United States Patent Application Publication US 2026/0226531 A1 - sequence listing, part 3

SEQ ID NO: 33945 - DNA, 110 bp, synthetic construct
  source 1..110: mol_type = other DNA
ttttcatgtgcctgctagccttcttaaaggtaaaaacattggcaagcaaggcaatcctcactcaaaacagttagaaaaaacatcatgattctttatgtgggtgtactcac

SEQ ID NO: 33946 - DNA, 110 bp, synthetic construct
  source 1..110: mol_type = other DNA
cctcactcaaaacagttagaaaaaacatcatgattctttatgtgggtgtactcacatgtcatggtcttaacagatgactgatgtattaaacaatgagtttggtgccacgt

SEQ ID NO: 33947 - DNA, 110 bp, synthetic construct
  source 1..110: mol_type = other DNA
tgaattctgtcacagttgttgaagtgtcattgttaaaggccatcacacagtgaaagcattatctgcagtaaaggaaaaccaaatcacctccaaatcattttcttccatat

SEQ ID NO: 33948 - DNA, 110 bp, synthetic construct
  source 1..110: mol_type = other DNA
ttcactttcacagctcttatcacttaggaagttccaagtagtttaggatccttgtttcagagactggtataaaacatacgtcttaatataaatcacaatatcacaaatgt

SEQ ID NO: 33949 - DNA, 110 bp, synthetic construct
  source 1..110: mol_type = other DNA
aggaagttccaagtagtttaggatccttgtttcagagactggtataaaacatacgtcttaatataaatcacaatatcacaaatgttgaagaggatataattataaatccc

SEQ ID NO: 33950 - DNA, 110 bp, synthetic construct
  source 1..110: mol_type = other DNA
ttattaattaaagtttcaaggcttaggggatcaaatcagcctggatttggccatccaagatgatatttatctttgcctctgctgatgcatcagaaatacaatataatctc

SEQ ID NO: 33951 - DNA, 110 bp, synthetic construct
  source 1..110: mol_type = other DNA
ggattgaaagaatatgttttgaatgtcatagaatggtggcctcagggtgacctgatttcaagcttagctaataatagttaaattacttaaattctaagcataatgtctta

SEQ ID NO: 33952 - DNA, 110 bp, synthetic construct
  source 1..110: mol_type = other DNA
ttggccaatccactgagccaggaaatggatgccagctgctggcatagccgtggattcatgatgaccacatagtggaggggtttgcagacagcaacatagcgatccaaggc

SEQ ID NO: 33953 - DNA, 110 bp, synthetic construct
  source 1..110: mol_type = other DNA
ggtaaagcccctccccctgcttatactggacattccccacagcacctcacatgaacctggagctcgtttgtccctcaagaacctgttcatttccagcctgctcatgagac

SEQ ID NO: 33954 - DNA, 110 bp, synthetic construct
  source 1..110: mol_type = other DNA
cttcctggatctctgctataccaccaccacagtccctcagatgctggtcaacatgggcagctccaggaagaccatcagctacagtggctgcacagtacagtatgcaattt

SEQ ID NO: 33955 - DNA, 110 bp, synthetic construct
  source 1..110: mol_type = other DNA
ggcagctccaggaagaccatcagctacagtggctgcacagtacagtatgcaattttccactggttgggatgcactgaatgcattgttttggcagctatggccttagaccg

SEQ ID NO: 33956 - DNA, 110 bp, synthetic construct
  source 1..110: mol_type = other DNA
gagatgcggagacctccccggtcctagagcggagcaggaagtgtcccaggggagggagccggagggcttcggcctttccttttctccgcgtccggcgggctccagaggca

SEQ ID NO: 33957 - DNA, 110 bp, synthetic construct
  source 1..110: mol_type = other DNA
agagcggagcaggaagtgtcccaggggagggagccggagggcttcggcctttccttttctccgcgtccggcgggctccagaggcagccaggcctgcacggcgcgccaact

SEQ ID NO: 33958 - DNA, 110 bp, synthetic construct
  source 1..110: mol_type = other DNA
tgctgtggtgtaggtttgatccctggcctaggaaattctgcatgcctcaggcatggctgaaaaaaaaatagtcttgttaccaaaccaatcttggggccactcacccacat

SEQ ID NO: 33959 - DNA, 110 bp, synthetic construct
  source 1..110: mol_type = other DNA
gtttacaaacatgcatatttactgttatctactctaggaatacataatcatctatgagtggtagttgaaagatgagctctttaaaaggagagccatcttgttacactggt

SEQ ID NO: 33960 - DNA, 110 bp, synthetic construct
  source 1..110: mol_type = other DNA
tgggttagagattagcattcacctggacataaaacagatatactccatatagtaaacaaggcctgtggggatgttactccctggaactcttaagtcatggatgttaatca

SEQ ID NO: 33961 - DNA, 110 bp, synthetic construct; identical to SEQ ID NO: 33960
  source 1..110: mol_type = other DNA

SEQ ID NO: 33962 - DNA, 110 bp, synthetic construct
  source 1..110: mol_type = other DNA
attaagagattcaagataagggggctggttgggctcattgctgctagggtgtcgtttctaggctccttcacaaacacaaccaggagattatataactacattcatagttg

SEQ ID NO: 33963 - DNA, 110 bp, synthetic construct
  source 1..110: mol_type = other DNA
gagagacagtaagtagtaagcctgataaatatgttgggatttgataaacgaatgctaccaaacaaatggagcagggtaagggcgactggtaatgctgtgggcaaatgcac

SEQ ID NO: 33964 - DNA, 110 bp, synthetic construct
  source 1..110: mol_type = other DNA
taccaaacaaatggagcagggtaagggcgactggtaatgctgtgggcaaatgcacaggggttaaataggttggtcagggaaggtctcactgagaaggtgacatttgagaa

SEQ ID NO: 33965 - DNA, 110 bp, synthetic construct
  source 1..110: mol_type = other DNA
ctgtatttgaaaatgctgatgggacatccaactgggaagagctggagtaggtttgagcctcagccaccccatcttctgaatgtagggcctcatgtagaccacccactgca

SEQ ID NO: 33966 - DNA, 110 bp, synthetic construct
  source 1..110: mol_type = other DNA
agaagggggagggggtatgcagattttaaccacctagagcttctccaggaccatgtcacaggtatcttcatatataagagatacactaatacatatgtaaaaacatttgt

SEQ ID NO: 33967 - DNA, 110 bp, synthetic construct
  source 1..110: mol_type = other DNA
aaaggaaaaaaaaaaaaaatcatcccaaaaaatttgtcccaaaagagacaaaggagcttttcaaaaggggcctgggcttacccctcccctcccccaatggaagcaagcat

SEQ ID NO: 33968 - DNA, 110 bp, synthetic construct
  source 1..110: mol_type = other DNA
gcttttcaaaaggggcctgggcttacccctcccctcccccaatggaagcaagcatctcagatctgtcttcaaaggatcccattccaccccttaccagacacttagcctga

SEQ ID NO: 33969 - DNA, 110 bp, synthetic construct
  source 1..110: mol_type = other DNA
ggcactggctaggagggcacaggagcagtctgggactagcatcaccctcacattcagctcttgcccctaccctgcctgggacatgcctgtggccctcacacccttgagcc

SEQ ID NO: 33970 - DNA, 110 bp, synthetic construct
  source 1..110: mol_type = other DNA
ggacgggagaggaactctgggtcaaaggaaggaccacagcaaaccacataaccagagtcactgaggccagctgggctcaaggtgaggacccaacactccaggttcgtcct

SEQ ID NO: 33971 - DNA, 110 bp, synthetic construct
  source 1..110: mol_type = other DNA
agtcactgaggccagctgggctcaaggtgaggacccaacactccaggttcgtcctctacaggacagagactgacatgaacctgaaaacaggccaatgtaatgatctggac

SEQ ID NO: 33972 - DNA, 110 bp, synthetic construct; identical to SEQ ID NO: 33970
  source 1..110: mol_type = other DNA

SEQ ID NO: 33973 - DNA, 110 bp, synthetic construct; identical to SEQ ID NO: 33971
  source 1..110: mol_type = other DNA

SEQ ID NO: 33974 - DNA, 110 bp, synthetic construct
  source 1..110: mol_type = other DNA
ctcttctgagttctgtgagccctagtgaatgagcaaacctgagagtggtcttggggatccctaataacgtatgtctttaccaccatcctgagaggggctatgagccttcc

SEQ ID NO: 33975 - DNA, 110 bp, synthetic construct
  source 1..110: mol_type = other DNA
gatccctaataacgtatgtctttaccaccatcctgagaggggctatgagccttcctattgcacaaataagccttgaggccccccagggtgggcttgctagctctgaggta

SEQ ID NO: 33976 - DNA, 110 bp, synthetic construct
  source 1..110: mol_type = other DNA
ccacttccccccaaagtcataggcatttattaagcacctactacatgcaaaacttcaacaaagagcaaaggcagccccttgtttaccatctaaagatctagacaggtggg

SEQ ID NO: 33977 - DNA, 110 bp, synthetic construct
  source 1..110: mol_type = other DNA
ggctttggtgccacagtctgggaggtgttcagcggtgtcatgatgcccatcagcactctggatcctgccaaggtcagagcacaggcattagcctctagaaccctcatttg

SEQ ID NO: 33978 - DNA, 110 bp, synthetic construct
  source 1..110: mol_type = other DNA
ttgtaaaaggccctgtgtttgggttataactgattcctgggttgcagcccatgacctggctgtatcgtcagctggatgggcaatggaagcctggactattaaaagggatg

SEQ ID NO: 33979 - DNA, 110 bp, synthetic construct
  source 1..110: mol_type = other DNA
aacactacaaagctacagtcatcagtgtggtattggcataagaatagacaactatatcagtgggatagagctgtgatataaaagcagcaaaccatatgtccatcatcaat

SEQ ID NO: 33980 - DNA, 110 bp, synthetic construct
  source 1..110: mol_type = other DNA
cccccaaaaaaatggacaaacaggtacagagaggttaagccactgctcggggtcaccacaggatcaccagctagtgagcactggagctgagaccgtatctctttggaaat

SEQ ID NO: 33981 - DNA, 110 bp, synthetic construct
  source 1..110: mol_type = other DNA
ccacaggatcaccagctagtgagcactggagctgagaccgtatctctttggaaatattcctctcagtaaccagactccctgctctgccccctctcgatgcctggttctca

SEQ ID NO: 33982 - DNA, 110 bp, synthetic construct
  source 1..110: mol_type = other DNA
cagcacagacccagatgtcacctagtttgtattcctacagccctttacccatggtgagctgcttgagggaatcaaacctgcgagacagcaggctgtggctggtcttcctg

SEQ ID NO: 33983 - DNA, 110 bp, synthetic construct
  source 1..110: mol_type = other DNA
accggcaagaggggacagagtccttgcctcctgtagagcttgcctcatcctctgtcagccatagggcagccatatcatcactttcgagggacaactggtcatcttttcgg

SEQ ID NO: 33984 - DNA, 110 bp, synthetic construct
  source 1..110: mol_type = other DNA
cagccatagggcagccatatcatcactttcgagggacaactggtcatcttttcggaagtgtaagtcggagagtccagacattggttccaaaggggaattagggactgggc

SEQ ID NO: 33985 - DNA, 110 bp, synthetic construct
  source 1..110: mol_type = other DNA
acaggaaggccacaggacgtgggccttgaagcatgaggggtttggcaagtggaagggcactcctgcagagagcatggctccatcgaacactcagctcagtggcaggtttg

SEQ ID NO: 33986 - DNA, 110 bp, synthetic construct
  source 1..110: mol_type = other DNA
ggcactcctgcagagagcatggctccatcgaacactcagctcagtggcaggtttggggagcagtgatgtaagatgagaccacccaggcgtgggagaagttacagctgagt

SEQ ID NO: 33987 - DNA, 110 bp, synthetic construct
  source 1..110: mol_type = other DNA
ccgtcggaggagaggaaatgctggcctggcgcttgaagcgaagcgaggagagctattgtgtagccaggggtgtgtgtggcctccaagctccagggtggctggtgtggctg

SEQ ID NO: 33988 - DNA, 110 bp, synthetic construct
  source 1..110: mol_type = other DNA
ttgtgtagccaggggtgtgtgtggcctccaagctccagggtggctggtgtggctggtgggtcatgtggagctgaggatggatgggagaggaggaagtgggacaccggtgc

SEQ ID NO: 33989 - DNA, 110 bp, synthetic construct
  source 1..110: mol_type = other DNA
ttcagcagtgttttgtaatttccagctgtacgacagaccttcctcacgtttggttagggttacacttaagtatttggtgtttttttgtgctgttttacaagatcttctct

SEQ ID NO: 33990 - DNA, 110 bp, synthetic construct
  source 1..110: mol_type = other DNA
gccctaggggtcatctgggaactggaaagaaagattctgtcctgaaaatggccattttcccatgctgcagtgcgacaggacatacgggaatccagggtcattgtcagagc

SEQ ID NO: 33991 - DNA, 110 bp, synthetic construct
  source 1..110: mol_type = other DNA
tttcccatgctgcagtgcgacaggacatacgggaatccagggtcattgtcagagcaggtcggtgttggagatactagtacttgacatgtacattaggtgattatgtgctc

SEQ ID NO: 33992 - DNA, 110 bp, synthetic construct
  source 1..110: mol_type = other DNA
agccaacaggtggcctttgatgactccacccccgtccagaggcagctggtggatgtccggtactctaaggacaccaggaagcagtttaagccgggtctgtcctatgtggg

SEQ ID NO: 33993 - DNA, 110 bp, synthetic construct
  source 1..110: mol_type = other DNA
ggtgggagaaaagaatccctgccttgcagcaggtgtgtccagggaaggccacttgccaatttcaggacaccccctccatgtgcccatctcaaggttccagaacaacaagt

SEQ ID NO: 33994 - DNA, 110 bp, synthetic construct
  source 1..110: mol_type = other DNA
acagaccagaccagactagagcaaacaagaccagactcgatcaaaagccagatcaggccagggcagggcagaccagaccagaccggagcaaaccagacaggactagatca

SEQ ID NO: 33995 - DNA, 110 bp, synthetic construct
  source 1..110: mol_type = other DNA
aactaaatgtaacagggttccctggctggagtcctagaccagagagagaacacaaagatcaggtgtcagtcaaagtccaaagggtggttttttggttttttggcttttct

SEQ ID NO: 33996 - DNA, 110 bp, synthetic construct
  source 1..110: mol_type = other DNA
ttcacttaggctcatttaatgaggaaatgctactgttttttaaaacttaccacgttttgactcttgttttaatttgaagtttgatgacaattgctaacgttgagtgcttt

SEQ ID NO: 33997 - DNA, 110 bp, synthetic construct
  source 1..110: mol_type = other DNA
ggatcccacccaaactccctcccaggctggttcagggagggctcgtggctgaggtggtggtagcagtggctgatttcagcctcttgatcttgatccagtgcctccaaact

SEQ ID NO: 33998 - DNA, 110 bp, synthetic construct
  source 1..110: mol_type = other DNA
cttacccccaaagggatattgtgagggtcatgcgggctctttctcttttgtggaagtgttgatgacaccctgagagctgcttagatgagccccctgtgtgctttgttctc

SEQ ID NO: 33999 - DNA, 110 bp, synthetic construct
  source 1..110: mol_type = other DNA
acccgtgtgtctggatcagatttctggagagcaaaagtttctttcatttccctgagccccggcaagggatctgccctaaaggcaaaagaaagcatcccctggaagggaac

SEQ ID NO: 34000 - DNA, 110 bp, synthetic construct
  source 1..110: mol_type = other DNA
acaatcccttctgaagttctaggtcataccctctcatccttattaagagatacacccctcccacagcagctactgcaggctatgcccacccactgagctccataaagaga

SEQ ID NO: 34001 - DNA, 110 bp, synthetic construct
  source 1..110: mol_type = other DNA
aggccagccagcagtgggagcctcctgcactcacacagtactctttccctgctgctaacacacttctcccgccaaagccaacccagaaatccaggtggtaaggaattcac

SEQ ID NO: 34002 - DNA, 110 bp, synthetic construct
  source 1..110: mol_type = other DNA
tgatatcctaagtcagcctactgcaggagttgaatggcctggctgtatacgcacgcacatgcatttcagcccagctctagctgtgtgaccctgacactatcaaatttacc

SEQ ID NO: 34003 - DNA, 110 bp, synthetic construct
  source 1..110: mol_type = other DNA
gttagtgtttcatggggacagaattttagttagggaagatgaaatagttgtagggatgaatatggtggtgacagttgtacaacaatatgtatatacttaatccactgaac

SEQ ID NO: 34004 - DNA, 110 bp, synthetic construct
  source 1..110: mol_type = other DNA
gatgccaggtgtgggctggacctctataggggttgtggaatagggcacctacacatgcttctccatgtgaattgggggcttcgagcagctcaatagtcaagagtatttgg

SEQ ID NO: 34005 - DNA, 110 bp, synthetic construct
  source 1..110: mol_type = other DNA
tttagctgatttctagtagggggtgggattgtcagggtgtgagtaatcaagatatggagcttggccttgatctctatataatgaggcactgttgtgtcttcttgagtatt

SEQ ID NO: 34006 - DNA, 110 bp, synthetic construct
  source 1..110: mol_type = other DNA
ggagcttggccttgatctctatataatgaggcactgttgtgtcttcttgagtattctagggagatcaagaattgtgaatggtatgaaggacagaggaaggatgagatggg

SEQ ID NO: 34007 - DNA, 110 bp, synthetic construct
  source 1..110: mol_type = other DNA
ctctatcctgccacatatgcctgtgtttaggaagaggtgaaacatttgttctgttttcaaagcttgtaggtcagagcctgggttggtaggtgctagagaccgaatgtgtc

SEQ ID NO: 34008 - DNA, 110 bp, synthetic construct
  source 1..110: mol_type = other DNA
aagattacagaatgttgaccaacacatagcaataaggagaggatccatgtgtattcacaggactccttgaaattaaaattaaccagttccctgatgcctcagagtgttaa

SEQ ID NO: 34009 - DNA, 110 bp, synthetic construct
  source 1..110: mol_type = other DNA
cacaggactccttgaaattaaaattaaccagttccctgatgcctcagagtgttaaggatccagccgtgttactgcaggggctctggttggaaagctggcctgggaacatc

SEQ ID NO: 34010 - DNA, 110 bp, synthetic construct
  source 1..110: mol_type = other DNA
atatagatatgtgttgattaaattggtcaactgcctttggatgggtaccaatatcccgactattcaagtaaggatgaaccatgtaaaatggttctggtggctctccacat

SEQ ID NO: 34011 - DNA, 110 bp, synthetic construct
  source 1..110: mol_type = other DNA
ccgactattcaagtaaggatgaaccatgtaaaatggttctggtggctctccacattcaaacatcaaatacatgaagatgcaaaattcaaatctagagcttcgagctacaa

SEQ ID NO: 34012 - DNA, 110 bp, synthetic construct
  source 1..110: mol_type = other DNA
ggagaccctgaagaccagtcttgctgaaacatgatggtattcagactgcctgaatggtggaaaccaggaaatacttcttttaatttattgaagtatagttgatttacaat

SEQ ID NO: 34013 - DNA, 110 bp, synthetic construct
  source 1..110: mol_type = other DNA
agacatgcccagcagttgattatttatgtcccctaaaatggcccctttggcctcagctcagagcttctgcattggctcttcctctgccaggaatgccaaccaccacccca

SEQ ID NO: 34014 - DNA, 110 bp, synthetic construct
  source 1..110: mol_type = other DNA
aaaataataatccatggcgcaagctgaaaaaaatgatagtccgacataattgtcgcccaggaaaatagaactccttgaatagagagacaaatttaaacaagaataataaa

SEQ ID NO: 34015 - DNA, 110 bp, synthetic construct
  source 1..110: mol_type = other DNA
acagactcccccaaccccatcatccaccccagactgcttaccacaaagatggcgagtgccaatttaacctgctgagctccataggctgaagaggaagcagaaaggaaggc

SEQ ID NO: 34016 - DNA, 110 bp, synthetic construct
  source 1..110: mol_type = other DNA
gctcggggctcagagaacacatcgctgtggatgtgcagcatcaggtccccaccagccgagtactccatcacgaagcacacgtgctctggtgtctggaaacagccaaacag

SEQ ID NO: 34017 - DNA, 110 bp, synthetic construct
  source 1..110: mol_type = other DNA
ccacacttacactcagatgctgtcactcttttatccagacaccatcaccctcagggacagtcccaggatgtagttgagctgtcacacagggacagtcatatatacaaggt

SEQ ID NO: 34018 - DNA, 110 bp, synthetic construct
  source 1..110: mol_type = other DNA
tgggacccttccttccttgtatgagatttctggaaccttcaagaattcaccaagtgccctagctgctgtggaaccttctctgcccttgacaatcttttcttctttttcat

SEQ ID NO: 34019 - DNA, 110 bp, synthetic construct
  source 1..110: mol_type = other DNA
cacttgtgacattagcctactcagtgacatttcagacccagccctccctgccttggccgtgcatcctagtactagctattgcacgttgctgtgatcaccagaagagcaag

SEQ ID NO: 34020 - DNA, 110 bp, synthetic construct
  source 1..110: mol_type = other DNA
cttggacccctgggtactgacaaggtgggaccctcgagacagctggaggactcgctttgatgctcactaaccaaacagcctgagccccggagccgatgcgatacaggtga

SEQ ID NO: 34021 - DNA, 110 bp, synthetic construct
  source 1..110: mol_type = other DNA
caagagaaaagatttgcttgccatgttgtcccagcatagttcacagcagtgcagcccggctccctgtgtcaatggaggcttttgatttcactttttttttctttttcttt

SEQ ID NO: 34022 - DNA, 110 bp, synthetic construct
  source 1..110: mol_type = other DNA
tggtgtagtagagtgatctggaaggagggcaagggagctggggaattcatctgcctacttccagcagctgtgctggagggctgctcccacagaattcattccctgggcct

SEQ ID NO: 34023 - DNA, 110 bp, synthetic construct
  source 1..110: mol_type = other DNA
ggaggagctctgagggtgtggggtctgagggaagaacatcccaggaaacagtatgtacaaaggccctgaggtaggaacatgcctggtgtgtttagggaacatgaaggagg

SEQ ID NO: 34024 - DNA, 110 bp, synthetic construct
  source 1..110: mol_type = other DNA
aaagccagagggagaagttttggactgcagagtcctctgaagagaggagtcattgagattataaaccacagatgtcccggtgtttccaggaaacagacttggccagggcc

SEQ ID NO: 34025 - DNA, 110 bp, synthetic construct
  source 1..110: mol_type = other DNA
tccactcccacctgctctggttgaatctacaaatcaggtggaaatgcctgtatggtacaccttgctaagactgtgttataggcaaagctcttgtctaacttcctgcccat

SEQ ID NO: 34026 - DNA, 110 bp, synthetic construct
  source 1..110: mol_type = other DNA
ggagatagcagcagctgaggctttgctgaccaggctgaactcgtcctctgcacggtcctgtagctccccacggcaggcagccaccacagctggacccagttcgtgactgg

SEQ ID NO: 34027 - DNA, 110 bp, synthetic construct
  source 1..110: mol_type = other DNA
ggacctgtctggggactgcttcaggtctgattaaggggaatcactggacagcgtgccggcaccagagagaccacgggggctggggcgctatcgtgttctggggcagggcc

SEQ ID NO: 34028 - DNA, 110 bp, synthetic construct
  source 1..110: mol_type = other DNA
ggagtgaccaatctgacagacatgtctagtacagaaaggctctacctgtaagataactgtaaacctgatgatcagaacaaagtaacttacctggaccactgtggattgaa

SEQ ID NO: 34029 - DNA, 110 bp, synthetic construct
  source 1..110: mol_type = other DNA
ttcaaggagacagaaaactttcagggacataaaacaaccttaatctgaaagaacaggagttcctgtcacggtacagtatttaacgaatccgactaggaacaatgaggttg

SEQ ID NO: 34030 - DNA, 110 bp, synthetic construct
  source 1..110: mol_type = other DNA
catgaagctgtggtttccatttgacttggagaagcagtcacagttggaaaagttgtactggtttctgccccagaacttgtgacctctgaggtcaccacttctggtacacc

SEQ ID NO: 34031 - DNA, 110 bp, synthetic construct
  source 1..110: mol_type = other DNA
tactggtttctgccccagaacttgtgacctctgaggtcaccacttctggtacaccaggtgagcttgaactggcttctgccacaggactggtggccattgagagtgtggtg

SEQ ID NO: 34032 - DNA, 110 bp, synthetic construct
  source 1..110: mol_type = other DNA
acaccagatgttgagatgggtatagatgcagttgtgtccaaaagactcactgtccttgcacttgtgctggcctctgtcttttcagccaaactgtaggaggatgggatagc

SEQ ID NO: 34033 - DNA, 110 bp, synthetic construct
  source 1..110: mol_type = other DNA
gcttggagtctgtcctgtttccctggatatgccaggcctgtctgcaaccatgacgctttcctgggtgacatttacgttctctgtgacccttgcgtaacttttccctgagc

SEQ ID NO: 34034 - DNA, 110 bp, synthetic construct
  source 1..110: mol_type = other DNA
taagtgtgacccacagatggaaaatgccttatactttctaccagctgatggcactttcaggacagtggagacaatacgagtataagagaaaatgatcccagagagaggaa

SEQ ID NO: 34035 - DNA, 110 bp, synthetic construct
  source 1..110: mol_type = other DNA
ttttattgcagatctctgcttcaggagtgccatgagagcaagaaagtagcttcgtggtgccagtgccctgctactcaggcagatttactgccatcctcacagatggcagc

SEQ ID NO: 34036 - DNA, 110 bp, synthetic construct
  source 1..110: mol_type = other DNA
atagaggacattctcactaaagaggagacaatttgaaagtaagagaaaaagattccagtgaggggaaacacacccagcaaggaagttgtcacagataagtggatggtatt

SEQ ID NO: 34037 - DNA, 110 bp, synthetic construct
  source 1..110: mol_type = other DNA
cagtgaggggaaacacacccagcaaggaagttgtcacagataagtggatggtattaatgctgatcactatggctccctcgttcagatgttgcctgcctggtggaatcctc

SEQ ID NO: 34038 - DNA, 110 bp, synthetic construct
  source 1..110: mol_type = other DNA
gggggtggttcttgaactatggctgccattagagctctacagccccagggcataggcttgcactattactcctgccatgcttagtcactgctagaagtagtcttagcata

SEQ ID NO: 34039 - DNA, 110 bp, synthetic construct
  source 1..110: mol_type = other DNA
ggaacacgatcatcccttacctttgatacacacctggcccttgacattttggcccgccctggaccctagatcccagccaacccttggtccttcccagatgtgcccccact

SEQ ID NO: 34040 - DNA, 110 bp, synthetic construct
  source 1..110: mol_type = other DNA
aatccagggtatatggaagttcttgagccagggattgaacgcaagccacagctgtgaccacagattcctaacccacagcaccacagcaagaactctatgtaacacttaaa

SEQ ID NO: 34041 - DNA, 110 bp, synthetic construct
  source 1..110: mol_type = other DNA
ccagaggccatacatccaaactcaggacacccacctgcaggccaggggggccaatcacccccacaaagcctctcactccatcctctcctttctgcccaaagaggcctggg

SEQ ID NO: 34042 - DNA, 110 bp, synthetic construct
  source 1..110: mol_type = other DNA
cacccccacaaagcctctcactccatcctctcctttctgcccaaagaggcctgggggtccccggcgcccctgagctccatctgctccctgggaagaggacaaggcagagc

SEQ ID NO: 34043 - DNA, 110 bp, synthetic construct
  source 1..110: mol_type = other DNA
cccctcctatgccgagtccctgaaagcgtgtctctttccttgatccctgcaaaggaagagcttccctccaggcaccgctcaaggcccagagaataactccacccttcccc

SEQ ID NO: 34044 - DNA, 110 bp, synthetic construct
  source 1..110: mol_type = other DNA
tttcacgtgctaaatggccacagaaagtactactagacagctatgctctagattgtggagtctagaatgtttttcagaatatggtcccaagatgatgctttttccagtca

SEQ ID NO: 34045 - DNA, 110 bp, synthetic construct
  source 1..110: mol_type = other DNA
ccttccttgttaataccagtaactaacgttttgacccctggataaccccgggactcagagatcatgaccctctgaccactgagccaggctcaggggagggctactcctta

SEQ ID NO: 34046 - DNA, 110 bp, synthetic construct
  source 1..110: mol_type = other DNA
tttttttaagcggggcttcaaaaataatcaggaagagcctaacacatagcgcaattctcagcagggctcgtgctgctgggtgcacagctgcagcaggttccagaaggcct

SEQ ID NO: 34047 - DNA, 110 bp, synthetic construct
  source 1..110: mol_type = other DNA
acatgctcatggatactagttggattcatttcctgtgcgccgtaacgggaacttcctaaatttatttatttttgaataaatgatgtctgtatgttgctcatattcagaag

SEQ ID NO: 34048 - DNA, 110 bp, synthetic construct; identical to SEQ ID NO: 34047
  source 1..110: mol_type = other DNA

SEQ ID NO: 34049 - DNA, 110 bp, synthetic construct
  source 1..110: mol_type = other DNA
gatcatcaaggctctttagtctcctttactctggaatagtttccagcaatttaggtttttcctgaggcaaccagggaggctgtcttggactgcccctgatctggtacagt

SEQ ID NO: 34050 - DNA, 110 bp, synthetic construct
  source 1..110: mol_type = other DNA
agtgatgccggcccctccaccccgaccaccagcacgcgcagccgcgacaaggatgacgagagcaagaagcagaagaagcgtggccgtcctcccgccgagaagctctcccc

SEQ ID NO: 34051 - DNA, 110 bp, synthetic construct
  source 1..110: mol_type = other DNA
ctagtaacaaaatagataaattggtctccatcaaaattaagtacttctgtcgaccacatagcacaaggaactatattcaatatcctgtgacaagtcataatgggaaagaa

SEQ ID NO: 34052 - DNA, 110 bp, synthetic construct
  source 1..110: mol_type = other DNA
gaagctacctaggcctgctaaaggtcttactaacattactaatattctccttgctaactgtctcacaattcccaataaatactccatctatttctggcacccaatcatct

SEQ ID NO: 34053 - DNA, 110 bp, synthetic construct
  source 1..110: mol_type = other DNA
tcagtgtgggactcagtgtgggacttaggaaattcgcttgctttggttcacagtgggctctttcaatctgggtgctcatgagtttcttcagttctgagactgttccagcc

SEQ ID NO: 34054 - DNA, 110 bp, synthetic construct
  source 1..110: mol_type = other DNA
tgagctagttcaggattcctgtaagtgtctgtgagggtgggtacatgtgtgagtgagtgtgaccatgtgcatggctcatccagaggagagcgtgtgtccttgtgattctg

SEQ ID NO: 34055 - DNA, 110 bp, synthetic construct
  source 1..110: mol_type = other DNA
aggcccctcccttgtctcagctcctaccctgcaaggtggccccccgctggggagaccctgaaactgagtgtctctaaaactgagtttcagagttccccttgtggctcagt

SEQ ID NO: 34056 - DNA, 110 bp, synthetic construct
  source 1..110: mol_type = other DNA
ccctgactgggcttcccaggcacagagccaggcaggcaaaggaagctgtgggcccctcccttccctgactcaacacacttatgacaaaaaacccgggcgttcagagcctg

SEQ ID NO: 34057 - DNA, 110 bp, synthetic construct
  source 1..110: mol_type = other DNA
taagctgtggtcagccaagccccaggagcttggctcctgggtgtccttggatgggcagcctgccaagacaaaccccagcatctttcttgagcttgaaggcaggtctgcgg

SEQ ID NO: 34058 - DNA, 110 bp, synthetic construct
  source 1..110: mol_type = other DNA
ggtggcaaaccttttctgcaaaggctcgggcgttaaatcctttgcacttggccacctctgtgggctcttagtgcaactactcagccctgccattggagccggaaagctgc

SEQ ID NO: 34059 - DNA, 110 bp, synthetic construct
  source 1..110: mol_type = other DNA
tccagtgcaagcttaggattctaaagagaaacaggaggagttccctggcagcctaggagttaaggacctggcaatatcactgtttttgcttgggtctgtgctgtggcaga

SEQ ID NO: 34060 - DNA, 110 bp, synthetic construct
  source 1..110: mol_type = other DNA
gagaaacaggaggagttccctggcagcctaggagttaaggacctggcaatatcactgtttttgcttgggtctgtgctgtggcagatttttgatccctggcctgggaactt

SEQ ID NO: 34061 - DNA, 110 bp, synthetic construct
  source 1..110: mol_type = other DNA
gtctcacagtcctagagagcagaagtccaagatcaagatgacagtaaagctggctctttttgagagctgcacgagaggatctgttctatgatcctcttctaggttctgga

SEQ ID NO: 34062 - DNA, 110 bp, synthetic construct
  source 1..110: mol_type = other DNA
atttccccaagggttttagcgtgtgtcctttgctatttttgctgggagttgtccgtacataaaacacagtactcccccacccccaaagaactcccaggctagaggaagat

SEQ ID NO: 34063 - DNA, 110 bp, synthetic construct
  source 1..110: mol_type = other DNA
atttctggaggagctcccggaatccctaggctgcctcagtcatccagcatgacttacccaggagcaagggccccccttcttctggtctagggacaatcccatttccagtg

SEQ ID NO: 34064 - DNA, 110 bp, synthetic construct
  source 1..110: mol_type = other DNA
gcacaaccccaacctctaaagacaggaggagggagggtccatgggcagttgtgctcagagtgtgttggctctgcatccaccttcttcattttatttatttttttaatggt

SEQ ID NO: 34065 - DNA, 110 bp, synthetic construct
  source 1..110: mol_type = other DNA
tgcactctggtggaaggaagtggccaggtgactctgactaagattgagctaaaatgttttcttctagcatggagcttaaattattatcctgattttcaagaccctgtcca

SEQ ID NO: 34066 - DNA, 110 bp, synthetic construct
  source 1..110: mol_type = other DNA
ggctctgttaccacgctcgcctgggctaagaaaggtctcatttggtagattttgcagccaggaggaaggccgagctctctgcttgaactgtaaaggccagaccccaccta

SEQ ID NO: 34067 - DNA, 110 bp, synthetic construct
  source 1..110: mol_type = other DNA
ctgttcagtgccacctactggggcaatcccagctctaggcgctggggagacgttagggaacagacccacaagggcccaggccctgactggaacaagcatatgacacattc

SEQ ID NO: 34068 - DNA, 110 bp, synthetic construct
  source 1..110: mol_type = other DNA
tggagcctgtccaccacacttctggactccggggaagagagccacccagaaatgcttgtttgcccacactgtgggccgtactgcccaccccgagccaggcctccacctcg

SEQ ID NO: 34069 - DNA, 110 bp, synthetic construct
  source 1..110: mol_type = other DNA
cccaatcatgagaaccccagatttccccagacattgtccagtgtcctctggcagcagaaccatccctgccatggggcccacagaggccagaatcgcccattttcccagag

SEQ ID NO: 34070 - DNA, 110 bp, synthetic construct
  source 1..110: mol_type = other DNA
gcaagtgaggctcagagaggaggctgccttcccaacttctagcttcagagttgtaaatccagggttagaacccagtttactttttttcttttggctgcacccacggcatg

SEQ ID NO: 34071 - DNA, 110 bp, synthetic construct
  source 1..110: mol_type = other DNA
tcggggcttctcctcggagcgccctctcttctccttctggctgggtctccttgtgggctctgtgctttgtggttgcaacttcttagtcgatttcttcacctgtggcagcc

SEQ ID NO: 34072 - DNA, 110 bp, synthetic construct
  source 1..110: mol_type = other DNA
accctaaccattctacatacatacacaggccagtcctggtgctcaggaagggctgagtgagctggaggccacaaggctctcactggtgtccattgccacagaccccccag

SEQ ID NO: 34073 - DNA, 110 bp, synthetic construct
  source 1..110: mol_type = other DNA
tttgatgtgaccattttccgtgagcacagccagggaaaaaaccaccacctatttagtctgcatgaccaaagtcttggtcagagctggtgggggtcctgctcggggccctc

SEQ ID NO: 34074 - DNA, 110 bp, synthetic construct
  source 1..110: mol_type = other DNA
ctgtcgaatggccatcatccatggctcagggggatcactgaggataatgctgagctcagtgcttggcacagggtaggggctccatgaggaagaaggaggaaggaggggga

SEQ ID NO: 34075 - DNA, 110 bp, synthetic construct
  source 1..110: mol_type = other DNA
gaggcgaagaggtcaccccgtctgacaagacattacctggtctgctcctgggaaaggcttgcattttgtatgagttggtgggaagaaaactcttaacagagaggtttccc

SEQ ID NO: 34076 - DNA, 110 bp, synthetic construct
  source 1..110: mol_type = other DNA
atcttccagcgtgtgcatttagaatgatcagaataaatatatcaaatttagaagcatttcagatgatccttcagaattattttttcatgtgagtgtaattggtgttcttt

SEQ ID NO: 34077 - DNA, 110 bp, synthetic construct
  source 1..110: mol_type = other DNA
ttgcagcccccaggtggttatgttggccagagagaccaggtatgagctgggccatcttaagggcgctggtctgatgatgcccagaagcggtacctcatagaggctcctgg

SEQ ID NO: 34078 - DNA, 110 bp, synthetic construct
  source 1..110: mol_type = other DNA
gggtgaggggatggggcccaatgtatggaagagcaaacagaggttcagagttgggaaaggggtcgcccagggtcacaaggccgtgggatgagtctgatgctacacggggc

SEQ ID NO: 34079 - DNA, 110 bp, synthetic construct
  source 1..110: mol_type = other DNA
cagattctcatgtgaggccccagagccctggccctctgggtaattgcactgcttccctgtaatcaggaacgtggcaagcttcctcttccagcaatggtgagctgggtcac

SEQ ID NO: 34080 - DNA, 110 bp, synthetic construct
  source 1..110: mol_type = other DNA
acagtctcctgggctttgccagctatatgcgcacacatggggactgggtgggcatgactatgccaataaaactttatttacagacacagattgagggccacaacctcagg

SEQ ID NO: 34081 - DNA, 110 bp, synthetic construct
  source 1..110: mol_type = other DNA
gacagtcttagaggtccctttcagcccagcgtgtctgacatttggagatggacccgtaggttctgtggttgtctccaccattctgtcctcagcttctcaaggttctgact

SEQ ID NO: 34082 - DNA, 110 bp, synthetic construct
  source 1..110: mol_type = other DNA
ctccttgctccaagtgggaagataccactggtcgaaagagtgaatatgctgtctatggagagagactggtgacttgggaagcttgtgctgaggatattgtgccatcctca

SEQ ID NO: 34083 - DNA, 110 bp, synthetic construct
  source 1..110: mol_type = other DNA
ttggaagaaattggagttctcataatcaaagagttgatgagaggagttcccaccgtggtgcagcaggttaaggatggccttgtctctgtggtagcatgggttctatcccc

SEQ ID NO: 34084 - DNA, 110 bp, synthetic construct
  source 1..110: mol_type = other DNA
gctgccatgtgctctacaacatccttgagacactctgagccaggacctgcccccctcctctgtaacacatcccaaattcttacccacagaaattggcataataaatgcct

SEQ ID NO: 34085 - DNA, 110 bp, synthetic construct
  source 1..110: mol_type = other DNA
tcctctgtaacacatcccaaattcttacccacagaaattggcataataaatgcctgtcttaatctgttaatttgggggaccatttgttacgcagcaactgagagctgata

SEQ ID NO: 34086 - DNA, 110 bp, synthetic construct
  source 1..110: mol_type = other DNA
tcatgcccatggccctccacccctgcaggagaagaacgcccggttgctgggcgccgcacagcaactgttcggccactgccaagctcagaaagaggagatcaagaggctct

SEQ ID NO: 34087 - DNA, 110 bp, synthetic construct
  source 1..110: mol_type = other DNA
caggtgggtgaccttattttgccctgtctgggagtgcctcctccagtacctgggaaggtccagcaacagacaaatacacatgaccatggacctcagggacccactgcagg

SEQ ID NO: 34088 - DNA, 110 bp, synthetic construct
  source 1..110: mol_type = other DNA
aggtccagcaacagacaaatacacatgaccatggacctcagggacccactgcagggaagggcttccctccaggagagcttcagaccaagagaccccaagggcttgggtaa

SEQ ID NO: 34089 - DNA, 110 bp, synthetic construct
  source 1..110: mol_type = other DNA
tggctgagtagtatcctatgtatgtgcgcgcacgcatgttcacacgcatgctcacccccacatatgttcagtgatctttgattttttttttttttagttcactgaatttt

SEQ ID NO: 34090 - DNA, 110 bp, synthetic construct
  source 1..110: mol_type = other DNA
ttaagtttgctgtacacaggcaactatttacagaatattgccattatatcaggtattacaagtagtctagaaatgatatatggatcatttgtgcatgggttatatgcaaa

SEQ ID NO: 34091 - DNA, 110 bp, synthetic construct; identical to SEQ ID NO: 34090
  source 1..110: mol_type = other DNA

SEQ ID NO: 34092 - DNA, 110 bp, synthetic construct
  source 1..110: mol_type = other DNA
atgtgactgtatttgtaaatcagggtgcgtccagtggaaattggtgaggagaggagagagagagacacacaagacaggtggctatgggccacaaaggacctggagctact

SEQ ID NO: 34093 - DNA, 110 bp, synthetic construct
  source 1..110: mol_type = other DNA
agattaaactgagccccctcagacccctctggtaagtttcagcagcttttggttggtatagcctgtgatttcctagtggcagaggagcagggctccctgcaggtctggga

SEQ ID NO: 34094 - DNA, 110 bp, synthetic construct
  source 1..110: mol_type = other DNA
ccaacaaggaattcgcacgcctgaggttagaggcagcaaggactctggtgaatgtggagggttttattttttttccccttccccttttaagacaaaaaaaggttggctgg

SEQ ID NO: 34095 - DNA, 110 bp, synthetic construct
  source 1..110: mol_type = other DNA
tggacttgctcctcaggccacactgggtctggcccaagagtggccagcagactttataggacctgtaggccacggaggtcagtgtggatgccatgctcctctccatgtcc

SEQ ID NO: 34096 - DNA, 110 bp, synthetic construct
  source 1..110: mol_type = other DNA
aggctgggtacatgagtggtgtgatcgcccagctgaggggtaacagaagcccccgtcactgccagacaggggctgagcagccttgaaaggaaacagatctctcctcccaa

SEQ ID NO: 34097 - DNA, 110 bp, synthetic construct
  source 1..110: mol_type = other DNA
gagctccaccgggtcttgtcagctccagcacaggcccttgcacacagtgaatgcctcatcacattgatgtgtgccctggaactccccagtcaacttagatctgaccagaa

SEQ ID NO: 34098 - DNA, 110 bp, synthetic construct
  source 1..110: mol_type = other DNA
cggcccgggaggttcatgagactgtagcctgtgggaccagtggtggcactgcagtgccatggggagccatgcatggtggaggagcagggcagggagcagctgggtcctag

SEQ ID NO: 34099 - DNA, 110 bp, synthetic construct
  source 1..110: mol_type = other DNA
cattgacggtgtgctctgggtctgctaaccctcataaccacccccaccttggcagggagactacctacctcttcttccagatgaggagacttgagctgggacttgaatgc

SEQ ID NO: 34100 - DNA, 110 bp, synthetic construct
  source 1..110: mol_type = other DNA
ggacccagctgtatccggcttgactctgggacaggcacttttccagaatcaggctggcatgggtttcctcatctggagagctgggctggtggtagctcatggagtgtgta

SEQ ID NO: 34101 - DNA, 110 bp, synthetic construct
  source 1..110: mol_type = other DNA
ataacatggggtaggcctgtggctcccaactcatgccatcccacagccaatgctcgatgcgatctcagatttctgctcattctacacaggcccacaccctctcctgactg

SEQ ID NO: 34102 - DNA, 110 bp, synthetic construct
  source 1..110: mol_type = other DNA
gatgcgatctcagatttctgctcattctacacaggcccacaccctctcctgactgagtagagcagaggcccagcttctttgggtgcaaaggcatcagatgtacctcggga

SEQ ID NO: 34103 - DNA, 110 bp, synthetic construct
  source 1..110: mol_type = other DNA
tgtgtttatttggcccttctaaataaatgttagacaatgcacctcaatttgcccgtttaaaataaaatcttggagttcccgccgtggcgcagttaacgaatccgacgggg

SEQ ID NO: 34104 - DNA, 110 bp, synthetic construct
  source 1..110: mol_type = other DNA
cttttcccattatagatgaggccttcttttaagaacttgattatctcgaattcctagggtgttatagcttcagttatatatcatcttatttgattttcacgagtttgaga

SEQ ID NO: 34105 - DNA, 110 bp, synthetic construct
  source 1..110: mol_type = other DNA
tgttagccaaaacaattcctctaagattatttcaaaattctacgaataagatggccatctggaatttctgtcatggctcagcagaaacgaacccaactagtatctatgag

SEQ ID NO: 34106 - DNA, 110 bp, synthetic construct
  source 1..110: mol_type = other DNA
ttcctctaagattatttcaaaattctacgaataagatggccatctggaatttctgtcatggctcagcagaaacgaacccaactagtatctatgagaactcgggtttgatc

SEQ ID NO: 34107 - DNA, 110 bp, synthetic construct
  source 1..110: mol_type = other DNA
actacagagcatcatcttgttttcacatttccagcaacaagggtatttcatgagaggtgcattaaaaaaagagagatgaaaacgtaattagtttgttgagctctacattt

SEQ ID NO: 34108 - DNA, 110 bp, synthetic construct
  source 1..110: mol_type = other DNA
ggtgcattaaaaaaagagagatgaaaacgtaattagtttgttgagctctacattttgagcacttgggtgtatttaggtactaacttttacttcaaaaaaaaaaaagtagg

SEQ ID NO: 34109 - DNA, 110 bp, synthetic construct
  source 1..110: mol_type = other DNA
cttaccggttagaccagtaatggtcatttctctacacccacactaatctggccttgttaaattgataggggaaaaacggaaagtaattacgttcattcaaggtgggcttt

SEQ ID NO: 34110 - DNA, 110 bp, synthetic construct
  source 1..110: mol_type = other DNA
atgagcagggaggggggcagccagctgtgcagcctggagacttgcaagattaacttgacggcaaagcttgcacaggcaatactaacttctatcctaatccacctgtccac

SEQ ID NO: 34111 - DNA, 110 bp, synthetic construct
  source 1..110: mol_type = other DNA
agatttatcattcactggtatttcttgcacactttgtcttctatcttgaggtcattgttctgatttaattttcatgtttatgagactaattcttgaattatttcctcaga

SEQ ID NO: 34112 - DNA, 110 bp, synthetic construct
  source 1..110: mol_type = other DNA
gctgggctgctaggtggaggctgcgaggccccggccctctaggcacacacagcttctgtatcctatgctgggacttcagccgtatcccctgcttaagggccgtcccttct

SEQ ID NO: 34113 - DNA, 110 bp, synthetic construct
  source 1..110: mol_type = other DNA
aaccatcactgaatccataaaggcaggaagagccttaaactatgcttcagtggggtgtgcacactgggacgcccggaggggccagatgtgcagcataaatgaatcaggct

SEQ ID NO: 34114 - DNA, 110 bp, synthetic construct
  source 1..110: mol_type = other DNA
aagtcgtgggctgcagggccgtgggtgaggggggtatgggacttgcagctgtaccttctagggtctgccttcctctcaccctgccttgatatcacctggagggcaatgag

SEQ ID NO: 34115 - DNA, 110 bp, synthetic construct
  source 1..110: mol_type = other DNA
tatactccatcccttctgttgttcctttctgtggtgacttcgaagatgcatagtctgtttttatcccactagctatttcctttaagtttttaaaatcttcttaaacttaa

SEQ ID NO: 34116 - DNA, 110 bp, synthetic construct
  source 1..110: mol_type = other DNA
gccaaggcgagccagacaaaggcctggctcagcctcagcctctctgagccctatgctgctgtggtctccctccttgttcagttattctgcttgcaggactgcctttgggg

SEQ ID NO: 34117 - DNA, 110 bp, synthetic construct
  source 1..110: mol_type = other DNA
gctttctctaatatagtttattctcttaaaagaaataaccatgtcctttatttaaaaaattgtccacactgcatacgacatccatgacatggtaagaaacccactatcct

SEQ ID NO: 34118 - DNA, 110 bp, synthetic construct
  source 1..110: mol_type = other DNA
ggtgtagccctaaaaagacaaaaaccaaggggcgacacatgaactgaaggctgtcccacctcactatatcatatccagctatccaactttgaaaacattctgagtgctac

SEQ ID NO: 34119 - DNA, 110 bp, synthetic construct
  source 1..110: mol_type = other DNA
ggatcccctgttagaagcacacaagcctccctctgtggtgttttgcgaaaaatgtacttttaaaatgtagcgatgtggcatttccgtcatggtgcagtggaaatgaatcc

SEQ ID NO: 34120 - DNA, 110 bp, synthetic construct
  source 1..110: mol_type = other DNA
cctccctctgtggtgttttgcgaaaaatgtacttttaaaatgtagcgatgtggcatttccgtcatggtgcagtggaaatgaatccaactaggagccatgaagttgcaggt

SEQ ID NO: 34121 - DNA, 110 bp, synthetic construct
  source 1..110: mol_type = other DNA
aggtacacatggtgtgaggtcgtgaaggtggaagtgctattttcttttgcccccgggaggtcaggagcactccataagacctgcgtctgggcttttgataatgcttttta

SEQ ID NO: 34122 - DNA, 110 bp, synthetic construct
  source 1..110: mol_type = other DNA
gggcatccccccacctagcagtcaggaggccatctcacaactcctccactgcctttcagtatccctgcatcacccacttgtctttccgtcaactgaccacctatctacct

SEQ ID NO: 34123 - DNA, 110 bp, synthetic construct
  source 1..110: mol_type = other DNA
gataactagtgttctttgtttactgggaagcttaaaacactgtttctcttttgcgatcactttctcttaataaatagattaggctgggaaaagggttctagaagtgttaa

SEQ ID NO: 34124 - DNA, 110 bp, synthetic construct
  source 1..110: mol_type = other DNA
atcactttctcttaataaatagattaggctgggaaaagggttctagaagtgttaaaaatttctggtgtaaccagactatttttgaagtatattatcagtcaaccgtagtc

SEQ ID NO: 34125 - DNA, 110 bp, synthetic construct
  source 1..110: mol_type = other DNA
ggggtgtcagatggggcaagggcccactccacagtgccatggcttccacaagggacggtgaaagcggcagggtttgcttggaaggtgtcctcaaaagctgcctattgaag

SEQ ID NO: 34126 - DNA, 110 bp, synthetic construct
  source 1..110: mol_type = other DNA
cggtgaaagcggcagggtttgcttggaaggtgtcctcaaaagctgcctattgaagttcccctgccactccccgcctggctaagtcctcatttagcttcctgagccctcta

SEQ ID NO: 34127 - DNA, 110 bp, synthetic construct
  source 1..110: mol_type = other DNA
caccctaaagagtgaggggcttccctccaccttggtcatgtcttcctgtctggctccccccagcccagctgcctgttccctctgttgttcctctgctcccaacgcatggt

SEQ ID NO: 34128 - DNA, 110 bp, synthetic construct
  source 1..110: mol_type = other DNA
ccccccagcccagctgcctgttccctctgttgttcctctgctcccaacgcatggtgggtttttaccttgggggggaaaaaaaccaaaaaacaaaaaaccaggcagggaaa

SEQ ID NO: 34129 - DNA, 110 bp, synthetic construct
  source 1..110: mol_type = other DNA
aaatgacaagaaatttataaacgtctcccgggagctgtgggagaggagagggaatttccaaagggtctagggagtgaaggaaggacagtgcatggtgaggacagagcctt

SEQ ID NO: 34130 - DNA, 110 bp, synthetic construct
  source 1..110: mol_type = other DNA
accaatatctctggctcagctgggtgcacagaaacgcaagcaccatgcccacgtttcctaaatgctctgccacagtcgatctttgtaaatggttttggtctcatgtgctt

SEQ ID NO: 34131 - DNA, 110 bp, synthetic construct
  source 1..110: mol_type = other DNA
tcctaaatgctctgccacagtcgatctttgtaaatggttttggtctcatgtgcttcagcagaaagggctctggagtcaagccaggggtcctagatcctggggtccacttt

SEQ ID NO: 34132 - DNA, 110 bp, synthetic construct
  source 1..110: mol_type = other DNA
tccattggcaatggccaccctgtggcctgcgtggccacaacccaagctgtagcaagggcatttgaagccaccggcgtcgagtacttcaacacggtgagtgagactccagg

SEQ ID NO: 34133 - DNA, 110 bp, synthetic construct
  source 1..110: mol_type = other DNA
agacaagcatagaagctccatgcaggcagggacacaggacccatcctcatctgagttccactcacctcctccacttccgccaccaccaccgctgcctcggttccctcggt

SEQ ID NO: 34134 - DNA, 110 bp, synthetic construct
  source 1..110: mol_type = other DNA
cactttcctccattaatgagtttgttgagtgcatctctcgagatgacatggccgcagatgagcttgatgggagggttggaatccgatgtctgctggcggaggatggggca

SEQ ID NO: 34135 - DNA, 110 bp, synthetic construct
  source 1..110: mol_type = other DNA
gtaagatacccagggaagggcccatagggtcccgctcagttagaaggacacagggtgtcatagctataagggaagaaaagtcacctcaggagtcaggtcagcccccaaag

SEQ ID NO: 34136 - DNA, 110 bp, synthetic construct
  source 1..110: mol_type = other DNA
tctcggaaaggggccagggcatctgtgggcttgccagggctgggagcagagcttgggtgccctccctcctctgaatgaccttcgagcatagtatctatgtgttgacatgg

SEQ ID NO: 34137 - DNA, 110 bp, synthetic construct
  source 1..110: mol_type = other DNA
ggtgccctccctcctctgaatgaccttcgagcatagtatctatgtgttgacatgggacgggcaagggctggatctgtctctggccccctcagctgccctgctgttctggg

SEQ ID NO: 34138 - DNA, 110 bp, synthetic construct
  source 1..110: mol_type = other DNA
tcctcacaacctctttgtgagtggtgctcactattcccattttacagatcaagaaactgagaagtgagttgtccaagtttacacatcgagttagagatcatctaagctgt

SEQ ID NO: 34139 - DNA, 110 bp, synthetic construct
  source 1..110: mol_type = other DNA
actgagaagtgagttgtccaagtttacacatcgagttagagatcatctaagctgtgaatgtgtgcacttagggcgacaggtgctaggcctgggccaccacctgtccaggt

SEQ ID NO: 34140 - DNA, 110 bp, synthetic construct; identical to SEQ ID NO: 34138
  source 1..110: mol_type = other DNA

SEQ ID NO: 34141 - DNA, 110 bp, synthetic construct; identical to SEQ ID NO: 34139
  source 1..110: mol_type = other DNA

SEQ ID NO: 34142 - DNA, 110 bp, synthetic construct
  source 1..110: mol_type = other DNA
actcactttggctcttgagctcttggcacttcaaataaaagtgaaaatctggccatcaccacagctctcatcatcagaggaggaagtgaacctacacttccaagagaaac

SEQ ID NO: 34143 - DNA, 110 bp, synthetic construct
  source 1..110: mol_type = other DNA
gcccttgcctagcaaactgcaatgtttattgtacaaaatagtcccaaagctccaatacttacttgatgagatgctgaaaaaacagaattgataaaacaagaaatttccct

SEQ ID NO: 34144 - DNA, 110 bp, synthetic construct
  source 1..110: mol_type = other DNA
aaatagtcccaaagctccaatacttacttgatgagatgctgaaaaaacagaattgataaaacaagaaatttcccttaaggaaattctagttaagaaaaggttaggttcaa

SEQ ID NO: 34145 - DNA, 110 bp, synthetic construct
  source 1..110: mol_type = other DNA
tgccacagctgtggtgtagactgcaggagtggcttggattcgacctgtggtccagaaacttccaaatgcctcgggtgcagccataaaaaaagaaagaaaagaattgcccc

SEQ ID NO: 34146 - DNA, 110 bp, synthetic construct
  source 1..110: mol_type = other DNA
cctttttttaaattggagaaacagtcaagcttatatgatcacttgataaacagcttggtactaaatagttgcctatctagagataagagtcagtcattcatagaggactg

SEQ ID NO: 34147 - DNA, 110 bp, synthetic construct
  source 1..110: mol_type = other DNA
tggtactaaatagttgcctatctagagataagagtcagtcattcatagaggactgttattaaggtccctttgcccccaagctttccacgcagtggttttgtgtgtgtgtg

SEQ ID NO: 34148 - DNA, 110 bp, synthetic construct
  source 1..110: mol_type = other DNA
ctccctgtgctatatttcagattccaccagtaagtgatatcatatggtagttgtcttttttttctgccttgcttcacttagtgtgagaatctcaaattccatccatgttg

SEQ ID NO: 34149 - DNA, 110 bp, synthetic construct; identical to SEQ ID NO: 34148
  source 1..110: mol_type = other DNA

SEQ ID NO: 34150 - DNA, 110 bp, synthetic construct
  source 1..110: mol_type = other DNA
tttgccccccccactcagcatagtaggccttaaacccttggctcccttcctaccgtgacctaagaaccacatgtggtcaaagcccagccccatggcagagtcctttcctg

SEQ ID NO: 34151 - DNA, 110 bp, synthetic construct
  source 1..110: mol_type = other DNA
tcatttttatgtgaaattccctgttttaaaatgttgacaactaatttaaacatctaaacatcatgtgggccaaacaagctggtgggccaaagccagactggacaacatcc

SEQ ID NO: 34152 - DNA, 110 bp, synthetic construct
  source 1..110: mol_type = other DNA
caccatgtgaccttaatgcctgagctggcagcgctgtcactgagagagggcacggagagcaccactctggcccaggcatcaacttaccttcccccatttcctctccaggc

SEQ ID NO: 34153 - DNA, 110 bp, synthetic construct
  source 1..110: mol_type = other DNA
tgataaaatccatggctggccaatctggctttggaatgtcttggcccctcctccgcccatgactacttggggcactgccctccttaccttgggctccaacacccatagcc

SEQ ID NO: 34154 - DNA, 110 bp, synthetic construct
  source 1..110: mol_type = other DNA
atctgtcctccatccatttggctcctcaaggcagaatctcagagaagcagcagaatcctctctgctttcactctcacatcccaccgcatgaccaagatttgttgacttta

SEQ ID NO: 34155 - DNA, 110 bp, synthetic construct
  source 1..110: mol_type = other DNA
accaggatgcaggttcgatcaccagccagacttggttgggttagaggatccagtattgcctcagctgcagtgtcagttcggatctgacccttggcccaggaactccatat

SEQ ID NO: 34156 - DNA, 110 bp, synthetic construct
  source 1..110: mol_type = other DNA
agaactgtggttactagaggctgtagggagagggtaatgggaagtaattgtttgatggagttcagagtttcagtttgagatcataaaaaagttctaaagatggacagtgg

SEQ ID NO: 34157 - DNA, 110 bp, synthetic construct
  source 1..110: mol_type = other DNA
caaaattcatcagaaggtatctcctaacaagaacatgctcctatataatcaccatactaaatataaagtgcaggaattttactgctgaagtaatacagtcctctgatatg

SEQ ID NO: 34158 - DNA, 110 bp, synthetic construct
  source 1..110: mol_type = other DNA
ggcggggggcagggtacaggcacacaaaataccacaaaaccttcctactccttgcaatggtgtcccttcttggttatgcattgtctaggtcctgtagcttctcaactgat

SEQ ID NO: 34159 - DNA, 110 bp, synthetic construct
  source 1..110: mol_type = other DNA
tgaaatataattccaagactgtaaaattcacccttttaaagtgtacaattcagcactcttaggtgtagtcatgaagtagtgcaagcatcaccccaattctgttctaattt

SEQ ID NO: 34160 - DNA, 110 bp, synthetic construct
  source 1..110: mol_type = other DNA
ctcttaggtgtagtcatgaagtagtgcaagcatcaccccaattctgttctaatttcagaacattttccagagagaaaccccaaacccattagtagtcactccccatttcc

SEQ ID NO: 34161 - DNA, 110 bp, synthetic construct
  source 1..110: mol_type = other DNA
tcaaaatgaagcagagcccgagctcacagtcaggcttgctctgccactgactagttagctgtggccttgggcaagtgacttcaactttggaagtcagttccttcacatat

SEQ ID NO: 34162 - DNA, 110 bp, synthetic construct
  source 1..110: mol_type = other DNA
gttgacaaatgtttgtgaatgaatgaatgaatgaatggatggatggatggatgaatgaatggatggatgaatgggtcaggcatatagaccagcattctaggggacaaagg

SEQ ID NO: 34163 - DNA, 110 bp, synthetic construct
  source 1..110: mol_type = other DNA
tgaatggatggatgaatgggtcaggcatatagaccagcattctaggggacaaaggcatggtctgtggaaagagaaacgaagtgacatttattgagcccttgtgtgtggtc

SEQ ID NO: 34164 - DNA, 110 bp, synthetic construct
  source 1..110: mol_type = other DNA
acgggagcgtggggctgctcttattgtctatcccttgccctgtgctgccttagcaggcctggaccaaaagggtatcaggtgtggcagaccccatacctgcctaagaagca

SEQ ID NO: 34165 - DNA, 110 bp, synthetic construct
  source 1..110: mol_type = other DNA
ggcctggaccaaaagggtatcaggtgtggcagaccccatacctgcctaagaagcaacaggacacattctgttcttagagtttgcaggactgtggcttctaagaaaatata

SEQ ID NO: 34166 - DNA, 110 bp, synthetic construct; identical to SEQ ID NO: 34164
  source 1..110: mol_type = other DNA

SEQ ID NO: 34167 - DNA, 110 bp, synthetic construct; identical to SEQ ID NO: 34165
  source 1..110: mol_type = other DNA

SEQ ID NO: 34168 - DNA, 110 bp, synthetic construct
  source 1..110: mol_type = other DNA
gaaacccctgactcatgggactggcctggggcaggctggactaaatagtcgggtggggggatgctgaggttcctgatctgctttcacctctaagggctgtgcagccagga

SEQ ID NO: 34169 - DNA, 110 bp, synthetic construct
  source 1..110: mol_type = other DNA
gggggatgctgaggttcctgatctgctttcacctctaagggctgtgcagccaggactctccaaaaactcaatcagagtcactgtttacatgctaaacctgtttttctctg

SEQ ID NO: 34170 - DNA, 110 bp, synthetic construct
  source 1..110: mol_type = other DNA
agtcctgcccataaacatagtggctggtggtcctggtgggatcaggggaggaatggaatggtacttggctgcctgagctttctgaaaatgatcagacatgtctaagaaaa

SEQ ID NO: 34171 - DNA, 110 bp, synthetic construct
  source 1..110: mol_type = other DNA
gaatggtacttggctgcctgagctttctgaaaatgatcagacatgtctaagaaaaataatttttctctaagataaattttactttaaaccttaggccaagaaaatgcttc

SEQ ID NO: 34172 - DNA, 110 bp, synthetic construct
  source 1..110: mol_type = other DNA
ggggcatggcaaaaacaaaacaacgcttaagtcagcaaagatgggggggggggcatttctgaatgaaaattcggtgaggtgaacaataatccctggcctcgctcagtggg

SEQ ID NO: 34173 - DNA, 110 bp, synthetic construct
  source 1..110: mol_type = other DNA
caaaacaacgcttaagtcagcaaagatgggggggggggcatttctgaatgaaaattcggtgaggtgaacaataatccctggcctcgctcagtgggttcaagatctggtgt

SEQ ID NO: 34174 - DNA, 110 bp, synthetic construct
  source 1..110: mol_type = other DNA
gctacttggacctgttgtttggtgtcctttgtcagttttggaaagttccctattatgatctttgcagatatttcttatgagccattctttctttacacataggttagact

SEQ ID NO: 34175 - DNA, 110 bp, synthetic construct
  source 1..110: mol_type = other DNA
tagcattgtctccccaccaggaataaatatcagataacctgggagttttccaggcaactttttcacctctttccagctcattacctaggtagtcatggaggatcatatgt

SEQ ID NO: 34176 - DNA, 110 bp, synthetic construct
  source 1..110: mol_type = other DNA
aactttttcacctctttccagctcattacctaggtagtcatggaggatcatatgtttcgtagtttgaaaacattccccaggtcatctgaatcatccctaccttcagttga

SEQ ID NO: 34177 - DNA, 110 bp, synthetic construct
  source 1..110: mol_type = other DNA
cctagacttttgactaagagcagtaattgtttaaattctgtgtatttaaactttaaaaattcttcagggagttcccattgtggctcagcggaattgaacccaactagtat

SEQ ID NO: 34178 - DNA, 110 bp, synthetic construct
  source 1..110: mol_type = other DNA
aagagcagtaattgtttaaattctgtgtatttaaactttaaaaattcttcagggagttcccattgtggctcagcggaattgaacccaactagtatccatgaggatgccgg

SEQ ID NO: 34179 - DNA, 110 bp, synthetic construct
  source 1..110: mol_type = other DNA
agaatgtaatttgaaaaaaaattattttgaggaactatacatcttgttgaccagggaagtgtaaattgctcttttagttttagcagacttcccctatgcagagagattaa

SEQ ID NO: 34180 - DNA, 110 bp, synthetic construct
  source 1..110: mol_type = other DNA
gaagtgtaaattgctcttttagttttagcagacttcccctatgcagagagattaagaaacataccattggtgtgtgagctctatcctaataattttttaaattactacca

SEQ ID NO: 34181 - DNA, 110 bp, synthetic construct; identical to SEQ ID NO: 34179
  source 1..110: mol_type = other DNA

SEQ ID NO: 34182 - DNA, 110 bp, synthetic construct; identical to SEQ ID NO: 34180
  source 1..110: mol_type = other DNA

SEQ ID NO: 34183 - DNA, 110 bp, synthetic construct
  source 1..110: mol_type = other DNA
cagacttgtaagtcagatcagctggtgaatttaatatttgttttacctcaggtccttcaccatctccatctgtatacatccaaagctgcatttttataccttgctgtatt

SEQ ID NO: 34184 - DNA, 110 bp, synthetic construct
  source 1..110: mol_type = other DNA
ttcaccatctccatctgtatacatccaaagctgcatttttataccttgctgtatttttttcaacctactgtccataaaaatgagccataaaaaaagcccattgtctggaa

SEQ ID NO: 34185 - DNA, 110 bp, synthetic construct
  source 1..110: mol_type = other DNA
ggccacgagtgaccatgaagtaaaccatgtaccctcttgctcatttaaatctgaatgtaggagttcctgctgaggcccagtggaaactaatccgactagtatccttgagg

SEQ ID NO: 34186 - DNA, 110 bp, synthetic construct
  source 1..110: mol_type = other DNA
cagttcaccaggcacagaaaagtaaagcagctgcataagacctccgccagggacgggccacaaacagcgcagatatccgtaagctctttccaggcaaagagaacccggtt

SEQ ID NO: 34187 - DNA, 110 bp, synthetic construct
  source 1..110: mol_type = other DNA
aaaccagcccacctcctggaaagttcggccccctgaaattgttggccaaggcctgttcagtctcctccagagatacctggccccaaacctcaacgtcaagctagtctcag

SEQ ID NO: 34188 - DNA, 110 bp, synthetic construct
  source 1..110: mol_type = other DNA
ttcagtctcctccagagatacctggccccaaacctcaacgtcaagctagtctcaggattgtgggccatgttggcgaaccagggcgtgcagcgggtgtccattaaactcgt

SEQ ID NO: 34189 - DNA, 110 bp, synthetic construct
  source 1..110: mol_type = other DNA
cagtcacagaaaggagagatttctcagctaggggagacctcggagagctctagagggcagtcctgagaatgggatgacaagaggagggaaggcaggtgacaccatccctt

SEQ ID NO: 34190 - DNA, 110 bp, synthetic construct
  source 1..110: mol_type = other DNA
gctctgagggagcaggcccgcccagggaaacttgctggtctgtgagaaacatctgtcctgctttcttccaacaacacaaaccccacagttaacatcccagcagcacaggc

SEQ ID NO: 34191 - DNA, 110 bp, synthetic construct
  source 1..110: mol_type = other DNA
tcctgctttcttccaacaacacaaaccccacagttaacatcccagcagcacaggccaggcgtgctcgacacgggtcgttgggttgctgcttggcgacccttcggtgtctt

SEQ ID NO: 34192 - DNA, 110 bp, synthetic construct
  source 1..110: mol_type = other DNA
taatctagttcagttaccttattttatacatgaagacactggggcctagatggatacagtggctctagttcaaggtcactagcgactgtagccagctctcctgaccctta

SEQ ID NO: 34193 - DNA, 110 bp, synthetic construct
  source 1..110: mol_type = other DNA
acagtggctctagttcaaggtcactagcgactgtagccagctctcctgacccttaggatagggaccagatccacagcaacagtcattattcctgaaggcctgctagtctc

SEQ ID NO: 34194 - DNA, 110 bp, synthetic construct
  source 1..110: mol_type = other DNA
ggagtcatgtcgttttcctggtagagtcctgctttagtgctgctgcccccgctggacacttgactgtctctttgccgtcacccctgctgctgccaggaataagcgccatg

SEQ ID NO: 34195 - DNA, 110 bp, synthetic construct
  source 1..110: mol_type = other DNA
gtagctgaggtcttgccagtgcaataggggcaagagatggaagccaggctcaggcttggagagctgtgatggtccattttcttttttccttcctgctggaatagagcaga

SEQ ID NO: 34196 - DNA, 110 bp, synthetic construct
  source 1..110: mol_type = other DNA
ttggagagctgtgatggtccattttcttttttccttcctgctggaatagagcagagtaacttgggagccaagtgttgcaggtggcagagccacaaggtggcaggaacctg

SEQ ID NO: 34197 - DNA, 110 bp, synthetic construct
  source 1..110: mol_type = other DNA
ggaggtagtctctctataaaataacctttggataggttttaggcctgcttcagtggggaacagatccttcttgtatttccagcttttaatattaagtccaagacgagttt

SEQ ID NO: 34198 - DNA, 110 bp, synthetic construct
  source 1..110: mol_type = other DNA
aagtgacataacctgctaagatttcgttggctcacaatgaggatggtgtttaaattcatgcagagcagtttcaatttcagaccctgcctggaggcttacctttgtcagcc

SEQ ID NO: 34199 - DNA, 110 bp, synthetic construct
  source 1..110: mol_type = other DNA
cctttaatgcatcatcttgcagctctagtactacagagaccacactgccagacaccttctctgggtgcatgttgctgtgctgtgtggcttcatgaagttgttctttgcag

SEQ ID NO: 34200 - DNA, 110 bp, synthetic construct
  source 1..110: mol_type = other DNA
tggctagcagccaataatagtgcaatgctactgctgagttcttcaagcttttcatttaataatgatggggaggaagaatcatcatggccatttgaaagattgggaagtag

SEQ ID NO: 34201 - DNA, 110 bp, synthetic construct
  source 1..110: mol_type = other DNA
ctgagactccagaaaatttgttggaagctctgtgtgtaggcaaaacatgtcattccttatctgaaggtgatgtggtagcaagccagcttttttaaagttcagggactctt

SEQ ID NO: 34202 - DNA, 110 bp, synthetic construct
  source 1..110: mol_type = other DNA
cttatctgaaggtgatgtggtagcaagccagcttttttaaagttcagggactcttaaataccactgtttatagttcatctctcccacagcatgtgttacctttttttttt

SEQ ID NO: 34203 - DNA, 110 bp, synthetic construct
  source 1..110: mol_type = other DNA
acgtagccctttctgcaaggggctgactgttataggcatgtgacatctgggtcggaaatacaggttctctgcagatcaaccatcccttctgaagtctcatggttaggaca

SEQ ID NO: 34204 - DNA, 110 bp, synthetic construct
  source 1..110: mol_type = other DNA
gccatccccatctctgctgccacccagctgctcagttatttaaaccagatgattgcaagtcatccctggccccgccaacctctacatccaaagagtcggcaaatcttggt

SEQ ID NO: 34205 - DNA, 110 bp, synthetic construct
  source 1..110: mol_type = other DNA
gccgtccctaggaaaccctctttcttagctttgccatctcatcaggtgacaggacccacgcagactgccagaagtccctgccactatccaaacagtgagagcttcctagc

SEQ ID NO: 34206 - DNA, 110 bp, synthetic construct
  source 1..110: mol_type = other DNA
ccacgcagactgccagaagtccctgccactatccaaacagtgagagcttcctagctgcaggtgaggatggggacacttattccaaagtgctctgccaggggccagtgtgt

SEQ ID NO: 34207 - DNA, 110 bp, synthetic construct
  source 1..110: mol_type = other DNA
cacacatctgttatcagaagtcaaatgtccattaggcaatagagatgacctttgtagcttttaaacatttgtgaccactgcttgagatgctctccatctgccaatgctta

SEQ ID NO: 34208 - DNA, 110 bp, synthetic construct
  source 1..110: mol_type = other DNA
ccttaaagaggtcgatcgctaaagtcagctgcaaacagtaagaacatacaacatcctccccttcccaaaatgactgctatcttttgcagtactgatagctctgcctgcac

SEQ ID NO: 34209 - DNA, 110 bp, synthetic construct
  source 1..110: mol_type = other DNA
agatcgtagctgatccagttaatcgcagactcgtacacgagcctttcgtcttcagtctccagctcttcactggacaagagctgcactaccatgtcctggggcagctggag

SEQ ID NO: 34210 - DNA, 110 bp, synthetic construct
  source 1..110: mol_type = other DNA
cccaaagtgtcctctttgttctttgctcttcttcctgcgtgtgtgtatgtgtgtgtggaagacagcacagctttccttcctcatgtaatctgtgagatgggcctcaaggc

SEQ ID NO: 34211 - DNA, 110 bp, synthetic construct
  source 1..110: mol_type = other DNA
tggaagacagcacagctttccttcctcatgtaatctgtgagatgggcctcaaggctgtgtggcctgtagagtcagagtggccgagggtcaaagacgtatgttcttcctcc

SEQ ID NO: 34212 - DNA, 110 bp, synthetic construct
  source 1..110: mol_type = other DNA
ctgctcgggacagaccgggcaatccagtgccatagccccttctgcatacaacgctgtataagttggtctcagagctcctggatagggacccatttgtcttgaagttaatt

SEQ ID NO: 34213 - DNA, 110 bp, synthetic construct
  source 1..110: mol_type = other DNA
gtataagttggtctcagagctcctggatagggacccatttgtcttgaagttaattagaatgatgagaattcctaacatttattttgtcttatcatgtgctaaacactaca

SEQ ID NO: 34214 - DNA, 110 bp, synthetic construct; identical to SEQ ID NO: 34212
  source 1..110: mol_type = other DNA

SEQ ID NO: 34215 - DNA, 110 bp, synthetic construct; identical to SEQ ID NO: 34213
  source 1..110: mol_type = other DNA

SEQ ID NO: 34216 - DNA, 110 bp, synthetic construct
  source 1..110: mol_type = other DNA
ttttaccaggacaactgggggagtgggcatagggggcgctgctgtgcagatgccgaagtggggtggagttaaaggtcctggtgatggacaccagctatctggtcttgagc

SEQ ID NO: 34217 - DNA, 110 bp, synthetic construct
  source 1..110: mol_type = other DNA
tacctccaaggagaacatgtttggactttcatctgtttttttcaataattattagtatggtttagtgattctgagttgagctactaagttcctcaagagatgagttacat

SEQ ID NO: 34218 - DNA, 110 bp, synthetic construct
  source 1..110: mol_type = other DNA
attaccacatttctttcaatttctaaaaagtcttggctagctgttttgcaggacgtctttcaacttagatctatttgttttctcctggtttggatcaaatatttttgcca

SEQ ID NO: 34219 - DNA, 110 bp, synthetic construct
  source 1..110: mol_type = other DNA
aaaccaaaattcagacagacaaaaacttgtgaaattccgaatactccggctcagctaggatgacttggggggggtggatatcgggcaaatcacttgatttcttttatatt

SEQ ID NO: 34220 - DNA, 110 bp, synthetic construct
  source 1..110: mol_type = other DNA
tctgtgaaagaaaatcctacacatcacattagctatgtattgtagtcatcttgcaatgtcattctccatgattaaaatcacttctaggcccctttgtggtcaattattcc

SEQ ID NO: 34221 - DNA, 110 bp, synthetic construct
  source 1..110: mol_type = other DNA
ctgccctgccaattacgactaattgatgacccgggattctgctggagtcctcttgtgaaagctgtgccagctgtctcactgcctgagagcatcatttggtggacacgtcg

SEQ ID NO: 34222 - DNA, 110 bp, synthetic construct
  source 1..110: mol_type = other DNA
tccagccacggactcctcccatcactttttgcaaatcctctcacctcccagaacttagcgtccttgtttgtaaattaagtaggaaggaacagaaaccagggattcttgtg

SEQ ID NO: 34223 - DNA, 110 bp, synthetic construct
  source 1..110: mol_type = other DNA
caggaggggaagcttcaagaagataaagaagctaaccatcctgcccccaaggacctctgcttctggctatggtggagtaacagggatcgggtttacccttttccctgaaa

SEQ ID NO: 34224 - DNA, 110 bp, synthetic construct
  source 1..110: mol_type = other DNA
gtacagtaactctaatttctccacatgcatttaaagcaggatctctaatgcctataactacatcacagaggcagtacagggatagagagagatgaactaagggtacagat

SEQ ID NO: 34225 - DNA, 110 bp, synthetic construct
  source 1..110: mol_type = other DNA
actatgctcaaacattcaagtgcaccataacttctgtgggtctcaggcccctcgatcatcatttttatctttaggggaagattctgctctattttattagagtgctaaca

SEQ ID NO: 34226 - DNA, 110 bp, synthetic construct
  source 1..110: mol_type = other DNA
gccaaattcacctcatgccccagctacacactggagcaagagctgccaggaccgaggaaagactttgtccatcagaaactgaggaggctcaaactagaagcagcatctga

SEQ ID NO: 34227 - DNA, 110 bp, synthetic construct
  source 1..110: mol_type = other DNA
tgttcctgagtggaaagttctataaatgttaaataggtgaagctggttgatagcgttatttaaatattctgtatcctaactgatactctgcccctttgagttactataag

SEQ ID NO: 34228 - DNA, 110 bp, synthetic construct
  source 1..110: mol_type = other DNA
cagaaatgagatacttcaatgtggccgagccactgtttgactaagtagccatttccagtcccctctcctttgctgttgcccatgaaagagatcacaaaacttaaatattc

SEQ ID NO: 34229 - DNA, 110 bp, synthetic construct
  source 1..110: mol_type = other DNA
actgaagtcactacctcagttgtcatcttgcagcaggctgcccacaaaaacaatgcctatgctggatcttgtccctgggttgaaagatccaagataaaatacttttcctg

SEQ ID NO: 34230 - DNA, 110 bp, synthetic construct
  source 1..110: mol_type = other DNA
taactacttccaaataacctatctgaattaagctagtacaaatgaatcaatgaattcattagcccaaagattacctgacttttgtgtactcaagagaaaatggctaaagt

SEQ ID NO: 34231 - DNA, 110 bp, synthetic construct
  source 1..110: mol_type = other DNA
aaagtaatttcatagcagttctcttctgaagatctaacaaagggttggattgcattgaatctgaggaggtgctttatttaaggtggccttttgttgtagttgttaacaga

SEQ ID NO: 34232 - DNA, 110 bp, synthetic construct
  source 1..110: mol_type = other DNA
tggattgcattgaatctgaggaggtgctttatttaaggtggccttttgttgtagttgttaacagaaaatggatttaaaaaaaaaaaaaattaggagttcccgtcgtggcg

SEQ ID NO: 34233 - DNA, 110 bp, synthetic construct
  source 1..110: mol_type = other DNA
tagcaaaaagcttggcatgtggtaagtgctcactaaatagtagttattgtaacgattattcttgggtaaaatgctgtctgatttcctcaaacatagtcaaatagcactga

SEQ ID NO: 34234 - DNA, 110 bp, synthetic construct
  source 1..110: mol_type = other DNA
cacctaaggtctcttccctgggagctaaactttagttctgtgattatcatcccatattgaaattatatgtgcagaatgtctctgctttaagacagtaagctccctaagga

SEQ ID NO: 34235 - DNA, 110 bp, synthetic construct
  source 1..110: mol_type = other DNA
attgaaattatatgtgcagaatgtctctgctttaagacagtaagctccctaaggagaggaaccttgctttcttcatctgtgtgcttcctagtaccagtactacgcttagc

SEQ ID NO: 34236 - DNA, 110 bp, synthetic construct
  source 1..110: mol_type = other DNA
aatacatgaaatggacttggcctggtgcctgatgtttactcttttccaattggatgcaaacatgtctgtgaattattggcggagagccagctgctctatactcattctgt

SEQ ID NO: 34237 - DNA, 110 bp, synthetic construct
  source 1..110: mol_type = other DNA
gcaaacatgtctgtgaattattggcggagagccagctgctctatactcattctgtttgattaaaatgctctctgttgagattctattcagaactgatcactctgcttttg

SEQ ID NO: 34238 - DNA, 110 bp, synthetic construct
  source 1..110: mol_type = other DNA
tctctcccatctctcttctctgctttgtactgtgttggctccattcttagtagactctttccttttggtagcaagaggttgccagcttttaaaaccccaatgtagcaggg

SEQ ID NO: 34239 - DNA, 110 bp, synthetic construct
  source 1..110: mol_type = other DNA
tgtttgtatttaagaagtaatggtccagtaattccatagggccattctcaggtttgcccacacgctattattttcaacacgtgacagcatgccccatttcatgcacatta

SEQ ID NO: 34240 - DNA, 110 bp, synthetic construct
  source 1..110: mol_type = other DNA
tcaggactgaaccactgaccagagtctgaaaaactcccatcttctcgttggccgtcggttgagctaggatggaagactcttataaggataggacttccctgatgaagggt

SEQ ID NO: 34241 - DNA, 110 bp, synthetic construct
  source 1..110: mol_type = other DNA
aggtccagaaatcaagttccgggttctggcagagtaggcattggaagggcactagaaatttggcttttggtgtgttgctagcttttttatccaattgcaaatagctctct

SEQ ID NO: 34242 - DNA, 110 bp, synthetic construct
  source 1..110: mol_type = other DNA
catcatacccctttgttcttatgaagggcacttgtgcttagctcctcctgctgtctccgtgtcctcactgccactcttctttagtctcctgtcctctgctgacatcatta

SEQ ID NO: 34243 - DNA, 110 bp, synthetic construct
  source 1..110: mol_type = other DNA
tcaaatctgaagagttgtaggataataattatgatttatgttgcttacttggtgcggaccacattttaagctctacgatttcctcctgaagtccctgaaacctcaaacag

SEQ ID NO: 34244 - DNA, 110 bp, synthetic construct
  source 1..110: mol_type = other DNA
ccctagcaactctagaaaaattcggtcttgcgtgggggcaggtggcaagcttttcacggttgtccttggaaatgaggcaggacggtaagtggcaggcaggcacagagggg

SEQ ID NO: 34245 - DNA, 110 bp, synthetic construct
  source 1..110: mol_type = other DNA
ttacactgtcatgtatttcagtaattcttgtacagagcaaattaactcaggctgtgaaggtgtctctcctttgcacagagctaatgggtgttggtttgtcaaatgccaca

SEQ ID NO: 34246 - DNA, 110 bp, synthetic construct
  source 1..110: mol_type = other DNA
gaaggtgtctctcctttgcacagagctaatgggtgttggtttgtcaaatgccacatagcaagttgcccttgagggatttctcaatgagttctccatgaaggctcccttct

SEQ ID NO: 34247 - DNA, 110 bp, synthetic construct
  source 1..110: mol_type = other DNA
ataaaacaattctgaaggcacttcagggacctgcccttggggttggcaatgactgggagcctccagctcactcagtttcaggagccgggcagccctgggtaaagagcaga

SEQ ID NO: 34248 - DNA, 110 bp, synthetic construct
  source 1..110: mol_type = other DNA
aaaaagttattttgatggttgagtagtgagctgtgtccccgggcctgagtctcaggcagagcacacccagacacatctgatctctcaggtgctttatggttgaagggaca

SEQ ID NO: 34249 - DNA, 110 bp, synthetic construct
  source 1..110: mol_type = other DNA
aattgtatgctaaattttgtaggttggaagcagactgggtttggatgtagggcaaagaatgcagcagtattcaaaaggaatttgcaaggtaaccctgcgattcattctga

SEQ ID NO: 34250 - DNA, 110 bp, synthetic construct
  source 1..110: mol_type = other DNA
attcactgatgttgactcatctagggctgtaataatttgacacctacccagagttcacaagattgccagaaacagaataccttctcggacccgccgaggttacagtcctg

SEQ ID NO: 34251 - DNA, 110 bp, synthetic construct
  source 1..110: mol_type = other DNA
cacaagattgccagaaacagaataccttctcggacccgccgaggttacagtcctggtttctggccaatcacttgtcagtcagaacatggtacctgttggggttcttctcc

SEQ ID NO: 34252 - DNA, 110 bp, synthetic construct; identical to SEQ ID NO: 34250
  source 1..110: mol_type = other DNA

SEQ ID NO: 34253 - DNA, 110 bp, synthetic construct; identical to SEQ ID NO: 34251
  source 1..110: mol_type = other DNA

SEQ ID NO: 34254 - DNA, 110 bp, synthetic construct
  source 1..110: mol_type = other DNA
gtcattccagcctgcaaggggcatcctgattcccagcctttttggctgtgagcagttcttaagcttgcatgacttgtccgaacgttctgattggcaggagaggaacttgt

SEQ ID NO: 34255 - DNA, 110 bp, synthetic construct
  source 1..110: mol_type = other DNA
acttaaagtctgtgattcttatggcctttattaagctttttctacaaaaatacgtgtgtgtgaggagaagacatcaattgtggtttctaatcacacttagctgcctgagt

SEQ ID NO: 34256 - DNA, 110 bp, synthetic construct
  source 1..110: mol_type = other DNA
ttgtctccaggtctggctgaaaaatggtgacctcagggacatgctgggggtgcatgtcagcatcgggagcttcaatcttgatggtgctggaatgagcagctttgggaatc

SEQ ID NO: 34257 - DNA, 110 bp, synthetic construct
  source 1..110: mol_type = other DNA
taactcttctctctgggcctgtgtgccccccagttatccttcacagcaaatccaaacacccccggctctcccagtccttcctctccttacctgctgcccacaggctttcg

SEQ ID NO: 34258 - DNA, 110 bp, synthetic construct
  source 1..110: mol_type = other DNA
acacccccggctctcccagtccttcctctccttacctgctgcccacaggctttcggatctctgcggttttgccaaagattccaggcaaacagcagcttcctgccaacccc

SEQ ID NO: 34259 - DNA, 110 bp, synthetic construct
  source 1..110: mol_type = other DNA
agaataacattttttatttcccttaagccaattctgagcagataagacagaatttagagatcagagcattctcgagaaaatatatctgcccttggggatttatttactcc

SEQ ID NO: 34260 - DNA, 110 bp, synthetic construct; identical to SEQ ID NO: 34259
  source 1..110: mol_type = other DNA

SEQ ID NO: 34261 - DNA, 110 bp, synthetic construct; identical to SEQ ID NO: 34259
  source 1..110: mol_type = other DNA

SEQ ID NO: 34262 - DNA, 110 bp, synthetic construct; identical to SEQ ID NO: 34259
  source 1..110: mol_type = other DNA

SEQ ID NO: 34263 - DNA, 110 bp, synthetic construct
  source 1..110: mol_type = other DNA
aacaaggatagcaaagactttaaactctcatagaaacaatctgcagaaatctgcgcacatttttggtcctgaaagcagtttacagtgactgagccttgtccataattggc

SEQ ID NO: 34264 - DNA, 110 bp, synthetic construct
  source 1..110: mol_type = other DNA
accaagttacctactttctaattctaaagtatgtactgtccgttttagtggattcgatatttgttcacttttataactgagaaagggaaagcaattgcctttatttaaag

SEQ ID NO: 34265 - DNA, 110 bp, synthetic construct
  source 1..110: mol_type = other DNA
tagtggattcgatatttgttcacttttataactgagaaagggaaagcaattgcctttatttaaagtatagtccatgaattcagctgcataggtattacagtaaatctaat

SEQ ID NO: 34266 - DNA, 110 bp, synthetic construct
  source 1..110: mol_type = other DNA
taagagtactgctagcatgaaattaatttaacagtggaactttctggagtccaattgtagggggaaaagctgggggaaaaagagtagagttatttcatggaaggggagag

SEQ ID NO: 34267 - DNA, 110 bp, synthetic construct
  source 1..110: mol_type = other DNA
aatgtctataagtattttattatacctgttcctctattgtgtattgaacggttaggagtcagacagcttgtctagttttgtagactaagagtaactgtacgcaaggagcc

SEQ ID NO: 34268 - DNA, 110 bp, synthetic construct
  source 1..110: mol_type = other DNA
aaagtggaggaatgaaaacaaggatgacatgtgctggcttagtctggaagaccaaaagccttttttagtgagcttgctttgtcgtaaattttaattaatttattttttag

SEQ ID NO: 34269 - DNA, 110 bp, synthetic construct
  source 1..110: mol_type = other DNA
ggaagaccaaaagccttttttagtgagcttgctttgtcgtaaattttaattaatttattttttagtgagcttaccttaacaggatctgattttgtaacatgaagcataac

SEQ ID NO: 34270 - DNA, 110 bp, synthetic construct
  source 1..110: mol_type = other DNA
aacaaaccctctttgtaaatgagaattgctgacccactgggaggtggaggcatggcttggtgtctgcttagccattcttagtacccccaagcctcagacatgtggagatt

SEQ ID NO: 34271 - DNA, 110 bp, synthetic construct
  source 1..110: mol_type = other DNA
cttggtgtctgcttagccattcttagtacccccaagcctcagacatgtggagattttgagaggagccattgtgcaaggcctggctgcagctcctttcctgtgattgtggg

SEQ ID NO: 34272 - DNA, 110 bp, synthetic construct
  source 1..110: mol_type = other DNA
ctacaagcacagaaactaaggtttagacttggttcagaagctgagcatcagtaggaaattactggaaacactggaattgaatgtgaggccaggtttctggtttgggccca

SEQ ID NO: 34273 - DNA, 110 bp, synthetic construct
  source 1..110: mol_type = other DNA
tgcccctccccattggacagcggaagagcagaggtgcagagaggtgaagtgacactccctgtgtctctagctggtcttccaagcccagctgtggctgcgaaactaaagaa

SEQ ID NO: 34274 - DNA, 110 bp, synthetic construct
  source 1..110: mol_type = other DNA
tccctgtgtctctagctggtcttccaagcccagctgtggctgcgaaactaaagaatgttcttggcagagatggaaagtaaggggctaataagagttaactagactgctgg

SEQ ID NO: 34275 - DNA, 110 bp, synthetic construct
  source 1..110: mol_type = other DNA
cctcctgctattccataggcctgaaatgcccctcccatggtttcacctgcctcatcctcacctgccttcctcatagagctccagcgtgattttccagaagtttgcttgaa

SEQ ID NO: 34276 - DNA, 110 bp, synthetic construct
  source 1..110: mol_type = other DNA
cctcacctgccttcctcatagagctccagcgtgattttccagaagtttgcttgaattcccaggtggggctaaatgcatcttacctgagttcccataggaccctgcggagc

SEQ ID NO: 34277 - DNA, 110 bp, synthetic construct
  source 1..110: mol_type = other DNA
ataaagcttatctgctaaagaaatgtagttttgcttcctgatgggtgaactttcatcttagctgcacagaaaaatgaggcattagtccagttccaaagccagttacgtat

SEQ ID NO: 34278 - DNA, 110 bp, synthetic construct
  source 1..110: mol_type = other DNA
tcttagctgcacagaaaaatgaggcattagtccagttccaaagccagttacgtatctactggtgcatttagtgactgtcaccagtcacgctgaggatggtgagattctag

SEQ ID NO: 34279 - DNA, 110 bp, synthetic construct
  source 1..110: mol_type = other DNA
tccaagtcttaagacaagagcagtcctcgattttagaaagagtccatttctattgggcaaacctttatattccgtggaacacggcacctcattattaaccaacatttata

SEQ ID NO: 34280 - DNA, 110 bp, synthetic construct
  source 1..110: mol_type = other DNA
ggcaaacctttatattccgtggaacacggcacctcattattaaccaacatttatagaggacgttatcctcatgcgggctctgcgtgacaaccattgtgttacaggagtag

SEQ ID NO: 34281 - DNA, 110 bp, synthetic construct
  source 1..110: mol_type = other DNA
aggactttttaggtgtcgtctatggcaaagggaaacaagctacaacctacaagtcaaatgtggcctgttgtgtacatttttggcacatagccatgttctttgttacacag

SEQ ID NO: 34282 - DNA, 110 bp, synthetic construct
  source 1..110: mol_type = other DNA
tcattcttttgagtaaaaacagttattccatgaaaaaaaaagctagttcagtctaatagcctaagtgcttgtcctccagtcaaccatcatactttgatgggcagcacaag

SEQ ID NO: 34283 - DNA, 110 bp, synthetic construct
  source 1..110: mol_type = other DNA
agactgacttcaaaaattttcagtggaactagatgtggccccagcagcatcgaacacaccacccacccccttctgatacctctgcctcaacacctctctgagcaacattt

SEQ ID NO: 34284 - DNA, 110 bp, synthetic construct
  source 1..110: mol_type = other DNA
acccaagttgcccttgctgaatgctgtatcccagctcttagtctctatgtctgaacagggcttcagctctagatgtattggcttgagcctaaacaatcagtgcatcattt

SEQ ID NO: 34285 - DNA, 110 bp, synthetic construct
  source 1..110: mol_type = other DNA
cagggcttcagctctagatgtattggcttgagcctaaacaatcagtgcatcatttccctgagcatagtcacttgtacaggatgaccatatatttcagtcagagtcaatga

SEQ ID NO: 34286 - DNA, 110 bp, synthetic construct
  source 1..110: mol_type = other DNA
gagggagacagaaggctgattttgtcactcttcagctccaaacgtccagtgtcctcccatcacacagaatcaacttcaactccctctggtgacttacaaggaccacgtgc

SEQ ID NO: 34287 - DNA, 110 bp, synthetic construct
  source 1..110: mol_type = other DNA
ctcaatatatgctgttgattgtatatcaaccatacttcaagaaaacttaacgagagggtattgtgcagctcaccaaaccattgggaggactggaagactgggctctggac

SEQ ID NO: 34288 - DNA, 110 bp, synthetic construct
  source 1..110: mol_type = other DNA
gggtattgtgcagctcaccaaaccattgggaggactggaagactgggctctggactcagcagctaagagcaatccccgagttatgctgcaatgggtcatgtaaggacgct

SEQ ID NO: 34289 - DNA, 110 bp, synthetic construct
  source 1..110: mol_type = other DNA
agcaatagggctatttcaaaatacattattggtgatgaaaagaacagggccaagtaaaaagttaaataaggtcactagctacacaactgggaaaacaagcctgatggggt

SEQ ID NO: 34290 - DNA, 110 bp, synthetic construct
  source 1..110: mol_type = other DNA
agggttggggcaccattctctacgctatgatatatgcactgaaccaatagcttacatgctttccctcattatatggaatacatggaatggaaccaagaaaccaaggcatg

SEQ ID NO: 34291 - DNA, 110 bp, synthetic construct
  source 1..110: mol_type = other DNA
ccggatgtttacaacaggagtgtgcacaggcacctctgcctgcgagggcaggtgtctttgtacggattctgttagatgcaagtggaatcccatgcatttgtgcaggttcc

SEQ ID NO: 34292 - DNA, 110 bp, synthetic construct
  source 1..110: mol_type = other DNA
aactggacaatagtaagttacatgaaggaaatcagaggatgaattcctgttcattgtactaatagctagagtcatccacccctagttcttggaagaggccctaaaatcaa

SEQ ID NO: 34293 - DNA, 110 bp, synthetic construct
  source 1..110: mol_type = other DNA
gtactaatagctagagtcatccacccctagttcttggaagaggccctaaaatcaagttgtaattgaggcctctactatccactattgtaagagagcaaagggaaggaatc

SEQ ID NO: 34294 - DNA, 110 bp, synthetic construct
  source 1..110: mol_type = other DNA
acagaacaaggaatcagaaagcctgagccttaataagccttctaaaaagtttagatgtggccttctataaaaacaccaacatgagttctgtctctactcagtaaatgtca

SEQ ID NO: 34295 - DNA, 110 bp, synthetic construct
  source 1..110: mol_type = other DNA
tgtggccttctataaaaacaccaacatgagttctgtctctactcagtaaatgtcatcttctcccttcccatgctgtgagaatgtacatcttgttttgtggctgctacatt

SEQ ID NO: 34296 - DNA, 110 bp, synthetic construct
  source 1..110: mol_type = other DNA
tctggagctttctggagacttccgcctctgcacttatctcatactgacagctgacaaaaagtcttccctctccagagcaaaggcctgacacagtgctgggtatctacctg

SEQ ID NO: 34297 - DNA, 110 bp, synthetic construct
  source 1..110: mol_type = other DNA
tattgatggaagaaggtgtaagtggtttaaatgtagatgatttttttcagagaggagagggcagtttcattgctctaaaaaccatacaaaaatcaagttgaaaatgctgg

SEQ ID NO: 34298 - DNA, 110 bp, synthetic construct
  source 1..110: mol_type = other DNA
agagggcagtttcattgctctaaaaaccatacaaaaatcaagttgaaaatgctggcttttcaacggacaagaaaagagcagtccttcaactctcagttctcttttccttg

SEQ ID NO: 34299 - DNA, 110 bp, synthetic construct
  source 1..110: mol_type = other DNA
ccacagctaagtaaaactgccataaagaagaacagcttggttaggcagctgggcataagcaccacagcagggctccatctgaattctaggaccagtgagtgatcaccatg

SEQ ID NO: 34300 - DNA, 110 bp, synthetic construct
  source 1..110: mol_type = other DNA
cttagggataagaaaggtggccagggtgggaagaggtcttcctggctatcactgctgtagctcctcctcccagagggcttgtgagcccaggattctgccttgataaagtg

SEQ ID NO: 34301 - DNA, 110 bp, synthetic construct
  source 1..110: mol_type = other DNA
tttgaaaaactaatggctgaactgtttccaaattttaagaaatgtataagcttacaagaagctcaacaaactccaagcagaaaaaacatgaagaaaaatatgtcgaggca

SEQ ID NO: 34302 - DNA, 110 bp, synthetic construct; identical to SEQ ID NO: 34301
  source 1..110: mol_type = other DNA

SEQ ID NO: 34303 - DNA, 110 bp, synthetic construct
  source 1..110: mol_type = other DNA
caaattaggacaaatatgcaaggacaagagatgagcacaggaagaaggtaaccatctataagccagggagagaagcctcagaagaaagcaaatctgtcaacacctctatc

SEQ ID NO: 34304 - DNA, 110 bp, synthetic construct
  source 1..110: mol_type = other DNA
ctataagccagggagagaagcctcagaagaaagcaaatctgtcaacacctctatcttagatttctcgactccacaatttgggaaaaaaataaatttctgttgattaggcc

SEQ ID NO: 34305 - DNA, 110 bp, synthetic construct
  source 1..110: mol_type = other DNA
gaaattctcctgtctcggggcctgagcacctgaacctcctcctgactgaatacccctccccagacatctgcatgtcactccccgccaccctacctgaggtattcttaagg

SEQ ID NO: 34306 - DNA, 110 bp, synthetic construct
  source 1..110: mol_type = other DNA
ctccccagacatctgcatgtcactccccgccaccctacctgaggtattcttaaggattttttcctgaccctcatacttcaaattcaacccaaacaccagcctagctcctg

SEQ ID NO: 34307 - DNA, 110 bp, synthetic construct
  source 1..110: mol_type = other DNA
attggaattattttgtacttgcacaactaaattttcctgaatggagatcttataccaatccatctattcatgcattcctttgtgctttcatcaaatgttttcttgcccat

SEQ ID NO: 34308 - DNA, 110 bp, synthetic construct
  source 1..110: mol_type = other DNA
caatccatctattcatgcattcctttgtgctttcatcaaatgttttcttgcccatctattttttgccaggcacagacctgggacttagggttacaaaagcaagtaagatt

SEQ ID NO: 34309 - DNA, 110 bp, synthetic construct
  source 1..110: mol_type = other DNA
actgtgtggaggataccatttccacgtgagctgctttctttctgagtctacctttatcaaccccagctatagaagagcttggtatagaaagaggcagaggaaagtggtta

SEQ ID NO: 34310 - DNA, 110 bp, synthetic construct
  source 1..110: mol_type = other DNA
atcaaccccagctatagaagagcttggtatagaaagaggcagaggaaagtggttaagatgttcattatctgtgtttaaattaatgcaacatctaaataactatcttttta

SEQ ID NO: 34311 - DNA, 110 bp, synthetic construct
  source 1..110: mol_type = other DNA
tttgagtctgaaaattagtgtcctcacattcccttagaacattgactttcccttgttcctctagagctcagttataccttctcagtctatcctcatttctcttaacctct

SEQ ID NO: 34312 - DNA, 110 bp, synthetic construct
  source 1..110: mol_type = other DNA
tgtcccacatctccttttggcctactggtaggcagtccagtttctgacatgggctgccaggtccatacagctctgaagctggtgttggccttcttttgggtgagagtttg

SEQ ID NO: 34313 - DNA, 110 bp, synthetic construct
  source 1..110: mol_type = other DNA
ggttggtattaatatcatcatttgacacatgagtcaattgagggattaagagaagtcacgcagctaatcaatggtggaactgggactcaaatccaggccatgtggctcac

SEQ ID NO: 34314 - DNA, 110 bp, synthetic construct
  source 1..110: mol_type = other DNA
tgccagccatgacgagggaggtagaggctggcaccaggcccggggatttcgcgtagagaaacactgccaaaatcacacagccgcctcaacttaagcttttcaaatcttag

SEQ ID NO: 34315 - DNA, 110 bp, synthetic construct
  source 1..110: mol_type = other DNA
tgaggccctaaaaagatgcttaaaaaaacaaaaggacaccagagaacagaaggagaggtgtggaaggaaccctcccctgagatggggagaagaggggaaaacccaagatt

SEQ ID NO: 34316 - DNA, 110 bp, synthetic construct
  source 1..110: mol_type = other DNA
aggtgtggaaggaaccctcccctgagatggggagaagaggggaaaacccaagattcttcctcccaattttttttcttccccaaggacagcatttaagatcagatcaatga

SEQ ID NO: 34317 - DNA, 110 bp, synthetic construct
  source 1..110: mol_type = other DNA
ggacaggatgctacatgggattcagaatgtgggtagccttccagctcaccctatggaagcctggttttcacaggcagtcctccgtagcctttgcagaagggaatgaccac

SEQ ID NO: 34318 - DNA, 110 bp, synthetic construct
  source 1..110: mol_type = other DNA
ggatgagagagaacacagacactagagcactttctaggtgacgtggggtcacagaggagggaacctccttgaaaccacctgggtacagcctgtcagtggaggagggaacg

SEQ ID NO: 34319 - DNA, 110 bp, synthetic construct
  source 1..110: mol_type = other DNA
ggagggaacctccttgaaaccacctgggtacagcctgtcagtggaggagggaacgtttcagctgctggccacgttctcctgataggcaggtacagaagctggaccatttc

SEQ ID NO: 34320 - DNA, 110 bp, synthetic construct
  source 1..110: mol_type = other DNA
cccggtgagtctctaggaaaagaaacagtgcgaacagtcagaaagaatatttctaaactgattgtttggggtcctgaaacatactcccttgaactcaaaatacagtttca

SEQ ID NO: 34321 - DNA, 110 bp, synthetic construct
  source 1..110: mol_type = other DNA
aactgattgtttggggtcctgaaacatactcccttgaactcaaaatacagtttcagggtgaattttgaaggcgctttagccgataatctgaaaagtcatccttgtccaga

SEQ ID NO: 34322 - DNA, 110 bp, synthetic construct
  source 1..110: mol_type = other DNA
caggggctccagcacatgttaatctccatgatttcattggactttggtcatctcagcccttagatactgttgcctgttttaaatttttcaaattccaccttcactgctat

SEQ ID NO: 34323 - DNA, 110 bp, synthetic construct
  source 1..110: mol_type = other DNA
agagaaaagcaggatactgcccctagaaagttacggtgtatatcaaaggagtgactgcaatgagcccagcttcttacatctttccatgcatagaaaatgctaaattcatt

SEQ ID NO: 34324 - DNA, 110 bp, synthetic construct
  source 1..110: mol_type = other DNA
tgcaatgagcccagcttcttacatctttccatgcatagaaaatgctaaattcattaacttaggacgtctggtttttttaattaacagtcatcttttgttgttctggccac

SEQ ID NO: 34325 - DNA, 110 bp, synthetic construct
  source 1..110: mol_type = other DNA
ggtggcaggtacctggacgtcagtcaaagctacctgctctgctgactcctaaggctgacaccacggtgagcaggctggtctttcaatgacctgaaaatgaaccaatctac

SEQ ID NO: 34326 - DNA, 110 bp, synthetic construct
  source 1..110: mol_type = other DNA
ggttgttatgtgaattaaatggggagacatttaaagggcttgggctatagcaagtgctcaataagctggtagcttaaaaacagtgacaacgccttttgttgcaaaatttg

SEQ ID NO: 34327 - DNA, 110 bp, synthetic construct
  source 1..110: mol_type = other DNA
gctcaataagctggtagcttaaaaacagtgacaacgccttttgttgcaaaatttggatcctgactctaaaggtggaaagactataagcacagatacaagacactaaccta

SEQ ID NO: 34328 - DNA, 110 bp, synthetic construct
  source 1..110: mol_type = other DNA
aaaaaaaatggaaaagaaaggtctagaagcccatttgcccaccatcaagctggtctctgattggcctctgagatgccacgagagcttggaaagtctgcctgaggccctct

SEQ ID NO: 34329 - DNA, 110 bp, synthetic construct
  source 1..110: mol_type = other DNA
tattttgaacaagcctcccaggctgatactgatgtattctaaaatttgaaagtgactcccttagaatttattagatttttctttaaagggcggtggccttttcccgtatt

SEQ ID NO: 34330 - DNA, 110 bp, synthetic construct
  source 1..110: mol_type = other DNA
ctcccttagaatttattagatttttctttaaagggcggtggccttttcccgtattcatctaaagagatgctatcttcacatgattttgatatcagtacagaagcaagact

SEQ ID NO: 34331 - DNA, 110 bp, synthetic construct
  source 1..110: mol_type = other DNA
aactccgttgatgcttgataagggccaaggtctcatctttccagcgatgctcgttgcctcttggcatcctaaaagaggagcgaatttgctctttttagtaactcttcaca

SEQ ID NO: 34332 - DNA, 110 bp, synthetic construct
  source 1..110: mol_type = other DNA
gcctcttggcatcctaaaagaggagcgaatttgctctttttagtaactcttcacaatttacacagcatttttgacagcccttatctctttaaatctcacaactctgacgg

SEQ ID NO: 34333 - DNA, 110 bp, synthetic construct
  source 1..110: mol_type = other DNA
atagaaaagagggcaaatgggggaaaccaacatggcttagaagacaagatgaacaattgcaaatccaattgtacctggcttagcgatcagctccgtgaatcaccagctgt

SEQ ID NO: 34334 - DNA, 110 bp, synthetic construct
  source 1..110: mol_type = other DNA
attgcaaatccaattgtacctggcttagcgatcagctccgtgaatcaccagctgtgtgacctcaagcaagttacttaatctctctgagccccaaagtcatccttaaatgg

SEQ ID NO: 34335 - DNA, 110 bp, synthetic construct
  source 1..110: mol_type = other DNA
ttatttggaggagaagcggccagcatgggggatgagcagagatgaaggctcccaggtggcagatcagccctctgggatcaagagctattccccacagacacaaatatgca

SEQ ID NO: 34336 - DNA, 110 bp, synthetic construct
  source 1..110: mol_type = other DNA
taagaaggactggtttgaactagctctttctggttccacagcagatatttactatcctggggagttatcaggaagactagatggccctctgataaaccctgctgtgctgt

SEQ ID NO: 34337 - DNA, 110 bp, synthetic construct
  source 1..110: mol_type = other DNA
cctgtagaagttctcaaattgtacttttgtcagtggaatttgttaaaaattatagattcccagcccccatgtatagcgattttatttcattaggtttgtcctgcatatct

SEQ ID NO: 34338 - DNA, 110 bp, synthetic construct
  source 1..110: mol_type = other DNA
attcccagcccccatgtatagcgattttatttcattaggtttgtcctgcatatctacaatacttatccccaaatgatggcaaggtgagccccactttgaagagcattgaa

SEQ ID NO: 34339 - DNA, 110 bp, synthetic construct
  source 1..110: mol_type = other DNA
tgtaacgacaataattaatttggaggagaagtcctctgtgatttgaagaaaagaattattgactgagatttctgttctttgccccagctctgctaattagccttggaaac

SEQ ID NO: 34340 - DNA, 110 bp, synthetic construct
  source 1..110: mol_type = other DNA
ttattgactgagatttctgttctttgccccagctctgctaattagccttggaaacaagggcaagtgtcttcaccacactacctctaatttccctcatctaagaaatgctg

SEQ ID NO: 34341 - DNA, 110 bp, synthetic construct
  source 1..110: mol_type = other DNA
acgacacttcaggggctcgaaacccataaaagtgaggtattactgggtcctaaacttttacccataaagcccctgtttacctcccaaaccaggaagaagaggacggtcta

SEQ ID NO: 34342 - DNA, 110 bp, synthetic construct
  source 1..110: mol_type = other DNA
aggcccgcatcttctggatactagtcaggtttgtttccactgagctgcagtgagaactccaataatgtactcttaagtatagaaaaatctcttcatctcagtgagtgcta

SEQ ID NO: 34343 - DNA, 110 bp, synthetic construct
  source 1..110: mol_type = other DNA
tttatagctttcactgggggtggggggggaaggcagcaggcaaatgaagcttgaatttagggtctgagtagagatactgggctgcactttttcaacaagggatgagcgag

SEQ ID NO: 34344 - DNA, 110 bp, synthetic construct
  source 1..110: mol_type = other DNA
agataattcaatgctcagcatcaagcttggcttcaacccaccagacatcagttttactatcctagttgtgaaagtaagaaatgtctccacatattgctggatgtccacag

SEQ ID NO: 34345 - DNA, 110 bp, synthetic construct
  source 1..110: mol_type = other DNA
taataatttcataattatcctcaaactagctcactgtttacacagggattttccttgtctcattaatatgaggttagagtatccaaaatattattctccctgcagaattc

SEQ ID NO: 34346 - DNA, 110 bp, synthetic construct
  source 1..110: mol_type = other DNA
tattcttaactaaactgcaattaacctattacacaattaaatctgaggatctccaagacccccatccatttttctctctctacgcacacacccactcccaagtctaaatt

SEQ ID NO: 34347 - DNA, 110 bp, synthetic construct
  source 1..110: mol_type = other DNA
agacccccatccatttttctctctctacgcacacacccactcccaagtctaaatttcctccaaactgcagcctgattagtttatctaaaacacaagcagaggaagaactc

SEQ ID NO: 34348 - DNA, 110 bp, synthetic construct
  source 1..110: mol_type = other DNA
aatgttttgagagatgagaaaataaaaatcctgggaagctaagaactctgccaaagtcacacagatgcttgtacagaatgagataccaggttgtcttatcacatctcttc

SEQ ID NO: 34349 - DNA, 110 bp, synthetic construct
  source 1..110: mol_type = other DNA
ggccctggcatgcaattgagtgctgcgggagggatatgcctttcttcaactagcataaaagcatcttgtagactagcagtggtggccctattcttgagataataccagct

SEQ ID NO: 34350 - DNA, 110 bp, synthetic construct
  source 1..110: mol_type = other DNA
taaaagcatcttgtagactagcagtggtggccctattcttgagataataccagcttgaaaaccagtaaactgaaggatcagaactgaggaccattatagaggataggaag

SEQ ID NO: 34351 - DNA, 110 bp, synthetic construct
  source 1..110: mol_type = other DNA
tttttctttttatagctggaacagtcagatgatttcagttcgtgaagccaaagccattcccaggcctgatggtattgaatggagaaataaattcatctgtgtagaaggta

SEQ ID NO: 34352 - DNA, 110 bp, synthetic construct; identical to SEQ ID NO: 34351
  source 1..110: mol_type = other DNA

SEQ ID NO: 34353 - DNA, 110 bp, synthetic construct
  source 1..110: mol_type = other DNA
gatggagtgttttaggggttcttggactaaggccggatcactcagtgcaaaccaaaatgaatgggatttgatcaaggtcgcagaggtcttatctaagggactcactagag

SEQ ID NO: 34354 - DNA, 110 bp, synthetic construct
  source 1..110: mol_type = other DNA
tgctggactacaccacccagaggctcctgtttctaaacgccgagactggacagttgctcttcatcattaggcaccggttcaatgagggggtccaccctgcctttgccctg

SEQ ID NO: 34355 - DNA, 110 bp, synthetic construct
  source 1..110: mol_type = other DNA
gctcttcatcattaggcaccggttcaatgagggggtccaccctgcctttgccctggagaaacccggaaagtgtactttgcacctggggatcgagcccccggattctgcaa

SEQ ID NO: 34356 - DNA, 110 bp, synthetic construct
  source 1..110: mol_type = other DNA
ctcaggagcctattctgctcatctgaacacctaactgccaactttctgaagcagcccagcttcccagaactgaagtcaccaagccaagacgaagagaacgctgggacctg

SEQ ID NO: 34357 - DNA, 110 bp, synthetic construct
  source 1..110: mol_type = other DNA
tgcctgcctcgaggtgggtgatcaataacggttagctgttaagataagtgcctcaggatctgacatctcaagatctgagtgatcaaaatgcactttattggctgtaaaat

SEQ ID NO: 34358 - DNA, 110 bp, synthetic construct
  source 1..110: mol_type = other DNA
tcatgggacttttctacctctgtaatttcatgaaccaattcccataataaacctcttcatcaatatctagctggctagttgtatcttactctctatgggttttatttctc

SEQ ID NO: 34359 - DNA, 110 bp, synthetic construct
  source 1..110: mol_type = other DNA
ttcatcaatatctagctggctagttgtatcttactctctatgggttttatttctctgtagaacactgactaatacaatcataatctgcttgaactaacataactatcaca

SEQ ID NO: 34360 - DNA, 110 bp, synthetic construct
  source 1..110: mol_type = other DNA
ggactcgctgtgcacggatgggagcccccagccgcctccccagcagctgagctccaagggggccgccatcttgcaggggccgacctttgctatcccggaagtgcttttgt

SEQ ID NO: 34361 - DNA, 110 bp, synthetic construct
  source 1..110: mol_type = other DNA
aagggggccgccatcttgcaggggccgacctttgctatcccggaagtgcttttgtcgcctaatttccggcacgtggaactgagggggcggggcgaaagggagggaaggtt

SEQ ID NO: 34362 - DNA, 110 bp, synthetic construct
  source 1..110: mol_type = other DNA
aactccagaagcagaatggtgctctgtagatgtagcaggacctgcaaagctgcgacagtcttaggctgattgagatcaagaggttgcgctggggcccgaggctgtgatat

SEQ ID NO: 34363 - DNA, 110 bp, synthetic construct
  source 1..110: mol_type = other DNA
cagtcttaggctgattgagatcaagaggttgcgctggggcccgaggctgtgatattgtcaaagttggagaagaggaaaaaaaccatggaggagctgatagcattgttgag

SEQ ID NO: 34364 - DNA, 110 bp, synthetic construct
  source 1..110: mol_type = other DNA
gatgggcattaaaagcctgtccaaacccggttcttctgtttagaaaacaagaggaggacaagaagtaggagaccgatggtgcccaaagctagcgggtcagtgtcactttc

SEQ ID NO: 34365 - DNA, 110 bp, synthetic construct
  source 1..110: mol_type = other DNA
aggaggctctgtaacctatgagtaaccaaaatgcccatagatggagccggaaagacattcagcaaacccaggctgtttgactggctggcagtgcctctgaaggagactat

SEQ ID NO: 34366 - DNA, 110 bp, synthetic construct
  source 1..110: mol_type = other DNA
tctctacaggctacacggcttttaatggggttgacttcgaagggaccttccacgtcaacacccaaacggacgatgactatgctggctttatcttcggttaccaagacagc

SEQ ID NO: 34367 - DNA, 110 bp, synthetic construct
  source 1..110: mol_type = other DNA
caacacccaaacggacgatgactatgctggctttatcttcggttaccaagacagctccagcttctacgtggtcatgtggaagcagacagagcagacatactggcaggcca

SEQ ID NO: 34368 - DNA, 110 bp, synthetic construct
  source 1..110: mol_type = other DNA
aattgcatttttcctggcagggcttccaggctcatgaaattcatctcttgccaaaggcagaggatcagctggcaacagggagcgtgggctgcggctaatcaggtgcaatc

SEQ ID NO: 34369 - DNA, 110 bp, synthetic construct
  source 1..110: mol_type = other DNA
ggcagaggatcagctggcaacagggagcgtgggctgcggctaatcaggtgcaatcattttttaatggcatcttcttccctctaatgatcaaaatcgtgccactcgcttta

SEQ ID NO: 34370 - DNA, 110 bp, synthetic construct
  source 1..110: mol_type = other DNA
agcccacagcaacgctggattgttaatccactgagcgaggcctgggattgaatactccttctcatggtagtatcctgtttcccaccaatggacaggagctgcaaactgaa

SEQ ID NO: 34371 - DNA, 110 bp, synthetic construct
  source 1..110: mol_type = other DNA
ctctccctaaaaacctggaaatatggtcagactcacaaagaggagctaagagaataagcctcagcctcttctggcactccgtggcctgccttcctgcttgccacgccaca

SEQ ID NO: 34372 - DNA, 110 bp, synthetic construct
  source 1..110: mol_type = other DNA
tgaacccctgcatttctgtcttaccatagttgataccagtgcccctggatttcggggaagaaccccagccaagaactaccagctctaacatgatgggaggtgaggcaagg

SEQ ID NO: 34373 - DNA, 110 bp, synthetic construct
  source 1..110: mol_type = other DNA
ttcattttgtagagatgtaaatagtgccgtgtagctggtaaagagcctggtctttcaggaggtgaaaaggcctggcatcctaggtgcagaggaagatgagcaagaaagga

SEQ ID NO: 34374 - DNA, 110 bp, synthetic construct
  source 1..110: mol_type = other DNA
tatggcttaacatataatttgatattttataaaagaaatgtgaaatgtaactctcatttttagatggcttaatggtacaaattaccccagagacaatggatggcttgcgg

SEQ ID NO: 34375 - DNA, 110 bp, synthetic construct
  source 1..110: mol_type = other DNA
tataggctggaaacattcatgatgctgtgtttggctgggagcttagctggacctggaaagtctaaaatggcctcactcacacgatggacaccttaatgctgtctgtcagg

SEQ ID NO: 34376 - DNA, 110 bp, synthetic construct
  source 1..110: mol_type = other DNA
gaaagtctaaaatggcctcactcacacgatggacaccttaatgctgtctgtcaggcaggaagtcctagttttcttctgtatggcttctctctctccatagggtttctgaa

SEQ ID NO: 34377 - DNA, 110 bp, synthetic construct
  source 1..110: mol_type = other DNA
cctatttaagctttgtcctttgagggtctctgttacatgaattgataacctatatcgtaatggatacattctttgcaccagaccagatatttccttgagcagttggcaag

SEQ ID NO: 34378 - DNA, 110 bp, synthetic construct
  source 1..110: mol_type = other DNA
cgtaatggatacattctttgcaccagaccagatatttccttgagcagttggcaagactcacttctcctgtggagctgggagtcagagcctttgggtggaccagtgcaggg

SEQ ID NO: 34379 - DNA, 110 bp, synthetic construct
  source 1..110: mol_type = other DNA
tccacatttttacatctgatactgtcaagtgttggtgagaatgccacagctgaggtatgtgaatggttacctccttgtagttataatttgcatttctccagttactagtg

SEQ ID NO: 34380 - DNA, 110 bp, synthetic construct
  source 1..110: mol_type = other DNA
taccagcccattaatgagggctctattttatggcctcatcacctcctagggacgtaggtttgaatactggcctggttatttaacagctaaccttaaacaacttttgtaac

SEQ ID NO: 34381 - DNA, 110 bp, synthetic construct
  source 1..110: mol_type = other DNA
attgagtccttcaccaccaggccaccagaactccttatgtacctatttggatggacagatttgttattaaataattagaatgtaggagcataaaagaaatcatttcgtcg

SEQ ID NO: 34382 - DNA, 110 bp, synthetic construct
  source 1..110: mol_type = other DNA
gaaatgctgtctttgagttttcttcactaagaaccttttctgatttcctgctgcagctctagggcttaacccaggacctggtcctcggtagagttcagtgaacaaagggc

SEQ ID NO: 34383 - DNA, 110 bp, synthetic construct
  source 1..110: mol_type = other DNA
gatggcaggaagattggctggaatcccaccttctgtgattctacctgtgacttgctaccagctactagtctatagcacacatagccagatagtcactcctttgattgggt

SEQ ID NO: 34384 - DNA, 110 bp, synthetic construct
  source 1..110: mol_type = other DNA
tccgtgttattctttaggacccaagagcagccttagctaaacactcacctgaacagatggaatcagggcctgaaaacttgggttctttacccactgcatgtccatcttta

SEQ ID NO: 34385 - DNA, 110 bp, synthetic construct
  source 1..110: mol_type = other DNA
gatacccagggagttagactgtcccagtttgaggcccctttgcagaaaggctgatctcccagaatttgggggcatttagaaatctcagacaaagctcgaaaaaagctggt

SEQ ID NO: 34386 - DNA, 110 bp, synthetic construct
  source 1..110: mol_type = other DNA
ccatagtcagtgtctccactttatcacctctgtttcccttagcttattctcttagactttcactctgaaatgactcttctctaggtcacctgtgacctccatcctgccaa

SEQ ID NO: 34387 - DNA, 110 bp, synthetic construct
  source 1..110: mol_type = other DNA
tggctaatccagcttctctgccttccagacactcatccacgaggaaggatggccagcaccttctcaaaattactaactggccgcaatgcttctttgttatttgccacctt

SEQ ID NO: 34388 - DNA, 110 bp, synthetic construct
  source 1..110: mol_type = other DNA
caggtgctgccagaaaaagaaaaaaggaaatagaaatcatccttcagtccaccgtagccacaatacactcccatcttagaggtgacacacttaactttttgttgtggccc

SEQ ID NO: 34389 - DNA, 110 bp, synthetic construct
  source 1..110: mol_type = other DNA
ttctatagactttggagtctctgctttgagtcttaaggccctcttcaatatacgatccacaatgcagtcaaactaattgcaaatctgatcaatacaaagtttaacagtta

SEQ ID NO: 34390 - DNA, 110 bp, synthetic construct
  source 1..110: mol_type = other DNA
ctgattattccatgtaaaagaaaaatgagatctgtttaaagcccacacaaataatatcaataaccagggattttccttttgccatgctgttttcacaatcacaggcatgc

SEQ ID NO: 34391 - DNA, 110 bp, synthetic construct
  source 1..110: mol_type = other DNA
cctactgccagagcccacctgatttctgatgctcaaaaaggagaaccccgtcagcattggcacaggactccctgaacaactctagcctcctgccgttgctaaggcttctc

SEQ ID NO: 34392 - DNA, 110 bp, synthetic construct
  source 1..110: mol_type = other DNA
attggcacaggactccctgaacaactctagcctcctgccgttgctaaggcttctccatcctaacccaatagctccatcaaagggctttaaagacccaaggtttacatagg

SEQ ID NO: 34393 - DNA, 110 bp, synthetic construct; identical to SEQ ID NO: 34391
  source 1..110: mol_type = other DNA

SEQ ID NO: 34394 - DNA, 110 bp, synthetic construct; identical to SEQ ID NO: 34392
  source 1..110: mol_type = other DNA

SEQ ID NO: 34395 - DNA, 110 bp, synthetic construct
  source 1..110: mol_type = other DNA
ccactttttgcaaatccttttaccctctccaccttccactagctcaacagataccacattctctgggatatctccctagtcaactcttaagccctgctacacaccaagtg

SEQ ID NO: 34396 - DNA, 110 bp, synthetic construct
  source 1..110: mol_type = other DNA
tcattaggtgaaccatgttcttccagtcccggccatttcctgttcaaggcaggaactcactgaaagaattaaagtagctgccagaagtttctgatgaccttgcggtagct

SEQ ID NO: 34397 - DNA, 110 bp, synthetic construct
  source 1..110: mol_type = other DNA
aaataagaattaaaaggcctctgctcccctaatcactcccccattaatctctgtctcttcagttaaacctacttcattatattttgaagtttcatagcaacatattagaa

SEQ ID NO: 34398 - DNA, 110 bp, synthetic construct; identical to SEQ ID NO: 34397
  source 1..110: mol_type = other DNA

SEQ ID NO: 34399 - DNA, 110 bp, synthetic construct
  source 1..110: mol_type = other DNA
caacaacaggaagttcttgccattttaatctttttctttaagaactttctccaggcagggagtgaggacacttatagagctcacctagtttatatccttttcctcagaga

SEQ ID NO: 34400 - DNA, 110 bp, synthetic construct
  source 1..110: mol_type = other DNA
aaaaacctagaacaaatctaaatatttttcagtcaaacatggatgttatttatttggaaaaaatattaagcccaaatctctagcttcccagagaagagaatggatgtggt

SEQ ID NO: 34401 - DNA, 110 bp, synthetic construct; identical to SEQ ID NO: 34400
  source 1..110: mol_type = other DNA

SEQ ID NO: 34402 - DNA, 110 bp, synthetic construct
  source 1..110: mol_type = other DNA
atgagacaaaatcttggtcttaaaggcctaaaaccatctggcactttgagaaagggaagtggaaaatacgtaaaagtctgaaatttcccaattgtatgacttcaagggat

SEQ ID NO: 34403 - DNA, 110 bp, synthetic construct
  source 1..110: mol_type = other DNA
accgctgctcatgatggttcccacctggaaatgctcccttacccatctctctatccaattcttaacctggcctacatgattcactcttttacaaagccttctctgaccct

SEQ ID NO: 34404 - DNA, 110 bp, synthetic construct
  source 1..110: mol_type = other DNA
tttgcagcttggctcaggtctgatgcctggcccaggagctccatgtgttgcagtgcagccaaaaaaaccccaaacaaacaacaacaaaatccagctaataagtgagggaa

SEQ ID NO: 34405 - DNA, 110 bp, synthetic construct
  source 1..110: mol_type = other DNA
ctaatagattcattattattaaccagataggtttggcactcctttgttcatttgggttgcaaaggccattccccaaagaatttgctcagaatttccaccagctcagtcat

SEQ ID NO: 34406 - DNA, 110 bp, synthetic construct
  source 1..110: mol_type = other DNA
gaaggaatctggcatgttgggttgagatagaagctgatagacaaacagagatactgacagtgccaataaacggggtggtgctgggtcaccaatggtcagttcctttgtat

SEQ ID NO: 34407 - DNA, 110 bp, synthetic construct
  source 1..110: mol_type = other DNA
tcttttgtattgaatttaattgtctttttggcttcctagtttctcatctctattgtccacactctacatttcagctgagatcacttaaaaacatgctacactcttcccca

SEQ ID NO: 34408 - DNA, 110 bp, synthetic construct
  source 1..110: mol_type = other DNA
taaaatacagactagatgtactaaaggtcaaattaattctgattaaggcagctgctattagggaatttcccataaagggatttaagttttccagccttgggcataaggag

SEQ ID NO: 34409 - DNA, 110 bp, synthetic construct
  source 1..110: mol_type = other DNA
gcttatttgctcagggcttcagtagttataatctgtctacacagtgtatcaagtcattcatttatctcagttcatagtgcaaatgaggccaggtagcatgttcagtccct

SEQ ID NO: 34410 - DNA, 110 bp, synthetic construct
  source 1..110: mol_type = other DNA
tggtaattgaaattaggaatagaattatggttggcccctaaataacatgatgtgaatgccaaaactgctatttagctgttatactgaacaatttggaacaatgggaggga

SEQ ID NO: 34411 - DNA, 110 bp, synthetic construct
  source 1..110: mol_type = other DNA
agtaagtactagaacctagaatgcttatatcttattttttttttattttttattttttggccacaccgatagcacatagaagctcctggccaggaatcaaatctgtgcca

SEQ ID NO: 34412 - DNA, 110 bp, synthetic construct
  source 1..110: mol_type = other DNA
gaaagcagcaaaggaaaagcaacaaataacataccagggaattccccaaaggctatcagctgaattttcagcaaaactgctggccaggagggggtggccggatatattta

SEQ ID NO: 34413 - DNA, 110 bp, synthetic construct
  source 1..110: mol_type = other DNA
tccagccctagttcggtcccgtatcccctttacaagctcagccgcgaccccgcagccccggttcttaccatagtgaggccggcgaagccccagccacatcactcttccgg

SEQ ID NO: 34414 - DNA, 110 bp, synthetic construct
  source 1..110: mol_type = other DNA
ggtaatctgagtccttcatggtatatttgaaggccatttcctcttgttctgtcatcagaaaaggatgaggaacagctgtttaccatcttcttcagtacttaaaggcttat

SEQ ID NO: 34415 - DNA, 110 bp, synthetic construct
  source 1..110: mol_type = other DNA
tattgttatgtaaattttatttgagaataaccttttaaaattagtagctatgggagttacctggtggctgagtgggttaaggatctggtgttatcactgttgtggcttgg

SEQ ID NO: 34416 - DNA, 110 bp, synthetic construct
  source 1..110: mol_type = other DNA
aaagtttgccgcaaatttcaccagctgtttcagaatgacagagcagagtacatcaaggaaacctccaatttttatttatttatttatttatttttgtctttttgccattt

SEQ ID NO: 34417 - DNA, 110 bp, synthetic construct
  source 1..110: mol_type = other DNA
gttactttaataagtgttcattaagctccccaatgaagtccatattggtgaacatggtggtcatttcactctgcaaccccgattacttgaaaacctgaaaagttggtggt

SEQ ID NO: 34418 - DNA, 110 bp, synthetic construct
  source 1..110: mol_type = other DNA
tgctgttcttgaaggatatattctaaaattgctcacaatttcccctcccatcacagtagccagaatttggtcatgtggtccttcttgattgcaagagaattggggaaatg

SEQ ID NO: 34419 - DNA, 110 bp, synthetic construct
  source 1..110: mol_type = other DNA
ataaactcgtgaaagagtatggtcccatttcctgaccacaaggaagatgtttgatacattcaaggaatctctgttattcagggaaaaaaaattaaatattctaccatagg

SEQ ID NO: 34420 - DNA, 110 bp, synthetic construct
  source 1..110: mol_type = other DNA
acattcaaggaatctctgttattcagggaaaaaaaattaaatattctaccataggggacacttagaaagactgaagggagaaaaagagcagagaaagcagaatctagact

SEQ ID NO: 34421 - DNA, 110 bp, synthetic construct
  source 1..110: mol_type = other DNA
gaaggagtcaggacctacggattccgtgctccccatgagacttacgatgtgtattgttacgtggaccatctggatggtaagacgttcaaattcctatagcttcatttgga

SEQ ID NO: 34422 - DNA, 110 bp, synthetic construct
  source 1..110: mol_type = other DNA
tcgaatgggcctctggttatacaagaaaaaagtaagaaaagctttctctacagcgaaaactgaatcaagcagtatggttaaaaacaatcatttcttaaaggacagtcctg

SEQ ID NO: 34423 - DNA, 110 bp, synthetic construct
  source 1..110: mol_type = other DNA
gagacaatatgtatgtgtgtctttgtgtcttttaatacttttgttaccttaatggtgagaggagcaggccaggaaggaagcaagcatcgcaagagggcagggtagcttct

SEQ ID NO: 34424 - DNA, 110 bp, synthetic construct
  source 1..110: mol_type = other DNA
tgagaggagcaggccaggaaggaagcaagcatcgcaagagggcagggtagcttctcacacagcagaatcttgtgatacctcttaagccaagctgtgtgtgtgtgtgtgtg

SEQ ID NO: 34425 - DNA, 110 bp, synthetic construct
  source 1..110: mol_type = other DNA
aattgaggattatttttgcactaatgaaactttaaataatctctttcaccttgctaaccttagcaggtgcacaggtaaatctctatcagtgatgtaatatatcttgagag

SEQ ID NO: 34426 - DNA, 110 bp, synthetic construct
  source 1..110: mol_type = other DNA
cagagaacgcaaatctgagcccaaagtctgccgaaagtacctgcatttattagcgagctgtcacaacaactatcagagtcagttctcagagcgtggggatatatctatcc

SEQ ID NO: 34427 - DNA, 110 bp, synthetic construct
  source 1..110: mol_type = other DNA
gttgattcctttatcatatcatatttaaatcttactattgacttacttaaatcgtcaactagatacagggtttcctgtgagcagaaatttttaatctttatagcccagca

SEQ ID NO: 34428 - DNA, 110 bp, synthetic construct
  source 1..110: mol_type = other DNA
cattctttggagaacattactttggccttctatggggattgatttgaaattccctaagaaattagagtcaggttttctgaaacctacacagtatgacgatatatataaat

SEQ ID NO: 34429 - DNA, 110 bp, synthetic construct
  source 1..110: mol_type = other DNA
ttgggaaggggagataggatgcccctgatggttgagtctttatagaatggatcggtccatggagtgaaaggggaccaaggacacaagaggatacaggatggctgatgtga

SEQ ID NO: 34430 - DNA, 110 bp, synthetic construct
  source 1..110: mol_type = other DNA
tgaaacaactgggacttgctcagtttagttaacatgcgtgtgtggaactggtgaaagtgcgtggagttgtcaggtagatgacaggcagaggaaggtggcctgaaggacgg

SEQ ID NO: 34431 - DNA, 110 bp, synthetic construct
  source 1..110: mol_type = other DNA
agcctgttataatacatataacacagcctattataatatctgcacatggaattggtctctaagagctcagatcaccaatgagggactgagaagctcctggtttttctcag

SEQ ID NO: 34432 - DNA, 110 bp, synthetic construct
  source 1..110: mol_type = other DNA
tttacctttctgcccagtagattaaaattatttttaaaaattatgtcaaaaatatttttttcaggtaggcatgcattctctgatacctagcttacagtaagacacctgct

SEQ ID NO: 34433 - DNA, 110 bp, synthetic construct
  source 1..110: mol_type = other DNA
ctagagaaccaagaactaacttcaaggtgaacacactcttcaccctagccttgatggcctaacctgctttacagctgttcacaattaatttagtggttaacatctctgtg

SEQ ID NO: 34434 - DNA, 110 bp, synthetic construct
  source 1..110: mol_type = other DNA
tggtatatctaaatcataggaggagactggatataaatatactgctaataatggccactcaaacaagaagaatgcaatcctttgacaataattcaatctagcatttaatt

SEQ ID NO: 34435 - DNA, 110 bp, synthetic construct
  source 1..110: mol_type = other DNA
tctctgtccgaaaaaagaagtgaagaatagaccatagagactgtctctgtgctggttccctgactgctagatattagcagctttgatcatatctttggtgcaggtatggt

SEQ ID NO: 34436 - DNA, 110 bp, synthetic construct
  source 1..110: mol_type = other DNA
agccattctattctcagatacccttggagctaactttgacattgatggaaaataaaggttgatggatgatagaagtgtcatattattggtattaaaatgcatgcatttct

SEQ ID NO: 34437 - DNA, 110 bp, synthetic construct
  source 1..110: mol_type = other DNA
ggatcccacattactgtagctgtgatgtaggccaaggctacagctccaattcggccttagcatgggaacctccagccttaaaaagtcacacactgggagttcccatcatg

SEQ ID NO: 34438 - DNA, 110 bp, synthetic construct
  source 1..110: mol_type = other DNA
tggcctagatttctccttggggacatatgtgtctaatgtaattgactctttttgatgtgctatgtctgtttcaaatggaatggaacataaaatgggacttttcttattct

SEQ ID NO: 34439 - DNA, 110 bp, synthetic construct
  source 1..110: mol_type = other DNA
taaagcaattgacagtgtgtcccagataaaggctatggtcccatgaggttcaagttacactctaagttgcatttaagaaggaatcatttaacatcaaatactaattgaag

SEQ ID NO: 34440 - DNA, 110 bp, synthetic construct
  source 1..110: mol_type = other DNA
ctgcctgagcactttgaactctgtgaaaacacagatgagaaacaattaattctaaactggaggttaaagaagtcttaaaaatgtcatcttaatttagctagaatttgttt

SEQ ID NO: 34441 - DNA, 110 bp, synthetic construct
  source 1..110: mol_type = other DNA
aaccgggagagtaatggcatagcagcttcagtattcttcaacactggtgtgcaagtaagccaggtgcagccaggtatgccgcctgtcttgctgtgcgtcataaacatcta

SEQ ID NO: 34442 - DNA, 110 bp, synthetic construct
  source 1..110: mol_type = other DNA
tatctccccctctcctaaatacacatataaacatcagctcaacaggaggaacaatggggcatgggctttgatctaccaacccaagtaaaaattattaaacaaagtagatg

SEQ ID NO: 34443 - DNA, 110 bp, synthetic construct
  source 1..110: mol_type = other DNA
ggtagaggtgctgggatgcagattgcactccaccttgaagctggcatggagggtgatggagagatgaaggatgtggaaggaacatgtggctgcaccccagtaagcaaggt

SEQ ID NO: 34444 - DNA, 110 bp, synthetic construct
  source 1..110: mol_type = other DNA
gggaacttccatacactgcatttgtggccctaaaaaaagcaaaaaaaaaataaataaataaaataagtatgtggtattcagcggatctgaaaactttctgaaagtacatg

SEQ ID NO: 34445 - DNA, 110 bp, synthetic construct; identical to SEQ ID NO: 34444
  source 1..110: mol_type = other DNA

SEQ ID NO: 34446 - DNA, 110 bp, synthetic construct
  source 1..110: mol_type = other DNA
aaataaagtctttgacaatttcatattccagcctcccatcaagactgatagtgagaggaattcctcagttcctagctaggaaagaattcaggttctaaatattaaaaatg

SEQ ID NO: 34447 - DNA, 110 bp, synthetic construct
  source 1..110: mol_type = other DNA
gtgttattccccaagcagttcctgtgcatgctccaagttttccgtagccccaaaagtggtgctgcttcccagatgttgctaggcagctgctgctgccaagtggctcccag

SEQ ID NO: 34448 - DNA, 110 bp, synthetic construct
  source 1..110: mol_type = other DNA
tgaattgcagttttttaataggtgaagctgaacctcttgatcaatcttaatatcactaaaagtaggaaaatcagatattgtgttccctaatgtggaacaataaaaagcac

SEQ ID NO: 34449 - DNA, 110 bp, synthetic construct
  source 1..110: mol_type = other DNA
taagcagtagattaaatagtcacccctgcagtaaggaaaccgaggtcctcggagacaaaatgtcctccctagagttaactcagctttgtaggactgcgttttaaagtctg

SEQ ID NO: 34450 - DNA, 110 bp, synthetic construct
  source 1..110: mol_type = other DNA
gggaaattccatatgctgcagttgcgaccctaaaaagaaaaagaaaaaaaaaagagtctaggaattcagaaagaccagtaggtttgtgttattgagacccaaggaaggta

SEQ ID NO: 34451 - DNA, 110 bp, synthetic construct
  source 1..110: mol_type = other DNA
gtctaggaattcagaaagaccagtaggtttgtgttattgagacccaaggaaggtaaaccaaattcgttatggtgagtaagggagatttcccaaaagaacttccatttcag

SEQ ID NO: 34452 - DNA, 110 bp, synthetic construct
  source 1..110: mol_type = other DNA
ctgacctacttaaggaagaatatcaatatctaggatagaatcattacctttaaatttattaccaggctcagaagagaacttctggtaggaaataggcaatataagccatc

SEQ ID NO: 34453 - DNA, 110 bp, synthetic construct
  source 1..110: mol_type = other DNA
ttattaccaggctcagaagagaacttctggtaggaaataggcaatataagccatcttctattttccttttttcatgtaccattttgctgagatgttttgaagatgcattt

SEQ ID NO: 34454 - DNA, 110 bp, synthetic construct
  source 1..110: mol_type = other DNA
aatgtaatcacagtggtccttaaataaggaagagagtcagaagagaaaagccaaagagatggcaggatgaaaaggatccaagctgacattgctggctttcaaaatgaagg

SEQ ID NO: 34455 - DNA, 110 bp, synthetic construct
  source 1..110: mol_type = other DNA
gagatggcaggatgaaaaggatccaagctgacattgctggctttcaaaatgaaggaataaggctgtgaatcaaggatgccagcaggctccacaggatgggaaaggcaaga

SEQ ID NO: 34456 - DNA, 110 bp, synthetic construct
  source 1..110: mol_type = other DNA
tcaacaatcttgattccagtctatttttgaaacttgaccgatttgaatttgagcatcaggagaccctggagaagtcaccttggtcattgctactttatgaagtctcttga

SEQ ID NO: 34457 - DNA, 110 bp, synthetic construct
  source 1..110: mol_type = other DNA
ctggtggtcagggcttgttctcagcacaccttttcccagcctgaaacaggctattttagaaacagatggcagtgggatttagtgattcacatcatagtaaattaggttaa

SEQ ID NO: 34458 - DNA, 110 bp, synthetic construct
  source 1..110: mol_type = other DNA
ttagaaacagatggcagtgggatttagtgattcacatcatagtaaattaggttaacacttaaatatcttcttaaaggttaggcttgagggaaaaagggatatatgttaac

SEQ ID NO: 34459 - DNA, 110 bp, synthetic construct
  source 1..110: mol_type = other DNA
gacaaagataccacaactaaagaaaatcacacattggtataactgataaacatagatgtgaaaatcctcaacaaaacactagcaaactgaatccaataatacattcaaag

SEQ ID NO: 34460 - DNA, 110 bp, synthetic construct; identical to SEQ ID NO: 34459
  source 1..110: mol_type = other DNA

SEQ ID NO: 34461 - DNA, 110 bp, synthetic construct
  source 1..110: mol_type = other DNA
attactttcatcaagttacactgattttactttttttttcctattcacatttactaccttattagacctccatcagccattcaaaagtccccttcttcctgaaatttatc

SEQ ID NO: 34462 - DNA, 110 bp, synthetic construct
  source 1..110: mol_type = other DNA
tactgatgggaatacaatgtaacatagctactctgctagtcttctattgctgtataacaaattactacattaaactgtgtcacttaaaacagcacacagttattacctct

SEQ ID NO: 34463 - DNA, 110 bp, synthetic construct
  source 1..110: mol_type = other DNA
ctcaaagagaccatttataaattgtgtgaccttttaagaacttggttcctcatacataaggtagagacaattattgtatctagctcccaggattgttcttaggaatatat

SEQ ID NO: 34464 - DNA, 110 bp, synthetic construct
  source 1..110: mol_type = other DNA
ataccagaaagtattttattacctagcatagcctactcagtgctctattctgtggtagatatgaaagtataattcatgtttcatactgcccaagctagttgggaggcaaa

SEQ ID NO: 34465 - DNA, 110 bp, synthetic construct
  source 1..110: mol_type = other DNA
tagatatgaaagtataattcatgtttcatactgcccaagctagttgggaggcaaaaccctgacgaaagaatacgagttataactatgtgttaaattgtgtagaacagatc

SEQ ID NO: 34466 - DNA, 110 bp, synthetic construct
  source 1..110: mol_type = other DNA
gaaagaggcttatcaggaaagagctaagaggagttgagcttgatgactgcaggattagaagaaggaagttacaggaattaatatggggccacatcaacaagcctgtatgc

SEQ ID NO: 34467 - DNA, 110 bp, synthetic construct
  source 1..110: mol_type = other DNA
ctaattcactgacctcagacattttatttatggtttacatgtcactgtgccatctgttttacccgcagaaattttaaatacacacatgaaaataaaattgacacttgtga

SEQ ID NO: 34468 - DNA, 110 bp, synthetic construct
  source 1..110: mol_type = other DNA
gaatgcattggtatgggcaatgtctcagctattttagaattctagaggatttaataatggaagttataatgaaaaggtaactaaacattaacttaaggaaaagtgtgaag

SEQ ID NO: 34469 - DNA, 110 bp, synthetic construct
  source 1..110: mol_type = other DNA
attcatcacttgtccctgtatccatgcctttgacaacctgacattgaagctcctcccatctagaagacattatgtcccaccttccaaatctgactttgccttgtggctca

SEQ ID NO: 34470 - DNA, 110 bp, synthetic construct
  source 1..110: mol_type = other DNA
ccatctagaagacattatgtcccaccttccaaatctgactttgccttgtggctcaccttagccattagaatgcaggagcaataatgctgtggacttctgagcctagggcc

SEQ ID NO: 34471 - DNA, 110 bp, synthetic construct; identical to SEQ ID NO: 34469
  source 1..110: mol_type = other DNA

SEQ ID NO: 34472 - DNA, 110 bp, synthetic construct; identical to SEQ ID NO: 34470
  source 1..110: mol_type = other DNA

SEQ ID NO: 34473 - DNA, 110 bp, synthetic construct
  source 1..110: mol_type = other DNA
agaatgtgaaccctgaaagctctggcagggtgtggaaggcgagtggagtcgcaccctgagcagagctctgggcccagaatggcagaatgcgcctagggtggccggaggtc

SEQ ID NO: 34474 - DNA, 110 bp, synthetic construct
  source 1..110: mol_type = other DNA
agaaaataaacaatgcaatgtgcaaatttaaacctaaaagctactaattttctcaaaaatacaaagttattggaattcccattgtggcttagcagtaacgcacctgacta

SEQ ID NO: 34475 - DNA, 110 bp, synthetic construct
  source 1..110: mol_type = other DNA
actcttttcatttcttacactgtggttcttatctctgtcctaaatttggcagaatcattgaggttcacaaaatagctccttctatgtgacactagtattcaaattattag

SEQ ID NO: 34476 - DNA, 110 bp, synthetic construct
  source 1..110: mol_type = other DNA
catatttagcagccctccaccacacccctcaatttaatgctcctattctttactggtgctttcactgccttcctcctgaagtcttactttacccttcccatgttttatgt

SEQ ID NO: 34477 - DNA, 110 bp, synthetic construct
  source 1..110: mol_type = other DNA
gtaggcagtgttttccaaccttatttgacaaccatacccatttttttgtgacgcgcttattaacatctctcacaatcaatgcttagcatatagcagattctcaagaaatg

SEQ ID NO: 34478 - DNA, 110 bp, synthetic construct
  source 1..110: mol_type = other DNA
taaggatacaagtccctatcggaaaagctgaggacagcaggagatccatatcccagctcaaatggagatagcacattgcctctcttacctttctgttctattctggccct

SEQ ID NO: 34479 - DNA, 110 bp, synthetic construct
  source 1..110: mol_type = other DNA
ttccctacatcaaggatcagaactcaaatatatatacagttctcttacaaatggactttaaaatctagcttaggcgttgcttgccttcatcactcacccccaaaccaaac

SEQ ID NO: 34480 - DNA, 110 bp, synthetic construct
  source 1..110: mol_type = other DNA
tgaacatctggagaggaactccaccgagagggtcaaagacacttttaggccgcctgggggtaggctgagctttgggctgagacttggggcagatgcgactttggagcttg

SEQ ID NO: 34481 - DNA, 110 bp, synthetic construct
  source 1..110: mol_type = other DNA
gtaagtgcacaggttgcacgcccaggacactggccctggttttaagacatgggtatgagaactaaaaagcttttagctgctatccctgaacaaattgatcacggttacca

SEQ ID NO: 34482 - DNA, 110 bp, synthetic construct
  source 1..110: mol_type = other DNA
cctctactcaccttcagcttgttctcctttcactctggcatgacctgctcacctagcagcaatttctaaaatcaatagtagccctttattgagtgcctctctcttctcac

SEQ ID NO: 34483 - DNA, 110 bp, synthetic construct
  source 1..110: mol_type = other DNA
gcaactgactatgcagaaactggctagcaagatgcttgcctctaacagactagtgccgttactccctgtttcccagcttggccttagagactgacagccaaaaaccatgt

SEQ ID NO: 34484 - DNA, 110 bp, synthetic construct
  source 1..110: mol_type = other DNA
caaaagtgatatatgactctaacttattaaagacttccctaactgcttaaaacactgtgttttaatgcaaacattcccaggtccactacaaaaatcatgtagacattctc

SEQ ID NO: 34485 - DNA, 110 bp, synthetic construct
  source 1..110: mol_type = other DNA
agagcattgttttcaaaactcaaagagatggtacattggggaaaaaaaattctatgttgttaccactgccattcaaacacaatagatttttaaaaggatttctccaaaag

SEQ ID NO: 34486 - DNA, 110 bp, synthetic construct
  source 1..110: mol_type = other DNA
gttgttaccactgccattcaaacacaatagatttttaaaaggatttctccaaaagctgtgtgtcacccctgcagtttgggtagtgtttaccagataagcagacaatcttc

SEQ ID NO: 34487 - DNA, 110 bp, synthetic construct
  source 1..110: mol_type = other DNA
tcaaaaacatggagtccagagtttttagaccaggcaataccaagatttaaagcgaagtcagcttcactttttctctcacataactacaaacaaatagtacttttatccca

SEQ ID NO: 34488 - DNA, 110 bp, synthetic construct
  source 1..110: mol_type = other DNA
tttagtaggtaagttgtttattaagtggaatcttcttaggttgagtgcactctcatttgtaccagcctgaactgcttctgcacagagttctctgacttcagacataacct

SEQ ID NO: 34489 - DNA, 110 bp, synthetic construct
  source 1..110: mol_type = other DNA
cttgtcactcttggctataagacccctcccccgagtctccacgaggggctgcaaaacatattaatattatcagaggaacactcaggccacaggaagtaacactctcaaat

SEQ ID NO: 34490 - DNA, 110 bp, synthetic construct
  source 1..110: mol_type = other DNA
tctctgtaacttttccttctctgttctcccactctcttgccctggataagaatgaaatgatgtaaaagtgcatagcagagacatatatagctttctggatagaaactatg

SEQ ID NO: 34491 - DNA, 110 bp, synthetic construct
  source 1..110: mol_type = other DNA
aatgatgtaaaagtgcatagcagagacatatatagctttctggatagaaactatgagggatgtcaatagagacagagaaatttggatagatgacccataaagttgtttat

SEQ ID NO: 34492 - DNA, 110 bp, synthetic construct
  source 1..110: mol_type = other DNA
ctattctgaactgaactgcatctctcctaaattcatattttgaagctttagcttccagtgtgaggttacttaaagatgtcacctgtgggtgataatgaggttcagatgaa

SEQ ID NO: 34493 - DNA, 110 bp, synthetic construct
  source 1..110: mol_type = other DNA
ctcataaaatattatagtcatagctaacgtgcatgactgctatttgtaacaggtactgtcttgagcactttatatgtattattccacttaatgcccacaaggaccataga

SEQ ID NO: 34494 - DNA, 110 bp, synthetic construct
  source 1..110: mol_type = other DNA
gggagagaaagaaagaaataaagaaaggaaggaaggagggagggagactgggtttgagttctggttcttctataattgttatgtgtgaccttgggaaagctacctaacct

SEQ ID NO: 34495 - DNA, 110 bp, synthetic construct; identical to SEQ ID NO: 34494
  source 1..110: mol_type = other DNA

SEQ ID NO: 34496 - DNA, 110 bp, synthetic construct
  source 1..110: mol_type = other DNA
aagatgaaaaaaagggctcacagaaattctcagaaactagtgtgcagttcctagctcagtgcctggaacaaaatataccctagtcatttacaatatgtttcaaaaacgtt

SEQ ID NO: 34497 - DNA, 110 bp, synthetic construct
  source 1..110: mol_type = other DNA
tcagtgcctggaacaaaatataccctagtcatttacaatatgtttcaaaaacgtttgtagctctagtgtcattcaaaatgttatgcctcatttggaaagaaaatgttcaa

SEQ ID NO: 34498 - DNA, 110 bp, synthetic construct
  source 1..110: mol_type = other DNA
tatggaggttccttaagaaactaagaatagagtcaccaaatgaccctgaaaccctactcctgggtatatatcccgagaaaactgtaatttgaaagatatatacgtttcaa

SEQ ID NO: 34499 - DNA, 110 bp, synthetic construct
  source 1..110: mol_type = other DNA
agaaactaagaatagagtcaccaaatgaccctgaaaccctactcctgggtatatatcccgagaaaactgtaatttgaaagatatatacgtttcaatgttcaatgcagcac

SEQ ID NO: 34500 - DNA, 110 bp, synthetic construct
  source 1..110: mol_type = other DNA
aatccctaaagtgaggtgtgggacatgggagatttgaacagagaacaaaatccatcagaaatcttaagcatcagtatttatacgggaggttactctggagctggcatcca

SEQ ID NO: 34501 - DNA, 110 bp, synthetic construct
  source 1..110: mol_type = other DNA
cagaaatcttaagcatcagtatttatacgggaggttactctggagctggcatccaggttgctaggtagggtgtaatgcatcaacatcagatataaaagatcaatggctac

SEQ ID NO: 34502 - DNA, 110 bp, synthetic construct
  source 1..110: mol_type = other DNA
ccataaagacattaaaatttttaagaacactgcatgtataattttacctctttttcatcagttcgttcctggtgacttaggttacagatatggtactcatatatccaaaa

SEQ ID NO: 34503 - DNA, 110 bp, synthetic construct
  source 1..110: mol_type = other DNA
taactctgtttccagagttttaaaaatatttgcttactattaactgtttctagaggcactttgcactagggccaaatttccaatgttgtattggtacagataatgtaatt

SEQ ID NO: 34504 - DNA, 110 bp, synthetic construct
  source 1..110: mol_type = other DNA
gcactttgcactagggccaaatttccaatgttgtattggtacagataatgtaatttaggtgactttagaattactcttcatattagtactggctttaaaatatcaaaatc

SEQ ID NO: 34505 - DNA, 110 bp, synthetic construct
  source 1..110: mol_type = other DNA
gaaaagagcccactgtgaagctaaagagccaagcacacatgaatgcctaagaccagaaagttttaagaaatgaagtagaaacagtctggaaaagcaaccagcagatgctc

SEQ ID NO: 34506 - DNA, 110 bp, synthetic construct
  source 1..110: mol_type = other DNA
aaagcccagagaaggtaagaaatctatttaaggtcttaccagcatgaaaattagtcaggattcaattctctccgctagctctcaaatctgtgctttaattagattggtga

SEQ ID NO: 34507 - DNA, 110 bp, synthetic construct
  source 1..110: mol_type = other DNA
gaggaggagaggaaggaggaggggagaggaggaaatcagctttgggccctttaatcattaactatggcctatggaatatccaactaaagatatccctcaggcaattttac

SEQ ID NO: 34508 - DNA, 110 bp, synthetic construct
  source 1..110: mol_type = other DNA
attggcaaatttatccctctgggcaagaattttctgaaatagttaaggcaagtaatgtcaatgcagaccataagctgttatgggtagagatagaaatcgttgcacttctc

SEQ ID NO: 34509 - DNA, 110 bp, synthetic construct
  source 1..110: mol_type = other DNA
gtgcagctcagggtaagtgtggcctcagtgttggggggtctgaagatatggcaacaggaaggtgttaactgtactcctcacagtaggttcttttaaagggagatctgact

SEQ ID NO: 34510 - DNA, 110 bp, synthetic construct
  source 1..110: mol_type = other DNA
taaagcattcagatttctatgatctaatggtgcaatatgcacatacttggaagaaaaatactgatttcctgagcaacactgttgtaattcaaaataagaatgattcccat

SEQ ID NO: 34511 - DNA, 110 bp, synthetic construct; identical to SEQ ID NO: 34510
  source 1..110: mol_type = other DNA

SEQ ID NO: 34512 - DNA, 110 bp, synthetic construct
  source 1..110: mol_type = other DNA
ccagaccacatttgcagcctgtaccacagctatggcaacctcagatccttaacctgcttccacaagggaacttcctattttttaaaaatttaatttaattatttattttt

SEQ ID NO: 34513 - DNA, 110 bp, synthetic construct
  source 1..110: mol_type = other DNA
gcttccacaagggaacttcctattttttaaaaatttaatttaattatttatttttttagggccacatctgtggcctatggaaattcacaggctaggagttgaatcagagc

SEQ ID NO: 34514 - DNA, 110 bp, synthetic construct
  source 1..110: mol_type = other DNA
gtgtgacatcagtgcttttcttatagggtttaagaaaacgaattactctttaatgtgtgaaatttggagttactgattttatttcatgaagcttactatagagaaaaatg

SEQ ID NO: 34515 - DNA, 110 bp, synthetic construct
  source 1..110: mol_type = other DNA
ggaaatatctatctctagccaagtagctacgcagaatccctgtgtaaagggatcttaatcccttattaagaaaattcagcaggtcagctgttactctaggtatttgactt

SEQ ID NO: 34516 - DNA, 110 bp, synthetic construct
  source 1..110: mol_type = other DNA
ccagaaaacaaacaaactggaatttggaaccagatggagctggctttaaactggacttctaaatgtgtggccttaggaggctccaactttcctgacctcagtttcactac

SEQ ID NO: 34517 - DNA, 110 bp, synthetic construct
  source 1..110: mol_type = other DNA
aaaatcttttcccatccaattcaattaggagccattaatgtcacatataccacagttcctggaatgttgaggccaaagaaccaaacggaaggaaacctagctgacccaga

SEQ ID NO: 34518 - DNA, 110 bp, synthetic construct
  source 1..110: mol_type = other DNA
tggacttagtgtcacacagctaataagtgttggggccgtgatttgaacccagggcatctggcctctgtctgaactcttaaccactactaaaaataaatagtgatgggctc

SEQ ID NO: 34519 - DNA, 110 bp, synthetic construct
  source 1..110: mol_type = other DNA
gataaagcctaaacgctgtgacacagcatatgcttaaacactaagctctgcttcggtctcaccttccatcccttctctttctcacaaccccccttctgccccacacacat

SEQ ID NO: 34520 - DNA, 110 bp, synthetic construct
  source 1..110: mol_type = other DNA
cacacactacctgtatctttgccagttcagctggatgctcattcaggttggtatctcattgcctctctccccccttcagctttccagtgcatctggatagaatggccttt

SEQ ID NO: 34521 - DNA, 110 bp, synthetic construct
  source 1..110: mol_type = other DNA
ctgaaaaaaaaagaaagcacttcagcaaattaactatgtctagagaggtggctgtaaatgttttcttgattggaatctggcagaaggagcaggggctttgtgggtggata

SEQ ID NO: 34522 - DNA, 110 bp, synthetic construct
  source 1..110: mol_type = other DNA
agctcatatcctgcccttaagctgattctcccagaaataaagcccacttatacgtgactggacttatctgatacactagaaatattctaatgatctggtgatgcattttc

SEQ ID NO: 34523 - DNA, 110 bp, synthetic construct
  source 1..110: mol_type = other DNA
cacccatgattgcaccccctccccactgtgactctattagttcccacagctgacatccctacagaaatggaaaatggcccttcctattactgctcaatcttaaaggagcc

SEQ ID NO: 34524 - DNA, 110 bp, synthetic construct
  source 1..110: mol_type = other DNA
ggcattcagtgtcctgcagatttttggccaagaatgggccatggattatgctggcaatgctgagtgagtcctaggagtttttgaaactgttggggaaaaaaaaaaatgcc

SEQ ID NO: 34525 - DNA, 110 bp, synthetic construct
  source 1..110: mol_type = other DNA
tacctctcttctgtctctcagctctgcccctctctctgtgtccgcttcgtttttagtttgccttcctactcagtaaataagcagtcaaataattccacacaataactttc

SEQ ID NO: 34526 - DNA, 110 bp, synthetic construct
  source 1..110: mol_type = other DNA
tgcttcctaaatccagttacctagccagcctatgtgttggcatgctggcctgcctctgaggctaggctctgctctgtgaacaggcagcagaggaacagatagcaatagaa

SEQ ID NO: 34527 - DNA, 110 bp, synthetic construct
  source 1..110: mol_type = other DNA
tggcctgcctctgaggctaggctctgctctgtgaacaggcagcagaggaacagatagcaatagaaaatcatggactagtatccatgaggatgcaggttccatctctggtc

SEQ ID NO: 34528 - DNA, 110 bp, synthetic construct
  source 1..110: mol_type = other DNA
agcccaaccaaattttctaaatttcctcctatgcatatgccaaatgagatgtaagctgatgatgatataattacagtctgagaaaaatatatggtatctaggtatattag

SEQ ID NO: 34529 - DNA, 110 bp, synthetic construct
  source 1..110: mol_type = other DNA
cccatgtctcagcttgaagccaaacaggaagaactctcttttacttgaggaagagtcaacccctttgttttattcaaacctgtagctgattagatgaggcccaccacttt

SEQ ID NO: 34530 - DNA, 110 bp, synthetic construct
  source 1..110: mol_type = other DNA
ccctagaaaagttagccaggactgtaaatgttgccagagttaacagaactatgtaaaatgtagaatgcccttattttcattacaagggcttcagtgcagctatttagata

SEQ ID NO: 34531 - DNA, 110 bp, synthetic construct
  source 1..110: mol_type = other DNA
aaatgtagaatgcccttattttcattacaagggcttcagtgcagctatttagatatgggatatgagattcagaacaatccctagcagagagcgagcatgacccactgctg

SEQ ID NO: 34532 - DNA, 110 bp, synthetic construct
  source 1..110: mol_type = other DNA
gaatgattacgacagaatgccaggcctgtgtacaggatcctagtaatgtattccacagtcagctgtgtgagtcaccccagggtgctggtgtcaggagagcggagtacttc

SEQ ID NO: 34533 - DNA, 110 bp, synthetic construct
  source 1..110: mol_type = other DNA
tatcatctgaccctgggaacattcctaaaatctttttggatcttttaaaatcactccattgtaactgaaatgtcctcactgaagatatcccctacacactaaatcatcat

SEQ ID NO: 34534 - DNA, 110 bp, synthetic construct
  source 1..110: mol_type = other DNA
actgaactacctcccaaaggcccaccttctaatactatcgcactgggtgctaggatttcaccatgtaaatttgaggggtatgcagacattcagtttagggcagctaacct

SEQ ID NO: 34535 - DNA, 110 bp, synthetic construct
  source 1..110: mol_type = other DNA
catgtgccgcaggggcagccttaaaaagaaaaagaaaaaaaaaattctgattaggctattcatttttgaaagggttctaagaaaaaccctaagaacaacatcagtatggc

SEQ ID NO: 34536 - DNA, 110 bp, synthetic construct
  source 1..110: mol_type = other DNA
atctgattctacagaaggccaagcagtaagaaaaaaataacttaggtttcatgctgacattgttgagctgctaaatcaagccacctatgaattccaccaggtaggtgagc

SEQ ID NO: 34537 - DNA, 110 bp, synthetic construct
  source 1..110: mol_type = other DNA
tgcctagggaaatagggcatccttcttatgtatagacacggtgccacctacatgagtcgtttgatttttaaaacctaaaataaatttatgccttgtattatatcattata

SEQ ID NO: 34538 - DNA, 110 bp, synthetic construct
  source 1..110: mol_type = other DNA
ttattggacaatttagacatgacaattcattttaaaatatattttgttcataacaagaggatgtttttcccccagtcctcatttggagaatgcagggaacactttatgtg

SEQ ID NO: 34539 - DNA, 110 bp, synthetic construct
  source 1..110: mol_type = other DNA
aggaaagtggaaacatgtcagcttgcttagcaggaataaagatctcctttaataactcaaagtggaaaaatctcctaccttgtcattaaatatagtgtaattcttagagg

SEQ ID NO: 34540 - DNA, 110 bp, synthetic construct
  source 1..110: mol_type = other DNA
atggaaaattcctatttaactctcaggattcagcttaaatgtcacctccaccattaagtatccccacatcctctatatctagacaagttgtccaggtcttgctcctttag

SEQ ID NO: 34541 - DNA, 110 bp, synthetic construct
  source 1..110: mol_type = other DNA
ctctgttgttttggaagtttatgtaattattattattactcttattttgtatttttagggccgcatcattggcacatgaggttcccaggctaggggtgaaattggagctg

SEQ ID NO: 34542 - DNA, 110 bp, synthetic construct; identical to SEQ ID NO: 34541
  source 1..110: mol_type = other DNA

SEQ ID NO: 34543 - DNA, 110 bp, synthetic construct
  source 1..110: mol_type = other DNA
tgactcagacacccaagcagatacaggagaaattaaagggaaggcagagagatttttaaaacctcaaaaggcatccctacattgaaagaacttcacagaatcatgaatct

SEQ ID NO: 34544 - DNA, 110 bp, synthetic construct
  source 1..110: mol_type = other DNA
catatgccatatattcgtaagacatgcctgtaatttacttccccctaaaggtggtgtttaacatagttattttttatgtttaaaaattttatccaagggagttcccatct

SEQ ID NO: 34545 - DNA, 110 bp, synthetic construct
  source 1..110: mol_type = other DNA
ccattaagctatgggtcgaaaacagacacaagtgctggtaccatactgctttgattactgcagctttttagtatagtttgacaccagggaacatgatacgtccagctttt

SEQ ID NO: 34546 - DNA, 110 bp, synthetic construct
  source 1..110: mol_type = other DNA
cataacatgaattcaactttggcctttcagagtgacagtttcgatcacattcaccttacaaacaatttctctgttgacttatttgtttatttgactgaatgctgattgtc

SEQ ID NO: 34547 - DNA, 110 bp, synthetic construct
  source 1..110: mol_type = other DNA
gtgcttcatttttttgttttgatgtagaaaaatgaaatattttgctagctaagcaattcacagtgattgcattattaccaagcctcctccagattactgattttttacta

SEQ ID NO: 34548 - DNA, 110 bp, synthetic construct
  source 1..110: mol_type = other DNA
attaattactactagcttcttcttattatacacaatttggttgactttcagggaacaaagataaatttatactcaaaataatcataccaggagttcccatcgtggctgag

SEQ ID NO: 34549 - DNA, 110 bp, synthetic construct; identical to SEQ ID NO: 34548
  source 1..110: mol_type = other DNA

SEQ ID NO: 34550 - DNA, 110 bp, synthetic construct
  source 1..110: mol_type = other DNA
gtgatggtgttccccacctgatgagtcctgctagaaagcttagacaatatttctactctactcgaaacaactgcataagaccttgtagcagcacatgctgttaacaaatc

SEQ ID NO: 34551 - DNA, 110 bp, synthetic construct
  source 1..110: mol_type = other DNA
tccattagaaatacgacttttacagctaggtcctgttttaaagaaatatttcactgggcgatgttaaagagggtgaagaaagatcagtgtgacattgacaaaatagagag

SEQ ID NO: 34552 - DNA, 110 bp, synthetic construct
  source 1..110: mol_type = other DNA
tactgtgtcatcttttttaggtttggtgaagggacgataacggtttaacgcggcgtcatgttatgtgatgagttatgtaagtttactgcaaacatttcttttaggattgc

SEQ ID NO: 34553 - DNA, 110 bp, synthetic construct
  source 1..110: mol_type = other DNA
aatattcactcatttattcccattgccttctcttcaactttcctcccatctctgtgccacccaaactccaaggcccagctcaagaccaccatcttgaaggaatcattctg

SEQ ID NO: 34554 - DNA, 110 bp, synthetic construct
  source 1..110: mol_type = other DNA
gggttcaatgtatctacattcagcatcccagaggcttttactgaaaattcattttaaacactacttatatcattctacatagttaaatatttaccattaaggagatgtga

SEQ ID NO: 34555 - DNA, 110 bp, synthetic construct
  source 1..110: mol_type = other DNA
ccttctgcctagaccctgcttaaaactgtctgaggtgaagagtctccttctgaggttacttccaactgagttccatgcctcaattagggtcaaagccatcagagaaggag

SEQ ID NO: 34556 - DNA, 110 bp, synthetic construct
  source 1..110: mol_type = other DNA
ttacttccaactgagttccatgcctcaattagggtcaaagccatcagagaaggaggagattgagcttccatttcagaggtcaacaagcctgaatgttagaaacaggaaat

SEQ ID NO: 34557 - DNA, 110 bp, synthetic construct
  source 1..110: mol_type = other DNA
tgagaaatgcaatatatacttatatgatatgagatacttggaccatcttacaaaaatggaaatttttttcctaatacatctagtgggaaaagggagggagaaaaaatgtc

SEQ ID NO: 34558 - DNA, 110 bp, synthetic construct
  source 1..110: mol_type = other DNA
atggaaatttttttcctaatacatctagtgggaaaagggagggagaaaaaatgtcaagggttaaagtgtaagctttggaatacaaggctttggcagactttatacttaac

SEQ ID NO: 34559 - DNA, 110 bp, synthetic construct
  source 1..110: mol_type = other DNA
ttattgaaaaagtattaaaaatacataggtccaatttcatctaggtaattctccaaactcctcactggccaaatgctgcagttatatgtttgttagcaagaataaaaaga

SEQ ID NO: 34560 - DNA, 110 bp, synthetic construct
  source 1..110: mol_type = other DNA
tgacagagagaagcagagactcctctagggaaatatgtctcatgagaggcaaccggcaagagtagctgcttcacccagcaatcttaactgtcaacgactttgcaatcata

SEQ ID NO: 34561 - DNA, 110 bp, synthetic construct
  source 1..110: mol_type = other DNA
tattgaaaccagcccatttgcaaaagagaaccagagcaaactggttcgttagttgtctagaaacaacagttgaatgaaaatatttttagtgaaatgggcaaagggagttc

SEQ ID NO: 34562 - DNA, 110 bp, synthetic construct
  source 1..110: mol_type = other DNA
tcgacattagctctgtaatgaccatatgtcacccctaggggtcagatatattttaaagggtgaaattataaacacttggcatccatcagctaaaaaagcagctcatatag

SEQ ID NO: 34563 - DNA, 110 bp, synthetic construct
  source 1..110: mol_type = other DNA
aagggtgaaattataaacacttggcatccatcagctaaaaaagcagctcatatagaaactacaaatatttacctacaaactctgtaacactgctgaaatgtcagcttaga

SEQ ID NO: 34564 - DNA, 110 bp, synthetic construct; identical to SEQ ID NO: 34562
  source 1..110: mol_type = other DNA

SEQ ID NO: 34565 - DNA, 110 bp, synthetic construct; identical to SEQ ID NO: 34563
  source 1..110: mol_type = other DNA

SEQ ID NO: 34566 - DNA, 110 bp, synthetic construct
  source 1..110: mol_type = other DNA
gcagtaactaaagaatttccacgtttttcaaaagacacagtcatttaaagaaagaatgctcagaaggcatttcccccacagaatggcaaactttagaatgctataaattg

SEQ ID NO: 34567 - DNA, 110 bp, synthetic construct
  source 1..110: mol_type = other DNA
ttgaaagacattggcttgtaactggtcattaatcaaaactgcctccatagcaatggaaataatcttgagatctgagctacccataatgttttgtgtcatgtcgaggggaa

SEQ ID NO: 34568 - DNA, 110 bp, synthetic construct
  source 1..110: mol_type = other DNA
attcctgtaggactgtatacaatacacaccctccaaatactaactgctgaacctgatgaactgacatacattacttggtatacagctgctcttactaaatcacttaaggt

SEQ ID NO: 34569 - DNA, 110 bp, synthetic construct
  source 1..110: mol_type = other DNA
ccactgtgtctcaggattcctttgcactttccttagcatttagccaaatgctttgtacctgatagatacacagacattgcaataattgtttttgttttttttgtttcttt

SEQ ID NO: 34570 - DNA, 110 bp, synthetic construct
  source 1..110: mol_type = other DNA
aaaaatgagagaaactgagagagttctagccagaacagtaaaagaagctgccaacctgtaggtggatgttttttatctcagagcagtctatagcattccttcaaagcctt

SEQ ID NO: 34571 - DNA, 110 bp, synthetic construct
  source 1..110: mol_type = other DNA
agagaaactgaagcactgaagggcagactgcagccccgaacaagctgcaagtataccaagagattaagagcaagacaaatcaggggcacctctgctacttgaccaaggcc

SEQ ID NO: 34572 - DNA, 110 bp, synthetic construct
  source 1..110: mol_type = other DNA
taaattattcagggtccaatgtactttgacaaatacttcagaggtatttcaaaaagacagaattacttttaaaaaaatctaaggggaaaaaggaagaggctgtgaaggca

SEQ ID NO: 34573 - DNA, 110 bp, synthetic construct
  source 1..110: mol_type = other DNA
gacagaattacttttaaaaaaatctaaggggaaaaaggaagaggctgtgaaggcatggatcaaaatatagctagatattctgtttgtatttctattaaactgtcatcagg

SEQ ID NO: 34574 - DNA, 110 bp, synthetic construct
  source 1..110: mol_type = other DNA
agggaagagttgcaaaaatgttaaacatagaggcttaagaagctcttgcttatttgggtttgccttctgccctcttcaaaccctgagacaccatgtcaaaagcacaggct

SEQ ID NO: 34575 - DNA, 110 bp, synthetic construct
  source 1..110: mol_type = other DNA
tagcactttaatttcctctactgtaaaatgatccctaagctcccttccaactgtaacattctgtgatttcatctgtacctttcaaagcctatataatctcccctttgcag

SEQ ID NO: 34576 - DNA, 110 bp, synthetic construct
  source 1..110: mol_type = other DNA
catcctctactttttccctatacgtctttctgactattaaatggaactgtggagcatttagtaactgatttctagttggctgcattttgagtttgaatttctctaaataa

SEQ ID NO: 34577 - DNA, 110 bp, synthetic construct
  source 1..110: mol_type = other DNA
tattccgcactttcctgaggtgtgactgtagtcacataccattttaggttccaaccacatcctggttgttagctagctagctaggtagctatctatctgcctgtctggcc

SEQ ID NO: 34578 - DNA, 110 bp, synthetic construct
  source 1..110: mol_type = other DNA
aacagtctgtgctacatacataattaaaacagatgttctcaatcttaattttcatagctaattgtgacagccaaagaaatgtgcttgtcttttgtagagtcacctatttt

SEQ ID NO: 34579 - DNA, 110 bp, synthetic construct
  source 1..110: mol_type = other DNA
agctaattgtgacagccaaagaaatgtgcttgtcttttgtagagtcacctattttctctcagaagtgtcctatttttctcatcgcccactatgattgctcagaaagaaag

SEQ ID NO: 34580 - DNA, 110 bp, synthetic construct
  source 1..110: mol_type = other DNA
gctgtggtgtaggttgcagacgcagcgtaatctggtgtggctgcagctgtggcataagttgtcaggtgcagctccaatttgacccctcacctgggaatttccagatgctg

SEQ ID NO: 34581 - DNA, 110 bp, synthetic construct; identical to SEQ ID NO: 34580
  source 1..110: mol_type = other DNA

SEQ ID NO: 34582 - DNA, 110 bp, synthetic construct
  source 1..110: mol_type = other DNA
accctcagagatctgtgtgtggtgacaaaggtggagcatgaaataagagaaaatgaacctgagcattaaaatttgcgtggacgtttgaaagctcagtggaatggcaatag

SEQ ID NO: 34583 - DNA, 110 bp, synthetic construct
  source 1..110: mol_type = other DNA
agaattattttaaggaattggctcacatgattatggaggcttggtgtgtccaaaatctgatgaggcagtctatcaggctgaaagctaacggaagaattgcagtttgagtc

SEQ ID NO: 34584 - DNA, 110 bp, synthetic construct
  source 1..110: mol_type = other DNA
tctgatgaggcagtctatcaggctgaaagctaacggaagaattgcagtttgagtccaaaaccagactgatggcagaattccctctggattgggggaggtctttaaggccc

SEQ ID NO: 34585 - DNA, 110 bp, synthetic construct
  source 1..110: mol_type = other DNA
ttagatggaagctgggaaggcatgcaaatgaagagttacaggcattgcccttgcagcttccctctattttgtgatcaatcaatctctgttgttttaaacccactaagttt

SEQ ID NO: 34586 - DNA, 110 bp, synthetic construct
  source 1..110: mol_type = other DNA
tttttctagccaaattgcaaggatcagaggatgaattcaaggaaagaaagaatcataagatgttgtttagcaaggtcaaatccagtttttctttctcatacaaactctat

SEQ ID NO: 34587 - DNA, 110 bp, synthetic construct
  source 1..110: mol_type = other DNA
ctccacagtgcttgtacttttttcagctaaaaatgtctctccccctttttaccctccaacagtttaactaaagaaggcaatgcaaacttttccacaccccattttgtcat

SEQ ID NO: 34588 - DNA, 110 bp, synthetic construct
  source 1..110: mol_type = other DNA
ccaacagtttaactaaagaaggcaatgcaaacttttccacaccccattttgtcatgtagcctatgtgacacagtgcatctgctctgaagccatttgggcacaacgaagtg

SEQ ID NO: 34589 - DNA, 110 bp, synthetic construct
  source 1..110: mol_type = other DNA
tgagatatcaaccaaactctcatgcatagaccagcagctccctcaggcagtaaatacatacaatgagctgcatacacataggatgggcccgtatttgtgaaaatgcactc

SEQ ID NO: 34590 - DNA, 110 bp, synthetic construct
  source 1..110: mol_type = other DNA
acatacaatgagctgcatacacataggatgggcccgtatttgtgaaaatgcactcaataagcatttttggagaaactgaaagacattactactagcaatggttaaggtct

SEQ ID NO: 34591 - DNA, 110 bp, synthetic construct
  source 1..110: mol_type = other DNA
tagactctcagatttatccactttatgctgcaacttctgctaggcatgactacaaatacagattatgtatttcagttccctcccctatagtcataaaatacataacttca

SEQ ID NO: 34592 - DNA, 110 bp, synthetic construct
  source 1..110: mol_type = other DNA
atacagattatgtatttcagttccctcccctatagtcataaaatacataacttcattgactagatacttaagcagatctccctggtcaaaccaataatattcaaaaagaa

SEQ ID NO: 34593 - DNA, 110 bp, synthetic construct
  source 1..110: mol_type = other DNA
cataaggaggacagggagggagaagatgtcacactcagacatggcagacagtgagaaggctcagaccactttggaaaacaacagcgtgaactagggttgctagtcagcat

SEQ ID NO: 34594 - DNA, 110 bp, synthetic construct
  source 1..110: mol_type = other DNA
aaggctcagaccactttggaaaacaacagcgtgaactagggttgctagtcagcattgaatgcctgattgaaaatggagagactgtgaatttgtagcaccctttatctgca

SEQ ID NO: 34595 - DNA, 110 bp, synthetic construct
  source 1..110: mol_type = other DNA
tcagctggcattttccaggcaatgtgtctcctgatctgtgcagagatgtaccaggtatccagactgcagcacatctgtgagctgttcatcattacacagctgcaaagcat

SEQ ID NO: 34596 - DNA, 110 bp, synthetic construct
  source 1..110: mol_type = other DNA
gttggattcgtttctgctgcgccaccacgggaactcctgaagtattttttaaaaagcttaaatacctatgagactgataaatatgtggctgggtatggggtttgggaggg

SEQ ID NO: 34597 - DNA, 110 bp, synthetic construct
  source 1..110: mol_type = other DNA
gcttaaatacctatgagactgataaatatgtggctgggtatggggtttgggagggacagagtaggaaagacttttggtgttgcttgacatctttaaccacacacgtgtgt

SEQ ID NO: 34598 - DNA, 110 bp, synthetic construct
  source 1..110: mol_type = other DNA
tctgcccctgcatttttccactgcctgagcttgtaaattcacttcttgcctaaattggtttgaggtgggtttctttcacctaactagagcagttaaactgaatgggcatc

SEQ ID NO: 34599 - DNA, 110 bp, synthetic construct
  source 1..110: mol_type = other DNA
gtgctagtaagcataagcatgtaaaacctctgcttggccctgcaggacatcctacagctctgacttgctcactctaagagtcctaatcttttatctagagaaagtaattt

SEQ ID NO: 34600 - DNA, 110 bp, synthetic construct
  source 1..110: mol_type = other DNA
gagtagcaattttgaaaagacaaactaaactccagggagagagtgctctaagcaaaaaagctaagacacaggaatgggtaccgtgtggccagagggcaggtctctgggta

SEQ ID NO: 34601 - DNA, 110 bp, synthetic construct
  source 1..110: mol_type = other DNA
aaaagctaagacacaggaatgggtaccgtgtggccagagggcaggtctctgggtattgagttctttgacacgtgatacataacataaaggatgagaactggacctgggga

SEQ ID NO: 34602 - DNA, 110 bp, synthetic construct
  source 1..110: mol_type = other DNA
tcacgccacactactatattgtcttgattactgtagctatattgtaaggctcagaaatcagatagtgtaactctgccaactttgttcttctaaattgttggctagtctat

SEQ ID NO: 34603 - DNA, 110 bp, synthetic construct
  source 1..110: mol_type = other DNA
catcaaaagaaagtcaaagactgaggaacaaataagctgttgcattcctaaatgataacaattttaaacaaagccctattcctaataactagatgtaaaatgtgccacat

SEQ ID NO: 34604 - DNA, 110 bp, synthetic construct
  source 1..110: mol_type = other DNA
agtggtagagacacacgggattctgatgatgagctagtcacctgaagccagtatactcctggactattcagttatgtgaaacaataaatttccttttttgactaagccag

SEQ ID NO: 34605 - DNA, 110 bp, synthetic construct
  source 1..110: mol_type = other DNA
gttcagatctgaccacactgcagccatagctcttactcacaagagagcaaaactcagcaggtccaatatcttaagtaaacatgtgttggccaggtctaggttgttttatc

SEQ ID NO: 34606 - DNA, 110 bp, synthetic construct
  source 1..110: mol_type = other DNA
aatttaagtaactctaatagttcatccattaatttaactgtaaacagcctatgtgaaaataaaagtctatggatttggagttcccatagtggctcagtggttaatgaatc

SEQ ID NO: 34607 - DNA, 110 bp, synthetic construct; identical to SEQ ID NO: 34606
  source 1..110: mol_type = other DNA

SEQ ID NO: 34608 - DNA, 110 bp, synthetic construct
  source 1..110: mol_type = other DNA
gaaaataacataggaggaaaaaaggtaggccaacccacagttcctttactctctgcccttcattattctccagttagctaaaggtagagaggatatgcctatcgagaagc

SEQ ID NO: 34609 - DNA, 110 bp, synthetic construct
  source 1..110: mol_type = other DNA
ctcactcccctatatgtcttaccccttcccccaacctctccacactgataaccgttagtttgtttaaaacatgttacagggagcttctgaccaaatgcacagattaaaca

SEQ ID NO: 34610 - DNA, 110 bp, synthetic construct
  source 1..110: mol_type = other DNA
tgaggaacaccctgcaggggaagtcatagggactacctgctttgcctgcctggtggatgtgggtacaaagctatgcaaatgagctctgccttttgagtgtcagctggcct

SEQ ID NO: 34611 - DNA, 110 bp, synthetic construct
  source 1..110: mol_type = other DNA
gatgtgggtacaaagctatgcaaatgagctctgccttttgagtgtcagctggccttcacctctgccttggttggttgcagcactgagtcactgctcagctgtcaccagct

SEQ ID NO: 34612 - DNA, 110 bp, synthetic construct
  source 1..110: mol_type = other DNA
ctgtttaaactatgtattagaacttagttgacttcactaaaaataagtaacatcaccaatactgtctaattggaggtggggggcaagcaaaaataacgtattgcttataa

SEQ ID NO: 34613 - DNA, 110 bp, synthetic construct
  source 1..110: mol_type = other DNA
ccaatactgtctaattggaggtggggggcaagcaaaaataacgtattgcttataatgggcatctgattttgttaatactctctaaaaattctctttaaaaatcatgtgtt

SEQ ID NO: 34614 - DNA, 110 bp, synthetic construct
  source 1..110: mol_type = other DNA
acagatatggtggagttactaaatggacacatctgcaatgttctcctgtgcttgaggaggttatccactatttccttctccttcccttcacctgaacaacttcagctgtt

SEQ ID NO: 34615 - DNA, 110 bp, synthetic construct
  source 1..110: mol_type = other DNA
ggaggttatccactatttccttctccttcccttcacctgaacaacttcagctgttgaaggggagcatcagaggggtttttaatctatatttattttctgtgtcagcacca

SEQ ID NO: 34616 - DNA, 110 bp, synthetic construct
  source 1..110: mol_type = other DNA
aaaactgttagactccattcaattgcccaaacagctagctatctttaaaatactgggacattccaaatctgattcagtgggagccaaagagaatcaattggctgatgctg

SEQ ID NO: 34617 - DNA, 110 bp, synthetic construct
  source 1..110: mol_type = other DNA
gccacactgacaaggttagaaggcagcacttctctttttgctctggcaccatcctaacccaagatgccccactagcttagccacaggggtttaatatttgacctccttct

SEQ ID NO: 34618 - DNA, 110 bp, synthetic construct
  source 1..110: mol_type = other DNA
cctagctgtactcttcactttatctttctctcagagagctggaatacttacttgcctagtatctcaaggcatattttcaattcatggtcagaaaatcctgcaagggggcc

SEQ ID NO: 34619 - DNA, 110 bp, synthetic construct
  source 1..110: mol_type = other DNA
atactggtgtctcttattatggctttatttctaagaataccatttcaattgctttttggcatgatagatcatagaaactttctctgaatcatacccatgatgtattttca

SEQ ID NO: 34620 - DNA, 110 bp, synthetic construct
  source 1..110: mol_type = other DNA
ggtgtttgtccaaggtgcttcataatttagaataccgagctcattgatgctccgtacataccagtggtccacttgtgaagaccctcttcggagaggaataagtacccctg

SEQ ID NO: 34621 - DNA, 110 bp, synthetic construct
  source 1..110: mol_type = other DNA
tagttctctagtcctggaaggaggagtagtgcctttggcaggcatctccactattggtggcattactgcttttgggtggaccatcaacgcttctggtatctgcagccaca

SEQ ID NO: 34622 - DNA, 110 bp, synthetic construct
  source 1..110: mol_type = other DNA
aagctctgtgacccagccacagctgaagaactagggcttatgtacaaagcactgacaaagactggccttaaaaaagcttggtgcccagcttttggtgacccagaattgag

SEQ ID NO: 34623 - DNA, 110 bp, synthetic construct
  source 1..110: mol_type = other DNA
gcagctggtgcccagtcctttagttttcagaggtggtggtagctctcatgtacccagagcacatgatgggagcagcaatatcatgctgtctctcctggagttgagtggtt

SEQ ID NO: 34624 - DNA, 110 bp, synthetic construct
  source 1..110: mol_type = other DNA
gagaaatatacagaggagtgtatttgaggtcccatatccctttacactgaaaaatggccaaatgtaagtattaatgttataatagtatcattattactaaggatggttaa

SEQ ID NO: 34625 - DNA, 110 bp, synthetic construct
  source 1..110: mol_type = other DNA
ggtaatgggaaatcattgaagccttccaagctgaggaaatatatctagtttgcgtttcacaaatgtcactctgattacatgttaggtatagatagaaggcaaatattgat

SEQ ID NO: 34626 - DNA, 110 bp, synthetic construct
  source 1..110: mol_type = other DNA
aaggcaatgtgttacccagctagccatctgtttgtaccaagttaaaccgattgcttgactttgcaggaccatattttgagagaaaatatgaacaagtatttctcaaaaaa

SEQ ID NO: 34627 - DNA, 110 bp, synthetic construct
  source 1..110: mol_type = other DNA
gaagaaagatgcaacttcaggcattagtggaaagacctcatgatctggaaaggaactttgttcaaatgagggcatgtcagtcgcagagcttttaaaaaatgaatctcaaa

SEQ ID NO: 34628 - DNA, 110 bp, synthetic construct
  source 1..110: mol_type = other DNA
ctttgttcaaatgagggcatgtcagtcgcagagcttttaaaaaatgaatctcaaagttcatacgttttagcgcactgccactggaacgacttgacatgagctggttgtct

SEQ ID NO: 34629 - DNA, 110 bp, synthetic construct
  source 1..110: mol_type = other DNA
aatcttgactttttttaataggtcagtaatgaagctgggttcctatatatgtgtcacctgctggttgatataattttctcctgtgaacagatttttgttcctctagaact

SEQ ID NO: 34630 - DNA, 110 bp, synthetic construct
  source 1..110: mol_type = other DNA
actccatgacccagttttatcatcattgaaacaaaataaaaataccagcattttaaaaaaagtaattgctgtgatagccagcttaacttgtatctctcagttaaacctaa

SEQ ID NO: 34631 - DNA, 110 bp, synthetic construct
  source 1..110: mol_type = other DNA
gctggctcctaaggagaccaaggaccacatcagggaaggacttgtgtgttaagcgaaatacagctttttaggcctctgggaggatgtctgaccagtgacgaggtatttac

SEQ ID NO: 34632 - DNA, 110 bp, synthetic construct
  source 1..110: mol_type = other DNA
aataaaagagaataggttaacaaacaggagcttcttgaggttacttggaagtcaccactatttgaattgatgtagtactccaaggcagggactgctttataatagtgaga

SEQ ID NO: 34633 - DNA, 110 bp, synthetic construct
  source 1..110: mol_type = other DNA
ttccatctctaccctttaccttcatctcacttttctgttccctgaagtgtggttctcagtgtatagcttcttaataaatatatttgtactcaataatttagtattttcac

SEQ ID NO: 34634 - DNA, 110 bp, synthetic construct
  source 1..110: mol_type = other DNA
aggatgcactcatccaacaacctttacaggtgttaacaatcacctgaatggcagctgcccaagctgttggaatggtgatcagaaataactgatggcttctataattttaa

SEQ ID NO: 34635 - DNA, 110 bp, synthetic construct
  source 1..110: mol_type = other DNA
ctcagtgtcagtgtaacctggcttctttttctgccttttcgctgttgttccacaatatcaattacatatgattattcatttcttgacaagcatcccacttcttctatctg

SEQ ID NO: 34636 - DNA, 110 bp, synthetic construct
  source 1..110: mol_type = other DNA
ttgttgctctgcaaggagatgttaatggactgttcacagaaatgtttgcaggcaggaagctgggaaatcttgagaacttcacatgtgacctttcactgtgcacactctgg

SEQ ID NO: 34637 - DNA, 110 bp, synthetic construct
  source 1..110: mol_type = other DNA
gaagctgggaaatcttgagaacttcacatgtgacctttcactgtgcacactctggacagagaggaatgtcaaaacgcaccgagagcaattttctagagaaaaatcagaag

SEQ ID NO: 34638 - DNA, 110 bp, synthetic construct; identical to SEQ ID NO: 34636
  source 1..110: mol_type = other DNA

SEQ ID NO: 34639 - DNA, 110 bp, synthetic construct; identical to SEQ ID NO: 34637
  source 1..110: mol_type = other DNA

SEQ ID NO: 34640 - DNA, 110 bp, synthetic construct
  source 1..110: mol_type = other DNA
agatcacagtttatttagaaagcattataatattttatacactttcatgttttgtctgcacaatagctctttgctctgattagagcataagttactacccctatttgaca

SEQ ID NO: 34641 - DNA, 110 bp, synthetic construct
  source 1..110: mol_type = other DNA
aatagcactaaacattaaaaatgtcattttttttggtaaataactgataagctcccccattcctccaatatagtgtttaacagagaggagagaaaaagcacattttcaac

SEQ ID NO: 34642 - DNA, 110 bp, synthetic construct
  source 1..110: mol_type = other DNA
gagactaaattttcatccatccccaagggctggaggactcagagacagacttaatggttatttaaatgaaataagaaaattcatacacctagcttcataggccaatattt

SEQ ID NO: 34643 - DNA, 110 bp, synthetic construct
  source 1..110: mol_type = other DNA
ttttttctaacaaaatatcaggtcactttggcccccatgctccttcaagtagtggtaaaaatgacttgaagattatcagcttcaaatatttatagtatggttatttggga

SEQ ID NO: 34644 - DNA, 110 bp, synthetic construct
  source 1..110: mol_type = other DNA
aactgaaaaccaaaaatgtgtaatagctaaacacacatagacaaaaaggaatctaaacataatgctaaatacaatcatcaaatcacaagagaacaaaagaagaaaggggg

SEQ ID NO: 34645 - DNA, 110 bp, synthetic construct
  source 1..110: mol_type = other DNA
gtgacatacagccctagagggtttcttgcatagtgacttttcttgtaaaatcaatcacagctttaaaaactatgcaaaataatgctattcattacaggactgttcaagtt

SEQ ID NO: 34646 - DNA, 110 bp, synthetic construct
  source 1..110: mol_type = other DNA
acaccaaaccaccacatgccacaccctcaaaaattgtttaaacaaaaaaataaacagaagcagtaacaggagagatgtgacatagctaatgggaatggttttcattaaga

SEQ ID NO: 34647 - DNA, 110 bp, synthetic construct
  source 1..110: mol_type = other DNA
ttctgttgatcctgttcatctcttcccaaatcatgttcagggacatgatgttggtaatttaaaatcagctttggtgggaaaaacttcagagcccttcctggacaaggggg

SEQ ID NO: 34648 - DNA, 110 bp, synthetic construct
  source 1..110: mol_type = other DNA
agtattttaggagtgataaattaggtgtcccgtggaaacacagaaggggcaggagagtcatcttaaaagcagaataaagtggcatttagctttttcttttcatcttcaca

SEQ ID NO: 34649 - DNA, 110 bp, synthetic construct
  source 1..110: mol_type = other DNA
agtgtgttttaatgaccacgcccagagagagctgctcggatatcataatacccgtctgactcctatctctacgtggtacatcgataacttccatgcacagttctttctgc

SEQ ID NO: 34650 - DNA, 110 bp, synthetic construct
  source 1..110: mol_type = other DNA
tgttacaatgaacaacaatgtatctgaaggaagaaacactccttcctttaaaacattactgtattttggttatcctgattgtcattgcaacttttggaagccatccaact

SEQ ID NO: 34651 - DNA, 110 bp, synthetic construct
  source 1..110: mol_type = other DNA
aggatgagaatgagcaactgcaggacacacccacagtgtctctatgggcctaatggcaggagctgagagacatgtggataattgaccctagttctagttccagagacttc

SEQ ID NO: 34652 - DNA, 110 bp, synthetic construct
  source 1..110: mol_type = other DNA
gcaggagctgagagacatgtggataattgaccctagttctagttccagagacttcatcggtttataaaaatacctaggccaggatgcactatcctggggctgtgggtgat

SEQ ID NO: 34653 - DNA, 110 bp, synthetic construct
  source 1..110: mol_type = other DNA
gtgcaggtgctcttgttaagggctagggatcatggtgcaatgatgcagaacagtggaagagctcaacagagggtcaggcatttctcatgatgatggtgccagaggcatga

SEQ ID NO: 34654 - DNA, 110 bp, synthetic construct
  source 1..110: mol_type = other DNA
atttctttcaaagtaaaagtattatttttcctttaaatccccgcacatctttacctgtacctctgctatgaaacacttcacattgttctgtactattatgtacactgttg

SEQ ID NO: 34655 - DNA, 110 bp, synthetic construct
  source 1..110: mol_type = other DNA
tgccatcaataaatgtttcagatctattcaggagtgatggctctgttgatacaaaaggtaaaacgtattccagaacctaagtaaaagtatatatgtttctaaaatttttc

SEQ ID NO: 34656 - DNA, 110 bp, synthetic construct
  source 1..110: mol_type = other DNA
tcctttacaacaaaaagacccttctcatttaaaatttcagctatttcttagaatttttggttggctctcgctagtttgactagagtataacataatcttcttcaatgtca

SEQ ID NO: 34657 - DNA, 110 bp, synthetic construct; identical to SEQ ID NO: 34656
  source 1..110: mol_type = other DNA

SEQ ID NO: 34658 - DNA, 110 bp, synthetic construct
  source 1..110: mol_type = other DNA
tggcttttgttttgatccactaaattggagaatttgttaggtaacagagttgacgaatatctcttgagctttgtaacaaagagggcttgagacaaagctgaggtaagtgt

SEQ ID NO: 34659 - DNA, 110 bp, synthetic construct
  source 1..110: mol_type = other DNA
atacctggtctggttaactaatcacagcttagtttcaatcattctagctgctaccacaaataaaatatcatttttcattgacttagaatttttgaaaaaaatgacccctc

SEQ ID NO: 34660 - DNA, 110 bp, synthetic construct
  source 1..110: mol_type = other DNA
ctccacaggactggcaaagcatcctgaaaaacagagcggccagattcagagcaaaggattcaagaacacagaagcttcagtgtcttgtatgacctagtctttaaagtcac

SEQ ID NO: 34661 - DNA, 110 bp, synthetic construct
  source 1..110: mol_type = other DNA
ctgaagtttaggatttattcttgcttaaattccagtgattatagtatgctgcatgtagctagaatcttcccatgcttataattttcagaatatattttccatctatttcc

SEQ ID NO: 34662 - DNA, 110 bp, synthetic construct
  source 1..110: mol_type = other DNA
agaaatacagtgtgcagaccatggctggttggctgttgtctgaaggaagccctcattctgctcagctttttcaatttaggactaagggatttccacatcatcaactaagt

SEQ ID NO: 34663 - DNA, 110 bp, synthetic construct
  source 1..110: mol_type = other DNA
aacatatatgatcagtggtttggcctacaagctggatcctagtaactagaaattcttcataccctaccctgtccttggaatgtgcattctgctttccttgcctgctccca

SEQ ID NO: 34664 - DNA, 110 bp, synthetic construct
  source 1..110: mol_type = other DNA
cacttaaacatgaggagctggcagtccactcattttgaagtttgttctgccgaatcttccttcttcattccccatgttctctggcatttgaatgaaacatggtgggtaaa

SEQ ID NO: 34665 - DNA, 110 bp, synthetic construct
  source 1..110: mol_type = other DNA
tatcattattcttgcctccttaaatgagaggttctttagcataaaaccaggtgatatttagatcagatggccctccttttagatatattattctttccaaaattatgtta

SEQ ID NO: 34666 - DNA, 110 bp, synthetic construct
  source 1..110: mol_type = other DNA
gttgctgtaaactatggtgtaatctgcagaagtggcttggatctggcattgtcgtggctggagcttaggccaatagctgcagttccaattcaacccatagcccaggaact

SEQ ID NO: 34667 - DNA, 110 bp, synthetic construct
  source 1..110: mol_type = other DNA
aacatcttttccttcatgaacccatgagattcctgtattcaggtgcagtaattcggcctcctgctcagctcaagagctgtggtaatgctgggatttttacctttcattgc

SEQ ID NO: 34668 - DNA, 110 bp, synthetic construct
  source 1..110: mol_type = other DNA
aatgttggcattttctatgactagctttcctcatggttgcaaaatggctgctatagttttaggagccacatgcagacgtctgggcaaagaagatggaccataacaccact

SEQ ID NO: 34669 - DNA, 110 bp, synthetic construct
  source 1..110: mol_type = other DNA
caacaaaaatcctaggtgcccagcacaagttgttattgccctgttgtgaagcaataacatccaacatagctgctgccgcttggtacaggaaagtggtgaaacagtccctt

SEQ ID NO: 34670 - DNA, 110 bp, synthetic construct
  source 1..110: mol_type = other DNA
aacatccaacatagctgctgccgcttggtacaggaaagtggtgaaacagtcccttgagaatccatgtccaagacagtcaaacttcctctaattaatatcaatcaatcatc

SEQ ID NO: 34671 - DNA, 110 bp, synthetic construct
  source 1..110: mol_type = other DNA
atctagaacttcccctgacctctgtgtgtgtaagcaacattatctatacaatcttatttggaattttggccccaatgtctgtagcttgcctcttgccccatgagcacata

SEQ ID NO: 34672 - DNA, 110 bp, synthetic construct
  source 1..110: mol_type = other DNA
gttaataatagtaaaggtgagacaaaaatggagtgatgaggaaacttgggaggtcaatgtgcttcgtcaaaactcccaaacttactttcttttctaaattgtctctgatc

SEQ ID NO: 34673 - DNA, 110 bp, synthetic construct
  source 1..110: mol_type = other DNA
tgggtgaaggtgagttgttgccttagtcaggaacagcttagatcaggctgtggaatggacctagagagaggagggtagttccctgacaccagccagggagacatagggac

SEQ ID NO: 34674 - DNA, 110 bp, synthetic construct
  source 1..110: mol_type = other DNA
ggctccagggctcacctgaactggtaggaggtaggaggttggggaaatctacccctgggtcctttcctacctttctgctgctggagctgcacagaaaagcaatagagtaa

SEQ ID NO: 34675 - DNA, 110 bp, synthetic construct
  source 1..110: mol_type = other DNA
tcctcagaagatactctagatacttaaaggtttttagtctcaatgagagaaaaccaagaattggaaaacatgttggctaaagacaggctggcagctctgtttcccatgag

SEQ ID NO: 34676 - DNA, 110 bp, synthetic construct
  source 1..110: mol_type = other DNA
aagaattggaaaacatgttggctaaagacaggctggcagctctgtttcccatgaggtcctatttgactcatacatctgtgaatgacttctcagctataagccatttatat

SEQ ID NO: 34677 - DNA, 110 bp, synthetic construct
  source 1..110: mol_type = other DNA
gtttgatgaactctcgcgtccgccgcgcgcaatctcagagaaggaaaagctggttcagcccgaaaagggtgcgaggaacctagccgggctagcccgatcgctgccgcgcc

SEQ ID NO: 34678 - DNA, 110 bp, synthetic construct
  source 1..110: mol_type = other DNA
agaatgtgttagctctttctctccttcctataaccagcagttctctgtggtgggacccagactggagcctggtgatgtgggggccaggaagatgctgtctctcagcatca

SEQ ID NO: 34679 - DNA, 110 bp, synthetic construct
  source 1..110: mol_type = other DNA
ttgggtagggttttgagagtacagattatttttgcttcactcaccttggtagggattactggatgctagaagccggatgctgggatgatctgaaggctaattcattcaca

SEQ ID NO: 34680 - DNA, 110 bp, synthetic construct
  source 1..110: mol_type = other DNA
ttactggatgctagaagccggatgctgggatgatctgaaggctaattcattcacatatctcctggctgatggtggctgtaagtcattacctaagatagtgctattgggca

SEQ ID NO: 34681 - DNA, 110 bp, synthetic construct
  source 1..110: mol_type = other DNA
tccttgccttgcccctgtccttgatctgtggcttgggctttcaatggatttgtaatggagggagctcttaccttatagttgttcaccttattttatttgctggattccat

SEQ ID NO: 34682 - DNA, 110 bp, synthetic construct
  source 1..110: mol_type = other DNA
acagcccccatttgagaaccattaacatataggaatcaaaggagacctatagcgcttcttttcagtccagctttaggaacacattatacttcggttttttgttctttgtc

SEQ ID NO: 34683 - DNA, 110 bp, synthetic construct
  source 1..110: mol_type = other DNA
tgtaaccttcacaataccagcagcaaacgtttgtgaaatgtgtgcacagctgcacacacctccacttcacctttatcctatatatcctactccccctttgcctccttgga

SEQ ID NO: 34684 - DNA, 110 bp, synthetic construct; identical to SEQ ID NO: 34683
  source 1..110: mol_type = other DNA

SEQ ID NO: 34685 - DNA, 110 bp, synthetic construct
  source 1..110: mol_type = other DNA
gtattttacacactgagcagtcactgaagaagaaccattgtgtttgcctgagtttttcagaacattgccaattattcagaaactgaactagctaacaatatggatgcatt

SEQ ID NO: 34686 - DNA, 110 bp, synthetic construct
  source 1..110: mol_type = other DNA
ttcagaacattgccaattattcagaaactgaactagctaacaatatggatgcatttatagtgatatctccattgttttaaaaagcagattctgtcatctttatagctagg

SEQ ID NO: 34687 - DNA, 110 bp, synthetic construct
  source 1..110: mol_type = other DNA
aatatcagagtcattacctgtcttcatccttgccctttcgggatgatcattgcagggtaccctaagcaggaagagcagctggaaattcttcaggtctgtaaatcaatttt

SEQ ID NO: 34688 - DNA, 110 bp, synthetic construct
  source 1..110: mol_type = other DNA
ggaagtcctgcctaatatgactgcagtgtaaaatatttggaaattatgtaaaatcaatatgaacatctgtattagagaagctattattctcattgctgccatccaattga

SEQ ID NO: 34689 - DNA, 110 bp, synthetic construct; identical to SEQ ID NO: 34688
  source 1..110: mol_type = other DNA

SEQ ID NO: 34690 - DNA, 110 bp, synthetic construct; identical to SEQ ID NO: 34688
  source 1..110: mol_type = other DNA

SEQ ID NO: 34691 - DNA, 110 bp, synthetic construct; identical to SEQ ID NO: 34688
  source 1..110: mol_type = other DNA

SEQ ID NO: 34692 - DNA, 110 bp, synthetic construct
  source 1..110: mol_type = other DNA
acctcattaatgctatccagaaaattgctgactgacaattaagaaaatatttccgggggaggcttaagcttcaattaggttttttttatttatttatgtacttatttatc

SEQ ID NO: 34693 - DNA, 110 bp, synthetic construct
  source 1..110: mol_type = other DNA
tccccatattttatagcagaaaaataactccttgaataaacagatacgtgtatatgtaggtaggtaattaagaagaaggaaacaaaggaagaaaaaaactcatgccatct

SEQ ID NO: 34694 - DNA, 110 bp, synthetic construct; identical to SEQ ID NO: 34693
  source 1..110: mol_type = other DNA

SEQ ID NO: 34695 - DNA, 110 bp, synthetic construct
  source 1..110: mol_type = other DNA
ggccaacattaacttttctttttaaaacattttcaaattttgacattttatttagtgatcattgtagactcacatgtagttgtaggaaccgttacacaaagatcccacat

SEQ ID NO: 34696 - DNA, 110 bp, synthetic construct
  source 1..110: mol_type = other DNA
agtctgcaaaattatattgccaatctctagttctgtttggcctgaaattaagtgaaaatagaagaattagcaaagattatacattaagttttgtaggttgtgtactctac

SEQ ID NO: 34697 - DNA, 110 bp, synthetic construct
  source 1..110: mol_type = other DNA
tctgagagattgagagcccaggtatttgtagatgacaatgctagtgatggactgtaagacagtaaaagccaaaaatgtcatgaagcttgtgtgttttaggacaaacagga

SEQ ID NO: 34698 - DNA, 110 bp, synthetic construct
  source 1..110: mol_type = other DNA
aagacagtaaaagccaaaaatgtcatgaagcttgtgtgttttaggacaaacaggagagaggtatggaattatcaatgagcaaccaaaaggaaaaataatccagctttaag

SEQ ID NO: 34699 - DNA, 110 bp, synthetic construct
  source 1..110: mol_type = other DNA
cttcataacccaaaggcttatgccaatatatcttatttatggagctggagagtaggactgggaaatctaaaaacaattttgaattgaaatctgtaaatgcacactttttc

SEQ ID NO: 34700 - DNA, 110 bp, synthetic construct
  source 1..110: mol_type = other DNA
ctagtggtttttatgtgcagtctttaggattgtctatatacaatatcatgttatctgcatattatgacaattttgcctgtctttaaaactgaatacctgaaaaatggcta

SEQ ID NO: 34701 - DNA, 110 bp, synthetic construct
  source 1..110: mol_type = other DNA
accatggttttggtggtgcacccaggcaacaaagacctactgccaacagaacccggtgagtagcttgcatatacacctcatctttgatagaatatggagaatattctcag

SEQ ID NO: 34702 - DNA, 110 bp, synthetic construct
  source 1..110: mol_type = other DNA
tcctaactctgaacactcttcagacccagtgatagaagagatttccattattgtaatctgtttacctgttttacccactgagcttctctgaaatattttatttgaacaaa

SEQ ID NO: 34703 - DNA, 110 bp, synthetic construct
  source 1..110: mol_type = other DNA
gtagcacaggagctaagaggatccagaggaaattacagtaagatacacagacaaagccttatgaacttaatgacatgttcaatttggcctgacatattgggataaagaga

SEQ ID NO: 34704 - DNA, 110 bp, synthetic construct
  source 1..110: mol_type = other DNA
gccttatgaacttaatgacatgttcaatttggcctgacatattgggataaagagaagagacagaactaaaatagatatgagggattatgaactaggaagaaaaatagact

SEQ ID NO: 34705 - DNA, 110 bp, synthetic construct; identical to SEQ ID NO: 34703
  source 1..110: mol_type = other DNA

SEQ ID NO: 34706 - DNA, 110 bp, synthetic construct; identical to SEQ ID NO: 34704
  source 1..110: mol_type = other DNA

SEQ ID NO: 34707 - DNA, 110 bp, synthetic construct
  source 1..110: mol_type = other DNA
gcaagctctgttatgattttctgtgatttcctcctagtatagaagctaaaaacaagctctaacccttttaatttatatactattgtttacagcagtctttgagttagaga

SEQ ID NO: 34708 - DNA, 110 bp, synthetic construct
  source 1..110: mol_type = other DNA
aacattcacaattaaactttgtgtttagtgaaactcaggtctctgtgggcagggcacaggctgacaggtcctcaccccagctcctattcctactgtttctccagtatctg

SEQ ID NO: 34709 - DNA, 110 bp, synthetic construct
  source 1..110: mol_type = other DNA
aagttagttggagagtaacatgtgccaactatacaagaggccattcttggataaccttataatttctgcattatggcctcaccgtcctcttatattgacagtttctgatg

SEQ ID NO: 34710 - DNA, 110 bp, synthetic construct
  source 1..110: mol_type = other DNA
cttataatttctgcattatggcctcaccgtcctcttatattgacagtttctgatggcagatataaactgaaaatacttttgaaggcaatttatcctagttctgcatacta

SEQ ID NO: 34711 - DNA, 110 bp, synthetic construct
  source 1..110: mol_type = other DNA
ctctgaagaaatttctattccggtatacacctgtcatttcaaattttcccatggaaagctattcttttaaattcctctctgagcttaaggcaggaatatcattccattcc

SEQ ID NO: 34712 - DNA, 110 bp, synthetic construct
  source 1..110: mol_type = other DNA
aagctattcttttaaattcctctctgagcttaaggcaggaatatcattccattccaagactaacttttccgttgcatgggaagaagcactgttacacctgtaacatttac

SEQ ID NO: 34713 - DNA, 110 bp, synthetic construct
  source 1..110: mol_type = other DNA
aatgtgggtaggcttgccaaatttaccaaataaaatagaggacatctggttaaatttgactttatttcagctttattgaggtatccctgacaaaaattgtatgtgtttag

SEQ ID NO: 34714 - DNA, 110 bp, synthetic construct
  source 1..110: mol_type = other DNA
agtgaagagaaggtatacttagcaatagtacatatagtacagctaactagttttgttgatggctctcaggtctgcattagtgtctgagcaaagactatccagccgtgtca

SEQ ID NO: 34715 - DNA, 110 bp, synthetic construct
  source 1..110: mol_type = other DNA
agatggcaaggtttgatctggatctggaaagacagtttgttgggtctgcagagggggaagagtattccagctgctggctgtttgagcactgaagggccatctgggcacgt

SEQ ID NO: 34716 - DNA, 110 bp, synthetic construct
  source 1..110: mol_type = other DNA
agtttttttaagagttctaggtagtcaaaccctcctatgaatatgactcagcttgggatcttctgaaactgtggattcagatttggtgggtctgagaacttgtatctcca

SEQ ID NO: 34717 - DNA, 110 bp, synthetic construct
  source 1..110: mol_type = other DNA
tcaaatcctaccagcattaactctgaaacaaatagcttctctttctaaagagcaccagtacattgactagttggcctgatctggttcatgcaccaacctcagaaccagtc

SEQ ID NO: 34718 - DNA, 110 bp, synthetic construct
  source 1..110: mol_type = other DNA
taaaccaatataaaggaattaaataggtttttaggaagtctattcattggtatgtggataccatgattgcaaagtcattaatgagatgtctaggcacaattggtgtttaa

SEQ ID NO: 34719 - DNA, 110 bp, synthetic construct; identical to SEQ ID NO: 34718
  source 1..110: mol_type = other DNA

SEQ ID NO: 34720 - DNA, 110 bp, synthetic construct
  source 1..110: mol_type = other DNA
aggagccctgagctgtcatgtcagaagtctactactctaagactgccatgctggagaggccatggagaagtgattgggtcaacagttccctttcaggcatccttgtcaag

SEQ ID NO: 34721 - DNA, 110 bp, synthetic construct
  source 1..110: mol_type = other DNA
gaaagtttttatttggttttaaacctggatgttaccataaagttgtccttctatgaatttgccaaagtaacctctacttatcagttatggtgaatgtatttttgaggaga

SEQ ID NO: 34722 - DNA, 110 bp, synthetic construct; identical to SEQ ID NO: 34721
  source 1..110: mol_type = other DNA

SEQ ID NO: 34723 - DNA, 110 bp, synthetic construct
  source 1..110: mol_type = other DNA
aagagtttgggcataggatttaggtagcatttgttcacattttgtctctgtcatttaatagctgtttgaccaatggcatattagttagcatctccaagccttagtttctc

SEQ ID NO: 34724 - DNA, 110 bp, synthetic construct
  source 1..110: mol_type = other DNA
ccatgcttgcttccagctcaaggcatttcatgctttcccagctctgtgcctttacttatgccattttattttttagaaatgccattttacccattctttgaagctaaact

SEQ ID NO: 34725 - DNA, 110 bp, synthetic construct
  source 1..110: mol_type = other DNA
aaaacagccacttgtttataaacagatttgattatgtggatgagcagttctctgttcattcctttaccaagacagagctaatcaacatattcttacataaactgagacat

SEQ ID NO: 34726 - DNA, 110 bp, synthetic construct
  source 1..110: mol_type = other DNA
ctagatttgaaccataaaggaaatattactaggaaactctaggcccacctgtgctttccttggtgactatgacaagactggtccctgtcactatggaacttatcctgttt

SEQ ID NO: 34727 - DNA, 110 bp, synthetic construct
  source 1..110: mol_type = other DNA
ttccttggtgactatgacaagactggtccctgtcactatggaacttatcctgtttttaactagaaactacacagaatattaaaaaaaattatttacaactttcaagatta

SEQ ID NO: 34728 - DNA, 110 bp, synthetic construct
  source 1..110: mol_type = other DNA
tatgagaaaccaggaaagtctggtattttggtttttgggtttttttagctgtacccccagcacatgtaagttcctcatcaacggaatgaacctgggccaaagctatgacc

SEQ ID NO: 34729 - DNA, 110 bp, synthetic construct
  source 1..110: mol_type = other DNA
tagctgtacccccagcacatgtaagttcctcatcaacggaatgaacctgggccaaagctatgacctatgccacagctgtggcagagctggatccttaacccactgcgctg

SEQ ID NO: 34730 - DNA, 110 bp, synthetic construct
  source 1..110: mol_type = other DNA
attccttcagtatcggcaaagtgcagtgattattatggaaagcttattctgtgctgttagtcccctccacccacttcctcatcatcttcaccttcagggattctgtatct

SEQ ID NO: 34731 - DNA, 110 bp, synthetic construct
  source 1..110: mol_type = other DNA
gtagttgagagaatgctttatctaccacagatacaattgctttgttgatgcggagtgttcttccaataaattgttgggcagttctgttcatgaactctcacaattttcca

SEQ ID NO: 34732 - DNA, 110 bp, synthetic construct
  source 1..110: mol_type = other DNA
ttatatagtaatttaatctcaaatacaatttatgaggttgtctctagtgcagttccctcattttatagctgcataaacacaggctcaaagagcacaactattttcccaag

SEQ ID NO: 34733 - DNA, 110 bp, synthetic construct
  source 1..110: mol_type = other DNA
gttctcaggggtggtagcagctctcatgtacccagagtgtgtgatgggaccagcagcatcacactacctctcctggaccaggtggctgctagagatggggtccatgaagg

SEQ ID NO: 34734 - DNA, 110 bp, synthetic construct
  source 1..110: mol_type = other DNA
ggcctggcgcttctcttcagtggtgcaggcacaccgttggttggggccaaatttttccaaaataacagcctcaaggggagctcatactgataaatattccttgggacagc

SEQ ID NO: 34735 - DNA, 110 bp, synthetic construct
  source 1..110: mol_type = other DNA
aaagaataaaaaaattttaaagagctatgtgattctaccattctgtctccagctgtacaagtgctgcatgtctgaaagatgccactaaatgctggttgagaactctagca

SEQ ID NO: 34736 - DNA, 110 bp, synthetic construct
  source 1..110: mol_type = other DNA
tacaagtgctgcatgtctgaaagatgccactaaatgctggttgagaactctagcaaaagaatgtaatttttaagtaactcatggtgcaatgtaacagaaaatgcactctg

SEQ ID NO: 34737 - DNA, 110 bp, synthetic construct
  source 1..110: mol_type = other DNA
ctttctacaagctgaagacccagtaaagctggtggtatagtttataggcctaagagctagaaagctgatggaatagattctaatcacagtctgaaggcctaagaaccaag

SEQ ID NO: 34738 - DNA, 110 bp, synthetic construct
  source 1..110: mol_type = other DNA
gctagaaagctgatggaatagattctaatcacagtctgaaggcctaagaaccaaggagcaccaagggcaagagaagatcaatgtcctagtttacccagcaaagtagagta

SEQ ID NO: 34739 - DNA, 110 bp, synthetic construct
  source 1..110: mol_type = other DNA
ctaagaagagataggcagtgaggaaagatgtgaatgaaagctgaagaaaattctgaagagaaaggccttactgatatactgtaatattgacaaaagtaatcaggatcaga

SEQ ID NO: 34740 - DNA, 110 bp, synthetic construct
  source 1..110: mol_type = other DNA
cagtgggttaaggatcctgcattgcctcgagattcagcataggttacagatgcaggtcagatgcagctttgctatgtctgtggcataggccagcagctgcagctccaatt

SEQ ID NO: 34741 - DNA, 110 bp, synthetic construct; identical to SEQ ID NO: 34740
  source 1..110: mol_type = other DNA

SEQ ID NO: 34742 - DNA, 110 bp, synthetic construct
  source 1..110: mol_type = other DNA
tccttcctcaaaccctgaagacatgtgttgaagtttagatgtctcacatttcccactagtcagaacatcttgcacaggttttgacaggagttctgaatcccttcctacag

SEQ ID NO: 34743 - DNA, 110 bp, synthetic construct
  source 1..110: mol_type = other DNA
ggagctgctggcctatgccacagcatggcaatgccaccatatctaagccatgcctgccacctatgccttagctcatggcaaacctcaaatactcaactcactgagcaagg

SEQ ID NO: 34744 - DNA, 110 bp, synthetic construct
  source 1..110: mol_type = other DNA
tgcagttaaagacaactacttccagaatggggagggtttccgctgtctccactattacagaaattgaatcctttgcagccacagctggtttcaggagcatatgttaagaa

SEQ ID NO: 34745 - DNA, 110 bp, synthetic construct
  source 1..110: mol_type = other DNA
tgtgctatatttcagtaagtctaacatcctgatgaaaataaaatccgctatgattttttatttataaactgagataccatctgacaactggacagcaatgtgcaaataaa

SEQ ID NO: 34746 - DNA, 110 bp, synthetic construct
  source 1..110: mol_type = other DNA
cagttcccagttggatttgttaaccactgagctacgatggaaactctggagtatagtttatttaaaatgtgtttgttacaggggttcctgtcctgtctcagtggaaatta

SEQ ID NO: 34747 - DNA, 110 bp, synthetic construct
  source 1..110: mol_type = other DNA
ggaaataaccaaatacatttaaaataatggtaagtatatacaattcacaagcttgtaaattacacatataaatatacatccacacataccccttgtgtgcgtacacacat

SEQ ID NO: 34748 - DNA, 110 bp, synthetic construct
  source 1..110: mol_type = other DNA
ctctttatatacatcaggtatgcaccttccaagctatcttttccagtattagaactaaattacacatgtaaactttgtagttggccacaattttctcatttatgcagaaa

SEQ ID NO: 34749 - DNA, 110 bp, synthetic construct
  source 1..110: mol_type = other DNA
tcatgaaaatagcaaatgaacaactacacacagaacaatgttctatgagaaaaatccagaaaatagctgagtggtttctagacgttatacaaatgggaaaatacatgtac

SEQ ID NO: 34750 - DNA, 110 bp, synthetic construct
  source 1..110: mol_type = other DNA
ccagaaaatagctgagtggtttctagacgttatacaaatgggaaaatacatgtacaaaatggcaggctctaggggctgactgtaacactacccagagaccagggatgctc

SEQ ID NO: 34751 - DNA, 110 bp, synthetic construct
  source 1..110: mol_type = other DNA
tgaggtctgtagaaactatccaagaagctcctgtactccagtggagtttgaaatcagcaacaaaaagggtaggaaaagtggcacagtaccatatgattaggagggaaccc

SEQ ID NO: 34752 - DNA, 110 bp, synthetic construct
  source 1..110: mol_type = other DNA
gaaaatgactctgaatgtagaggaccacatgatggaatataaagctggataaacaagaatttagtgatggtggtgcccttcctccttcttaaatatttaaaatcctggta

SEQ ID NO: 34753 - DNA, 110 bp, synthetic construct
  source 1..110: mol_type = other DNA
tatatacataactgcagttataaactacagcaaggatcagcaaacaacttctacaaagagccataaagtaaatatttctggtttgtgaagcttaaaatttctcacctatt

SEQ ID NO: 34754 - DNA, 110 bp, synthetic construct
  source 1..110: mol_type = other DNA
gtgtaatgaataaggatacactaaaaaggatgtttgccctaaaacatgaagtagaaagctcataaaaactgtctcaataacagcttcctctaaaatgtataggaaaagaa

SEQ ID NO: 34755 - DNA, 110 bp, synthetic construct
  source 1..110: mol_type = other DNA
aagctcataaaaactgtctcaataacagcttcctctaaaatgtataggaaaagaatagtgtatggtaggataatatgtgaagtactagcagataccaattgtgttaattt

SEQ ID NO: 34756 - DNA, 110 bp, synthetic construct; identical to SEQ ID NO: 34754
  source 1..110: mol_type = other DNA

SEQ ID NO: 34757 - DNA, 110 bp, synthetic construct; identical to SEQ ID NO: 34755
  source 1..110: mol_type = other DNA

SEQ ID NO: 34758 - DNA, 110 bp, synthetic construct
  source 1..110: mol_type = other DNA
ataggctgttgattaatcaaattgaaatagcaccagcttaaactgattttgccgccttaaacagattgttgattaaacaaacctggagtaattttacagagacagcactg

SEQ ID NO: 34759 - DNA, 110 bp, synthetic construct
  source 1..110: mol_type = other DNA
agccactttaataaaaatcagtaactgccataaattattttcacatattatgaagtagctgttttgttttccctaacacaatatagagatgcatgagaaattagggaatc

SEQ ID NO: 34760 - DNA, 110 bp, synthetic construct
  source 1..110: mol_type = other DNA
catgtcgagatctggcacatcaccagcaggccaacacaaaatgtaatagatccccaatttacaaagctaaaatggagcttaaaagacaaaagtagtaaaatcatctatat

SEQ ID NO: 34761 - DNA, 110 bp, synthetic construct
  source 1..110: mol_type = other DNA
agatttatcaattttatactttaaatggcatctgcagtggtttcaatgtcagtttggttttcaaatcctttgctgtgctttaatggattgtttcattaattcatttgggg

SEQ ID NO: 34762 - DNA, 110 bp, synthetic construct
  source 1..110: mol_type = other DNA
tagaccttgaggatgcatgttcaatccctggccttgcccagggagttggggatccagtgttgctatgacctgtggtgtaattcgcagaggcagctcagataccacgttgc

SEQ ID NO: 34763 - DNA, 110 bp, synthetic construct
  source 1..110: mol_type = other DNA
agtgttgctatgacctgtggtgtaattcgcagaggcagctcagataccacgttgctgtgtctgtggcataggcctgaagctgtacctgattccacccctagcctgggaac

SEQ ID NO: 34764 - DNA, 110 bp, synthetic construct
  source 1..110: mol_type = other DNA
atgttatcctttaaggagttgtctctatgctgggagaatgttgttcttcatagctgaataggtatttctgccaatggagaggtttggttgagccataatgcagatacaca

SEQ ID NO: 34765 - DNA, 110 bp, synthetic construct
  source 1..110: mol_type = other DNA
atccttagaagtatggttttggtgaaacacactgacacatgcacagagaaatgcattttttggggatatgtatctaggaatagaattacatttccttggcaactactgaa

SEQ ID NO: 34766 - DNA, 110 bp, synthetic construct
  source 1..110: mol_type = other DNA
tataaagcatgtcaaaatattaacaaggtaatatggaaacacatacagagctactgtggtgctcataatcttattataaaacagtagaaaagggatctcttatttacaac

SEQ ID NO: 34767 - DNA, 110 bp, synthetic construct
  source 1..110: mol_type = other DNA
gattaaacactgcacatattttacattagagggataaagtctatttataaaactaggccttcagaaaatacatttctttaagacgtatacacattccatttcacactgtg

SEQ ID NO: 34768 - DNA, 110 bp, synthetic construct; identical to SEQ ID NO: 34767
  source 1..110: mol_type = other DNA

SEQ ID NO: 34769 - DNA, 110 bp, synthetic construct
  source 1..110: mol_type = other DNA
tcaaataaatagctactgaaaaacgtatgaagtgcaaagttttctccttaggaaagtgggcaactaattaatttagttgctaggaagattataattatccacttatccaa

SEQ ID NO: 34770 - DNA, 110 bp, synthetic construct
  source 1..110: mol_type = other DNA
gtgggcaactaattaatttagttgctaggaagattataattatccacttatccaaaagtcattctgcttgctgctcgtagccattgcttttaaaactttagaatccatag

SEQ ID NO: 34771 - DNA, 110 bp, synthetic construct
  source 1..110: mol_type = other DNA
gacggagtctagaaacctctgcagtgtgactctcttttactaaagagtcaaacggattccggggtcaccctggatccagccgcttaagaagggattccacttccgaggtc

SEQ ID NO: 34772 - DNA, 110 bp, synthetic construct
  source 1..110: mol_type = other DNA
ccacagataagccagatcatcaacccattgtgcaatagcgggaactcctattaggcatttattaaaaaagaatttgtataagagctctaatcagtagaaatgaagaactg

SEQ ID NO: 34773 - DNA, 110 bp, synthetic construct
  source 1..110: mol_type = other DNA
ctaattgtgggaataaagtcaataggacaaatcattttcatcaattggctagtgtcaaatgcagttgacattttcagctgctgtttgaatgctctactaggctacagaag

SEQ ID NO: 34774 - DNA, 110 bp, synthetic construct
  source 1..110: mol_type = other DNA
tgggagggcagttcaaggtgagaaaattgtaatggtccacacccactggaagataaggcaaatatagtgattgtcaggacattactggggtggctaggtgatcaatgcta

SEQ ID NO: 34775 - DNA, 110 bp, synthetic construct
  source 1..110: mol_type = other DNA
aggcaaatatagtgattgtcaggacattactggggtggctaggtgatcaatgctattgccactttttatcccaagcttaaatagcataaaactagtggtgcataaggaaa

SEQ ID NO: 34776 - DNA, 110 bp, synthetic construct
  source 1..110: mol_type = other DNA
aatatgatactaaagtagatgataaaatagagcttgcttgagtacatagtttttcataaacattatccaggtttcctggctcaaaaggattcaaaataatagtgaggggc

SEQ ID NO: 34777 - DNA, 110 bp, synthetic construct
  source 1..110: mol_type = other DNA
gtgacagaaaaatgccacatattaatctatcaatttggaaaaaaaaatacacaattttattttgcactgttagtgagcctatatagaagccagtctcatacatttccaga

SEQ ID NO: 34778 - DNA, 110 bp, synthetic construct
  source 1..110: mol_type = other DNA
ctgtcccaatatccgtaggaaagttcccagcaccaaataattcttattgtaagaaagctgttcttgatatcatcaggccacatttgttttatttctggtattatctttga

SEQ ID NO: 34779 - DNA, 110 bp, synthetic construct
  source 1..110: mol_type = other DNA
taggacattttaaaacctttgcttattttccaagctggaaaccaagtggagaattctatgcaagagagtggcatgatttgactatgtttcagaaaggatgacaatgtgat

SEQ ID NO: 34780 - DNA, 110 bp, synthetic construct
  source 1..110: mol_type = other DNA
aaatacccagacatgattttccttaccctgtccaatatccagctggtagctcctcttatgcagatctacctggaagcctgagaactcagaagccagtttgtgtcattcag

SEQ ID NO: 34781 - DNA, 110 bp, synthetic construct
  source 1..110: mol_type = other DNA
caggctaaagactactgcaatagccctaaatcatgtttaaaaactgctcagatgaggatactagctaagcactaatcagctaggcagccacttttacaccaggaacactg

SEQ ID NO: 34782 - DNA, 110 bp, synthetic construct
  source 1..110: mol_type = other DNA
ggatactagctaagcactaatcagctaggcagccacttttacaccaggaacactgctctggtggcaactgtatcaatcaggatgctcaaggttatgtccttgcttaaaat

SEQ ID NO: 34783 - DNA, 110 bp, synthetic construct
  source 1..110: mol_type = other DNA
cattcctaggccagggatcagatctgggctgcaattgtgaccacagctatgacaatgccagatcctctaactcactatgcatggatggggatcaaacctgtgtcctggtg

SEQ ID NO: 34784 - DNA, 110 bp, synthetic construct
  source 1..110: mol_type = other DNA
ggctttcctgcatgttgatgtgaacatgattttctttgttgcttgttccctcatgctgaccctggcatcagctaccagacttataaatgtttctcattctctctatcctc

SEQ ID NO: 34785 - DNA, 110 bp, synthetic construct
  source 1..110: mol_type = other DNA
ctcgaactccttaccacttgaagtgtgggatggagaccaacagcattggcattatctgggagcttcccagacatgcaggattccatgtgtctccgcaggcctactgaaac

SEQ ID NO: 34786 - DNA, 110 bp, synthetic construct
  source 1..110: mol_type = other DNA
ctgggagcttcccagacatgcaggattccatgtgtctccgcaggcctactgaaacagtgttcattttagcacgctcccaggtggttgacagacacactgaagttttagga

SEQ ID NO: 34787 - DNA, 110 bp, synthetic construct
  source 1..110: mol_type = other DNA
tttcctttgtgtcagcctatatctccaggaggccttctcctcccaacggcccacaacagccccaggcttccatcagcccagctgaatgacactaatgaaatgacatctcc

SEQ ID NO: 34788 - DNA, 110 bp, synthetic construct
  source 1..110: mol_type = other DNA
acagccccaggcttccatcagcccagctgaatgacactaatgaaatgacatctccttccgcccagctgttctaaccaaagtctctaaactgagtttcactagcatggctt

SEQ ID NO: 34789 - DNA, 110 bp, synthetic construct
  source 1..110: mol_type = other DNA
gtagctgtcctttgtgtcaccagcagggtttttgtgggagagggcagtatgcttccagggcaggctgcaagagactaggagctaggacagaggcctgggagggtcacaca

SEQ ID NO: 34790 - DNA, 110 bp, synthetic construct
  source 1..110: mol_type = other DNA
gatgctgatgaggtgggtcagaaaacaacaaaagcacgtacgttcggaacctatgggagctactaaatgcacctggaacttcgtacagaatttgcatccagtgtggagaa

SEQ ID NO: 34791 - DNA, 110 bp, synthetic construct
  source 1..110: mol_type = other DNA
attacacacataaaccccttgaatgtaaattacatctcaataaagctgatttaagcaaagagtgagagtgagaaaaaagtccggtgtctataaaagcttctcagtttgat

SEQ ID NO: 34792 - DNA, 110 bp, synthetic construct
  source 1..110: mol_type = other DNA
caaagagtgagagtgagaaaaaagtccggtgtctataaaagcttctcagtttgatggttggatgtggggagggattagaagaaaacatggccagctcggtgttcatcaca

SEQ ID NO: 34793 - DNA, 110 bp, synthetic construct
  source 1..110: mol_type = other DNA
atcacactgaagcaatgcctcaaattagaacacaaatggggaatgatcgattggttaatttttgggcttgacctatctaggtgggtgttctaacgtaggctgtgaatcac

SEQ ID NO: 34794 - DNA, 110 bp, synthetic construct
  source 1..110: mol_type = other DNA
ttttctattaaaaagaaagagggaaaaaaatgatccttacaagaagatactacgcatcttctgtttaatcccaggagtcctctctccaatttgaaagtcaacatcagatg

SEQ ID NO: 34795 - DNA, 110 bp, synthetic construct
  source 1..110: mol_type = other DNA
tttcctgatgactataggtgacattgcacaggcgctccagcttctttcacaatgcctttgttttgatctacaaaagtcagctaaatttctttggggccttgtcatgttaa

SEQ ID NO: 34796 - DNA, 110 bp, synthetic construct
  source 1..110: mol_type = other DNA
ctttgttttgatctacaaaagtcagctaaatttctttggggccttgtcatgttaacaaaaacaaatgtaataatatgcacttgaaaaggctcgcatgtcttgatatttta

SEQ ID NO: 34797 - DNA, 110 bp, synthetic construct
  source 1..110: mol_type = other DNA
cttgtggcagagacctaggcatcaccaggcagatgctgatcaaggatgccttcacttgcttccttacacaggtaccaagtgatggcaggaaagtcagagaaaggccaaga

SEQ ID NO: 34798 - DNA, 110 bp, synthetic construct
  source 1..110: mol_type = other DNA
catctttcctaaatcagtttgttttcaggtgagaaaaagggctcatgtaaatttaatagctcaagacacataattaagacagtagtagtgacttggcctgaggcctgctc

SEQ ID NO: 34799 - DNA, 110 bp, synthetic construct
  source 1..110: mol_type = other DNA
atagctcaagacacataattaagacagtagtagtgacttggcctgaggcctgctcatgctctctgcgtattgtgtttctagaaaacaaaacctgtcttcagtgggcattt

SEQ ID NO: 34800 - DNA, 110 bp, synthetic construct
  source 1..110: mol_type = other DNA
tcagaaataatttcacaatttgtaacggagataataagcattcattttcccacttctcttgggatctgagctcagctttttattatgaagtaaaaactgaaatgtggaaa

SEQ ID NO: 34801 - DNA, 110 bp, synthetic construct
  source 1..110: mol_type = other DNA
ctcttgggatctgagctcagctttttattatgaagtaaaaactgaaatgtggaaacaaaaatccaagacagggagaccctggataggcagtgaatgacatatgcctccag

SEQ ID NO: 34802 - DNA, 110 bp, synthetic construct
  source 1..110: mol_type = other DNA
agagggttctttagtcaactaggctgggtcagcttccatgcaaaaaatactatcacaattagaaagaaggccatgaaatagatgaaagtgaaagggttaatacaccaata

SEQ ID NO: 34803 - DNA, 110 bp, synthetic construct
  source 1..110: mol_type = other DNA
aaaaacagagaggtcagttttaaaagggttatttaaagtcagaactttaggtgtctcagcttccaaagactatttttaaaggacaaagaaagcacctctacagaatatag

SEQ ID NO: 34804 - DNA, 110 bp, synthetic construct
  source 1..110: mol_type = other DNA
gagggcaaacagacccagacctaggaccagcacaaagcaaagggaaagaaaggggaagggggagccagcttccaacaatgaaaagaagtagtcagtctaatgggaggtca

SEQ ID NO: 34805 - DNA, 110 bp, synthetic construct
  source 1..110: mol_type = other DNA
taacataccacccgagttatgaataagtgctagggcctttcattcaaagtgtggtcctcagacaagcagcactggcatcaacctggagctcattaaaaatgcaaaaactg

SEQ ID NO: 34806 - DNA, 110 bp, synthetic construct
  source 1..110: mol_type = other DNA
catatctgagggaaggctaaactgtttctggcttcccacaatttctgcttcaactaataagaggatcaattactaaatatgtaattgctagcttattctggacaaaaatc

SEQ ID NO: 34807 - DNA, 110 bp, synthetic construct; identical to SEQ ID NO: 34806
  source 1..110: mol_type = other DNA

SEQ ID NO: 34808 - DNA, 110 bp, synthetic construct
  source 1..110: mol_type = other DNA
tccctggagtaagtcatttctccaggtaacactggttctgcttagtggagaacagtatttagaagctaagatctgaatactaagtaaagtagctgttatcaggtactact

SEQ ID NO: 34809 - DNA, 110 bp, synthetic construct
  source 1..110: mol_type = other DNA
cagtttttgttgcaaatacttaaacttgccattgcagtgcataagcagctgtggccaaaagaacatggacatgttccaataaaactttatttatggacactaaaatgtga

SEQ ID NO: 34810 - DNA, 110 bp, synthetic construct; identical to SEQ ID NO: 34809
  source 1..110: mol_type = other DNA

SEQ ID NO: 34811 - DNA, 110 bp, synthetic construct
  source 1..110: mol_type = other DNA
acaagaatttaaaagacagctgggtgacctgattttttttctttttatggccacgcctgatacatgtggtaattccctgcctagggatcagtttggagctgcagctgcta

SEQ ID NO: 34812 - DNA, 110 bp, synthetic construct
  source 1..110: mol_type = other DNA
tattgagataaaatgttagaacctgataagaactttctttcctccccaggcaatattggcattgcaaagaagcttcaggtagcctcagcccaagtctgtcaattcagaat

SEQ ID NO: 34813 - DNA, 110 bp, synthetic construct
  source 1..110: mol_type = other DNA
aatagaaaagaaaaagatattgctggctatagatagacacctccattaagattctgttttggaaaaggagctacatgtagagataggtatcagtgtatgtagaaatgtat

SEQ ID NO: 34814 - DNA, 110 bp, synthetic construct
  source 1..110: mol_type = other DNA
attgggaatgttggtggtagtatttctcagtgatgagcaaaaggtcagggaagcaggggagtcagtatttgagctctagcatgacagctaatctccttctgggagggatg

SEQ ID NO: 34815 - DNA, 110 bp, synthetic construct
  source 1..110: mol_type = other DNA
tggccaaatccagaagagaataaaatgcttgtctgggggcaaaaaaggaacacctgtgtaaatcgatcaaaagcttagaagaataggagacttggaagatattctagaaa

SEQ ID NO: 34816 - DNA, 110 bp, synthetic construct
  source 1..110: mol_type = other DNA
gtgtaaatcgatcaaaagcttagaagaataggagacttggaagatattctagaaacactgtttggtcagtttcccgaccagaaggaaaggagtaatcttatttattggta

SEQ ID NO: 34817 - DNA, 110 bp, synthetic construct
  source 1..110: mol_type = other DNA
gtggcgaaattcattcccttgtgtttgaggattgaggtcctcatttgcttgctggctgtcaactgggggctatttttagttttcagaggccaccagaatagtttgctttt

SEQ ID NO: 34818 - DNA, 110 bp, synthetic construct
  source 1..110: mol_type = other DNA
ctgtcaactgggggctatttttagttttcagaggccaccagaatagtttgcttttacatttaaaaacaagtagaaaaatgcccagttctgccataggtcattctctgtga

SEQ ID NO: 34819 - DNA, 110 bp, synthetic construct
  source 1..110: mol_type = other DNA
atttcatccaaggatcttgttggtcctcactgtacaggatcaggaccagctatgtgacataggtaatcattaaggctgtccagggcctaaggataagaatgagaaggcac

SEQ ID NO: 34820 - DNA, 110 bp, synthetic construct
  source 1..110: mol_type = other DNA
gacataggtaatcattaaggctgtccagggcctaaggataagaatgagaaggcacagcaacaaggcagcatcaagtgaatctttagtgctcctgggacccatgaggtaga

SEQ ID NO: 34821 - DNA, 110 bp, synthetic construct
  source 1..110: mol_type = other DNA
taactatgttttgaaattgaattgatttttggcagaaatctggacccccgatttgtagtattcttctaggcatgaaatacatgcaaggtagtaaattaacttttgtcatg

SEQ ID NO: 34822 - DNA, 110 bp, synthetic construct
  source 1..110: mol_type = other DNA
gtcagtttccagttcttcactaaatggtaataatcaagcgcagtgcctaagggaatgtttctggcccagtctgaattattttcttggtatcctagctttagtcccataat

SEQ ID NO: 34823 - DNA, 110 bp, synthetic construct
  source 1..110: mol_type = other DNA
tgtttctggcccagtctgaattattttcttggtatcctagctttagtcccataatctgtccattggagagtttacttcttgcttcagcctccttagtgcttgcactcacc

SEQ ID NO: 34824 - DNA, 110 bp, synthetic construct
  source 1..110: mol_type = other DNA
cttagtggtgaagaccacagatttggcactggaatgctctgtgtttcaatcctagccctataacacatcagctttgtgactttggactcctcccctgcaccccccttccc

SEQ ID NO: 34825 - DNA, 110 bp, synthetic construct
  source 1..110: mol_type = other DNA
cattctccacatggtagcattacagtccttcaaaacctaagtcacatcatgtcattcctgtgtgtgtagaactctctggttacgtcccagttgaataaaacccaaagagc

SEQ ID NO: 34826 - DNA, 110 bp, synthetic construct
  source 1..110: mol_type = other DNA
tcctgtgtgtgtagaactctctggttacgtcccagttgaataaaacccaaagagcttactatcaaaggccacatatcattcagtcctggctaactctgatcaaatctcct

SEQ ID NO: 34827 - DNA, 110 bp, synthetic construct
  source 1..110: mol_type = other DNA
ccagatccctaacctgatgagcgagccagggattgaacttgccttcttgtggatgcgagtcaaatttgtttccactgagcggaagtcctgaagtccctgttttattactg

SEQ ID NO: 34828 - DNA, 110 bp, synthetic construct; identical to SEQ ID NO: 34827
  source 1..110: mol_type = other DNA

SEQ ID NO: 34829 - DNA, 110 bp, synthetic construct
  source 1..110: mol_type = other DNA
gtgcatgaacagtgggagggagagaccccaggggttgcccacatcttcagccagctcactgcagatctgaggccactctgttctaaggcaggaggtggaaggatatacct

SEQ ID NO: 34830 - DNA, 110 bp, synthetic construct
  source 1..110: mol_type = other DNA
tccagtctgattggcttatcccctccctgacagattttgtagcggaaaagctacggcagctaaaaaaggtaggatgactgaggacacagactctagagaaatgcagatct

SEQ ID NO: 34831 - DNA, 110 bp, synthetic construct
  source 1..110: mol_type = other DNA
ctgtatctagatacataatattagatttctatgcccaaaatgaactgctgtaagatacctatgaaaatgaattaactttagctacctcacaactatgactgaaaaacaac

SEQ ID NO: 34832 - DNA, 110 bp, synthetic construct
  source 1..110: mol_type = other DNA
gcctttatatatgatgaaatatataagcctaacatatttaattttggtagcaagtagtacatatactaaatagcaataacaaaccctctcaaaactgagcagcttggagt

SEQ ID NO: 34833 - DNA, 110 bp, synthetic construct; identical to SEQ ID NO: 34832
  source 1..110: mol_type = other DNA

SEQ ID NO: 34834 - DNA, 110 bp, synthetic construct
  source 1..110: mol_type = other DNA
ttgggatcatattccagccctgatatgacagtgattgccattgagcagtggggaaaccttgcttaacatttggctctggccctaacccatctgtagctccaaattctacc

SEQ ID NO: 34835 - DNA, 110 bp, synthetic construct
  source 1..110: mol_type = other DNA
accttgcttaacatttggctctggccctaacccatctgtagctccaaattctaccaaggtgacatttatcagcgaactctgaggaaagacaagacttattgtcaagtgaa

SEQ ID NO: 34836 - DNA, 110 bp, synthetic construct
  source 1..110: mol_type = other DNA
tgtcatgtgcctccactcaccaagtggtcttctcagtttgaccagtctggagacacacagaaatgtgctgaccatcaccaacccagctctcttaccctcgtaagtactgt

SEQ ID NO: 34837 - DNA, 110 bp, synthetic construct
  source 1..110: mol_type = other DNA
cacagaaatgtgctgaccatcaccaacccagctctcttaccctcgtaagtactgttcactgagctccaccactgcttccacccatgcctcattctcctttcctttcagtt

SEQ ID NO: 34838 - DNA, 110 bp, synthetic construct
  source 1..110: mol_type = other DNA
actgatgctggagtcagttccaagcctttgcaggtagtcttcctggtatggggctgcagaagtccctaaactatgagctcctgtatgtgagtgagggccatacctcctgt

SEQ ID NO: 34839 - DNA, 110 bp, synthetic construct
  source 1..110: mol_type = other DNA
gcagaagtccctaaactatgagctcctgtatgtgagtgagggccatacctcctgttcaccactgtaaccccagctcccaccagttggtactgaaatacatatttgttgaa

SEQ ID NO: 34840 - DNA, 110 bp, synthetic construct
  source 1..110: mol_type = other DNA
cgtcttttccttcggtcaattaattccccaaattttgcactctgtgtatggtgaaaatggaaacagatcatacctgctacccattttttttataaagattctcactttag

SEQ ID NO: 34841 - DNA, 110 bp, synthetic construct
  source 1..110: mol_type = other DNA
gcagcaggaacctttatgaagcagactgctaaggcagagtgtgcaaatcctctgcactgctgctgtgaaactggctgagctggctcctagcacttcatattgtccatgtc

SEQ ID NO: 34842 - DNA, 110 bp, synthetic construct
  source 1..110: mol_type = other DNA
actgctgctgtgaaactggctgagctggctcctagcacttcatattgtccatgtcattgtcaatttggtaaactaggcagcgactgcagccaccatttcaggagcctcat

SEQ ID NO: 34843 - DNA, 110 bp, synthetic construct
  source 1..110: mol_type = other DNA
ccctgtaaattaaactcaatttttaaaataagaaaaaaaattcccagagtaattaagctaagagctcttggtggtagggcctagatatgtgtttttttgttgttgttgtt

SEQ ID NO: 34844 - DNA, 110 bp, synthetic construct
  source 1..110: mol_type = other DNA
agagtaattaagctaagagctcttggtggtagggcctagatatgtgtttttttgttgttgttgtttgtctttttagagctataccacggcatatggaggttcccaggcta

SEQ ID NO: 34845 - DNA, 110 bp, synthetic construct
  source 1..110: mol_type = other DNA
gttggccaaggcattcatccttaatttaccatatatttagtgagtgttcactaactgccaggtggagtaggttggtcccttggctttcccagcattgacactttttgagc

SEQ ID NO: 34846 - DNA, 110 bp, synthetic construct
  source 1..110: mol_type = other DNA
tttttctagaaccaatgctcctggatcatatgggcccctgtgtattaaaaacacgtgtgaattatgtgattctttatgtgtagccatacatttcactgtgttctagtgat

SEQ ID NO: 34847 - DNA, 110 bp, synthetic construct
  source 1..110: mol_type = other DNA
atttacccttttgatattttcttgatatttaaaatagggacagttgtccctaatttttaggtttacatacattaaattcgctcaaatacccagcacattgccaaccactt

SEQ ID NO: 34848 - DNA, 110 bp, synthetic construct
  source 1..110: mol_type = other DNA
tttaggtttacatacattaaattcgctcaaatacccagcacattgccaaccacttagctagtatttaataaatattgtccatatctacagcttcaattgtatctctatac

SEQ ID NO: 34849 - DNA, 110 bp, synthetic construct
  source 1..110: mol_type = other DNA
tgcaggctcttttcccttgtgcagacttatgcattgtctctgttagctcctccacatctagtctgatgttaaaccaaggttagatacaacctctgaccctcctttattct

SEQ ID NO: 34850 - DNA, 110 bp, synthetic construct
  source 1..110: mol_type = other DNA
ctagttttaggaggggtgaggctgcaaatagcttctttccattcctggggtagtattctctggccttctgtgagaacgaagccttagtaggtcacgctaggttgtggcac

SEQ ID NO: 34851 - DNA, 110 bp, synthetic construct
  source 1..110: mol_type = other DNA
aaagtgatctcaattaccaggaaggcttcgaggattccaggggacttttcagatcatttttggcaaacaaaatcgggagcacatcctcacaaatccatgatggcacatct

SEQ ID NO: 34852 - DNA, 110 bp, synthetic construct
  source 1..110: mol_type = other DNA
gtagtgaaaagtaagaaaatgtgttgtatagaaatcatgggaagtctctttcttcccttccacttttctgatactgatgcttaaaatgtggctgtgatagctggaactcc

SEQ ID NO: 34853 - DNA, 110 bp, synthetic construct
  source 1..110: mol_type = other DNA
ccttccacttttctgatactgatgcttaaaatgtggctgtgatagctggaactccagcagcctttttggagtatgatgatgaaggctacatcctagcaatcacagaaaga

SEQ ID NO: 34854 - DNA, 110 bp, synthetic construct
  source 1..110: mol_type = other DNA
ttggatgattttgctctgtagttgtaaattgagggatttggaatcagtttctggtgcacattgctacctacaggtgcaggcaagcagagctcttactctgggctccatga

SEQ ID NO: 34855 - DNA, 110 bp, synthetic construct
  source 1..110: mol_type = other DNA
gcacattgctacctacaggtgcaggcaagcagagctcttactctgggctccatgagtaaatactgctggggttcactggccaacatctctacagggcaaggagctaactg

SEQ ID NO: 34856 - DNA, 110 bp, synthetic construct
  source 1..110: mol_type = other DNA
ctagccctgcttttaaaatattaaaggaaaatatgattctagaatgctggggaattagaggacagctgggggccaagacctgggttaattatattcattcaacaaaattt

SEQ ID NO: 34857 - DNA, 110 bp, synthetic construct
  source 1..110: mol_type = other DNA
tagaggacagctgggggccaagacctgggttaattatattcattcaacaaaatttgggcacttctgatcttcaaaaaatcgtgctaaatgctgtgaaaagataaatgcga

SEQ ID NO: 34858 - DNA, 110 bp, synthetic construct; identical to SEQ ID NO: 34856
  source 1..110: mol_type = other DNA

SEQ ID NO: 34859 - DNA, 110 bp, synthetic construct; identical to SEQ ID NO: 34857
  source 1..110: mol_type = other DNA

SEQ ID NO: 34860 - DNA, 110 bp, synthetic construct
  source 1..110: mol_type = other DNA
aatgcaggtcataattttccctaggaccagctcttccatgcccccacaggtgacaaaagggaatgtatttctgggacacacaggatgtcccctgcagagggcacttcttc

SEQ ID NO: 34861 - DNA, 110 bp, synthetic construct
  source 1..110: mol_type = other DNA
cacaggagtaacagaaaaacagagctataagaacagggatgacagagagaaaattggaaaactgtatagatgctaactgccttggtcttttgaataattatatgtgggga

SEQ ID NO: 34862 - DNA, 110 bp, synthetic construct
  source 1..110: mol_type = other DNA
ttcatcagaggaagcagagatgctaatttctgccatccagcccatcaggtacatgtctgcctgtgcagctagttggtggtaattaatcccaggagcaggatctttctagt

SEQ ID NO: 34863 - DNA, 110 bp, synthetic construct
  source 1..110: mol_type = other DNA
tcacagggaacggaaccatataacttccaacaccttataaaacatgagctacatgaggagagtttcccaccttatggttataaaatgacatagaatactgagagaagaac

SEQ ID NO: 34864 - DNA, 110 bp, synthetic construct
  source 1..110: mol_type = other DNA
gtctccttcagttggcgttagcgacaccaggcaaggaaggtcctaattggggtccacttgatctgagagggttggtcacaggagagagttttcctgagactgtaatagag

SEQ ID NO: 34865 - DNA, 110 bp, synthetic construct
  source 1..110: mol_type = other DNA
cacgtggttcaggagggtgagtttatgaaatgcaaacgtggctgtgatggaagcaggcctcagtgaaaaggcctcttcaagatgcccacagatgctcaagctgagcatat

SEQ ID NO: 34866 - DNA, 110 bp, synthetic construct
  source 1..110: mol_type = other DNA
aaacataagtcataagaagagtaatccctcaacttcctgccaccaaaaatgcaaaggtttcacagggtgggaaaagatgcctccttcacagttatctttccccatgctct

SEQ ID NO: 34867 - DNA, 110 bp, synthetic construct
  source 1..110: mol_type = other DNA
tgtagaagaatacctgcagctgtctttcgataaatcagtatttaaaatttctgcaattttgcatccgagtacctacttgaataaaatacttcttggcagtgaacagggaa

SEQ ID NO: 34868 - DNA, 110 bp, synthetic construct; identical to SEQ ID NO: 34867
  source 1..110: mol_type = other DNA

SEQ ID NO: 34869 - DNA, 110 bp, synthetic construct
  source 1..110: mol_type = other DNA
gaatatatactattgtgcccacatgtgcattcctcatgtgtgtttccctagtagctaatcctgggccaaggtaaccagtagctcatacagagggaccaaggctctccaaa

SEQ ID NO: 34870 - DNA, 110 bp, synthetic construct
  source 1..110: mol_type = other DNA
ttgtagtctgtgtgtcccacaggctctgtaccaggacatatattttgacacctgcatgatatcaacttcaaataaaatcctttatacttgcctgatgggatccatggact

SEQ ID NO: 34871 - DNA, 110 bp, synthetic construct
  source 1..110: mol_type = other DNA
gataaggatcacagaaaaatattttgttttacgaaataaagttctctttaaagataataatttggggggatttcctatcgtggctgagcagttaatgaacccaactagta

SEQ ID NO: 34872 - DNA, 110 bp, synthetic construct
  source 1..110: mol_type = other DNA
catttataggtttaacaggaaatatatatgttattcagctttgcattatatgacgtgtttaaaccttcttctgcctgacctcttattccttgatgttaccaaatcaggtc

SEQ ID NO: 34873 - DNA, 110 bp, synthetic construct
  source 1..110: mol_type = other DNA
atagccaaattcagtgtacatttaattattgtatttcttcacaagtagttgcctatttagctagttttagggggtcataaacatagtacagtactcatggcttgattatc

SEQ ID NO: 34874 - DNA, 110 bp, synthetic construct
  source 1..110: mol_type = other DNA
ggacctcttcatttttcaaacatttggatccccatcctttgacagagtgaaaatgtaaatggaacacattgctagaccaaccagtgtgtttgtctgatgtgacacttgtt

SEQ ID NO: 34875 - DNA, 110 bp, synthetic construct
  source 1..110: mol_type = other DNA
taaatggaacacattgctagaccaaccagtgtgtttgtctgatgtgacacttgttagctgagtttaagtgtgtctctcagttgactatttagctgtaaaacttttgcttg

SEQ ID NO: 34876 - DNA, 110 bp, synthetic construct
  source 1..110: mol_type = other DNA
ctaatcctgactccatcacatgccagctctgtgaccctagagaagtacttaatatgtttgtaccttggtttcctcctctgtaaaatggaagtagaagaatatctgccatc

SEQ ID NO: 34877 - DNA, 110 bp, synthetic construct
  source 1..110: mol_type = other DNA
caggcatgagggagatgaaaagagggagcaggaaactgtggcacctatatctcaagagcaagcttttccaggaactttcaatgtttgtttcattggctgcatgttatttt

SEQ ID NO: 34878 - DNA, 110 bp, synthetic construct
  source 1..110: mol_type = other DNA
agggaccatttacagaatttaaattctgagtagtctgatatactacaccccaattcagattcttgaaggggttcattagcatgggaatttatgaaaatgacaaaaagagt

SEQ ID NO: 34879 - DNA, 110 bp, synthetic construct; identical to SEQ ID NO: 34878
  source 1..110: mol_type = other DNA

SEQ ID NO: 34880 - DNA, 110 bp, synthetic construct
  source 1..110: mol_type = other DNA
gaacttgcctgctggtgttgcaggggtttgtgtgagcagagaattggtcttccttgtccgctatagcttgcaaagctgtgtgtgtgtgacatttgtttcttcatctctgt

SEQ ID NO: 34881 - DNA, 110 bp, synthetic construct
  source 1..110: mol_type = other DNA
cacatgggagctgaaatccctgtgaaatatctctgcttctctgtaaagtggaatgtgagggccggctcagattcccagctcttcaggttcctggagcacagatgcttgtt

SEQ ID NO: 34882 - DNA, 110 bp, synthetic construct
  source 1..110: mol_type = other DNA
tataaaatacgaaacaaccacctgaacctgggctcctgctatgaaaagctagtgtgatgtcctaacacagagatgtcaattacatccacattcattgccattctgcttag

SEQ ID NO: 34883 - DNA, 110 bp, synthetic construct
  source 1..110: mol_type = other DNA
gatgtcctaacacagagatgtcaattacatccacattcattgccattctgcttagagccttaaagcacaacttgtccataaaaaggatactgctatgtattgaacactga

SEQ ID NO: 34884 - DNA, 110 bp, synthetic construct
  source 1..110: mol_type = other DNA
gttagacagaccagagggctttgattccagctctgccacttactagtttgacacgttactgaacttctaagcctcgattcctacctctttatttttttttatttttaaaa

SEQ ID NO: 34885 - DNA, 110 bp, synthetic construct
  source 1..110: mol_type = other DNA
tttagagatagcttccttaaactctccccctaaaagtcctgggtctgaagaaattttggatgcattttgttccaacttggagactcacagtaatgatggggctacttgct

SEQ ID NO: 34886 - DNA, 110 bp, synthetic construct
  source 1..110: mol_type = other DNA
ctcctgatctctactcagaattttttcaggggatgttgagagtcagcagctgcagcacctcccaatttaattcttgtagaggtcgatggcaagtggcaatttccagttgg

SEQ ID NO: 34887 - DNA, 110 bp, synthetic construct; identical to SEQ ID NO: 34886
  source 1..110: mol_type = other DNA

SEQ ID NO: 34888 - DNA, 110 bp, synthetic construct
  source 1..110: mol_type = other DNA
atgctggccggggggtatttgccatttttgctcttacttcactgatggtgctggagtcttcatttgtcacgtacagctcttgatacacttcctctctctccctcactcta

SEQ ID NO: 34889 - DNA, 110 bp, synthetic construct
  source 1..110: mol_type = other DNA
acaaacatcagtcaccccccttccctatatgtccctagtggtccgttcgtggatgtgcgctcacccacatcagatccactgacagcacattatgttggatttcaccatat

SEQ ID NO: 34890 - DNA, 110 bp, synthetic construct
  source 1..110: mol_type = other DNA
tgcgctcacccacatcagatccactgacagcacattatgttggatttcaccatattgttctaggagacaactgctgagaaactccagtttgtggggggtgttatttgttc

SEQ ID NO: 34891 - DNA, 110 bp, synthetic construct
  source 1..110: mol_type = other DNA
acatcactgcataagtttaagggctacactataatggttcaacaacatacacagtgaaatgattactccaagttttagctagcattcgtcctcatatagatacaatataa

SEQ ID NO: 34892 - DNA, 110 bp, synthetic construct
  source 1..110: mol_type = other DNA
atcaaatcggagctataactgctggcctctgccacagccacagcagctcagggcccaaggcacatctacaacctacacagcagtgcacaccaacaccggatctttaaccc

SEQ ID NO: 34893 - DNA, 110 bp, synthetic construct
  source 1..110: mol_type = other DNA
cagaaaaactacctgactgacatcttggccaagatcgaggccaagaccggcgtgaaccggagctacatagcgctaggtaagtgaggggtggtagccttctgggtcccgcc

SEQ ID NO: 34894 - DNA, 110 bp, synthetic construct
  source 1..110: mol_type = other DNA
ccagccccgccaacggagcagacctgctctaccagcgcatcatccggcccttcttcctgaagcacgaatctcaggtagacaatgtggtgagtgacttgaaggacaaagcc

SEQ ID NO: 34895 - DNA, 110 bp, synthetic construct
  source 1..110: mol_type = other DNA
cctgaagcacgaatctcaggtagacaatgtggtgagtgacttgaaggacaaagccaaagagacggcggatgccatcactaaggaaggtaaggctccaggacagcttggtt

SEQ ID NO: 34896 - DNA, 110 bp, synthetic construct
  source 1..110: mol_type = other DNA
acttaacgctcctgccagcagtgcctgggaattccagctgcttaacatagctgacgagacttggtcaatcttttaaattttaaccattatgtgaaatggcacctcatact

SEQ ID NO: 34897 - DNA, 110 bp, synthetic construct
  source 1..110: mol_type = other DNA
gagacttggtcaatcttttaaattttaaccattatgtgaaatggcacctcatacttgaaatttgtatttccctgatgactaaagatattgttaagtatcttttcaagtgc

SEQ ID NO: 34898 - DNA, 110 bp, synthetic construct
  source 1..110: mol_type = other DNA
cctagtcattgccccatcaatcagcttactactgtgcaagtataaactgacagaacgttagcggtgccaaatattcttttgcattctgccctaggatctctgacacacca

SEQ ID NO: 34899 - DNA, 110 bp, synthetic construct
  source 1..110: mol_type = other DNA
gatccaaatccaatacctattcatgatgaaatctggctctgcttcctggccaacaagtatttatgaaagagaatacatgcatgaatattgagaaagggagagcgctccat

SEQ ID NO: 34900 - DNA, 110 bp, synthetic construct
  source 1..110: mol_type = other DNA
cacatcagagttagcaaaactgagagcagagagaatggatgtcaaccgctgtcagtctccggttgagctgagctgggagaaagcattcattccacagcacttcttcctgc

SEQ ID NO: 34901 - DNA, 110 bp, synthetic construct
  source 1..110: mol_type = other DNA
tctccggttgagctgagctgggagaaagcattcattccacagcacttcttcctgccccacaaaaggctgcatgggctctgctggtcaaaaacaaaaatgaaaaggagttc

SEQ ID NO: 34902 - DNA, 110 bp, synthetic construct
  source 1..110: mol_type = other DNA
cttcctcttttgatagaaaaacaatgccatctgcctgttgatatccagtcaccatgtataatctgatgccctgcttaccactagggcccttcccttgctttcccactggc

SEQ ID NO: 34903 - DNA, 110 bp, synthetic construct
  source 1..110: mol_type = other DNA
ttgtggtgaaggtaagtgcagcatttattgtaggcaccaagcaagtagtccaggcagcaagcatttaaaggcctgaatccccgatggcttttagggaatggttttcaaag

SEQ ID NO: 34904 - DNA, 110 bp, synthetic construct
  source 1..110: mol_type = other DNA
aaaacaatgatgtgcaggtaaggacacttgattagagaggctcttacatttcaagatgcacaggaaatcccaggcatcccgaatggtgatgtgggttggggtagggagag

SEQ ID NO: 34905 - DNA, 110 bp, synthetic construct
  source 1..110: mol_type = other DNA
ggacacataaaaattcgagatttcagactacacttcagtaactaaaacagtgtagtactggcacaaaaactgacatatagctcaatggaacataatagagaccccagaaa

SEQ ID NO: 34906 - DNA, 110 bp, synthetic construct
  source 1..110: mol_type = other DNA
cctctgctccgcgggtcgtggtaaggagactgatgtcctttccgacccttttctggcttcccggtgcccgtgggctgggggcggggtggaggtagctgattgagaggcga

SEQ ID NO: 34907 - DNA, 110 bp, synthetic construct
  source 1..110: mol_type = other DNA
ccttagtagatcacactttgaaaatgctggtgtgtgtatgtatgtgtatccaatcatcttatggttattccagctcacttttgtggcttgatgttactgcttgtagcttt

SEQ ID NO: 34908 - DNA, 110 bp, synthetic construct
  source 1..110: mol_type = other DNA
tgatttacgggtttgtaagaatagaaagaaagctcctgagcatgttgaaagataacgtcccttgcttaaaaatactctgtggacataaataaggtacccaaggtcagaaa

SEQ ID NO: 34909 - DNA, 110 bp, synthetic construct
  source 1..110: mol_type = other DNA
aaagggattgaaaacttacttgaagaaataatagctgaaaacttccctggcctgggaaggtaaacagacatttaggcccacaaaacagagtgcaaacaggatgaactcaa

SEQ ID NO: 34910 - DNA, 110 bp, synthetic construct
  source 1..110: mol_type = other DNA
tgaatatttaggctctcacatttaatgctgctgcttctagctacgtatgtttctgagagaacttcctaaaaatatagaaactatactgtgtagtttcctgctcagtgccc

SEQ ID NO: 34911 - DNA, 110 bp, synthetic construct
  source 1..110: mol_type = other DNA
agagaacttcctaaaaatatagaaactatactgtgtagtttcctgctcagtgcccccaaatgctctgaggattattgagcaaaaatgttctcatcttgggagttcacttg

SEQ ID NO: 34912 - DNA, 110 bp, synthetic construct
  source 1..110: mol_type = other DNA
caaccctggctgcgataccagtgaaattttacctcgttctaaaagagagagtaatgttagttcctaatgatttgttcataccaaatacattttagcttctaaaaacaaat

SEQ ID NO: 34913 - DNA, 110 bp, synthetic construct; identical to SEQ ID NO: 34912
  source 1..110: mol_type = other DNA

SEQ ID NO: 34914 - DNA, 110 bp, synthetic construct
  source 1..110: mol_type = other DNA
tatcatagcttccacacctgtggggcccttgatagtgttgtgacacctttgcatgtttctcctctgtaggtcagctgaaggcaggaaaggaagaaattagtaaaaattct

SEQ ID NO: 34915 - DNA, 110 bp, synthetic construct
  source 1..110: mol_type = other DNA
tttctcctctgtaggtcagctgaaggcaggaaaggaagaaattagtaaaaattctcatacaagggaattagaataagccattctgagcaagagtcgttaagtggggagtt

SEQ ID NO: 34916 - DNA, 110 bp, synthetic construct
  source 1..110: mol_type = other DNA
cagggtgaaaattgccagaacggagagggtagctcatgcaaagccaatggaaacgatgttcaccagctacagatggcacgggtttcggatttccactctgataagtcgta

SEQ ID NO: 34917 - DNA, 110 bp, synthetic construct
  source 1..110: mol_type = other DNA
ttctgaatgcctgaatacaccatttgttctttcctgcaaagtgaaggttatttgctgacttaaaattcagtaacaaagtaagtacacctgtgatgtagaaaccaactggt

SEQ ID NO: 34918 - DNA, 110 bp, synthetic construct
  source 1..110: mol_type = other DNA
tgacttaaaattcagtaacaaagtaagtacacctgtgatgtagaaaccaactggtctatttcagttcaccatgcatcagacattggaagaaagcatgtaattctccttgg

SEQ ID NO: 34919 - DNA, 110 bp, synthetic construct; identical to SEQ ID NO: 34917
  source 1..110: mol_type = other DNA

SEQ ID NO: 34920 - DNA, 110 bp, synthetic construct; identical to SEQ ID NO: 34918
  source 1..110: mol_type = other DNA

SEQ ID NO: 34921 - DNA, 110 bp, synthetic construct
  source 1..110: mol_type = other DNA
atggagtggagcaaggagtgttaggaggaaagtctttcattccttaatgaatatatctggagaagccagtatttattgcttttgagaggaagttaattttctcccagttc

SEQ ID NO: 34922 - DNA, 110 bp, synthetic construct
  source 1..110: mol_type = other DNA
tctggagaagccagtatttattgcttttgagaggaagttaattttctcccagttcctttttggaaggatctgtggtcagaacacttcttgattctttatgcccacttttt

SEQ ID NO: 34923 - DNA, 110 bp, synthetic construct
  source 1..110: mol_type = other DNA
tcagtgctgtctcttagcacccaacccagtactgtgctctcagtaggctctcagtgaatattcagctgactgatgaccaacttgcaagaaggtctccatgtgtcacctct

SEQ ID NO: 34924 - DNA, 110 bp, synthetic construct
  source 1..110: mol_type = other DNA
gtctactgaggtctgggaggtatgttttatgtgtgaggatccatgggtagctcttgtgggtttactgtttttttggtgtgagggctgcttttggttttgatgattgctgc

SEQ ID NO: 34925 - DNA, 110 bp, synthetic construct
  source 1..110: mol_type = other DNA
aggatccatgggtagctcttgtgggtttactgtttttttggtgtgagggctgcttttggttttgatgattgctgcctctgtcctcagtatgtacaggccattatcccctt

SEQ ID NO: 34926 - DNA, 110 bp, synthetic construct
  source 1..110: mol_type = other DNA
cagcatgaaactatatgcttagcttcctccccctgagagtcaaggagaagtctatgagctgctgagactggggaaaaacaagctaaggcaacataggtctttttaggttc

SEQ ID NO: 34927 - DNA, 110 bp, synthetic construct
  source 1..110: mol_type = other DNA
ttcccactccgcttatctctgcctttcaaataactagctggagccccacattccagtgtggttctatggtgtccctgtcatactgaattaaccaggaaaacgcagtcatt

SEQ ID NO: 34928 - DNA, 110 bp, synthetic construct
  source 1..110: mol_type = other DNA
tcatatgcacatgtacacacactcacactaaattgatttgtgctatagcctaaagtttctgccaccagacttcagtttctttgactttctttagcttgcctttttcaagg

SEQ ID NO: 34929 - DNA, 110 bp, synthetic construct
  source 1..110: mol_type = other DNA
cccccctcagccttctcatctgtaaacccgtgagaatgatggtgatgacagctaacccagacccacttagtgcttaggtgccggaccctgttgctgtggcttaacatata

SEQ ID NO: 34930 - DNA, 110 bp, synthetic construct
  source 1..110: mol_type = other DNA
cccagacccacttagtgcttaggtgccggaccctgttgctgtggcttaacatatattgatgcatttcacccttggaacagcaccctgaggattaaatgaatgcacctgga

SEQ ID NO: 34931 - DNA, 110 bp, synthetic construct
  source 1..110: mol_type = other DNA
atcaatagggcaggcacagatgcctgtccaaggaccccctcaccagacctgggcgctcacctggtttccgagctgctaattttgtaagtgaaaaatagaacctcattgcc

SEQ ID NO: 34932 - DNA, 110 bp, synthetic construct
  source 1..110: mol_type = other DNA
atgggggacattatgctcttggctctgaagacgaagggaggaagccacaaagcgtagagtgtgggtggcttctagaagctggaaaaggcaagggaatggagcttcttcta

SEQ ID NO: 34933 - DNA, 110 bp, synthetic construct
  source 1..110: mol_type = other DNA
ctacgtagggcctcatagcaacccttccaaggaggaatttcccatatttcacagggctcagagaagttaaatcatttgttcaaggctgctcaaccagccagtaaactgca

SEQ ID NO: 34934 - DNA, 110 bp, synthetic construct
  source 1..110: mol_type = other DNA
gctcagagaagttaaatcatttgttcaaggctgctcaaccagccagtaaactgcacagctgggatttgactccaaggtctggctttcctattttactgtgccatgacaca

SEQ ID NO: 34935 - DNA, 110 bp, synthetic construct
  source 1..110: mol_type = other DNA
aaaccagcatcacagtcaatgatgttgtctttgttattgattctggtaaggtgaaagaggtgtgtatggataaattgtatttttacttaaatgaagaaggttattatttc

SEQ ID NO: 34936 - DNA, 110 bp, synthetic construct
  source 1..110: mol_type = other DNA
tctttaaggagccgatagcagtagctgcagatcttaggtcttcatagctgcaattgcctctgttcccagaaatatcaacctctctgcaaacctctcctggtgcttcttta

SEQ ID NO: 34937 - DNA, 110 bp, synthetic construct
  source 1..110: mol_type = other DNA
gggcaggtgctgtggacagctgttctgtatcctctaggcagaggatggactgcttgacccagctgtcaaaggcagtcctctgcttaattactttaaatgctgcctcacag

SEQ ID NO: 34938 - DNA, 110 bp, synthetic construct
  source 1..110: mol_type = other DNA
agttcgcttttctcagtgatctttggagggtcagggctttaagtaccgagacaggcagctttggctcaattcccatcccatcagcttgcttacaagctgccatcctcagc

SEQ ID NO: 34939 - DNA, 110 bp, synthetic construct
  source 1..110: mol_type = other DNA
tgtagcgacacatccaatggctgtacacttttgaggaaatctgtatccttttggaggaatgaggcaggagctcagcacacacctcctgctttcccccctcccctggtctt

SEQ ID NO: 34940 - DNA, 110 bp, synthetic construct
  source 1..110: mol_type = other DNA
ggaatgaggcaggagctcagcacacacctcctgctttcccccctcccctggtcttaatccagactttacaggatttggctggagtgccttagaatttatggttagtggct

SEQ ID NO: 34941 - DNA, 110 bp, synthetic construct
  source 1..110: mol_type = other DNA
cccagtgctccagagatgccactaatccccttgcaccacagtgggaactccaggacattctcatcttatatttgcagggtccaggcaagaatgctagtggaggcctttgt

SEQ ID NO: 34942 - DNA, 110 bp, synthetic construct
  source 1..110: mol_type = other DNA
cattctcatcttatatttgcagggtccaggcaagaatgctagtggaggcctttgtaccacatgtctaaatgcttattataaatcgaaccaacaaactttaaaattaatat

SEQ ID NO: 34943 - DNA, 110 bp, synthetic construct
  source 1..110: mol_type = other DNA
ctgtaaaagagtgatttccaaacagttctaaatctttacctcctaaaagccctctcaggagctgctgtgatgctggtgaggaggagaatgaggggtgagttctctgctga

SEQ ID NO: 34944 - DNA, 110 bp, synthetic construct
  source 1..110: mol_type = other DNA
caggagctgctgtgatgctggtgaggaggagaatgaggggtgagttctctgctgacagcccacttcaacttgtgtgtttttgcctttgcattttttgcaatatctcaggt

SEQ ID NO: 34945 - DNA, 110 bp, synthetic construct
  source 1..110: mol_type = other DNA
ccattagacttgtggccacaaaacttcaacttgtgaaaaaaatgcagtattttcaaaacacagtaaaagaggtctgcttgtaatatcttgcttgttaaattataaaacaa

SEQ ID NO: 34946 - DNA, 110 bp, synthetic construct; identical to SEQ ID NO: 34945
  source 1..110: mol_type = other DNA

SEQ ID NO: 34947 - DNA, 110 bp, synthetic construct
  source 1..110: mol_type = other DNA
ctacttccatgccacttgctatgatgttccattcatcatgttatacagttaaatttgtcttgaacccttatccttttttaaaaatagaagtagagttaattcacagtatt

SEQ ID NO: 34948 - DNA, 110 bp, synthetic construct
  source 1..110: mol_type = other DNA
tctgagaaggagcagtgaacagtgaaaacaagatccttggagcttatactttcgttgagggagagagacagtatatcagcaaaaagactggataatttcagatagtggta

SEQ ID NO: 34949 - DNA, 110 bp, synthetic construct
  source 1..110: mol_type = other DNA
tagcaacagtaagactcagatttagacacgtatatacactgactatgctagaagtattgataggtaaagcaaagtcatccatacatagctattgtataactttggtctgt

SEQ ID NO: 34950 - DNA, 110 bp, synthetic construct
  source 1..110: mol_type = other DNA
taatttagaacttgtttgggaacattgttatctgccttcctcacccctcaacctgtttaaaaatcattgcaggatattttcccatgtccttgaaagaaaggcaaatagga

SEQ ID NO: 34951 - DNA, 110 bp, synthetic construct
  source 1..110: mol_type = other DNA
tttaaaaatcattgcaggatattttcccatgtccttgaaagaaaggcaaataggaatattcctaatacactgtgtctgtctcagaatgattttcagggaccataagtcag

SEQ ID NO: 34952 - DNA, 110 bp, synthetic construct; identical to SEQ ID NO: 34950
  source 1..110: mol_type = other DNA

SEQ ID NO: 34953 - DNA, 110 bp, synthetic construct; identical to SEQ ID NO: 34951
  source 1..110: mol_type = other DNA

SEQ ID NO: 34954 - DNA, 110 bp, synthetic construct
  source 1..110: mol_type = other DNA
cacttagggcatcaggatgaaagttagggatcataatccatattaaagtctcctctgctttcatgctttccatcttcccaagtactaacagctagccagagtcccctgat

SEQ ID NO: 34955 - DNA, 110 bp, synthetic construct
  source 1..110: mol_type = other DNA
tgctttcatgctttccatcttcccaagtactaacagctagccagagtcccctgatttttacaaaaataaaacataaacccagtaaatatctaatccgtttttgctctctt

SEQ ID NO: 34956 - DNA, 110 bp, synthetic construct
  source 1..110: mol_type = other DNA
atggctggtcttgccatcaaaaggaaatattctttgggcctcaagagcaacactgtccattagaattagagggtgagccacaaacatgaacccacatgaataattttagg

SEQ ID NO: 34957 - DNA, 110 bp, synthetic construct
  source 1..110: mol_type = other DNA
gaaaagaaagtctcatttctgaggcttaattagtatttgtgtagcaccaagaggtctctgtagaaatagccttgggtaagagaaaattagtgtttttaattattatcatt

SEQ ID NO: 34958 - DNA, 110 bp, synthetic construct
  source 1..110: mol_type = other DNA
ctctgtagaaatagccttgggtaagagaaaattagtgtttttaattattatcattaaaaatgaatatttacaggaaattgggctgaaggccatctggcccaagtacattc

SEQ ID NO: 34959 - DNA, 110 bp, synthetic construct
  source 1..110: mol_type = other DNA
ccttcagtcttccatacccccagcagcgtgctccttccatatttctcatttaagtactatttcagtgttcccattgaacaaatttaagtgttagagctgaaagagacatg

SEQ ID NO: 34960 - DNA, 110 bp, synthetic construct
  source 1..110: mol_type = other DNA
actatttcagtgttcccattgaacaaatttaagtgttagagctgaaagagacatggagaaccaggacttaactgtggataagttgagggtttaagatactaagtaaagca

SEQ ID NO: 34961 - DNA, 110 bp, synthetic construct
  source 1..110: mol_type = other DNA
ctctgggatggcaattgccatctggaattcagggacaaccaatgcagaacatttggtaataatgatgaaagaccacagtaaagtttcatttctgtaaagcaaaaccaaac

SEQ ID NO: 34962 - DNA, 110 bp, synthetic construct
  source 1..110: mol_type = other DNA
caaccaatgcagaacatttggtaataatgatgaaagaccacagtaaagtttcatttctgtaaagcaaaaccaaacaaagcgaaaaattaagttcacatccataacttcac

SEQ ID NO: 34963 - DNA, 110 bp, synthetic construct
  source 1..110: mol_type = other DNA
tgcattttccttcaagttagctttccagagatgcaagatacagatctaaaactggaagggcagaaattaaaatttctctttacttgtgcatctatgccatacaaaggagg

SEQ ID NO: 34964 - DNA, 110 bp, synthetic construct
  source 1..110: mol_type = other DNA
aagggcagaaattaaaatttctctttacttgtgcatctatgccatacaaaggaggagcatgtgagtgaagtcaggggacgtagcagcctcagaaagctcctgtgcttgtt

SEQ ID NO: 34965 - DNA, 110 bp, synthetic construct
  source 1..110: mol_type = other DNA
ttgacatagtgacctgtcattgaattctgtgtctccactagcaggtgacatggtgtaaagctcaaaatgttcgttccattaaatttggttgaagtcctgtttgtaataga

SEQ ID NO: 34966 - DNA, 110 bp, synthetic construct
  source 1..110: mol_type = other DNA
gcaagtccttctgacttcatctaagggggaggtatgttactgacaggcccaagccctttattttaaaatgatgttacttacatgactgtccaggggcatggactgcaaag

SEQ ID NO: 34967 - DNA, 110 bp, synthetic construct
  source 1..110: mol_type = other DNA
ctttattttaaaatgatgttacttacatgactgtccaggggcatggactgcaaagtagcttcagctcctgtagagcaagttgttaattttaatttttacaaaataaagtt

SEQ ID NO: 34968 - DNA, 110 bp, synthetic construct
  source 1..110: mol_type = other DNA
tggtacagtggtcattatgataaagaataacagttcgcgtggactcagggaggcaagcatatacatagataaaccctaggacatcagctccatagcagagagaccttgac

SEQ ID NO: 34969 - DNA, 110 bp, synthetic construct
  source 1..110: mol_type = other DNA
agcatatacatagataaaccctaggacatcagctccatagcagagagaccttgactgtgcctggtgcctagtcatcctcattaactatttgctgaactatctcagaagat

SEQ ID NO: 34970 - DNA, 110 bp, synthetic construct
  source 1..110: mol_type = other DNA
acctactgctgcacctgatggggtgtcactccgggaccttttgtgtagcatcccctgtccagtaaccattgatgcctctgttactttccaggctctttcttcagtctcaa

SEQ ID NO: 34971 - DNA, 110 bp, synthetic construct
  source 1..110: mol_type = other DNA
tgtccagtaaccattgatgcctctgttactttccaggctctttcttcagtctcaaggctaggcctctacaaggcttgcagggctgtggtgtgcaacccagaattttatat

SEQ ID NO: 34972 - DNA, 110 bp, synthetic construct
  source 1..110: mol_type = other DNA
taattcattgtcaaattcacttgcttctctggcttgcagcagaggtgctcacttcaatacacaagacttctggtgagctagaaaatattcagcaagaaatgggccagcag

SEQ ID NO: 34973 - DNA, 110 bp, synthetic construct
  source 1..110: mol_type = other DNA
aatacacaagacttctggtgagctagaaaatattcagcaagaaatgggccagcagtggaggaaaaatagagctcaagaagaaacacaaataaaaattgacttccaaaggc

SEQ ID NO: 34974 - DNA, 110 bp, synthetic construct
  source 1..110: mol_type = other DNA
ggaagacctaaccgcaagcaatttttaaagcagtgattaacactcctatattgcgttatgcttcacaaagtctttgatgacaattattttattccctagtcccctacttt

SEQ ID NO: 34975 - DNA, 110 bp, synthetic construct
  source 1..110: mol_type = other DNA
agggccctgtagcaagaaaccccagcaccaagctctatccaccaggaacatcaattccaggatcccctatgctccagggctgcccaacaggagccacatctagccacagg

SEQ ID NO: 34976 - DNA, 110 bp, synthetic construct
  source 1..110: mol_type = other DNA
tccctgggatagggagctccctataggtccttgcagagctcacatgaggctccgaatgaagaaagggaaaggaaaccagcagacagatgggctgcctcctctatgctctg

SEQ ID NO: 34977 - DNA, 110 bp, synthetic construct
  source 1..110: mol_type = other DNA
tctgcaagctgcttattttaaaagacagctataaaagatgttaacctagaaaggagtgtcattcttcccaaaaactaatgtatattagttatccatggttctgtaattaa

SEQ ID NO: 34978 - DNA, 110 bp, synthetic construct
  source 1..110: mol_type = other DNA
atccagtattagcgcacatctcaagcactcttagtcccttccatttttatcatttctcctttctaaaaatcaagctcttttaggagcttttaggcaggaacctaactagg

SEQ ID NO: 34979 - DNA, 110 bp, synthetic construct
  source 1..110: mol_type = other DNA
ggcacattttatgatccctgtgttataccccatatatagatatggcacaggcaatggtgtgctaaaggtcaccagaatgggggcagagctgggcgcggagcctgactgtt

SEQ ID NO: 34980 - DNA, 110 bp, synthetic construct
  source 1..110: mol_type = other DNA
tgcacttctcagccccttttcattgcatttctcttgactcttccgccttcttctctattaaggggtcaggtgatcacactgaggccgtatatataaaacacccaaaaata

SEQ ID NO: 34981 - DNA, 110 bp, synthetic construct
  source 1..110: mol_type = other DNA
tattaaggggtcaggtgatcacactgaggccgtatatataaaacacccaaaaataagctccatattttaaagtccgctaatcagtaaccttaacttcatctgcaaaatct

SEQ ID NO: 34982 - DNA, 110 bp, synthetic construct
  source 1..110: mol_type = other DNA
tcttaattagagacttcagcattacaacggaagagtaaactgcttgaactacgaagtgtattgagccctcaatggacggggcaaggctgttctccacgacttcagtgtga

SEQ ID NO: 34983 - DNA, 110 bp, synthetic construct
  source 1..110: mol_type = other DNA
gtgtattgagccctcaatggacggggcaaggctgttctccacgacttcagtgtgagctttgacaattacagtgacaacaataggcaccactttctgagcactcagttttc

SEQ ID NO: 34984 - DNA, 110 bp, synthetic construct
  source 1..110: mol_type = other DNA
tgataaaaacaataagtgaaaaggagagctgaacactcggtgtgttgttcaaaaccctcctaggacttccacttgaaactggtctatttaacaattatccaagaaaactg

SEQ ID NO: 34985 - DNA, 110 bp, synthetic construct
  source 1..110: mol_type = other DNA
ctctcaaaagttaataaattgaagcaataaggcaaccagatgacatttctctatgtatttggagcttgggctctacaagtgatgacaaggtaagattcaggctataacaa

SEQ ID NO: 34986 - DNA, 110 bp, synthetic construct
  source 1..110: mol_type = other DNA
tatttggagcttgggctctacaagtgatgacaaggtaagattcaggctataacaactacagtctgacagtgaagttttcaactaaattgtagtttcttagtaactctctt

SEQ ID NO: 34987 - DNA, 110 bp, synthetic construct
  source 1..110: mol_type = other DNA
gaccagggagacctctcctgagaggtgatcagggtactggcctcttgtgcactatgccgggagtcatccaacagagctcttgagagtctcacaaggcaagagagccctag

SEQ ID NO: 34988 - DNA, 110 bp, synthetic construct
  source 1..110: mol_type = other DNA
catctacacaaaaatcctgagtcaggtaggcaaagccagcatcctatttaaagaggaggagctgaaggatcaaggagcttaaatgactcacttgagcccacctggccaat

SEQ ID NO: 34989 - DNA, 110 bp, synthetic construct
  source 1..110: mol_type = other DNA
gaggagctgaaggatcaaggagcttaaatgactcacttgagcccacctggccaataggtgacatgcttgaaatctgaggcccttaaagacaaggccatgtttatctttac

SEQ ID NO: 34990 - DNA, 110 bp, synthetic construct
  source 1..110: mol_type = other DNA
acgtgtttaagatctgtcccttcttagaacatgctttccatgagcttagaggacctgactttgtaattcatccctgggtccccagcacctagaagtaagcctggcaccta

SEQ ID NO: 34991 - DNA, 110 bp, synthetic construct
  source 1..110: mol_type = other DNA
atggaactgaactaaatcagatttctataggtgaaaggtttcatgagatccttaggtaacagaacatggaaggtcaagaatggttgatgtggagctcccactatggcaca

SEQ ID NO: 34992 - DNA, 110 bp, synthetic construct
  source 1..110: mol_type = other DNA
gtaacagaacatggaaggtcaagaatggttgatgtggagctcccactatggcacacagggaccggtggcatcttgggagctgcttgcaacccaggttcaatcccaggcct

SEQ ID NO: 34993 - DNA, 110 bp, synthetic construct
  source 1..110: mol_type = other DNA
cagcggtataaatctgtatactacaaacagtatcaggaatgaaaaggacatcagtacaggtctggcataggataaaaagagggcaggattaactgtgctaaaaaacttga

SEQ ID NO: 34994 - DNA, 110 bp, synthetic construct
  source 1..110: mol_type = other DNA
aatctgactgcagtggctcaagttgctgcagatgtgcagattcaatctctagtctggtacagtgagttaaggtatctggtttttgctgcagctgtggcataggtcacagt

SEQ ID NO: 34995 - DNA, 110 bp, synthetic construct
  source 1..110: mol_type = other DNA
ctgtagaggatgtgtgagctgagatgcactaccaagaccataaaatatagcttcctgtaacagtctctacatggcttcataacctcaggatgggaaatacacaaaatctg

SEQ ID NO: 34996 - DNA, 110 bp, synthetic construct
  source 1..110: mol_type = other DNA
gaatctgtatcccatttgggggtaatatatgttcaaatggtcactgtgttctacgtgctccttcctcccctcccctcccccagcctggaggcaaagtgctggcagaggag

SEQ ID NO: 34997 - DNA, 110 bp, synthetic construct
  source 1..110: mol_type = other DNA
cactaaatgactgacatgtagtagttagtggtttttagctaacattatcgttaaagtattgcagtagcacacaaacttaattggttaaagaagtccttttctttttcttt

SEQ ID NO: 34998 - DNA, 110 bp, synthetic construct
  source 1..110: mol_type = other DNA
ttgtggctcagtgagttaaggactggacatagtcaacgtgaggatgtgggtttggtcctggccttactcagttaaggatatggcattgccacaagctgcagcataggtta

SEQ ID NO: 34999 - DNA, 110 bp, synthetic construct
  source 1..110: mol_type = other DNA
gatgccatgtgctatctgtgacatcccccagctggacaattataacataaacctcttattcacctgcaatcagacagtgccatctggagtggaaaattatacatcatttg

SEQ ID NO: 35000 - DNA, 110 bp, synthetic construct
  source 1..110: mol_type = other DNA
cagcatctgaagttggccgatacattgcaaaggactttttaatcaacaattggcaagctgtgagtgaaaggtaaggatgagatatgaggcctctctttcccttaggacac

SEQ ID NO: 35001 - DNA, 110 bp, synthetic construct
  source 1..110: mol_type = other DNA
ctccacaccagtggtttttgtacactctctgaacctcttgctgtggtctttctactctaccctgctggggcctggcctcatgcgtgctcttaagctctcatggaggtgaa

SEQ ID NO: 35002 - DNA, 110 bp, synthetic construct
  source 1..110: mol_type = other DNA
tctaccctgctggggcctggcctcatgcgtgctcttaagctctcatggaggtgaaaccctacccacaatcccacagacccacaccccgctccaacctaccccagataggc

SEQ ID NO: 35003 - DNA, 110 bp, synthetic construct
  source 1..110: mol_type = other DNA
aatcttgaaggagtgtgacatcctgaaaaagggcttagttaggagggttaatgggtctggattttaaacccatgtggccttaaagagctctctaggtctcaattcctcaa

SEQ ID NO: 35004 - DNA, 110 bp, synthetic construct
  source 1..110: mol_type = other DNA
ggtgggagtcttcaggtgaagaaacccctgaagaggacaggaactcagagctgtcaccaacttcctttctagcagctgggggaggatagtgtgtgggttgcacagcacag

SEQ ID NO: 35005 - DNA, 110 bp, synthetic construct
  source 1..110: mol_type = other DNA
accaacttcctttctagcagctgggggaggatagtgtgtgggttgcacagcacagcatcatgtgatctagttgtgctgctttgagagagcatgcagatgatgtgcttgtt

SEQ ID NO: 35006 - DNA, 110 bp, synthetic construct
  source 1..110: mol_type = other DNA
attttaccaaaaaatcttctcttttacctttgaattgggtaatttctatgaatccaactttagttttactaattcttcctctacccatctccacttggttgttgtactca

SEQ ID NO: 35007 - DNA, 110 bp, synthetic construct
  source 1..110: mol_type = other DNA
ctatgaatccaactttagttttactaattcttcctctacccatctccacttggttgttgtactcatttagactgttttatttcactgattttagtcttcaaatctagaat

SEQ ID NO: 35008 - DNA, 110 bp, synthetic construct
  source 1..110: mol_type = other DNA
gggccttaacccactgctccacagcaggagctcttaggactgtgttaagatgtagagtccactgtgagagatcagtttgtttttgatataaatgatgatttataacatct

SEQ ID NO: 35009 - DNA, 110 bp, synthetic construct
  source 1..110: mol_type = other DNA
actgaaaagatgaaactgaaagctgagccaccgccttaaagatccaggaagtgaatcccaggacaaaaaaaggccaaatgtttatgaattgattaaggattctataaaca

SEQ ID NO: 35010 - DNA, 110 bp, synthetic construct
  source 1..110: mol_type = other DNA
tcccaggacaaaaaaaggccaaatgtttatgaattgattaaggattctataaacattgtggttctagacactgtcctggggacttagagataaagtgatgcgccccaccc

SEQ ID NO: 35011 - DNA, 110 bp, synthetic construct
  source 1..110: mol_type = other DNA
tctccccagggtggtttaataagtgcccccactcctagcccgattttctttttcggggaattgctttgccaagaagctagtctttcctctcccaaatgtcatcgctcagg

SEQ ID NO: 35012 - DNA, 110 bp, synthetic construct
  source 1..110: mol_type = other DNA
gggaattgctttgccaagaagctagtctttcctctcccaaatgtcatcgctcaggaagtgatagtgagaaagatgtggttagtcagtcagagccaggtcatagcatttat

SEQ ID NO: 35013 - DNA, 110 bp, synthetic construct
  source 1..110: mol_type = other DNA
tcccctatcccaaacgggcccttagaaccctgacttctgctctttgtcctttttcctctcctctccatctatcctcatgccctagctcaagtctgacctcctctgggaag

SEQ ID NO: 35014 - DNA, 110 bp, synthetic construct
  source 1..110: mol_type = other DNA
ttcttttcccttccctagggcctcatactcctccttctcctcccacttgaccatgctgcttctgactcccacaagacttagagatggtggagggaggagaggtggggtag

SEQ ID NO: 35015 - DNA, 110 bp, synthetic construct
  source 1..110: mol_type = other DNA
gggagagcgatttagtcccaattttacacgtgttcaaaggatacagaaatcacttcgcgtaagattaggacaatttttatgccgtttctaatttcataacacaattactg

SEQ ID NO: 35016 - DNA, 110 bp, synthetic construct
  source 1..110: mol_type = other DNA
cgcgtaagattaggacaatttttatgccgtttctaatttcataacacaattactgaagtattactaataaagcaggaaatagggagaggattagaaagcttgttgaaaac

SEQ ID NO: 35017 - DNA, 110 bp, synthetic construct
  source 1..110: mol_type = other DNA
atgctgatgaaactcaaatctacctgcctcctcatgtttctccatgaatcagggtttacccatccatcttcttgttggagatgcctattcacgtcccataggcagtgcca

SEQ ID NO: 35018 - DNA, 110 bp, synthetic construct
  source 1..110: mol_type = other DNA
ttacccatccatcttcttgttggagatgcctattcacgtcccataggcagtgccacccacaatgcaaggtgtactcaatgtacaaaacgaattcccaccttctcaccacc

SEQ ID NO: 35019 - DNA, 110 bp, synthetic construct
  source 1..110: mol_type = other DNA
aatgagagtggatgttctcccccagctggtttccagacatgatcacagactccctgtcataccccaggtgcaaatcctcacacacacatgtatccccacaactacgttta

SEQ ID NO: 35020 - DNA, 110 bp, synthetic construct
  source 1..110: mol_type = other DNA
ctgacccatggcctggagaaccctgcctccagccctgtacatcctcctgttacctaccctgctggggtacctcgtcagatgctacttccagggagcttcttttggatccc

SEQ ID NO: 35021 - DNA, 110 bp, synthetic construct
  source 1..110: mol_type = other DNA
accctgctggggtacctcgtcagatgctacttccagggagcttcttttggatccctagctcaaaatcctatctcctaccgcgcattctatcatttagctactttctgtgt

SEQ ID NO: 35022 - DNA, 110 bp, synthetic construct; identical to SEQ ID NO: 35020
  source 1..110: mol_type = other DNA

SEQ ID NO: 35023 - DNA, 110 bp, synthetic construct; identical to SEQ ID NO: 35021
  source 1..110: mol_type = other DNA

SEQ ID NO: 35024 - DNA, 110 bp, synthetic construct
  source 1..110: mol_type = other DNA
aagaggcagaaccctccatattggcaggtggcagttttcacaagcaaggggaacttacccaggagacttgtctagatgattcgatctctaaacctgacagccagaatctt

SEQ ID NO: 35025 - DNA, 110 bp, synthetic construct
  source 1..110: mol_type = other DNA
tacccaggagacttgtctagatgattcgatctctaaacctgacagccagaatcttaacatttgtataatttacctgggttctgtcataggtaccatccagatggtctgaa

SEQ ID NO: 35026 - DNA, 110 bp, synthetic construct
  source 1..110: mol_type = other DNA
cgggaagtccagtgatgctctttcttaagtgcaactctgaaggcgtgagtttgcctacattgctagcactccaggactcttccaggtgctacatttggaaaccatttaat

SEQ ID NO: 35027 - DNA, 110 bp, synthetic construct
  source 1..110: mol_type = other DNA
tacattgctagcactccaggactcttccaggtgctacatttggaaaccatttaataaatgcttttggattaaacagagacactggcttgggtgacttttaatatgtgaga

SEQ ID NO: 35028 - DNA, 110 bp, synthetic construct
  source 1..110: mol_type = other DNA
ttagagcaaggttaaatcgtgagcctctgagacagtaagggcaaaattcacttatctcacaaaccaggtagctctgtctctaccagatccatagcatcctgtgcctatgg

SEQ ID NO: 35029 - DNA, 110 bp, synthetic construct
  source 1..110: mol_type = other DNA
acactcacatactacttctttttaatgttgacctaagggctccaattcctttccagcctaaactacctaacagggtactagctggatttctctgttcagatagcttcctg

SEQ ID NO: 35030 - DNA, 110 bp, synthetic construct
  source 1..110: mol_type = other DNA
ttacttcagtgacagagaggctgtaacgctcatatttccaaatatgttaaaatcttccatttagtcctctgagacaggtaatcttatttctgttaggaaacattttcaaa

SEQ ID NO: 35031 - DNA, 110 bp, synthetic construct; identical to SEQ ID NO: 35030
  source 1..110: mol_type = other DNA

SEQ ID NO: 35032 - DNA, 110 bp, synthetic construct
  source 1..110: mol_type = other DNA
catgccacagctgtgctaaggcttaaaataagaatttagcaacatgctgactcaccaaagagatttttacagtagataccaaattgtaaagactgggcgctgtggtaaaa

SEQ ID NO: 35033 - DNA, 110 bp, synthetic construct
  source 1..110: mol_type = other DNA
caaagagatttttacagtagataccaaattgtaaagactgggcgctgtggtaaaattaaatagtaaatggttgcttagcattctcagggcccctgccacgggaccgtgca

SEQ ID NO: 35034 - DNA, 110 bp, synthetic construct
  source 1..110: mol_type = other DNA
tggcttattttttcagtacttgaaattaaaaaattcatttgtaattgaagctccgagagaaataatattaaatatgactttgcatcagccaaggagcagaaggtacaagt

SEQ ID NO: 35035 - DNA, 110 bp, synthetic construct
  source 1..110: mol_type = other DNA
gccaaggtataaaatcttgaaaatgaggtttctgcgggaaactgcggaactgcatgctggcaattaggctgacgaacggtcttgatgaccccatcctccgtctcctgctt

SEQ ID NO: 35036 - DNA, 110 bp, synthetic construct
  source 1..110: mol_type = other DNA
gctggcaattaggctgacgaacggtcttgatgaccccatcctccgtctcctgcttcaagccacagagccttgcagtcatgttgcaattagtgctgtggagatggtgtgta

SEQ ID NO: 35037 - DNA, 110 bp, synthetic construct
  source 1..110: mol_type = other DNA
aagcacctgctgtgcatctagtccttgcggctgcaaagatgaaaataatgcatttcatgtcctcaggatatttacaatttaacacatgaattagtgaaaacatagctaaa

SEQ ID NO: 35038 - DNA, 110 bp, synthetic construct
  source 1..110: mol_type = other DNA
catgtcctcaggatatttacaatttaacacatgaattagtgaaaacatagctaaacaaacatgtctggtgtgtaaagacaaaatgaaaagtcatttcagggtggtgtggt

SEQ ID NO: 35039 - DNA, 110 bp, synthetic construct
  source 1..110: mol_type = other DNA
agaactagacactcttgggggaaaataagatagtggttaatttaaaaaatgttaccaaggagttgccatcatggtttagcagtaatgaacctgactagtatcctttagga

SEQ ID NO: 35040 - DNA, 110 bp, synthetic construct
  source 1..110: mol_type = other DNA
tcacaccaaatgatattgcttaaaacaatggagggaaggatgttggtaatggtgaaaacataagctgctgattctgggtctcttattttacttggcttctgtcataagca

SEQ ID NO: 35041 - DNA, 110 bp, synthetic construct
  source 1..110: mol_type = other DNA
agtagtgtgactaacggtaagggcttcagagcagatgagatccaggcacaaattctacccttacttagctcccttgaggttactaagcaggttctctaagtctcagtttt

SEQ ID NO: 35042 - DNA, 110 bp, synthetic construct
  source 1..110: mol_type = other DNA
tacccttacttagctcccttgaggttactaagcaggttctctaagtctcagttttctcatctgtgaaataagaatgggagggaaggagttcctgtcttggctcagtgatt

SEQ ID NO: 35043 - DNA, 110 bp, synthetic construct
  source 1..110: mol_type = other DNA
ttatggagctcttcttcccaaagcatggcctccaggctgggggcaggggcagggggtggtccaacaggggcttgtcttcctcaatccttaaggtagatctctaaatttgt

SEQ ID NO: 35044 - DNA, 110 bp, synthetic construct
  source 1..110: mol_type = other DNA
tccctgcattaatatgcgtttcctgtgaggcaaacatcctttaccattatgcttagcatatggtcctagatagaagctctacaagaacttctgctttgccgattttacct

SEQ ID NO: 35045 - DNA, 110 bp, synthetic construct
  source 1..110: mol_type = other DNA
gaatccttgatacagcttgacttgaacagctccagggcttgcattaatttgaacgcacctctttcccaggggaggcctctgactgaagtatttacttgggttgctttttg

SEQ ID NO: 35046 - DNA, 110 bp, synthetic construct
  source 1..110: mol_type = other DNA
gacaagtgccatggtctattctatatccttagttccaaacacagtgtctggtacattgtaggtggtcagtaaacatttgttgaattggtaaatggatttaaaatataaaa

SEQ ID NO: 35047 - DNA, 110 bp, synthetic construct
  source 1..110: mol_type = other DNA
ggcacagaaacagtgtaagattcaactttgtacccatgcataatctgaaagcaggagaatttctcagcttctctaaggatacagttttgacagataggcggtagagactg

SEQ ID NO: 35048 - DNA, 110 bp, synthetic construct
  source 1..110: mol_type = other DNA
cttctagcaaatgtaggtgcgccttcatccacattggcccttaaaatactgaggtctttcagtttatctttgccaagatagaccaatgattgacagttgaggtacatatt

SEQ ID NO: 35049 - DNA, 110 bp, synthetic construct
  source 1..110: mol_type = other DNA
tgcttaatatagcatcatgaatgcacagctgcagaggatgtgcaaaacagccaaaattgtacacactgcaatctgtgagggattttgttcttcctttttatgtctggggt

SEQ ID NO: 35050 - DNA, 110 bp, synthetic construct
  source 1..110: mol_type = other DNA
ataaattcacacagctaaatttattctcaagagaggacaactatttattaacatgggtggttcttagcatacccagtatatttgtcctggtatattttctacggaggaca

SEQ ID NO: 35051 - DNA, 110 bp, synthetic construct; identical to SEQ ID NO: 35050
  source 1..110: mol_type = other DNA

SEQ ID NO: 35052 - DNA, 110 bp, synthetic construct
  source 1..110: mol_type = other DNA
tcatgcttcatataaatgacctggtagaaggatgcaataaaagtgtactttgtgatactgaggccactcatgccattagagaaagcactgtgtcagcactttcctttcca

SEQ ID NO: 35053 - DNA, 110 bp, synthetic construct
  source 1..110: mol_type = other DNA
gcaagaaacaccgctgtgcaagtgatttttatatagctacatcgagctgggtgtctttacagttggagaaggaagtgctaaatatgtaacagcctggggccttgctggac

SEQ ID NO: 35054 - DNA, 110 bp, synthetic construct
  source 1..110: mol_type = other DNA
cttaggaaaatgggcagattactagatcatcacttatggtcacagaaacataagtctcctagctgtcagtgaacttcaatccacagataaaaaattcaagatgatggaga

SEQ ID NO: 35055 - DNA, 110 bp, synthetic construct
  source 1..110: mol_type = other DNA
ctcctagctgtcagtgaacttcaatccacagataaaaaattcaagatgatggagacttagaaggcgatagagcaaggaatggcaacttctaactttctagaatttaccct

SEQ ID NO: 35056 - DNA, 110 bp, synthetic construct
  source 1..110: mol_type = other DNA
gttcttgcctccacggttcccctaaccctgtgatggttttgtcacgatttgtgcttctctcccattgtgacctagctagcaaactcacagcaaggtgacctagcttacaa

SEQ ID NO: 35057 - DNA, 110 bp, synthetic construct
  source 1..110: mol_type = other DNA
gtacaacaccattctttcatgaggacagctagacacctggtggtagggtgactacattggaccccttctactccaatgagggtatctattaattgctgaggtagagctat

SEQ ID NO: 35058 - DNA, 110 bp, synthetic construct
  source 1..110: mol_type = other DNA
atagattgtgaatcaagtgtatatgggtagaaattaaggctgtggaatggatgagattgtctgtagagcaggaagtggagaccgttcccagtcatgtgaaaatctacatt

SEQ ID NO: 35059 - DNA, 110 bp, synthetic construct
  source 1..110: mol_type = other DNA
attgtctgtagagcaggaagtggagaccgttcccagtcatgtgaaaatctacatttaatggaagttagaagctgagtctgcagaacatctcaagaagtcattagaaggta

SEQ ID NO: 35060 - DNA, 110 bp, synthetic construct
  source 1..110: mol_type = other DNA
tagtctacccatattccccaaccagtgaagagtgattcagcaaaaacagctgcctcaaggataggcaggttgttacagtcaggactctaaggtagtaagtactcagtgca

SEQ ID NO: 35061 - DNA, 110 bp, synthetic construct
  source 1..110: mol_type = other DNA
gcacatacaaacacatagacaccaccagagatctcatagattcatttcctaagcttagttatagatacaataaataaaattcactagtttaaagtaacagttggaataag

SEQ ID NO: 35062 - DNA, 110 bp, synthetic construct; identical to SEQ ID NO: 35061
  source 1..110: mol_type = other DNA

SEQ ID NO: 35063 - DNA, 110 bp, synthetic construct
  source 1..110: mol_type = other DNA
cagggacctcattgtaactcctctccaggtcctctggtttttgtctcaaggaaaccctagaggccaaaagacaacccgtctaaattgacctgaagggagcgtctcacatg

SEQ ID NO: 35064 - DNA, 110 bp, synthetic construct
  source 1..110: mol_type = other DNA
cctagaggccaaaagacaacccgtctaaattgacctgaagggagcgtctcacatgttaagctcacatatggttactgaacagagggagaaatgtatcccgcttgtttctg

SEQ ID NO: 35065 - DNA, 110 bp, synthetic construct; identical to SEQ ID NO: 35063
  source 1..110: mol_type = other DNA

SEQ ID NO: 35066 - DNA, 110 bp, synthetic construct; identical to SEQ ID NO: 35064
  source 1..110: mol_type = other DNA

SEQ ID NO: 35067 - DNA, 110 bp, synthetic construct
  source 1..110: mol_type = other DNA
aacttaaccagtcacatatgagagccttagaaaaacaaagacgccctcctctgggtctccatcaagtggcacacattgtcccacggtagacagactgtcacttccactgc

SEQ ID NO: 35068 - DNA, 110 bp, synthetic construct
  source 1..110: mol_type = other DNA
cagacataggcaccaaaagcttgagcaagaaataggatggctttttaagagagcagaagtccttagcagaagttaaagaaagcatcatctcaaatctctctgttaccatc

SEQ ID NO: 35069 - DNA, 110 bp, synthetic construct
  source 1..110: mol_type = other DNA
tgagttccccaaaagcaactgaatttgggttattgaacatttattagaaatcaacacttgtgaaaggaaaggaggaaaagcaggattgggcagaggacaaagttaaactg

SEQ ID NO: 35070 - DNA, 110 bp, synthetic construct; identical to SEQ ID NO: 35069
  source 1..110: mol_type = other DNA

SEQ ID NO: 35071 - DNA, 110 bp, synthetic construct
  source 1..110: mol_type = other DNA
ctcattaaggttgcaggagtcaacacataggcttcctgtcagactaggactgattggcttccaaaatgaatgatataatacaggggtttctgtcactctggatatagtat

SEQ ID NO: 35072 - DNA, 110 bp, synthetic construct
  source 1..110: mol_type = other DNA
acaaggcccagcactgaggtctgagcaagagcccagacagaaggtgccatggaccaatgatatgtaattgcctattggagacgcttgggagcatatacagttggttacag

SEQ ID NO: 35073 - DNA, 110 bp, synthetic construct
  source 1..110: mol_type = other DNA
aatgatatgtaattgcctattggagacgcttgggagcatatacagttggttacagctgtacctgttcaattagcctattgaacaattttaggttttatttgtgtttactg

SEQ ID NO: 35074 - DNA, 110 bp, synthetic construct
  source 1..110: mol_type = other DNA
aattgcaatcactctacatagaatcatcattaaggatatctattactagcaactgcaatgctaatatggatatgacttatgaaacttaatacttttctaatcctagccca

SEQ ID NO: 35075 - DNA, 110 bp, synthetic construct
  source 1..110: mol_type = other DNA
tggttgtactcttggattatagaggttaccaggcaaggagttgtaccagagccatagcagtgacaatgccaagtccttaaaagcttaggccatcaggaaactcccacact

SEQ ID NO: 35076 - DNA, 110 bp, synthetic construct
  source 1..110: mol_type = other DNA
ttcagctttaagagccaccctgaaacattaatagcttaaaaaagctatggtttgttttgctcatgattctgttggttggcttggcaattctggtttgcgccagctggagt

SEQ ID NO: 35077 - DNA, 110 bp, synthetic construct
  source 1..110: mol_type = other DNA
tcccaaagatttcctttgcttctctagcaaaggtaatctattcattatttggttgtcttttttatatcctctgaaatgtgagctctttgagagattatgttttgcctccc

SEQ ID NO: 35078 - DNA, 110 bp, synthetic construct
  source 1..110: mol_type = other DNA
gaactccagaattggcttcaggcaagttcaaagacatacacagtatcctgtggtcttgttgatagagtctgggatgaatctgggtatcacacatcctctctgtatctggg

SEQ ID NO: 35079 - DNA, 110 bp, synthetic construct
  source 1..110: mol_type = other DNA
ttgttgatagagtctgggatgaatctgggtatcacacatcctctctgtatctgggaaattttctcctgacctagcatgtaaaacccaaatcagtaagaacttgaaacatt

SEQ ID NO: 35080 - DNA, 110 bp, synthetic construct
  source 1..110: mol_type = other DNA
aggccaagcttgtcgtggctcaggctggagcacctgctcttcctgctgcttttcctgctcttcttctgccgcttggcatagacctctgatgccacctctgccagagagca

SEQ ID NO: 35081 - DNA, 110 bp, synthetic construct
  source 1..110: mol_type = other DNA
tcattataaggacaaggtgagcctaaggaactttccaagcagacaggtcctacaggcagctggaaacgggctggagcaaaggcacccaacatctttactcatgaaacctt

SEQ ID NO: 35082 - DNA, 110 bp, synthetic construct
  source 1..110: mol_type = other DNA
ccgaggtggagatctttattctcatctcatagatgggaaaactaaagtcttagtaatatccctggccagtatgacagctcatagaaccattaactagaaaatagtggact

SEQ ID NO: 35083 - DNA, 110 bp, synthetic construct
  source 1..110: mol_type = other DNA
atatccctggccagtatgacagctcatagaaccattaactagaaaatagtggacttttgtaagtatatgcttccattccagagccctggggggattaattaccacaggaa

SEQ ID NO: 35084 - DNA, 110 bp, synthetic construct
  source 1..110: mol_type = other DNA
attcaggaatgaatatgtaatgcatcccatattcaagctcaactgtgaatcattttaggacttttgcttaagatattggcaaagaaccatcttttcttcccattggactt

SEQ ID NO: 35085 - DNA, 110 bp, synthetic construct
  source 1..110: mol_type = other DNA
ttggttttagtttctctcccatggtatttgttgcatacagttcttctgtttggataatgtcagtgcaaacaattaaagcacaggtttcaaattcttcttcagagttggaa

SEQ ID NO: 35086 - DNA, 110 bp, synthetic construct
  source 1..110: mol_type = other DNA
ggagaggtgggtacaggttagatcacataggaccttgtagttcttggcaagacatctagatttcatgtgtataggaagctgtggagctgtggagtgacatcatctaattt

SEQ ID NO: 35087 - DNA, 110 bp, synthetic construct
  source 1..110: mol_type = other DNA
ctagatttcatgtgtataggaagctgtggagctgtggagtgacatcatctaattttgaaaagtcattctggctaccaagtgggtaattaagttttcttttagatatattt

SEQ ID NO: 35088 - DNA, 110 bp, synthetic construct
  source 1..110: mol_type = other DNA
tgctggtttcctgttattgctaatatctgggttacaacatcctctcctgttcatctcacagcttctgcatcacctgtgtggcctattttgtgcattcagtgccctctgtt

SEQ ID NO: 35089 - DNA, 110 bp, synthetic construct
  source 1..110: mol_type = other DNA
attttgcttttcctttaattactcatttggaacaagtgatgactgaaagagtaaacagtgtgtaaacacttcagctgggggagtatttcatcagggtctcttgatgtgtg

SEQ ID NO: 35090 - DNA, 110 bp, synthetic construct
  source 1..110: mol_type = other DNA
cagtgtgtaaacacttcagctgggggagtatttcatcagggtctcttgatgtgtggattaattttttactaattaaccattaattgtccagaaattggaacaaacagttg

SEQ ID NO: 35091 - DNA, 110 bp, synthetic construct
  source 1..110: mol_type = other DNA
ctaaggggtcttttttttcaaagctggaagggtcataaaacaactgctaacgtttttctaacttgtgtccttttcaaggcgtgggactgagagttgctttgttctgaatc

SEQ ID NO: 35092 - DNA, 110 bp, synthetic construct
  source 1..110: mol_type = other DNA
ttctaacttgtgtccttttcaaggcgtgggactgagagttgctttgttctgaatcatgataaaatatgacaacttctagtttcacagtcactctgccatttataatgtgc

SEQ ID NO: 35093 - DNA, 110 bp, synthetic construct; identical to SEQ ID NO: 35091
  source 1..110: mol_type = other DNA

SEQ ID NO: 35094 - DNA, 110 bp, synthetic construct; identical to SEQ ID NO: 35092
  source 1..110: mol_type = other DNA

SEQ ID NO: 35095 - DNA, 110 bp, synthetic construct
  source 1..110: mol_type = other DNA
agccccctttcatggtggtggtagtttgtggtgtgttcttctttatagctgtggtatcagttgtaacttctcttcctgccctcatctcttcattctgtccttcagtgatg

SEQ ID NO: 35096 - DNA, 110 bp, synthetic construct
  source 1..110: mol_type = other DNA
atcagttgtaacttctcttcctgccctcatctcttcattctgtccttcagtgatgccaacactcactccctagtgaccactggttttcatctctgtccctcaccctggga

SEQ ID NO: 35097 - DNA, 110 bp, synthetic construct
  source 1..110: mol_type = other DNA
ccgtattactccatcgagacagcagttgcatattcaaaaataaccttccctaggagacattcatcaaccctcatcttccttggcctttcgctagctttcattgtgtgtta

SEQ ID NO: 35098 - DNA, 110 bp, synthetic construct
  source 1..110: mol_type = other DNA
gacattcatcaaccctcatcttccttggcctttcgctagctttcattgtgtgttatctctccaccattccttactcacatttttcccctagacttctaggatacccttcc

SEQ ID NO: 35099 - DNA, 110 bp, synthetic construct
  source 1..110: mol_type = other DNA
agtcattttcctactctcaggctcatgtcagccctgtttattgtgcaatttctaaaaacaattatttcacatatttcccccacctcttagttgctgatgatatgaagtta

SEQ ID NO: 35100 - DNA, 110 bp, synthetic construct
  source 1..110: mol_type = other DNA
tagtccttataccccataaagtggcctcaagtggaaacccaatttgatcttctgactggtcttgggcagaataccttatttgtatggggaacaggttattgagtggcaga

SEQ ID NO: 35101 - DNA, 110 bp, synthetic construct
  source 1..110: mol_type = other DNA
ctggtcttgggcagaataccttatttgtatggggaacaggttattgagtggcagagtggggagtgggagacattccttctgtcgcagggagtgagcagcccaggctggtc

SEQ ID NO: 35102 - DNA, 110 bp, synthetic construct
  source 1..110: mol_type = other DNA
aaaaagccatgtgtttgtagtaatctttgacccacaggcagttgtgctcagggtgcctaaggttcggctcacaggtagttgtttttagggtgcaattaaaccagggagaa

SEQ ID NO: 35103 - DNA, 110 bp, synthetic construct
  source 1..110: mol_type = other DNA
gctcagggtgcctaaggttcggctcacaggtagttgtttttagggtgcaattaaaccagggagaagcacaaggaagggctctaagctattcacttttatattagtcattt

SEQ ID NO: 35104 - DNA, 110 bp, synthetic construct
  source 1..110: mol_type = other DNA
ggtagccccaagaaactgctctgagacagtgagtgaggagctaggatgtgtaggagtttttgccacaaagggcaggggagcaggaacgaaagaggcctgggctcactgaa

SEQ ID NO: 35105 - DNA, 110 bp, synthetic construct; identical to SEQ ID NO: 35104
  source 1..110: mol_type = other DNA

SEQ ID NO: 35106 - DNA, 110 bp, synthetic construct
  source 1..110: mol_type = other DNA
cagtgcacaactcttcatatgtccaagttcttatagtttttaaaagactttccgccataattcccttgacatagttaccatgataggaatttccagatagacaaaaattg

SEQ ID NO: 35107 - DNA, 110 bp, synthetic construct
  source 1..110: mol_type = other DNA
actctacatcagggagcctgaggaggccacagctaatctgtttcagtctgttacagctgtgtagaactgtggggtcagtgttaaaagttttgcagttctctttttatgtt

SEQ ID NO: 35108 - DNA, 110 bp, synthetic construct
  source 1..110: mol_type = other DNA
tagttctggccacttttttctgactctgaaagcttgcagcttgtcccaagctggaagcgggagaccaatctgctggaaatactcagttgtcagaacttttattgcttgtt

SEQ ID NO: 35109 - DNA, 110 bp, synthetic construct
  source 1..110: mol_type = other DNA
tggcatcccagtgtgtgggttcctttcctctttaatagctccctctcaggagtactagttccatcctgataccttttctctttctttgttttctttttgttctacccaat

SEQ ID NO: 35110 - DNA, 110 bp, synthetic construct; identical to SEQ ID NO: 35109
  source 1..110: mol_type = other DNA

SEQ ID NO: 35111 - DNA, 110 bp, synthetic construct
  source 1..110: mol_type = other DNA
ggtcataaacacacactgaagatgccagattcatgcatcagaattgccctggggcaataggcatggtcatagggagagaaaatccagtatttggtatctcagaacttgaa

SEQ ID NO: 35112 - DNA, 110 bp, synthetic construct
  source 1..110: mol_type = other DNA
aataggcatggtcatagggagagaaaatccagtatttggtatctcagaacttgaagacttgctgttgaaaatgacatgatctttaaaaaatgcaaatcatactacgtgac

SEQ ID NO: 35113 - DNA, 110 bp, synthetic construct
  source 1..110: mol_type = other DNA
cgtacgggcagagaggaatgctgaggtgtaatgcaagccaacaacagctatggctgaccccacggggagcactggagcacaaatggcccatcataggtgtttctcattgg

SEQ ID NO: 35114 - DNA, 110 bp, synthetic construct
  source 1..110: mol_type = other DNA
ttgtacctactaaaggttcacacttgcagcaactgtctattaaccattccatgaatctgtggaatgcttgaatttcaggaggctctcttggatttctggtgctgcccgaa

SEQ ID NO: 35115 - DNA, 110 bp, synthetic construct
  source 1..110: mol_type = other DNA
tctgtggaatgcttgaatttcaggaggctctcttggatttctggtgctgcccgaagctcctcattaggaggaatgtcttctgaatttggcgtgttcttgttcattttctc

SEQ ID NO: 35116 - DNA, 110 bp, synthetic construct
  source 1..110: mol_type = other DNA
gccaagagtcatgatgaatcaatatctaaatgtttaagtaagcttcgaaggaaattttaaatttaacaactggggcagtgtacagatagtccatgcccagaatgccctct

SEQ ID NO: 35117 - DNA, 110 bp, synthetic construct
  source 1..110: mol_type = other DNA
tactgatttattttaaaagaatattaaaaggtacaaatcaacagagatacagagatacatagggtaaggtccagagcaaaggcgcttctgtcctcctggaacttggggtc

SEQ ID NO: 35118 - DNA, 110 bp, synthetic construct
  source 1..110: mol_type = other DNA
tacatagggtaaggtccagagcaaaggcgcttctgtcctcctggaacttggggtccagcacagtgagacatggaagtcttcttgttccctaagttgaaagctctctgaaa

SEQ ID NO: 35119 - DNA, 110 bp, synthetic construct
  source 1..110: mol_type = other DNA
tgtggatgagagtacaggatggtattatgtgatatggtctggttttcagctctcccatctcagaaaccagatttgttggccttctgaaggtgaatctgtctcttaggata

SEQ ID NO: 35120 - DNA, 110 bp, synthetic construct
  source 1..110: mol_type = other DNA
gaggactttcttcttggcttgcaaatggccaccttcttgcttgctgagccttcgcatgtagaagatagctctgttctctcttccctttcaagtaaggacggacacttatc

SEQ ID NO: 35121 - DNA, 110 bp, synthetic construct
  source 1..110: mol_type = other DNA
gtatttatgctgttgtttaaaaatacagcttcttgatctttgttagtctgccaaatcagtacatgcagacctttctacatcggcttttttagagcttcattgtgcatact

SEQ ID NO: 35122 - DNA, 110 bp, synthetic construct
  source 1..110: mol_type = other DNA
tcagtacatgcagacctttctacatcggcttttttagagcttcattgtgcatactccagttccctgttggcagacatttcattttgttttgtatttttgttttgcttgtt

SEQ ID NO: 35123 - DNA, 110 bp, synthetic construct
  source 1..110: mol_type = other DNA
gtgcttcagttcggaaaaactaagttcattgtctctttaaatactgcttctcttacttctgggaatctttcttaaaatatgcagtactttatcacaatatagcaaggact

SEQ ID NO: 35124 - DNA, 110 bp, synthetic construct
  source 1..110: mol_type = other DNA
tggcagtgtgggttttgtaatcagccaacattgctttcaaactttaaattctaaagtgcaagctctgcacatcattcattacatcatcacaaaacatggtctatatttct

SEQ ID NO: 35125 - DNA, 110 bp, synthetic construct
  source 1..110: mol_type = other DNA
gtgcaagctctgcacatcattcattacatcatcacaaaacatggtctatatttcttcttcttgaagatatcaaatcagaaatgcttttttttcaaatttttaaggccaag

SEQ ID NO: 35126 - DNA, 110 bp, synthetic construct
  source 1..110: mol_type = other DNA
aaccattgataatacagattaaatatctgtatccaaaaggcattaagtgactttcccaggttcccccagctccataataggtcagaacctgggactcgatgtcagtcatt

SEQ ID NO: 35127 - DNA, 110 bp, synthetic construct
  source 1..110: mol_type = other DNA
ccaggttcccccagctccataataggtcagaacctgggactcgatgtcagtcattttctgtctgttataaaattatctgttttatgaggcatctccaatatttgcatgtg

SEQ ID NO: 35128 - DNA, 110 bp, synthetic construct
  source 1..110: mol_type = other DNA
actcagtctttaggaacttgttaaaaaatgttagcttgatctttttactggcttgtgtgttatttggcagcatctgttccagttatgcaaggccttgtttcttcctgcag

SEQ ID NO: 35129 - DNA, 110 bp, synthetic construct
  source 1..110: mol_type = other DNA
tgtgttatttggcagcatctgttccagttatgcaaggccttgtttcttcctgcaggtatccatcaccctctaaatttcaggatagtttatttgctctgtggtttcaattg

SEQ ID NO: 35130 - DNA, 110 bp, synthetic construct
  source 1..110: mol_type = other DNA
aaggcatccaggctgcccatattgctgttaaaactgaagcagagattatatagattatattgtttaacttaaaagaagtgactaaacatgatgaaaggcaaagtaggaaa

SEQ ID NO: 35131 - DNA, 110 bp, synthetic construct
  source 1..110: mol_type = other DNA
gtagattaactgtagtaaaactattaatctaatagccacggggcctttgcactgtgtagctgcatctttcatgtcaaaggcataggttctactcaggcagaatcataaag

SEQ ID NO: 35132 - DNA, 110 bp, synthetic construct
  source 1..110: mol_type = other DNA
aatatccactctctcccatgtaagaaaatgtcacatttattagtttggtaagataatattatgaggtatggtttaagatcaaccttggccataggagatattaagaattg

SEQ ID NO: 35133 - DNA, 110 bp, synthetic construct
  source 1..110: mol_type = other DNA
actaattgctctgactaagacttctagtactgtattgaacagaagtagcaagagtcggcatccttaacttgttcctgatcttcgaggaaaagctttaggtttttcactgt

SEQ ID NO: 35134 - DNA, 110 bp, synthetic construct
  source 1..110: mol_type = other DNA
cggcatccttaacttgttcctgatcttcgaggaaaagctttaggtttttcactgttgagtatgatattagctatgagcttgtatttttacggtctttattatgttgaggt

SEQ ID NO: 35135 - DNA, 110 bp, synthetic construct
  source 1..110: mol_type = other DNA
tactgttttttgactcacagtggcatttatccaagtgcatggccacttagccttctaaggagaagatggaagaataaactcaatgtaagagatacttacatgagattttg

SEQ ID NO: 35136 - DNA, 110 bp, synthetic construct
  source 1..110: mol_type = other DNA
taaggagaagatggaagaataaactcaatgtaagagatacttacatgagattttgcatgcctcttcagcttctcttgacctgtgcttcccaacacttaacagcttgctta

SEQ ID NO: 35137 - DNA, 110 bp, synthetic construct
  source 1..110: mol_type = other DNA
aatcagaagtttgtaccttgtgactgcttacatccatcttcccctcccattagcaaccacaaatccaatctcttttactatgcatttctttgttttttgaagtagaattg

SEQ ID NO: 35138 - DNA, 110 bp, synthetic construct
  source 1..110: mol_type = other DNA
ggattctttcctgtaaattctaattgtatcaggaagtaatgcgacttttacataatcatttacagctgataaatggaagcactttacccacatacatacttcaaatttat

SEQ ID NO: 35139 - DNA, 110 bp, synthetic construct
  source 1..110: mol_type = other DNA
taaggcagccaatgtgttcttgttaatcgtccttgttatttcttcagaaaatctcctcataactattgtggtttcccttgtactgtgtgtaatgtacagttttttccagg

SEQ ID NO: 35140 - DNA, 110 bp, synthetic construct
  source 1..110: mol_type = other DNA
ctcataactattgtggtttcccttgtactgtgtgtaatgtacagttttttccaggtctcactcttcctttgggatccatgggttggtgttcttgttaattttggcttact

SEQ ID NO: 35141 - DNA, 110 bp, synthetic construct
  source 1..110: mol_type = other DNA
agactgcctgttggttgctttctgggatctctggtaagcatttctcccattgaagtttactaattttgtgttctgagctctttcagtttgtttgtctcacccttccaggt

SEQ ID NO: 35142 - DNA, 110 bp, synthetic construct
  source 1..110: mol_type = other DNA
gtcttgaattagaaaacaatacagatagcacatgttggctccaaatttggccagttaaatttgtctgcgttggagactggtggggttgctatggatgaggaaatttagta

SEQ ID NO: 35143 - DNA, 110 bp, synthetic construct
  source 1..110: mol_type = other DNA
ttctgatcttttatggttccctttaaaattttggaatatttgttcttgttctgtgaaaaatgtcctgagtaatttgacagggatcaccttaaatctgtagtttactttga

SEQ ID NO: 35144 - DNA, 110 bp, synthetic construct; identical to SEQ ID NO: 35143
  source 1..110: mol_type = other DNA

SEQ ID NO: 35145 - DNA, 110 bp, synthetic construct
  source 1..110: mol_type = other DNA
tatttgtggttcagttttctcagtccagtcattttttacttttgttgttttctactagagctgggttttaggcaggtgaatatgtccactagctgtgaattagcctttat

SEQ ID NO: 35146 - DNA, 110 bp, synthetic construct
  source 1..110: mol_type = other DNA
gtggttttcttaacttttacatggatcttaaaatttgtttttagcatgtccttccagcagttgggaaaatagcacacagcagaaaagggtagagaggacaaagagtggta

SEQ ID NO: 35147 - DNA, 110 bp, synthetic construct
  source 1..110: mol_type = other DNA
agcagttgggaaaatagcacacagcagaaaagggtagagaggacaaagagtggtacattttgggctgcctttgtgctaccttgaattcattttttatcagctgggtgtgg

SEQ ID NO: 35148 - DNA, 110 bp, synthetic construct
  source 1..110: mol_type = other DNA
gggaatatcttctattacttctttggcatatttaattattagagatgagaattttattgttgcagagatgcagtaataacaggtgtatccaagtttccgtagcttaatat

SEQ ID NO: 35149 - DNA, 110 bp, synthetic construct
  source 1..110: mol_type = other DNA
tggatgatctgccctttgatgtaagtgtggtattaagtcccctactccttctttattattgtcactattcccctttatgtctgttaatgtttgctctataaaattaggtc

SEQ ID NO: 35150 - DNA, 110 bp, synthetic construct; identical to SEQ ID NO: 35149
  source 1..110: mol_type = other DNA

SEQ ID NO: 35151 - DNA, 110 bp, synthetic construct
  source 1..110: mol_type = other DNA
tatttgggcaaatatgtttcatgtattcaagtgatatctatgatgtgtgctctgtcatgtagtggttaaattatagacctagtcttgtgcctgatctaagcaaattaata

SEQ ID NO: 35152 - DNA, 110 bp, synthetic construct
  source 1..110: mol_type = other DNA
ggtaagagagaatgtaacacagtagggtaagctaacgcaggagttcattcatatgaccaggagataaggctaaataagcacaatctggtgcagaagtggtgatgggaatt

SEQ ID NO: 35153 - DNA, 110 bp, synthetic construct
  source 1..110: mol_type = other DNA
tgacccctagcctgcgaaattctatatgctacaggtgtggccctaaaagacaaacaaaacaaaaataataataagcctataacctagtggtttgaatgttgtatgaaaat

SEQ ID NO: 35154 - DNA, 110 bp, synthetic construct
  source 1..110: mol_type = other DNA
tgtggccctaaaagacaaacaaaacaaaaataataataagcctataacctagtggtttgaatgttgtatgaaaatacactattatcctggtataaaagagacaggatagc

SEQ ID NO: 35155 - DNA, 110 bp, synthetic construct
  source 1..110: mol_type = other DNA
ttcaaaacaccattagttcctgcctcttccatgcttctcctcattctgcagctgacactctacctacctctcctccaactacacccccactctctgattctaccccttta

SEQ ID NO: 35156 - DNA, 110 bp, synthetic construct
  source 1..110: mol_type = other DNA
aaaagtcatagtcttttttcacccaatcttggaagtgacgttctatactgttaccatattctattcattaccaagtcagtaagtccagctcacactcaatggaagagaat

SEQ ID NO: 35157 - DNA, 110 bp, synthetic construct
  source 1..110: mol_type = other DNA
atattctattcattaccaagtcagtaagtccagctcacactcaatggaagagaattgcacaaaagtgtggatgacaggaggtagaggtcatccaggatgaaagtaaaggc

SEQ ID NO: 35158 - DNA, 110 bp, synthetic construct; identical to SEQ ID NO: 35156
  source 1..110: mol_type = other DNA

SEQ ID NO: 35159 - DNA, 110 bp, synthetic construct; identical to SEQ ID NO: 35157
  source 1..110: mol_type = other DNA

SEQ ID NO: 35160 - DNA, 110 bp, synthetic construct
  source 1..110: mol_type = other DNA
attgccagatttattttcaaaatgctctaaaatccacattaatgcagaggataatctcaccttgatatacttctttcttgcccgctaatatagacaagtaattttatatg

SEQ ID NO: 35161 - DNA, 110 bp, synthetic construct
  source 1..110: mol_type = other DNA
ctcaccttgatatacttctttcttgcccgctaatatagacaagtaattttatatgaactttctttttcaggatgaaaatacagaaagatcccccaaatgctctttttaac

SEQ ID NO: 35162 - DNA, 110 bp, synthetic construct
  source 1..110: mol_type = other DNA
gaagactctaactgcaggaaaaacggggtgactgctttctgctgaaaaggggcatcattagggataagcagttaagtctccactcacgggcttcaatacattacattggg

SEQ ID NO: 35163 - DNA, 110 bp, synthetic construct
  source 1..110: mol_type = other DNA
aaaaacagctccagctcctgatactggagccctgctctgatacacacaggtagacttcagtgttatcacaagtccttttgatgctaacagctgagccattttcttctgct

SEQ ID NO: 35164 - DNA, 110 bp, synthetic construct
  source 1..110: mol_type = other DNA
gtttaaaacttatgggttgtttatttctggaaatttttatttaatattttcaaaccgccgttgaccatgggtaactgaaaccgcagataaggagagactattatttgttg

SEQ ID NO: 35165 - DNA, 110 bp, synthetic construct
  source 1..110: mol_type = other DNA
cgccgttgaccatgggtaactgaaaccgcagataaggagagactattatttgttgacatttagtaattcttttaactggctgccagcaaaagcctgacactagtaaaatt

SEQ ID NO: 35166 - DNA, 110 bp, synthetic construct
  source 1..110: mol_type = other DNA
actgggctgggctggggattaatcccacacctcaacccactgtgccacggagggaactctggaaaatatatatatttgaaagggtttttaaaaatagtaaccaaatcagt

SEQ ID NO: 35167 - DNA, 110 bp, synthetic construct
  source 1..110: mol_type = other DNA
cacggagggaactctggaaaatatatatatttgaaagggtttttaaaaatagtaaccaaatcagtatgtggtccttgtttgatcctaaatcaaacaaaccaacttaaaaa

SEQ ID NO: 35168 - DNA, 110 bp, synthetic construct
  source 1..110: mol_type = other DNA
gaggtccttctgtttttattgcatttccgtcccaccacagaattttcaaattgtatcaaaaatgagagtaccaatgaatatataaagaatggatgaataaattaagggat

SEQ ID NO: 35169 - DNA, 110 bp, synthetic construct; identical to SEQ ID NO: 35168
  source 1..110: mol_type = other DNA

SEQ ID NO: 35170 - DNA, 110 bp, synthetic construct
  source 1..110: mol_type = other DNA
tagagtactattgccccaaccctactcattcaaatgtatccttttagacatgcttatacattcattcaaagctagtgtccatatataagttagtaaatcatgattctgtg

SEQ ID NO: 35171 - DNA, 110 bp, synthetic construct
  source 1..110: mol_type = other DNA
agacatgcttatacattcattcaaagctagtgtccatatataagttagtaaatcatgattctgtgttgaagttcttgacaaataacttcttagagtagccaaccgattta

SEQ ID NO: 35172 - DNA, 110 bp, synthetic construct
  source 1..110: mol_type = other DNA
tttttttttttttttttttaagttggtcgtttttttctgtgcatcagtttgaccataggattatccgaagccaacattgtcctctctttgtatgtatgtccctttggcat

SEQ ID NO: 35173 - DNA, 110 bp, synthetic construct
  source 1..110: mol_type = other DNA
tatgactcttgcgtaccctgtaatttggatgctccatatagggtgagaattacagtcttggcctaacaatagctttcataggatgatattatgaaccttaacaacataaa

SEQ ID NO: 35174 - DNA, 110 bp, synthetic construct
  source 1..110: mol_type = other DNA
tcttggcctaacaatagctttcataggatgatattatgaaccttaacaacataaaatgtccttgcaaaaggctctacttagaagcatcaagagtgcatttctcccatttt

SEQ ID NO: 35175 - DNA, 110 bp, synthetic construct
  source 1..110: mol_type = other DNA
aattatcccttttctcttaggcttatagtttctttctctctgccccaaacactcctgtcctaaaaacaaccacaaaacgaatatttcctcagctctacttatctctcaaa

SEQ ID NO: 35176 - DNA, 110 bp, synthetic construct
  source 1..110: mol_type = other DNA
tgtcctaaaaacaaccacaaaacgaatatttcctcagctctacttatctctcaaatttcctttctgcaaacttttggaaagtttatttctcttcttcctgacctaatctt

SEQ ID NO: 35177 - DNA, 110 bp, synthetic construct
  source 1..110: mol_type = other DNA
aaaatttctgtcacttttgctaaagatggggggtggtagctttgagcaaaaacctggagcagctctggcaacagctctatgtcctttccccgtagcttgagttttgtaca

SEQ ID NO: 35178 - DNA, 110 bp, synthetic construct
  source 1..110: mol_type = other DNA
tgaacagcacgaacagcacacacagctgctctttagggaagagccttggatggaccagctcagacccgggcatatacttttccagtttatatggcacacatctaagaacc

SEQ ID NO: 35179 - DNA, 110 bp, synthetic construct
  source 1..110: mol_type = other DNA
cagctcagacccgggcatatacttttccagtttatatggcacacatctaagaaccttgaagataatcagtaaatgttaacttaatgagtgaatgtgccattatctgctgt

SEQ ID NO: 35180 - DNA, 110 bp, synthetic construct
  source 1..110: mol_type = other DNA
taacattttattatgtttgtgaaggttttcttttactcgactaagagataaaatggaggctctggaaaaactcaaattggaacatgctggtagtttgtatcgtattttgt

SEQ ID NO: 35181 - DNA, 110 bp, synthetic construct
  source 1..110: mol_type = other DNA
gaggctctggaaaaactcaaattggaacatgctggtagtttgtatcgtattttgttttgctgctgttgtggtatgtgaatttaaaacaatcgcagaatacagatgcaaca

SEQ ID NO: 35182 - DNA, 110 bp, synthetic construct
  source 1..110: mol_type = other DNA
acttggctggactagaggaaaatatggaaacaaatgacctatgtgaagagccgtgtcaaacacttgcttcatggtagtatcagtcttcagattgttattgcaagctgata

SEQ ID NO: 35183 - DNA, 110 bp, synthetic construct
  source 1..110: mol_type = other DNA
tcaaacacttgcttcatggtagtatcagtcttcagattgttattgcaagctgataagcatttttaatgacctaaagtatggctttgagcagggcactccagcagggcctt

SEQ ID NO: 35184 - DNA, 110 bp, synthetic construct
  source 1..110: mol_type = other DNA
cactctgtgaggtgggtggctttgtggcagattgacctttcctggtgagtggttataaactgaaaagaaaatgaagctccttcatgacccgagtctaagtagtctgggac

SEQ ID NO: 35185 - DNA, 110 bp, synthetic construct
  source 1..110: mol_type = other DNA
tacctttgagtgacaaaaagaaacttcaaagtaaaaatgttcagtatatttaagtaaacatcctgaccccttcccctccctgccttatcatttgacttatacttgatcat

SEQ ID NO: 35186 - DNA, 110 bp, synthetic construct
  source 1..110: mol_type = other DNA
acatttgtttttacccattcattcatcagtggacacttgaattaccttcatgttttggctcttgtgaaccacacagatctgtccaagtctctgctttcacttctttgggt

SEQ ID NO: 35187 - DNA, 110 bp, synthetic construct
  source 1..110: mol_type = other DNA
tggctcttgtgaaccacacagatctgtccaagtctctgctttcacttctttgggtatttacccagaaatggaattgccagtcatacagtaattatatgtttcgtttttca

SEQ ID NO: 35188 - DNA, 110 bp, synthetic construct
  source 1..110: mol_type = other DNA
ggctcttcagtaaataaaacttgaaccccgttcaacattgtgaagacagaattagcagaagagaaaaccctttgccttcagcataagggaagcctagaaacttttttata

SEQ ID NO: 35189 - DNA, 110 bp, synthetic construct
  source 1..110: mol_type = other DNA
cagaagagaaaaccctttgccttcagcataagggaagcctagaaacttttttatatgaaagtagatagcagaatgtagtcataaaacacataaaccgaaggaaccttgga

SEQ ID NO: 35190 - DNA, 110 bp, synthetic construct
  source 1..110: mol_type = other DNA
aataaatacagaaaaaaacctgcagcaaattcttccaccaacacctactcttgccatcaagcaaaagattccaggaccccgagcagcactggaactgacggaatgtttta

SEQ ID NO: 35191 - DNA, 110 bp, synthetic construct; identical to SEQ ID NO: 35190
  source 1..110: mol_type = other DNA

SEQ ID NO: 35192 - DNA, 110 bp, synthetic construct
  source 1..110: mol_type = other DNA
ggggatggtactactttgcagtggccattggagtaatatatagataggctgtcaacctgtagtgatcaggtttaaccatctgcctcaaactcagttcacagccttgtagc

SEQ ID NO: 35193 - DNA, 110 bp, synthetic construct
  source 1..110: mol_type = other DNA
cctgtagtgatcaggtttaaccatctgcctcaaactcagttcacagccttgtagctaaaagtaggaattgccctttggatgggagtggctcattagaacactgaaaaaga

SEQ ID NO: 35194 - DNA, 110 bp, synthetic construct
  source 1..110: mol_type = other DNA
aattccttgttagtagcactaccctctgcacatttgtcaacaattctttgtaaatgtgtcacgcaggtttggatgggatgccaggtgcagaatggctaggatagaaaagt

SEQ ID NO: 35195 - DNA, 110 bp, synthetic construct
  source 1..110: mol_type = other DNA
gtgtcacgcaggtttggatgggatgccaggtgcagaatggctaggatagaaaagtgtaggaccttcacctgctctgtgcaaattattcttacagtaattatcacttagat

SEQ ID NO: 35196 - DNA, 110 bp, synthetic construct
  source 1..110: mol_type = other DNA
aattctttatgtctgatctcaagtagaacaatcactgatttggccgtgtaactcatgaatgtttaaattctaacatccaagtatgagaagatgaatttgataagagaagg

SEQ ID NO: 35197 - DNA, 110 bp, synthetic construct
  source 1..110: mol_type = other DNA
tgaatgtttaaattctaacatccaagtatgagaagatgaatttgataagagaagggagctgtttgtcgtgttgcccttcgcaaaaggtcaaatgactcctggtgacttca

SEQ ID NO: 35198 - DNA, 110 bp, synthetic construct
  source 1..110: mol_type = other DNA
ctgactccattttagagacactttttgcagccagatgcagccatgagcctaaggcccagcccatataatttaagcaaaatgacacttcttagaccataaacgctgtacaa

SEQ ID NO: 35199 - DNA, 110 bp, synthetic construct
  source 1..110: mol_type = other DNA
ccagcccatataatttaagcaaaatgacacttcttagaccataaacgctgtacaacacaatcttctacaccgaatttccgcttcttgctgactggaatagcctcagaggg

SEQ ID NO: 35200 - DNA, 110 bp, synthetic construct
  source 1..110: mol_type = other DNA
tcaaaaccgcaataggtcaagtattaaatctaggtttggtatcatggggtgtagccccagtgacaccatttgagggctgtagtttttctcttttaacaaggcacttagtg

SEQ ID NO: 35201 - DNA, 110 bp, synthetic construct
  source 1..110: mol_type = other DNA
cccagtgacaccatttgagggctgtagtttttctcttttaacaaggcacttagtgcaaacagctgggataaagttagcagcaggacagagagctggtctttctcataact

SEQ ID NO: 35202 - DNA, 110 bp, synthetic construct
  source 1..110: mol_type = other DNA
gacgggaacttatctaggtaatacatgtttatgcaccaggtgtaccaacctgaataagaattacatggtttggagttcctgtcgtgattagctccctggcttgggaacct

SEQ ID NO: 35203 - DNA, 110 bp, synthetic construct
  source 1..110: mol_type = other DNA
tgtttatgcaccaggtgtaccaacctgaataagaattacatggtttggagttcctgtcgtgattagctccctggcttgggaacctccatatgctgcaggtgtagccctaa

SEQ ID NO: 35204 - DNA, 110 bp, synthetic construct
  source 1..110: mol_type = other DNA
taaacttgttacatgcattttcatgtctgaatcactagagtagcatcagagattgaaggtaatagttttcaatgttttcagcaccagaattcttcataaaattcctgtag

SEQ ID NO: 35205 - DNA, 110 bp, synthetic construct
  source 1..110: mol_type = other DNA
cattttcatgtctgaatcactagagtagcatcagagattgaaggtaatagttttcaatgttttcagcaccagaattcttcataaaattcctgtaggtaatgcaaatttat

SEQ ID NO: 35206 - DNA, 110 bp, synthetic construct
  source 1..110: mol_type = other DNA
attgatagcacagtacaaagagtacttatattccctcggattcaccacttgttaacattttgctgtttttactttgtcttctttctctctctctttctctctctcacacc

SEQ ID NO: 35207 - DNA, 110 bp, synthetic construct
  source 1..110: mol_type = other DNA
ccagctgtccctgccagatacttgggggaccaaccccaccccaggcacagctgggtgactgccaattaggcctgcccggagcaagaggcagcccctgctgcctaagagtg

SEQ ID NO: 35208 - DNA, 110 bp, synthetic construct
  source 1..110: mol_type = other DNA
tgactgccaattaggcctgcccggagcaagaggcagcccctgctgcctaagagtggagagatgggtcactcaactctctgctctaatacaatttattttctgctgcagag

SEQ ID NO: 35209 - DNA, 110 bp, synthetic construct
  source 1..110: mol_type = other DNA
tactattaagaataataagtagtagtatttattagctctttacagtacagcatgctgggctgtagaaattgtagcagtgtctttataggcatgagtcttatttcatcatg

SEQ ID NO: 35210 - DNA, 110 bp, synthetic construct
  source 1..110: mol_type = other DNA
tgggctgtagaaattgtagcagtgtctttataggcatgagtcttatttcatcatgacgacaacatctgaagtagatcgtgttgacctcgtggaagcgtggaggatctaag

SEQ ID NO: 35211 - DNA, 110 bp, synthetic construct
  source 1..110: mol_type = other DNA
aggacccctactcccaggagctctgggctgctagataaatccttatccaggccttggtctctgctctaggtcagacaccatgtctccttgcttgctagttactgtctgca

SEQ ID NO: 35212 - DNA, 110 bp, synthetic construct
  source 1..110: mol_type = other DNA
tgatccagggagctaggtagctggtttcctcaataagaaacaataaacccagggatattagagactctataaactgaattatttgtactttacagaacttgaattttgtt

SEQ ID NO: 35213 - DNA, 110 bp, synthetic construct
  source 1..110: mol_type = other DNA
tggctgttgactgcagtcgatttcagctatcctacagaaatctacaggtaacacacatgccaaatattataaaccaaatgctaaacctggactggagaaagctgagaacc

SEQ ID NO: 35214 - DNA, 110 bp, synthetic construct
  source 1..110: mol_type = other DNA
agatgtaaaaagccgtttctccaaagaagatatacaagtgggctataagctcataaaaagatgcttaacatcataagctgtccgggaaatacaaaccaaaaccacaataa

SEQ ID NO: 35215 - DNA, 110 bp, synthetic construct
  source 1..110: mol_type = other DNA
aaaagatgcttaacatcataagctgtccgggaaatacaaaccaaaaccacaataagaaatccataccaaaaagaatgggtttccttcagggtgatgaaaatgttctggaa

SEQ ID NO: 35216 - DNA, 110 bp, synthetic construct
  source 1..110: mol_type = other DNA
atataagtgaggctgaatagccctgctggcaccccctggacaggatctgcagaaaactcttctgcaggaggagctgaggttgcccagaatccctgaccttcttctccaaa

SEQ ID NO: 35217 - DNA, 110 bp, synthetic construct
  source 1..110: mol_type = other DNA
actcttctgcaggaggagctgaggttgcccagaatccctgaccttcttctccaaacttccacctttcttaaaactcctgtgcctttgtcctggagctgcagcatcacagt

SEQ ID NO: 35218 - DNA, 110 bp, synthetic construct
  source 1..110: mol_type = other DNA
tgtatggatgcacacacatacctctgtactagctgtacaatgttcttattattttttccaacacagctattaagcagacaaaataagtgtggtaaggaagaaatgcccta

SEQ ID NO: 35219 - DNA, 110 bp, synthetic construct
  source 1..110: mol_type = other DNA
ttccaacacagctattaagcagacaaaataagtgtggtaaggaagaaatgccctagaaatcagaaagttaaatcttctaacttagctctgtacttaactggatgtgtgat

SEQ ID NO: 35220 - DNA, 110 bp, synthetic construct
  source 1..110: mol_type = other DNA
atggcctgtgatcctgcaaagaacagcccttgccaatgctagtcctcccctgcaacttctggtctgacacattggagctcgggggttgaaattgattgtatccaagagtt

SEQ ID NO: 35221 - DNA, 110 bp, synthetic construct
  source 1..110: mol_type = other DNA
aaacaattttgcctgaaatgacagcatgtgaatagctcagctggtagatttgcgagccggaagtatgatgtagcctgtgaatggatcctgctaaaattgcattttaattg

SEQ ID NO: 35222 - DNA, 110 bp, synthetic construct
  source 1..110: mol_type = other DNA
cgtaattttttttacatttgtctctactttcttattatctattgatgtcattatttgcattacctgctctgttaagcaggtaaggataagcacaggaggaatctgaagta

SEQ ID NO: 35223 - DNA, 110 bp, synthetic construct
  source 1..110: mol_type = other DNA
tgcattacctgctctgttaagcaggtaaggataagcacaggaggaatctgaagtattacctttcatgtaactccagtggtacctataggcttttagggccttgagagagt

SEQ ID NO: 35224 - DNA, 110 bp, synthetic construct
  source 1..110: mol_type = other DNA
tatcacttgcatgaagagatttaatcatgacaaggtcctttctcactaatattgtctctagcattaatatttgccagtatgtgtttttctctcctattgattcctttgat

SEQ ID NO: 35225 - DNA, 110 bp, synthetic construct
  source 1..110: mol_type = other DNA
catgacaaggtcctttctcactaatattgtctctagcattaatatttgccagtatgtgtttttctctcctattgattcctttgatcatttgttacttccttttgaattta

SEQ ID NO: 35226 - DNA, 110 bp, synthetic construct
  source 1..110: mol_type = other DNA
ggcactgtcttccacaaccattctcattttaaaatttgacacaatttcatacctaatattgattttgaaacattgtttttgaaccaggtctcccttagctttgagtgata

SEQ ID NO: 35227 - DNA, 110 bp, synthetic construct
  source 1..110: mol_type = other DNA
taaatgcccaacttaaaaaaatgctttaaaatgcctcaaagacagaagcagtcatcctttttatcaagtgatttccatagagagtattaagtgcatcagaactatttctc

SEQ ID NO: 35228 - DNA, 110 bp, synthetic construct
  source 1..110: mol_type = other DNA
tttagggtaacttgttctcccccgggtgacgtgcagtacctaataaagcataactggggacacaggtggctccgtgttttcacaaagggagcatactgttgtgctaattt

SEQ ID NO: 35229 - DNA, 110 bp, synthetic construct
  source 1..110: mol_type = other DNA
ggggacacaggtggctccgtgttttcacaaagggagcatactgttgtgctaatttactccttgagttccagttgttttctataaatgatacagagagtaggtatgacata

SEQ ID NO: 35230 - DNA, 110 bp, synthetic construct
  source 1..110: mol_type = other DNA
aatttgaccctttgttcacagttctcctctttattccagactctgccactctcatgggtgatttaaacatccatatgaatgtcctacccttcattctggcctcttggttc

SEQ ID NO: 35231 - DNA, 110 bp, synthetic construct
  source 1..110: mol_type = other DNA
acaaaaaacccccccaaaaaaccatatgctgccagcgcggccctaaaaaggcaaaagaccaaaaaaaaaaagaaaaaaagatactttggaaatcagagtgcatatttaaa

SEQ ID NO: 35232 - DNA, 110 bp, synthetic construct
  source 1..110: mol_type = other DNA
cgcggccctaaaaaggcaaaagaccaaaaaaaaaaagaaaaaaagatactttggaaatcagagtgcatatttaaatgtatttttctgacgtcacattaatctttgtcttt

SEQ ID NO: 35233 - DNA, 110 bp, synthetic construct
  source 1..110: mol_type = other DNA
gacgggaacccctacattatctttttgactttgttaagcgcagatgttcatagccctacccttcgctctacctcttctactcttcttaagagctgagcatctgtgaattg

SEQ ID NO: 35234 - DNA, 110 bp, synthetic construct
  source 1..110: mol_type = other DNA
ctacccttcgctctacctcttctactcttcttaagagctgagcatctgtgaattgtgttactttaacactgttaagactgaaaaagtttttattttcttctataacattt

SEQ ID NO: 35235 - DNA, 110 bp, synthetic construct
  source 1..110: mol_type = other DNA
actgacaactgagatttaaatggtaagtcatacaagtcattatgttaggactagcaaatgacagaaagccttaagaagctaaatgaagaaaaaggagttcattgactcat

SEQ ID NO: 35236 - DNA, 110 bp, synthetic construct
  source 1..110: mol_type = other DNA
aaatgacagaaagccttaagaagctaaatgaagaaaaaggagttcattgactcatgtactgtatttcagagaaaggacctatctttaagacattgctgtatctggaactt

SEQ ID NO: 35237 - DNA, 110 bp, synthetic construct
  source 1..110: mol_type = other DNA
agcaaaatttgatatttaaatgaagaagctattaaaatcctttgtcttttcccgcagatggtatacctcaagtttactattttggcccttgtggtaaatacaatgctatg

SEQ ID NO: 35238 - DNA, 110 bp, synthetic construct
  source 1..110: mol_type = other DNA
tggccattagcatgcttaaatttgaaagactgaccatactaaatattggaccggctttgaagcaactggaagtctcatgcattgctggtggaaataaaatggcacaaccc

SEQ ID NO: 35239 - DNA, 110 bp, synthetic construct
  source 1..110: mol_type = other DNA
tttgaagcaactggaagtctcatgcattgctggtggaaataaaatggcacaacccttttggaaaacagtgtagaaatttcttaggaagttacatgtagactttccatatg

SEQ ID NO: 35240 - DNA, 110 bp, synthetic construct
  source 1..110: mol_type = other DNA
ctgacttttctaaacctaggaaaaatgtcttgtgcctagagtttcctttttggtgatgtctctttttaaaggcccttggctggataatttctttctattctttccggtag

SEQ ID NO: 35241 - DNA, 110 bp, synthetic construct
  source 1..110: mol_type = other DNA
atatggatgctatgattcaggtgattagtgaagagggctagacatgaaaataccggcatagtgagaaaaaaagacattgattctgagcactatctagatgtgaatgaatt

SEQ ID NO: 35242 - DNA, 110 bp, synthetic construct
  source 1..110: mol_type = other DNA
gttttgggacttaatagagtccagaaaaactcttcactagtgcgatttggagcctctgcccctcccttttctgtgagtagtgattgaataaggccatatttctgtcctgg

SEQ ID NO: 35243 - DNA, 110 bp, synthetic construct
  source 1..110: mol_type = other DNA
tgtaacaaaccctctgaggatttcgttagccggcgtctgatacgaggaccaggcaggcttcctttccttatagggttacgctttgccctcttcctctggaggcctcatca

SEQ ID NO: 35244 - DNA, 110 bp, synthetic construct
  source 1..110: mol_type = other DNA
ttactgatgtgtaaaaataaacttcatttcccttgttttcagaatggggaaattgcacacagcccaaatatttgtagggcagatttaaaaagacaatgcctaaggaatat

SEQ ID NO: 35245 - DNA, 110 bp, synthetic construct
  source 1..110: mol_type = other DNA
cacacagcccaaatatttgtagggcagatttaaaaagacaatgcctaaggaatattttgtaattatgcaaggaatgggaactattgctaaattttacagcttctctgaca

SEQ ID NO: 35246 - DNA, 110 bp, synthetic construct
  source 1..110: mol_type = other DNA
aggaagatagaattcctagcattttggtagctctcaggaaagaattttgtaaccaggaccttgtagtttttgaggtcacctggtctcatcctagaatatcctgccttctt

SEQ ID NO: 35247 - DNA, 110 bp, synthetic construct
  source 1..110: mol_type = other DNA
gcagatgttccatgagctgagctgacagactcaacagcatcacccagatgggcccctattctctctacaagaacagcctctaactcaatggcagatagttctcagcctat

SEQ ID NO: 35248 - DNA, 110 bp, synthetic construct
  source 1..110: mol_type = other DNA
ctattctctctacaagaacagcctctaactcaatggcagatagttctcagcctatctcactgcgtccaaaccccaacctccattaaccagacacttctccagaggaaaac

SEQ ID NO: 35249 - DNA, 110 bp, synthetic construct
  source 1..110: mol_type = other DNA
ggctttcccactagagggtcccacagccctacttctaaaggtatctggacctctactctaccccaccagctgtgtcagagggtaaaaagtctttcttcatatattcacag

SEQ ID NO: 35250 - DNA, 110 bp, synthetic construct
  source 1..110: mol_type = other DNA
gcatttttttcttccatgtctttgctgaacaaatatgaagctggtgcctacacagcatcagttatttttttagtcactggggataaaacaaaacaaaaagtcctgacctt

SEQ ID NO: 35251 - DNA, 110 bp, synthetic construct
  source 1..110: mol_type = other DNA
ggaaaaaaaaaaaaaaaaaggaaaagaataaatgtaatcatgacaccaactgcccaccagtgtgagggggaaaaaaactagtgaaaattctcaggttttcctgttccatg

SEQ ID NO: 35252 - DNA, 110 bp, synthetic construct
  source 1..110: mol_type = other DNA
accagtgtgagggggaaaaaaactagtgaaaattctcaggttttcctgttccatgaccttgcaagtgcaagagaactgaggtgcagaacaaactagcacaacacctgagc

SEQ ID NO: 35253 - DNA, 110 bp, synthetic construct
  source 1..110: mol_type = other DNA
tcatgttatgccggttggaactgtgctacagtgcagttgggtaagccccattatcctgccggcaacacacacacacacacacacacacattcaattcaatcagttctcct

SEQ ID NO: 35254 - DNA, 110 bp, synthetic construct
  source 1..110: mol_type = other DNA
ccttggtccaggacagtgagtcctggcctgtgtggttccctgccccagagctcgggcctgtgctgagaggtgtttctcagtgatctccctgtacatcatctttagtaatt

SEQ ID NO: 35255 - DNA, 110 bp, synthetic construct
  source 1..110: mol_type = other DNA
tatgcaaagcccagatgctcggccaagagtgtctcaaccgactacagtttctcacttgtttttgtttgaattataattggaccgatctatatttctcagcccattctgta

SEQ ID NO: 35256 - DNA, 110 bp, synthetic construct
  source 1..110: mol_type = other DNA
ttgtttttgtttgaattataattggaccgatctatatttctcagcccattctgtagctgtcacaggcacccctttgcctctgttgctacctctgcttgactcaccttctt

SEQ ID NO: 35257 - DNA, 110 bp, synthetic construct
  source 1..110: mol_type = other DNA
gagcagaagcagggataccagcaggtgacctctgaacaggccacgtttgacccgaggcagaacaatgccagacagagctcacgccacctaagattgcagcactattcaca

SEQ ID NO: 35258 - DNA, 110 bp, synthetic construct
  source 1..110: mol_type = other DNA
atgtaaaagttcatgccacctgtccacatgagccatattatcacaatggagagttgacttagtcatgaattagctgccttttccttataattgattgtaagttgtgacat

SEQ ID NO: 35259 - DNA, 110 bp, synthetic construct
  source 1..110: mol_type = other DNA
gacttagtcatgaattagctgccttttccttataattgattgtaagttgtgacatcatgtattattctccacataaagctgacactcactgaagaaactataaaatgcta

SEQ ID NO: 35260 - DNA, 110 bp, synthetic construct
  source 1..110: mol_type = other DNA
ttaggtcacaaaaaataaagataatgacagctagaaagaaaaaagatacccaggacccatccctggggccagcagtagagaatggaagaaaaaaagcctaagagtgacct

SEQ ID NO: 35261 - DNA, 110 bp, synthetic construct
  source 1..110: mol_type = other DNA
acaacaatggcttttcccatccttgtcagaattttaccttaaagatctagaaataagcacagcctttgtagaacactgtcttagaaagacttggcaaccacattcttttc

SEQ ID NO: 35262 - DNA, 110 bp, synthetic construct
  source 1..110: mol_type = other DNA
agcacagcctttgtagaacactgtcttagaaagacttggcaaccacattcttttcacattcatgtatcttttataggattttttgtttgttttttggctgagcttgcaac

SEQ ID NO: 35263 - DNA, 110 bp, synthetic construct
  source 1..110: mol_type = other DNA
agaagagcctgaataaaatcactgtttaccagctgatcttagcaccatccattagaaaaagagctatttcattctcctttgaagcaacctagtaacaacaaaactttttc

SEQ ID NO: 35264 - DNA, 110 bp, synthetic construct
  source 1..110: mol_type = other DNA
gaatttgaggcttttcaaaatattaatataatctcacttattaagataaaacgatgtgcgaaagcactggaaattctcacagtggatcagctatctattttcctttgctt

SEQ ID NO: 35265 - DNA, 110 bp, synthetic construct
  source 1..110: mol_type = other DNA
gtgcgaaagcactggaaattctcacagtggatcagctatctattttcctttgctttttttttttttttaatggaaaggatctataattaggagtgtccgttttcacatcc

SEQ ID NO: 35266 - DNA, 110 bp, synthetic construct; identical to SEQ ID NO: 35264
  source 1..110: mol_type = other DNA

SEQ ID NO: 35267 - DNA, 110 bp, synthetic construct; identical to SEQ ID NO: 35265
  source 1..110: mol_type = other DNA

SEQ ID NO: 35268 - DNA, 110 bp, synthetic construct
  source 1..110: mol_type = other DNA
gaattcaactgcagaggctcaggttcaattcctggcctggtgcagtgggttaaaggatctggcatggttacgactatggcgtcggtcacagctgcagctcggaatcaatc

SEQ ID NO: 35269 - DNA, 110 bp, synthetic construct
  source 1..110: mol_type = other DNA
tgggttaaaggatctggcatggttacgactatggcgtcggtcacagctgcagctcggaatcaatccctggcctgggaacttccataggccgtgtgtgcatagccattaaa

SEQ ID NO: 35270 - DNA, 110 bp, synthetic construct
  source 1..110: mol_type = other DNA
cagtatttctactgtcagaacataagaaggtcaaagcttctaaactctaggtggcagagaataaaaatatgaatatttaatggtcgtctatgctatctgtattaaaaaga

SEQ ID NO: 35271 - DNA, 110 bp, synthetic construct
  source 1..110: mol_type = other DNA
agagaataaaaatatgaatatttaatggtcgtctatgctatctgtattaaaaagaaccccttaacacagcaacaacacactgcacacgatcaaaatgaaaatttgctaat

SEQ ID NO: 35272 - DNA, 110 bp, synthetic construct
  source 1..110: mol_type = other DNA
tgagttgtggtcaaccaaacactggacccaaacagaagtgacctgagaagctatagataactttagccactgtcgtcattatctacatctatgtagcaagcaacccccaa

SEQ ID NO: 35273 - DNA, 110 bp, synthetic construct
  source 1..110: mol_type = other DNA
catcaaagcacagaaagaagattttttttttttttttttaaagatggcacagattttgagtagtaacaaaatggagtttgaatccaagtctggctaattccacattccaa

SEQ ID NO: 35274 - DNA, 110 bp, synthetic construct
  source 1..110: mol_type = other DNA
ttgagtagtaacaaaatggagtttgaatccaagtctggctaattccacattccaaagcctttgctgctacagtaactcttcctaaagtggggctgacaatatgtacctga

SEQ ID NO: 35275 - DNA, 110 bp, synthetic construct
  source 1..110: mol_type = other DNA
aaagaagggacttggcccttcccctttctcgtggctttgcagaggtgatcattttccaactcacaacactctctgctacctgcgcctcctctcttccgccgccccgtcgc

SEQ ID NO: 35276 - DNA, 110 bp, synthetic construct
  source 1..110: mol_type = other DNA
ccaactcacaacactctctgctacctgcgcctcctctcttccgccgccccgtcgcagctcagtttactcccagagaagctgcccatactcatcagcctgagggccagagc

SEQ ID NO: 35277 - DNA, 110 bp, synthetic construct
  source 1..110: mol_type = other DNA
ctggggtactagatatctgcccaaagcttgacaagccaatgggtgaactagggaatacgccatggggctatcaaacacttgtgcgagcagctcatcagtaagcagccaag

SEQ ID NO: 35278 - DNA, 110 bp, synthetic construct
  source 1..110: mol_type = other DNA
tacgccatggggctatcaaacacttgtgcgagcagctcatcagtaagcagccaagtggcaaattgggattgactgggaatgctgagcagctgttgacttttgaagtattg

SEQ ID NO: 35279 - DNA, 110 bp, synthetic construct; identical to SEQ ID NO: 35277
  source 1..110: mol_type = other DNA

SEQ ID NO: 35280 - DNA, 110 bp, synthetic construct; identical to SEQ ID NO: 35278
  source 1..110: mol_type = other DNA

SEQ ID NO: 35281 - DNA, 110 bp, synthetic construct
  source 1..110: mol_type = other DNA
ctgcgccacaagggaacgcccccaagtggtcatttttcattggaaaaaacacctagttcacaaaagtgccatttaaaatgctaattttctgctacacatcacatgaataa

SEQ ID NO: 35282 - DNA, 110 bp, synthetic construct
  source 1..110: mol_type = other DNA
gttcacaaaagtgccatttaaaatgctaattttctgctacacatcacatgaataagaagcgtaattgccccccaaatatgggtaaatatgggtctcactcttaggatggc

SEQ ID NO: 35283 - DNA, 110 bp, synthetic construct
  source 1..110: mol_type = other DNA
tattttctgggtatattttctgggtatatttctggatagagctaagagggtatgctctagaatgaggaatgaagttgcctaactgagatggggaatacaagaagaagcat

SEQ ID NO: 35284 - DNA, 110 bp, synthetic construct
  source 1..110: mol_type = other DNA
cattcccaggacaactgtcctctctcctgcctggctgtacatacctcaagcaattccttggagacttggagggggcgagctttctctctttggagatgcatgcgggcggc

SEQ ID NO: 35285 - DNA, 110 bp, synthetic construct
  source 1..110: mol_type = other DNA
tggtgaaccgagctgcaacagagccagtccattcctatcagtgtctctttatcatcagctctgatggctgcagccaaaacaattgtgtgggggacttaatggagatcact

SEQ ID NO: 35286 - DNA, 110 bp, synthetic construct
  source 1..110: mol_type = other DNA
cagctctgatggctgcagccaaaacaattgtgtgggggacttaatggagatcactaactagtttaaccaaacagttggctgggttgtggtttatccatcaagtctgatga

SEQ ID NO: 35287 - DNA, 110 bp, synthetic construct
  source 1..110: mol_type = other DNA
tacaaaatacaaaaaatgtttggtgtgtttagctgtcagcctttgcttctctcccagtatggtactgtggttaggcacccaagagaaggcttgtaggacagggcccattt

SEQ ID NO: 35288 - DNA, 110 bp, synthetic construct
  source 1..110: mol_type = other DNA
gtcccaggcactcatctgagttaattagttggcttctgtgattctccccaactccctctgaagctcctgctggcaacttctagccttttttggactaatatcagacaaca

SEQ ID NO: 35289 - DNA, 110 bp, synthetic construct
  source 1..110: mol_type = other DNA
ctctgaagctcctgctggcaacttctagccttttttggactaatatcagacaacaaaaatgcagatgagccagcctagatgttggctgaaactccacccctcaaatgcaa

SEQ ID NO: 35290 - DNA, 110 bp, synthetic construct
  source 1..110: mol_type = other DNA
gtagctgaaatgccttaggtttgaacagctccagggagtagtaactgtctctccagttgtccatcattagtaagtcctcccaagaagataaacaatgaagaaaactaaaa

SEQ ID NO: 35291 - DNA, 110 bp, synthetic construct
  source 1..110: mol_type = other DNA
ggcttgttgaaagtgtgccaagcagctgcctcctttagcgccgggagaggagctgcctcttgggcaagaactgaagcctggaggagaaggcttgccaaaacagtgaacag

SEQ ID NO: 35292 - DNA, 110 bp, synthetic construct
  source 1..110: mol_type = other DNA
cctcttgggcaagaactgaagcctggaggagaaggcttgccaaaacagtgaacagaaaccaggaagaaattccgatttatgttgctgcaaaaagaggagggagccgagga

SEQ ID NO: 35293 - DNA, 110 bp, synthetic construct
  source 1..110: mol_type = other DNA
ggtatagatgtgggctttgagatatgtgtgttctgagagataaaggacagagggggctcccctcctacaattcttatttaaaaaaaaattcaggaggtcccatcatggca

SEQ ID NO: 35294 - DNA, 110 bp, synthetic construct
  source 1..110: mol_type = other DNA
aactcagaagccaaacaggcaaatattactcagtgagtctttttaactattccaacgtgtattacaaaatgaagggtctgaagagaagatttttgagtcttccattttct

SEQ ID NO: 35295 - DNA, 110 bp, synthetic construct
  source 1..110: mol_type = other DNA
cgtgtattacaaaatgaagggtctgaagagaagatttttgagtcttccattttcttggtcaaatgaaaaacaggaaactcagaagccaataatgggctatataatatatc

SEQ ID NO: 35296 - DNA, 110 bp, synthetic construct
  source 1..110: mol_type = other DNA
cgttggacaaggggaaagcagactgaccagatctaccaccttttggaaaattctgtgcctaaaccataaatctcagagtaattttacctcctactttttgggtgttggtg

SEQ ID NO: 35297 - DNA, 110 bp, synthetic construct
  source 1..110: mol_type = other DNA
tgcctaaaccataaatctcagagtaattttacctcctactttttgggtgttggtggaggtttggggaaaccattttgtacttaaatgaaagaatcaatgaaactgatata

SEQ ID NO: 35298 - DNA, 110 bp, synthetic construct
  source 1..110: mol_type = other DNA
actacagagaaggccctggtcagaaattaggacagatgataaatatttgtcaggactctgtcagggcactgaaaggtccagcgtagcttggctaaaaccagaaactcaag

SEQ ID NO: 35299 - DNA, 110 bp, synthetic construct
  source 1..110: mol_type = other DNA
ctctgtcagggcactgaaaggtccagcgtagcttggctaaaaccagaaactcaagaggggatgtgatgtgacacagggcaacagaggcatgtaacagagtatcttcgtaa

SEQ ID NO: 35300 - DNA, 110 bp, synthetic construct
  source 1..110: mol_type = other DNA
tttctaggctctctattctcttccattgatccatatgtctctttttgtaccaatacaaccctgttttgatttctgtagtttcatagtattgtctgaagtctgggagagtt

SEQ ID NO: 35301 - DNA, 110 bp, synthetic construct
  source 1..110: mol_type = other DNA
caaccctgttttgatttctgtagtttcatagtattgtctgaagtctgggagagttatgcctcttgccttgctgccccaaccccacccaagaattgatttggctgttctgg

SEQ ID NO: 35302 - DNA, 110 bp, synthetic construct
  source 1..110: mol_type = other DNA
tttgttttttggctgctgtttcagtatgattattaatggttctcctattattcgaagtgttctgctttaaggaaaccttagcagctcctggttcagaagacaactatata

SEQ ID NO: 35303 - DNA, 110 bp, synthetic construct
  source 1..110: mol_type = other DNA
gatctgtttgcttcagttcccccctgctctatgcttcacatgggagtacttgcaaatagagcgcctggagggatcaacacaggtttctaaagcaaacataacacaagtgc

SEQ ID NO: 35304 - DNA, 110 bp, synthetic construct
  source 1..110: mol_type = other DNA
atagagcgcctggagggatcaacacaggtttctaaagcaaacataacacaagtgctattcatgggttacacactccacagctgtaatacgaaatgtgtaggagcccctaa

SEQ ID NO: 35305 - DNA, 110 bp, synthetic construct
  source 1..110: mol_type = other DNA
tctttacattgtagaaaacagctgagaattttttaattaaaatctttaccaaacgcatttgtttgtccaatccctatctgggggtattgaggagttaaccccatgggtgt

SEQ ID NO: 35306 - DNA, 110 bp, synthetic construct
  source 1..110: mol_type = other DNA
ggtcaaataaacaaaggagtgagcagagatcaatgtcattttaagccttgagtgtgctagctgcctctgattcatgacaatcaatttagtgactagaatttatcctacct

SEQ ID NO: 35307 - DNA, 110 bp, synthetic construct
  source 1..110: mol_type = other DNA
tctgctatgaataagcaactgttcccacacaaatcgaaatgattcacaaagaacttaagagactgcagaatgaggactatgatgatgaagctccaaacaggaccaggaag

SEQ ID NO: 35308 - DNA, 110 bp, synthetic construct
  source 1..110: mol_type = other DNA
taagagactgcagaatgaggactatgatgatgaagctccaaacaggaccaggaagtagaagcttcctacagaaaaaaaaaaattctgcctgtactctgaggctagaatgt

SEQ ID NO: 35309 - DNA, 110 bp, synthetic construct
  source 1..110: mol_type = other DNA
tgccctcatccctggaggctgcagcccagagctgaataggccttttcaatctccagccattataattctaggtgactattccaagaagacatgaaaggcgtggtttttct

SEQ ID NO: 35310 - DNA, 110 bp, synthetic construct
  source 1..110: mol_type = other DNA
gcaatgaccaaaaattcccatcccctaggctgggctaatgtcacacaatagaagtccaaagacttcttttaggtatcagaggtcaggaattctctcagcccctcacagct

SEQ ID NO: 35311 - DNA, 110 bp, synthetic construct
  source 1..110: mol_type = other DNA
ccaaagacttcttttaggtatcagaggtcaggaattctctcagcccctcacagctaacaacccgcccccctttttggggagggaggtcaaaaacaataaggcagatccca

SEQ ID NO: 35312 - DNA, 110 bp, synthetic construct
  source 1..110: mol_type = other DNA
ttgacaatgctagctcaacagggaaaagcagaaatagaagaaccaatggaacatttaaatagctctacctcagaaacaaataaattaaccaacaaataaaaacatgagag

SEQ ID NO: 35313 - DNA, 110 bp, synthetic construct
  source 1..110: mol_type = other DNA
taaatagctctacctcagaaacaaataaattaaccaacaaataaaaacatgagagcctgggaaggagagaaattacaaagtaacaatgcctagagtgatacagtttctaa

SEQ ID NO: 35314 - DNA, 110 bp, synthetic construct
  source 1..110: mol_type = other DNA
ccattttatacccactaggatgactataataaaagaaacagctaataacaaatttaggtaagaatatagagaaagtagaactcccatacattgctgatcaggatataaaa

SEQ ID NO: 35315 - DNA, 110 bp, synthetic construct
  source 1..110: mol_type = other DNA
aaatcctaatcatatttgagacggctgcaagcaaaatagagtcctaagtaaaactgtcaatagcattgacgatatggccaaaaggatgaaaaatcacaagtgacaaggaa

SEQ ID NO: 35316 - DNA, 110 bp, synthetic construct
  source 1..110: mol_type = other DNA
ttttgcacttggaagaatccctctttccctcccatgttacgcactccttccctcatgatgtccaagtaacagcattacactggcttggattatttgcttgaattccaaaa

SEQ ID NO: 35317 - DNA, 110 bp, synthetic construct
  source 1..110: mol_type = other DNA
tgatgtccaagtaacagcattacactggcttggattatttgcttgaattccaaaacaaaaagcttctggccaactgtatcaaaggaaacttgtttaacttcttggaagga

SEQ ID NO: 35318 - DNA, 110 bp, synthetic construct
  source 1..110: mol_type = other DNA
cccgtcctggccccgtagcgttgctgcaagctgtggggtaggttgtgtaggttgcggatgaagcttggatctgacgtggctgtagtgtaggccggcggctgcagctccaa

SEQ ID NO: 35319 - DNA, 110 bp, synthetic construct
  source 1..110: mol_type = other DNA
ggccatgcagagaaactaaaacgctcagctagtccccagctgttccagccaactcagtagaagcgccagacacgagagtgcacatccagttcagtgaagccttcaaataa

SEQ ID NO: 35320 - DNA, 110 bp, synthetic construct
  source 1..110: mol_type = other DNA
tggctaaatacatgtatttctggcatcatacattctctctctctctccaaataaaagttcgtatcgtaggtatggtaacaagggaaaggcagtcgaacgcaagaggaatt

SEQ ID NO: 35321 - DNA, 110 bp, synthetic construct
  source 1..110: mol_type = other DNA
agttcgtatcgtaggtatggtaacaagggaaaggcagtcgaacgcaagaggaatttctgtgaacagaaaggacatttcctcggaccatctccctttggggtgtctctccc

SEQ ID NO: 35322 - DNA, 110 bp, synthetic construct
  source 1..110: mol_type = other DNA
ctcccacaaatagcctcctaccttcttttctttgttagtcaaccttgtagttttcctcctaggttagaaataactttctgtatcccagggcccaatggtggtaagtgaca

SEQ ID NO: 35323 - DNA, 110 bp, synthetic construct
  source 1..110: mol_type = other DNA
ctcctaggttagaaataactttctgtatcccagggcccaatggtggtaagtgacagctgacacgggcttcgggggagggacacagtagggagtgtcccgaccagagagag

SEQ ID NO: 35324 - DNA, 110 bp, synthetic construct
  source 1..110: mol_type = other DNA
acttttcaaaactcagaaaaatgtgtctacatttcattaaagaaaatacatttaaaaataaaatatttaaggagctcccaccatggcacaatgggttaggcagtgtctcc

SEQ ID NO: 35325 - DNA, 110 bp, synthetic construct
  source 1..110: mol_type = other DNA
aaataaaatatttaaggagctcccaccatggcacaatgggttaggcagtgtctccacagcaccaggacgtaggttcaatccccggcacagcacaaagggttaaaggatcc

SEQ ID NO: 35326 - DNA, 110 bp, synthetic construct
  source 1..110: mol_type = other DNA
acagcagagcactgtgccaagggctaagaaaaacgaggaaacacatgctactcgtaacatcagctcctcctgcctggcttcaagcaataagtagcggaagagacggaacc

SEQ ID NO: 35327 - DNA, 110 bp, synthetic construct
  source 1..110: mol_type = other DNA
ggcaggcattcccgcagatcatggcgatggcgttgttccagccgtacactgccacggggaagttgaatgcagtgatgattccgaccaggcctacgggattccactgctcg

SEQ ID NO: 35328 - DNA, 110 bp, synthetic construct
  source 1..110: mol_type = other DNA
ggggaagttgaatgcagtgatgattccgaccaggcctacgggattccactgctcgatgagcgcgtggccaggtcctgaggacagggaaggcgtgcgacatgctgaagcac

SEQ ID NO: 35329 - DNA, 110 bp, synthetic construct
  source 1..110: mol_type = other DNA
aacccgtatcctcataggtcctagtcgggttcgttaaccgcagagccaggaagggagctctatgtgcagacagatataaagtataataagaccagtgagataatggaaat

SEQ ID NO: 35330 - DNA, 110 bp, synthetic construct
  source 1..110: mol_type = other DNA
agctctatgtgcagacagatataaagtataataagaccagtgagataatggaaatctactgaatgttgggaagatacaagtctgattttactttcttttggtgcagtttt

SEQ ID NO: 35331 - DNA, 110 bp, synthetic construct
  source 1..110: mol_type = other DNA
gatcctttaagcagggattcccgcctcaggctctgctcacaaggaagtgctgagagaagtgctcctgggaagctgactagatctagctgtggcgctggatcactcctcca

SEQ ID NO: 35332 - DNA, 110 bp, synthetic construct
  source 1..110: mol_type = other DNA
agatatcccctacaggtaggaagcatctggtgttctgtacagatctgagtcaccgcttaattttatccgactttgaaaaatactctaaactggttcttggcctccctttc

SEQ ID NO: 35333 - DNA, 110 bp, synthetic construct
  source 1..110: mol_type = other DNA
gccagatcccagctgggtctgtgacctataccacagctcctggcaacaccagaccctgagagaatctgaattccaaaataacttattcccttttttggtttttaagcata

SEQ ID NO: 35334 - DNA, 110 bp, synthetic construct
  source 1..110: mol_type = other DNA
tcagagcctttgcagtggctgttcctcctgcctgctgctcttcccacagctgggtctttctcatcggtcatgcctctgttcccgtcttcagagaggccttccaaacaccc

SEQ ID NO: 35335 - DNA, 110 bp, synthetic construct
  source 1..110: mol_type = other DNA
ctttctcatcggtcatgcctctgttcccgtcttcagagaggccttccaaacaccccgactaatccaccctgtgttctccccccagtcactttttaccacaggcgcgtggt

SEQ ID NO: 35336 - DNA, 110 bp, synthetic construct
  source 1..110: mol_type = other DNA
tccaattctctcagaataaaagctaaagtccttacaaaagtccttacaaagtcctaaaaggtcctgtatattctagttctcctgtattatttctcttaccccatctctgg

SEQ ID NO: 35337 - DNA, 110 bp, synthetic construct
  source 1..110: mol_type = other DNA
gtacaacggcacactatgcagctgttcaaaaatgagagatgggtttacatgtttgacatgaaggatgcctttcatgcattaagtgccaaaaaaagtttgtggtgagggag

SEQ ID NO: 35338 - DNA, 110 bp, synthetic construct
  source 1..110: mol_type = other DNA
ccacatcacttgtgtttgcctcagtcagccaacagacgtcttcctgctaaatggaaaccactcccagaattttcattccagaaggatgtctgtgagagctgtgcttctga

SEQ ID NO: 35339 - DNA, 110 bp, synthetic construct
  source 1..110: mol_type = other DNA
aaccactcccagaattttcattccagaaggatgtctgtgagagctgtgcttctgactccaacacatggtacctgggctaagaaaaaccttggctttgtgtttaggctgga

SEQ ID NO: 35340 - DNA, 110 bp, synthetic construct; identical to SEQ ID NO: 35338
  source 1..110: mol_type = other DNA

SEQ ID NO: 35341 - DNA, 110 bp, synthetic construct; identical to SEQ ID NO: 35339
  source 1..110: mol_type = other DNA

SEQ ID NO: 35342 - DNA, 110 bp, synthetic construct
  source 1..110: mol_type = other DNA
acgaggatttcaaatccagttattaaaaatcttccccttcactttgttctgtctgccttttcaaggtatgtgcatgactttagctaaattaggagtgtttgtgaattact

SEQ ID NO: 35343 - DNA, 110 bp, synthetic construct
  source 1..110: mol_type = other DNA
cacttactatttataggtggtgttcagatattattacctattcttctaatattttgtgtggcagtttctctagtggcattcttaaaaacattcgtagaagggatcaaaat

SEQ ID NO: 35344 - DNA, 110 bp, synthetic construct
  source 1..110: mol_type = other DNA
gtgtggcagtttctctagtggcattcttaaaaacattcgtagaagggatcaaaatcacaggataattctacagcggtgcagtcttgtatctctgtgaaggtcctagactt

SEQ ID NO: 35345 - DNA, 110 bp, synthetic construct
  source 1..110: mol_type = other DNA
tttaggtagatgaagaagagagggaaggagaaagaggctggcaggacattgcaacatagagagctgaagactgcagtgagtcctgggtgctgccagcagctctgttttgc

SEQ ID NO: 35346 - DNA, 110 bp, synthetic construct
  source 1..110: mol_type = other DNA
actgtggttctggggtgtcactggtggaaacacagtctatttcctccccctcagtcagtgaactctatctcatagctaggccatttggcttaaactagtatcttagtctg

SEQ ID NO: 35347 - DNA, 110 bp, synthetic construct
  source 1..110: mol_type = other DNA
cagtgaactctatctcatagctaggccatttggcttaaactagtatcttagtctgttaggacctctctaacagaatagcatagactgcatggctgaaaaccaacagaaat

SEQ ID NO: 35348 - DNA, 110 bp, synthetic construct
  source 1..110: mol_type = other DNA
cttgccttcccctacgtcttaatttaacttgccatagggagggaagaaatattcctcttccctctaaaatggggagtagtgacagcttctgtatagcaggaagactgcca

SEQ ID NO: 35349 - DNA, 110 bp, synthetic construct
  source 1..110: mol_type = other DNA
tcttccctctaaaatggggagtagtgacagcttctgtatagcaggaagactgccaattcttctggaattctttcattttttttcctatggggtaaagggatagagattgt

SEQ ID NO: 35350 - DNA, 110 bp, synthetic construct
  source 1..110: mol_type = other DNA
tttctttctacattgatccattggcaaagaattatattttatttataatcatcctccctagtagattttgaactgtgaagctggagaccagaccttaaaaggcacactac

SEQ ID NO: 35351 - DNA, 110 bp, synthetic construct
  source 1..110: mol_type = other DNA
ccctagtagattttgaactgtgaagctggagaccagaccttaaaaggcacactactccccacagttgcacttccatccttagggaatatggcttgtggatttttcaccat

SEQ ID NO: 35352 - DNA, 110 bp, synthetic construct
  source 1..110: mol_type = other DNA
tttgatctaagtgaccaatcccaagacattgacatgaccaggtgatgacagaacttgcagttttcagcctgagatagtggctatcagctcttgtacagataatccagtgg

SEQ ID NO: 35353 - DNA, 110 bp, synthetic construct
  source 1..110: mol_type = other DNA
tgcagttttcagcctgagatagtggctatcagctcttgtacagataatccagtggtaaaccagtacatccctccagccatgcacatagatgctaaagaagaaggagacgg

SEQ ID NO: 35354 - DNA, 110 bp, synthetic construct; identical to SEQ ID NO: 35352
  source 1..110: mol_type = other DNA

SEQ ID NO: 35355 - DNA, 110 bp, synthetic construct; identical to SEQ ID NO: 35353
  source 1..110: mol_type = other DNA

SEQ ID NO: 35356 - DNA, 110 bp, synthetic construct
  source 1..110: mol_type = other DNA
gatggacccttgctgtgttagtcctgtggtcaggttaatacattgtctaggatagagggatcagagctatttttgcatctctccccctcttgacattgtgggcccattaa

SEQ ID NO: 35357 - DNA, 110 bp, synthetic construct
  source 1..110: mol_type = other DNA
gctcgagttagccattcataagcttaatactagataataaattaagagcaatacagattagataaattgttacccccaataattgccggtctaagtgtttaatcagaaac

SEQ ID NO: 35358 - DNA, 110 bp, synthetic construct
  source 1..110: mol_type = other DNA
gccttcagtagtcctcctttatcccacttcccaccttcgacatctgccccaaacgctccctcacccgcaccctctgcgggtcctcccacatcaggattctcagtcgggtc

SEQ ID NO: 35359 - DNA, 110 bp, synthetic construct
  source 1..110: mol_type = other DNA
tcagttcatcaagaactcttattctctgtaccttcaaaatatatccagcatctgcttgtcactgtcaccattgctacctccctgggtgaagctacaagaagagcttgtgg

SEQ ID NO: 35360 - DNA, 110 bp, synthetic construct
  source 1..110: mol_type = other DNA
ttgtcactgtcaccattgctacctccctgggtgaagctacaagaagagcttgtggtaccctgatccctctagctctcctttttttctttcccatagcactcaacaccttc

SEQ ID NO: 35361 - DNA, 110 bp, synthetic construct
  source 1..110: mol_type = other DNA
actacctttttggtcgtgttcgtgttttgttttgttttttctttttcttttgacgtgctcctagaactacttaatgaatatgctaagcctgtacactttttgttttgggt

SEQ ID NO: 35362 - DNA, 110 bp, synthetic construct
  source 1..110: mol_type = other DNA
caaaaatgtgaaaaatccacgtggcctaatcttctcccaggaagcgaggctttgtatccagccttgacctgtgagagctagagcatggtctgttgttggctactccataa

SEQ ID NO: 35363 - DNA, 110 bp, synthetic construct
  source 1..110: mol_type = other DNA
atccagccttgacctgtgagagctagagcatggtctgttgttggctactccataactttgtgatgtgattgtcacaaagcacagggtttctcagaaggtgtgagtggtgg

SEQ ID NO: 35364 - DNA, 110 bp, synthetic construct
  source 1..110: mol_type = other DNA
tcttatttccaaaggataaaaacttcatcaaaaacttgaaaatagcttctcactgtgatggaaaacagagcatggaaaccatgaaacaagacccaggaatagaagaaaaa

SEQ ID NO: 35365 - DNA, 110 bp, synthetic construct
  source 1..110: mol_type = other DNA
ctttagcagtgaaattctttcatttgtctttatttggctgtaaaagcagacatggtatgtttctgatttactgttggattcctacaacttagcttaaggcctagcacata

SEQ ID NO: 35366 - DNA, 110 bp, synthetic construct
  source 1..110: mol_type = other DNA
gatacttttcttctcctcctcttcatcattaatatcattattactattactgcaactttcgaaatgaaaaaatttgagaatcagggagattgagggagagtctggctgtt

SEQ ID NO: 35367 - DNA, 110 bp, synthetic construct
  source 1..110: mol_type = other DNA
tgtgttgcccttttcaagatgagagtatgctttgcaataatacttggagtaatacaaaagggatacttagagataatccatgcctcagagcacaagagttggcatgaata

SEQ ID NO: 35368 - DNA, 110 bp, synthetic construct
  source 1..110: mol_type = other DNA
agctttcatgaaatcttgatgttgctggctttcaaatgagtggtctgtgtctatctaatcccatctttgataaaccgattttaccggattagtaattcactgctgcccga

SEQ ID NO: 35369 - DNA, 110 bp, synthetic construct
  source 1..110: mol_type = other DNA
gacatactgctttacagaatgttaggtagcagcctgtatttctacactcatatatggcaacttcatcatcaagaacaacaaggaggcctttgcttcacattcctgcaatg

SEQ ID NO: 35370 - DNA, 110 bp, synthetic construct
  source 1..110: mol_type = other DNA
attgttaaatctaaaatcagcctcgttggacaatatctttattttttaaagtcagagcaagcaacactttggggacactggaagatattggtatcaaaagttagtaatca

SEQ ID NO: 35371 - DNA, 110 bp, synthetic construct
  source 1..110: mol_type = other DNA
cctaattcctagcctaccttcctttccactgcatcacactttaccagaagaataattttaaaaaataaataaatgccatcactctaagatattgtcagaagtgctccact

SEQ ID NO: 35372 - DNA, 110 bp, synthetic construct
  source 1..110: mol_type = other DNA
ttttaaaaaataaataaatgccatcactctaagatattgtcagaagtgctccactgataacgttatgttttatcctgcccaatattcagcataagtggattacaatcaaa

SEQ ID NO: 35373 - DNA, 110 bp, synthetic construct
  source 1..110: mol_type = other DNA
tgtaccttctcccattatcctctcataatgttagctaatacatgttactatatgtaatatatattcacctcccatctttctccacctctcagcccaggttaacacagctg

SEQ ID NO: 35374 - DNA, 110 bp, synthetic construct
  source 1..110: mol_type = other DNA
taagtatttgagagaatcagcagatcatcatagaatttctccttatcttcagcgccttgaatctaggttgagaacctcaaggggagtggggcaggaacccactgtcagca

SEQ ID NO: 35375 - DNA, 110 bp, synthetic construct
  source 1..110: mol_type = other DNA
tactctgtatatatggggattagggaaaggacattgtgaagcaagactgtatcatgtgggcctgtgccttttctctctcaggatgcaagaccagtgagatggagtaatta

SEQ ID NO: 35376 - DNA, 110 bp, synthetic construct
  source 1..110: mol_type = other DNA
gtgggcctgtgccttttctctctcaggatgcaagaccagtgagatggagtaattatcctaggatagagaaaaagaatgatttgcagatcattcattattagttgtatttg

SEQ ID NO: 35377 - DNA, 110 bp, synthetic construct
  source 1..110: mol_type = other DNA
ggtctcattggggtgggggcgcatatgtttctacaacttgatttcacatcctgggtttcagtgtcgtctttatggaggtgaatactgaatgttcactgtgttgttgtagc

SEQ ID NO: 35378 - DNA, 110 bp, synthetic construct
  source 1..110: mol_type = other DNA
tttcagtgtcgtctttatggaggtgaatactgaatgttcactgtgttgttgtagcaccatttccacacagtaacagcccactccgctttcataacctccttggagtgagg

SEQ ID NO: 35379 - DNA, 110 bp, synthetic construct
  source 1..110: mol_type = other DNA
gtacgtggtcaagggtcttagcaccatgcctcaaaccttatattcatgaacacacaggcctgagactctaatttcacccctgtatgaatggataccctcagtgcaggggt

SEQ ID NO: 35380 - DNA, 110 bp, synthetic construct
  source 1..110: mol_type = other DNA
aggcctgagactctaatttcacccctgtatgaatggataccctcagtgcaggggtgctggggtccaacagagtggaaggaaggagataaacccagggatggaagcttagg

SEQ ID NO: 35381 - DNA, 110 bp, synthetic construct
  source 1..110: mol_type = other DNA
aggtagcccccttccgtgttggagcagccgtaattgcagggattcttggaggacgagcactcattcacgtcatggcaggcactggaaaactggtcaaaggagaacccaga

SEQ ID NO: 35382 - DNA, 110 bp, synthetic construct
  source 1..110: mol_type = other DNA
aatcacacttgtttttcctctacaaagttgtttttaataagggtttttgttttaaaatttatttcagaagcaacacggagcatacttagagaaggtcacctgaatttact

SEQ ID NO: 35383 - DNA, 110 bp, synthetic construct
  source 1..110: mol_type = other DNA
aatttatttcagaagcaacacggagcatacttagagaaggtcacctgaatttacttgtccagctcctcccagagcacaacctactgagggtttctgattttatctgcttg

SEQ ID NO: 35384 - DNA, 110 bp, synthetic construct
  source 1..110: mol_type = other DNA
cctaagagctgactctgtgattaaagttcagattccctcggctaaagcgtcatcgtggttttaaaaagggaaaaacaaacaaacaaaaatttgacattttatcatcaggt

SEQ ID NO: 35385 - DNA, 110 bp, synthetic construct
  source 1..110: mol_type = other DNA
aagcccttgctttgatttgctgcagactgctttttagggtgctcactcttttggtgacagctacgcagcccccctccacttcatcccaccccagatgaacaaatgaattc

SEQ ID NO: 35386 - DNA, 110 bp, synthetic construct
  source 1..110: mol_type = other DNA
gacagctacgcagcccccctccacttcatcccaccccagatgaacaaatgaattcgtactgtcaaccccaagatgatatgaaacttaactcctacttgaaaatctgtacc

SEQ ID NO: 35387 - DNA, 110 bp, synthetic construct
  source 1..110: mol_type = other DNA
aatatatgacaagctatgtaaagaaaacgtgaacacatttgacttgttcggaatccaaatctattgcccatttatgggaaagttccattgtgtgagttttggtgggagga

SEQ ID NO: 35388 - DNA, 110 bp, synthetic construct; identical to SEQ ID NO: 35387
  source 1..110: mol_type = other DNA

SEQ ID NO: 35389 - DNA, 110 bp, synthetic construct
  source 1..110: mol_type = other DNA
tgagattccagagtttcatgtcctgatacaaatgaagaatcatagatcccatacgtttttcttcagggctaccagagagtaaaagaaatggcattacttatcagatactc

SEQ ID NO: 35390 - DNA, 110 bp, synthetic construct
  source 1..110: mol_type = other DNA
aaggtttagtttatgaatgggttgtattttaccaaatgctatttctgctttgctgggataatcattatatttctcctttcattggtaatagtgatgagctacagtaatgg

SEQ ID NO: 35391 - DNA, 110 bp, synthetic construct
  source 1..110: mol_type = other DNA
ggataatcattatatttctcctttcattggtaatagtgatgagctacagtaatggattgtttattaaatcagtgaagattacttggttgtggtacactccattgcatact

SEQ ID NO: 35392 - DNA, 110 bp, synthetic construct
  source 1..110: mol_type = other DNA
ttagaaatagaatttgcgaacatttctccagctgtttcagattggaagtggtgctgtcctgccaaagttgggctctgtaagagcctctgcatttaacgatagtgaaaggg

SEQ ID NO: 35393 - DNA, 110 bp, synthetic construct
  source 1..110: mol_type = other DNA
gtcctgccaaagttgggctctgtaagagcctctgcatttaacgatagtgaaagggagggcaggaaaatatcaccaacctggacgtgggccaaacagaaggggaattaaat

SEQ ID NO: 35394 - DNA, 110 bp, synthetic construct
  source 1..110: mol_type = other DNA
gggattgtaaattggtccaactgcattgagaatagtttggtggtacataccagagctgaatatatgccaactctatgacctaataattctgctttgagatatgcagccat

SEQ ID NO: 35395 - DNA, 110 bp, synthetic construct
  source 1..110: mol_type = other DNA
ctgaatatatgccaactctatgacctaataattctgctttgagatatgcagccattgtctccacatatattataaggcctaagggtcagtgacattatttgcaagaccaa

SEQ ID NO: 35396 - DNA, 110 bp, synthetic construct; identical to SEQ ID NO: 35394
  source 1..110: mol_type = other DNA

SEQ ID NO: 35397 - DNA, 110 bp, synthetic construct; identical to SEQ ID NO: 35395
  source 1..110: mol_type = other DNA

SEQ ID NO: 35398 - DNA, 110 bp, synthetic construct
  source 1..110: mol_type = other DNA
aactatatggataaaactataagctcttactaaaagatccccccaaaacccactgtaaatacttacacaaatagaagaggtgtgtcatggtttatatgaggactcaaatc

SEQ ID NO: 35399 - DNA, 110 bp, synthetic construct
  source 1..110: mol_type = other DNA
gcttaaagagacctagccaaagaggtaaagtcattaatttgggggattcaaatatccaaaaataaatgataataacgcttgagtagtagaatctgcttttaacctgcaga

SEQ ID NO: 35400 - DNA, 110 bp, synthetic construct
  source 1..110: mol_type = other DNA
agaggatggatatccatcagatttgtggtggaaagtcaggaaggctaattattgagctcagccttgagggaaaatagaagaccaaaagtagttaggacaagttaaggaga

SEQ ID NO: 35401 - DNA, 110 bp, synthetic construct
  source 1..110: mol_type = other DNA
gctcagccttgagggaaaatagaagaccaaaagtagttaggacaagttaaggagaaaaatccaaacaagagaagcagaacacacaaagtcaagaggaaaagagcacaata

SEQ ID NO: 35402 - DNA, 110 bp, synthetic construct
  source 1..110: mol_type = other DNA
ggtctggtttaaaagctctaagatggattcactctcatgcctgacactttgtcaaggacagctgtcataccttcttttccattacaatttcatggcttctccacgtgttc

SEQ ID NO: 35403 - DNA, 110 bp, synthetic construct
  source 1..110: mol_type = other DNA
tattttttaaaaatagcaaatacagctgagaccagtcgccgggatgcttttgtgttcacgaccagcacaaaactatctctagttccagaactgcacaggaaggtcacttg

SEQ ID NO: 35404 - DNA, 110 bp, synthetic construct
  source 1..110: mol_type = other DNA
gcagacactatgtgtgtgatgactgagaacaaggaaccccctataaatagtgcacgggtcaaagatacacttgcactgacactgagctgccgcatttggaaatggaaata

SEQ ID NO: 35405 - DNA, 110 bp, synthetic construct
  source 1..110: mol_type = other DNA
tctcctgcaaagccatttctactattccaggccccattcaaggctggcagtatttcaggtcatgcagaatgaatcttggcattatactcagttatggtacgtgctgtctc

SEQ ID NO: 35406 - DNA, 110 bp, synthetic construct
  source 1..110: mol_type = other DNA
taattttctgaggctcatggcaagggcagtaaccaagccctcccccaatagtcttttggtgtctgccggagacagaggccagacctcaatggaaacgatccgttcagttc

SEQ ID NO: 35407 - DNA, 110 bp, synthetic construct
  source 1..110: mol_type = other DNA
tctgctcagatacggcctcgagtgcaggtatcctttgtcccccatagccaatcattgcccccagcttccaacaccctgttgtggaggtgcactgaagagctagtagggcc

SEQ ID NO: 35408 - DNA, 110 bp, synthetic construct
  source 1..110: mol_type = other DNA
tgtatattttatctattatttctataatgtgtgtattatattgtaacaaactgcataaaagtttgggagttcccattgcggcacgatggaaatgaaacccactagtaccc

SEQ ID NO: 35409 - DNA, 110 bp, synthetic construct
  source 1..110: mol_type = other DNA
aggggtttctcagttagacactactaacgcctggtggcactaccgatgcgataatcaataagagatgtataagaaatgggggcattttatctcagaacacaactcacttc

SEQ ID NO: 35410 - DNA, 110 bp, synthetic construct
  source 1..110: mol_type = other DNA
ttatcatttttgctaaggatctttattttaaaattttgcacataatgttgaagactttacagtattttcccatcaaccaatttcttttctgagtctccagatgtaaccac

SEQ ID NO: 35411 - DNA, 110 bp, synthetic construct
  source 1..110: mol_type = other DNA
ctgtgatttctgtttgcttttgtgaaagctcatgatatctgtctgtatggaaatcatcttcaaaagtagttaagtgaatctgtctctatgtcacattactccacgtacat

SEQ ID NO: 35412 - DNA, 110 bp, synthetic construct
  source 1..110: mol_type = other DNA
tcacagatactagtcaggtttctaactgtggagccataacaggaactccccatttgcattttatataccagcaattggcaatgatacatttagtttaaaaattatattaa

SEQ ID NO: 35413 - DNA, 110 bp, synthetic construct
  source 1..110: mol_type = other DNA
ctctccttttttcacctcgctgagccacatgcttgagaacctcctcctcctccaccccactagcccaacaaacaaaacctcacagactctttttttattctcccacgtcc

SEQ ID NO: 35414 - DNA, 110 bp, synthetic construct
  source 1..110: mol_type = other DNA
cccactagcccaacaaacaaaacctcacagactctttttttattctcccacgtcctctgtacatctttatgtctcaaagatactatttttaaatgggtatttctgcggct

SEQ ID NO: 35415 - DNA, 110 bp, synthetic construct
  source 1..110: mol_type = other DNA
acaaaaacagactcagacagagaacagacttgcggtggccaaggtggggcaaggagggagtgggacggactgggagtttgggtttggtaaatgcaaactattatatttag

SEQ ID NO: 35416 - DNA, 110 bp, synthetic construct
  source 1..110: mol_type = other DNA
gggagtgggacggactgggagtttgggtttggtaaatgcaaactattatatttagcatgggtaagcagtgaggtcctactggatagcccagggaactatatccagtctct

SEQ ID NO: 35417 - DNA, 110 bp, synthetic construct
  source 1..110: mol_type = other DNA
gaatattcttgatgaggggggactggtgggccgttggagcagctgcaccggatggtgcaaagctctgcacaaggagtggaaagatgggaccagagtcctgactcagctgt

SEQ ID NO: 35418 - DNA, 110 bp, synthetic construct
  source 1..110: mol_type = other DNA
tgcaaagctctgcacaaggagtggaaagatgggaccagagtcctgactcagctgtgatctccagcaagtctgatcagctttgaaaagtctgggttcgaacgatagaatct

SEQ ID NO: 35419 - DNA, 110 bp, synthetic construct
  source 1..110: mol_type = other DNA
gaaatccatgataaatctattttcttatgattattcatgcctttcctctctaccaaacgttggcctagtaacatcgaatatgatttcacagtgaactacatactctttcc

SEQ ID NO: 35420 - DNA, 110 bp, synthetic construct
  source 1..110: mol_type = other DNA
ggaaaagagaagattctgttaacatagagagaaatagtagcagccttctgatagcaaggaaagcttaagtgtctagactctgaatttagtgtatgtgggttcaagttcca

SEQ ID NO: 35421 - DNA, 110 bp, synthetic construct
  source 1..110: mol_type = other DNA
gttaaatatcatttttatcagtcatggaatgcacaaatagaaagaagtagaatgtcactgaatctcagtgcaggtaagctgggaggaaaatggctttgtttagaatgtta

SEQ ID NO: 35422 - DNA, 110 bp, synthetic construct
  source 1..110: mol_type = other DNA
cactgaatctcagtgcaggtaagctgggaggaaaatggctttgtttagaatgttactatttgaatgaaagaactatgtcctggagttcctgtagtggctcagcagaaagg

SEQ ID NO: 35423 - DNA, 110 bp, synthetic construct
  source 1..110: mol_type = other DNA
caatggaacacacacccacagccgggagggaggccttcctagtcctttcattgttatgtagcacccttgctcgggtgtgctggctccttcaggtaacactgtggtcactt

SEQ ID NO: 35424 - DNA, 110 bp, synthetic construct
  source 1..110: mol_type = other DNA
cctacacacacacaccctaaccctatccttcccttaactagatgctggcaggcgatgcactctcagctataccttgttctgcaggagcttttcctgcctgtaggtacttt

SEQ ID NO: 35425 - DNA, 110 bp, synthetic construct
  source 1..110: mol_type = other DNA
gaacacacagtcagttggttttgttcacatgaaaattttttttggcagacattgactctgtatggatgagagaagatcatccctattttaaataaagatggaaaatgatt

SEQ ID NO: 35426 - DNA, 110 bp, synthetic construct
  source 1..110: mol_type = other DNA
ctcttccatcctatcctaaataaagtgaaagtcatcatagagacactcatttttcctcaggtaaaatcaggaagctacctgtgtctgcagccatcctttcagcttttccc

SEQ ID NO: 35427 - DNA, 110 bp, synthetic construct
  source 1..110: mol_type = other DNA
tgttctccatttgattttgtccagaaagcactggaaatagataatcaaggatgaagaaagaaccttttatttaattaaagttattgggtagctttcctctgaagttttct

SEQ ID NO: 35428 - DNA, 110 bp, synthetic construct
  source 1..110: mol_type = other DNA
gaaagaaccttttatttaattaaagttattgggtagctttcctctgaagttttctttgctgggtgctctccagccctgcaaaccaaccatgtgatggtgtaagccaactt

SEQ ID NO: 35429 - DNA, 110 bp, synthetic construct
  source 1..110: mol_type = other DNA
tcacatcagttttgtcacagtgggagttgacacttcagctttttgcctagggttccaaaaccacagatactgtttgcacttattgttctcaccagtccgtgctaagacag

SEQ ID NO: 35430 - DNA, 110 bp, synthetic construct
  source 1..110: mol_type = other DNA
caaaaccacagatactgtttgcacttattgttctcaccagtccgtgctaagacagatcgctgtcctagtcaccatgatagaacgaagttaaagaccacttggctattgca

SEQ ID NO: 35431 - DNA, 110 bp, synthetic construct
  source 1..110: mol_type = other DNA
ggggtgtgggcacaaaccttcaatccacagctcagggtattggcagaatcaagataagagcacttccattccctcttgttgtcctttcataaccaccatgactccccttc

SEQ ID NO: 35432 - DNA, 110 bp, synthetic construct
  source 1..110: mol_type = other DNA
tcaattgaaagtggaaaggatgcctaggagattaggaaaacaaagtgtgatctatttcagcactccagctccgtgcacatccgtccctcctttttatttatttcgggggt

SEQ ID NO: 35433 - DNA, 110 bp, synthetic construct
  source 1..110: mol_type = other DNA
ttcagcactccagctccgtgcacatccgtccctcctttttatttatttcgggggtttttgttgttgttttgttttggttttggtttttggggttttttttgttttgtttt

SEQ ID NO: 35434 - DNA, 110 bp, synthetic construct
  source 1..110: mol_type = other DNA
cgagacagagcaagagaaacagaagaaggagggggggaaaagaaagaaaatagtatcagtgtcttagggtcacatcgtacaacgtgactagttgtgcaacttgcctagct

SEQ ID NO: 35435 - DNA, 110 bp, synthetic construct
  source 1..110: mol_type = other DNA
tcagtgtcttagggtcacatcgtacaacgtgactagttgtgcaacttgcctagctgcttgaatgtggcctgcatgctgctttctatagccctgagtccaggcatttgaag

SEQ ID NO: 35436 - DNA, 110 bp, synthetic construct
  source 1..110: mol_type = other DNA
tctcagtgtgaactccaggttaaggtgactgatacatctcacccctggaaactgaagctgagtggctggtaaggccaaaagccatcagccgcacaagagaagagtcacac

SEQ ID NO: 35437 - DNA, 110 bp, synthetic construct
  source 1..110: mol_type = other DNA
atgttatttttcattatacattctacaagtctacaagtgccagtttgggagaagagctaaaggacaccctaagaagagaatcttgagggctgatagaaaagccatgtagc

SEQ ID NO: 35438 - DNA, 110 bp, synthetic construct; identical to SEQ ID NO: 35437
  source 1..110: mol_type = other DNA

SEQ ID NO: 35439 - DNA, 110 bp, synthetic construct; identical to SEQ ID NO: 35437
  source 1..110: mol_type = other DNA

SEQ ID NO: 35440 - DNA, 110 bp, synthetic construct; identical to SEQ ID NO: 35437
  source 1..110: mol_type = other DNA

SEQ ID NO: 35441 - DNA, 110 bp, synthetic construct
  source 1..110: mol_type = other DNA
ggtccatactggaaaaagagttgaattgggcccaaatcttttgtgtaacaagaagcagctatctaaaggtgtaagggtatcagaattctaaactggattcaacatacaaa

SEQ ID NO: 35442 - DNA, 110 bp, synthetic construct
  source 1..110: mol_type = other DNA
cagctatctaaaggtgtaagggtatcagaattctaaactggattcaacatacaaattataaacccaactcctaactctttcttccagaagggtccagagaacagttcttt

SEQ ID NO: 35443 - DNA, 110 bp, synthetic construct
  source 1..110: mol_type = other DNA
agctgtgacagaattaatgtgaccatgctaataatctttttaaatgtatactgtggagaaggtattccattttctgaagaaatgcttgatactatgaaaggtttagagag

SEQ ID NO: 35444 - DNA, 110 bp, synthetic construct
  source 1..110: mol_type = other DNA
ataacatttatctagatcggtttgaggtatggaagttgggagagagtagagagggaagctacagaaactgcagcgtggaataaaggcaagaggccaagacttgcttatgc

SEQ ID NO: 35445 - DNA, 110 bp, synthetic construct
  source 1..110: mol_type = other DNA
aagctacagaaactgcagcgtggaataaaggcaagaggccaagacttgcttatgccaaaggccagtggacacttgatttgcttccctgcagacttgtgcctcagtattaa

SEQ ID NO: 35446 - DNA, 110 bp, synthetic construct
  source 1..110: mol_type = other DNA
tatcctatactgaaatctacataaatagagcatgaagactatttcttaatgttccatctccatttaatagcaacagatcatttggaagctcaaagcgctgaggtttgaga

SEQ ID NO: 35447 - DNA, 110 bp, synthetic construct
  source 1..110: mol_type = other DNA
ttgttctgttcagtgggttaaaatacagctcaaatagcagttcccactatggtgcggaaggttaagaattcgattgcagcctctcaggtcaccgtggaggcacgggtttg

SEQ ID NO: 35448 - DNA, 110 bp, synthetic construct
  source 1..110: mol_type = other DNA
tgcagcatttctcatgtcctttattgcagatacagtaacagtccttgccatcgtgatagagatatagggttaatgtgcctaattcatactcttagtcaaataagagtagc

SEQ ID NO: 35449 - DNA, 110 bp, synthetic construct
  source 1..110: mol_type = other DNA
atgggcctgaactcacgtgaacgttcccctggactggacttccaagatggtttcttccctctcatcatcagggatggctggagtcactgggcactggtcaggcagataca

SEQ ID NO: 35450 - DNA, 110 bp, synthetic construct
  source 1..110: mol_type = other DNA
tccctctcatcatcagggatggctggagtcactgggcactggtcaggcagatacatctctgagtgggcaaatgtgtgaatcaagagacatgatttaatccatctttagga

SEQ ID NO: 35451 - DNA, 110 bp, synthetic construct
  source 1..110: mol_type = other DNA
tggtagttctaagtataaactctggtgccagatatgttcaaaccccacatctctcacccagtagctctgataactgataaactgcttatctttgtgtccgtattctcatg

SEQ ID NO: 35452 - DNA, 110 bp, synthetic construct
  source 1..110: mol_type = other DNA
tcatgttgacacataaaattaaaattatcacagtgactcaaagtgaactttctcatcttgctggccaaagagctgaccttgtttagaaaaacacatctcataacctcatg

SEQ ID NO: 35453 - DNA, 110 bp, synthetic construct
  source 1..110: mol_type = other DNA
aagtaatagaaagcagcaaggatgtcaaatttctcagcacttaaagaattttgaaaaataaccccaattttcccctctccacgtgtaactaacataaattgtctcttgga

SEQ ID NO: 35454 - DNA, 110 bp, synthetic construct
  source 1..110: mol_type = other DNA
aaataaccccaattttcccctctccacgtgtaactaacataaattgtctcttggaaatgaaatggccacattttgaagcaccatgtcctcttattaaatccatctatttt

SEQ ID NO: 35455 - DNA, 110 bp, synthetic construct
  source 1..110: mol_type = other DNA
ctgcggcggtggtgtaggagctacagctctgattcaacccctagcccaggatgtgaatatagccctaaaaaaagaaaagaaagaattgttccccgtgataagtctagtta

SEQ ID NO: 35456 - DNA, 110 bp, synthetic construct
  source 1..110: mol_type = other DNA
aatatagccctaaaaaaagaaaagaaagaattgttccccgtgataagtctagttaccatttaccaccatacaaagatatcacttagctgttgactatattccctactgta

SEQ ID NO: 35457 - DNA, 110 bp, synthetic construct
  source 1..110: mol_type = other DNA
actgttcacattttcttgaaagctgaatgtcccactgaagcagctgtctggaatatatgagattataaagttgagtgccagacacaattgagaagttagtctagggatat

SEQ ID NO: 35458 - DNA, 110 bp, synthetic construct
  source 1..110: mol_type = other DNA
cattcttccactcagtgcattgaattgaagaatggttgaagccacccattctaaagccccaggtaagactgcccagagctagaacaactcttgttgtttgtggtttatgg

SEQ ID NO: 35459 - DNA, 110 bp, synthetic construct
  source 1..110: mol_type = other DNA
gtccaactccattacttggtatcattgcatagcaagtttgtatctttttgaaccacaggagtcctgaagcaagaattaggaggtttgggactagaggggggtggagagga

SEQ ID NO: 35460 - DNA, 110 bp, synthetic construct
  source 1..110: mol_type = other DNA
caggagtcctgaagcaagaattaggaggtttgggactagaggggggtggagaggaaaatacctacaggatagagcccaaggcagacctgaactaagatttggggaaccaa

SEQ ID NO: 35461 - DNA, 110 bp, synthetic construct
  source 1..110: mol_type = other DNA
ggttctttttttagaatggtctgataccatcaacacaattccccaaatgtcctttctctccctttctaggctatctgctggtttggatttagcatgccattttaagcaat

SEQ ID NO: 35462 - DNA, 110 bp, synthetic construct
  source 1..110: mol_type = other DNA
ctgtcattcctttccttttttccctgatgaagtgtaaaaatttttttcctatcgccatttgtagaccatattgtccctcctaaatacataccagtatacttgaggatata

SEQ ID NO: 35463 - DNA, 110 bp, synthetic construct
  source 1..110: mol_type = other DNA
agtcttcttcttgtttctcttgtatctatgcatctttatcattctgttttctcgaggaacactgtgttctcttcccttccctggccagctctcccgtttgatgatgacac

SEQ ID NO: 35464 - DNA, 110 bp, synthetic construct
  source 1..110: mol_type = other DNA
atgtactccttttgactcccaggctaccacactctcttagtttctctcctacctccctagcttctcatttctggctgacctggtcccttctctccaatcttttagtgttg

SEQ ID NO: 35465 - DNA, 110 bp, synthetic construct
  source 1..110: mol_type = other DNA
ttcctcatttttctcagtctccctaaatcacactttgtgtcctgtgtgtctcattgtgttgttgcctgattagctaaggtagtatttggtgtttgctactagattttatg

SEQ ID NO: 35466 - DNA, 110 bp, synthetic construct
  source 1..110: mol_type = other DNA
caccctttgtattttctaaatttctccgtatagtaatgattttttcagtcttattctgatatataaacttttctccatgttggtatcttactgcattgacctccagcatc

SEQ ID NO: 35467 - DNA, 110 bp, synthetic construct; identical to SEQ ID NO: 35466
  source 1..110: mol_type = other DNA

SEQ ID NO: 35468 - DNA, 110 bp, synthetic construct
  source 1..110: mol_type = other DNA
gcaccaatcaaattccaaattcaagaaatggaatgtcaaaagccattttgactgagaaaactagttcaaatataaatctgcttaaggctctcacatagctataagcattt

SEQ ID NO: 35469 - DNA, 110 bp, synthetic construct; identical to SEQ ID NO: 35468
  source 1..110: mol_type = other DNA

SEQ ID NO: 35470 - DNA, 110 bp, synthetic construct
  source 1..110: mol_type = other DNA
aaaaaaaagtttcttaattccttgcacaattgatacctgggttggatcactcttttgtgtggctgctttgttctggggtgttatagcctagttagcagtatccctggcct

SEQ ID NO: 35471 - DNA, 110 bp, synthetic construct
  source 1..110: mol_type = other DNA
tcactttcaaaagtcacatcatctgatctttcattaggcttgtaaatctgaaatagtaagtaaagcatattacgtaattaaatgatacatgaccacttaggcatatgcat

SEQ ID NO: 35472 - DNA, 110 bp, synthetic construct
  source 1..110: mol_type = other DNA
aatcttgtcagatcttactccttcaaaggcttcacaagcttctaaaataacgatcaaaacctcttaaggtgacttctaccaggctctccagaatttattatacttgattc

SEQ ID NO: 35473 - DNA, 110 bp, synthetic construct
  source 1..110: mol_type = other DNA
gaaaactctaatggccattttcagaaaaaagccaacctccaagacaggattcaacagtattttcttgtgtctaaaaggaaaaagtgctgaatgcaagtaatttattaagt

SEQ ID NO: 35474 - DNA, 110 bp, synthetic construct
  source 1..110: mol_type = other DNA
atttctctacctaaggaattataattctctaatcggacagaaaaataatcccacgatttacttgttactcttagttccaaagaacttaaccaatttaggcctttttctta

SEQ ID NO: 35475 - DNA, 110 bp, synthetic construct
  source 1..110: mol_type = other DNA
aggtaactaaagaattttctgccttgagctaggtcaaacaacttccaagataactctatgtggtataactaataaatcgcttcgaatggtgtcattatatgctgccaagt

SEQ ID NO: 35476 - DNA, 110 bp, synthetic construct
  source 1..110: mol_type = other DNA
ctatgtggtataactaataaatcgcttcgaatggtgtcattatatgctgccaagtctggaacccaaactcaaaactagaacatcatcgggaagttgtgttatagttcttt

SEQ ID NO: 35477 - DNA, 110 bp, synthetic construct
  source 1..110: mol_type = other DNA
ttttggtttatagtgccacacatgaggcatatggacgttccatggctagagggctcgaattggagccacagctgtcagcctacgccacagggcacagcaatacaggatcc

SEQ ID NO: 35478 - DNA, 110 bp, synthetic construct
  source 1..110: mol_type = other DNA
cgttccatggctagagggctcgaattggagccacagctgtcagcctacgccacagggcacagcaatacaggatccgagccatgtctgcatcctataccacagctcgccac

SEQ ID NO: 35479 - DNA, 110 bp, synthetic construct
  source 1..110: mol_type = other DNA
aaaagttcggagtttccggtgtggcgcagcagaaacaaacccaactcgtttccatgacgacggaggttctatccctggccctgctcagtgtgtcgtggatccagcgttgc

SEQ ID NO: 35480 - DNA, 110 bp, synthetic construct
  source 1..110: mol_type = other DNA
gcagcagaaacaaacccaactcgtttccatgacgacggaggttctatccctggccctgctcagtgtgtcgtggatccagcgttgccaggagcctggtgtgggtcacagat

SEQ ID NO: 35481 - DNA, 110 bp, synthetic construct
  source 1..110: mol_type = other DNA
aggtcatgttggtataaaacagagatcagtgtaagaagcccacggctcctaaagcataattgaggcacatacatgtaagaaatagatgtgcctactttgcttaaagccca

SEQ ID NO: 35482 - DNA, 110 bp, synthetic construct
  source 1..110: mol_type = other DNA
ataattgaggcacatacatgtaagaaatagatgtgcctactttgcttaaagcccactagttacaactatactctgcagatgtaggaacgtaataaatatgaattgaatgg

SEQ ID NO: 35483 - DNA, 110 bp, synthetic construct
  source 1..110: mol_type = other DNA
caggcagagcaactcaggatctgagctgggtcttccacctataccacagtgcacggcaatgccgggtcaccgacccactgattgaggccaggaatcgaacctgtgtcctc

SEQ ID NO: 35484 - DNA, 110 bp, synthetic construct
  source 1..110: mol_type = other DNA
gggggtcatgcccagtggcagaggtccataatagggagcttagggctcaacaacagggccctctgagacctgaagaactaacctggaagcaagagatacacctgcccaaa

SEQ ID NO: 35485 - DNA, 110 bp, synthetic construct
  source 1..110: mol_type = other DNA
gaagggctagatgttgagcaggactctggtgagaacagccctcagcccctctccttttgtaagctgtattaagagccttgctacagcaggatggacaggatctgtactca

SEQ ID NO: 35486 - DNA, 110 bp, synthetic construct
  source 1..110: mol_type = other DNA
tttgtaagctgtattaagagccttgctacagcaggatggacaggatctgtactcaggccaaggtgacagctcatgcctgggtttccccagcatgtgggtccaactggtcc

SEQ ID NO: 35487 - DNA, 110 bp, synthetic construct
  source 1..110: mol_type = other DNA
caacccactatatcatacagtgatatattattaatcaaaaaaagaatgaagtactgatacacactgcaacatggaagaattccgaaaacatcatgctaactgaaagaagc

SEQ ID NO: 35488 - DNA, 110 bp, synthetic construct
  source 1..110: mol_type = other DNA
gatacacactgcaacatggaagaattccgaaaacatcatgctaactgaaagaagccagaaataaaatgtacacactgtacaaaactgattccatttatgtgaactttcta

SEQ ID NO: 35489 - DNA, 110 bp, synthetic construct
  source 1..110: mol_type = other DNA
ccagactgaggggggcaaagaagagacagagccatatagaccatcagtacccctgtctggaacaccacagcctgagatacttgggcagaggctgggcaatgagactcagg

SEQ ID NO: 35490 - DNA, 110 bp, synthetic construct
  source 1..110: mol_type = other DNA
ctgactacagcagctcaggtagctgaggaggcctggtgcagtaggtaaaaggatccagcattgctgcagctatgatgcagtttgcagctgtggctggtttcaatccttgg

SEQ ID NO: 35491 - DNA, 110 bp, synthetic construct
  source 1..110: mol_type = other DNA
cagcattgctgcagctatgatgcagtttgcagctgtggctggtttcaatccttggccaggaacttccatatgcctcagatgtggccatttaaaaaagaataggagttccc

SEQ ID NO: 35492 - DNA, 110 bp, synthetic construct
  source 1..110: mol_type = other DNA
cattataccaagcttattgactgtgttaatcaaatcatctactactttcatgtgttttgattggcttgatatatcaagggctatgtatgtatgttatagtatctcataac

SEQ ID NO: 35493 - DNA, 110 bp, synthetic construct; identical to SEQ ID NO: 35492
  source 1..110: mol_type = other DNA

SEQ ID NO: 35494 - DNA, 110 bp, synthetic construct
  source 1..110: mol_type = other DNA
tgccaaatttcctggttaaattagacctcactctcttaggctacttaattactaggttctctgttatcagacctctcaacttttacatgtttacgaatctcttccattac

SEQ ID NO: 35495 - DNA, 110 bp, synthetic construct
  source 1..110: mol_type = other DNA
gttctctgttatcagacctctcaacttttacatgtttacgaatctcttccattaccaccaaattattatctttgctatcatatcagagctttaataactggtaaatgaag

SEQ ID NO: 35496 - DNA, 110 bp, synthetic construct
  source 1..110: mol_type = other DNA
tggatggaagcaaatgtggtggtagcagtggggtgagaggaaacaatgtcactaagggtttgaatgtcagctcagggggctactacgtggtcgggctgggtggggcaagg

SEQ ID NO: 35497 - DNA, 110 bp, synthetic construct
  source 1..110: mol_type = other DNA
ggacttcactggtttttgctaagtgctttagaagccttggaaaatgaaaatggtaggcccaggtgaaccaactataaactcaaggcccactgaaagccaggaggcctcca

SEQ ID NO: 35498 - DNA, 110 bp, synthetic construct
  source 1..110: mol_type = other DNA
atgaaaatcataagaatatccagcttatccaacttgtagcgaggattcactgagatcacgcaccatgttacatcccatagcaccagcaaatggacatcacaggtggctgg

SEQ ID NO: 35499 - DNA, 110 bp, synthetic construct; identical to SEQ ID NO: 35498
  source 1..110: mol_type = other DNA

SEQ ID NO: 35500 - DNA, 110 bp, synthetic construct
  source 1..110: mol_type = other DNA
tcaaacacacacacacacacatccccaaagacatatatgatttctcagaaaaggtacactctacatcattacagagacagaaaaacattttcctgccttaaacatactcc

SEQ ID NO: 35501 - DNA, 110 bp, synthetic construct
  source 1..110: mol_type = other DNA
acactctacatcattacagagacagaaaaacattttcctgccttaaacatactccacatagctgccctgaagaacacctgagaaagtacattattatatccctttgattt

SEQ ID NO: 35502 - DNA, 110 bp, synthetic construct
  source 1..110: mol_type = other DNA
gctctctcagcgaaggacatcactcaagtgtcttgaggcattgctacttgagaaaagaggcactcattagagctagctgaccatgatttgtggccaaagagggcatggag

SEQ ID NO: 35503 - DNA, 110 bp, synthetic construct
  source 1..110: mol_type = other DNA
agaggcactcattagagctagctgaccatgatttgtggccaaagagggcatggagtactcaaacttcccatcgtcagagttacctggtggcctagtagttaaagatccag

SEQ ID NO: 35504 - DNA, 110 bp, synthetic construct
  source 1..110: mol_type = other DNA
atcagtgccaaaagtctttctttgcgaggagccggatggtcccatgtccatcacgccagcctgtgcctactttgccccaggcctccatgtgtgttggcactgtgctccag

SEQ ID NO: 35505 - DNA, 110 bp, synthetic construct
  source 1..110: mol_type = other DNA
aggaagcccaatttttgccctgtgggggaggggttgcagatgccctttccagctgccctattcatcctgttgcctgaggaccactcccctggaagatacacagtagtggc

SEQ ID NO: 35506 - DNA, 110 bp, synthetic construct
  source 1..110: mol_type = other DNA
ccctattcatcctgttgcctgaggaccactcccctggaagatacacagtagtggcccttgcccctagcgacgtagatttaaagattaccctatcaggtttttccggaaca

SEQ ID NO: 35507 - DNA, 110 bp, synthetic construct
  source 1..110: mol_type = other DNA
ctattgccgtgtaacataacatagtcacagattccatgctttagaatgtggacatttttattctaccatggaccactattccacctactcttctgggttttccaagggcc

SEQ ID NO: 35508 - DNA, 110 bp, synthetic construct
  source 1..110: mol_type = other DNA
ttttattctaccatggaccactattccacctactcttctgggttttccaagggccacattctcaggcatagacagcaggacaagccaaaaaacagagtatggccaccatt

SEQ ID NO: 35509 - DNA, 110 bp, synthetic construct
  source 1..110: mol_type = other DNA
gactgtagaacgagaaagaagcttaggcccaagcttgctatgacactccttcagctgcccaccctgactctcaggtgacgaagcatactcaccttcttcttggccttgca

SEQ ID NO: 35510 - DNA, 110 bp, synthetic construct
  source 1..110: mol_type = other DNA
tgcccaccctgactctcaggtgacgaagcatactcaccttcttcttggccttgcacttagcatctcggctggacttggactttctctctgtggggcaagtaggctgtcag

SEQ ID NO: 35511 - DNA, 110 bp, synthetic construct
  source 1..110: mol_type = other DNA
tggagacagagcttttaaagaggtacgttaaaatggggttgttagggtggcccctaacccaatctggctgatggccttataaaaagaggcaattggtccacatagaaaga

SEQ ID NO: 35512 - DNA, 110 bp, synthetic construct
  source 1..110: mol_type = other DNA
aacccaatctggctgatggccttataaaaagaggcaattggtccacatagaaagataccggagatgcacatgcccagaggaaaggccacaggaggatgagaaggcagccc

SEQ ID NO: 35513 - DNA, 110 bp, synthetic construct
  source 1..110: mol_type = other DNA
gagattgttaggttgtatagtaagtgtatgtttcaccttatgagctgcccagctgtttttcaaagtggctgtattatttggtacctgttcagttgtgcttcatgcttgac

SEQ ID NO: 35514 - DNA, 110 bp, synthetic construct
  source 1..110: mol_type = other DNA
cattttaccttgtttttatatcatcccagactagtaataattgtcgtggtttcgtagtgcttatttgaatataaaccctcatgtttaccaatttcttataagttccactc

SEQ ID NO: 35515 - DNA, 110 bp, synthetic construct
  source 1..110: mol_type = other DNA
tggtattgtcactgctgtagctctggttaaagtcgtggcatggattcaatccctggcccaggaatttccacatgccacaggcaaggaaaaaaaacagatgcttggattcc

SEQ ID NO: 35516 - DNA, 110 bp, synthetic construct
  source 1..110: mol_type = other DNA
gcccaggaatttccacatgccacaggcaaggaaaaaaaacagatgcttggattcccatgcccagctctctatccacccttggctggatcagtcagcctagagacatggtg

SEQ ID NO: 35517 - DNA, 110 bp, synthetic construct
  source 1..110: mol_type = other DNA
ggcaacacatttctcaaaaaaaggaaaaaagaggaagaggagaattaccttaattagcaatttttactatgaatgaggcaaacgactataagacagtacattcataaaac

SEQ ID NO: 35518 - DNA, 110 bp, synthetic construct
  source 1..110: mol_type = other DNA
agcaatttttactatgaatgaggcaaacgactataagacagtacattcataaaacatgatttgaatgctggaacagaaagaggcccagaggttattcaatgctatacacc

SEQ ID NO: 35519 - DNA, 110 bp, synthetic construct
  source 1..110: mol_type = other DNA
gcagcacctgcagccccagtcacctcagaggttggcacagaggagggtggtgctcaccaccgttattgctcttactctcctggaaatgcacatgccctgcagctgctgat

SEQ ID NO: 35520 - DNA, 110 bp, synthetic construct
  source 1..110: mol_type = other DNA
accaccgttattgctcttactctcctggaaatgcacatgccctgcagctgctgatgtcaaaccctctgggcaccacctacacctgactgagggtcactgctacttcccag

SEQ ID NO: 35521 - DNA, 110 bp, synthetic construct
  source 1..110: mol_type = other DNA
ggcaaagcagacagcaagctgcacagatcatcaataccacctccctggaaaccacagccagagatactcaaaaaggggttgagcagtgagactcaggctctggaggtcag

SEQ ID NO: 35522 - DNA, 110 bp, synthetic construct
  source 1..110: mol_type = other DNA
aagctgcacagatcatcaataccacctccctggaaaccacagccagagatactcaaaaaggggttgagcagtgagactcaggctctggaggtcagtactggggagaggac

SEQ ID NO: 35523 - DNA, 110 bp, synthetic construct
  source 1..110: mol_type = other DNA
tggaccccattgctgaccagctcgcccatgatcttgatcttgaacttgtggagctcactcttggagatggtgtcagccttggcaatgatgggaatgatgttcacctgcca

SEQ ID NO: 35524 - DNA, 110 bp, synthetic construct
  source 1..110: mol_type = other DNA
aacttatgtttcttctcttagaagttgtcatcatatagcctcagagagataggccaagcaacagagaagccgcaaaaccaaattccaagtttcttcacgtccctgcatct

SEQ ID NO: 35525 - DNA, 110 bp, synthetic construct
  source 1..110: mol_type = other DNA
ctgcttcttgcctgaagttttagcatcacagaaccaagtatcttcatgaagaagatggaaagacagaagactggctcttgggactctgtattattagtttaaatacttaa

SEQ ID NO: 35526 - DNA, 110 bp, synthetic construct
  source 1..110: mol_type = other DNA
tggaaagacagaagactggctcttgggactctgtattattagtttaaatacttaataaaaatagttaattttgatctctaaggatctgtaattcttcactttttaggcca

SEQ ID NO: 35527 - DNA, 110 bp, synthetic construct
  source 1..110: mol_type = other DNA
tttttaaatgtcctcaaaagagcatttcacctatccctgattccttcccccaccactttaagttatgagctatgactttaactattgacattacattaaaattttttatt

SEQ ID NO: 35528 - DNA, 110 bp, synthetic construct
  source 1..110: mol_type = other DNA
ataccaatcttatcttaatgtacctgaaattgatttcttgatctcttttctcctacctccaactcctgctccaatgattctagtgctaccagccaaccagtcttgccaaa

SEQ ID NO: 35529 - DNA, 110 bp, synthetic construct
  source 1..110: mol_type = other DNA
cctccaactcctgctccaatgattctagtgctaccagccaaccagtcttgccaaatccttccttcaacctctttccacattcaatccttaaccacagtatccaaaatata

SEQ ID NO: 35530 - DNA, 110 bp, synthetic construct
  source 1..110: mol_type = other DNA
caaacttgcatcctcacagagcccaaagtgtcctcaatccactaagacacaatgggaatgcctacagtcgattcttaacctacagcaccacagcaggagctctactctta

SEQ ID NO: 35531 - DNA, 110 bp, synthetic construct
  source 1..110: mol_type = other DNA
gaatgcctacagtcgattcttaacctacagcaccacagcaggagctctactcttagtgcctttgtaatgtacgtgaaatttgtagtgatagcatctctctcaagtccgac

SEQ ID NO: 35532 - DNA, 110 bp, synthetic construct
  source 1..110: mol_type = other DNA
cctcatcctctgattcagactcagattccagctcttccagtagcagcagcaccagcacagatagcagctctgaagatgaaccatcacggaagaagaaaaagaaatagaat

SEQ ID NO: 35533 - DNA, 110 bp, synthetic construct
  source 1..110: mol_type = other DNA
cacagatagcagctctgaagatgaaccatcacggaagaagaaaaagaaatagaattgctccaaccgtactggactgatggactgaaaactttaatgtgattctcagaagg

SEQ ID NO: 35534 - DNA, 110 bp, synthetic construct
  source 1..110: mol_type = other DNA
ctgttacaatttaaagcagaatttaagttacggttggcctggggagtaaggaggtaaggagaatgtggtgttcaagctgaggtgcagcaggaactaagaggagaaagtgc

SEQ ID NO: 35535 - DNA, 110 bp, synthetic construct
  source 1..110: mol_type = other DNA
aaggagaatgtggtgttcaagctgaggtgcagcaggaactaagaggagaaagtgccactttctggtctagattgtagttgcagagtatgggcatgtggaatgcagcctta

SEQ ID NO: 35536 - DNA, 110 bp, synthetic construct
  source 1..110: mol_type = other DNA
tgttactcgaggctgtgcattgcaggtgagcttgctttttttcacaggtagccatttataggtattataacaatatagtagcggttttatgtatccagctagtctgagat

SEQ ID NO: 35537 - DNA, 110 bp, synthetic construct
  source 1..110: mol_type = other DNA
aggtagccatttataggtattataacaatatagtagcggttttatgtatccagctagtctgagattagctcagagtaatcttaaggtttaagattctgaaacttttgttt

SEQ ID NO: 35538 - DNA, 110 bp, synthetic construct
  source 1..110: mol_type = other DNA
ggcgtagatccttcatgcaggaggctggttggatagatgggtgagtggagatgcggcaggatggtttttttgtggacataaatgaacctagaaattgagaacattgcagc

SEQ ID NO: 35539 - DNA, 110 bp, synthetic construct
  source 1..110: mol_type = other DNA
gttgaacccatgtcctcatggttcctagtcaggttcattactgttgagccatgatgggaactcctgtcttcctgattttaatgtcaacagtcaagtgttaagctggtgag

SEQ ID NO: 35540 - DNA, 110 bp, synthetic construct
  source 1..110: mol_type = other DNA
gggaactcctgtcttcctgattttaatgtcaacagtcaagtgttaagctggtgagtgtgatttgtgctcatcatttgagagaagtctgattcctcaaatttaaactattg

SEQ ID NO: 35541 - DNA, 110 bp, synthetic construct
  source 1..110: mol_type = other DNA
tttattgtgttatattatgtatgtacaggtgtgggtttctattgtgtctgtccctaggagtagaattgctggggcacatcttcggctttttaagaaaatgcccagctgga

SEQ ID NO: 35542 - DNA, 110 bp, synthetic construct
  source 1..110: mol_type = other DNA
aggagtagaattgctggggcacatcttcggctttttaagaaaatgcccagctggaggttgcgttgtgtcccagtgggttacaaacctgactgatatccatgaggataccg

SEQ ID NO: 35543 - DNA, 110 bp, synthetic construct
  source 1..110: mol_type = other DNA
ctccttggttccaccctggcctccacctactagttcttgacacagaaaccacagggatcagtgtgaaataccagtgagctcaacactgtccacctcaataacactttctt

SEQ ID NO: 35544 - DNA, 110 bp, synthetic construct
  source 1..110: mol_type = other DNA
ctggaacagaatctgacagtgatgaatcagtaccagagcttgaggaacaggattctacacaggtaactacacaacaagcccaactggcagcagcagtcagtaaagcaaaa

SEQ ID NO: 35545 - DNA, 110 bp, synthetic construct
  source 1..110: mol_type = other DNA
tacacaggtaactacacaacaagcccaactggcagcagcagtcagtaaagcaaaacagagccagagtggaaagaaggtatggaaggctatgtccaaactgggtcttcggc

SEQ ID NO: 35546 - DNA, 110 bp, synthetic construct
  source 1..110: mol_type = other DNA
ataatagctgttgccaccatcacgctcacgaaatgactagcgtggctgtttatctgcggaacaagcagcttgcccagcgtggcggtaaggagcgcttgatggagagccgg

SEQ ID NO: 35547 - DNA, 110 bp, synthetic construct
  source 1..110: mol_type = other DNA
gcggaacaagcagcttgcccagcgtggcggtaaggagcgcttgatggagagccggccggcccgagagccagagaagtcaggcgtgctgtgggccgtaatgcgcatttagt

SEQ ID NO: 35548 - DNA, 110 bp, synthetic construct
  source 1..110: mol_type = other DNA
ccaggacgtatttgttgcatgaatgattgcaccctgctttcaaggttaagtgctgtgcacctgcagattaacctgggtgggggcgctggggatggtgggggcctcgcgca

SEQ ID NO: 35549 - DNA, 110 bp, synthetic construct
  source 1..110: mol_type = other DNA
tgcacctgcagattaacctgggtgggggcgctggggatggtgggggcctcgcgcaggcttgggcataggttgcacaagggcactgctgaggccatatgggcaggccgcac

SEQ ID NO: 35550 - DNA, 110 bp, synthetic construct
  source 1..110: mol_type = other DNA
atgctggggcaggggagggaggggctcatgcagtgtgggcagatcggtgcccaacagcggactcactagaaggaaaaaagcttcctagccccttggtagcacccgcatag

SEQ ID NO: 35551 - DNA, 110 bp, synthetic construct
  source 1..110: mol_type = other DNA
agcggactcactagaaggaaaaaagcttcctagccccttggtagcacccgcatagtgtacatttctgtgttgcaaacacggccacaatggctgatgtgaacctaccagcc

SEQ ID NO: 35552 - DNA, 110 bp, synthetic construct
  source 1..110: mol_type = other DNA
gatcaagcctggtcagatgctgggtggaggctactgcctccccttacacctgaatccatggacaaacccgcatctcaatttttgccccagcatcaggtgatttaaatgaa

SEQ ID NO: 35553 - DNA, 110 bp, synthetic construct
  source 1..110: mol_type = other DNA
ccatggacaaacccgcatctcaatttttgccccagcatcaggtgatttaaatgaacaaaaccacccagagctttcctagataaatggtacatttgctcatgaatgcctgg

SEQ ID NO: 35554 - DNA, 110 bp, synthetic construct; identical to SEQ ID NO: 35552
  source 1..110: mol_type = other DNA

SEQ ID NO: 35555 - DNA, 110 bp, synthetic construct; identical to SEQ ID NO: 35553
  source 1..110: mol_type = other DNA

SEQ ID NO: 35556 - DNA, 110 bp, synthetic construct
  source 1..110: mol_type = other DNA
tttcccattctccacaaaagctcagcttaggtgggtccctttctgacaggtgtgtgtcttctacgtggtgagactctggagaccccacatggcgtgaggggctgaaatgg

SEQ ID NO: 35557 - DNA, 110 bp, synthetic construct
  source 1..110: mol_type = other DNA
gtcttctacgtggtgagactctggagaccccacatggcgtgaggggctgaaatggcatcattaaatagcactcgtgtcattcgatctcatgggtggactcctagtcacct

SEQ ID NO: 35558 - DNA, 110 bp, synthetic construct
  source 1..110: mol_type = other DNA
aggccatttggttttactgatgtgagtgtacacagcgtgggctagttacagtcttcaggaggcctgccttcatgagaaggggtatatatttatatcaaaagtattccctg

SEQ ID NO: 35559 - DNA, 110 bp, synthetic construct
  source 1..110: mol_type = other DNA
caggaggcctgccttcatgagaaggggtatatatttatatcaaaagtattccctggttacttttatttttatgtaattaattaattaattaattagctttatagggccac

SEQ ID NO: 35560 - DNA, 110 bp, synthetic construct
  source 1..110: mol_type = other DNA
cacaaactgggctaaatgctgatggactcaccttattgaggattaaacccaacctagtaaagggttatacaggtaaccaatcgttccttttcctcattggtgcctcacta

SEQ ID NO: 35561 - DNA, 110 bp, synthetic construct
  source 1..110: mol_type = other DNA
agtaaagggttatacaggtaaccaatcgttccttttcctcattggtgcctcactatatcccacaagagctgggcaaggctggtttcaatatccactcaacacaatgaggc

SEQ ID NO: 35562 - DNA, 110 bp, synthetic construct
  source 1..110: mol_type = other DNA
gcagctgggaaaatcttcctgagctaagagatttctgtgaaggcaatttctgtagacagttctcatttaaatggaaattccttcagaaacactaacaatggctcacacat

SEQ ID NO: 35563 - DNA, 110 bp, synthetic construct
  source 1..110: mol_type = other DNA
acagttctcatttaaatggaaattccttcagaaacactaacaatggctcacacatccactgcttgactaggtgctgggcactgttctgagaggtttatatgtattaactc

SEQ ID NO: 35564 - DNA, 110 bp, synthetic construct
  source 1..110: mol_type = other DNA
ctccttgaagtggatggaaggcagcagcagaagtggtaccatcactgtctctgagccccctctttgcagaaaatggaaatgcggggagacaaaagctctctgagaaggat

SEQ ID NO: 35565 - DNA, 110 bp, synthetic construct
  source 1..110: mol_type = other DNA
ccccctctttgcagaaaatggaaatgcggggagacaaaagctctctgagaaggatagttcactcaaaggcctcttgcatagaacgctgaagacactgcaggagaagccac

SEQ ID NO: 35566 - DNA, 110 bp, synthetic construct
  source 1..110: mol_type = other DNA
cagccaacaaattggggatcactgctcctaaagagaagggatgagccaggagaagttgcctgaagccccaactctgttagagggagcaatgtttgccggtttcttgcctc

SEQ ID NO: 35567 - DNA, 110 bp, synthetic construct
  source 1..110: mol_type = other DNA
ttgcctgaagccccaactctgttagagggagcaatgtttgccggtttcttgcctctgctaatgatgtttgggggaaaacaagtgtaagagggaagatgaatcacaagata

SEQ ID NO: 35568 - DNA, 110 bp, synthetic construct; identical to SEQ ID NO: 35566
  source 1..110: mol_type = other DNA

SEQ ID NO: 35569 - DNA, 110 bp, synthetic construct; identical to SEQ ID NO: 35567
  source 1..110: mol_type = other DNA

SEQ ID NO: 35570 - DNA, 110 bp, synthetic construct
  source 1..110: mol_type = other DNA
cagtggtcttgacatgaagtaagccaattgctctgacaatcaggaaaagactgaaagacatattcctgttgttggtatataggaaggtgataggaacactagcggcttct

SEQ ID NO: 35571 - DNA, 110 bp, synthetic construct
  source 1..110: mol_type = other DNA
agacatattcctgttgttggtatataggaaggtgataggaacactagcggcttcttgaaactcccctggttcttccttcctgactttgaagagacaaacagtgaaaataa

SEQ ID NO: 35572 - DNA, 110 bp, synthetic construct
  source 1..110: mol_type = other DNA
actgcgtcctgggcatgagttatcttatttaatcctcaccagagtgagtatgacttgtttgctcttttgcacactacaaatcggagtcagagaagtaacaccgaggattt

SEQ ID NO: 35573 - DNA, 110 bp, synthetic construct
  source 1..110: mol_type = other DNA
tgtttgctcttttgcacactacaaatcggagtcagagaagtaacaccgaggattttcgagctgctaagctgcaaaacagggatgctaagccaaaatggtcggagtgcaga

SEQ ID NO: 35574 - DNA, 110 bp, synthetic construct
  source 1..110: mol_type = other DNA
ttctccttctcaggaaagggcagcactgtgcttctggtttctcaggacaaaagcctgccagttatctttcattctgcttttttacttacagtccactttcaataaatcag

SEQ ID NO: 35575 - DNA, 110 bp, synthetic construct
  source 1..110: mol_type = other DNA
tgccagttatctttcattctgcttttttacttacagtccactttcaataaatcagctaagttctattggcaccatcttccaaatttgtctagaatgagaccatgtgttgc

SEQ ID NO: 35576 - DNA, 110 bp, synthetic construct
  source 1..110: mol_type = other DNA
ctctcaacctacagcaatcacagttcccatagcacaaggcccacttagaggattacagaatctcaccctgtggtctcctccggaatgtcactaaggacaagaaacaactc

SEQ ID NO: 35577 - DNA, 110 bp, synthetic construct
  source 1..110: mol_type = other DNA
cagaatctcaccctgtggtctcctccggaatgtcactaaggacaagaaacaactcatgattccaggcaagcctgactcccagggagtcctcaacacgcaatcatcaaagg

SEQ ID NO: 35578 - DNA, 110 bp, synthetic construct
  source 1..110: mol_type = other DNA
acccaaggggtgaaccagacggcccatttttctcactgctatgccatcccagctactgtgtggccttcattaagtcactttgcggcctcggtttctcatctgcacactgg

SEQ ID NO: 35579 - DNA, 110 bp, synthetic construct
  source 1..110: mol_type = other DNA
ctgtgtggccttcattaagtcactttgcggcctcggtttctcatctgcacactgggtacagcatgacccatgttgctgggctttgtaagactccaatgagatatggtatg

SEQ ID NO: 35580 - DNA, 110 bp, synthetic construct
  source 1..110: mol_type = other DNA
tgtgctctacaaggaccagcttcacttattctaaaaacactggctccatcagtatattttcctccatctattattcctcctcagcagcaggaagggcacttttagagatg

SEQ ID NO: 35581 - DNA, 110 bp, synthetic construct
  source 1..110: mol_type = other DNA
aaaaaaaaatggggaggtgaaaggggccaaggtgaggggaacacccagttcttggatattctgtccacagcttgtcccagagtcaggggagagcctgcaagggagatggc

SEQ ID NO: 35582 - DNA, 110 bp, synthetic construct
  source 1..110: mol_type = other DNA
atattctgtccacagcttgtcccagagtcaggggagagcctgcaagggagatggcatccccacctgatgaaaggagctgtacttaacattcactcaacagatttgtctca

SEQ ID NO: 35583 - DNA, 110 bp, synthetic construct
  source 1..110: mol_type = other DNA
tcagagtcggcttctgacctctctggaagactccatcactctctgtcacccagagccatcacctttctaggacaaacagctctacatcatgacagaccacactgcatcaa

SEQ ID NO: 35584 - DNA, 110 bp, synthetic construct
  source 1..110: mol_type = other DNA
ccatcacctttctaggacaaacagctctacatcatgacagaccacactgcatcaacttctgtttctggaccctatggaagggaaacataaacatggcattctgtctacag

SEQ ID NO: 35585 - DNA, 110 bp, synthetic construct
  source 1..110: mol_type = other DNA
gttcaagtcccggtgcagccattttagtcactcacttattgaacatccaacccatacatatacaaggagcaccaactatgcaccaggcaatgctccagaggaagctggta

SEQ ID NO: 35586 - DNA, 110 bp, synthetic construct
  source 1..110: mol_type = other DNA
acatatacaaggagcaccaactatgcaccaggcaatgctccagaggaagctggtacccagcaaagaggaaaccaaaggatccaacctcatgttgcatctcaactcttaag

SEQ ID NO: 35587 - DNA, 110 bp, synthetic construct
  source 1..110: mol_type = other DNA
accgtggcaggaactcctggatattttaatcttaaaagttcccatagacagatcagatcccctgacactgctggctacttctggggaaagtggggtcttggctggtcagg

SEQ ID NO: 35588 - DNA, 110 bp, synthetic construct
  source 1..110: mol_type = other DNA
gatcccctgacactgctggctacttctggggaaagtggggtcttggctggtcagggggtcctagatctggggtttcctagcctctcaggggtccatggggtgacagaggc

SEQ ID NO: 35589 - DNA, 110 bp, synthetic construct
  source 1..110: mol_type = other DNA
gccacacctgtgacatatggaggttcccaggcgagggttccaaatggagctgccagcctgcaccccagccacagcaatgtcagattcgagccgcgtctgcgacctacacc

SEQ ID NO: 35590 - DNA, 110 bp, synthetic construct; identical to SEQ ID NO: 35589
  source 1..110: mol_type = other DNA

SEQ ID NO: 35591 - DNA, 110 bp, synthetic construct
  source 1..110: mol_type = other DNA
tggaaagggccttatcccctcactaagccatcggggagggaaataaagcttggatcctgtcactccactgcttaaaaccctgacgcagagttcccactatggctcagcgg

SEQ ID NO: 35592 - DNA, 110 bp, synthetic construct
  source 1..110: mol_type = other DNA
gccccaagccctggccccctggcctctagagagggaacagcatgtgcaaaggcctgaggaccagccccgtcaccccagctcttctaggtgccccaggaaaaggcaaccat

SEQ ID NO: 35593 - DNA, 110 bp, synthetic construct
  source 1..110: mol_type = other DNA
gaggaccagccccgtcaccccagctcttctaggtgccccaggaaaaggcaaccatgagtgatgggctatctgctcctctgaggccagagagaatcccaccccacaccccg

SEQ ID NO: 35594 - DNA, 110 bp, synthetic construct
  source 1..110: mol_type = other DNA
catgctgcctgctttatgggctcttagggccacccctcttggccgctgaagatagggataaataaatttggctaagttagacatccccagtccagagaaggtcagctgaa

SEQ ID NO: 35595 - DNA, 110 bp, synthetic construct
  source 1..110: mol_type = other DNA
ggataaataaatttggctaagttagacatccccagtccagagaaggtcagctgaagacttggactcatggctttgagtcatagaacctcctgaaccgtgagggccccagg

SEQ ID NO: 35596 - DNA, 110 bp, synthetic construct
  source 1..110: mol_type = other DNA
tcaatgataataataataaagaactagagaagctgggggataaaaattaaattaagttaaccagcccggtggcaggaagcaaagacagtagacatgagtcaggaggccca

SEQ ID NO: 35597 - DNA, 110 bp, synthetic construct
  source 1..110: mol_type = other DNA
gttaaccagcccggtggcaggaagcaaagacagtagacatgagtcaggaggcccaggttccactctgttgctggctctcactcctggccgacctctctgggccactgtct

SEQ ID NO: 35598 - DNA, 110 bp, synthetic construct
  source 1..110: mol_type = other DNA
cttgtccccgaacccccctcctcctcccaagccccagtattctggccccagtattcaagcaccacaagctcccagtcctcagggatgccccagtactcaaagacagctct

SEQ ID NO: 35599 - DNA, 110 bp, synthetic construct
  source 1..110: mol_type = other DNA
caagcaccacaagctcccagtcctcagggatgccccagtactcaaagacagctctttccccttcacctttgcgctccaaaatattccatcagctcagcccagcactgccc

SEQ ID NO: 35600 - DNA, 110 bp, synthetic construct
  source 1..110: mol_type = other DNA
ggttcttgcaaaggagtcgcatgtggcaatcaaaaagaatggggtagatttctactcgggagcacagaaagctatctatgatgtcattcaatgagaaaagcaagcctcag

SEQ ID NO: 35601 - DNA, 110 bp, synthetic construct
  source 1..110: mol_type = other DNA
tcgggagcacagaaagctatctatgatgtcattcaatgagaaaagcaagcctcagaaaatgaataattccaggtaactggaggaaaacctttttacacactcctctttat

SEQ ID NO: 35602 - DNA, 110 bp, synthetic construct
  source 1..110: mol_type = other DNA
gtcagacttggaagaacccatcactgacctttccagccaatcaagagagagctaaacccaggtatagggttttggacaagaccttctggtcttatcctgacttttatagg

SEQ ID NO: 35603 - DNA, 110 bp, synthetic construct
  source 1..110: mol_type = other DNA
acccaggtatagggttttggacaagaccttctggtcttatcctgacttttataggatgggaaagtgaagatttagagtaaatctataaggatcaaatttactcagttcag

SEQ ID NO: 35604 - DNA, 110 bp, synthetic construct
  source 1..110: mol_type = other DNA
ccaggttttatgggacctgaagtttattcagtttgggaaactttaaaagacagagtaaaaaaaaattagtcccgcgtcttacgcttccttagcttcatgataaattcact

SEQ ID NO: 35605 - DNA, 110 bp, synthetic construct
  source 1..110: mol_type = other DNA
taaaaaaaaattagtcccgcgtcttacgcttccttagcttcatgataaattcacttcttgctctactctcttacaaaataaaaaagaatcctgaaatgctagatttcaat

SEQ ID NO: 35606 - DNA, 110 bp, synthetic construct
  source 1..110: mol_type = other DNA
acctgtattttcctgatggagaaacggaggctcagagaggtcaataactcacttgacatctcacagctgggtgagccagatccaagcctcagtttgtctgtttcaaagcc

SEQ ID NO: 35607 - DNA, 110 bp, synthetic construct
  source 1..110: mol_type = other DNA
acatctcacagctgggtgagccagatccaagcctcagtttgtctgtttcaaagccagtctaatcccactgcctcacagcctggaggtttctggggtccctgggaagaagg

SEQ ID NO: 35608 - DNA, 110 bp, synthetic construct; identical to SEQ ID NO: 35606
  source 1..110: mol_type = other DNA

SEQ ID NO: 35609 - DNA, 110 bp, synthetic construct; identical to SEQ ID NO: 35607
  source 1..110: mol_type = other DNA

SEQ ID NO: 35610 - DNA, 110 bp, synthetic construct
  source 1..110: mol_type = other DNA
caggctgagaagtccgaggttgacgtcctggctttgcccctcctgtgctgttaagtcctcatgtgctctttgacccatttccacatccagagggtgggcagctttgtctg

SEQ ID NO: 35611 - DNA, 110 bp, synthetic construct
  source 1..110: mol_type = other DNA
tcctcatgtgctctttgacccatttccacatccagagggtgggcagctttgtctgggtgatctccaacacgggttctagatcttttcactcatgccaggatccccccctc

SEQ ID NO: 35612 - DNA, 110 bp, synthetic construct
  source 1..110: mol_type = other DNA
cccggcgagtgtggcatcctgcagtcccggagaaggaacggcagcaagcagggaggagaaatgagctctgcgcggtgctgccgaggaggcaggtaaaatggagacagaga

SEQ ID NO: 35613 - DNA, 110 bp, synthetic construct
  source 1..110: mol_type = other DNA
gagaaatgagctctgcgcggtgctgccgaggaggcaggtaaaatggagacagagaactgagccgagttcggagacaggtcacaggggaccttgacaggtcatctggtgaa

SEQ ID NO: 35614 - DNA, 110 bp, synthetic construct
  source 1..110: mol_type = other DNA
accaccaggttccagtttcctctgaaggcagagagaaaagaaaacacaagtatacatcctattttgaggaaaacaaaacacaggcatcttttataacctggtatcatcat

SEQ ID NO: 35615 - DNA, 110 bp, synthetic construct
  source 1..110: mol_type = other DNA
atcctattttgaggaaaacaaaacacaggcatcttttataacctggtatcatcataaaatctaaaaggaaggtattttaaatagcaccctttcctcccaaagactgttta

SEQ ID NO: 35616 - DNA, 110 bp, synthetic construct
  source 1..110: mol_type = other DNA
ttgaatatgagatacagctgaggccttcggcacagccacagaagtattggatcagagctgcgtctgcaacctatgctgcaacttgctgcagtgctgaatccttaacccac

SEQ ID NO: 35617 - DNA, 110 bp, synthetic construct; identical to SEQ ID NO: 35616
  source 1..110: mol_type = other DNA

SEQ ID NO: 35618 - DNA, 110 bp, synthetic construct
  source 1..110: mol_type = other DNA
gcaatcccactcctgggcatatttccacaagccacccgaagaagtccagattcccagcccatcaggggactgagggagctgttcttcactcagaatgagatcttcagccc

SEQ ID NO: 35619 - DNA, 110 bp, synthetic construct
  source 1..110: mol_type = other DNA
agcccatcaggggactgagggagctgttcttcactcagaatgagatcttcagccccacatattttcagtagaacttcactcaatgccttgcacaggatggcccatcagca

SEQ ID NO: 35620 - DNA, 110 bp, synthetic construct
  source 1..110: mol_type = other DNA
taatgaactaaaagatgacagataatgcctttcttattctatctggaaaatagctcttttctgtaaagttgattgtagagttgttaaaaagttttaggccaagaataagg

SEQ ID NO: 35621 - DNA, 110 bp, synthetic construct
  source 1..110: mol_type = other DNA
gtccccacacgtcctgtcatgcccacgtcaaatatgaggttccctcaaggctgcagatcagatcaggccccgggacccgagaaaacctcgggcctgtccgctcctcaaac

SEQ ID NO: 35622 - DNA, 110 bp, synthetic construct
  source 1..110: mol_type = other DNA
aaccgaaaccgcgcactatggaaaaggtccacagcctcaaatcagaccgagccctgcaggacacagaacggctgtgatgagcggacatcattccatcaacaagtcagagg

SEQ ID NO: 35623 - DNA, 110 bp, synthetic construct
  source 1..110: mol_type = other DNA
gcaggacacagaacggctgtgatgagcggacatcattccatcaacaagtcagaggggccaaacgaggccggtggggtcctcacccgctgagtaaggatgagttcatatta

SEQ ID NO: 35624 - DNA, 110 bp, synthetic construct
  source 1..110: mol_type = other DNA
cctttctgctgaaccatgatgggaactccttgccactcgtccatctgcttgcttccttccaaaaatgtgctgacatctttcatcagctgctatctcctccctatttgcat

SEQ ID NO: 35625 - DNA, 110 bp, synthetic construct
  source 1..110: mol_type = other DNA
atcctgttcacgccctcaggagtcaccatccccactgccctaggaacactggctagctgcacccctgataaccaccaaatgcttctttgggccactagctcctgggtcac

SEQ ID NO: 35626 - DNA, 110 bp, synthetic construct
  source 1..110: mol_type = other DNA
actcaaagctgcttttgagtatccttaaccccaccccccaaaagtttttgcgctgcaccctaaggaaatatggctgccccggaatgaggagaccagggttccagtcttgt

SEQ ID NO: 35627 - DNA, 110 bp, synthetic construct
  source 1..110: mol_type = other DNA
caccctaaggaaatatggctgccccggaatgaggagaccagggttccagtcttgtctctgctcttaacgtggtgtacctcggttttcccatctgtaaaatgggacacgag

SEQ ID NO: 35628 - DNA, 110 bp, synthetic construct
  source 1..110: mol_type = other DNA
gaatttgatataagttgaaatgaatgtcaactgctagaaggttgagatggcatctgtcctgtgccatgcttttactcctagcgctgagcgtaatgtctgacatgaagtag

SEQ ID NO: 35629 - DNA, 110 bp, synthetic construct
  source 1..110: mol_type = other DNA
gtcctgtgccatgcttttactcctagcgctgagcgtaatgtctgacatgaagtaggtgctcaataaatagctgaatgaatttaaaaggcaacagcataaagtttgtaaaa

SEQ ID NO: 35630 - DNA, 110 bp, synthetic construct
  source 1..110: mol_type = other DNA
agaatggcaaggactacacagcgatgaacagttttcaaagaaagccatgggatttgctggtgtggtatggggtgcatgtactgtcatgtggcttcagagctactgacttc

SEQ ID NO: 35631 - DNA, 110 bp, synthetic construct
  source 1..110: mol_type = other DNA
gctggtgtggtatggggtgcatgtactgtcatgtggcttcagagctactgacttcaggtacaaacagatgtcatgtcagaggcaaatgaggccaagggaactgttcccaa

SEQ ID NO: 35632 - DNA, 110 bp, synthetic construct
  source 1..110: mol_type = other DNA
aaatgcattttggccttgtaaagattaaggttgcttctagaaacttagtttctttggagagatcatctttttttcttcctttttttgtttttgttttttagggctgcgct

SEQ ID NO: 35633 - DNA, 110 bp, synthetic construct
  source 1..110: mol_type = other DNA
tctagaaacttagtttctttggagagatcatctttttttcttcctttttttgtttttgttttttagggctgcgcttgtggcatatagaagttgccaggctaggggtcaaa

SEQ ID NO: 35634 - DNA, 110 bp, synthetic construct
  source 1..110: mol_type = other DNA
tgtcagtttatcttcagctcttgccttagcaggctaatgaacagaacttgaaacaggtgaatttattctgttctatgagacagtgaagggatcgcctcagtatttaaata

SEQ ID NO: 35635 - DNA, 110 bp, synthetic construct
  source 1..110: mol_type = other DNA
agctcttgccttagcaggctaatgaacagaacttgaaacaggtgaatttattctgttctatgagacagtgaagggatcgcctcagtatttaaatatattaatataaccag

SEQ ID NO: 35636 - DNA, 110 bp, synthetic construct
  source 1..110: mol_type = other DNA
acctgttttcatttctctcaggtctataaataactagggtttataactggatcatagtacgtttagctttttgaggaaccactaaacttctccaccagaggcaccatttt

SEQ ID NO: 35637 - DNA, 110 bp, synthetic construct
  source 1..110: mol_type = other DNA
gcgttttactgtgttcctcctcttcactgttcacagctagtcagaaaaaatattttgtccattgcacctcagaattgtgctttcaagatggatgaacaccatcctgtgag

SEQ ID NO: 35638 - DNA, 110 bp, synthetic construct
  source 1..110: mol_type = other DNA
cccgaattccatggacatagaaccttagatgagtctccttctgagagtgtaacatttggtggtttacacctttacacatccccggtggacagctttggctggggtggtct

SEQ ID NO: 35639 - DNA, 110 bp, synthetic construct
  source 1..110: mol_type = other DNA
ttggtggtttacacctttacacatccccggtggacagctttggctggggtggtctcgggcaggagggggccctggcccagggtcgtatcggtattattcccattttacaa

SEQ ID NO: 35640 - DNA, 110 bp, synthetic construct
  source 1..110: mol_type = other DNA
gctctgccttcaaatttgatgtgagctgggctaaaggttggcaggaaaggtccttgtggcgcttgctccctcgttcagcatcacctcaggcttagcgtctctgaaagcac

SEQ ID NO: 35641 - DNA, 110 bp, synthetic construct
  source 1..110: mol_type = other DNA
gtggcgcttgctccctcgttcagcatcacctcaggcttagcgtctctgaaagcacactcatctttccatctttcctacaagacaggtccttgtctcagtaggacccccac

SEQ ID NO: 35642 - DNA, 110 bp, synthetic construct
  source 1..110: mol_type = other DNA
tgaggacgttgtctgaagtgccctgggaagccagctttcattttagagttgggtctgctgggcacgagttattggagatgtttggctctgcggtggatcacgtaaaaggc

SEQ ID NO: 35643 - DNA, 110 bp, synthetic construct
  source 1..110: mol_type = other DNA
tgctgggcacgagttattggagatgtttggctctgcggtggatcacgtaaaaggcaggtagactagtggccctcgatgggtgagggtttgtttgccccagatgcacatgt

SEQ ID NO: 35644 - DNA, 110 bp, synthetic construct
  source 1..110: mol_type = other DNA
caccgctgtgctttccagagtcagactttactctgtgcagtttggggtttccctggatctccgcaagagctgactgttgtgactgtaatatttccttccttcacgggcaa

SEQ ID NO: 35645 - DNA, 110 bp, synthetic construct
  source 1..110: mol_type = other DNA
gatctccgcaagagctgactgttgtgactgtaatatttccttccttcacgggcaaacctccaccgccgggcacttggcctggagcacgcttacttctgggggccccgggg

SEQ ID NO: 35646 - DNA, 110 bp, synthetic construct
  source 1..110: mol_type = other DNA
tgggttgaaatcttgttgatcccatggaggcaggaatcttgtatctcacagcattttgtattctcatcagtgtctggctcatcgtaggccctcaggaagtgttggttgcc

SEQ ID NO: 35647 - DNA, 110 bp, synthetic construct
  source 1..110: mol_type = other DNA
ttgtattctcatcagtgtctggctcatcgtaggccctcaggaagtgttggttgccgggtggactgggaattagccaatacgtaaacacaaactgagatgctttcaggcct

SEQ ID NO: 35648 - DNA, 110 bp, synthetic construct
  source 1..110: mol_type = other DNA
cgtggaccattctgggttcccgcttcagctctgccctcactctctctgtgtccttgggaagagagcgtagctctctgactcactggtttagtcacctgcgtgatgggact

SEQ ID NO: 35649 - DNA, 110 bp, synthetic construct
  source 1..110: mol_type = other DNA
gggaagagagcgtagctctctgactcactggtttagtcacctgcgtgatgggactagaatgcttacctggcagagttgtgacgttagacccatcgggcgcagtgacgggc

SEQ ID NO: 35650 - DNA, 110 bp, synthetic construct
  source 1..110: mol_type = other DNA
attcttgaagttccatagcatttactattgaaaagcatctgcatgttcattgcacagttcagactccggggtcacctgtgcttccttttctcccctgtgactaataagca

SEQ ID NO: 35651 - DNA, 110 bp, synthetic construct
  source 1..110: mol_type = other DNA
ctgcaagtgcaaaggccctggggttgagcaggaccagtgtgttgaaaatgcagaatggacaatgcagctggatttcggaatctggaagaacgtggtaagagatgatcgga

SEQ ID NO: 35652 - DNA, 110 bp, synthetic construct
  source 1..110: mol_type = other DNA
tggacaatgcagctggatttcggaatctggaagaacgtggtaagagatgatcggagtgagagagagttcagaccacgtggggctggatcttcactatttaggagtttgga

SEQ ID NO: 35653 - DNA, 110 bp, synthetic construct
  source 1..110: mol_type = other DNA
gggagctagcagcttgagccctgggttcagaccccggggtcgccctaaggataccacttcctgggtgctaggatgtgcctgcatgtgacagatcagaagggagggcagtg

SEQ ID NO: 35654 - DNA, 110 bp, synthetic construct
  source 1..110: mol_type = other DNA
acttcctgggtgctaggatgtgcctgcatgtgacagatcagaagggagggcagtgctttcatgagaataatgataagaacagtgatccagtggtggtgaagggcaaaggt

SEQ ID NO: 35655 - DNA, 110 bp, synthetic construct
  source 1..110: mol_type = other DNA
caatttgttaatcattattatgctttcttgggtggaagcccaatttgcttctagattccggaggaccttagtcctttaaccccagcacctctttggaaggcagctggagt

SEQ ID NO: 35656 - DNA, 110 bp, synthetic construct
  source 1..110: mol_type = other DNA
ttccggaggaccttagtcctttaaccccagcacctctttggaaggcagctggagtgtcattacctgcttccatcagcaggccagggtcttcccgccatcccacggaccag

SEQ ID NO: 35657 - DNA, 110 bp, synthetic construct
  source 1..110: mol_type = other DNA
tgacaacctcgcccctgatcctggagcttgggctgtggattagtgtgtctgtcacactagctggctatcaccagggaaagtgcgatgctgggtattgtgacatggctgat

SEQ ID NO: 35658 - DNA, 110 bp, synthetic construct
  source 1..110: mol_type = other DNA
actagctggctatcaccagggaaagtgcgatgctgggtattgtgacatggctgattcaatagcgccattcagatgcatgacttcctaacttggctgctttgacatgggga

SEQ ID NO: 35659 - DNA, 110 bp, synthetic construct
  source 1..110: mol_type = other DNA
aactcattcattaaaatcatttcctattaaaaagctcaaaaatatatttgtgttcgacgttgttccaggccttattctgtgctactcagatatatggcacatctgtcttg

SEQ ID NO: 35660 - DNA, 110 bp, synthetic construct
  source 1..110: mol_type = other DNA
gacgttgttccaggccttattctgtgctactcagatatatggcacatctgtcttggctctgcatggtcatgggctacttttttagtttcttttcatctgctttaggatgc

SEQ ID NO: 35661 - DNA, 110 bp, synthetic construct
  source 1..110: mol_type = other DNA
accccaccggccctgggatcatggagctgcgtgcagggcaatgactctggccgagcaagctcttatctcaagagacagcatcccagcctccgagccaagtcggtgggaac

SEQ ID NO: 35662 - DNA, 110 bp, synthetic construct
  source 1..110: mol_type = other DNA
caagctcttatctcaagagacagcatcccagcctccgagccaagtcggtgggaactcacatacaatcccacttaaggtaaacgtcacgtggtgatggactctaaatctgg

SEQ ID NO: 35663 - DNA, 110 bp, synthetic construct; identical to SEQ ID NO: 35661
  source 1..110: mol_type = other DNA

SEQ ID NO: 35664 - DNA, 110 bp, synthetic construct; identical to SEQ ID NO: 35662
  source 1..110: mol_type = other DNA

SEQ ID NO: 35665 - DNA, 110 bp, synthetic construct
  source 1..110: mol_type = other DNA
ggtcctggcacggcctcttctcctcggccagtcaggcttctggacctgctgtgacagtgtcagtgaatgatgtgccatgtgacgctggctgagctccggcagacgggtta

SEQ ID NO: 35666 - DNA, 110 bp, synthetic construct
  source 1..110: mol_type = other DNA
agtgtcagtgaatgatgtgccatgtgacgctggctgagctccggcagacgggttacttacacgtcacagaggctgctcgtgcctaccctgtgcaaacgaatgggctgagg

SEQ ID NO: 35667 - DNA, 110 bp, synthetic construct
  source 1..110: mol_type = other DNA
ctttcctatagaaatcgagtcccccgaccagtatccagaggctggccatttgagccggactcaccctctgccaccagctccgcatgttcccaagtcctcccccgatcccc

SEQ ID NO: 35668 - DNA, 110 bp, synthetic construct
  source 1..110: mol_type = other DNA
gccaacaggttagtcttttccagaggccctgggtttccacagggttctcgaagttctgtgggcaagaaatgcgagctctggcggagaaggagcctccctctgtaaggggg

SEQ ID NO: 35669 - DNA, 110 bp, synthetic construct
  source 1..110: mol_type = other DNA
ctgtgggcaagaaatgcgagctctggcggagaaggagcctccctctgtaaggggggcattaaaaagtgtcctctatcaagcccgttcgacacatgtcccctggagacctt

SEQ ID NO: 35670 - DNA, 110 bp, synthetic construct
  source 1..110: mol_type = other DNA
cacctatgtgcctctgttaggggcaggaagtgataaatagctgagagctctctcttggggatgcgaggccctatccaaatgtcagccttcctctgcagtcattgcacgga

SEQ ID NO: 35671 - DNA, 110 bp, synthetic construct
  source 1..110: mol_type = other DNA
atctcctttcccttttaaccccatccagttttgctttcttgatttcgaggtcatgctcttaggggcacacaccttccccattggtacccctgtgccttactttctactta

SEQ ID NO: 35672 - DNA, 110 bp, synthetic construct
  source 1..110: mol_type = other DNA
ctgtctgcacagtaaagagagcttaggaggggccagagagctgagctgtgctgcggagctgaagccagcagcctttctgagaagcagagggaaatgctttgcctcctttt

SEQ ID NO: 35673 - DNA, 110 bp, synthetic construct
  source 1..110: mol_type = other DNA
gccgagggttaacagggtaccagggctggccctaaacacggaggaaaaagcttgcagcaaacacgacaaaccaccaactggcatttactcattcagcaccacctcatggc

SEQ ID NO: 35674 - DNA, 110 bp, synthetic construct
  source 1..110: mol_type = other DNA
ggatggtaaagcggcagctggccagcggcagaggcgagacgggcagcttgggacggcagataccactgtgtacccttttctcctgaagctgctcctgccacagagctggg

SEQ ID NO: 35675 - DNA, 110 bp, synthetic construct
  source 1..110: mol_type = other DNA
ggtgagcccgagtttcaaggttcagagtctggaacactgctagctttgccagttccggggccagtctagacctcaagaacttggctgatggtcaaccttaagagaactgg

SEQ ID NO: 35676 - DNA, 110 bp, synthetic construct
  source 1..110: mol_type = other DNA
ctgcgccataacaggaactccattttttaccataaatcttgaagattgtttcacatcactacataaataacttccttatcccctttttaatggctatagagtattccata

SEQ ID NO: 35677 - DNA, 110 bp, synthetic construct; identical to SEQ ID NO: 35676
  source 1..110: mol_type = other DNA

SEQ ID NO: 35678 - DNA, 110 bp, synthetic construct
  source 1..110: mol_type = other DNA
gggcccagcacgatcaaggcacagcctggcccctgccagcttatcctccacacagagaccagggtgtttgttttcttccaaaaaactgctctgatcatgtctctccttct

SEQ ID NO: 35679 - DNA, 110 bp, synthetic construct
  source 1..110: mol_type = other DNA
cagtggaaaacagaaaatgcaggacagggattcaggccagaaagggaacaagggaggtgagccctaaagtcaccccagcttttccccaaagatactgtttttaaaaatgt

SEQ ID NO: 35680 - DNA, 110 bp, synthetic construct
  source 1..110: mol_type = other DNA
ggtgagccctaaagtcaccccagcttttccccaaagatactgtttttaaaaatgtgtttttattgaagcatccttgattgacaatgttgtgttgatttatgctgaacagc

SEQ ID NO: 35681 - DNA, 110 bp, synthetic construct
  source 1..110: mol_type = other DNA
gctatgaggctctgggcacaggcagccttcactgactgctgcctggcaccttactcctccagggctgtcacagctgcccccaggtggcatctcaggcaaatagtcccctt

SEQ ID NO: 35682 - DNA, 110 bp, synthetic construct
  source 1..110: mol_type = other DNA
cctccagggctgtcacagctgcccccaggtggcatctcaggcaaatagtcccctttgtgacagagaccttcccatgagcagaaaccgacatattctaagtgccccccatt

SEQ ID NO: 35683 - DNA, 110 bp, synthetic construct
  source 1..110: mol_type = other DNA
agtcatggctcgggacagtccggtttggtggaagggcctcacctctgtggagtgtttgtttgaagctcgcccatctggtcctatcctagaggcaaaagtgaggatgtaga

SEQ ID NO: 35684 - DNA, 110 bp, synthetic construct
  source 1..110: mol_type = other DNA
ttgtttgaagctcgcccatctggtcctatcctagaggcaaaagtgaggatgtagacacatgaagggcatcgtgagcaggcctagaacccaggagtcctggcccctaggct

SEQ ID NO: 35685 - DNA, 110 bp, synthetic construct
  source 1..110: mol_type = other DNA
aggtttcacagatgacaggcccaaggcctagaggaggcaggagacttctccagagtcccacagcaagtggcaatggggaatcaggaaccctcttcagaggtcctgactct

SEQ ID NO: 35686 - DNA, 110 bp, synthetic construct
  source 1..110: mol_type = other DNA
tcccacagcaagtggcaatggggaatcaggaaccctcttcagaggtcctgactctgagctctttccacatccccaagcagcttattaagtctatgaattggggaaatctg

SEQ ID NO: 35687 - DNA, 110 bp, synthetic construct
  source 1..110: mol_type = other DNA
atatagagttactgggccagggatcagatctgagctgcggtctcaacctaagctgcaactgcagcaacagtggattcttaaatcactgtgctaggccagggattgaacct

SEQ ID NO: 35688 - DNA, 110 bp, synthetic construct
  source 1..110: mol_type = other DNA
agatctgagctgcggtctcaacctaagctgcaactgcagcaacagtggattcttaaatcactgtgctaggccagggattgaacctgaatcccagtgctcccaagacgctg

SEQ ID NO: 35689 - DNA, 110 bp, synthetic construct
  source 1..110: mol_type = other DNA
cctctctcatttcaggtacaaggttggtttcccaggatcccagatgctttggcagtgccccgagctccctccaccagagcccggatatggagcacctcaggcttgccttt

SEQ ID NO: 35690 - DNA, 110 bp, synthetic construct
  source 1..110: mol_type = other DNA
tgccccgagctccctccaccagagcccggatatggagcacctcaggcttgcctttggtttcccctgcagcaaccctcagactgtccccacacacacccttcaccacagcc

SEQ ID NO: 35691 - DNA, 110 bp, synthetic construct
  source 1..110: mol_type = other DNA
gtagaagggaactgacaggtcatgtgggcttcaaagaactatatttttcacaacatccccaaaaagttgtaccttgtcctctagatgatgttgagtgggaggatttggcc

SEQ ID NO: 35692 - DNA, 110 bp, synthetic construct
  source 1..110: mol_type = other DNA
tccccaaaaagttgtaccttgtcctctagatgatgttgagtgggaggatttggccccttagtacgcttcactcttttacaacaactctgtgtgtttcaaagccatagttt

SEQ ID NO: 35693 - DNA, 110 bp, synthetic construct
  source 1..110: mol_type = other DNA
gacattttatatttctttggattagagatcaagcaagtttgtactttcctttaccatagcgaccgggagcttgcaacacatcactattaagtgatgggtcatgattgaac

SEQ ID NO: 35694 - DNA, 110 bp, synthetic construct
  source 1..110: mol_type = other DNA
atagcgaccgggagcttgcaacacatcactattaagtgatgggtcatgattgaaccatcggtgatgtacagaggtcccttctctgtggggaccaaagtggctgccaagag

SEQ ID NO: 35695 - DNA, 110 bp, synthetic construct
  source 1..110: mol_type = other DNA
catgttgtttctcctgttctttgttctcagcatgctttgtcgttaaagagagtcatctctaaaagaaagcatttatcttagtttattttttttgtatgaaagcagctctt

SEQ ID NO: 35696 - DNA, 110 bp, synthetic construct
  source 1..110: mol_type = other DNA
ctcagcatgctttgtcgttaaagagagtcatctctaaaagaaagcatttatcttagtttattttttttgtatgaaagcagctctttggagataaaatacagaaggaaaaa

SEQ ID NO: 35697 - DNA, 110 bp, synthetic construct
  source 1..110: mol_type = other DNA
tgcctaatagtttaagtggccatcagctgtgacagaaggttgctcctaagttatgaggtgaaagagatgtcacaaaaaaaatcatttcttgggcgttccctttgtgattc

SEQ ID NO: 35698 - DNA, 110 bp, synthetic construct
  source 1..110: mol_type = other DNA
caggggtggtttcagcaggacgtgaggatttgatacgaagcaggtcttcttggaacactgactttcttgtgatggcctttgcgcgtttctgtccctgggtttcccccaaa

SEQ ID NO: 35699 - DNA, 110 bp, synthetic construct
  source 1..110: mol_type = other DNA
cactgactttcttgtgatggcctttgcgcgtttctgtccctgggtttcccccaaatgctgggtttgctgaagcttcgtgtcgcagactccagaaggtggtacatgttcca

SEQ ID NO: 35700 - DNA, 110 bp, synthetic construct
  source 1..110: mol_type = other DNA
ttgtggcgtgtcctttgtgattttgcgttttcttagaagcgccatcaaatgttgagatggagcagctgctctcgtctccagttataacagagtgggcacaagtttgcctt

SEQ ID NO: 35701 - DNA, 110 bp, synthetic construct
  source 1..110: mol_type = other DNA
gatggagcagctgctctcgtctccagttataacagagtgggcacaagtttgcctttatactaactggtcccaatcagccagtccttccaagttccaggcctggttctcgg

SEQ ID NO: 35702 - DNA, 110 bp, synthetic construct
  source 1..110: mol_type = other DNA
acatttaaattgtggtcctaagccctgaccccacaaggagtttgacagcttggaaacaggtgcagaaatgctcccgagactcttggcactgttttcctgctgttccacgg

SEQ ID NO: 35703 - DNA, 110 bp, synthetic construct
  source 1..110: mol_type = other DNA
tccctgagccccaactgccctgaatgtgccaggcttctccccgctggctttggctgatgccctgtggctgcctgctgctcaccgatgaggtcttagccaactcccctctc

SEQ ID NO: 35704 - DNA, 110 bp, synthetic construct
  source 1..110: mol_type = other DNA
gatgccctgtggctgcctgctgctcaccgatgaggtcttagccaactcccctctccttgatcctcaaaaccaaatctaaacaggggctccctatttttttctccattttt

SEQ ID NO: 35705 - DNA, 110 bp, synthetic construct
  source 1..110: mol_type = other DNA
ttgagtaattcaagcgtatttcatttctgcagcagctaatcacagagcattggagtgctgcaaagcagtccaaatgagtgattcatgcacttggcctgatctggcggaca

SEQ ID NO: 35706 - DNA, 110 bp, synthetic construct
  source 1..110: mol_type = other DNA
tcctcatggaccctagttgagtttgttttcactgagccacagcaggaactcctcaactccaacttcttactgactcatgtgcactttataagacagtgacctttgaggac

SEQ ID NO: 35707 - DNA, 110 bp, synthetic construct
  source 1..110: mol_type = other DNA
actccaacttcttactgactcatgtgcactttataagacagtgacctttgaggacccagctgcttaaaaagccttgagtcaaggatgatggggagcagacgagtggtcac

SEQ ID NO: 35708 - DNA, 110 bp, synthetic construct
  source 1..110: mol_type = other DNA
tggaagtgcagaggcccagagggcagagcacctgcacccacgggtggactgggatgggtattagctgctaaccacagacggttacatgcataggttatgcgcattatcca

SEQ ID NO: 35709 - DNA, 110 bp, synthetic construct
  source 1..110: mol_type = other DNA
agtttgatttcttcctctgcccaatcgtccttcctctctttttctttcatacatgctgttacctaataagtatctttcacccaaaactgtagctcagtgtccagagaata

SEQ ID NO: 35710 - DNA, 110 bp, synthetic construct
  source 1..110: mol_type = other DNA
ctgttacctaataagtatctttcacccaaaactgtagctcagtgtccagagaataccacctgcattaattggcaccaggtgtggtttgagaaagtaggtgacgaaaatgg

SEQ ID NO: 35711 - DNA, 110 bp, synthetic construct
  source 1..110: mol_type = other DNA
gtttagacgctctgtctaggttcactggttaggcaggttggaggatatattcaacagggtggagctacaaattagtttccttgccttggtgcagtggcagaagcagctct

SEQ ID NO: 35712 - DNA, 110 bp, synthetic construct
  source 1..110: mol_type = other DNA
tttatctttgctttcgtcttcttgtgctggtccgtctcgttggaggctcaactaatttgaccacctttccctttcccagtccccagctttgtcctgaaggaatcctgttg

SEQ ID NO: 35713 - DNA, 110 bp, synthetic construct
  source 1..110: mol_type = other DNA
gagctgcatctcttccgattctaaaataatcatctctccctggatttgtccaacctcttgttatctgattagtgctggtgaattaacaaattactttcatgttatatatt

SEQ ID NO: 35714 - DNA, 110 bp, synthetic construct; identical to SEQ ID NO: 35713
  source 1..110: mol_type = other DNA

SEQ ID NO: 35715 - DNA, 110 bp, synthetic construct; identical to SEQ ID NO: 35713
  source 1..110: mol_type = other DNA

SEQ ID NO: 35716 - DNA, 110 bp, synthetic construct; identical to SEQ ID NO: 35713
  source 1..110: mol_type = other DNA

SEQ ID NO: 35717 - DNA, 110 bp, synthetic construct
  source 1..110: mol_type = other DNA
aatgagcgaggtagtgagtgggaagaataagataatcatttcttgaaaaaagaagtgtaggagcagagaaaataactgttttttcctctcaatagaacggaaagaaagac

SEQ ID NO: 35718 - DNA, 110 bp, synthetic construct
  source 1..110: mol_type = other DNA
tgtaggagcagagaaaataactgttttttcctctcaatagaacggaaagaaagactgagatggatggtgataaaaggtggcccaagatgaaacagaggatcaagtgatag

SEQ ID NO: 35719 - DNA, 110 bp, synthetic construct
  source 1..110: mol_type = other DNA
tggcccttcctttcttttcaaacttcccagaagatttgcctaatatgaaatacgtggcgtgatagggaacattttacttaggacttgctatgtgccaggctctgtactaa

SEQ ID NO: 35720 - DNA, 110 bp, synthetic construct
  source 1..110: mol_type = other DNA
aaagaatatagcaaggcagcacaaaataagtgtgcagtagctgtaagctctcgttgcggttgttactgaaactaatccatacagagagattctgcagttaatgaaatatt

SEQ ID NO: 35721 - DNA, 110 bp, synthetic construct
  source 1..110: mol_type = other DNA
tggcaccaggacaggcactgacacatggggggtccactttggaataacctggcaatctttttatcttcagcttaacgaactcagattcgtgggtccagtgtcagtcttgc

SEQ ID NO: 35722 - DNA, 110 bp, synthetic construct
  source 1..110: mol_type = other DNA
ggccagctttcagggcagacccttggccaactgagaaaaacgacttgtgggatagaagacgagagaggccaagcttgtcttcagtctcccccttgatctgagaatttcta

SEQ ID NO: 35723 - DNA, 110 bp, synthetic construct
  source 1..110: mol_type = other DNA
aagacgagagaggccaagcttgtcttcagtctcccccttgatctgagaatttctacctcctctagtcttaaaggcacagtcatctaaccctagtgtctgctgtaggttga

SEQ ID NO: 35724 - DNA, 110 bp, synthetic construct
  source 1..110: mol_type = other DNA
ggtgtctattgtcagagatctcagctgcctctgggcctgtctccttccaggccctgtctgccccagatccagcaccaagctgtggcatggagtgggcagggctagagatc

SEQ ID NO: 35725 - DNA, 110 bp, synthetic construct
  source 1..110: mol_type = other DNA
gtctgccccagatccagcaccaagctgtggcatggagtgggcagggctagagatctgactctgctgagaaatggaccaggcatgctagatggagtatcttctgtggtgac

SEQ ID NO: 35726 - DNA, 110 bp, synthetic construct
  source 1..110: mol_type = other DNA
catatttggattggtacagaacccacagctcatgatggaacaatcacagatgtttgtatatgatctggacacactggaggttatttccaaagggaactcgtaaggtctgt

SEQ ID NO: 35727 - DNA, 110 bp, synthetic construct
  source 1..110: mol_type = other DNA
cctatttaaactgaattgacctttttatctggaatctttgcatccattcttacctgactttaggaaacctgggtgggaatattgcccaagagaccagaatttctgcccct

SEQ ID NO: 35728 - DNA, 110 bp, synthetic construct
  source 1..110: mol_type = other DNA
ttccttgttgttcttttggttttagaatatctcaatgagagtatctgaaatagtgtattcagaagttacttacagtgttcccattgtgttttcaaacccaactagtatcc

SEQ ID NO: 35729 - DNA, 110 bp, synthetic construct
  source 1..110: mol_type = other DNA
ttggttttagaatatctcaatgagagtatctgaaatagtgtattcagaagttacttacagtgttcccattgtgttttcaaacccaactagtatccatgaggatttgggtt

SEQ ID NO: 35730 - DNA, 110 bp, synthetic construct
  source 1..110: mol_type = other DNA
ctgtgacacagcctagttttatttctttattttgctttgagcagccttttgttccctcctcctctatctctttgcaaaattcttcattccctgagaaggactgaagccat

SEQ ID NO: 35731 - DNA, 110 bp, synthetic construct
  source 1..110: mol_type = other DNA
ctcctcctctatctctttgcaaaattcttcattccctgagaaggactgaagccatttgcattacaatacgttgtgttcccagccaaggtgtcagcgcctgtgaaaccctc

SEQ ID NO: 35732 - DNA, 110 bp, synthetic construct
  source 1..110: mol_type = other DNA
tcccatgtgagccaactccagggataatgctagggggcctgaccaatgcaaagatgggaaatactagcttgaggtgggctggtaaagtacaaacaaatggtcagtttggg

SEQ ID NO: 35733 - DNA, 110 bp, synthetic construct
  source 1..110: mol_type = other DNA
gcaatatacctctgccttcatcctggtgggaaagctctgtgatgggaggagctggtctggcttccccacgcctacattctcagcactcaccataaagatggatacatagt

SEQ ID NO: 35734 - DNA, 110 bp, synthetic construct
  source 1..110: mol_type = other DNA
caagcgtgtgttatacctctgcaattacattccaaggtatatattctgggaaatgcctgtacatgtatacctggagacatgcctaagaatgttaggatcagcactgtttt

SEQ ID NO: 35735 - DNA, 110 bp, synthetic construct
  source 1..110: mol_type = other DNA
cctgtacatgtatacctggagacatgcctaagaatgttaggatcagcactgttttatgacagaaaaaaatgggaaaatgacatgtccatcaaatagcagattgttactgt

SEQ ID NO: 35736 - DNA, 110 bp, synthetic construct
  source 1..110: mol_type = other DNA
tctcctgtggtccccactcaccattcttttctgccttgtgttttggcggctcgggttccgggagacacggacagggcccatcacagagggtggtgagactcttgccagtg

SEQ ID NO: 35737 - DNA, 110 bp, synthetic construct
  source 1..110: mol_type = other DNA
ttccgggagacacggacagggcccatcacagagggtggtgagactcttgccagtggaacaagcatggaactccaacttgcactgcaagagacagacagaacaagccttaa

SEQ ID NO: 35738 - DNA, 110 bp, synthetic construct
  source 1..110: mol_type = other DNA
ccatactatccaaagcaatttctattaaataccaatggcatttctcacagaataatcctaaaatctgtagagaaccacaaaagaccccaaatattcttcttcagaatgaa

SEQ ID NO: 35739 - DNA, 110 bp, synthetic construct
  source 1..110: mol_type = other DNA
tcctaaaatctgtagagaaccacaaaagaccccaaatattcttcttcagaatgaagaacaaagctggtggtatcatactctacagttgaaaactatattacaaagctgta

SEQ ID NO: 35740 - DNA, 110 bp, synthetic construct
  source 1..110: mol_type = other DNA
atgactgtgctggctcttctcccttttctgcttctagtcaccacaggatgaagtaagacacttagggatttcaagaagcttgaggaccaggcccctaatggccccagaca

SEQ ID NO: 35741 - DNA, 110 bp, synthetic construct
  source 1..110: mol_type = other DNA
agacacttagggatttcaagaagcttgaggaccaggcccctaatggccccagacaattgaggcatttccctgattggtttcaagtgctgtagaacccttaggattttcgc

SEQ ID NO: 35742 - DNA, 110 bp, synthetic construct
  source 1..110: mol_type = other DNA
ctttatgctccagtccaccctgatcctctccgttctccttctctcctacaggaattgcctgcttgtcccggaggcactggcacttgtagcacccacagcttcataagaac

SEQ ID NO: 35743 - DNA, 110 bp, synthetic construct
  source 1..110: mol_type = other DNA
tgcctgcttgtcccggaggcactggcacttgtagcacccacagcttcataagaacacacctttcttcataaaataaacaccagcaccaggcaaattctatactcccttct

SEQ ID NO: 35744 - DNA, 110 bp, synthetic construct
  source 1..110: mol_type = other DNA
gtgtgtttgcttgattccattataacttaatcatttagacataaagtaacataagcctccatttatacacctgccacagccctcacaatcattagatgcagcttatacag

SEQ ID NO: 35745 - DNA, 110 bp, synthetic construct
  source 1..110: mol_type = other DNA
cctccatttatacacctgccacagccctcacaatcattagatgcagcttatacagagatttatgtaggtacgggcttccctgagcttccttgagtcctgccaaccccagt

SEQ ID NO: 35746 - DNA, 110 bp, synthetic construct
  source 1..110: mol_type = other DNA
taccatgaaatggtgccaaaccatttctgctataattttgtgatgaagcctcttcatcatggatgttagagccaattttgagcgggaacctgaatttttcttcccctgtc

SEQ ID NO: 35747 - DNA, 110 bp, synthetic construct
  source 1..110: mol_type = other DNA
atcatggatgttagagccaattttgagcgggaacctgaatttttcttcccctgtcccacagccccaaatgccggatgtaatttagctcaactcttccccttgggggtttc

SEQ ID NO: 35748 - DNA, 110 bp, synthetic construct
  source 1..110: mol_type = other DNA
aaaaatctcatcggaagtgaaatgcagccatacaaatacaatgaaagatcatactctaatgtggtcctgagaagggcctctggactcatacagacctggccgcaacctca

SEQ ID NO: 35749 - DNA, 110 bp, synthetic construct
  source 1..110: mol_type = other DNA
ctaatgtggtcctgagaagggcctctggactcatacagacctggccgcaacctcagctctctcgcctagtcactacgaaaccatgggcaagtcatttaagtctccgctct

SEQ ID NO: 35750 - DNA, 110 bp, synthetic construct
  source 1..110: mol_type = other DNA
gaaagacacagcattaaaatcaatttggtgcttattagcaggtaacagaaggctcactctcttcccaaacacaggcacgccttgcgagaagacaggcctcagggaacctg

SEQ ID NO: 35751 - DNA, 110 bp, synthetic construct
  source 1..110: mol_type = other DNA
actctcttcccaaacacaggcacgccttgcgagaagacaggcctcagggaacctgcggctcactcgagaacaaacctcctacaggccagtcgagaaatctatgttgtttt

SEQ ID NO: 35752 - DNA, 110 bp, synthetic construct
  source 1..110: mol_type = other DNA
gctcttgacttcttatcacccagtcctgcaggtggaaagtagcaggacacttaaaagggccatatcctctgcagtgcaatgcagacacacttcataaatcccactttact

SEQ ID NO: 35753 - DNA, 110 bp, synthetic construct
  source 1..110: mol_type = other DNA
agggccatatcctctgcagtgcaatgcagacacacttcataaatcccactttactgactgtgttaaaagaaaagaaaaaaaacggaattcctgtcatggctcagtggaaa

SEQ ID NO: 35754 - DNA, 110 bp, synthetic construct
  source 1..110: mol_type = other DNA
agcccaggtgctcaggtggaagcagagatctgggcactggcgagtggtgtcagctgagctgacgaggaggcggagctgggaccggacaacatgaaactgctcagggctgt

SEQ ID NO: 35755 - DNA, 110 bp, synthetic construct
  source 1..110: mol_type = other DNA
gagctgacgaggaggcggagctgggaccggacaacatgaaactgctcagggctgttccagagggccaggcaatgcttccccacactgggtgtctctggagaggccagatg

SEQ ID NO: 35756 - DNA, 110 bp, synthetic construct
  source 1..110: mol_type = other DNA
catacattaagccagtgtctgatttgaatgtgaaattttctttcgacatgccaagacacgtgcggcagtgccaccacgcaagtggccagccagggcttgaccgccagagg

SEQ ID NO: 35757 - DNA, 110 bp, synthetic construct
  source 1..110: mol_type = other DNA
acacgtgcggcagtgccaccacgcaagtggccagccagggcttgaccgccagaggctgtggggtgagtggggttgaaaactctcttctctttccagaatccaaataagct

SEQ ID NO: 35758 - DNA, 110 bp, synthetic construct; identical to SEQ ID NO: 35756
  source 1..110: mol_type = other DNA

SEQ ID NO: 35759 - DNA, 110 bp, synthetic construct; identical to SEQ ID NO: 35757
  source 1..110: mol_type = other DNA

SEQ ID NO: 35760 - DNA, 110 bp, synthetic construct
  source 1..110: mol_type = other DNA
ccactcaccatgcagggataaaccgcccctgtcctatgccaccctccagggtcctgggcacctagatccatgaaaatgagtccttgcaccctggtagcctcctggcttca

SEQ ID NO: 35761 - DNA, 110 bp, synthetic construct
  source 1..110: mol_type = other DNA
gggcacctagatccatgaaaatgagtccttgcaccctggtagcctcctggcttcatgcaggatttttcattcttcctgctcttgtgtaaagccccatgtctctgtgccag

SEQ ID NO: 35762 - DNA, 110 bp, synthetic construct
  source 1..110: mol_type = other DNA
tgatttcaatgtactcacagcattgttactgaatatagcaaaggcccgatttccacatgggcaaacaggaccatccatcacctcagctgatactcagtcaatgcccaaac

SEQ ID NO: 35763 - DNA, 110 bp, synthetic construct
  source 1..110: mol_type = other DNA
catgggcaaacaggaccatccatcacctcagctgatactcagtcaatgcccaaacagtcccagcttcgaacaggaaagtcggtgtcctggaagctttttcaccactggca

SEQ ID NO: 35764 - DNA, 110 bp, synthetic construct
  source 1..110: mol_type = other DNA
ctgaaagggcccctcctgagtgctggacaggagctaggagctagaagctgcagcaggacttcaggatgcttacatccacgtaggaagtattgacaaggtttctaaagggt

SEQ ID NO: 35765 - DNA, 110 bp, synthetic construct
  source 1..110: mol_type = other DNA
gcggggaccttgaagggagaaaatgcctgccaagcactgcagacagtacctagcgccgtcatgcagggcttgagaaaggttagctgctgcctctaagtgcttttgttcag

SEQ ID NO: 35766 - DNA, 110 bp, synthetic construct
  source 1..110: mol_type = other DNA
cagtgcaacaccagctgtgcttcttgcctgtgcaccagcatctctgctacccccgcagaggctcagccactcggtgggtccatttcgtgtgccgtgaaaacatcgcacat

SEQ ID NO: 35767 - DNA, 110 bp, synthetic construct
  source 1..110: mol_type = other DNA
atgcagaacctcatgctcccaaagccagcctgggaccacgctgccggacaagatgggttttcaccttttgagatgggctagacgcaagtgaatcagagcttaacatggaa

SEQ ID NO: 35768 - DNA, 110 bp, synthetic construct
  source 1..110: mol_type = other DNA
ggttttcaccttttgagatgggctagacgcaagtgaatcagagcttaacatggaaagtgacaccaaacaggtcttacttagcataatagggcccctaggaagtccttcat

SEQ ID NO: 35769 - DNA, 110 bp, synthetic construct
  source 1..110: mol_type = other DNA
ccgacaacctcatggcactggtcacagctgaataatatccatctcccaccagaccagggtacaagggaagggtccaggtatgtgtctgtcttatttgctgctgaacccac

SEQ ID NO: 35770 - DNA, 110 bp, synthetic construct
  source 1..110: mol_type = other DNA
ctaatcaagcaagctctgtccccaaatcctgaggcagccagactcctgctgacgtcagctgggccctgtctggcctagacgatgatgctagattgggctctgggtcaatt

SEQ ID NO: 35771 - DNA, 110 bp, synthetic construct
  source 1..110: mol_type = other DNA
ctcagcctccgtaccaacaggagccaatttctagggtttcatgtggatctgcttctctggagaatcctaacaaatagctgtttgatcaattagtccttagaaaatttcgg

SEQ ID NO: 35772 - DNA, 110 bp, synthetic construct
  source 1..110: mol_type = other DNA
tctggagaatcctaacaaatagctgtttgatcaattagtccttagaaaatttcgggggaaatagcaaatgtagcaacaggcagtacccaagagcctaaagcattgttagc

SEQ ID NO: 35773 - DNA, 110 bp, synthetic construct
  source 1..110: mol_type = other DNA
gccgggcttgtcctactacttcataagaatgagactctgataactgggggtccaaaaagctgcctctgaagtgaaacagacctgagtagcaatcctgaccctgccagtta

SEQ ID NO: 35774 - DNA, 110 bp, synthetic construct
  source 1..110: mol_type = other DNA
aaagctgcctctgaagtgaaacagacctgagtagcaatcctgaccctgccagttactcacgataggaccttgcctcaaccccggtcgattccctttctacatctgttgag

SEQ ID NO: 35775 - DNA, 110 bp, synthetic construct
  source 1..110: mol_type = other DNA
aattccatctgcagtattaactccttggcattccgtctaacccattcagattctaggggtcaggacacaaacatctttggaggccattattctgccactatgctatatga

SEQ ID NO: 35776 - DNA, 110 bp, synthetic construct
  source 1..110: mol_type = other DNA
cacctccccacctgcaaaacacaaaccacactgaggtatattcccaatctctgtccaacctccccagatccagctaaaacttacctctcctgcccccttgttgactctct

SEQ ID NO: 35777 - DNA, 110 bp, synthetic construct
  source 1..110: mol_type = other DNA
cagtaattttttttcaaatttcacaatttttcctgacatccttctggcattcaaggttactcactactttggtaaatggcttctcttctttgaacttgaggtccttgtct

SEQ ID NO: 35778 - DNA, 110 bp, synthetic construct
  source 1..110: mol_type = other DNA
cctaatacaactacaatcagatttgttagctgttcacttttaaatctatctaaggttctatttctcagaccactgaacctgtactatacccatgaagctagtgtaactgc

SEQ ID NO: 35779 - DNA, 110 bp, synthetic construct
  source 1..110: mol_type = other DNA
gtaaaatctttaatcctgttccaaactcctgcccagaagtgaaagctatcaaataaatattagtgagcctcaaccctatacccggctctgtgcacagaactaagagagga

SEQ ID NO: 35780 - DNA, 110 bp, synthetic construct
  source 1..110: mol_type = other DNA
aatattagtgagcctcaaccctatacccggctctgtgcacagaactaagagaggaagaaaggcaaaaatggagaggataagaaataaagcataggaggaccccaaaccag

SEQ ID NO: 35781 - DNA, 110 bp, synthetic construct
  source 1..110: mol_type = other DNA
caacaacagggtccactaagtctcagtgagccacttttctctcatgagtcttacattttcactctgaatggaatatggaattggagtttactctgattagggaattctgc

SEQ ID NO: 35782 - DNA, 110 bp, synthetic construct
  source 1..110: mol_type = other DNA
ttttcactctgaatggaatatggaattggagtttactctgattagggaattctgcctttgtgcaacagtgatggcgaaacgtaaccacagcctttaaaatttgtaaaaat

SEQ ID NO: 35783 - DNA, 110 bp, synthetic construct
  source 1..110: mol_type = other DNA
ccaaagtgtgagaaccactgatctagaaattagacttcagcaacctttatgctttcaaatacagctttacattcttaaatatgaaggtttctgggcccatgaaataacca

SEQ ID NO: 35784 - DNA, 110 bp, synthetic construct
  source 1..110: mol_type = other DNA
caaatacagctttacattcttaaatatgaaggtttctgggcccatgaaataaccattacacagacccaatatttaaaatgagccttcatgttttactcaaagaaccaaat

SEQ ID NO: 35785 - DNA, 110 bp, synthetic construct
  source 1..110: mol_type = other DNA
atatggaatgactggccaacagggacctgctctaaagcacagggagctctacccaaaattcatgcgtaagtgaatcactttgttgtagagcagaaattaccacagcattg

SEQ ID NO: 35786 - DNA, 110 bp, synthetic construct; identical to SEQ ID NO: 35785
  source 1..110: mol_type = other DNA

SEQ ID NO: 35787 - DNA, 110 bp, synthetic construct; identical to SEQ ID NO: 35785
  source 1..110: mol_type = other DNA

SEQ ID NO: 35788 - DNA, 110 bp, synthetic construct; identical to SEQ ID NO: 35785
  source 1..110: mol_type = other DNA

SEQ ID NO: 35789 - DNA, 110 bp, synthetic construct
  source 1..110: mol_type = other DNA
ggctggggtcgaattggagctgcagctacaccacagacacagagatgcaggctctaagctgcatctgtaacctatgccacaacttgcgacaatgctgggtctttaatgca

SEQ ID NO: 35790 - DNA, 110 bp, synthetic construct
  source 1..110: mol_type = other DNA
gatgtgacttctgctttctggggagctcagttggatggcagaaatgtgctgctatccttggagggatcctctgtgtggctaggactgacaaagcctaaatgataaggaaa

SEQ ID NO: 35791 - DNA, 110 bp, synthetic construct
  source 1..110: mol_type = other DNA
ccagacaatttacaatccaagccagtcagcatactgaatggatcatgacttacctctgtacaatgctgtggtagccaggtgcaatgtcatctgtgacaggctgcaggaag

SEQ ID NO: 35792 - DNA, 110 bp, synthetic construct
  source 1..110: mol_type = other DNA
ctgtacaatgctgtggtagccaggtgcaatgtcatctgtgacaggctgcaggaagacattggcatacctgtccaaaaagaatatggtacaattactgacttagctttcag

SEQ ID NO: 35793 - DNA, 110 bp, synthetic construct
  source 1..110: mol_type = other DNA
caatgatgacgtcgccgtcctcacctcttttgtggccaagaccaaagagattatcagttctttagaagcccctccagcaaaagtctgcttcctccttccatctcttccct

SEQ ID NO: 35794 - DNA, 110 bp, synthetic construct
  source 1..110: mol_type = other DNA
agttctttagaagcccctccagcaaaagtctgcttcctccttccatctcttccctttgccttttctcctttcctttcttcttttttgtacattctttctttcattctgct

SEQ ID NO: 35795 - DNA, 110 bp, synthetic construct
  source 1..110: mol_type = other DNA
tctgtttgggttcagtctccagaacgtttttaccccccagggatggccaacctatgggcctcctacagatactcccatctcaccaatcagccccatgtacgcttgcagac

SEQ ID NO: 35796 - DNA, 110 bp, synthetic construct
  source 1..110: mol_type = other DNA
cctcagagagattcatcactcctgcccctgcccctaatggaccactccttaagcggtgggagtgtcccccacccctgctcttcgacccctacctccggaagctgtttcgg

SEQ ID NO: 35797 - DNA, 110 bp, synthetic construct
  source 1..110: mol_type = other DNA
gtgggagtgtcccccacccctgctcttcgacccctacctccggaagctgtttcggttcaaggagaccctagctcactctcttctctcccagtgtcgtcagcaccttcctt

SEQ ID NO: 35798 - DNA, 110 bp, synthetic construct
  source 1..110: mol_type = other DNA
gggctgaggtctggagcagtgcccactgggtgcctcttccactcagaatggcttcatttgcttagcgtgacagctctgctttctccactgcaggaaccaagcaagctccg

SEQ ID NO: 35799 - DNA, 110 bp, synthetic construct
  source 1..110: mol_type = other DNA
atttgcttagcgtgacagctctgctttctccactgcaggaaccaagcaagctccgacaggccctggtacagtgcctccagggacttaaatctggctcagccacgtggtta

SEQ ID NO: 35800 - DNA, 110 bp, synthetic construct
  source 1..110: mol_type = other DNA
agagacatggagatcatgtagcctaaccaattatttctcctctgcttctaattcgtttttcaaacccagcttagcaccttcctcaaacatgctgaatgatgtcattcagt

SEQ ID NO: 35801 - DNA, 110 bp, synthetic construct
  source 1..110: mol_type = other DNA
tggtttcaccctttgaaaaaatgttgaatcttcagaatgatcaataaaccatcttccccccatttacatgcagctgaaaaatgacgacaggctagggacagaattttgta

SEQ ID NO: 35802 - DNA, 110 bp, synthetic construct
  source 1..110: mol_type = other DNA
ctgatagatgtataacctgggacactagcatgaggaaatcatgtcactgcaaagcgcatcttaaagtatgtatttagcactgtgatcatcagccaagctgagaacgagtt

SEQ ID NO: 35803 - DNA, 110 bp, synthetic construct
  source 1..110: mol_type = other DNA
gcatcttaaagtatgtatttagcactgtgatcatcagccaagctgagaacgagttcacgaggttctaggaagggcaatgaccctgacctccatctggaaggggtgaggga

SEQ ID NO: 35804 - DNA, 110 bp, synthetic construct
  source 1..110: mol_type = other DNA
tagcaatacatacaatcatccctgttgggggttcccactgtggtgcagtgggttaagaacccagctgcagtggctcgggttgtggcagaggcacaggttcatttcccagc

SEQ ID NO: 35805 - DNA, 110 bp, synthetic construct
  source 1..110: mol_type = other DNA
agaacccagctgcagtggctcgggttgtggcagaggcacaggttcatttcccagcccagtgcagtggattaaaggatctggtgctgccacaggtgtaggtcatacctgca

SEQ ID NO: 35806 - DNA, 110 bp, synthetic construct
  source 1..110: mol_type = other DNA
ctttgattgggattttgaagagtgagtaggagttttccaggagtcaagacggagaaggaataaaatgggacccccttccgtgggtcctggagggcgggagctgcaagcag

SEQ ID NO: 35807 - DNA, 110 bp, synthetic construct
  source 1..110: mol_type = other DNA
aggaataaaatgggacccccttccgtgggtcctggagggcgggagctgcaagcagcctcagcaggtgttccccaggcctcgaggtctttgcgttccaccttgacagccac

SEQ ID NO: 35808 - DNA, 110 bp, synthetic construct
  source 1..110: mol_type = other DNA
actggaacaatgctcatatcttgtctggtgcccagctcctccatcagactcctcgtatgctgtgtttcccactgaggcccaagcagagtctgcagaagcagagcacagcc

SEQ ID NO: 35809 - DNA, 110 bp, synthetic construct
  source 1..110: mol_type = other DNA
gcttggaaacttccgtatgctgcaggtatggccctaaaaagcaaaaaaaaataaagggggaggggattattacatagattaggttctcgctgctgaagaattcaggtaac

SEQ ID NO: 35810 - DNA, 110 bp, synthetic construct; identical to SEQ ID NO: 35809
  source 1..110: mol_type = other DNA

SEQ ID NO: 35811 - DNA, 110 bp, synthetic construct
  source 1..110: mol_type = other DNA
gcctgtctgccctaagatggaaaggtgaacgcagaactgaggaaaattacaaccatacgattctcctccaccctacaatccagctgtccttttatctcatgcctgattgg

SEQ ID NO: 35812 - DNA, 110 bp, synthetic construct
  source 1..110: mol_type = other DNA
tgctatttcattccattatatatgtgtccatccttctgacaataccccacacaatctctattgctgtagcttgtgagtctctaccaattatgagtagagtgattcctccc

SEQ ID NO: 35813 - DNA, 110 bp, synthetic construct
  source 1..110: mol_type = other DNA
ctttgaggttgttaaatttaaaggttttgcagtacctgcatggattcagtttcttgacattttccagcactgctgtcttcagcgtgcctggcattgggtggctgtagaag

SEQ ID NO: 35814 - DNA, 110 bp, synthetic construct
  source 1..110: mol_type = other DNA
gacattttccagcactgctgtcttcagcgtgcctggcattgggtggctgtagaagctctaggcacgacatttgcacacatcagtgtgtccactgagaagaaaaagaaggt

SEQ ID NO: 35815 - DNA, 110 bp, synthetic construct
  source 1..110: mol_type = other DNA
ctgctttaccttttctttcttcttcttcttttttttttctttttgtcttttaaggaccacaggtacagcatttggaagttcctaggctaggggttgcatcggagttgtgg

SEQ ID NO: 35816 - DNA, 110 bp, synthetic construct
  source 1..110: mol_type = other DNA
tttcttcttcttcttttttttttctttttgtcttttaaggaccacaggtacagcatttggaagttcctaggctaggggttgcatcggagttgtggctgctggcctacacc

SEQ ID NO: 35817 - DNA, 110 bp, synthetic construct
  source 1..110: mol_type = other DNA
tttgaaagccatttcatcagtgcttagcagggacatacatgtcaaaatcgagggagcctaggtggtctctctgcttagtgaagtagtctcttaattaggcgagagccaag

SEQ ID NO: 35818 - DNA, 110 bp, synthetic construct
  source 1..110: mol_type = other DNA
gcctaggtggtctctctgcttagtgaagtagtctcttaattaggcgagagccaagagtcacttattttaaagattcattgggcacctttactttgacctagccaaaaata

SEQ ID NO: 35819 - DNA, 110 bp, synthetic construct
  source 1..110: mol_type = other DNA
ccccgggatctggtcaatgcagcgtttgttaaaaaagtcgaaaaaaggtggctctctttgcctatctcagtgataccacgggcatgaactatttaattattcatgggtga

SEQ ID NO: 35820 - DNA, 110 bp, synthetic construct
  source 1..110: mol_type = other DNA
ctttgcctatctcagtgataccacgggcatgaactatttaattattcatgggtgaaaaacaacacagtagcgcattcacgaaatccagcgccactgcgttcacttaagtc

SEQ ID NO: 35821 - DNA, 110 bp, synthetic construct
  source 1..110: mol_type = other DNA
ggcttcggagcgtctcttttcacacggggcctcttccctcggctccagactctctccggctgcctggtcaacacccgcgcttaaatgtacaactgacatctcgacacaaa

SEQ ID NO: 35822 - DNA, 110 bp, synthetic construct
  source 1..110: mol_type = other DNA
ccggctgcctggtcaacacccgcgcttaaatgtacaactgacatctcgacacaaacacagcaaaacagcgtccaccaccagctcccgtcttttgcctccgccgtctaccc

SEQ ID NO: 35823 - DNA, 110 bp, synthetic construct
  source 1..110: mol_type = other DNA
cattacctggaccagccctccacctagaacccagctcgttctacacacgccccagtcagaaggtggaggcgaggcaggaagagagaataactctggaagggcagactgag

SEQ ID NO: 35824 - DNA, 110 bp, synthetic construct
  source 1..110: mol_type = other DNA
gccccgcagtggaaaacccaggcaacaccacggtgctgaatttggctgcatccatggagacacacggacgctttctgacttcattttcttatctggagagcaatcatctc

SEQ ID NO: 35825 - DNA, 110 bp, synthetic construct
  source 1..110: mol_type = other DNA
ggagacacacggacgctttctgacttcattttcttatctggagagcaatcatctcccaggttaggaagggctatcacagccatcagctctaccactcagaatcctgctga

SEQ ID NO: 35826 - DNA, 110 bp, synthetic construct
  source 1..110: mol_type = other DNA
gataatgctcaagaaacacgaattatgatgattatggcacaagtctgatcagtcatttcctgctttagtctctccagtggatcgtttaggatcaaggataaagttcagaa

SEQ ID NO: 35827 - DNA, 110 bp, synthetic construct
  source 1..110: mol_type = other DNA
tttcctgctttagtctctccagtggatcgtttaggatcaaggataaagttcagaagagcaagattttcctaactccctccctagcctttcactgtatctcggccaccccg

SEQ ID NO: 35828 - DNA, 110 bp, synthetic construct
  source 1..110: mol_type = other DNA
tttgacccgagtaattcaaaggaaagagctgccattaatggagatggggaaggttattcagagctcagttttagccacgttaagtttgagatgcctcttgaatatccaca

SEQ ID NO: 35829 - DNA, 110 bp, synthetic construct
  source 1..110: mol_type = other DNA
gttaaggatccagcattgctacagctctggtgtaggtcacagctccagctcagattccatccctgtcccaggaacttccatatactgctggtgcagccgaaaagaaaaaa

SEQ ID NO: 35830 - DNA, 110 bp, synthetic construct
  source 1..110: mol_type = other DNA
tccatccctgtcccaggaacttccatatactgctggtgcagccgaaaagaaaaaagaaaaaatatatatatgccacaaccaagtgggattcaccccaagttcacaggatg

SEQ ID NO: 35831 - DNA, 110 bp, synthetic construct
  source 1..110: mol_type = other DNA
taagataccgccctgcaagagcttccacagaggtacagatttccttctggctattatactgctttgccccttggctgaccacatttgagcaacgattctgtacaatatat

SEQ ID NO: 35832 - DNA, 110 bp, synthetic construct
  source 1..110: mol_type = other DNA
aagtccttctgacccagaggtttggatttcagtccctgctctgccactaagttagctggatgattttaatcccataaactctcggcttcggtttctctattggtaaaatg

SEQ ID NO: 35833 - DNA, 110 bp, synthetic construct
  source 1..110: mol_type = other DNA
ctggatgattttaatcccataaactctcggcttcggtttctctattggtaaaatgggaatttatttttccttccaactagtattgactgattgtacacggggattgggct

SEQ ID NO: 35834 - DNA, 110 bp, synthetic construct
  source 1..110: mol_type = other DNA
gcatatggaagttaccaggctaggggtcgaatgggagctgtagtcaccagcctatcccacagccacgtggggtccaagctgcgtgtgtgacctacaccacatctcatggc

SEQ ID NO: 35835 - DNA, 110 bp, synthetic construct
  source 1..110: mol_type = other DNA
gtcgaatgggagctgtagtcaccagcctatcccacagccacgtggggtccaagctgcgtgtgtgacctacaccacatctcatggcaatgccgaattcttaacccactaaa

SEQ ID NO: 35836 - DNA, 110 bp, synthetic construct
  source 1..110: mol_type = other DNA
aatttgccctattatttctgcatttattgtttcggtgtcaagatctctggatgcgacttggtatatatcactcgtagtgtgacgctgtgtatcacgtttggtgtgtgtgt

SEQ ID NO: 35837 - DNA, 110 bp, synthetic construct
  source 1..110: mol_type = other DNA
aatgatgtaatcagtatcgaacacgcgggtatatagttacttgctggtcactgcacgaggtatcaacaatgcaggctcaaaagaagatgtatggcaagttggtcctttcc

SEQ ID NO: 35838 - DNA, 110 bp, synthetic construct
  source 1..110: mol_type = other DNA
cgaggtatcaacaatgcaggctcaaaagaagatgtatggcaagttggtcctttccaaaagtaaatatattaggacactaagttgacactttaaatgaacccaaaataaat

SEQ ID NO: 35839 - DNA, 110 bp, synthetic construct
  source 1..110: mol_type = other DNA
gtgctggatggggcctgggaaccgcctccaggggccgggctgcccctgctcacggtcatcgttgccgtctttgtcctgctggccgtctgcatcgtggtgacagttcactt

SEQ ID NO: 35840 - DNA, 110 bp, synthetic construct
  source 1..110: mol_type = other DNA
ggaaaatagagactgttcatttgtcttcttgtcatggtactgtaatatcttgccccaagacagtagtatatgtttctattactgtatagaagatacttgattaaatggca

SEQ ID NO: 35841 - DNA, 110 bp, synthetic construct
  source 1..110: mol_type = other DNA
tccatatgccgcaggagctgcccaagaaaaggcaaaaagatcaaaaaaaaaaaagaataaagtgggacactacttgtgctttctttttaaaatatgcagattttaacata

SEQ ID NO: 35842 - DNA, 110 bp, synthetic construct
  source 1..110: mol_type = other DNA
aataaagtgggacactacttgtgctttctttttaaaatatgcagattttaacataccattgaatttttccccacttttctgcaaagctgtgtcaagcaggaaaaagtgtg

SEQ ID NO: 35843 - DNA, 110 bp, synthetic construct
  source 1..110: mol_type = other DNA
cttccgggggactggggtgggctctagagttgggccaacctggatgttagtctcatcttcaccatccaccgcttgggtgacgtttgaggcagctctgagcctcagtgttc

SEQ ID NO: 35844 - DNA, 110 bp, synthetic construct
  source 1..110: mol_type = other DNA
tcttcaccatccaccgcttgggtgacgtttgaggcagctctgagcctcagtgttctcatctgtgcaatgggcagagcaacctcttcgggctgctgtgagaatgagacagg

SEQ ID NO: 35845 - DNA, 110 bp, synthetic construct
  source 1..110: mol_type = other DNA
agtccgtcctggcacctggccatagtttgtcctgttgcaagactgctcttcttggcagtcggagctggtgactttgtaacagaccattaaagaccctgataatgaaacaa

SEQ ID NO: 35846 - DNA, 110 bp, synthetic construct
  source 1..110: mol_type = other DNA
cagtcggagctggtgactttgtaacagaccattaaagaccctgataatgaaacaaactccaggggcaacttggagcgtggctacgggcgaaggatgtgtggagagatcag

SEQ ID NO: 35847 - DNA, 110 bp, synthetic construct
  source 1..110: mol_type = other DNA
cagaacccctggtgctcagggggctgtttttttgttttgttttttctttttttgtcttttgtctttttaggcccatacccacgccatatggaggttccctggctaggggt

SEQ ID NO: 35848 - DNA, 110 bp, synthetic construct; identical to SEQ ID NO: 35847
  source 1..110: mol_type = other DNA

SEQ ID NO: 35849 - DNA, 110 bp, synthetic construct
  source 1..110: mol_type = other DNA
tcaaagtaacacacggtacaccttaaactgacacaatgttacctgtcaaatttagtcaataaaaaaatcatttgactgcatacgtatgggtttatttctggagtcttaat

SEQ ID NO: 35850 - DNA, 110 bp, synthetic construct
  source 1..110: mol_type = other DNA
tcaataaaaaaatcatttgactgcatacgtatgggtttatttctggagtcttaattctatgccagtggccccactgttttgattagtctagctttgtagtaagttttgaa

SEQ ID NO: 35851 - DNA, 110 bp, synthetic construct
  source 1..110: mol_type = other DNA
tgcacgctggcatgagaaaggctatgaaaattttgcaggaggaaagagctcaactttgtagtatgttgcaagtgtgtgtgaccatgcaagtcagtttctgatgagaaaaa

SEQ ID NO: 35852 - DNA, 110 bp, synthetic construct
  source 1..110: mol_type = other DNA
caaaatctggaaagactgcgtcagctgaactaggatgctggggccgaggcctgtgggtacctggaaatcacgggaagggcgcggctgctccctttggcccttaagacatg

SEQ ID NO: 35853 - DNA, 110 bp, synthetic construct
  source 1..110: mol_type = other DNA
ggtacctggaaatcacgggaagggcgcggctgctccctttggcccttaagacatgtgcctggaactatttttaactgcttcgtatctgtcacacttgtctctcaggaggt

SEQ ID NO: 35854 - DNA, 110 bp, synthetic construct
  source 1..110: mol_type = other DNA
agctgtgggctgagactggaccagggaggctgacttccaggaaggaccctcagtatctgtaaacaaaacaaccaaaagccctgacagagcctgaacagtctcctctgcct

SEQ ID NO: 35855 - DNA, 110 bp, synthetic construct
  source 1..110: mol_type = other DNA
gaaaggagttcggggtggagatcaggggtgaggccctctgctcggggaaaactggcagagcaggtcttcagatagatagatactttcaagagaagattttatgagcccaa

SEQ ID NO: 35856 - DNA, 110 bp, synthetic construct
  source 1..110: mol_type = other DNA
cagagcaggtcttcagatagatagatactttcaagagaagattttatgagcccaactgtatctagaaaaatcgctaaaaacccttcatggtggggtctgcctcccgtgac

SEQ ID NO: 35857 - DNA, 110 bp, synthetic construct
  source 1..110: mol_type = other DNA
ctagggattaaaaaaaaacattgttttgttagtagggaagcttgtttcacaatgaagtgttgctgtcattttccatggcagaaattttcaaattcaaaccctttaaaatg

SEQ ID NO: 35858 - DNA, 110 bp, synthetic construct
  source 1..110: mol_type = other DNA
tccccagaggtgagtgctcaccaggtgtggctcccagtttccccattcacccggaagcagcaagctgcccagaggagcaccctccaccaattcagcccacccaggcctct

SEQ ID NO: 35859 - DNA, 110 bp, synthetic construct
  source 1..110: mol_type = other DNA
agcagcaagctgcccagaggagcaccctccaccaattcagcccacccaggcctctacgcccatccccttctagaatcagctgcaccctcccccttctcagctctgctggg

SEQ ID NO: 35860 - DNA, 110 bp, synthetic construct
  source 1..110: mol_type = other DNA
caaaggagtcttgacacttcgtgccattcccattccctgttctgaggtgcttcaacggtttcatagggtttttgcatttaatctatgctcttcctctcaggccttaataa

SEQ ID NO: 35861 - DNA, 110 bp, synthetic construct
  source 1..110: mol_type = other DNA
cggtttcatagggtttttgcatttaatctatgctcttcctctcaggccttaataaaactaagactaataataaaggaaagctaacgctttggagcacttgctgtgtacca

SEQ ID NO: 35862 - DNA, 110 bp, synthetic construct; identical to SEQ ID NO: 35860
  source 1..110: mol_type = other DNA

SEQ ID NO: 35863 - DNA, 110 bp, synthetic construct; identical to SEQ ID NO: 35861
  source 1..110: mol_type = other DNA

SEQ ID NO: 35864 - DNA, 110 bp, synthetic construct
  source 1..110: mol_type = other DNA
acattcctaagcgtgacagcttgcggtggcttctgactcctgaggaggacttcgcgctccggggagttgcgtcagttctcccccttccgccatgtccttgtcccctctgg

SEQ ID NO: 35865 - DNA, 110 bp, synthetic construct
  source 1..110: mol_type = other DNA
cccttgtccaccaaactggagatgataaccctacccaccttccaggaggtctcgtggtggcgcagcagaaacgaatttgactaggaaccaaaaggttgcgggttcgatcc

SEQ ID NO: 35866 - DNA, 110 bp, synthetic construct
  source 1..110: mol_type = other DNA
actcctctggctggatgagccgatgccagagaaggagagaagcatccctgagacggggctggagccggagtactcattcaacagaagtgacagtgaagatgtgagctcca

SEQ ID NO: 35867 - DNA, 110 bp, synthetic construct
  source 1..110: mol_type = other DNA
gggctggagccggagtactcattcaacagaagtgacagtgaagatgtgagctccaggaagggtcctctcaggacaacagagcaggggtgggggagagaagtcctgcccgg

SEQ ID NO: 35868 - DNA, 110 bp, synthetic construct
  source 1..110: mol_type = other DNA
gtctcccgagtgtctagacccttgtcaccgactcaggactcccgagtggagaaagctggtccgtcccaggctacagaggccatgggagcactccgagaaaggggcagatc

SEQ ID NO: 35869 - DNA, 110 bp, synthetic construct
  source 1..110: mol_type = other DNA
gctccccccatcaccctctcagagccccctacctgagcagcttcagaacccaggactctgtcaaaggtgacgctttgttcctatgggcaggacgggtgtcagccgtgtca

SEQ ID NO: 35870 - DNA, 110 bp, synthetic construct
  source 1..110: mol_type = other DNA
ctctgtcaaaggtgacgctttgttcctatgggcaggacgggtgtcagccgtgtcactcccatcttctcctgcactcaccccaccccagcccagcccaagccctctccacc

SEQ ID NO: 35871 - DNA, 110 bp, synthetic construct
  source 1..110: mol_type = other DNA
cctcagcttgtctttgcagctggcatgccctgtgcttcggtgtctaagcaacttgctaacagaggctgcagtggaggctgtgggagtgcacccgcagctgcgagatgagc

SEQ ID NO: 35872 - DNA, 110 bp, synthetic construct
  source 1..110: mol_type = other DNA
ctaacagaggctgcagtggaggctgtgggagtgcacccgcagctgcgagatgagcgtgtcgtggcggccttatttatcctcctggactttttcctccagaaacagcccag

SEQ ID NO: 35873 - DNA, 110 bp, synthetic construct
  source 1..110: mol_type = other DNA
ataagagcaagctcagttccggatgaggctcaaggtcctccagccccagggctcccgcatcaaacggactcaccttgtcagcgacgccaaacagggtcaggtattcaaat

SEQ ID NO: 35874 - DNA, 110 bp, synthetic construct
  source 1..110: mol_type = other DNA
cgcatcaaacggactcaccttgtcagcgacgccaaacagggtcaggtattcaaatagcagcttcaggtctcccaggccctccaaggcctgtttgttttgggacagtttag

SEQ ID NO: 35875 - DNA, 110 bp, synthetic construct
  source 1..110: mol_type = other DNA
ttgtcagcatttctccactcaagctggcactctttctggtggtgactttatctgtcttccaccattgcagggcctctgctcctctctaatattccgtgccatcttggcct

SEQ ID NO: 35876 - DNA, 110 bp, synthetic construct
  source 1..110: mol_type = other DNA
ttttaacctagtccttatgttagagggatgctgagtcatcctgaaagggtatcggtgtgtgctgacccctcactgtgcagagactgatcaccgtcctctgacaccacatt

SEQ ID NO: 35877 - DNA, 110 bp, synthetic construct
  source 1..110: mol_type = other DNA
cacagccccattagatggatactgttatctttgttttacaagtgaaagagcactgagaggccaagtgacttgctcacggttatgcagcaaatacctgctcaggctgagct

SEQ ID NO: 35878 - DNA, 110 bp, synthetic construct
  source 1..110: mol_type = other DNA
agaggccaagtgacttgctcacggttatgcagcaaatacctgctcaggctgagcttctaacgcaaatctctgggaccctcaaacattcattgtaagcattctgctacccc

SEQ ID NO: 35879 - DNA, 110 bp, synthetic construct
  source 1..110: mol_type = other DNA
ccaccccacatagaccacactctatgcagaggtatagctagattgaattctctccagggcctgtctacccaagacttagcacttagccgctgtgtattcttgtggtactg

SEQ ID NO: 35880 - DNA, 110 bp, synthetic construct
  source 1..110: mol_type = other DNA
tgtcaacttaagctctttacaaatttgaataaatactgtcgaattacttttactgatttaaagcccattagcaacacatctgagctcaaattactttcgaaagcaaagct

SEQ ID NO: 35881 - DNA, 110 bp, synthetic construct
  source 1..110: mol_type = other DNA
cttatcacctgaaaattgaggctacggatggaggaggcctttctggaaaaggcactgtggtcatagaggtggtagatgtgaatgacaacgcccccgaactgaccatatct

SEQ ID NO: 35882 - DNA, 110 bp, synthetic construct
  source 1..110: mol_type = other DNA
tcagctttcttcctctttcaattctctctgctcctaatcaatgatcctcaaatatggaggatgaacatggagccttcagtgcactgctgctcgtaaggccatcttctgag

SEQ ID NO: 35883 - DNA, 110 bp, synthetic construct
  source 1..110: mol_type = other DNA
ggaggatgaacatggagccttcagtgcactgctgctcgtaaggccatcttctgagcatttgggggatatcaacagccctgagatttggtccagaactattgatgtgagag

SEQ ID NO: 35884 - DNA, 110 bp, synthetic construct; identical to SEQ ID NO: 35882
  source 1..110: mol_type = other DNA

SEQ ID NO: 35885 - DNA, 110 bp, synthetic construct; identical to SEQ ID NO: 35883
  source 1..110: mol_type = other DNA

SEQ ID NO: 35886 - DNA, 110 bp, synthetic construct
  source 1..110: mol_type = other DNA
agttttacaaggtgcaggtcccagagaacagacccataggctccctcgtcatcacagtctctgctagggatttggatgctggaacttacggagagctctcctactcattt

SEQ ID NO: 35887 - DNA, 110 bp, synthetic construct
  source 1..110: mol_type = other DNA
agtctctgctagggatttggatgctggaacttacggagagctctcctactcatttttccaatcctcaaatcaggtcattcagaccttcgaagtcaacacagtcacagggg

SEQ ID NO: 35888 - DNA, 110 bp, synthetic construct
  source 1..110: mol_type = other DNA
gaagctgagagcggctcgtttgtggctaatctggccaaggacctggggctgggagttggggagctagctgcgcgggaagcccgggtggtctctgaggacaacgaaccccg

SEQ ID NO: 35889 - DNA, 110 bp, synthetic construct
  source 1..110: mol_type = other DNA
ttggggagctagctgcgcgggaagcccgggtggtctctgaggacaacgaaccccggttgcagctggatctgcagaccggggagttgatattaaatgagaaactggaccgg

SEQ ID NO: 35890 - DNA, 110 bp, synthetic construct; identical to SEQ ID NO: 35888
  source 1..110: mol_type = other DNA

SEQ ID NO: 35891 - DNA, 110 bp, synthetic construct; identical to SEQ ID NO: 35889
  source 1..110: mol_type = other DNA

SEQ ID NO: 35892 - DNA, 110 bp, synthetic construct
  source 1..110: mol_type = other DNA
gacgcagaaaatggattggataaaattatgtttatggggatttcccattgtggcacagcaaagacaaatctgactagtatctatgaagatgcaggttcaatccctggcct

SEQ ID NO: 35893 - DNA, 110 bp, synthetic construct; identical to SEQ ID NO: 35892
  source 1..110: mol_type = other DNA

SEQ ID NO: 35894 - DNA, 110 bp, synthetic construct
  source 1..110: mol_type = other DNA
actgcagcccaggcagcgctacagagcagctggggtatgatgggcatgaaggtagtcagcagaaccaggcccatcaggtaaaaaccaaagccaagaaaacatgcagaggg

SEQ ID NO: 35895 - DNA, 110 bp, synthetic construct
  source 1..110: mol_type = other DNA
ttctgcaaatctagactatgaggactccagcttttatgagctggatgtcgaagcccgggatcggccaggtctacaagatagagccaaagtcttcataactatcttggatg

SEQ ID NO: 35896 - DNA, 110 bp, synthetic construct
  source 1..110: mol_type = other DNA
cgggatcggccaggtctacaagatagagccaaagtcttcataactatcttggatgtgaatgacaatgtccccgaagtggtggtgacatctggaagcagatcagttgctga

SEQ ID NO: 35897 - DNA, 110 bp, synthetic construct
  source 1..110: mol_type = other DNA
cggcctggggctgctttcagcctggcctctgtgtcaaggcggggcccgtgggtccccccaactacagtgaaggaacgttgccttattcctacaacctgtgcgttgcccac

SEQ ID NO: 35898 - DNA, 110 bp, synthetic construct
  source 1..110: mol_type = other DNA
ccccaactacagtgaaggaacgttgccttattcctacaacctgtgcgttgcccacactggaaagacagagtttaattttctgacatgtagtgagccgttgagttcaggac

SEQ ID NO: 35899 - DNA, 110 bp, synthetic construct
  source 1..110: mol_type = other DNA
tatagccacttgtgatggagcattatggaagataatgcgaggaaaagaatatataaatgtgtgtgtgtgtatgtgtgtgtgtgtgactgggtcactttgctgtacagtag

SEQ ID NO: 35900 - DNA, 110 bp, synthetic construct; identical to SEQ ID NO: 35899
  source 1..110: mol_type = other DNA

SEQ ID NO: 35901 - DNA, 110 bp, synthetic construct
  source 1..110: mol_type = other DNA
cctgtgtttctgcatttgtgcaagttggtagctagcttcaagggaaggtctggatcagggtgggggtggggtgagatcgagtttccccttccaaatggccccctagggct

SEQ ID NO: 35902 - DNA, 110 bp, synthetic construct
  source 1..110: mol_type = other DNA
tagcattcatttccgctgcactcctgaaatcatttaaaatactaaattcataattaaaagcctgctgaacaggaaaatctactcaaaaggtttgattagacaattttacc

SEQ ID NO: 35903 - DNA, 110 bp, synthetic construct
  source 1..110: mol_type = other DNA
aaaagcctgctgaacaggaaaatctactcaaaaggtttgattagacaattttaccatttaaagaaaaattaatgccaatctcttttagaaaacaggagagaaggaaacac

SEQ ID NO: 35904 - DNA, 110 bp, synthetic construct
  source 1..110: mol_type = other DNA
gaggggcaggggggagggcagccctgacgggaggggccgcagcggccgctgctgcggagagcgaagccacttctttcttggcgtcttccagttccttggacagcttggca

SEQ ID NO: 35905 - DNA, 110 bp, synthetic construct
  source 1..110: mol_type = other DNA
ggagagcgaagccacttctttcttggcgtcttccagttccttggacagcttggcaacctacagaagtaataccagcgaagcacttctcagtccacttcagggaccactga

SEQ ID NO: 35906 - DNA, 110 bp, synthetic construct
  source 1..110: mol_type = other DNA
cccgacctgccctctgagggcccctcaccccacctaggaacttccaccaggcactccctcgactccctgagcctcctgcagctggcgtgcgttcaacaaacactttggga

SEQ ID NO: 35907 - DNA, 110 bp, synthetic construct
  source 1..110: mol_type = other DNA
attccacagatttggtgatgcaaatgcatgcaaatatatgcaaatctgcatgtaaaggaggcttgccactgtggttctaagtggctgtcacagcttctctgacacctgtt

SEQ ID NO: 35908 - DNA, 110 bp, synthetic construct
  source 1..110: mol_type = other DNA
aggaggcttgccactgtggttctaagtggctgtcacagcttctctgacacctgttctgagagacagctgccctgccccctcctgctcaggcgtatactcagtatttgccc

SEQ ID NO: 35909 - DNA, 110 bp, synthetic construct
  source 1..110: mol_type = other DNA
tggttcttaagtaattccttgcatgcttctttggactgaattataaagtccattaagctgggacccttgcctgtcttgttcatctctgcctcctcaacgcctagaacagt

SEQ ID NO: 35910 - DNA, 110 bp, synthetic construct
  source 1..110: mol_type = other DNA
gctctagcttcacagtccttgtgcagagccccgggggaggaactaggggctgtgagacaggcagagtccttggccctcgccctagaggaactgtgatggatttggggaga

SEQ ID NO: 35911 - DNA, 110 bp, synthetic construct
  source 1..110: mol_type = other DNA
gacaggcagagtccttggccctcgccctagaggaactgtgatggatttggggagagaaggcacaaagctggcgcagagctgcacagggatccgcacgcgcacggacggca

SEQ ID NO: 35912 - DNA, 110 bp, synthetic construct; identical to SEQ ID NO: 35910
  source 1..110: mol_type = other DNA

SEQ ID NO: 35913 - DNA, 110 bp, synthetic construct; identical to SEQ ID NO: 35911
  source 1..110: mol_type = other DNA

SEQ ID NO: 35914 - DNA, 110 bp, synthetic construct
  source 1..110: mol_type = other DNA
gggctggctcttcccgggcaggagaatgggcacgaggcataagactctcctgcgctggcccaagagcagagctgagcgcagagagggaggagtttttagtgtctctacgc

SEQ ID NO: 35915 - DNA, 110 bp, synthetic construct
  source 1..110: mol_type = other DNA
gactgggagagcggcttcctgcacagacagcgcccgtgcctgggctggggacgacttaacccttctggtgccagagtcagggcaagcagagtgtaacacagtagtgcaca

SEQ ID NO: 35916 - DNA, 110 bp, synthetic construct
  source 1..110: mol_type = other DNA
actgccttaggtcacagaagtagtaggcagaagagctggggtttgagaaataagcatccctctcacgtgcgtagggagaaggttggatgggggacgggaaatcaacagag

SEQ ID NO: 35917 - DNA, 110 bp, synthetic construct
  source 1..110: mol_type = other DNA
atccctctcacgtgcgtagggagaaggttggatgggggacgggaaatcaacagaggtcactgaggctagaaaggggtcactatggcccctgcccccaaacacacacacac

SEQ ID NO: 35918 - DNA, 110 bp, synthetic construct
  source 1..110: mol_type = other DNA
gaaatgaaaccaaaaacaaaactcgaagttgtcacagcaagggcactgaactggaggtcagtgtcctgagagctgatcccacttttgtcactcattggccacttgacctt

SEQ ID NO: 35919 - DNA, 110 bp, synthetic construct
  source 1..110: mol_type = other DNA
ggtcagtgtcctgagagctgatcccacttttgtcactcattggccacttgaccttgagcaaagtcactttaaggggaaacttcttggcctggcttgtgtgcctcctgtgt

SEQ ID NO: 35920 - DNA, 110 bp, synthetic construct
  source 1..110: mol_type = other DNA
caaggaaagatttataatttctgttgtcttttagtaaccaaaacacagctccccaaactggaccacagaaattctgagttgagaaaagttacagttatgctatgtctgcc

SEQ ID NO: 35921 - DNA, 110 bp, synthetic construct
  source 1..110: mol_type = other DNA
aactggaccacagaaattctgagttgagaaaagttacagttatgctatgtctgcccaatcctgagaggggaagtgggctcctttcccacttaaatgtcttctttcttttc

SEQ ID NO: 35922 - DNA, 110 bp, synthetic construct
  source 1..110: mol_type = other DNA
ctaacaccatcttttgtaattttttttctgcagatggcaggctttctctggtgtttctagtatgaattccacatctcggccttttatccagctccagcagtctcagctcc

SEQ ID NO: 35923 - DNA, 110 bp, synthetic construct
  source 1..110: mol_type = other DNA
tctagtatgaattccacatctcggccttttatccagctccagcagtctcagctccatcatctggaggacaaatgaaatttgcatgagttgcaaactcttgagctgaatga

SEQ ID NO: 35924 - DNA, 110 bp, synthetic construct
  source 1..110: mol_type = other DNA
tttttgcaaaattcttcccttcgggtttggtgagtgtcttggtagcagagtaagatgggggaagaaaggccaggggattcagttgcagccgtgcagaagctcttttctcc

SEQ ID NO: 35925 - DNA, 110 bp, synthetic construct
  source 1..110: mol_type = other DNA
tgggggaagaaaggccaggggattcagttgcagccgtgcagaagctcttttctccttccctgtcattgaaaagtagggatcatctgaaaccattttatgtgtgtgttatc

SEQ ID NO: 35926 - DNA, 110 bp, synthetic construct
  source 1..110: mol_type = other DNA
aacccttcacatttatgactccctgagccaaggctctaaccacaagcagcctgcggttgcagggggagctcccttcaacagcgactccaccatccgcagggaaccagagg

SEQ ID NO: 35927 - DNA, 110 bp, synthetic construct
  source 1..110: mol_type = other DNA
ctgaccgtgtttgcttctggcatgacgctggcctgacagctaaagggaagacacggcaagaggcggtttggtgtttcaagagccaccagtgcagcttctgttccgtcacc

SEQ ID NO: 35928 - DNA, 110 bp, synthetic construct
  source 1..110: mol_type = other DNA
acatgaaactaggatgtcacatcttcggagaagcaggggtttctaagctcagggcctgctttgatctaccctgggaagggctttcccagccccactgcaaacatgaagag

SEQ ID NO: 35929 - DNA, 110 bp, synthetic construct
  source 1..110: mol_type = other DNA
acacctgtttttcctctctgggatttgttttctccccatcttcagtttttagagatttcacaatgatgtgacttgacctgagtgtatttttgtccactattcagggcact

SEQ ID NO: 35930 - DNA, 110 bp, synthetic construct
  source 1..110: mol_type = other DNA
tagtcgttctccacgtggctggtcttcatctggtcgatggggaggatggtgagcgggtgctggagccggctgtgggccatacggctgtccagaaggggctggaccatgac

SEQ ID NO: 35931 - DNA, 110 bp, synthetic construct
  source 1..110: mol_type = other DNA
aatcaggctggggggctcctggagactggatgcgccagaaggcagccttctaccctcatccaggcctggcaatatggatacctatccagcagctgctgaatgaggcagcc

SEQ ID NO: 35932 - DNA, 110 bp, synthetic construct
  source 1..110: mol_type = other DNA
tcatccaggcctggcaatatggatacctatccagcagctgctgaatgaggcagccagcagccttcccctcttgccccccaatccagcccctccagcctggctcacttctc

SEQ ID NO: 35933 - DNA, 110 bp, synthetic construct
  source 1..110: mol_type = other DNA
tggtgaagcaagaatcagaggtggcttgcctgctgatgtgacgccacgttctgtgatgagcattcgatgtccttcctgctcttggggacagtatgtgacagggactgttg

SEQ ID NO: 35934 - DNA, 110 bp, synthetic construct
  source 1..110: mol_type = other DNA
atgagcattcgatgtccttcctgctcttggggacagtatgtgacagggactgttggtgtggatttggcttttttttgcagacaggggaatggctctctgtagcttaggat

SEQ ID NO: 35935 - DNA, 110 bp, synthetic construct
  source 1..110: mol_type = other DNA
aatgcaatggtgtactagagcccctggcacaggtaggaggtatcatgtaaagtagacactaaatccagctggaaaggatttgaacacttatcatgagccagcactgtgcc

SEQ ID NO: 35936 - DNA, 110 bp, synthetic construct
  source 1..110: mol_type = other DNA
acactaaatccagctggaaaggatttgaacacttatcatgagccagcactgtgccaagtgcctctcactcatgaacttgtttaaaaatgtacaggtacaagtgggatatg

SEQ ID NO: 35937 - DNA, 110 bp, synthetic construct
  source 1..110: mol_type = other DNA
atatgacatgtgtcccagtgtcaggcccttgtcctccaggatggcacgtattttcagcctcattttccctgtgaggtcatcatgcagagtgacccagtgagctctgctcc

SEQ ID NO: 35938 - DNA, 110 bp, synthetic construct
  source 1..110: mol_type = other DNA
agcctcattttccctgtgaggtcatcatgcagagtgacccagtgagctctgctccagatctgtgcttggttcctgtatcattccttctcaccttggggtctggggcttcc

SEQ ID NO: 35939 - DNA, 110 bp, synthetic construct
  source 1..110: mol_type = other DNA
tggatgtgtttatagaatataaaagtgaagtataaaaattcaatcttttcaactctcatggaccccttgagaaaagagtgtcactgtgtcaagtgtttggcttgtgaaaa

SEQ ID NO: 35940 - DNA, 110 bp, synthetic construct
  source 1..110: mol_type = other DNA
tcatggaccccttgagaaaagagtgtcactgtgtcaagtgtttggcttgtgaaaatctggggagtgggaggaatgagaagaagatacgccacctctgcactgactgtgtg

SEQ ID NO: 35941 - DNA, 110 bp, synthetic construct
  source 1..110: mol_type = other DNA
cagccagaccagagggcaggctgcagtgaaacctcctggtggttggattgtggatcacacatgcacagtggctttcccctgtgcttagaagaacctccagactctgcctt

SEQ ID NO: 35942 - DNA, 110 bp, synthetic construct
  source 1..110: mol_type = other DNA
ttctccttataccccacggtgtcacagcagtaggtgacagtgaccttatccacattacaaatgtgatgtaatatatctgggagtggatggcaagacagggtcatatttcc

SEQ ID NO: 35943 - DNA, 110 bp, synthetic construct
  source 1..110: mol_type = other DNA
aaactcagaaactaagacacgtgtacatcactattaaccagcttaaattgaccccagactctaatccacactgccttctggcatcctgtcctcaggtcccgctggtctga

SEQ ID NO: 35944 - DNA, 110 bp, synthetic construct
  source 1..110: mol_type = other DNA
agactctaatccacactgccttctggcatcctgtcctcaggtcccgctggtctgagagttgctcaggcttcccttgcttttcatgaccaacagtcttaagaagtgagtcc

SEQ ID NO: 35945 - DNA, 110 bp, synthetic construct
  source 1..110: mol_type = other DNA
gttagtgcagctctctgtacatcactttcttcttcagttacattgagaaaataccagagcctatctcaggatagcagtgaggacttggaacaggacccagcgcttcatga

SEQ ID NO: 35946 - DNA, 110 bp, synthetic construct
  source 1..110: mol_type = other DNA
cctcatctccagaacaatagctactgcccagggttctctgagtattaagtgataatgcatacaaagtgctgagcccagcacttgaaagcttataagcactcagtagatat

SEQ ID NO: 35947 - DNA, 110 bp, synthetic construct
  source 1..110: mol_type = other DNA
tgcatacaaagtgctgagcccagcacttgaaagcttataagcactcagtagatattagcttgattatccacctccgtgtggcttcttgttttattttccaatcatctgtg

SEQ ID NO: 35948 - DNA, 110 bp, synthetic construct
  source 1..110: mol_type = other DNA
agggaactgaaaatagtccagtccagctgaggcaagagggctgtggctggggaagcggatagagccattatctcaaaaccacaaaacaatgagtcttgctgtgtgacatg

SEQ ID NO: 35949 - DNA, 110 bp, synthetic construct
  source 1..110: mol_type = other DNA
cggatagagccattatctcaaaaccacaaaacaatgagtcttgctgtgtgacatggtcagattcacatttttaaaatgtccgtttgactgttgagcgaagcagtattgga

SEQ ID NO: 35950 - DNA, 110 bp, synthetic construct
  source 1..110: mol_type = other DNA
aaattcagaggaaggaccagcacagcctcattttctcgcagctctttgcgtccccggaggcttgggtgccttgattcatggacgctggccactgcttctgctcccactgg

SEQ ID NO: 35951 - DNA, 110 bp, synthetic construct
  source 1..110: mol_type = other DNA
ggaggcttgggtgccttgattcatggacgctggccactgcttctgctcccactgggccggtagccgaggcagggatgtgcagctgtgtggcccccttgtgagcggggcca

SEQ ID NO: 35952 - DNA, 110 bp, synthetic construct
  source 1..110: mol_type = other DNA
cagtgagcaaaggagaatgaatcccagactttgtggagcttatagatgagtgataagtttaagccattcatcaaacaatcaaataagtataaagtctaagagggatgaag

SEQ ID NO: 35953 - DNA, 110 bp, synthetic construct
  source 1..110: mol_type = other DNA
ggattgaactcaggaaaggttccgtcacccttttatttttttctgtccttcgtttcagctgaaaggctcctgcgaagtgaaacggctgagatggagctgcagcctggaag

SEQ ID NO: 35954 - DNA, 110 bp, synthetic construct
  source 1..110: mol_type = other DNA
cagctgaaaggctcctgcgaagtgaaacggctgagatggagctgcagcctggaagagaggaaaagcaattctaatcatccccgaagtggcttcagggtatcttgtggatt

SEQ ID NO: 35955 - DNA, 110 bp, synthetic construct
  source 1..110: mol_type = other DNA
aactgtggatgtcttggctctgcgtgaagcttgtcccatgagggcaggggagcgaaagctgtcaaaagcctgacttcatcttggcttcctcgttctggtttcccggtttt

SEQ ID NO: 35956 - DNA, 110 bp, synthetic construct
  source 1..110: mol_type = other DNA
atcccgtgtttgctctccaggctgtggtgtattcacccccctcttccccgccccccagtcgtaaatggcaatccattttcagtggcagccttgataccctcagagaaaag

SEQ ID NO: 35957 - DNA, 110 bp, synthetic construct
  source 1..110: mol_type = other DNA
cagtcgtaaatggcaatccattttcagtggcagccttgataccctcagagaaaagtccctcttaggtgcttaaaggaagaatcacaaaaataataattaaagatgacaca

SEQ ID NO: 35958 - DNA, 110 bp, synthetic construct
  source 1..110: mol_type = other DNA
tttaccctggtgacctttgtcaccgaaaggcgaaaagctttagcaagtggatgttgtcttccttggaggaggcttgagaaggagaaccaagaagtaaatcatccacatag

SEQ ID NO: 35959 - DNA, 110 bp, synthetic construct
  source 1..110: mol_type = other DNA
agtcttaccctctgggatgaggccctctgtgctggagctggatcggcccagagcggaccctccccgggcttgaaaccattcattattttcccactgctctcaggacgtag

SEQ ID NO: 35960 - DNA, 110 bp, synthetic construct
  source 1..110: mol_type = other DNA
gaccctccccgggcttgaaaccattcattattttcccactgctctcaggacgtagatgacccggtgcgtgatctggtccctgcctcccccaaaccctttctcagttccct

SEQ ID NO: 35961 - DNA, 110 bp, synthetic construct
  source 1..110: mol_type = other DNA
gagaaatcttaagaacgtcatcttgaagaaacagcttgcacgatgagatatatatggtgtcatgctatttatgtacattttaaagacataaaaatgatgttgcctctgga

SEQ ID NO: 35962 - DNA, 110 bp, synthetic construct
  source 1..110: mol_type = other DNA
tttcaaaaaatcatgcaccttggaaaaagatgctgcaagtgatttcgatggcccctcttggttgagaactttttcctttaacacctggaggaagcaagccaagcgtctct

SEQ ID NO: 35963 - DNA, 110 bp, synthetic construct
  source 1..110: mol_type = other DNA
tcttggttgagaactttttcctttaacacctggaggaagcaagccaagcgtctctgaaaagagggccatgaaaccctaagactgatctgcacctgctctgagagttaccc

SEQ ID NO: 35964 - DNA, 110 bp, synthetic construct
  source 1..110: mol_type = other DNA
tccatcggctcccagagaaaaatcggcagatgttgcagatgctcatgaaccacttggcaaagtaggtttcaggtggcttgctggcctttttctcacccccagcaagctct

SEQ ID NO: 35965 - DNA, 110 bp, synthetic construct
  source 1..110: mol_type = other DNA
ggcaaagtaggtttcaggtggcttgctggcctttttctcacccccagcaagctcttgtctcagttctaaagctggtctcggctctgcttaggtctccttctcccactgtt

SEQ ID NO: 35966 - DNA, 110 bp, synthetic construct
  source 1..110: mol_type = other DNA
ctcactaatgaatgagtcccgtggccttggctggaccaggcttcccagcgcggtgccagcctgcctcccacacacgggtaaattcatcaagccataatggatggctggtg

SEQ ID NO: 35967 - DNA, 110 bp, synthetic construct
  source 1..110: mol_type = other DNA
ccagcctgcctcccacacacgggtaaattcatcaagccataatggatggctggtgccagcagaggctgaggtgtgcgcctttctctctgggctgcataacgatctcaagc

SEQ ID NO: 35968 - DNA, 110 bp, synthetic construct
  source 1..110: mol_type = other DNA
ttaatatgggttttggcttttttctttttctcccccagaagaacaacgaaacagcctcatcaactccagcttggaatctgtggtctcatcaaatgcaaacagcatcctga

SEQ ID NO: 35969 - DNA, 110 bp, synthetic construct
  source 1..110: mol_type = other DNA
cctcctccagcaaaggataagagttccagatgtgccgagtcttgtaaatgctcagtattttcagccccttggtgttagctatccagtggtcctggtaggtgaggaagggc

SEQ ID NO: 35970 - DNA, 110 bp, synthetic construct
  source 1..110: mol_type = other DNA
tgttttgcctatctgcaccccttcttctgctcacagcacctccattttcctttgggagccccctaccctcaggtcctgggtttgggtgagctggtccgtccccgagccag

SEQ ID NO: 35971 - DNA, 110 bp, synthetic construct
  source 1..110: mol_type = other DNA
gagccccctaccctcaggtcctgggtttgggtgagctggtccgtccccgagccagtggtgaacctgtgccctggtctggccgaggaggtcgtcacatccactcagcctca

SEQ ID NO: 35972 - DNA, 110 bp, synthetic construct
  source 1..110: mol_type = other DNA
ttctaattggattcgtttccactctgccatgatgggaactcctgaagtctagcagcttttttgtagattccataggatttctgcgtagaccggatcatgttgtctctgag

SEQ ID NO: 35973 - DNA, 110 bp, synthetic construct; identical to SEQ ID NO: 35972
  source 1..110: mol_type = other DNA

SEQ ID NO: 35974 - DNA, 110 bp, synthetic construct
  source 1..110: mol_type = other DNA
aaaccgttttgttaagcacgaagtcagtgcgaatcacgtgtacaaatcattactagatcctctgtccccaagatgacaacatatatcatttgcggagggcagctatgggg

SEQ ID NO: 35975 - DNA, 110 bp, synthetic construct
  source 1..110: mol_type = other DNA
gatcctctgtccccaagatgacaacatatatcatttgcggagggcagctatggggtaagaactctgtatttcagtgggtagtgttagaagggaaacacccctgtcgtctg

SEQ ID NO: 35976 - DNA, 110 bp, synthetic construct
  source 1..110: mol_type = other DNA
aagatctacacaaacggcaagatatccgcgttcgtgaagcggaaggctcactgctgggatggagcaaggctctccgaagtgatcaaagggcagagttcaattcactctcg

SEQ ID NO: 35977 - DNA, 110 bp, synthetic construct
  source 1..110: mol_type = other DNA
gggatggagcaaggctctccgaagtgatcaaagggcagagttcaattcactctcgaccaaaatgccaaaggccattttttagaaacggacaagctgatcctgaaatgtgg

SEQ ID NO: 35978 - DNA, 110 bp, synthetic construct
  source 1..110: mol_type = other DNA
tccccggctcccactccaggtgccacatttaaaaatacaatgccgtccatttatcacagctaaggacaaaactgtatcacgctaagctcggctgttcatcctgccacaca

SEQ ID NO: 35979 - DNA, 110 bp, synthetic construct
  source 1..110: mol_type = other DNA
ggccagggatcaaacgcgcaacctcataattcctagttggattcgtttccaccgcgccacaatgggaactcctgaaaaaaaaatctttatgaagagaaggccagccatta

SEQ ID NO: 35980 - DNA, 110 bp, synthetic construct; identical to SEQ ID NO: 35979
  source 1..110: mol_type = other DNA

SEQ ID NO: 35981 - DNA, 110 bp, synthetic construct
  source 1..110: mol_type = other DNA
gacctcattgcttttccattctagatgcaatagtttgcatctaccagtcccaaactccccgtccgtccatcctacttcctaccccctcccccttgaccacaagttgttgt

SEQ ID NO: 35982 - DNA, 110 bp, synthetic construct; identical to SEQ ID NO: 35981
  source 1..110: mol_type = other DNA

SEQ ID NO: 35983 - DNA, 110 bp, synthetic construct
  source 1..110: mol_type = other DNA
aagtcaaggtgttgtacaccctaaactcacacaatcttatatgttcgttgtatctcagttaaaaaatgataagagttttgggtgatgctgaaagacaatgaaggaagagg

SEQ ID NO: 35984 - DNA, 110 bp, synthetic construct
  source 1..110: mol_type = other DNA
cagttaaaaaatgataagagttttgggtgatgctgaaagacaatgaaggaagaggataaatttcactcatgtgaattaatcctagccgtctaataaaaacaatgtcctca

SEQ ID NO: 35985 - DNA, 110 bp, synthetic construct
  source 1..110: mol_type = other DNA
gctgtgctctctcaaaacccctgtatttttgccttgcagctgttagattggaaatgggcagtgtcactcaagtcagggatgtcgccgagtgagggttttctgcttgtttg

SEQ ID NO: 35986 - DNA, 110 bp, synthetic construct
  source 1..110: mol_type = other DNA
atcagagaggcggagaaccctgtatagctacaggtggaggtgaacccagagggatctgactccacagcagatgctcacaggcactagtgatgggcatttggacccgttat

SEQ ID NO: 35987 - DNA, 110 bp, synthetic construct
  source 1..110: mol_type = other DNA
ctttgtctttacaaatggtagcaaaggagtcttttgcaaatttcaattctgaaaggacggtcttaacacacaaaaggccaacaggcagcaacaaaatgaaggcagtgaag

SEQ ID NO: 35988 - DNA, 110 bp, synthetic construct
  source 1..110: mol_type = other DNA
gacggtcttaacacacaaaaggccaacaggcagcaacaaaatgaaggcagtgaaggaaaactgcaaaagcaaaagatacgggggggggggggaacccagcacctggtttc

SEQ ID NO: 35989 - DNA, 110 bp, synthetic construct; identical to SEQ ID NO: 35987
  source 1..110: mol_type = other DNA

SEQ ID NO: 35990 - DNA, 110 bp, synthetic construct; identical to SEQ ID NO: 35988
  source 1..110: mol_type = other DNA

SEQ ID NO: 35991 - DNA, 110 bp, synthetic construct
  source 1..110: mol_type = other DNA
ttcatgaaatggctgcatcttgagctgagtttcacatcaaccctgtgtctttaacataaatccttcattctcatttaaatgaactggaatctctactattggggcagggg

SEQ ID NO: 35992 - DNA, 110 bp, synthetic construct
  source 1..110: mol_type = other DNA
aaaactcaggccctagactggttgtcccttgtgctatatttgctatagcaaaaggcacaatttcccccgcacagctcagagatccccatggacatccaacacaggggcca

SEQ ID NO: 35993 - DNA, 110 bp, synthetic construct
  source 1..110: mol_type = other DNA
cacaatttcccccgcacagctcagagatccccatggacatccaacacaggggccatgcggaatgagaaaggctttgtgatcagactcatttggggttagggtccggtcgc

SEQ ID NO: 35994 - DNA, 110 bp, synthetic construct
  source 1..110: mol_type = other DNA
tctgtttaaatatgaaggaaacagggtaacagctacagccatgtagcaacagaaaaagacatctcagaaggaactctttgtcctcagagacattcaaactgaggatgtgt

SEQ ID NO: 35995 - DNA, 110 bp, synthetic construct
  source 1..110: mol_type = other DNA
tggggcaaagtttcactattaaaatatgacaactaggaggagacaagatagcagaatactgggaggtcttgagctcacctccgcacatgaaaacaccaatctgcaaatca

SEQ ID NO: 35996 - DNA, 110 bp, synthetic construct
  source 1..110: mol_type = other DNA
atactgggaggtcttgagctcacctccgcacatgaaaacaccaatctgcaaatcagtcaatgtgatataccacatgagcaaattgaagagtaaaaaccatacgaccatct

SEQ ID NO: 35997 - DNA, 110 bp, synthetic construct
  source 1..110: mol_type = other DNA
agttttctcctcttccctccaggacttcttcaaataacatgtgtcaccacccacaggcagtcaggtcagtggataaagtttttagttctttaaagctttcagtgaatctc

SEQ ID NO: 35998 - DNA, 110 bp, synthetic construct
  source 1..110: mol_type = other DNA
ggcagtcaggtcagtggataaagtttttagttctttaaagctttcagtgaatctcatttccatatgaaaaagaaataggctgcttcttctttctttcttttgggacatta

SEQ ID NO: 35999 - DNA, 110 bp, synthetic construct
  source 1..110: mol_type = other DNA
ggctgtgcttttcggttgcaccctgtttaatgttttaggggtgtcaactgtgggaatcagagggacctcaagggtcatcaagcccaggctctttattttgaaaattcacc

SEQ ID NO: 36000 - DNA, 110 bp, synthetic construct
  source 1..110: mol_type = other DNA
ctctgccaaactccatcagtttcattcactcttctgatctctcccaggacatgctagaactcagctctctcctctgctgaaagtttcatgtcatacagacagcaaagaaa

SEQ ID NO: 36001 - DNA, 110 bp, synthetic construct
  source 1..110: mol_type = other DNA
agaactcagctctctcctctgctgaaagtttcatgtcatacagacagcaaagaaattagattaagcatgatttcaaaaaaccagaatcctgacatggaaccaaaagtgtc

SEQ ID NO: 36002 - DNA, 110 bp, synthetic construct
  source 1..110: mol_type = other DNA
ttcctcctcccaaagagcctctaaagcacagacagcacctcagagaaaacaagcttgtcacctcgggtcacacacctgggaaatgacagggccaagtgttgaatcaagag

SEQ ID NO: 36003 - DNA, 110 bp, synthetic construct
  source 1..110: mol_type = other DNA
tgtcacctcgggtcacacacctgggaaatgacagggccaagtgttgaatcaagagtggctgacatccaaggcccggcttctaaacacctgcaatgtggaagagacagcct

SEQ ID NO: 36004 - DNA, 110 bp, synthetic construct
  source 1..110: mol_type = other DNA
cattgtacttctcatcatttgacacctgctgtatctgtttattttctagaatgttagcttcaggaaggaagggcctttggctatttggggtttactgccatatccctaat

SEQ ID NO: 36005 - DNA, 110 bp, synthetic construct
  source 1..110: mol_type = other DNA
agcttcaggaaggaagggcctttggctatttggggtttactgccatatccctaatgcttagagcagtgcctggtccctagaaaatactcgactgtatttgccgaaggaat

SEQ ID NO: 36006 - DNA, 110 bp, synthetic construct
  source 1..110: mol_type = other DNA
ggcagagcttctgacccactggcttgatttactctgtgactctgccttgccctatttacagcccctcttgagatttcttccctttttcctgttctctctagaactggatt

SEQ ID NO: 36007 - DNA, 110 bp, synthetic construct
  source 1..110: mol_type = other DNA
ggttcggtccccggcccagcacagtggatttagtatctggtgttgccacagctgtagcttaggtggaagcagcagcttgaatctgatacctggcttgggaactccatatg

SEQ ID NO: 36008 - DNA, 110 bp, synthetic construct
  source 1..110: mol_type = other DNA
ccagcacagtggatttagtatctggtgttgccacagctgtagcttaggtggaagcagcagcttgaatctgatacctggcttgggaactccatatgccacagggtggccaa

SEQ ID NO: 36009 - DNA, 110 bp, synthetic construct
  source 1..110: mol_type = other DNA
tgggtgtctggggatcagctagctgttggctggtctccagctgtgttgaggttggggtgattgtgggagactcaggtctgctccagtgtctcatcctcctgcagtctcag

SEQ ID NO: 36010 - DNA, 110 bp, synthetic construct
  source 1..110: mol_type = other DNA
ggtgattgtgggagactcaggtctgctccagtgtctcatcctcctgcagtctcagctgggtgtgttcttggcaaatgcaggagagcaagaaggacacatgcctccatgtg

SEQ ID NO: 36011 - DNA, 110 bp, synthetic construct
  source 1..110: mol_type = other DNA
tccaacctgcatcctcatgagtactagtcaggtttgttctgctgagccatgacaggaactcccaaaatgagccttaaagagctaaattcaaggtgtcagtagcgctggcc

SEQ ID NO: 36012 - DNA, 110 bp, synthetic construct; identical to SEQ ID NO: 36011
  source 1..110: mol_type = other DNA

SEQ ID NO: 36013 - DNA, 110 bp, synthetic construct
  source 1..110: mol_type = other DNA
tttttaggaattataagactacctactgcaaaaatttgttttgaagagttcatgagataatccctcaagagggtttagctgagtggtgtaaccagggtattaaagtttag

SEQ ID NO: 36014 - DNA, 110 bp, synthetic construct
  source 1..110: mol_type = other DNA
gataatccctcaagagggtttagctgagtggtgtaaccagggtattaaagtttagtgccataattttggtgtttaaattctaccaagaattcatttttgctttgttaagg

SEQ ID NO: 36015 - DNA, 110 bp, synthetic construct
  source 1..110: mol_type = other DNA
ggtattctgaagaatggattcttatcagcagttgcattaaaacagcatcagcgacaagagctagcatattttttaagtgacggctctaaggagccttcctgttttagatt

SEQ ID NO: 36016 - DNA, 110 bp, synthetic construct
  source 1..110: mol_type = other DNA
cctaggaacctctatatgctgcgagtgcagccctaaaaaaaagaaaaaaaagaaagaaagaaaagaaacaaatagctgaatgcagtgctatgaatcaacatgcacggaaa

SEQ ID NO: 36017 - DNA, 110 bp, synthetic construct
  source 1..110: mol_type = other DNA
gaaagaaaagaaacaaatagctgaatgcagtgctatgaatcaacatgcacggaaatagcgagagaggagttcacactgtggcttaaatataatgtagtggatcataaaag

SEQ ID NO: 36018 - DNA, 110 bp, synthetic construct
  source 1..110: mol_type = other DNA
aggtttagttgtgagacgcagtctaccagtggcctctcacctgtacattttatatctttactaaccaacatattgttctcactctttgtttataggaaacatcaggaagc

SEQ ID NO: 36019 - DNA, 110 bp, synthetic construct
  source 1..110: mol_type = other DNA
ctttactaaccaacatattgttctcactctttgtttataggaaacatcaggaagctctgtatataattagatatatccctgggagaaaactgctacaaatactttgtttt

SEQ ID NO: 36020 - DNA, 110 bp, synthetic construct
  source 1..110: mol_type = other DNA
ttttgcacatgcataattaactgagtaagctaccaaagatgcaattatccaattatgaggaaggaaggaaaattaagattaggtacggttttgttcaagaaagaataatt

SEQ ID NO: 36021 - DNA, 110 bp, synthetic construct
  source 1..110: mol_type = other DNA
taagctaccaaagatgcaattatccaattatgaggaaggaaggaaaattaagattaggtacggttttgttcaagaaagaataattaattgttacatcaaggagacatgaa

SEQ ID NO: 36022 - DNA, 110 bp, synthetic construct
  source 1..110: mol_type = other DNA
ggaggagttgcaaagtcacagcaaagaggaggagctgtaggcagagggatcctgtgcccatttcagcaagcaatctaccacatcttccatagacttgtcagtacagtacg

SEQ ID NO: 36023 - DNA, 110 bp, synthetic construct
  source 1..110: mol_type = other DNA
aggtattaaaaatatttcacatcaacacatccctcttatttgttttaaactctgtaaaacacccaacagcatttgaagtcaatgtcagtgtaaatacttgtaatagtccc

SEQ ID NO: 36024 - DNA, 110 bp, synthetic construct
  source 1..110: mol_type = other DNA
tatacttagtacccaaaatatcaggagctccttgggacgtggaatatgtgtaatagtgtagaatgtgtcgagtgacttgcacagcactgttctaggtagaagtaaaaata

SEQ ID NO: 36025 - DNA, 110 bp, synthetic construct
  source 1..110: mol_type = other DNA
aaaccttctcaacacccagttcctctgtagtggtggcgtcagtgtattctactgcaagctcattgccctgaaaagcagacaaagtaacacacgtgacagccccacaaaca

SEQ ID NO: 36026 - DNA, 110 bp, synthetic construct
  source 1..110: mol_type = other DNA
aagctcattgccctgaaaagcagacaaagtaacacacgtgacagccccacaaacaaaagtcttccgtagacttgtacaaagttattcttactggaaggagtcctcgtgtt

SEQ ID NO: 36027 - DNA, 110 bp, synthetic construct
  source 1..110: mol_type = other DNA
ctggagctttcacaggcaaacaggacattggttatctctattggcaaacatcacctggcagccaggggctgaaaagtgtgaagcattccaggtacaaatatgtattctcc

SEQ ID NO: 36028 - DNA, 110 bp, synthetic construct
  source 1..110: mol_type = other DNA
ttgtccaaagtcaaagaacttattacttgcatggtgggattaaaaacaaggtcagccgacttcggatagcatcgtctttccactgtattattctcacagtcgtgagcgta

SEQ ID NO: 36029 - DNA, 110 bp, synthetic construct
  source 1..110: mol_type = other DNA
gtggagctatgtcatgaagcaagcagggctggaacactccctcagctcaggctgagacacacaacaggactctcaggggaaactggccagatacccattcagtctcaacc

SEQ ID NO: 36030 - DNA, 110 bp, synthetic construct
  source 1..110: mol_type = other DNA
caacaaataaggcaggttgcaaatagctaacactatgtaaaaattgcagagcacgtaacaatactgtatattgtgtatccgtatattcctatgtggttcaaaagtgtgct

SEQ ID NO: 36031 - DNA, 110 bp, synthetic construct
  source 1..110: mol_type = other DNA
ggtctccatagataacccagcctccactatggttttctcattttgattgccccagcaatccagtcatattatctagctgcctttttaattgacgttttctgcgtgccact

SEQ ID NO: 36032 - DNA, 110 bp, synthetic construct
  source 1..110: mol_type = other DNA
gggaagggaagtaaaaaacaaacaaacaaaaaaacctgtttttcattatgtaacttaacgtatctgttaatatatttttctcaccctcaagactgggaccaccttaattt

SEQ ID NO: 36033 - DNA, 110 bp, synthetic construct
  source 1..110: mol_type = other DNA
ggagaaaatctttgcaaacaatgcaattagaaaagggcctaatctccaaaatatactaacagctcatacaatgcatcaacaaaacaacaacccagtaaaaaaatgggcag

SEQ ID NO: 36034 - DNA, 110 bp, synthetic construct
  source 1..110: mol_type = other DNA
attagaaaagggcctaatctccaaaatatactaacagctcatacaatgcatcaacaaaacaacaacccagtaaaaaaatgggcagaagacataaagagacatttctccaa

SEQ ID NO: 36035 - DNA, 110 bp, synthetic construct
  source 1..110: mol_type = other DNA
caggggttctcaccagcaccatctaagcctctccagccacaaacttgaaatattcgttatctattgttatataacaacattaccgccaatgtagcagcttaaaacgatgt

SEQ ID NO: 36036 - DNA, 110 bp, synthetic construct
  source 1..110: mol_type = other DNA
gttatctattgttatataacaacattaccgccaatgtagcagcttaaaacgatgtacatttctcatcttatttctggggttcaggagaccaggcacagctgagtcctctg

SEQ ID NO: 36037 - DNA, 110 bp, synthetic construct
  source 1..110: mol_type = other DNA
taaaggtccaactttcaatcttagcttgacaaaattcaaaagatctagcaacaatgagcctttattcccactgaaactgtgttgaacagtcatcctctttttggagaggc

SEQ ID NO: 36038 - DNA, 110 bp, synthetic construct
  source 1..110: mol_type = other DNA
tcttcacgtaccaggcagaaataagggtgtaagggaatagcagcagctgcctatgtacttttaaatcagggaagtgaattttcccagaagccaccagcaaatttctctca

SEQ ID NO: 36039 - DNA, 110 bp, synthetic construct
  source 1..110: mol_type = other DNA
ctatgctcgcaaacttccagccactcagaagatacttgctccagagatccaccattagctgcgacttccccttctgcaccactctgtggttcttagggttgtttcatgga

SEQ ID NO: 36040 - DNA, 110 bp, synthetic construct
  source 1..110: mol_type = other DNA
caccaaaaatttccatgttgctaaatccaatgaaagtttcttacttctcagctaccttggtttctctgcacaaagggcatggcgccttcattaccaggtactctgcatgc

SEQ ID NO: 36041 - DNA, 110 bp, synthetic construct
  source 1..110: mol_type = other DNA
cttggtttctctgcacaaagggcatggcgccttcattaccaggtactctgcatgccaccctcctgcccccagtactctggacactggaaataggctgttgggcatgagag

SEQ ID NO: 36042 - DNA, 110 bp, synthetic construct; identical to SEQ ID NO: 36040
  source 1..110: mol_type = other DNA

SEQ ID NO: 36043 - DNA, 110 bp, synthetic construct; identical to SEQ ID NO: 36041
  source 1..110: mol_type = other DNA

SEQ ID NO: 36044 - DNA, 110 bp, synthetic construct
  source 1..110: mol_type = other DNA
gcgttgtcttcacattcttcgtggggaaaaatgcttacaatagagcatacatgctgatttttttaaagcatttttcaagttctgttaagaaaagtaactctagaatggtg

SEQ ID NO: 36045 - DNA, 110 bp, synthetic construct
  source 1..110: mol_type = other DNA
aatagagtttctgcttctttcagtatgccaccttagctcctctgaaggtcttttgcatgacaaaacaactagatccttgataaaatcttatttttaatgcattgttagaa

SEQ ID NO: 36046 - DNA, 110 bp, synthetic construct
  source 1..110: mol_type = other DNA
ttgctggttcacagccctggtttctagcacacctcatggcacatgccaggtactcaggaaatactggccaaactaaaaaacagcttcacaaaatgaagagttccactctg

SEQ ID NO: 36047 - DNA, 110 bp, synthetic construct
  source 1..110: mol_type = other DNA
aggaaatactggccaaactaaaaaacagcttcacaaaatgaagagttccactctgttcttttaacctcttctctaatgctctttttaagcaaatctactccttgacccac

SEQ ID NO: 36048 - DNA, 110 bp, synthetic construct
  source 1..110: mol_type = other DNA
cacaagcagaaagatctgtgcccgattagccccactggcccagtgaaaagcagcgaggttataggacgccctccgcatcccagaaggagtcaggaggagccaggatgctg

SEQ ID NO: 36049 - DNA, 110 bp, synthetic construct
  source 1..110: mol_type = other DNA
gggtgtgtgtgtgtgtgcgcgtgtgtgtgtgtgtaagaggtagaatgactgactaattttcaggaaacagggcccatcacgttgacacgttcttttttgtttggccactc

SEQ ID NO: 36050 - DNA, 110 bp, synthetic construct
  source 1..110: mol_type = other DNA
ggtcacgatggtggggtttcccaaaaggggcacttagatgctttgactcaatatatggacaagcaagtattttgagcagttacctcccctctgtttatttacagaagtct

SEQ ID NO: 36051 - DNA, 110 bp, synthetic construct
  source 1..110: mol_type = other DNA
tggacaagcaagtattttgagcagttacctcccctctgtttatttacagaagtctccatcagcttactgatgctgccccctctctgctccctcactcacttctgccgggg

SEQ ID NO: 36052 - DNA, 110 bp, synthetic construct
  source 1..110: mol_type = other DNA
gaaacccaaagacaaagagctttattcgatttcttcaagaaaactgcagattgaggatttccaccatgacagaagcacagcaaacccatgagaaaaggacagggctattt

SEQ ID NO: 36053 - DNA, 110 bp, synthetic construct
  source 1..110: mol_type = other DNA
gatttccaccatgacagaagcacagcaaacccatgagaaaaggacagggctatttttttccatctcgaagacaagctgttccaagccacgatgcaatgtgaaacaataaa

SEQ ID NO: 36054 - DNA, 110 bp, synthetic construct
  source 1..110: mol_type = other DNA
gcacccaaagaagtgttgcattcagcagaggacagaccaaggacctccaggacctgcatgagagctacgagtttgtgacctccggggttggagactttcctgaggcagaa

SEQ ID NO: 36055 - DNA, 110 bp, synthetic construct
  source 1..110: mol_type = other DNA
gcatgagagctacgagtttgtgacctccggggttggagactttcctgaggcagaaatctctctagacccaaaggctgatgcggtggttctgatacccaggaggcgttcca

SEQ ID NO: 36056 - DNA, 110 bp, synthetic construct
  source 1..110: mol_type = other DNA
ttgtcactgatcattcctcttcggctccagaaatctccacatggaggtaaaaaagagaaatgatttgggggagaaagccagcgtgtatgtgatcagagctttttttttcc

SEQ ID NO: 36057 - DNA, 110 bp, synthetic construct
  source 1..110: mol_type = other DNA
agaaatgatttgggggagaaagccagcgtgtatgtgatcagagctttttttttcccctaacgcagcagaggtttggatggtgggagggtcatttgactcatctctcctcc

SEQ ID NO: 36058 - DNA, 110 bp, synthetic construct
  source 1..110: mol_type = other DNA
gagtgagtctgaggcacatggaggagcagcactggctccgcctttctcatattggatcgcagagctgacgtttggctctgcccgtcagcaggagtaaaaggccgcactgg

SEQ ID NO: 36059 - DNA, 110 bp, synthetic construct
  source 1..110: mol_type = other DNA
atcgcagagctgacgtttggctctgcccgtcagcaggagtaaaaggccgcactggttgtcaacatgctgaaatcgtcctgtactgagaggtgactagcagatgccctggg

SEQ ID NO: 36060 - DNA, 110 bp, synthetic construct; identical to SEQ ID NO: 36058
  source 1..110: mol_type = other DNA

SEQ ID NO: 36061 - DNA, 110 bp, synthetic construct; identical to SEQ ID NO: 36059
  source 1..110: mol_type = other DNA

SEQ ID NO: 36062 - DNA, 110 bp, synthetic construct
  source 1..110: mol_type = other DNA
aggaccttcagaccgcaccttccacagagaccaaccctcacagctctttagccatgactctgcagcaagcagaaagcaatcacattttcctaagcagtcaaaatggttgt

SEQ ID NO: 36063 - DNA, 110 bp, synthetic construct
  source 1..110: mol_type = other DNA
gctaaggacaccgctgagagggaagaacaggaaaaaaaaagagaagtgacttggattaatcagccaaaatgggagtcagaagacaacatgagcagtcatcacagacacac

SEQ ID NO: 36064 - DNA, 110 bp, synthetic construct
  source 1..110: mol_type = other DNA
ttaatcagccaaaatgggagtcagaagacaacatgagcagtcatcacagacacacactgaacaacaggtcaaatgatatagattcaaaaacctagcttgggccctggaac

SEQ ID NO: 36065 - DNA, 110 bp, synthetic construct; identical to SEQ ID NO: 36063
  source 1..110: mol_type = other DNA

SEQ ID NO: 36066 - DNA, 110 bp, synthetic construct; identical to SEQ ID NO: 36064
  source 1..110: mol_type = other DNA

SEQ ID NO: 36067 - DNA, 110 bp, synthetic construct
  source 1..110: mol_type = other DNA
ttaatgggaattctaaatctgatggacacgagctaggaacaagtagccatgtttatcagggagcttttgtatttagaaaaacgtaaccaaattagaaacgttgcacttct

SEQ ID NO: 36068 - DNA, 110 bp, synthetic construct
  source 1..110: mol_type = other DNA
tcagggagcttttgtatttagaaaaacgtaaccaaattagaaacgttgcacttctcaagtactaaaattttgcacaatccccgcggcctggatttctcctaaggtggcga

SEQ ID NO: 36069 - DNA, 110 bp, synthetic construct
  source 1..110: mol_type = other DNA
agccctaggcacagaacaggtgctcagtgagcatctgatggatacggaaacaacagaggcccctgctttgcttgcagagccatgagaacttgatctccatttatggtaat

SEQ ID NO: 36070 - DNA, 110 bp, synthetic construct
  source 1..110: mol_type = other DNA
gaggcccctgctttgcttgcagagccatgagaacttgatctccatttatggtaatggatttgacttctaccccttccgcaagatctccccttagaaacttgacatattgt

SEQ ID NO: 36071 - DNA, 110 bp, synthetic construct
  source 1..110: mol_type = other DNA
tgagttctgcatattccttgtggtccaggaatggcctttggggagcctgcacacaccttgcctttgcaccataaatgcgtgtgtatgtgggagtggggggagagtgtgtg

SEQ ID NO: 36072 - DNA, 110 bp, synthetic construct
  source 1..110: mol_type = other DNA
aaaacacccgggaagtgttgtctgcctgggaagctctcctgaggtgaggagtcaagggttttcgttggggactggtcacttatttggtaccatctgcctggcacgtgcca

SEQ ID NO: 36073 - DNA, 110 bp, synthetic construct
  source 1..110: mol_type = other DNA
ttttatccttccagtgttgctgtttctttttttccctatttctctttcttactggtttgtgacttaattgtcattttattggcctttgaaggccaatatgcatgtttagc

SEQ ID NO: 36074 - DNA, 110 bp, synthetic construct
  source 1..110: mol_type = other DNA
atcattaccaataaatacagccgtggccatctgctgtgctttggacctatttgccacgatcgcctgtctcctgatcgtcgtgttcccagggggcagggtcactgtcctga

SEQ ID NO: 36075 - DNA, 110 bp, synthetic construct
  source 1..110: mol_type = other DNA
tccaaggaactttctgttactgatcttctcctgacacatgcaagggttaagaaaatcggccagggttgtaacaggtagaaaagttgggatttagaccaggctaagatctc

SEQ ID NO: 36076 - DNA, 110 bp, synthetic construct
  source 1..110: mol_type = other DNA
tatgaacctgtgtacatcccactgcttctagctgcctagtgtcttctttgttcttccaactcatcttcctcctctggatgagaaggcatggatatctgccaaagttcagc

SEQ ID NO: 36077 - DNA, 110 bp, synthetic construct
  source 1..110: mol_type = other DNA
ccaactcatcttcctcctctggatgagaaggcatggatatctgccaaagttcagctttcacattgcttgtgaaaatggtggaaccgactgttgcaagaagatgattttag

SEQ ID NO: 36078 - DNA, 110 bp, synthetic construct
  source 1..110: mol_type = other DNA
tggtcatgtgtctttgtcaggagccaggaataggtagagctgggttgtaaacttggctctggttctacagcccactgctgtccccacattctgcatcatttctcctcccg

SEQ ID NO: 36079 - DNA, 110 bp, synthetic construct
  source 1..110: mol_type = other DNA
gctttgtatttggtgatgcctctttacccttcaattatctctcataaatctggttgagttctttgtaaaattagcttgagactgagatagcatcacattttactatagtt

SEQ ID NO: 36080 - DNA, 110 bp, synthetic construct
  source 1..110: mol_type = other DNA
gagttctttgtaaaattagcttgagactgagatagcatcacattttactatagttccctcaccaaacccagaggcaaacattccttgggcttctagagtatgcgtgcccc

SEQ ID NO: 36081 - DNA, 110 bp, synthetic construct
  source 1..110: mol_type = other DNA
catacaacaaaatgaaaaattactaagatacaaaaacccatggaaagcggagtatacatatagaaaagaacatctaatgtatatgtaactgttagccatgaagagaccga

SEQ ID NO: 36082 - DNA, 110 bp, synthetic construct
  source 1..110: mol_type = other DNA
acatatagaaaagaacatctaatgtatatgtaactgttagccatgaagagaccgaaagaagtggacaggaaaaaactacttaaaatacgtttttaaaaaatgcctgaaac

SEQ ID NO: 36083 - DNA, 110 bp, synthetic construct
  source 1..110: mol_type = other DNA
ctaacagagaagggcccctgcgccctgatatgtgggcatgactcaggctcatcacgtctgctgagtgtatgatgtgtgcgttcagctggtctgtcctgattcagaaggtg

SEQ ID NO: 36084 - DNA, 110 bp, synthetic construct
  source 1..110: mol_type = other DNA
gtctgctgagtgtatgatgtgtgcgttcagctggtctgtcctgattcagaaggtgaaaaagcctttcagatactaggctgattttataactttctctttatgcttttctg

SEQ ID NO: 36085 - DNA, 110 bp, synthetic construct
  source 1..110: mol_type = other DNA
aaaaattacatatttaaaaaattaaatatttcactctctttggggatgcttctcaaatccaagaggttgtttcaaactgccaaaaatatttactgattgcacctgctgga

SEQ ID NO: 36086 - DNA, 110 bp, synthetic construct
  source 1..110: mol_type = other DNA
aatccaagaggttgtttcaaactgccaaaaatatttactgattgcacctgctggaaactgacaagatatttaaagggacttttaagtagctctatagtcagaaactggcc

SEQ ID NO: 36087 - DNA, 110 bp, synthetic construct
  source 1..110: mol_type = other DNA
tccccatgggcatatgtcaggttcttaagctgctgagccacaacaggagctctgtactcacctcttttcaccttgtattttattgaatatatcttacgtctccgactaga

SEQ ID NO: 36088 - DNA, 110 bp, synthetic construct
  source 1..110: mol_type = other DNA
ggagctctgtactcacctcttttcaccttgtattttattgaatatatcttacgtctccgactagattataagtcaatatatgaatgtatgatgagtaaatgaatacatga

SEQ ID NO: 36089 - DNA, 110 bp, synthetic construct
  source 1..110: mol_type = other DNA
aactgactttcattcgaagaattattcatgtgacttcaacgtaaaaagaacaaccaactcaggtgaatatttacctgagtaagtatctatctacactgatagctagaaac

SEQ ID NO: 36090 - DNA, 110 bp, synthetic construct
  source 1..110: mol_type = other DNA
aactcaggtgaatatttacctgagtaagtatctatctacactgatagctagaaacttgttctttgcatataggggaaaacccataaattatttttcaccacaatgacagc

SEQ ID NO: 36091 - DNA, 110 bp, synthetic construct
  source 1..110: mol_type = other DNA
aaattaaattttgtcctcctattcttctttctttaaattgtttctatgtgagacgatgtatgttagctgaacgtactgcggtcatcacatcccaatacatgtaagtcaaa

SEQ ID NO: 36092 - DNA, 110 bp, synthetic construct
  source 1..110: mol_type = other DNA
cagtcctgccaaatgaatatcatttccctcttctgttaatgaggcaacagacccgatcgggttggattctttgactgttaacacatccggtgagaggcgagagcatagct

SEQ ID NO: 36093 - DNA, 110 bp, synthetic construct
  source 1..110: mol_type = other DNA
cagaggctttaagaacagttgagtgaattcatgttctccctggggtctgcagcattagctcccagagggctttatctccatagatgatgatgccactggcagcacctgcc

SEQ ID NO: 36094 - DNA, 110 bp, synthetic construct
  source 1..110: mol_type = other DNA
tgctggcctgggccacagctacaacaacgctggatataagccacatctgccacctacactgccagcttgtggaaatgccggatgcttaacccactgaaagaggccaggga

SEQ ID NO: 36095 - DNA, 110 bp, synthetic construct; identical to SEQ ID NO: 36094
  source 1..110: mol_type = other DNA

SEQ ID NO: 36096 - DNA, 110 bp, synthetic construct
  source 1..110: mol_type = other DNA
ctcacggatactagtcggattcatttccactgtgccacgacgggaactccaaattcaatatataatcacactattataaaggcagctacactctttaaaaaaatttgtct

SEQ ID NO: 36097 - DNA, 110 bp, synthetic construct
  source 1..110: mol_type = other DNA
cggattcatttccactgtgccacgacgggaactccaaattcaatatataatcacactattataaaggcagctacactctttaaaaaaatttgtctaataaattaaaaata

SEQ ID NO: 36098 - DNA, 110 bp, synthetic construct
  source 1..110: mol_type = other DNA
aattaaaatgcagaaggcactgtgggtcacatatgtaactcagaaacctcattcacggactacgccttccatgtgagcttgcacaatgtgtctaggcaaaacgggtcctg

SEQ ID NO: 36099 - DNA, 110 bp, synthetic construct
  source 1..110: mol_type = other DNA
cggactacgccttccatgtgagcttgcacaatgtgtctaggcaaaacgggtcctggacccataaggcaagacaaagggcagggcgctagacttggctccgggtgcattta

SEQ ID NO: 36100 - DNA, 110 bp, synthetic construct
  source 1..110: mol_type = other DNA
aactcagaaagggcttagttctagcttggggtctctcacgtggttgtggtgaggttgggctgagtctgtagacaactgaaggctcacctgggctgggcatccaagatgac

SEQ ID NO: 36101 - DNA, 110 bp, synthetic construct
  source 1..110: mol_type = other DNA
aaggaaagagtaggtccgtctcaacactttctaggttgcccctttttgttgtccagccaccagtccaacgaggtaagcctaccacaagacccatgatgagaagagctgat

SEQ ID NO: 36102 - DNA, 110 bp, synthetic construct
  source 1..110: mol_type = other DNA
gccaccagtccaacgaggtaagcctaccacaagacccatgatgagaagagctgatcagagcagtgtgtcccagcatcctggggcaaggctctgagtctcacccagttgca

SEQ ID NO: 36103 - DNA, 110 bp, synthetic construct
  source 1..110: mol_type = other DNA
agatagcgaatccatcaccaagctccatttgggagcaaatgatgtgaagatgttctcaccacccagtcaccttgttaggagaggttgcagacaaccacctgcagcctaca

SEQ ID NO: 36104 - DNA, 110 bp, synthetic construct
  source 1..110: mol_type = other DNA
tcatggtgctcttgaggtgagagttttacagggaagcttcaatacaggaaacttggagctgcatcctacagagaccggtggataccaggtggaatacgtggccactgctc

SEQ ID NO: 36105 - DNA, 110 bp, synthetic construct
  source 1..110: mol_type = other DNA
gagctgcatcctacagagaccggtggataccaggtggaatacgtggccactgctctcaggaatgtttctcaaaacacggtactcttcttagtcatctctttaccctcatc

SEQ ID NO: 36106 - DNA, 110 bp, synthetic construct
  source 1..110: mol_type = other DNA
tcctatgttgctggcccaagcaacttggtgaataattgtgtccttctccgagaggggcgatctgagcatacttattgtcaaaatcaagaactctcttagctgtattgagt

SEQ ID NO: 36107 - DNA, 110 bp, synthetic construct
  source 1..110: mol_type = other DNA
ggcgatctgagcatacttattgtcaaaatcaagaactctcttagctgtattgagtttgagctgcatcttactcatccaaatagggctgctgagtaggtggtgagcctgga

SEQ ID NO: 36108 - DNA, 110 bp, synthetic construct
  source 1..110: mol_type = other DNA
gcaggtgagtgacttctttgaactgattggttaaccatgataatatcttaaaaaaaaaaaaaagaacctaaggaatggatgtcggacccactcaaacttgaattttaatc

SEQ ID NO: 36109 - DNA, 110 bp, synthetic construct
  source 1..110: mol_type = other DNA
aaaaaaaagaacctaaggaatggatgtcggacccactcaaacttgaattttaatctggcttttctccttcctttctttagtttattcgtgaatttgttactttttctaca

SEQ ID NO: 36110 - DNA, 110 bp, synthetic construct
  source 1..110: mol_type = other DNA
aatgctgagtcctgtggttgaaggcaggtgtctccatggagcaatcattgcagctcaactacaagctccaccttccacccagcccaggaatagaaaggggaagtgttgcc

SEQ ID NO: 36111 - DNA, 110 bp, synthetic construct
  source 1..110: mol_type = other DNA
caactacaagctccaccttccacccagcccaggaatagaaaggggaagtgttgccccttgggggcttacgggcattccgcagagactcccttccctctgccagcctggcc

SEQ ID NO: 36112 - DNA, 110 bp, synthetic construct
  source 1..110: mol_type = other DNA
aaccttccaggctgcctgctatggaagcaaatgacctaaatcccctttcctacccgctgagatttccacctgcccaaacccttcagctacctctgctgccaccccacacc

SEQ ID NO: 36113 - DNA, 110 bp, synthetic construct
  source 1..110: mol_type = other DNA
gctgagatttccacctgcccaaacccttcagctacctctgctgccaccccacaccagtcaaatccctgagaagcacacgctaaggtttttaaccaatgattctcttctca

SEQ ID NO: 36114 - DNA, 110 bp, synthetic construct
  source 1..110: mol_type = other DNA
cccatcagcacttgtcggtgtcacgtgacggaaagacaaacagatacgtaggacccttgagtttcacgctctcctctatcagaccacagctggagggtggattttactcc

SEQ ID NO: 36115 - DNA, 110 bp, synthetic construct
  source 1..110: mol_type = other DNA
cttgagtttcacgctctcctctatcagaccacagctggagggtggattttactccacaccgcctacatttaacgtgatcgctcataaagagagaagaatggggaaggggt

SEQ ID NO: 36116 - DNA, 110 bp, synthetic construct
  source 1..110: mol_type = other DNA
aattgaatagataaggaatgatgagtcttccctcatcaaagcaggaccttagagctcagccgctctcatgagctgggtctgcattctggttctgtcactgagacactggg

SEQ ID NO: 36117 - DNA, 110 bp, synthetic construct
  source 1..110: mol_type = other DNA
tcagccgctctcatgagctgggtctgcattctggttctgtcactgagacactgggtggcattggggatgtcacacaagcccccaaaggctcagctgccctgtctgtcaag

SEQ ID NO: 36118 - DNA, 110 bp, synthetic construct
  source 1..110: mol_type = other DNA
ctcagttccttcatctgtaataacatattaaaagtgcctcctccaaatgtaaattcacacaaccactatggaaaacagtatgcagacacctcagaaaactaaatattgaa

SEQ ID NO: 36119 - DNA, 110 bp, synthetic construct
  source 1..110: mol_type = other DNA
tgtaataacatattaaaagtgcctcctccaaatgtaaattcacacaaccactatggaaaacagtatgcagacacctcagaaaactaaatattgaactaccacatgaccca

SEQ ID NO: 36120 - DNA, 110 bp, synthetic construct
  source 1..110: mol_type = other DNA
gtttgtgctcaggctctccataaacggtgctgataaataatagctctaccaggcttggtcccatctctctaagcgctgagtcctctgtaatccagttaacaggaggaacg

SEQ ID NO: 36121 - DNA, 110 bp, synthetic construct
  source 1..110: mol_type = other DNA
aaaaccagaacccacggcatatctcaagtgggttcccaaatcttctgcactttttccaatgctttgaagctctgctggtggtaccttgcttcacctggtctttaaccgga

SEQ ID NO: 36122 - DNA, 110 bp, synthetic construct
  source 1..110: mol_type = other DNA
aaccccaattcagtctcccatctgtctctcagccccttgtccatacctttattgtaacaaggaccacaccacaccgcgggtcgtgactgccaccaacctccttctcacca

SEQ ID NO: 36123 - DNA, 110 bp, synthetic construct
  source 1..110: mol_type = other DNA
aacaaggaccacaccacaccgcgggtcgtgactgccaccaacctccttctcaccacttcccaactgttagcaccttaaaggcaggacctctgttctatttctacaagcca

SEQ ID NO: 36124 - DNA, 110 bp, synthetic construct
  source 1..110: mol_type = other DNA
gagggaaggaaagaaatgactacactttctttgactaaatgactaaacttgctcctctagcttgactgttttaggagagagccaaccacaaaggacccttcccctatgac

SEQ ID NO: 36125 - DNA, 110 bp, synthetic construct
  source 1..110: mol_type = other DNA
tctagcttgactgttttaggagagagccaaccacaaaggacccttcccctatgactcagttaaagcctgcctccactctgcctcgggattccttgtcggcattcctctat

SEQ ID NO: 36126 - DNA, 110 bp, synthetic construct
  source 1..110: mol_type = other DNA
tcttgaaatttcacaagatgtacaccctttagaaacttgactcttgtgccaggccccagggtctggaacaccagctccccacatggttttgagaagcctgtgggctccat

SEQ ID NO: 36127 - DNA, 110 bp, synthetic construct
  source 1..110: mol_type = other DNA
ccagggtctggaacaccagctccccacatggttttgagaagcctgtgggctccatttagtctgaatgatcttctgttcccttcggtctgccatccgtcttggacggaggg

SEQ ID NO: 36128 - DNA, 110 bp, synthetic construct
  source 1..110: mol_type = other DNA
tgctaacagcctttctttcagcacaaggccacatcctaggatgaccctacccccttaaagtggccacctgggaaaactcaaggatgtcaaaaaatgtattgtttgctcca

SEQ ID NO: 36129 - DNA, 110 bp, synthetic construct
  source 1..110: mol_type = other DNA
taaagtggccacctgggaaaactcaaggatgtcaaaaaatgtattgtttgctccaccagcacctgaagataggacccaagtctcccagcctcagaaggaagggaggagcc

SEQ ID NO: 36130 - DNA, 110 bp, synthetic construct
  source 1..110: mol_type = other DNA
ttaacactgcagtgctctggcacaatacctgctgtttggctttgtcagagtcccggaggcctgggaaaacaaggatgtctggaggaaacagcaaatgctgttctttcaga

SEQ ID NO: 36131 - DNA, 110 bp, synthetic construct
  source 1..110: mol_type = other DNA
gaggcctgggaaaacaaggatgtctggaggaaacagcaaatgctgttctttcagagctaaaatcttctattaacctttgctgctatatcctttatccttataaatgatct

SEQ ID NO: 36132 - DNA, 110 bp, synthetic construct
  source 1..110: mol_type = other DNA
ccgtgcaaaggggttctaccgggaggtcaggcagaatcgcctgcctctgcagaagtgcgagtaagcaaatgcctacctgccctttctgagccagagttgcttccagatct

SEQ ID NO: 36133 - DNA, 110 bp, synthetic construct
  source 1..110: mol_type = other DNA
tgcgagtaagcaaatgcctacctgccctttctgagccagagttgcttccagatcttcaattttggctttataccttagcacctctgcctggagctgttcttgagcctagg

SEQ ID NO: 36134 - DNA, 110 bp, synthetic construct
  source 1..110: mol_type = other DNA
ctaattgaaactcatcacagctctacaggatcccactatgtcaccgatgaagaaacaggtgtaaggacaaacccacttttccgttagtcctctacacacctaacaaagag

SEQ ID NO: 36135 - DNA, 110 bp, synthetic construct
  source 1..110: mol_type = other DNA
caggtgtaaggacaaacccacttttccgttagtcctctacacacctaacaaagagatgttgagtttttcagttctgcctattatttaggctctagggatgcagaagtcag

SEQ ID NO: 36136 - DNA, 110 bp, synthetic construct
  source 1..110: mol_type = other DNA
gacagcgtgctggagtgtttgtctctgaaacttattaagtccagtccaagaaaggcgtgatgccaggcactgcagatgaaaaagacgtgggtaactatcttcacccctct

SEQ ID NO: 36137 - DNA, 110 bp, synthetic construct
  source 1..110: mol_type = other DNA
cgtgatgccaggcactgcagatgaaaaagacgtgggtaactatcttcacccctctgagagcttaaatctagtaagaggacaaaataccacagctaaccagggaggcagaa

SEQ ID NO: 36138 - DNA, 110 bp, synthetic construct
  source 1..110: mol_type = other DNA
aaatcaccccccacaaactcaattcaaaataaagaggcagcctatgaattcacctcctgtgctatgatacagcttgtcctacttggtcacaatgaaactaagggacaata

SEQ ID NO: 36139 - DNA, 110 bp, synthetic construct
  source 1..110: mol_type = other DNA
ttgagaggcgtggtgtttttctccctccgccaaaaacaaggagattttgcaaggaaagctttgacccctctggcatctgcctccttgcaggacatgccagcttaatgtgt

SEQ ID NO: 36140 - DNA, 110 bp, synthetic construct
  source 1..110: mol_type = other DNA
aagctttgacccctctggcatctgcctccttgcaggacatgccagcttaatgtgtccttggctctagctcctgttacaagctgaagggcctttcctgagaagtcagagac

SEQ ID NO: 36141 - DNA, 110 bp, synthetic construct
  source 1..110: mol_type = other DNA
ttggagtcggggtggggggctgtgtccagggggcctccctcgatcaccttttccccgggtcacaggctctagattgcctgttgtgacagagacagctcgcatttcagtga

SEQ ID NO: 36142 - DNA, 110 bp, synthetic construct
  source 1..110: mol_type = other DNA
cgggtcacaggctctagattgcctgttgtgacagagacagctcgcatttcagtgagaggggatctttctttccttcctgcctctgacttgacctcctccattttcttcgg

SEQ ID NO: 36143 - DNA, 110 bp, synthetic construct
  source 1..110: mol_type = other DNA
ggtgcctcctgcagagagctctttcctgccaaaagttgtttaaaacccccattcgtcagaatatcattctctttctaagtggttggggcaaaggtccatcttctggaact

SEQ ID NO: 36144 - DNA, 110 bp, synthetic construct
  source 1..110: mol_type = other DNA
tcaagctactgcaaataaagctttggtgacagaacaaataacctaaagactttcggtacagatcaggaaaaccacaaatctagtagcaccaaaggcagatggtttttctt

SEQ ID NO: 36145 - DNA, 110 bp, synthetic construct
  source 1..110: mol_type = other DNA
aaactgagacagcctcctttcgaacaggccacttggccaagggtgttcacctagtggttcccagcgaaggggatgcacgcctgtggtgagggggctcctgaggtcttgca

SEQ ID NO: 36146 - DNA, 110 bp, synthetic construct
  source 1..110: mol_type = other DNA
ggttcccagcgaaggggatgcacgcctgtggtgagggggctcctgaggtcttgcagctgccaagaaagctgtgtgcacatttgctattctgggtattattgacgataaag

SEQ ID NO: 36147 - DNA, 110 bp, synthetic construct
  source 1..110: mol_type = other DNA
atccactgtatggatgtagagcagtttttttatccattcgccaattgatgtatctttggattgtgtctgtttcttagtgattaagaacaaagttgctataaatattcttt

SEQ ID NO: 36148 - DNA, 110 bp, synthetic construct
  source 1..110: mol_type = other DNA
agagaaaatgaccccatccgtggtccagacgggaagatgtatggcaacttatgttccatgtgccaagccttctagtgagtatagagctttagaatgtcacggagaggagg

SEQ ID NO: 36149 - DNA, 110 bp, synthetic construct
  source 1..110: mol_type = other DNA
gtgtaaacatgttccttgaggaagattcctctatcagcagtgaaaaggagaaagagaaggaggagactaaaattcagaatgctgctggtggtagtaaaggattacaatac

SEQ ID NO: 36150 - DNA, 110 bp, synthetic construct
  source 1..110: mol_type = other DNA
gaaggaggagactaaaattcagaatgctgctggtggtagtaaaggattacaataccccaaggagaggtaacgaaagcaaggagccagcactggtgagtggatcagcgtgg

SEQ ID NO: 36151 - DNA, 110 bp, synthetic construct
  source 1..110: mol_type = other DNA
tctttaagagatggttcaatgtcctggtttatattcccagggtctagtgcaatacctcgcatggagcaatggcgtatgaaaagctacccaatgaaaggagccccttaaga

SEQ ID NO: 36152 - DNA, 110 bp, synthetic construct
  source 1..110: mol_type = other DNA
caatggttgtgattttggtgttttcatgagaggatatgagctcaagactttctattccaccaacttgtcctgatttggggggttgcttttagtttaaatgtttgctgcct

SEQ ID NO: 36153 - DNA, 110 bp, synthetic construct
  source 1..110: mol_type = other DNA
acaaattgcacttccacctctttgccctctcctgcctggaatgcctcttgtgccagcttctgccactctgcctaccctttcttgctcatacaaatttgtcattttagggc

SEQ ID NO: 36154 - DNA, 110 bp, synthetic construct
  source 1..110: mol_type = other DNA
gcttctgccactctgcctaccctttcttgctcatacaaatttgtcattttagggctgctgtttatttcaaggcttatttcagatactgagaggaactgaacaaaatacca

SEQ ID NO: 36155 - DNA, 110 bp, synthetic construct
  source 1..110: mol_type = other DNA
aatgcataaagaaagcattttcaataaagttagctttgcagacttcttacatttatgttcttttcaggtgacaagggagccacctttgatttagactcattgctaggctg

SEQ ID NO: 36156 - DNA, 110 bp, synthetic construct
  source 1..110: mol_type = other DNA
tctcggtgctgcttgggagccagagtcacccaaagccatggggactggccactactcagatatgccaggagcctgggtttgctggaacacctccacccctcactccagag

SEQ ID NO: 36157 - DNA, 110 bp, synthetic construct
  source 1..110: mol_type = other DNA
gaataaacatatgaaaaataacatttgctttaaaatgggaaattttggcgttcccatcgtggtggagtggaaacaaacccaatgaggaaccatgaggttgtgggtttgat

SEQ ID NO: 36158 - DNA, 110 bp, synthetic construct; identical to SEQ ID NO: 36157
  source 1..110: mol_type = other DNA

SEQ ID NO: 36159 - DNA, 110 bp, synthetic construct
  source 1..110: mol_type = other DNA
tagcctcgtcacagaagacacaggctagagcctgcagatacccaagaggaatgttgttaggaaaagcccgctgttccacagggtacgggagctgggaacagcacagcctc

SEQ ID NO: 36160 - DNA, 110 bp, synthetic construct
  source 1..110: mol_type = other DNA
gttaggaaaagcccgctgttccacagggtacgggagctgggaacagcacagcctctgtgggctgacctgcctgccttcacacccgctgccccctcggcgctcctagaccc

SEQ ID NO: 36161 - DNA, 110 bp, synthetic construct
  source 1..110: mol_type = other DNA
ctcttggaagtggtgatgcaacacgttctttcgcctctgactccaaagacgaccagagacacagggagctccagaaaacatctagggtcaagacacggaggcaattcaga

SEQ ID NO: 36162 - DNA, 110 bp, synthetic construct
  source 1..110: mol_type = other DNA
gagacacagggagctccagaaaacatctagggtcaagacacggaggcaattcagatcatttagataattctcccacttaaaccacggggctccccgaatccatggggcat

SEQ ID NO: 36163 - DNA, 110 bp, synthetic construct
  source 1..110: mol_type = other DNA
gccaacactccggaagtgcccgagggacgacggaagcggaagcggaagcggcgccgcggtgggggccgcgggaagaatctgtcgagtttctccctccctctccaccacta

SEQ ID NO: 36164 - DNA, 110 bp, synthetic construct
  source 1..110: mol_type = other DNA
aagcggcgccgcggtgggggccgcgggaagaatctgtcgagtttctccctccctctccaccactacaacaaaccgagggcgggcgtaggtgaggcggcggtcgggagggc

SEQ ID NO: 36165 - DNA, 110 bp, synthetic construct
  source 1..110: mol_type = other DNA
cgactcctcggcatagccagtgacttcccggcagcgttgctttccccgcgcgcactttgaggcggaaagttatctgacgttgtccaccagctgtttcctggtctcctgca

SEQ ID NO: 36166 - DNA, 110 bp, synthetic construct
  source 1..110: mol_type = other DNA
tttgaggcggaaagttatctgacgttgtccaccagctgtttcctggtctcctgcatattgaatagtctctgccctgcagtccacccctttctcccgtacgtgtactctgc

SEQ ID NO: 36167 - DNA, 110 bp, synthetic construct
  source 1..110: mol_type = other DNA
ccagctcagacgcgcgcacacacacacacactcggatccagctcacagcagccgcgcctcgcagatgctgcagccccggcgctgtgtcttccaaagagtcaggaggctgg

SEQ ID NO: 36168 - DNA, 110 bp, synthetic construct
  source 1..110: mol_type = other DNA
gcctcgcagatgctgcagccccggcgctgtgtcttccaaagagtcaggaggctggagttcctgcgctctgtcctcgtgccacggttctccgcgactgactccatggcact

SEQ ID NO: 36169 - DNA, 110 bp, synthetic construct
  source 1..110: mol_type = other DNA
acactcagtgagcccctttcactttcagctccaaggccatgctactaacgcagcaatgggatcattaagccctaagacaggaacctggattcgaatgccctttaagcctc

SEQ ID NO: 36170 - DNA, 110 bp, synthetic construct
  source 1..110: mol_type = other DNA
gtggagaaactggagcctctgcaccgctggtgaagctgctgcggaaagcggctcggcggtttctcaaaaagctaagcatcaaatgcagcagcaccactccaggagcgcac

SEQ ID NO: 36171 - DNA, 110 bp, synthetic construct
  source 1..110: mol_type = other DNA
gcggtttctcaaaaagctaagcatcaaatgcagcagcaccactccaggagcgcaccccgaacaatcaaagcaggaacacgaacagatacattcactgcaatgttcacagc

SEQ ID NO: 36172 - DNA, 110 bp, synthetic construct
  source 1..110: mol_type = other DNA
tcataagaggacccctggcctcactctcgattcctgcgtcttcagtttgattaccacagctgctaacagcgtgcccaccacacactagaacggcctgtcatcttgctgaa

SEQ ID NO: 36173 - DNA, 110 bp, synthetic construct
  source 1..110: mol_type = other DNA
ttctaactgaaacatgttaaaaattaatcagctacatatcaatgttctgacatgcattcctgctgggtttctccactgggctgatgctgattcaaaaggaaagaaaataa

SEQ ID NO: 36174 - DNA, 110 bp, synthetic construct
  source 1..110: mol_type = other DNA
attcctgctgggtttctccactgggctgatgctgattcaaaaggaaagaaaataaaaagccaacggggaacaaaagctggatgcgcagataacacacacttgttaatctc

SEQ ID NO: 36175 - DNA, 110 bp, synthetic construct
  source 1..110: mol_type = other DNA
ctgatcttggacttgtcagcctccggaactgcgagaaacaaccagctgctgtttaaaccacccagactgtggtattctgttatagcggcccaaactgtgacggaaatgtg

SEQ ID NO: 36176 - DNA, 110 bp, synthetic construct
  source 1..110: mol_type = other DNA
aactgttttgcggtcttatgggattctagcttttatagattttattgagctgcagaagattgatgaggtgtgtgcatgtgtgaaagggttttgcaaagcctaaaaagtca

SEQ ID NO: 36177 - DNA, 110 bp, synthetic construct
  source 1..110: mol_type = other DNA
aagattgatgaggtgtgtgcatgtgtgaaagggttttgcaaagcctaaaaagtcacaatgaaggaagaagaatccagtggactctactgttaatatttctgagcatgtat

SEQ ID NO: 36178 - DNA, 110 bp, synthetic construct; identical to SEQ ID NO: 36176
  source 1..110: mol_type = other DNA

SEQ ID NO: 36179 - DNA, 110 bp, synthetic construct; identical to SEQ ID NO: 36177
  source 1..110: mol_type = other DNA

SEQ ID NO: 36180 - DNA, 110 bp, synthetic construct
  source 1..110: mol_type = other DNA
ctgctttccaacagtttccaggagagcattacggtgaaaagaaggcactgtctgtacatgtaaacatggattttctgaggggccccaactcaggggagagactgcaaatg

SEQ ID NO: 36181 - DNA, 110 bp, synthetic construct
  source 1..110: mol_type = other DNA
acatgtaaacatggattttctgaggggccccaactcaggggagagactgcaaatgctgctgagagcagaggagccccgagtgtctcgccgagagagagtcctaactgaca

SEQ ID NO: 36182 - DNA, 110 bp, synthetic construct
  source 1..110: mol_type = other DNA
aggccagcagctacagctctgtgttgatccctagcctgggaaactccacatgcctccagtgtggcccccctcccaaaattaattaactaattaattaaatctttaatcat

SEQ ID NO: 36183 - DNA, 110 bp, synthetic construct; identical to SEQ ID NO: 36182
  source 1..110: mol_type = other DNA

SEQ ID NO: 36184 - DNA, 110 bp, synthetic construct
  source 1..110: mol_type = other DNA
tctactgccggagtccagatttcaggatggccttccaggagcttctgtgcctgcacaggtcttccctgaaggcctatgggaacggctgctccagcaacagcaacggtagg

SEQ ID NO: 36185 - DNA, 110 bp, synthetic construct
  source 1..110: mol_type = other DNA
caggtcttccctgaaggcctatgggaacggctgctccagcaacagcaacggtaggactgactacacaggggaacagagtggctgttacctgggggaggagaaagacagcg

SEQ ID NO: 36186 - DNA, 110 bp, synthetic construct
  source 1..110: mol_type = other DNA
ttccctcagataatttgcaaaagtaaaactgctcctttgtatgatagttctatttttgtttttttgaggacgctccaaactgttttccatagtggttgcaccaatttcta

SEQ ID NO: 36187 - DNA, 110 bp, synthetic construct
  source 1..110: mol_type = other DNA
agttctatttttgtttttttgaggacgctccaaactgttttccatagtggttgcaccaatttctatttttctgccaacagtgcacacggtccccttttctccacatcctc

SEQ ID NO: 36188 - DNA, 110 bp, synthetic construct
  source 1..110: mol_type = other DNA
gtcacagacgcagctgggatcccgcgttaccgtggcttgtggcataggctggcagctgcagctttgtcttgactcctagcctggaaacctccatgtgccacagatgcagc

SEQ ID NO: 36189 - DNA, 110 bp, synthetic construct; identical to SEQ ID NO: 36188
  source 1..110: mol_type = other DNA

SEQ ID NO: 36190 - DNA, 110 bp, synthetic construct
  source 1..110: mol_type = other DNA
caagggactccagcagcctcccctccatctcccggtccctgagctgctgagccagggtcagccagtgctcatggtaggtgatgcatgcctcagggtttgggcacacagag

SEQ ID NO: 36191 - DNA, 110 bp, synthetic construct
  source 1..110: mol_type = other DNA
ggtcagccagtgctcatggtaggtgatgcatgcctcagggtttgggcacacagagctgtagaaatggcagagggatttggtgacctgaagctgacctgagtataaagcag

SEQ ID NO: 36192 - DNA, 110 bp, synthetic construct
  source 1..110: mol_type = other DNA
catgtttgctgtcactctggatggctgagtttacaacagcttccagaagggagtctcccacttcaatgctttaatgtcaaaaactcgccccatgtttaagaggagctctc

SEQ ID NO: 36193 - DNA, 110 bp, synthetic construct
  source 1..110: mol_type = other DNA
tcccacttcaatgctttaatgtcaaaaactcgccccatgtttaagaggagctctcataaaatgtgtatttttggattcaacgccaggagagtctgaggagggtcggggta

SEQ ID NO: 36194 - DNA, 110 bp, synthetic construct
  source 1..110: mol_type = other DNA
agggacgagagccaagtttgggggacgagggcctgggggttcatgcagtgggtgagccctgaggagagctccgtccacgccgtctgggaggcttttgctccacccactag

SEQ ID NO: 36195 - DNA, 110 bp, synthetic construct
  source 1..110: mol_type = other DNA
gccctgaggagagctccgtccacgccgtctgggaggcttttgctccacccactagttaatgtcctctctggggtcccttagcgagcgggtcacggaggcctctctaggga

SEQ ID NO: 36196 - DNA, 110 bp, synthetic construct
  source 1..110: mol_type = other DNA
attctacctttaaatccttaagacaaaatcaggccaaagcattctagactctcgcggtaggtagggatcttccagaccatctaataacccagccaaataccctgtgagct

SEQ ID NO: 36197 - DNA, 110 bp, synthetic construct
  source 1..110: mol_type = other DNA
gatggcagcggtggtggtgatgaagccagttccggtgagggtttgtgtctgtgtgaagaactcgactgtgtggtgtcacatgttctccacaataacccataaaggagaca

SEQ ID NO: 36198 - DNA, 110 bp, synthetic construct
  source 1..110: mol_type = other DNA
caacagtgagcagcaagtggtgtgcccttatttcgggatctggatgcttgtgccgagtggccttggtgcgtgtcctggggctcagtctccacccctgtgaaatggaggga

SEQ ID NO: 36199 - DNA, 110 bp, synthetic construct
  source 1..110: mol_type = other DNA
tgtgtgggcttgaaaaggctgaaggagctcaactatgcaacgcctggtgcgtcgtgagggttcagtcaggggaattgtggtagtattaggcattatctttgttccaaggc

SEQ ID NO: 36200 - DNA, 110 bp, synthetic construct
  source 1..110: mol_type = other DNA
gagggttcagtcaggggaattgtggtagtattaggcattatctttgttccaaggcccacccctcaccctgtctgatgctggcatgtctgcacagagccttctacttgctt

SEQ ID NO: 36201 - DNA, 110 bp, synthetic construct
  source 1..110: mol_type = other DNA
ggggagacacctgctatgtccatggggaccatcatgctctgggaaattgcaggtcttctcagagcctttatcagctcatgggccctgggcatgaagaagagcaggacaga

SEQ ID NO: 36202 - DNA, 110 bp, synthetic construct
  source 1..110: mol_type = other DNA
ttctcagagcctttatcagctcatgggccctgggcatgaagaagagcaggacagagagtgcggggcttcctcaagtgattggacttattttgacagctggactgcagagg

SEQ ID NO: 36203 - DNA, 110 bp, synthetic construct
  source 1..110: mol_type = other DNA
tcaactcaggctgactcccgccctctccctacagtgaggcaatcagatgctgtttcctggttagttcaggtgtgtgactcccaaagacgaccgcgcggtcctccttccat

SEQ ID NO: 36204 - DNA, 110 bp, synthetic construct
  source 1..110: mol_type = other DNA
ccacgacaggaactcctgttttattctgaaaaagtagtttgagatgggaaaggagaacccagattgtcccttcatttgggtacttaaggggtaggttcaatagtgtaatg

SEQ ID NO: 36205 - DNA, 110 bp, synthetic construct
  source 1..110: mol_type = other DNA
aacccagattgtcccttcatttgggtacttaaggggtaggttcaatagtgtaatgaaatgtatcctgatccaagtattcagaaaagctgactattacttgtgactctacc

SEQ ID NO: 36206 - DNA, 110 bp, synthetic construct
  source 1..110: mol_type = other DNA
atggagcggggtcccttccacacggtcgggagtaaacatctaggctgggggtcctgttacggcttttagcagctgcttccccatgagcacttactgtatacttgttcaga

SEQ ID NO: 36207 - DNA, 110 bp, synthetic construct
  source 1..110: mol_type = other DNA
gttacggcttttagcagctgcttccccatgagcacttactgtatacttgttcagaacactttctgtatgtatctcatttaatccccacaataaccttacagagtaggtat

SEQ ID NO: 36208 - DNA, 110 bp, synthetic construct
  source 1..110: mol_type = other DNA
agcggtgcttttgacatgttccaccaagtggttccaatggggccaagcgcgacaggggccctgagctcaaaggaacgcttgtcctcggtactatttgtgcagtggacatg

SEQ ID NO: 36209 - DNA, 110 bp, synthetic construct
  source 1..110: mol_type = other DNA
gggccctgagctcaaaggaacgcttgtcctcggtactatttgtgcagtggacatgaacgagggtgtggactgtccctctgctgcggatggtggcttagtaaaggagtgac

SEQ ID NO: 36210 - DNA, 110 bp, synthetic construct
  source 1..110: mol_type = other DNA
gctgtggcgtgggcctcagctgcagctcagggacttccgtttgctgcacctgcggctgttaaggaagaacaaactatccccgttccgtgcacatttgttacttaaatgat

SEQ ID NO: 36211 - DNA, 110 bp, synthetic construct
  source 1..110: mol_type = other DNA
ctgttaaggaagaacaaactatccccgttccgtgcacatttgttacttaaatgatacagttcacacccagcaacatagtttatcggaggcgctgattgttagtatagaaa

SEQ ID NO: 36212 - DNA, 110 bp, synthetic construct
  source 1..110: mol_type = other DNA
gtggtccgttgggatgagggacggaggacagagctcctgcctctcgcccctgtctctgtcccttccttcgagcctggcaccagatgggcggctttaatcactggtgaccg

SEQ ID NO: 36213 - DNA, 110 bp, synthetic construct
  source 1..110: mol_type = other DNA
cttgcaaaacggagttaagacattcgacccaaattcagataaaagcctctttcctgtgtccacttgagctaataatgcacatgtatccatcatttatgaggccgagtaag

SEQ ID NO: 36214 - DNA, 110 bp, synthetic construct
  source 1..110: mol_type = other DNA
gtgtccacttgagctaataatgcacatgtatccatcatttatgaggccgagtaagtgggaacaattagggcaaaggcctgggtaaagcctgtttctcttcaatgtcacac

SEQ ID NO: 36215 - DNA, 110 bp, synthetic construct
  source 1..110: mol_type = other DNA
tgctcgcctctggttgtcaagacaacagagacaaggcccgctgcccccctgccatggggacaaggcagccacagggggctcccgccctggaagcctccaaaatgcagtag

SEQ ID NO: 36216 - DNA, 110 bp, synthetic construct
  source 1..110: mol_type = other DNA
ggggacaaggcagccacagggggctcccgccctggaagcctccaaaatgcagtaggaggaagtctgaagcacaccctccaaagggctgcggaggaagtgggagctcagcc

SEQ ID NO: 36217 - DNA, 110 bp, synthetic construct
  source 1..110: mol_type = other DNA
tggtgtgattggaatggaagtgcactcgtgacgggtaaagctcggagaagcagtggcgcgggatgcgcctggggctgaggcggcgaaggctgaggttccgaggccgtgcg

SEQ ID NO: 36218 - DNA, 110 bp, synthetic construct
  source 1..110: mol_type = other DNA
actgctccctcctcgcgggcactttgtccgtttccggcgtttgcccgggtggatgtcactcattttcctctgccgctcttgaacccgcaggcctctttaacgtggggaac

SEQ ID NO: 36219 - DNA, 110 bp, synthetic construct
  source 1..110: mol_type = other DNA
cctccctggcgggttgttgttgcccagctgggcagaggaaaggctgcggaaagggggcagcctgcacaggcgtgaggagcccgtgacacccacccgaggggacgcagtta

SEQ ID NO: 36220 - DNA, 110 bp, synthetic construct
  source 1..110: mol_type = other DNA
ggcagcctgcacaggcgtgaggagcccgtgacacccacccgaggggacgcagttatcataaggagccatgtagccggagggctggatgtcggcgtacttgacgtcccccc

SEQ ID NO: 36221 - DNA, 110 bp, synthetic construct
  source 1..110: mol_type = other DNA
gagaggcttggggggatgggggggacaggaggcgccatatccatcgacctccacgtctcgtccctttctgaaggcctgaccctgctttatcctagcggacagcacctcgt

SEQ ID NO: 36222 - DNA, 110 bp, synthetic construct
  source 1..110: mol_type = other DNA
ctcaggtcagaacacgtctctaggcacagactcctggcctaaggacatcatttgcgaacagcttagagaggagttcctgtcgcggcctcagtggaaacgaatccgactag

SEQ ID NO: 36223 - DNA, 110 bp, synthetic construct
  source 1..110: mol_type = other DNA
gtctctaggcacagactcctggcctaaggacatcatttgcgaacagcttagagaggagttcctgtcgcggcctcagtggaaacgaatccgactagtacccatgaggatgt

SEQ ID NO: 36224 - DNA, 110 bp, synthetic construct
  source 1..110: mol_type = other DNA
aaagcttgtcgacgcagctgcgtagctgtcctgcgagaggcagaaagcggaggcggtggtttctctgctttttggggccacacctatggcctaaggaggttcccaggcca

SEQ ID NO: 36225 - DNA, 110 bp, synthetic construct
  source 1..110: mol_type = other DNA
gccctgcaggggaccgagagccagagtgacaggtaggggcgggagacgcggccctttgctccgaaggcgggatggcgtttgcgaacaggcaggttttcttgacgcgggaa

SEQ ID NO: 36226 - DNA, 110 bp, synthetic construct
  source 1..110: mol_type = other DNA
ttgctccgaaggcgggatggcgtttgcgaacaggcaggttttcttgacgcgggaatgaaggtgacatcatggtggtggcgggtgtgatgtgatgaggactccagcaaaat

SEQ ID NO: 36227 - DNA, 110 bp, synthetic construct
  source 1..110: mol_type = other DNA
ttactgcgccccgtcggagctgggaatgagcagaaggagacggcagctctgacctgagagagccctgtgcacacgcatacatgccacacacacgcacacacacactccta

SEQ ID NO: 36228 - DNA, 110 bp, synthetic construct
  source 1..110: mol_type = other DNA
ttggcagggcaccggagaggggaagtcaggagcaaggctgcaactggtgtggatttgctttggagacgatgaaagggtggaattggatagaggtggtagttgcaccccac

SEQ ID NO: 36229 - DNA, 110 bp, synthetic construct
  source 1..110: mol_type = other DNA
tgctttggagacgatgaaagggtggaattggatagaggtggtagttgcaccccacggagtggccctgttcactccctgctaaaaggttaacgccgctgatgtggatttca

SEQ ID NO: 36230 - DNA, 110 bp, synthetic construct
  source 1..110: mol_type = other DNA
ccaaaccctctcaagcggtcctcagagggggctgctccggcctgtgtctgccgagggattttcagccccaaagcacgtctggctccatgatctcccttgatctcttagct

SEQ ID NO: 36231 - DNA, 110 bp, synthetic construct
  source 1..110: mol_type = other DNA
tgattctcccagtccaggagcagggtttagcttcgcattggtttgtttgtctttggttgccttcgtcggcatctgatgcttttcggaggacaggtctcttgcctccttag

SEQ ID NO: 36232 - DNA, 110 bp, synthetic construct
  source 1..110: mol_type = other DNA
gagtccagctagcttcgtttgcagctctcagtagttacctgtggccagtagctgctgctagacagcaaaaaggcatagaattaatcctagacttactccagagcttcttt

SEQ ID NO: 36233 - DNA, 110 bp, synthetic construct
  source 1..110: mol_type = other DNA
tgctagacagcaaaaaggcatagaattaatcctagacttactccagagcttctttcttctgttcatcccccagccgcccaggtcagagccttctctcctctgccgcttct

SEQ ID NO: 36234 - DNA, 110 bp, synthetic construct
  source 1..110: mol_type = other DNA
tgctcagcccgggcccccctctgcagcgcagatgtggctctgcggagtgccagctccggtgtctgaggacactccttggggttcagccatgtccctgcttcagaggacat

SEQ ID NO: 36235 - DNA, 110 bp, synthetic construct; identical to SEQ ID NO: 36234
  source 1..110: mol_type = other DNA

SEQ ID NO: 36236 - DNA, 110 bp, synthetic construct
  source 1..110: mol_type = other DNA
gcagggatggcgagctcccggcaggaaccctctttacaaggatcagactcggtttctgggaacaaagtcccgagtctgcagcttgctacccctcagaaccaggcgccgct

SEQ ID NO: 36237 - DNA, 110 bp, synthetic construct
  source 1..110: mol_type = other DNA
ctgggaacaaagtcccgagtctgcagcttgctacccctcagaaccaggcgccgctcacaggctgtgcacgctggcctgtccctgggcggacaggaggagcaaagccaggc

SEQ ID NO: 36238 - DNA, 110 bp, synthetic construct
  source 1..110: mol_type = other DNA
agcctgcctcagtttctcgcgggcaaaggggctggtcgggctctgctgagaattaacaaatgtccattaagcgtccgtaggcgcctgctctgcagaggctaaggagtctt

SEQ ID NO: 36239 - DNA, 110 bp, synthetic construct
  source 1..110: mol_type = other DNA
acaaatgtccattaagcgtccgtaggcgcctgctctgcagaggctaaggagtcttaagtaattacaaccccggatgatgagccgtcgtcgtcgtgtgtcgttgatcggat

SEQ ID NO: 36240 - DNA, 110 bp, synthetic construct
  source 1..110: mol_type = other DNA
tttccccccaatccacttaaactaaaaccgcacaaaaacacgggctgtgttggaaggcgcccgcgctggcgcccccccaccccctcccgtgtccagctggccctgtggcc

SEQ ID NO: 36241 - DNA, 110 bp, synthetic construct
  source 1..110: mol_type = other DNA
cgcgtgtccagctctgcccgcggccccccagggccctactgctgctgtgtcacaaatagcccgacctcagcaactcaaaacagtgccatcaaaacggacaaccctcttct

SEQ ID NO: 36242 - DNA, 110 bp, synthetic construct
  source 1..110: mol_type = other DNA
atagcccgacctcagcaactcaaaacagtgccatcaaaacggacaaccctcttctctcacggttctggaggtccagtgcaggtcaagtgcagaaagaacctgcaggccaa

SEQ ID NO: 36243 - DNA, 110 bp, synthetic construct
  source 1..110: mol_type = other DNA
tgcaggggctttgctcccaggcttctggccccagcactgggaggggacaaacttcccctgtttcaagccccccagcctgctgcgctttgtcacagtggccctgggacaca

SEQ ID NO: 36244 - DNA, 110 bp, synthetic construct
  source 1..110: mol_type = other DNA
ccctgtttcaagccccccagcctgctgcgctttgtcacagtggccctgggacacacagaatccccagctccccggcttcagcggcccacacggaggcccagaggcagacg

SEQ ID NO: 36245 - DNA, 110 bp, synthetic construct
  source 1..110: mol_type = other DNA
tgctgggcgctaactggaggggatgagacagaagatgccatgagtatggcaggaagaacctggctgctctgagcatggatgcagtgcaaatggcatcagccccaccgagg

SEQ ID NO: 36246 - DNA, 110 bp, synthetic construct
  source 1..110: mol_type = other DNA
gaacctggctgctctgagcatggatgcagtgcaaatggcatcagccccaccgaggaggctggcctggagaaaccagtgctgctgaggggtgtttggaggcccttgacaga

SEQ ID NO: 36247 - DNA, 110 bp, synthetic construct
  source 1..110: mol_type = other DNA
ctgccaccagcagaaaggcatggcttccatgcaaagcatgtgcgccagcttgtcccgtctccagggcaacttagtaagacccggggcaaatactgcctcccccaggaagg

SEQ ID NO: 36248 - DNA, 110 bp, synthetic construct
  source 1..110: mol_type = other DNA
cgtctccagggcaacttagtaagacccggggcaaatactgcctcccccaggaaggcctccttgatggccccaacaggaagagactgcctcctcccacctggcccacccta

SEQ ID NO: 36249 - DNA, 110 bp, synthetic construct
  source 1..110: mol_type = other DNA
cctgaaagtctgcagaggcaacctgtcaaggctcacagatggtctttccagaacgaagcatgcacaaccagtcattaccataatgtatcatgacagggtcaaactgaggg

SEQ ID NO: 36250 - DNA, 110 bp, synthetic construct
  source 1..110: mol_type = other DNA
aagcatgcacaaccagtcattaccataatgtatcatgacagggtcaaactgaggggaggcctacatcgcaaaatcaatacctccgcctgtctgcaggataaaatgctgat

SEQ ID NO: 36251 - DNA, 110 bp, synthetic construct
  source 1..110: mol_type = other DNA
ctggttcccagctgggcttgatcgttgctgagcctcggaggaactcccaggtctgtctttctaaccctgcagcgtggatgttgtggtgtcctcggtggcatctccacccg

SEQ ID NO: 36252 - DNA, 110 bp, synthetic construct
  source 1..110: mol_type = other DNA
ctccactcccagaaaacagcccaaaggccccggcttattctcaaacagccctggtgccttgggtgacctggggacagagtggaaaaggccgcccggtgcagccaggctgc

SEQ ID NO: 36253 - DNA, 110 bp, synthetic construct
  source 1..110: mol_type = other DNA
gccttgggtgacctggggacagagtggaaaaggccgcccggtgcagccaggctgcgagagcagggtgctggggagaagagggccggtgccattggacctgtgccacacgg

SEQ ID NO: 36254 - DNA, 110 bp, synthetic construct
  source 1..110: mol_type = other DNA
gaatagatgtattttatcacgccgagaaatgagccacatattaatattttattaagagataaaccaggactggttgccggacggtgtcaaaggcctttaagcaaacgtgg

SEQ ID NO: 36255 - DNA, 110 bp, synthetic construct
  source 1..110: mol_type = other DNA
gagataaaccaggactggttgccggacggtgtcaaaggcctttaagcaaacgtggggaagacgccctggaaggagctgtcctggaatcagcccagcagtcctgccccgtc

SEQ ID NO: 36256 - DNA, 110 bp, synthetic construct
  source 1..110: mol_type = other DNA
cacggtcaggaggcagacgctgaccgactacggcgtcccctgagagatgaccaggacagtggggctgtcacactgtcacccagccgcagagaaagtgggcttctagagac

SEQ ID NO: 36257 - DNA, 110 bp, synthetic construct; identical to SEQ ID NO: 36256
  source 1..110: mol_type = other DNA

SEQ ID NO: 36258 - DNA, 110 bp, synthetic construct
  source 1..110: mol_type = other DNA
cacacagagccctgcaggagccactgctcagggcagtcctgcgaagaagagctgacagcaaaagccaccaagtcagggcccgcgggagaggcaggcggctcctcccgagc

SEQ ID NO: 36259 - DNA, 110 bp, synthetic construct
  source 1..110: mol_type = other DNA
cagcaaaagccaccaagtcagggcccgcgggagaggcaggcggctcctcccgagccaggagatcccttcctgagacgctggagaacggagggggccgggctaggacccga

SEQ ID NO: 36260 - DNA, 110 bp, synthetic construct
  source 1..110: mol_type = other DNA
ggccgacaagcatcctgctctccctccctgaaaactgcctctgagagttcccggtgaggcacagtgggttaagaatcgactgcagcatcttgggttgctgcagaggtgtg

SEQ ID NO: 36261 - DNA, 110 bp, synthetic construct; identical to SEQ ID NO: 36260
  source 1..110: mol_type = other DNA

SEQ ID NO: 36262 - DNA, 110 bp, synthetic construct
  source 1..110: mol_type = other DNA
aacttcggtgcagtccagatggctctgtttactcactggaaaccacttttaaaggcattttataattgacgatgagatacatcatagagtatattaccccaaagtcatgg

SEQ ID NO: 36263 - DNA, 110 bp, synthetic construct
  source 1..110: mol_type = other DNA
cattttataattgacgatgagatacatcatagagtatattaccccaaagtcatgggtatttaaacagatctgggagttcccttcgtggctcagcggttaataaaaacccg

SEQ ID NO: 36264 - DNA, 110 bp, synthetic construct
  source 1..110: mol_type = other DNA
ttacaagtatacaatcattccacaagctgcaaactttttcttcaaatatgggtaccctaaagtgaatttcatcttactttttgcctaaaccacaaaatataacccatgat

SEQ ID NO: 36265 - DNA, 110 bp, synthetic construct
  source 1..110: mol_type = other DNA
acttgggacttcagcagcagcctgcgagtttaacgcctctgttacagtgctctacttttgtttacttgtttttacacactgtcctgcatcttgctttattcgttccacaa

SEQ ID NO: 36266 - DNA, 110 bp, synthetic construct
  source 1..110: mol_type = other DNA
acccagtaaaataatgaccataataagactttattttatcattaggtggctggccatcctatttaggacaatgggtttctcacaagacaaagttttgggggttcttttaa

SEQ ID NO: 36267 - DNA, 110 bp, synthetic construct
  source 1..110: mol_type = other DNA
atcctatttaggacaatgggtttctcacaagacaaagttttgggggttcttttaattgtttttattacctaattgtattacatttataggtgaacagcaatcatcacaac

SEQ ID NO: 36268 - DNA, 110 bp, synthetic construct
  source 1..110: mol_type = other DNA
catgggtgctgataaggctttattgcagccagtgccaagcaggggctgccagacctgacaccacccctcttgctggcatgggtgtgccagtggcggcccaaagacactgg

SEQ ID NO: 36269 - DNA, 110 bp, synthetic construct
  source 1..110: mol_type = other DNA
tgacaccacccctcttgctggcatgggtgtgccagtggcggcccaaagacactgggcagcagcctggccttccctcctgtggggactctgcagggctgacccgttggggt

SEQ ID NO: 36270 - DNA, 110 bp, synthetic construct
  source 1..110: mol_type = other DNA
ccccagcccccgtttgaattgttcttctctgaaggcgtccaggtcaccaaatggccggtcatttcctagtcctcgtggaacccggccatcagcagcatccgctggggtcc

SEQ ID NO: 36271 - DNA, 110 bp, synthetic construct
  source 1..110: mol_type = other DNA
cggtcatttcctagtcctcgtggaacccggccatcagcagcatccgctggggtccctcatcccacgacactgtcacagctcccaggacacccactgtcctgggcttcctc

SEQ ID NO: 36272 - DNA, 110 bp, synthetic construct
  source 1..110: mol_type = other DNA
caccaagccagcctcccctgggcgccgcagtctgcagttggcctggcctagtgcttcatcctcacttcagggattagaaaaccagcttcagaagaaggagacacgtgccc

SEQ ID NO: 36273 - DNA, 110 bp, synthetic construct
  source 1..110: mol_type = other DNA
tcatcctcacttcagggattagaaaaccagcttcagaagaaggagacacgtgcccacgtcacggccctctgggaactcagcccgtgtcctttgtcagggtgggtgcggcc

SEQ ID NO: 36274 - DNA, 110 bp, synthetic construct
  source 1..110: mol_type = other DNA
aattataataaaaaagtaaaaaaaaaaaaaagaagtaagaactgctattgtggccaccaaagcgacactcgcttctacccatttgcactgttctcctcatgtgaagcctg

SEQ ID NO: 36275 - DNA, 110 bp, synthetic construct
  source 1..110: mol_type = other DNA
accaaagcgacactcgcttctacccatttgcactgttctcctcatgtgaagcctgcaagctcagtgtagacacgcgtttctcagcggagggggcccttgaagacagaaac

SEQ ID NO: 36276 - DNA, 110 bp, synthetic construct
  source 1..110: mol_type = other DNA
ggtgacgtgggcggaggtttgtggaaactcttcctttttgctttctgaaagagagaagaaacgatgcaatgcaggttaagcctctggagcagctggaacgggcccaaccg

SEQ ID NO: 36277 - DNA, 110 bp, synthetic construct
  source 1..110: mol_type = other DNA
aagaaacgatgcaatgcaggttaagcctctggagcagctggaacgggcccaaccgcgaagcctcggtgtgtccctgaggggcgggggtggtggggagatgaactaagccc

SEQ ID NO: 36278 - DNA, 110 bp, synthetic construct
  source 1..110: mol_type = other DNA
tatgctgcacgtgcagcccttaaaaaaattttacctatgttcatctattctttcccccagttcaatgagcattcttactactaacgaactctgtggtagattatttttat

SEQ ID NO: 36279 - DNA, 110 bp, synthetic construct; identical to SEQ ID NO: 36278
  source 1..110: mol_type = other DNA

SEQ ID NO: 36280 - DNA, 110 bp, synthetic construct
  source 1..110: mol_type = other DNA
aagtgcatgggtctattttgggctcttcatcttgtttcgttgaactatgtgtctgttttggtgccggtaccatacttttgacggctgtagctttgtaatatagtctgagt

SEQ ID NO: 36281 - DNA, 110 bp, synthetic construct
  source 1..110: mol_type = other DNA
ttttggtgccggtaccatacttttgacggctgtagctttgtaatatagtctgagtcagagagcaggatacctccagccctgatggattgaaatggttttgggtattcagg

SEQ ID NO: 36282 - DNA, 110 bp, synthetic construct
  source 1..110: mol_type = other DNA
ctgccctggccgtgacccccgtgcgggacctacgttccttctccagaagaggatcctgagcaggatgagctgccaatgactgggagtcactcgtgctttgtgtcagcagc

SEQ ID NO: 36283 - DNA, 110 bp, synthetic construct
  source 1..110: mol_type = other DNA
ctgagcaggatgagctgccaatgactgggagtcactcgtgctttgtgtcagcagcttctcaggtttgcggtggggacagtagagggggcggcggctgaagaatccccacc

SEQ ID NO: 36284 - DNA, 110 bp, synthetic construct
  source 1..110: mol_type = other DNA
aacagttgcaaaaacacactcctggaagacagactgatcacgagctcagctgtgattaaaaaatgtgaacagcaactacgcgtgtacgtcttgggatggctgacgactta

SEQ ID NO: 36285 - DNA, 110 bp, synthetic construct
  source 1..110: mol_type = other DNA
cagactttctcacgccctcctccgtgtctctcaacctgacttgtgtattttccctgcttctgttgctctgttcagcattctcgatgcttccttccaatatttcttttacg

SEQ ID NO: 36286 - DNA, 110 bp, synthetic construct
  source 1..110: mol_type = other DNA
gcttctgttgctctgttcagcattctcgatgcttccttccaatatttcttttacgctatgaatactctcttttatggggtacaaactactgagtattttggttcttgtac

SEQ ID NO: 36287 - DNA, 110 bp, synthetic construct
  source 1..110: mol_type = other DNA
ggaaatcatgtgactcattctagcttaaatccatcaatactacctgtgcacctcagctgctagtgaaggctggcagcacagacctcctgacttgtgactgcttaagggca

SEQ ID NO: 36288 - DNA, 110 bp, synthetic construct
  source 1..110: mol_type = other DNA
gctgctagtgaaggctggcagcacagacctcctgacttgtgactgcttaagggcaaatgcctcagtaacacggcctgagcgctgtgctaagaacagggcatgcgaactgt

SEQ ID NO: 36289 - DNA, 110 bp, synthetic construct
  source 1..110: mol_type = other DNA
tgcattacgatcccacacaaataaaacacaccccagtgaaagagccatttactctctcgtgtgcggaacaccttaaatgacccttgacttttttttttttttttttttta

SEQ ID NO: 36290 - DNA, 110 bp, synthetic construct
  source 1..110: mol_type = other DNA
tccctggtttgagtccaacaggaaaacccctgatcctggctgctagagtgaggattgttggcccctgatgaaatgtcacttctttggacggcgcgtgtccaggtccccag

SEQ ID NO: 36291 - DNA, 110 bp, synthetic construct
  source 1..110: mol_type = other DNA
tgttggcccctgatgaaatgtcacttctttggacggcgcgtgtccaggtccccagcctgaaggggttgtccctgctctggtttcccagagtcccagctttccccatagcc

SEQ ID NO: 36292 - DNA, 110 bp, synthetic construct
  source 1..110: mol_type = other DNA
attgaatgtctagtaagcccctagcatctggcactgagttgcatccagggtggtgctggggtggctgggcaggggtttgcttgcccgctgcatttaggaatcactggtgt

SEQ ID NO: 36293 - DNA, 110 bp, synthetic construct
  source 1..110: mol_type = other DNA
ctggggtggctgggcaggggtttgcttgcccgctgcatttaggaatcactggtgtccgtggtagggttagtggttggttgccagaaacatgaagttgtcaccccagctgc

SEQ ID NO: 36294 - DNA, 110 bp, synthetic construct
  source 1..110: mol_type = other DNA
ttgaaatggcagatgggatgatggggctgtagacctggccatgaggtctctggagagctggaaccagtttcaggtctcttaagtcggagtcctgctgtggtgtgtgttcc

SEQ ID NO: 36295 - DNA, 110 bp, synthetic construct
  source 1..110: mol_type = other DNA
agctggaaccagtttcaggtctcttaagtcggagtcctgctgtggtgtgtgttccctcggctgcctgttcctagcttcacccgagagagccaaagaatgaccccacggaa

SEQ ID NO: 36296 - DNA, 110 bp, synthetic construct
  source 1..110: mol_type = other DNA
gtctctacatctctgtcagagccccgaggaggcgctcatttttcctgcttttattctccccaagtcacagccattgtcatcctgggttggcaagcagggtgggacagggg

SEQ ID NO: 36297 - DNA, 110 bp, synthetic construct
  source 1..110: mol_type = other DNA
ctccccaagtcacagccattgtcatcctgggttggcaagcagggtgggacaggggagggtccccccccaaccccccggccctcaggctccctggaagtgggagacacagc

SEQ ID NO: 36298 - DNA, 110 bp, synthetic construct
  source 1..110: mol_type = other DNA
ttaaagagggtctttcaacagagcaaagttttaaattatgaactgcagtgaaccaattttttcttctattaaatgtgctttcggtaaactttatttttgcctgcatctgt

SEQ ID NO: 36299 - DNA, 110 bp, synthetic construct
  source 1..110: mol_type = other DNA
ttatgaactgcagtgaaccaattttttcttctattaaatgtgctttcggtaaactttatttttgcctgcatctgtggcatatggaagttcctgggccagggatcgaaccc

SEQ ID NO: 36300 - DNA, 110 bp, synthetic construct
  source 1..110: mol_type = other DNA
agcgtccgcctctaataagatggccatccggatagtacctgccgaagggagctcttgtgagaattaatcaaatcatgcatacgcattagtcttgcatagacagtcaggat

SEQ ID NO: 36301 - DNA, 110 bp, synthetic construct
  source 1..110: mol_type = other DNA
tgtgagaattaatcaaatcatgcatacgcattagtcttgcatagacagtcaggattacataaagacgtgttcgtctttaaatgagcctggccgtccccactgtatgcagg

SEQ ID NO: 36302 - DNA, 110 bp, synthetic construct; identical to SEQ ID NO: 36300
  source 1..110: mol_type = other DNA

SEQ ID NO: 36303 - DNA, 110 bp, synthetic construct; identical to SEQ ID NO: 36301
  source 1..110: mol_type = other DNA

SEQ ID NO: 36304 - DNA, 110 bp, synthetic construct
  source 1..110: mol_type = other DNA
ctggttttttcatttccttgggaccgaggagtccgtcggccatctcccagaaggcgtgccttggaattttggttcggaggcgcatcctgaatacaagttctaagggcctg

SEQ ID NO: 36305 - DNA, 110 bp, synthetic construct
  source 1..110: mol_type = other DNA
gtgccttggaattttggttcggaggcgcatcctgaatacaagttctaagggcctgcctgtctgtttccccagctctgggatcaccgctctgtgaccagccattttgcagt

SEQ ID NO: 36306 - DNA, 110 bp, synthetic construct
  source 1..110: mol_type = other DNA
tgaaaaaaggaatggagttctggtgtattctacagtgtgaacgaagctcagaaactttatgctaagggagagatgccagacacgaaaagtcatgtgttgtatgtttctgt

SEQ ID NO: 36307 - DNA, 110 bp, synthetic construct
  source 1..110: mol_type = other DNA
tttatgctaagggagagatgccagacacgaaaagtcatgtgttgtatgtttctgtttatacagaatgtgcagagcagggaaatccgctgatggagagcagactggtgtta

SEQ ID NO: 36308 - DNA, 110 bp, synthetic construct
  source 1..110: mol_type = other DNA
gtaatcccaactcaggcaccagacattgaggaagaagttctagatagttccagtgtgcagccattttcctgcggtaccctgactgaattcctgaccctcagaacctgtga

SEQ ID NO: 36309 - DNA, 110 bp, synthetic construct
  source 1..110: mol_type = other DNA
tgcagccattttcctgcggtaccctgactgaattcctgaccctcagaacctgtgagcagagtaacgtgatttggggatgatgctagtgaagccagtctttggggaccatg

SEQ ID NO: 36310 - DNA, 110 bp, synthetic construct
  source 1..110: mol_type = other DNA
ctattaacagtgtaggagggttcccttttctctgcaccctctctggcatcttacttgtagactttttgatgatgttgtttcgatgggtgtgaggtggtacctcattgtga

SEQ ID NO: 36311 - DNA, 110 bp, synthetic construct; identical to SEQ ID NO: 36310
  source 1..110: mol_type = other DNA

SEQ ID NO: 36312 - DNA, 110 bp, synthetic construct
  source 1..110: mol_type = other DNA
aaataggaggaaagacttagaaactcactttatgaggttagtattaccttggtagcaaaaccagacaaagacaacaaaaaattagaactccgtagcccagtatctttcat

SEQ ID NO: 36313 - DNA, 110 bp, synthetic construct; identical to SEQ ID NO: 36312
  source 1..110: mol_type = other DNA

SEQ ID NO: 36314 - DNA, 110 bp, synthetic construct
  source 1..110: mol_type = other DNA
gttcctgggagaggagttgtcgtggactggtaaccagagtgacagctgacctaagctctgcaggaggagaaggggtggcgaggcgatgaggagtgagggcaggagtgttc

SEQ ID NO: 36315 - DNA, 110 bp, synthetic construct
  source 1..110: mol_type = other DNA
ctctgcaggaggagaaggggtggcgaggcgatgaggagtgagggcaggagtgttccaagcagagagatgaggaggtgaagaggccctgcacatggagggagcatggtctg

SEQ ID NO: 36316 - DNA, 110 bp, synthetic construct
  source 1..110: mol_type = other DNA
tgagagcacagaagaaaatgagaggcttgttcctggaagctgggggaagcaggttcttgtcacacggcagcagaaagcttagtgggattatgttctgcaggtttatggaa

SEQ ID NO: 36317 - DNA, 110 bp, synthetic construct
  source 1..110: mol_type = other DNA
cttgtcacacggcagcagaaagcttagtgggattatgttctgcaggtttatggaaagcagaacatctaggtgatgaagttgaatatcttgctgaggacgttgccttgtta

SEQ ID NO: 36318 - DNA, 110 bp, synthetic construct
  source 1..110: mol_type = other DNA
ccatctaaaggttacataggcgcctcactttgctggacagtgcaggaccatatgcgcaatggggcaagctgggccacgcaaaacaatcttaataaccagtggggaacatt

SEQ ID NO: 36319 - DNA, 110 bp, synthetic construct
  source 1..110: mol_type = other DNA
gcaatggggcaagctgggccacgcaaaacaatcttaataaccagtggggaacattccagtggtttcaggacctttaaagatttttgttaaagcactgaaaactctcttag

SEQ ID NO: 36320 - DNA, 110 bp, synthetic construct
  source 1..110: mol_type = other DNA
gggagaagaagaaagaattggctagaggtgccgggctggaggacaacaaaatggcagggcatcttgtgaacacctgcctaaccgatagaagcaaaccaggtgtggtgtgt

SEQ ID NO: 36321 - DNA, 110 bp, synthetic construct
  source 1..110: mol_type = other DNA
agggcatcttgtgaacacctgcctaaccgatagaagcaaaccaggtgtggtgtgtcccaacctctaaactagcaaaggaggccgctaaggtggggtcattcctcctcttc

SEQ ID NO: 36322 - DNA, 110 bp, synthetic construct
  source 1..110: mol_type = other DNA
aatcagtggacttaaaatgttcagttaaccatgttgtaaacaggtgctattttggctttgttgttccattagtagcacacacatagaatagatttagcatgattcttaag

SEQ ID NO: 36323 - DNA, 110 bp, synthetic construct
  source 1..110: mol_type = other DNA
ctttgttgttccattagtagcacacacatagaatagatttagcatgattcttaagggccctaggatttttgggaatgagcactggcttccactgggagtcaccagctgct

SEQ ID NO: 36324 - DNA, 110 bp, synthetic construct
  source 1..110: mol_type = other DNA
ctacttgtctgtttatccttccttgagattacctgagagctaaataaaactctacctgagggttttgggttttgttttttatggctgcaccactgacacatggaagttcc

SEQ ID NO: 36325 - DNA, 110 bp, synthetic construct
  source 1..110: mol_type = other DNA
tggagctgaagcttggctcagtgctggtagacagtggctggctggagagcatataccttatctgatggggcagctgctgctccgttgccgccagcagatgtgatgacaga

SEQ ID NO: 36326 - DNA, 110 bp, synthetic construct
  source 1..110: mol_type = other DNA
ccttatctgatggggcagctgctgctccgttgccgccagcagatgtgatgacagaactcccagtttttcagttgtaagcacaactctggatggtaacaagaactcttatt

SEQ ID NO: 36327 - DNA, 110 bp, synthetic construct
  source 1..110: mol_type = other DNA
catctgtctaaccagagtcacacagacatttggatcacagagtatttgcttgacagctgtatgaagctattctttatgaaaaaccttgtcctgctgtgtagcacaatacc

SEQ ID NO: 36328 - DNA, 110 bp, synthetic construct
  source 1..110: mol_type = other DNA
gctgtatgaagctattctttatgaaaaaccttgtcctgctgtgtagcacaatacccaacataattcgtacatggtataggcatgtgtggtgaactatgaattcgatgaaa

SEQ ID NO: 36329 - DNA, 110 bp, synthetic construct
  source 1..110: mol_type = other DNA
atcttcaaatttttgtgtccatctctttctcagccagtttcagtctggcttttttttttttttttcttcactgtttgcttgaggaaaaagccagctatggactcattcca

SEQ ID NO: 36330 - DNA, 110 bp, synthetic construct
  source 1..110: mol_type = other DNA
tttctcagccagtttcagtctggcttttttttttttttttcttcactgtttgcttgaggaaaaagccagctatggactcattccacttttgattattgctttgtttttaa

SEQ ID NO: 36331 - DNA, 110 bp, synthetic construct
  source 1..110: mol_type = other DNA
acctctccacctgcttttagcctgattctctgaggcctgtcccctaacccaggcgagcgatgaacctttgtcccggggaggggaaaaactctcctcttgccacccgcacc

SEQ ID NO: 36332 - DNA, 110 bp, synthetic construct
  source 1..110: mol_type = other DNA
ccctccagggagagtgcgtgcatacccgccctttagggaccctgcatcggggccagcctggccacacctcatctcacccctgaggcttggggaggaatagtggataccaa

SEQ ID NO: 36333 - DNA, 110 bp, synthetic construct
  source 1..110: mol_type = other DNA
gcctggccacacctcatctcacccctgaggcttggggaggaatagtggataccaacgtgaagttctcccgtccaaagaaggaggaaaggcaccccagggaggaaggggtg

SEQ ID NO: 36334 - DNA, 110 bp, synthetic construct
  source 1..110: mol_type = other DNA
actcactggatggaaatagctgagggccagacagtgttggtataagaaggaaagatggaagcctttgtttccaaagaagcatgagtcttgtcctggagtcacatgggttt

SEQ ID NO: 36335 - DNA, 110 bp, synthetic construct
  source 1..110: mol_type = other DNA
tggaagcctttgtttccaaagaagcatgagtcttgtcctggagtcacatgggttttgtgggctggcctttcttttaggtatgctctcctttcctagttgtttgtcagttc

SEQ ID NO: 36336 - DNA, 110 bp, synthetic construct
  source 1..110: mol_type = other DNA
tccttttagttttaaaagcaaccttgtggccacattgatttaatcagggttctatttgtttgtctctgtggatctaatgtgtaatcagaatcgctcactaggaaatggtt

SEQ ID NO: 36337 - DNA, 110 bp, synthetic construct
  source 1..110: mol_type = other DNA
ttgtttgtctctgtggatctaatgtgtaatcagaatcgctcactaggaaatggtttctttccattgctctcttttctggaagcaacgtgtgatgttggatttcccactca

SEQ ID NO: 36338 - DNA, 110 bp, synthetic construct
  source 1..110: mol_type = other DNA
ctagaggatttcagtttacaaaatcacagtatgaggagctcccctgacctactccccaatacaagggataacattatttaaggaaaaaacaacatttaaaggttatagaa

SEQ ID NO: 36339 - DNA, 110 bp, synthetic construct
  source 1..110: mol_type = other DNA
cctgaaatacacaggtacaacactttgctgaaactgtttagggcacctcctttctgccctgaggccctgcagtgaggtcctgtcacacatcggtccctctcttgttaatc

SEQ ID NO: 36340 - DNA, 110 bp, synthetic construct
  source 1..110: mol_type = other DNA
gccctgaggccctgcagtgaggtcctgtcacacatcggtccctctcttgttaatcattcattcgtttctcacagtctatgtcttgcctggggtctcccactctcctggct

SEQ ID NO: 36341 - DNA, 110 bp, synthetic construct
  source 1..110: mol_type = other DNA
cacccctgtggcatttggaattcctgggccagggataagatccaagctgcagtcacgacttaagccacagctgcagccatgccagatccttaacccagggtgccgggcca

SEQ ID NO: 36342 - DNA, 110 bp, synthetic construct
  source 1..110: mol_type = other DNA
gggccagggataagatccaagctgcagtcacgacttaagccacagctgcagccatgccagatccttaacccagggtgccgggccagggatcaaacctgcgacccagcgct

SEQ ID NO: 36343 - DNA, 110 bp, synthetic construct
  source 1..110: mol_type = other DNA
gtgtcctaaccaccagaccaccagagaaccccgctgttgtcttttattctgttcaaaacccagtgcctgattcctttgactcgctttgggccaaagcgctagtgctggaa

SEQ ID NO: 36344 - DNA, 110 bp, synthetic construct
  source 1..110: mol_type = other DNA
aaacccagtgcctgattcctttgactcgctttgggccaaagcgctagtgctggaaagagtgcttgcggctcacctgagaggcccgtggagaagtgtggccgggggccaag

SEQ ID NO: 36345 - DNA, 110 bp, synthetic construct
  source 1..110: mol_type = other DNA
catttcagaacccgtgacagtaatgcatgttcttgataaagagcaagacggcagttcctgcttaaagtccacggcgatgaggcgtaacaggagcacatcggccccgctgt

SEQ ID NO: 36346 - DNA, 110 bp, synthetic construct
  source 1..110: mol_type = other DNA
agacggcagttcctgcttaaagtccacggcgatgaggcgtaacaggagcacatcggccccgctgtcctgaaggaccgagccgtcgtgccccgctggcctgaaggaccgag

SEQ ID NO: 36347 - DNA, 110 bp, synthetic construct
  source 1..110: mol_type = other DNA
cacattcctatctttctcccagaggtagagctacagttgtgtggccctttctagtgcatattaaggcttttgttttttaggggccttagaggagacgggtatgggcagtt

SEQ ID NO: 36348 - DNA, 110 bp, synthetic construct
  source 1..110: mol_type = other DNA
gcatattaaggcttttgttttttaggggccttagaggagacgggtatgggcagttttgagggtggctgccatttccctctcccagctgctctgggtgtgtctggcagagc

SEQ ID NO: 36349 - DNA, 110 bp, synthetic construct
  source 1..110: mol_type = other DNA
cctctcagaaccgtcacatgggtggcacgaaggctttgttttgtattcacctgccttccagtctgggcgcatagccgtctaacgtgcccaccagcaggccctcccttctc

SEQ ID NO: 36350 - DNA, 110 bp, synthetic construct
  source 1..110: mol_type = other DNA
ttccagtctgggcgcatagccgtctaacgtgcccaccagcaggccctcccttctcgcgacacttgcgataatctctttgtaaggctctatcttaagagggaccttagctg

SEQ ID NO: 36351 - DNA, 110 bp, synthetic construct
  source 1..110: mol_type = other DNA
acccgtcattaaatccctgttctagaaatgtttgatcagtcttctttttccctaaacaaacaataggaatgggaactgtcagaggcttaattttgctattacatatattt

SEQ ID NO: 36352 - DNA, 110 bp, synthetic construct
  source 1..110: mol_type = other DNA
acaaacaataggaatgggaactgtcagaggcttaattttgctattacatatatttgacagaaaaggggcaaaaacgtgtcacgctttttccgcccttgtcgccagatccg

SEQ ID NO: 36353 - DNA, 110 bp, synthetic construct
  source 1..110: mol_type = other DNA
gtcacgtttcaaaaatcatcacattgactttttaatcaaagtaagcctgtgataagttttatgagaactggcttcgtggtgattctgtctttccatccagaaaataatat

SEQ ID NO: 36354 - DNA, 110 bp, synthetic construct
  source 1..110: mol_type = other DNA
gttttatgagaactggcttcgtggtgattctgtctttccatccagaaaataatatgcttctccattttttcagttgttttttttctattgcttcgtgaagtttgcaggct

SEQ ID NO: 36355 - DNA, 110 bp, synthetic construct
  source 1..110: mol_type = other DNA
tgccgggaagggagaaagctagtggaatgcttatgggctggtttcctttatcaaaagattctgctacatcccagccctgagacgggcttctcgtagtagttagtctctgc

SEQ ID NO: 36356 - DNA, 110 bp, synthetic construct
  source 1..110: mol_type = other DNA
agattctgctacatcccagccctgagacgggcttctcgtagtagttagtctctgcgaggcctggggggagactcctttaaaggggttttgcttattgattgtcaggatca

SEQ ID NO: 36357 - DNA, 110 bp, synthetic construct
  source 1..110: mol_type = other DNA
gcacagaactccccaggccccatgaacgtgtacgaacgtgtgcatgcaaaatatatggattcaaagcaaaaatgtaacgttctggcagagttaaaaattgttcactagtg

SEQ ID NO: 36358 - DNA, 110 bp, synthetic construct
  source 1..110: mol_type = other DNA
tggattcaaagcaaaaatgtaacgttctggcagagttaaaaattgttcactagtgatgtatcatcagtcatagaactctgaagagtcagtgtttgaattcgaaagaaaaa

SEQ ID NO: 36359 - DNA, 110 bp, synthetic construct
  source 1..110: mol_type = other DNA
gtccgcagtcaccgcgacaactgagctataaaatattcccatagataaccttgttgccaccattccctggtgcccccgtttggtcctcaaagctccgttccccccccccc

SEQ ID NO: 36360 - DNA, 110 bp, synthetic construct
  source 1..110: mol_type = other DNA
gccaccattccctggtgcccccgtttggtcctcaaagctccgttcccccccccccaccagcccctggtagcctctccctcctgctctctctctcgccttcagagcatcat

SEQ ID NO: 36361 - DNA, 110 bp, synthetic construct
  source 1..110: mol_type = other DNA
tcggggctgcggaggagggggaaggaggggacatggggcaggggggtgtcagcccagagccgctcagccaccaaccaatgggagtcccttactgtttagtaaacgccact

SEQ ID NO: 36362 - DNA, 110 bp, synthetic construct
  source 1..110: mol_type = other DNA
agagccgctcagccaccaaccaatgggagtcccttactgtttagtaaacgccacttgaaacctccaggagccacggcatattcttcccgcggggtcaccgaggcctctgc

SEQ ID NO: 36363 - DNA, 110 bp, synthetic construct
  source 1..110: mol_type = other DNA
gtcagaccccctaaggtcactgcgaggtctcagatccaaggccccttcggcctccacacccctaacttccatcaggtcctctagtgggagctggaaacactcagcatgga

SEQ ID NO: 36364 - DNA, 110 bp, synthetic construct
  source 1..110: mol_type = other DNA
acacccctaacttccatcaggtcctctagtgggagctggaaacactcagcatggaaattgaaggtcccaggcacctctgcttcccaccttccactgccatggtcagtcaa

SEQ ID NO: 36365 - DNA, 110 bp, synthetic construct
  source 1..110: mol_type = other DNA
ctgttctgggcacttcgtcgacctggcctccgacctcatgtccccttcacatctggcttctctcggcgggttttccaggttgatctgtgttgtcgcaggcaccagatttc

SEQ ID NO: 36366 - DNA, 110 bp, synthetic construct
  source 1..110: mol_type = other DNA
gcttctctcggcgggttttccaggttgatctgtgttgtcgcaggcaccagatttcatcctttctcagggggagtcagagtcccctgtggtgtgcggacgccacctctggt

SEQ ID NO: 36367 - DNA, 110 bp, synthetic construct
  source 1..110: mol_type = other DNA
caggtcactggggtggcacgggaattatttgaaaaaataagaagcagcccttggggaaggggcaaggccgccgtccagtggaagctttctgggtcagcagctagggacat

SEQ ID NO: 36368 - DNA, 110 bp, synthetic construct
  source 1..110: mol_type = other DNA
gaaggggcaaggccgccgtccagtggaagctttctgggtcagcagctagggacattcacatgcacctgcccagatctgtccgcgattcctgggcctgctgcgcctcgggc

SEQ ID NO: 36369 - DNA, 110 bp, synthetic construct
  source 1..110: mol_type = other DNA
tatgtactgctccatgcgcacttgggaagactgtctcttctgttgctcctgaatgcagtgttcagtagatatctttcaagtcatgttgatgtttggtgtttttcaagtct

SEQ ID NO: 36370 - DNA, 110 bp, synthetic construct
  source 1..110: mol_type = other DNA
cagtgttcagtagatatctttcaagtcatgttgatgtttggtgtttttcaagtcttatatattcttgatcttctttcttgatttctcctttccgttctgtgtgttgtgcc

SEQ ID NO: 36371 - DNA, 110 bp, synthetic construct
  source 1..110: mol_type = other DNA
tatgctgaaccatgatgggaactccccgctgtagctgtgattctacccccaaacctgagaacttccatatgttataggtgtggcctcaaaagaaaaaaaaaagaaatgga

SEQ ID NO: 36372 - DNA, 110 bp, synthetic construct; identical to SEQ ID NO: 36371
  source 1..110: mol_type = other DNA

SEQ ID NO: 36373 - DNA, 110 bp, synthetic construct
  source 1..110: mol_type = other DNA
ttagaaatggttaaaatgagaaattttatgttgcatctattttgccacaatgaaaaaggtaaaagcagtttcctgtgaggaggaggacttggggatgcgaggacggatgg

SEQ ID NO: 36374 - DNA, 110 bp, synthetic construct
  source 1..110: mol_type = other DNA
aaggtaaaagcagtttcctgtgaggaggaggacttggggatgcgaggacggatgggctttataagccttgtgatacggtttgatgtttaaaccacacgcacaatactttg

SEQ ID NO: 36375 - DNA, 110 bp, synthetic construct
  source 1..110: mol_type = other DNA
tatcatgacatcacacgaccacagatctctacagtagaggtgtagctgtaattgagaaaattgtgccttagaaaacagtccctccaggactattgaaggccatgtacacc

SEQ ID NO: 36376 - DNA, 110 bp, synthetic construct
  source 1..110: mol_type = other DNA
tcgcgactcgtatttcacttctcagggggccccagaaactgaatttgcaaagggtttgtttgccgggaggaactattgctgcggaagcccggagagctggcacgggtccc

SEQ ID NO: 36377 - DNA, 110 bp, synthetic construct
  source 1..110: mol_type = other DNA
ttgtttgccgggaggaactattgctgcggaagcccggagagctggcacgggtcccgagacctgcttttggccacttgagacatcagaattctagccagctgtgccttttt

SEQ ID NO: 36378 - DNA, 110 bp, synthetic construct
  source 1..110: mol_type = other DNA
atgccttaggcattgtgaatacggctgctgtgaacatagggggggtgcatgtatcttttgaatcatcgttttgtcctgggtcatatggtagttctggttttagatttctg

SEQ ID NO: 36379 - DNA, 110 bp, synthetic construct
  source 1..110: mol_type = other DNA
atagggggggtgcatgtatcttttgaatcatcgttttgtcctgggtcatatggtagttctggttttagatttctgaggagcctccatactgttttccatagtggttgcac

SEQ ID NO: 36380 - DNA, 110 bp, synthetic construct
  source 1..110: mol_type = other DNA
gagcaaggagcacagccctgctgagtccttgatcgcagactctggcctccagaaccgcgacccagtgcgttgccgtggttgacgtcgctttgttcgtggtgcttggttac

SEQ ID NO: 36381 - DNA, 110 bp, synthetic construct
  source 1..110: mol_type = other DNA
cgcgacccagtgcgttgccgtggttgacgtcgctttgttcgtggtgcttggttacaacggctgcagcaaactcacgcgctcctcctcctgcaggtgtgtctgaggaaaaa

SEQ ID NO: 36382 - DNA, 110 bp, synthetic construct
  source 1..110: mol_type = other DNA
ccactgagtgaagccaaggactgaacctgcaacctcatggttcctagttaaccactgcgccaccaggggaattccatgggtctgcaaataatcttatttgcagaaactgc

SEQ ID NO: 36383 - DNA, 110 bp, synthetic construct; identical to SEQ ID NO: 36382
  source 1..110: mol_type = other DNA

SEQ ID NO: 36384 - DNA, 110 bp, synthetic construct
  source 1..110: mol_type = other DNA
aacaccctttttaaaagtcttctttggctgccccgtggcacgtggagttcccaggcccgggatcagatccgagccacagatgcgacccaagctgcagctgtggaaacacc

SEQ ID NO: 36385 - DNA, 110 bp, synthetic construct
  source 1..110: mol_type = other DNA
agttcccaggcccgggatcagatccgagccacagatgcgacccaagctgcagctgtggaaacaccagatccttaaccctcggtgcctggctgggatcgaacctgcgtccc

SEQ ID NO: 36386 - DNA, 110 bp, synthetic construct
  source 1..110: mol_type = other DNA
tcatttggaggcatctgagtatctgaacgtctgagccctgtgtcagatgctccatcaccgacgctccagactttggacacctggtctcccctttcttcctgctgcacaat

SEQ ID NO: 36387 - DNA, 110 bp, synthetic construct
  source 1..110: mol_type = other DNA
cccactcatctctgctgcccttcacctggtgagtgttttcaacttggagatttggcttaaatttcatctccgcagagagagcatccccagctttcaggttaaactggcac

SEQ ID NO: 36388 - DNA, 110 bp, synthetic construct
  source 1..110: mol_type = other DNA
cttaaatttcatctccgcagagagagcatccccagctttcaggttaaactggcaccggtacttttctttcacagcacctatcaccatttgcagctgtttttagaatgact

SEQ ID NO: 36389 - DNA, 110 bp, synthetic construct
  source 1..110: mol_type = other DNA
cgggcaggcccttccgccaccgtcacagaaagcagagtacagcctgtttgtccaaatgggacagatgcgtccttgcagagggcgagaggagcctgctgagcggggccggc

SEQ ID NO: 36390 - DNA, 110 bp, synthetic construct
  source 1..110: mol_type = other DNA
atgggacagatgcgtccttgcagagggcgagaggagcctgctgagcggggccggctctgcgaaaccagatctgtttttctggacacatgacctgccttttcctcttctgc

SEQ ID NO: 36391 - DNA, 110 bp, synthetic construct
  source 1..110: mol_type = other DNA
tctttaggaagacggggcgggacacagaaccgtccatggcgggggcggtgggaggctgcagcccacggatcacccagcttccggaacatgttaagctctgattggcagcc

SEQ ID NO: 36392 - DNA, 110 bp, synthetic construct
  source 1..110: mol_type = other DNA
ctgcagcccacggatcacccagcttccggaacatgttaagctctgattggcagccttggcccatttccgtggtgggggtggatattcctactggagaatctcacactggc

SEQ ID NO: 36393 - DNA, 110 bp, synthetic construct
  source 1..110: mol_type = other DNA
tggattcatttccgctgcacaacaagagaactccggaaactttgctgacacatcagacctcagcacttcatatccattgggtagatatgatcagaacaaaacaaaacaaa

SEQ ID NO: 36394 - DNA, 110 bp, synthetic construct
  source 1..110: mol_type = other DNA
gacctcagcacttcatatccattgggtagatatgatcagaacaaaacaaaacaaaacaaaaaccagaaaacgtgtcggcgaggacgtggagaaactggagctcttgtgca

SEQ ID NO: 36395 - DNA, 110 bp, synthetic construct
  source 1..110: mol_type = other DNA
agggtgtgtgagtgatgccacgtctggcactgcaaacaaggaggaggtgagccgcagaggcacttaggtaagcaaaaggcaagctacagttggtcctccgtattctcagg

SEQ ID NO: 36396 - DNA, 110 bp, synthetic construct
  source 1..110: mol_type = other DNA
gctgtacaccgatgttaattttttatgtcgtatttttccaaacttaagaaaagaccactcgtcgctgccaggaaactcacctcgtggacctgtggctctggaacagacct

SEQ ID NO: 36397 - DNA, 110 bp, synthetic construct
  source 1..110: mol_type = other DNA
cactcgtcgctgccaggaaactcacctcgtggacctgtggctctggaacagaccttttgtgctttctggcgcgacggagcccgagtcggcttgaacttggagttggaaag

SEQ ID NO: 36398 - DNA, 110 bp, synthetic construct
  source 1..110: mol_type = other DNA
ctatcccaccaggtctcacaatcttctaggcatctgatgcttcccgaaatgattatgcctgtttattgcctgtgaaaccccacggggcagagacctgacctgtcccctgc

SEQ ID NO: 36399 - DNA, 110 bp, synthetic construct
  source 1..110: mol_type = other DNA
tgcctgtttattgcctgtgaaaccccacggggcagagacctgacctgtcccctgcgtctagaacagtgtctcacatgcaccagatacattttatttacacggaggacagc

SEQ ID NO: 36400 - DNA, 110 bp, synthetic construct
  source 1..110: mol_type = other DNA
aacatgtctgtgcacaggctggcagagggtccccggaaggcggccagctgcctcctcgccgtgtggcactctctgtgttgctttgtcctgaaaatcttccacgaggaata

SEQ ID NO: 36401 - DNA, 110 bp, synthetic construct
  source 1..110: mol_type = other DNA
tcgccgtgtggcactctctgtgttgctttgtcctgaaaatcttccacgaggaatatcggaaaaaaagagccccatgttaactttcctaaaatgtaccggtaacatgcgca

SEQ ID NO: 36402 - DNA, 110 bp, synthetic construct
  source 1..110: mol_type = other DNA
tccgcaggcaccttagatgcggacaaatcttggaaatagccagaaacgaaaaggggcgggctgcacgcacgattcccccttatggaaaaggtcaaaaataggccggacga

SEQ ID NO: 36403 - DNA, 110 bp, synthetic construct
  source 1..110: mol_type = other DNA
gcgggctgcacgcacgattcccccttatggaaaaggtcaaaaataggccggacgaatctaaggtaacagaagaaagaggctggggtggggtggacagtgaccaggaggtg

SEQ ID NO: 36404 - DNA, 110 bp, synthetic construct
  source 1..110: mol_type = other DNA
gggttggcctgggttcgagtcctggttctgctctttcctgggtgtgtgtcatgtttacaagccgtttcccctcgctgagcctcggttttcctgtttgtaaagtggagctg

SEQ ID NO: 36405 - DNA, 110 bp, synthetic construct
  source 1..110: mol_type = other DNA
tacaagccgtttcccctcgctgagcctcggttttcctgtttgtaaagtggagctgactgtacctcctctcctggggttgggtgagagtgtgtgtgcctcagttacccgtg

SEQ ID NO: 36406 - DNA, 110 bp, synthetic construct
  source 1..110: mol_type = other DNA
aaagaaagaaagaaagaaaagacactgttaataaatgaaacagcaaggcaaagactatgagaaaaaatatacacaatccatacatctgacgaaggacttgttccagcata

SEQ ID NO: 36407 - DNA, 110 bp, synthetic construct
  source 1..110: mol_type = other DNA
tatgagaaaaaatatacacaatccatacatctgacgaaggacttgttccagcatatacacaaagctcatgaggaaaaagacagacaataacgggcaaaagccttgctcag

SEQ ID NO: 36408 - DNA, 110 bp, synthetic construct
  source 1..110: mol_type = other DNA
agagagctggtccctgaccaccccgcagaaaatagcatcgcctcctcatcctctccttatcctgtgttttctcgggtttgattgcgggctcaaagaactccatagttctt

SEQ ID NO: 36409 - DNA, 110 bp, synthetic construct
  source 1..110: mol_type = other DNA
cttatcctgtgttttctcgggtttgattgcgggctcaaagaactccatagttctttgcatcatctgacctactgcatctttttttttctgtcctcccacgataaaccgta

SEQ ID NO: 36410 - DNA, 110 bp, synthetic construct
  source 1..110: mol_type = other DNA
gtaataccctcacctgaagggacccactggcaggttctggccccagaaccagcgtcagatttcagcatgccccaggagcccaaaggtcaaggttaaccctgggggaaaca

SEQ ID NO: 36411 - DNA, 110 bp, synthetic construct
  source 1..110: mol_type = other DNA
cagatttcagcatgccccaggagcccaaaggtcaaggttaaccctgggggaaacaatttatgttccaagagagacaaacattgctaatttccaccagcaggtacctagga

SEQ ID NO: 36412 - DNA, 110 bp, synthetic construct
  source 1..110: mol_type = other DNA
gcactggctgctaggacggcggagtcttcaggaagagggttttgctgctcccttatctctgtctcaacaagtaccagaccgattgtgttacgggcacccagagggtacca

SEQ ID NO: 36413 - DNA, 110 bp, synthetic construct
  source 1..110: mol_type = other DNA
tctctgtctcaacaagtaccagaccgattgtgttacgggcacccagagggtaccagcccttcacagggagaaacccagcctatctatcctctcgagagccaagtccgtca

SEQ ID NO: 36414 - DNA, 110 bp, synthetic construct
  source 1..110: mol_type = other DNA
cccaacctggcggggtttctaatgatgtgaaattctcaaggactaagtgctgtcacagggagtcattccactcagtcatgaagcccattcacagaaacttcccaggaaaa

SEQ ID NO: 36415 - DNA, 110 bp, synthetic construct
  source 1..110: mol_type = other DNA
cagggagtcattccactcagtcatgaagcccattcacagaaacttcccaggaaaacccatctctatgtctggcttctgcttagatggctaagagatgatgcccgagtttc

SEQ ID NO: 36416 - DNA, 110 bp, synthetic construct
  source 1..110: mol_type = other DNA
aaatccttgttgcttatctattttatgtaagggagcatcttcaacaagggtcttgaactcagacacccccctagaccctgcaaaactggcccacggttccagacctgtgc

SEQ ID NO: 36417 - DNA, 110 bp, synthetic construct
  source 1..110: mol_type = other DNA
ttcctggaagtgcggcctctaagtacctgctgactttggggaaatactaaccttgtagttatgccagttacttctctctttactaatggtaacatcaaatgatctcacgc

SEQ ID NO: 36418 - DNA, 110 bp, synthetic construct
  source 1..110: mol_type = other DNA
tagttatgccagttacttctctctttactaatggtaacatcaaatgatctcacgctgcagaaagatcacgctggagagcttgtttgctaaacttaacagaaaggagcaaa

SEQ ID NO: 36419 - DNA, 110 bp, synthetic construct
  source 1..110: mol_type = other DNA
agcagcccacgctattcccacggggactgccccctgcaccagctgactgccaagcttccaacttcatcacctgccatctctccagccttccctcagaaatacgccttaaa

SEQ ID NO: 36420 - DNA, 110 bp, synthetic construct
  source 1..110: mol_type = other DNA
tcttcttaagacaagcgtgtgaaggggggatgtcccagcccaagctttatcttaggaaactactcaagttatatacagcagcgatctcaagtgagtcactaggaaactta

SEQ ID NO: 36421 - DNA, 110 bp, synthetic construct
  source 1..110: mol_type = other DNA
gaaactactcaagttatatacagcagcgatctcaagtgagtcactaggaaacttactctattactggcactgattgatccagtcactagtccatttctaccatgtcagaa

SEQ ID NO: 36422 - DNA, 110 bp, synthetic construct
  source 1..110: mol_type = other DNA
tggtcaaaatatcaaagcaaaaccaaaagagctattgaagaaggcctcagagatctagaggacaggaccaaggaggaagaagtccaacaaaatacgttccacactgggta

SEQ ID NO: 36423 - DNA, 110 bp, synthetic construct
  source 1..110: mol_type = other DNA
aaaaaagaacgggctggaattgggtatttcccttcctccatgtggaaggctagagccagctggagttgttgtttctccctccacaggtcagccaggctctgataaaatcc

SEQ ID NO: 36424 - DNA, 110 bp, synthetic construct
  source 1..110: mol_type = other DNA
ccagctggagttgttgtttctccctccacaggtcagccaggctctgataaaatcctatcagattaggctctggttaatcagtttctcctgagggctgcccttgttaagaa

SEQ ID NO: 36425 - DNA, 110 bp, synthetic construct
  source 1..110: mol_type = other DNA
aaggaaaacagtgaaaccagacaacagaataataatttagtcattaaagaaagtcaacgacctttagctcctcctcaaagggctgtagataatattctgagccctatcct

SEQ ID NO: 36426 - DNA, 110 bp, synthetic construct; identical to SEQ ID NO: 36425
  source 1..110: mol_type = other DNA

SEQ ID NO: 36427 - DNA, 110 bp, synthetic construct
  source 1..110: mol_type = other DNA
tacctttatcatgcctgtgggggaaggggcggaactggggttggcgtgaagaaagaaggggatgtgcccggaaaccagtgctactgatgtcttcaactagcagtacagtc

SEQ ID NO: 36428 - DNA, 110 bp, synthetic construct
  source 1..110: mol_type = other DNA
aaggggatgtgcccggaaaccagtgctactgatgtcttcaactagcagtacagtcagctctgtgcccaggatgcctcctaaaacttgaaaggcccccaaattaaatcctt

SEQ ID NO: 36429 - DNA, 110 bp, synthetic construct
  source 1..110: mol_type = other DNA
ttgccacaccttgagacttctgtgcctcagtttcctcacccataaaatggggatgaactggaggctcatgcggactgaggaagttcatgtaagtaagtgcctggagcagt

SEQ ID NO: 36430 - DNA, 110 bp, synthetic construct
  source 1..110: mol_type = other DNA
aactggaggctcatgcggactgaggaagttcatgtaagtaagtgcctggagcagtgcctggcagagagaaaagccaggggtcaagttaagtgcacaggaagatgttcaag

SEQ ID NO: 36431 - DNA, 110 bp, synthetic construct
  source 1..110: mol_type = other DNA
ttagtcaagctacatcttgcagcttgtgccccattttgtggctaaagacatcagggctcagagggtttaaactaactcctccggggccaccaaggggccagctggagtca

SEQ ID NO: 36432 - DNA, 110 bp, synthetic construct
  source 1..110: mol_type = other DNA
gctcagagggtttaaactaactcctccggggccaccaaggggccagctggagtcagacctctccacctgactaattcccaacccagcagttaatgtaaaatcccaggggc

SEQ ID NO: 36433 - DNA, 110 bp, synthetic construct
  source 1..110: mol_type = other DNA
gccccaggcgcccgtacaggttcttctcggtcaagtgcacctgcagcatcatgaggacctgcaggacgctgaggtggagcttagagtacaagaggtgggagtctctgtcc

SEQ ID NO: 36434 - DNA, 110 bp, synthetic construct
  source 1..110: mol_type = other DNA
gacctgcaggacgctgaggtggagcttagagtacaagaggtgggagtctctgtccatccccgccgagtccttcgcgactttggcggggacgtggccgttggctaaggagg

SEQ ID NO: 36435 - DNA, 110 bp, synthetic construct
  source 1..110: mol_type = other DNA
ggagagcacctcatcttttattgtccttagtacttcaggaagcttgtgcctcccgttcccagccccctcttagtagcagctgtcacctctgctcttttgagtgccagtct

SEQ ID NO: 36436 - DNA, 110 bp, synthetic construct
  source 1..110: mol_type = other DNA
tgattgtgcttattgtcctcctggcacttatcatatgcaccatgtctgccatcgtgtgtgtcagcatgagaggtaaagagtcgtcttttctctttgacgcctattctttt

SEQ ID NO: 36437 - DNA, 110 bp, synthetic construct
  source 1..110: mol_type = other DNA
gtgtgtcagcatgagaggtaaagagtcgtcttttctctttgacgcctattctttttttaaccgcgttattgagataaaatccacatgtcattacaattcagcctttaaag

SEQ ID NO: 36438 - DNA, 110 bp, synthetic construct
  source 1..110: mol_type = other DNA
gtgtaatgtgaagataacgttgatagatgctgggaaagtaaacacattttgttctttactgcggtatttcctttactgagtcgtctgcagccagacccacttcatctcca

SEQ ID NO: 36439 - DNA, 110 bp, synthetic construct
  source 1..110: mol_type = other DNA
ttactgcggtatttcctttactgagtcgtctgcagccagacccacttcatctccaagctatgcctgtctgtgtgttggacacacgccctgcgtgcatccacctgccgtgc

SEQ ID NO: 36440 - DNA, 110 bp, synthetic construct
  source 1..110: mol_type = other DNA
ggcttagtcaaattgacacataaaatgaaccattgcatttactagtatgggtattgaggggacgtgttagtaccatagtcaataatactaaccatgacacgtaatagatg

SEQ ID NO: 36441 - DNA, 110 bp, synthetic construct
  source 1..110: mol_type = other DNA
ctcatggatactagttgggtttgtttccactgtaccacaacgggaactcccctgacctctttttttccattgtcaacccccaacaatcagctacaactggagaatgggta

SEQ ID NO: 36442 - DNA, 110 bp, synthetic construct
  source 1..110: mol_type = other DNA
cctctttttttccattgtcaacccccaacaatcagctacaactggagaatgggtaagaaaaggggctttggagtcagaccacctgggtttgggtctttcattcattggcc

SEQ ID NO: 36443 - DNA, 110 bp, synthetic construct
  source 1..110: mol_type = other DNA
tccgacctcaccttccctccgggactgtgagataaaaccacatgcattccaccccactgggctgctttgccctaaaatagcatgcccccccccccattaaacccctcgag

SEQ ID NO: 36444 - DNA, 110 bp, synthetic construct
  source 1..110: mol_type = other DNA
actgggctgctttgccctaaaatagcatgcccccccccccattaaacccctcgagcatcctgccctttagaagtgtgtgaacgggaagtcgtctgcccgcgactgcgctg

SEQ ID NO: 36445 - DNA, 110 bp, synthetic construct
  source 1..110: mol_type = other DNA
gggtttttgaaaaccccagttctactgcgggctgtttcatggacacaactacagtgtcatctaaagacggtcagaacttggccaaaagctgcccgccagaagcactaact

SEQ ID NO: 36446 - DNA, 110 bp, synthetic construct
  source 1..110: mol_type = other DNA
atgagaagcctccaaatcagcaaaaaatgacagtatacacattaaggggtattataagtaagggccacatcctaaaataagagtaagagcttctgtgtgtcatgtattga

SEQ ID NO: 36447 - DNA, 110 bp, synthetic construct
  source 1..110: mol_type = other DNA
aagtaagggccacatcctaaaataagagtaagagcttctgtgtgtcatgtattgagctatacacttttactcattttcatttaattttctattgaaccaaagtgctaagt

SEQ ID NO: 36448 - DNA, 110 bp, synthetic construct
  source 1..110: mol_type = other DNA
actttctgatgaagaatggctgtgaaatttcacctccgagggtcctggcagcactaataagagattcgcaagaacggaagagtcatagggatggacccagtcatttgctt

SEQ ID NO: 36449 - DNA, 110 bp, synthetic construct
  source 1..110: mol_type = other DNA
aataagagattcgcaagaacggaagagtcatagggatggacccagtcatttgcttgctgtttccaaatgactttcaggtgattgcagattgagaaggaattgaagagcca

SEQ ID NO: 36450 - DNA, 110 bp, synthetic construct
  source 1..110: mol_type = other DNA
tctgtgctgggctgggattgaacctgcacctttgcagcaacctgagtccctgcattcggattcttaacccactgtaccagagggggaacgcctacattattattattatt

SEQ ID NO: 36451 - DNA, 110 bp, synthetic construct
  source 1..110: mol_type = other DNA
tcggattcttaacccactgtaccagagggggaacgcctacattattattattatttgctttttttagggccacaaggcaccatatggaagttcccgggctaggggttgaa

SEQ ID NO: 36452 - DNA, 110 bp, synthetic construct
  source 1..110: mol_type = other DNA
aggggacggacgggagccaccaggggctctcggctcaggaagaggcggagctgaggcggcagctcactcccaccctgcacccctgcacagcggctcccagaaacaaaagg

SEQ ID NO: 36453 - DNA, 110 bp, synthetic construct
  source 1..110: mol_type = other DNA
gcggcagctcactcccaccctgcacccctgcacagcggctcccagaaacaaaaggtgactcccctgtcacatcagtacaacgcgtttggggggacacttccgcttgcccc

SEQ ID NO: 36454 - DNA, 110 bp, synthetic construct
  source 1..110: mol_type = other DNA
ctttgatgctgtgatttggtttccttagagtgtgaattgcaagacagtctagttactgagtggtactggagctagaagaatccctgactgtggacagagtttttcatgga

SEQ ID NO: 36455 - DNA, 110 bp, synthetic construct
  source 1..110: mol_type = other DNA
tagcgactcctggttggtcatggctccatatttacaggcattctcattttaacttaaggaaggctcagcactctggctatgacatgtgaaaaatgaggagaagacctagg

SEQ ID NO: 36456 - DNA, 110 bp, synthetic construct
  source 1..110: mol_type = other DNA
cgaagaacgtggccatcctcccgggcagaaccctgcccctcagaatcagtttagtctttgatacagacgacgtccttgtcacatgttgagtgacacataagctcgccaag

SEQ ID NO: 36457 - DNA, 110 bp, synthetic construct
  source 1..110: mol_type = other DNA
ctttgatacagacgacgtccttgtcacatgttgagtgacacataagctcgccaagatcaaagaacacggtcagctctggttaacctgagcaaccgcaaaggcatatattc

SEQ ID NO: 36458 - DNA, 110 bp, synthetic construct
  source 1..110: mol_type = other DNA
gttgtatgaccagactaagacaaaggggaaattgcagaagcgtttccaggggaaattaataaataaatgagggagaggatgtagggtttcccaattcctggggctttgga

SEQ ID NO: 36459 - DNA, 110 bp, synthetic construct
  source 1..110: mol_type = other DNA
ttaataaataaatgagggagaggatgtagggtttcccaattcctggggctttggaggccttccagctgattctatcgccacagcctgggccctttaagaatgtaccattt

SEQ ID NO: 36460 - DNA, 110 bp, synthetic construct
  source 1..110: mol_type = other DNA
tgctttgcagctttgttagatggaaccagagcagttgtgccccactctgagtacctcacttcatgctgcaggtgttacagttgccttctgtccgctgagatcattcccag

SEQ ID NO: 36461 - DNA, 110 bp, synthetic construct
  source 1..110: mol_type = other DNA
tcacttcatgctgcaggtgttacagttgccttctgtccgctgagatcattcccagctgtttatcggctcccacctgcttgtttcatggatttcctcccctgaccccgggc

SEQ ID NO: 36462 - DNA, 110 bp, synthetic construct
  source 1..110: mol_type = other DNA
gactggtacagcgtaagcgctttgcatcctccttggatgccaagtaacgtctggatcgcaagagtcaggcaggctctcaccaggctgggaaggggagtagaaagggattt

SEQ ID NO: 36463 - DNA, 110 bp, synthetic construct
  source 1..110: mol_type = other DNA
tcgcaagagtcaggcaggctctcaccaggctgggaaggggagtagaaagggatttgtggggacaggcaatgctgggagcagatacagagcaggagggggcagtgggtgtg

SEQ ID NO: 36464 - DNA, 110 bp, synthetic construct
  source 1..110: mol_type = other DNA
ttccggttttgccttttggcgtttgtgacaaccaggagccagtcccaataccttgttattaactagagtccgtatttgattcggatttccttcgtgttactagtccctgg

SEQ ID NO: 36465 - DNA, 110 bp, synthetic construct
  source 1..110: mol_type = other DNA
ttattaactagagtccgtatttgattcggatttccttcgtgttactagtccctggcgtcctctgtctgtttctagacccctcagtgtgtttagttgccctctctctttgg

SEQ ID NO: 36466 - DNA, 110 bp, synthetic construct
  source 1..110: mol_type = other DNA
gtttttactgatactaatatcgttatgccagctttcttttggttagaatttgtctggcttatctctggcagtcctcttctcttgtttctgctgcttagaaatagctgctg

SEQ ID NO: 36467 - DNA, 110 bp, synthetic construct
  source 1..110: mol_type = other DNA
ggcttatctctggcagtcctcttctcttgtttctgctgcttagaaatagctgctgcttagaaatctattgatctgtccgtcttggtcacttgacacggaacatgtagtcc

SEQ ID NO: 36468 - DNA, 110 bp, synthetic construct
  source 1..110: mol_type = other DNA
cagccatgaagatccaaccctttgtttctggtccatggaattttctagatggctttgctaattttaatgcaacaccaataagacaaacttttgtgtgtgatgctaaccca

SEQ ID NO: 36469 - DNA, 110 bp, synthetic construct
  source 1..110: mol_type = other DNA
aaacacgtaaacccagctgattgaaagaaaaatgtgtaaacctgactatgttcaattagaaaatgcgctgatttgctcgaggagagtacactgaagttcaggcaccctct

SEQ ID NO: 36470 - DNA, 110 bp, synthetic construct
  source 1..110: mol_type = other DNA
ttagaaaatgcgctgatttgctcgaggagagtacactgaagttcaggcaccctctggtgaagctttgcaccagtacagcacttatcaaacgtatacacttatcgttttgc

SEQ ID NO: 36471 - DNA, 110 bp, synthetic construct
  source 1..110: mol_type = other DNA
gaaagtgataagactctctggggagaagcctggttagcaggaggctcagctgtgggctgcccagagggtcaccttataaaacgctgcctcggagaggccgctcatgggag

SEQ ID NO: 36472 - DNA, 110 bp, synthetic construct
  source 1..110: mol_type = other DNA
gctgcccagagggtcaccttataaaacgctgcctcggagaggccgctcatgggagaaagagaaatgaccactgcaggccagagtgacttcctttgcagggactatgaagc

SEQ ID NO: 36473 - DNA, 110 bp, synthetic construct
  source 1..110: mol_type = other DNA
ttaagtgagctacacacacctgagtgaacctttcagtatgtgtggtcacgttcaagaagaagttttaggaataaatgaaaaacgtatttgcaaatgtcaacagatacgtt

SEQ ID NO: 36474 - DNA, 110 bp, synthetic construct
  source 1..110: mol_type = other DNA
gaagaagttttaggaataaatgaaaaacgtatttgcaaatgtcaacagatacgttaaatcagtgcatgggctgcttttcgaatcacttttacttctgagctgcagacccg

SEQ ID NO: 36475 - DNA, 110 bp, synthetic construct
  source 1..110: mol_type = other DNA
cgtttaaagaccaagagaggggatggggctttaagggttcttattctgaaaaagcaaatgtgaattgaaaactcagcttacccttctgtgacttccttccaatccaagca

SEQ ID NO: 36476 - DNA, 110 bp, synthetic construct
  source 1..110: mol_type = other DNA
aaatgtgaattgaaaactcagcttacccttctgtgacttccttccaatccaagcagcattcacttctccagcatgccaaattcatttctgctggacaggttttcactggc

SEQ ID NO: 36477 - DNA, 110 bp, synthetic construct
  source 1..110: mol_type = other DNA
taaacaactcttccgtgtctagatcgtatgcacaggccttaatgaatgtgggcttgtgacgggactgctgaataacccgttcacttatccatccatccagcatatgttgg

SEQ ID NO: 36478 - DNA, 110 bp, synthetic construct
  source 1..110: mol_type = other DNA
gtgacgggactgctgaataacccgttcacttatccatccatccagcatatgttgggcacccactgtatgccaggtaaggcaagctaaattgcagctcaggtagcatgctc

SEQ ID NO: 36479 - DNA, 110 bp, synthetic construct
  source 1..110: mol_type = other DNA
tcagaggacagctcattagagatggtcgatgcagcgctttctccaccaggactgtctattaaccggcagctctgcacatttatggtacaaatagtaactgatactcataa

SEQ ID NO: 36480 - DNA, 110 bp, synthetic construct
  source 1..110: mol_type = other DNA
ctattaaccggcagctctgcacatttatggtacaaatagtaactgatactcataattatggcccccaggcaacagaaactcccggcgagacattgtgtttattggagcca

SEQ ID NO: 36481 - DNA, 110 bp, synthetic construct
  source 1..110: mol_type = other DNA
attgatcgttccaacccaaatcaattattactaggtcagctatcaaatgatgaattttttttttttttttttggctgcaccaacagcatcatgcggaggttcccaggcta

SEQ ID NO: 36482 - DNA, 110 bp, synthetic construct
  source 1..110: mol_type = other DNA
tttttttttttttttttggctgcaccaacagcatcatgcggaggttcccaggctaggggtccaattagaactctacagcacagctcactgcaacactggacccttaaccc

SEQ ID NO: 36483 - DNA, 110 bp, synthetic construct
  source 1..110: mol_type = other DNA
gtgggtgactgagggccaaagtcctgctttagagtcttcttccttcaaccactcctgatcccagctgttgcctgggacacagactctgagactctgaaatgtgcaggcag

SEQ ID NO: 36484 - DNA, 110 bp, synthetic construct
  source 1..110: mol_type = other DNA
tgatcccagctgttgcctgggacacagactctgagactctgaaatgtgcaggcaggaaatttactggggagccctagagcccagcgcctgtgggagaaggacggatgaag

SEQ ID NO: 36485 - DNA, 110 bp, synthetic construct
  source 1..110: mol_type = other DNA
ccctctcacttgtgttgtttccagcaagggttctgatgtcatccttagcttcgttcctctatacctaatgtgttttttcctctgctacttcaatattttctctatatcac

SEQ ID NO: 36486 - DNA, 110 bp, synthetic construct
  source 1..110: mol_type = other DNA
cctctatacctaatgtgttttttcctctgctacttcaatattttctctatatcactggttttgggtaactcgataatgatggaccctggcgtagtctcttaatttcttat

SEQ ID NO: 36487 - DNA, 110 bp, synthetic construct
  source 1..110: mol_type = other DNA
gctaggaaaaccaggaggctgaagcagtgccctgggttccacggttcccccaaagctgcagggacagtggacagccatggtccctgagactgattccacagaggcatgag

SEQ ID NO: 36488 - DNA, 110 bp, synthetic construct
  source 1..110: mol_type = other DNA
ctgcagggacagtggacagccatggtccctgagactgattccacagaggcatgaggaaagagggccctggcccaaggaagcagccaggctgtgatgactgtcagagctga

SEQ ID NO: 36489 - DNA, 110 bp, synthetic construct
  source 1..110: mol_type = other DNA
tgccatgagagtgcgccatctcagaaggggatcctccagtcctgtcaagcctttagaaggtgacagaccccaccaagctctgcatctcctgtgagtccccgactacaacc

SEQ ID NO: 36490 - DNA, 110 bp, synthetic construct
  source 1..110: mol_type = other DNA
ggcaaccaacccaccaccccagaggagggtcactggctttggttttctaggccctggaagggcagccagaacccacaagctgaagaaactggggcaaagaccaaacgctc

SEQ ID NO: 36491 - DNA, 110 bp, synthetic construct
  source 1..110: mol_type = other DNA
ggaagggcagccagaacccacaagctgaagaaactggggcaaagaccaaacgctcactgcactggatcataagcttccttggtccccccgggcagcgtggagcccaagcg

SEQ ID NO: 36492 - DNA, 110 bp, synthetic construct
  source 1..110: mol_type = other DNA
cttctcatcgccgccaagcacatcctcaccaccgagctgcgaaaccgtacggctgccttccttgcctttgcacagggcctcgggcgtatttttccccttgatctgccttt

SEQ ID NO: 36493 - DNA, 110 bp, synthetic construct
  source 1..110: mol_type = other DNA
acgggaagggaaaaagcaagttatcaagctgatgtaagctttgtgtaaaatacttaaaaatatgtttatcatctttagttgctaacttgcatcagtaagattctggtatt

SEQ ID NO: 36494 - DNA, 110 bp, synthetic construct
  source 1..110: mol_type = other DNA
aaaaatatgtttatcatctttagttgctaacttgcatcagtaagattctggtattcctgtgtaagtagaaatgctttcaaggtgtacagctgaagggggtcttgagtcca

SEQ ID NO: 36495 - DNA, 110 bp, synthetic construct
  source 1..110: mol_type = other DNA
tcgtgagcctcctctccgcactgtccccacacatgggacaacgggaagggtgtccttaacattcacccacctcccctcctgccgccgcagtttttgtgtcgtggcgcaag

SEQ ID NO: 36496 - DNA, 110 bp, synthetic construct
  source 1..110: mol_type = other DNA
ttaacattcacccacctcccctcctgccgccgcagtttttgtgtcgtggcgcaagtatcctgatagagggaagcagatggtgtccctcgggacgtggcgcctgtcagcct

SEQ ID NO: 36497 - DNA, 110 bp, synthetic construct
  source 1..110: mol_type = other DNA
ttagggaaaggactacatccggttgtgggagacacaggtgtagacaaccccacactgagaacagtgatcttggagacctactatgttttaacagttccgaagctaagggc

SEQ ID NO: 36498 - DNA, 110 bp, synthetic construct
  source 1..110: mol_type = other DNA
tgagaacagtgatcttggagacctactatgttttaacagttccgaagctaagggcaggatccgtaagttcccaccgcctaggcttcacatggagagcactcgtctgtgat

SEQ ID NO: 36499 - DNA, 110 bp, synthetic construct
  source 1..110: mol_type = other DNA
atcccccctttcctttttataccgttaggtatctgtgccacaataacgctggcaccacttcccctccaacataacaacccttgacgtgactgcttcctgggaaggctgac

SEQ ID NO: 36500 - DNA, 110 bp, synthetic construct
  source 1..110: mol_type = other DNA
aaggaaaatgtcaggcaaactcaggtgcaggcattggtgaatacgggtgacggcttccctcttatcacagttccacttgctaaaacaagagttccgcctgccttacatag

SEQ ID NO: 36501 - DNA, 110 bp, synthetic construct
  source 1..110: mol_type = other DNA
tccctcttatcacagttccacttgctaaaacaagagttccgcctgccttacataggtcggggtctttgctggtacacacctactcaggcaacatcttcacaggtttctta

SEQ ID NO: 36502 - DNA, 110 bp, synthetic construct
  source 1..110: mol_type = other DNA
ggtttgtgtgagggagagatgctatataattattagctcctctgtctgctcagcgaatgtgataaagattttcaaggactgctatggcaaatccaggttcatcccttccc

SEQ ID NO: 36503 - DNA, 110 bp, synthetic construct
  source 1..110: mol_type = other DNA
tttcaagatgctgtccttccatcccaaggaccacctctctcccagggtgcatcccaccaccacctgcgagcttcggtccctatcctggcacctctccggccatcacccca

SEQ ID NO: 36504 - DNA, 110 bp, synthetic construct
  source 1..110: mol_type = other DNA
accaccacctgcgagcttcggtccctatcctggcacctctccggccatcaccccatttctatttttcaccttccatcttcaaaggaggcatccatagtcactgtctgcct

SEQ ID NO: 36505 - DNA, 110 bp, synthetic construct
  source 1..110: mol_type = other DNA
cacgagcagggctgggccttccaggtgtgggcacccggggtggggggcagggggtgaagggatacccttgaccttcccctgcagagcatcagactataggtcattcaagc

SEQ ID NO: 36506 - DNA, 110 bp, synthetic construct
  source 1..110: mol_type = other DNA
gaagggatacccttgaccttcccctgcagagcatcagactataggtcattcaagccttgatccgatccctctggtctgacttggacaccagatggaggaagattcaaatt

SEQ ID NO: 36507 - DNA, 110 bp, synthetic construct
  source 1..110: mol_type = other DNA
ggcctgagggaccagggcagcagtcccctcttaaatccaaacaccttgcttgaagccctgattgaaaaactcaggcaggcggggcagctccttggccccgacggcttccc

SEQ ID NO: 36508 - DNA, 110 bp, synthetic construct
  source 1..110: mol_type = other DNA
ccctgattgaaaaactcaggcaggcggggcagctccttggccccgacggcttccctctcgtgccctctcgtgcaagggtgacgggggacctctccctttccttctgaccc

SEQ ID NO: 36509 - DNA, 110 bp, synthetic construct
  source 1..110: mol_type = other DNA
cctccagttctcacaggggcggggggagcgggcaggtgcagcatctccggggaagctccaggctacgtgtgcatccaacacgcagggagcgcttcccacgtgccaggtat

SEQ ID NO: 36510 - DNA, 110 bp, synthetic construct
  source 1..110: mol_type = other DNA
ctccaggctacgtgtgcatccaacacgcagggagcgcttcccacgtgccaggtatggttccaggcttagggttacactgatggacagaaccccgccaacagcggggggtg

SEQ ID NO: 36511 - DNA, 110 bp, synthetic construct
  source 1..110: mol_type = other DNA
gtaattagacagccagagctgtgccagcctccacagacagtagcagagatactggcctcccctgatttcctggacagcagctgcagagttataattgggctgctacagac

SEQ ID NO: 36512 - DNA, 110 bp, synthetic construct
  source 1..110: mol_type = other DNA
cagcagttactttctatacacatacaaacgctgtctccactgcatacggcttacaagccgctgcccagacccttaaaccggtcagtgcaggtgatcacttcatgcttata

SEQ ID NO: 36513 - DNA, 110 bp, synthetic construct
  source 1..110: mol_type = other DNA
agccgctgcccagacccttaaaccggtcagtgcaggtgatcacttcatgcttatacacagacatctaccctcacacccgtggcctcttcctctgctgatggcactagctc

SEQ ID NO: 36514 - DNA, 110 bp, synthetic construct
  source 1..110: mol_type = other DNA
cggctcagttcctacgttgaactatcacatataaacagaaagtgaaggttaccggcatttcaggataaccactcatagaaaggccaatggcacaacagaatcagcagcat

SEQ ID NO: 36515 - DNA, 110 bp, synthetic construct
  source 1..110: mol_type = other DNA
aaaaaaaaaaaaaaaaaagtggggctcggtagcctctagggtcctcctcatattacacctcgcggtccctaggcgcccagagaaaaaaaacacacaaacaagccctcact

SEQ ID NO: 36516 - DNA, 110 bp, synthetic construct
  source 1..110: mol_type = other DNA
cacctcgcggtccctaggcgcccagagaaaaaaaacacacaaacaagccctcactagaaggaaagcaaatggggacccctggggagcacagaaacgagaactagggtcat

SEQ ID NO: 36517 - DNA, 110 bp, synthetic construct
  source 1..110: mol_type = other DNA
gcgttgtgagacggaggaggagccgatgaggaaaccgaaaccgagggccgttccttctccttgggagccttatgcacgggtctcagagaccgtgctcattcgcgaaagaa

SEQ ID NO: 36518 - DNA, 110 bp, synthetic construct
  source 1..110: mol_type = other DNA
tctccttgggagccttatgcacgggtctcagagaccgtgctcattcgcgaaagaaaggtttcatgacgttgacagaatggtatctgggagcgggtccaaagcctgccaca

SEQ ID NO: 36519 - DNA, 110 bp, synthetic construct
  source 1..110: mol_type = other DNA
cgagtgcggcaagagcttcagccgcaacgccaacctggccgtgcaccggcgcgcccacaccggcgagaagccctacggctgccaggtgtgcggaaagcgcttcagcaagg

SEQ ID NO: 36520 - DNA, 110 bp, synthetic construct; identical to SEQ ID NO: 36519
  source 1..110: mol_type = other DNA

SEQ ID NO: 36521 - DNA, 110 bp, synthetic construct
  source 1..110: mol_type = other DNA
ttatctggatgtgaggtcttcctgttgtctggggaataggaaactcgagcactagcttttcaagtgtttgttccctgaactgacataactgcctcagttcacaacccact

SEQ ID NO: 36522 - DNA, 110 bp, synthetic construct
  source 1..110: mol_type = other DNA
gtttaaagtttgttagaggatcttaaaaatgaagagggattcgggagagaataggtggaacagcttgagtgaaagtgagaggcgggaggtagtgtgggctgtgcggggac

SEQ ID NO: 36523 - DNA, 110 bp, synthetic construct
  source 1..110: mol_type = other DNA
tggaacagcttgagtgaaagtgagaggcgggaggtagtgtgggctgtgcggggacctgcaaatactccaggctgaggcaatgtgaggtctgataagggccattgggaata

SEQ ID NO: 36524 - DNA, 110 bp, synthetic construct
  source 1..110: mol_type = other DNA
tccagcctgaacctcttgggagcactccaagtcaaaacatctatcaagtgttcactctacaattcatgaagaattcggctgcgtttagctaatcatcattaccttctgcg

SEQ ID NO: 36525 - DNA, 110 bp, synthetic construct
  source 1..110: mol_type = other DNA
tctacaattcatgaagaattcggctgcgtttagctaatcatcattaccttctgcgggtctcatagtggtggtgggagaggaggtgatgagtgattgtaactactgctttg

SEQ ID NO: 36526 - DNA, 110 bp, synthetic construct
  source 1..110: mol_type = other DNA
ctgctgcttgactcttgattgagacctccaagtcaactggcaggagcgttttttgctgggggctcagagcagcagaccagaacggctcactgaaagagcccaggtcagag

SEQ ID NO: 36527 - DNA, 110 bp, synthetic construct
  source 1..110: mol_type = other DNA
ctgggggctcagagcagcagaccagaacggctcactgaaagagcccaggtcagagctgttaacactgagatgctggttcgaggggaagttcccttcgacccagaaccact

SEQ ID NO: 36528 - DNA, 110 bp, synthetic construct
  source 1..110: mol_type = other DNA
ggttccccaaaagcagagcctgagacaggggttctgactgaaagagtttcctgagagagggctcgcaggagaagggagggaagggggccaggtagggtgggatgaaaagc

SEQ ID NO: 36529 - DNA, 110 bp, synthetic construct
  source 1..110: mol_type = other DNA
agagggctcgcaggagaagggagggaagggggccaggtagggtgggatgaaaagctgggagaagatgtggcctctgtggagcctgagccagaattgtgatccagagtgga

SEQ ID NO: 36530 - DNA, 110 bp, synthetic construct
  source 1..110: mol_type = other DNA
tatggtttcatgttaattactttagagttactgtataattagtgccactgaatgtcttttacctgaaatgaatgtatctacccaagactaaatgtagcattttcttttga

SEQ ID NO: 36531 - DNA, 110 bp, synthetic construct
  source 1..110: mol_type = other DNA
caggaatgcctgggtcccgctttgaacgtttattatgtgccagtcactgtgctaggtgccttcaaaggtcaggtcatcgattgcaagtcctcccctgagcttctgaccaa

SEQ ID NO: 36532 - DNA, 110 bp, synthetic construct
  source 1..110: mol_type = other DNA
gtgccttcaaaggtcaggtcatcgattgcaagtcctcccctgagcttctgaccaaatccatcagtcttgtgtaggaggtggaagagcacgggccccgaatcagaccaggg

SEQ ID NO: 36533 - DNA, 110 bp, synthetic construct
  source 1..110: mol_type = other DNA
acgtgatacatttatgtgtaacattttaaggaacttccaaattgtaagagtgttggggagcagagtgcttgcgcagctccatgtgtcagatcaccccctgagaagaggtt

SEQ ID NO: 36534 - DNA, 110 bp, synthetic construct
  source 1..110: mol_type = other DNA
gggagcagagtgcttgcgcagctccatgtgtcagatcaccccctgagaagaggtttggaggaagaggttacaagatccgaggggatctttgatcctgaggggatgagtgc

SEQ ID NO: 36535 - DNA, 110 bp, synthetic construct
  source 1..110: mol_type = other DNA
cctgagacccaggggcccctcccacattctcatggaccacttccaggtagtaagaggggcaccagctatccgggcactggggagtttctgagatgtgggactttcagccc

SEQ ID NO: 36536 - DNA, 110 bp, synthetic construct
  source 1..110: mol_type = other DNA
ggggcaccagctatccgggcactggggagtttctgagatgtgggactttcagcccccaaaacccgaaaagtcccagtgcaaaccaggatgggtgagtcaccctagtcagc

SEQ ID NO: 36537 - DNA, 110 bp, synthetic construct
  source 1..110: mol_type = other DNA
cctcctccccaggccgagcagctcagcaacgagctggcaacagagcgtagcgcagcccagaagaacgagagcgctcggcagcagctggagaggcagaacaaggagctgcg

SEQ ID NO: 36538 - DNA, 110 bp, synthetic construct
  source 1..110: mol_type = other DNA
gtggtaatgaacctgattagtatccacgaggacgcaggtaaaatccctggtcttgctcagtgcgttaaggatcctgagttgtgagctatagtgcaggttgcggatacagc

SEQ ID NO: 36539 - DNA, 110 bp, synthetic construct
  source 1..110: mol_type = other DNA
aggtaaaatccctggtcttgctcagtgcgttaaggatcctgagttgtgagctatagtgcaggttgcggatacagcccagacccagtgtagctgtggctgtggtgtaggct

SEQ ID NO: 36540 - DNA, 110 bp, synthetic construct
  source 1..110: mol_type = other DNA
ggaggcgagctggcgggcgggcatggaggaggacccacagtcagtcctggatgttgactgaaacaaggcccggaaacggcgagagcagatggaaaattctcaaatcccac

SEQ ID NO: 36541 - DNA, 110 bp, synthetic construct
  source 1..110: mol_type = other DNA
gactgaaacaaggcccggaaacggcgagagcagatggaaaattctcaaatcccacgacagagactccacgagggcaacagcatctatcaaaggcagtgactcacccccag

SEQ ID NO: 36542 - DNA, 110 bp, synthetic construct
  source 1..110: mol_type = other DNA
tcttcggaatgaggtcacccagcacagtccacaccgatggggagctgggagcaggggttactcacacttccttgatagcagaagttttataaataagagttcccatcttg

SEQ ID NO: 36543 - DNA, 110 bp, synthetic construct
  source 1..110: mol_type = other DNA
ccagcaattgcaaacaaaagcaacaaagtgttacagctggtctggatccatttaacctgatttcaaacttccattcttggctgctatactatacatatcttttactgcaa

SEQ ID NO: 36544 - DNA, 110 bp, synthetic construct
  source 1..110: mol_type = other DNA
tcttcatggaatttctccaacatccatctgaagggaagggggtgctttgatttgaagctgggtgtgcccagtaaggtttttgcttagtgtggctacagatgaataaaaag

SEQ ID NO: 36545 - DNA, 110 bp, synthetic construct
  source 1..110: mol_type = other DNA
agctgggtgtgcccagtaaggtttttgcttagtgtggctacagatgaataaaaaggctatgctttattcaaatgttaaaatgattttcttaaaaaaattttttaacttgg

SEQ ID NO: 36546 - DNA, 110 bp, synthetic construct
  source 1..110: mol_type = other DNA
tgagtgagtttttgtgacaactgcctgtcgtcactgaagcctcccacgagatgcacttccagcctgtcaaagagaaagaggtggtcagaggctttagccctcggctcccg

SEQ ID NO: 36547 - DNA, 110 bp, synthetic construct
  source 1..110: mol_type = other DNA
tgccaagaaaagaacttcttcgattttttttaaattatgagaacattacacggcagtcaaacatcaaaacacagctacatgagtcagtacatgagtcagcaccacagcgg

SEQ ID NO: 36548 - DNA, 110 bp, synthetic construct
  source 1..110: mol_type = other DNA
gtcaaacatcaaaacacagctacatgagtcagtacatgagtcagcaccacagcgggaactcctactcttgctttttttttttttttgctatttcttgggccactctcacg

SEQ ID NO: 36549 - DNA, 110 bp, synthetic construct
  source 1..110: mol_type = other DNA
cctgtgttcatagattagaagacttaatattgctaagactgcgttattacccaaagtgatctccagagtcaatacaatcactgtctaaatctcaatggcatttttttcag

SEQ ID NO: 36550 - DNA, 110 bp, synthetic construct; identical to SEQ ID NO: 36549
  source 1..110: mol_type = other DNA

SEQ ID NO: 36551 - DNA, 110 bp, synthetic construct
  source 1..110: mol_type = other DNA
aagagcaatactgaagaacaagaaatggtgttgggaaaactggactcagctacacgtaaaagaatgaaattagaactttcactaccaccagacacacaaataaactcaaa

SEQ ID NO: 36552 - DNA, 110 bp, synthetic construct
  source 1..110: mol_type = other DNA
gaacaagaaatggtgttgggaaaactggactcagctacacgtaaaagaatgaaattagaactttcactaccaccagacacacaaataaactcaaagtggatgaaagacct

SEQ ID NO: 36553 - DNA, 110 bp, synthetic construct
  source 1..110: mol_type = other DNA
tcaacgaagtctcaggcaaaagagtaaagccagtcgctgtcacttcatttgagctggaagcggacgtccacacgtggttccgaagcagggacgggacctgagagctgagt

SEQ ID NO: 36554 - DNA, 110 bp, synthetic construct
  source 1..110: mol_type = other DNA
gcaatcctagcctgagtccccttgggccctgtcgtcctagacgccaatcagaagtgggaagcccgggagttcacactgtggcatcgcaggttaagaacccaactagtatc

SEQ ID NO: 36555 - DNA, 110 bp, synthetic construct
  source 1..110: mol_type = other DNA
gtccccttgggccctgtcgtcctagacgccaatcagaagtgggaagcccgggagttcacactgtggcatcgcaggttaagaacccaactagtatccatgaagatgcaggt

SEQ ID NO: 36556 - DNA, 110 bp, synthetic construct
  source 1..110: mol_type = other DNA
tcactgctgcaagcacaggttccatccctggtccaggaactttcaaataccgtgggcacagcctagatagataaatagatagataaccacctgaattcaggtacatttta

SEQ ID NO: 36557 - DNA, 110 bp, synthetic construct
  source 1..110: mol_type = other DNA
gcacagcctagatagataaatagatagataaccacctgaattcaggtacattttaggctttagaaaaatcctggggttcccattgtgtcacagtagaaacacatccaact

SEQ ID NO: 36558 - DNA, 110 bp, synthetic construct
  source 1..110: mol_type = other DNA
gcctcattcgacactatcgaatacacactggagagaagccgtatcagtgtaacgagtgtgggaagagctttagtcagcatgcgggtctgagctcccaccagagactccac

SEQ ID NO: 36559 - DNA, 110 bp, synthetic construct
  source 1..110: mol_type = other DNA
gtgtgggaagagctttagtcagcatgcgggtctgagctcccaccagagactccacacgggagagaagccatataaatgtacggagtgtgggaaagccttcaaccacagct

SEQ ID NO: 36560 - DNA, 110 bp, synthetic construct; identical to SEQ ID NO: 36558
  source 1..110: mol_type = other DNA

SEQ ID NO: 36561 - DNA, 110 bp, synthetic construct; identical to SEQ ID NO: 36559
  source 1..110: mol_type = other DNA

SEQ ID NO: 36562 - DNA, 110 bp, synthetic construct
  source 1..110: mol_type = other DNA
tgactcaggtgagttggagctcaaagaacaggcatggcttgatgagcaggaggcatcagggattaagctgcttttgctagaattgagggcgtccttggaaacggttgtac

SEQ ID NO: 36563 - DNA, 110 bp, synthetic construct
  source 1..110: mol_type = other DNA
tcagggattaagctgcttttgctagaattgagggcgtccttggaaacggttgtaccggtgagaaggcagaagctcacaaggaggccgaattcagctcaacctcatttcca

SEQ ID NO: 36564 - DNA, 110 bp, synthetic construct
  source 1..110: mol_type = other DNA
tcctccgggttgccagtcagattcattaaccgctgagccatgatgagaactccggaaagcaactgacttttatcttaaacatgtatcctgtaaccttgcgacaatcattg

SEQ ID NO: 36565 - DNA, 110 bp, synthetic construct
  source 1..110: mol_type = other DNA
gctggagcacttgggggcagggcggggccctgggggtggagggactgcgctgtcaggccaggaaaccctgaggtagatctgcacacagagaaaaaagaacccgtcagtgg

SEQ ID NO: 36566 - DNA, 110 bp, synthetic construct
  source 1..110: mol_type = other DNA
ggccaggaaaccctgaggtagatctgcacacagagaaaaaagaacccgtcagtggtttgtgtctctccatccttcttctgggaagaagttctcaattcaccaaacttatc

SEQ ID NO: 36567 - DNA, 110 bp, synthetic construct
  source 1..110: mol_type = other DNA
gggaacccctgtactattgggttttgatattcagtccctgtgacttcatagtcataataataactatatggtaaatagagtaataaattttccatccttttcataaaccc

SEQ ID NO: 36568 - DNA, 110 bp, synthetic construct
  source 1..110: mol_type = other DNA
aataataactatatggtaaatagagtaataaattttccatccttttcataaacccttctataggactcaggagactatcctctgacagctcccagcccatcctggaagaa

SEQ ID NO: 36569 - DNA, 110 bp, synthetic construct
  source 1..110: mol_type = other DNA
gagaaaaggaagtaggccaaccacttacaaagctagaaggaaggttaaaaacagtagtagttaattcatctatatccacaataagtagttagggaaaacccaaaacaaaa

SEQ ID NO: 36570 - DNA, 110 bp, synthetic construct
  source 1..110: mol_type = other DNA
aaattaaaaattgattaagttggtttgatttttataatcactcgtgctggcaagtttaaacagcatcacgctggattactgctcctggccaggagagaccctctccctgt

SEQ ID NO: 36571 - DNA, 110 bp, synthetic construct
  source 1..110: mol_type = other DNA
agtggcggagccaggatgggaccccagagccgccctctcaatgtccttctcccgggactcgggtgtcatcaccttcccaggttcccatactgacaggcctcccaccagaa

SEQ ID NO: 36572 - DNA, 110 bp, synthetic construct
  source 1..110: mol_type = other DNA
gactcgggtgtcatcaccttcccaggttcccatactgacaggcctcccaccagaaagcacaatgggctacagtgacatggaggaggatgggaagaagccaaaagaaagca

SEQ ID NO: 36573 - DNA, 110 bp, synthetic construct
  source 1..110: mol_type = other DNA
tgaacacccattcccactctaatgtcactaactgccggcgttaccaaactccttgaaccacagtttactgatttgggaagtggggtgatgccctagggacctaagggacg

SEQ ID NO: 36574 - DNA, 110 bp, synthetic construct
  source 1..110: mol_type = other DNA
aaccacagtttactgatttgggaagtggggtgatgccctagggacctaagggacggcctgcccttaggaccaaataagaggtcgatgcaaagcccgctggccatgaccta

SEQ ID NO: 36575 - DNA, 110 bp, synthetic construct
  source 1..110: mol_type = other DNA
gaaggacattcctgcttaagggaacagggtgagcgaaagagggatgtggcaagccaaagacaacacataatgaaagctgtgtgtgcccgccactcatgcacggcagggga

SEQ ID NO: 36576 - DNA, 110 bp, synthetic construct
  source 1..110: mol_type = other DNA
ctttgagggattcaggacttcattggaaggagtaactgcagatgtggtacaaacaataaaagaacttccactagaagtggagcctgatgatgtgactgaattgctacaat

SEQ ID NO: 36577 - DNA, 110 bp, synthetic construct; identical to SEQ ID NO: 36576
  source 1..110: mol_type = other DNA

SEQ ID NO: 36578 - DNA, 110 bp, synthetic construct
  source 1..110: mol_type = other DNA
tcctgaaggaataacagcagaggggctgagggggtccctcgagcctgctctagtgccctccctgcagcccgctggtggcggacacacacgtgaaagcaggcagccctcac

SEQ ID NO: 36579 - DNA, 110 bp, synthetic construct
  source 1..110: mol_type = other DNA
tctagtgttgctgcagctgtagcttaggtcctgaatgtggctaagctacattggcccaggaactccatgtgctgcagggcagccaaaaaaaaaaaaaaggaaagaaaagg

SEQ ID NO: 36580 - DNA, 110 bp, synthetic construct
  source 1..110: mol_type = other DNA
ccaggaactccatgtgctgcagggcagccaaaaaaaaaaaaaaggaaagaaaaggaaaaaatgagaggaagaatagaagaataacttgatgcctatagagattaacaaaa

SEQ ID NO: 36581 - DNA, 110 bp, synthetic construct
  source 1..110: mol_type = other DNA
ctccgacctgccccctaacctgggaacttccatatgctgtagctgaggtagcaaaaaggaaaaaaaaaaaattttttttaaataaaaggaaacatccagaataggcaaat

SEQ ID NO: 36582 - DNA, 110 bp, synthetic construct; identical to SEQ ID NO: 36581
  source 1..110: mol_type = other DNA

SEQ ID NO: 36583 - DNA, 110 bp, synthetic construct
  source 1..110: mol_type = other DNA
ctggacttgtttctgatggctctcgtcttctcagtgaattgggaagcagggtagtgagctgagagtgagactggtacaggaagcactgtagagaggggtgaaggtttaag

SEQ ID NO: 36584 - DNA, 110 bp, synthetic construct
  source 1..110: mol_type = other DNA
gagctgagagtgagactggtacaggaagcactgtagagaggggtgaaggtttaagagtcatctcagaccgtaggagagtgaatagaccagagatgaaatactctctgagc

SEQ ID NO: 36585 - DNA, 110 bp, synthetic construct
  source 1..110: mol_type = other DNA
tgccaggctcatgtcctagacagtcaaagcccagacaatcacatggcacgctctgtgccctccggctgctgggatgcggccaagaggagggtgggacatgcttcccaatt

SEQ ID NO: 36586 - DNA, 110 bp, synthetic construct
  source 1..110: mol_type = other DNA
aatgaaggggttctgctgtctactcgctctttgtctccctactttaagccctgggagaccttgtctgactcccgattggccctctgtaggcggagcagcggtgccaggcc

SEQ ID NO: 36587 - DNA, 110 bp, synthetic construct
  source 1..110: mol_type = other DNA
tcagccctaaaaagacatcaaagaaaatagagacagtggttgaaatgtacatttcctgtaatttcatattgtgacctgggactgggcacagccatgtggcctgagtggga

SEQ ID NO: 36588 - DNA, 110 bp, synthetic construct
  source 1..110: mol_type = other DNA
ctgtaatttcatattgtgacctgggactgggcacagccatgtggcctgagtgggaactcagagctggatgcctggagaaggtccctgtgggacaccgaccaggtttgagt

SEQ ID NO: 36589 - DNA, 110 bp, synthetic construct
  source 1..110: mol_type = other DNA
agtatctacttcataaggttgttccaggcttcagtgaattcatattaataaagcacttagaaaaatatgtagtaagcattttattcgtgcttgtgctgcgtagcatgcta

SEQ ID NO: 36590 - DNA, 110 bp, synthetic construct
  source 1..110: mol_type = other DNA
cttagaaaaatatgtagtaagcattttattcgtgcttgtgctgcgtagcatgctaaccacgcacagattgccaagaaggaggggtttcacaaacttatgaggccagggag

SEQ ID NO: 36591 - DNA, 110 bp, synthetic construct
  source 1..110: mol_type = other DNA
gaggaaaggggatatgggaccattttctatcagagatgactgtcttttccagagctttcagctgattcccctgaagtcccactgacgtgtgtttgtcctctcagccaggg

SEQ ID NO: 36592 - DNA, 110 bp, synthetic construct
  source 1..110: mol_type = other DNA
tttcagctgattcccctgaagtcccactgacgtgtgtttgtcctctcagccagggtttccccacctctaaaatgggagtgattggatgcttcttaggagattgttggagg

SEQ ID NO: 36593 - DNA, 110 bp, synthetic construct
  source 1..110: mol_type = other DNA
tcattgctccattgttacttattgttcaatgtttgtgaacacttgtttcctaagttttatccaattttatccaattttgtggcgggcaggcaagtttagtatgacttagt

SEQ ID NO: 36594 - DNA, 110 bp, synthetic construct
  source 1..110: mol_type = other DNA
ggtgcagctgaaaaagggtgaaaaaaaatgtcacaggctttgaccatgtccagccatggtccaggcactgtcttcacattgcattgagagttgcggcctcagccaaaggc

SEQ ID NO: 36595 - DNA, 110 bp, synthetic construct
  source 1..110: mol_type = other DNA
atggtccaggcactgtcttcacattgcattgagagttgcggcctcagccaaaggcatctagcccagcccatcatggccttctgggaagggcttacggattctgattctaa

SEQ ID NO: 36596 - DNA, 110 bp, synthetic construct
  source 1..110: mol_type = other DNA
gtggccatcgcttccattttcttggtgaggagattgaggctcagagaggttaaatagcttgcccagggtcacccagcagggaagcgatagagtttgtattctcaccttcc

SEQ ID NO: 36597 - DNA, 110 bp, synthetic construct
  source 1..110: mol_type = other DNA
ccccaccaagttttgtgcccaccctgatttatctgtttagaaagatgctctttattcccaggagctggaccatcctttcagccagatgagagcacatgaccacagaaaag

SEQ ID NO: 36598 - DNA, 110 bp, synthetic construct
  source 1..110: mol_type = other DNA
tcccaggagctggaccatcctttcagccagatgagagcacatgaccacagaaaagtcccatggctgaggcttttgggggaaaatgatgtttattgtgagaaataacagcg

SEQ ID NO: 36599 - DNA, 110 bp, synthetic construct
  source 1..110: mol_type = other DNA
ccccaacaagaaccccatacctgttagcagtcgccacccccccatcgtccccatggcccccaagctctatgtaaccctcagtccacttcctgtgtgagcttggatattcc

SEQ ID NO: 36600 - DNA, 110 bp, synthetic construct
  source 1..110: mol_type = other DNA
caatgagctgctctctttttttctttgcccattttcctgctctgagttttatggggcagtgtctgaaagacagtgctagaagagttttgtgtgttttgttttttgttttt

SEQ ID NO: 36601 - DNA, 110 bp, synthetic construct
  source 1..110: mol_type = other DNA
gcagtgtctgaaagacagtgctagaagagttttgtgtgttttgttttttgtttttacccccgcccccatctcctctttctctttttggagaaagacccggatggtagcag

SEQ ID NO: 36602 - DNA, 110 bp, synthetic construct
  source 1..110: mol_type = other DNA
ttttcccaccacgtgccctgctgtcacctgccaccttctccagagccatgcccttctctcatgtcatcgcaggaagactccccgcggagcctcaagccaccacctgagcg

SEQ ID NO: 36603 - DNA, 110 bp, synthetic construct
  source 1..110: mol_type = other DNA
ctctcatgtcatcgcaggaagactccccgcggagcctcaagccaccacctgagcgccagagagcgtgctccttttagctgctctttcgttgccatcaatcgggcggagga

SEQ ID NO: 36604 - DNA, 110 bp, synthetic construct
  source 1..110: mol_type = other DNA
ggcctcagagtgctgggaggtggggtgtgacatgcgggggacgttcggaggagggtacattctgatttcatgaccctctatctggcagaagccactgaactctttcccca

SEQ ID NO: 36605 - DNA, 110 bp, synthetic construct
  source 1..110: mol_type = other DNA
tacattctgatttcatgaccctctatctggcagaagccactgaactctttccccaagaccaccggaaagaaatggctttctggaaaggtcggacgctttccgagggtgac

SEQ ID NO: 36606 - DNA, 110 bp, synthetic construct
  source 1..110: mol_type = other DNA
acctgccgaatgccctcgaccacgtaacccggcgtgctcgcagacgctgggggttaggacacaggcgtctttgggggccgttagcgtgcccaccgcagatagccttgctt

SEQ ID NO: 36607 - DNA, 110 bp, synthetic construct
  source 1..110: mol_type = other DNA
aggacacaggcgtctttgggggccgttagcgtgcccaccgcagatagccttgcttatttaagaggagactggcgaagagtgtaattctttactgtcttgatctcggtgtg

SEQ ID NO: 36608 - DNA, 110 bp, synthetic construct
  source 1..110: mol_type = other DNA
tgctaatttcctgctgcaggaagcccccacctccctgtgctcggctgcataagacacagaaggacctccagagcccaggtcttgattgtctttcctcagaattggatctc

SEQ ID NO: 36609 - DNA, 110 bp, synthetic construct
  source 1..110: mol_type = other DNA
aaccactgcgccgtgatgggaactcccactttcagaaacttttaagtcgcccgccaggaagaggcaactagccagtcggacatcagcttccaggctccccttctcctggg

SEQ ID NO: 36610 - DNA, 110 bp, synthetic construct
  source 1..110: mol_type = other DNA
aggaagaggcaactagccagtcggacatcagcttccaggctccccttctcctgggaaccggaacaggcatcttccacttgccctgcctctttgggctgctcctcggccct

SEQ ID NO: 36611 - DNA, 110 bp, synthetic construct
  source 1..110: mol_type = other DNA
cgtggcttatcgtacaagagagtcagtctctgaaggttttttcccgtcaggagtagaatcgaatccagactgtcctctagtcgtgtcagctgctgtatttttgagaccaa

SEQ ID NO: 36612 - DNA, 110 bp, synthetic construct
  source 1..110: mol_type = other DNA
gaatcgaatccagactgtcctctagtcgtgtcagctgctgtatttttgagaccaatacactccggctgcacagcagggcacctcaggcgtattttcagctctagaatcca

SEQ ID NO: 36613 - DNA, 110 bp, synthetic construct
  source 1..110: mol_type = other DNA
gcccccgttgccgccacagctggacacacccaggatgtccccctctgcccctttgtccttctggccccacattatttcatgcggtttttaccaggcctgcctatctgctg

SEQ ID NO: 36614 - DNA, 110 bp, synthetic construct
  source 1..110: mol_type = other DNA
tccttctggccccacattatttcatgcggtttttaccaggcctgcctatctgctgacttgccactttgatgacagagttttcttgatgaatgagagttacctacccattc

SEQ ID NO: 36615 - DNA, 110 bp, synthetic construct
  source 1..110: mol_type = other DNA
ccaggaaagccgtttgcttcagccagtgatgctactggaaaagaaaggggtctttccttttgtttatttgcggggggagctgggttgtgtttctcagccctgaagccacg

SEQ ID NO: 36616 - DNA, 110 bp, synthetic construct
  source 1..110: mol_type = other DNA
tgagctgcagcaggacgcggtgcgctcagggcagaccacagagggcttgtctcacctcggccaccagcagctgtgtggcctcaggcaagtgacacaacctctctgtgtct

SEQ ID NO: 36617 - DNA, 110 bp, synthetic construct
  source 1..110: mol_type = other DNA
ctcggccaccagcagctgtgtggcctcaggcaagtgacacaacctctctgtgtctccgtttcttctttaaaacaggaaaaataaagtccctgtctcctagactgtaggga

SEQ ID NO: 36618 - DNA, 110 bp, synthetic construct
  source 1..110: mol_type = other DNA
ctctccctcgccgttgctggcagacatgccgcccttctactccgagtcaaataaatactgttcctcacctgccatcagtttcgagaagctctgaggagttttcaggccgt

SEQ ID NO: 36619 - DNA, 110 bp, synthetic construct
  source 1..110: mol_type = other DNA
tactgttcctcacctgccatcagtttcgagaagctctgaggagttttcaggccgttttccagactagttagttcactagaatgacctctgtgggggattcatctgctcaa

SEQ ID NO: 36620 - DNA, 110 bp, synthetic construct
  source 1..110: mol_type = other DNA
tggctgtgctctgtcccaggggagagcaggggtgagtcttcaactcctagaggaggtcatggcccagaccttctgggcagtgcggtgtgtgggagtagagcatcttgtgg

SEQ ID NO: 36621 - DNA, 110 bp, synthetic construct
  source 1..110: mol_type = other DNA
gtcatggcccagaccttctgggcagtgcggtgtgtgggagtagagcatcttgtggctcctggggtgaagcagggtttgggctccattctccagacccacctgaagggtgg

SEQ ID NO: 36622 - DNA, 110 bp, synthetic construct
  source 1..110: mol_type = other DNA
cccactggcggtgtgacgatatggggaggtccctccgtttcccaggaactccctcaacttccccatctgtgaaatggggatcagaacgcctctgtgccagggctgcctgg

SEQ ID NO: 36623 - DNA, 110 bp, synthetic construct
  source 1..110: mol_type = other DNA
aacttccccatctgtgaaatggggatcagaacgcctctgtgccagggctgcctggcatcctaagctgagggctgctctgacctctgggaggcggggaggggagagagggt

SEQ ID NO: 36624 - DNA, 110 bp, synthetic construct
  source 1..110: mol_type = other DNA
tggaatcacataataactttgtagtaatcagttctagaattgaaggagacaggctgcaacccacagagctgaggtttcttaaaccctcctcttctggcctctttgagaca

SEQ ID NO: 36625 - DNA, 110 bp, synthetic construct
  source 1..110: mol_type = other DNA
ctgcatcttcatcccgaggtaagaggggagcgcagcagaaatcgggagcttatgtggacagcctttcagccagcaggaggaatagacggtttctaagtagagcctttgct

SEQ ID NO: 36626 - DNA, 110 bp, synthetic construct
  source 1..110: mol_type = other DNA
ggacagcctttcagccagcaggaggaatagacggtttctaagtagagcctttgctcttttttttttttttttttttttgctatctcccaagtttctaaggctattttgtg

SEQ ID NO: 36627 - DNA, 110 bp, synthetic construct
  source 1..110: mol_type = other DNA
tgctgcgtctaacacacgcctcctcctcgatgcctcctaggccctgtgggctcatctagtcccataccctgcagctcatctgctcagtcagcacttattctaacaggaca

SEQ ID NO: 36628 - DNA, 110 bp, synthetic construct
  source 1..110: mol_type = other DNA
gagtttgatcgcttgccctgggacttctacatgctgttggcgtggccaaaaaagtttttttctttttcgttttggctgccccacagcatgtggagttccccggctaggga

SEQ ID NO: 36629 - DNA, 110 bp, synthetic construct
  source 1..110: mol_type = other DNA
ttttttctttttcgttttggctgccccacagcatgtggagttccccggctagggatctaatctgagctgcagtcgtgacccaagccgcagctgtggcgaggccagactct

SEQ ID NO: 36630 - DNA, 110 bp, synthetic construct
  source 1..110: mol_type = other DNA
gaagcagagagaaaactccgtggaaacatatcaaactgctaacaatggctgcccttgagtggagaaactataggagacctttggttcaacctccctatgtatctggactt

SEQ ID NO: 36631 - DNA, 110 bp, synthetic construct
  source 1..110: mol_type = other DNA
atatcacagccacacatgtgacggttatacaaagcgtgtgtgtggttgtcgttttattgtgtgggtagacgtctgtaaccttcgtggcaatcagaacagatacagagcag

SEQ ID NO: 36632 - DNA, 110 bp, synthetic construct
  source 1..110: mol_type = other DNA
attgtgtgggtagacgtctgtaaccttcgtggcaatcagaacagatacagagcagttctcccatcacagagctctctcttgggcaactgccttacacttgcctctcttgc

SEQ ID NO: 36633 - DNA, 110 bp, synthetic construct
  source 1..110: mol_type = other DNA
ttggggggggctgttcgcattctacagatggggaccaggactgcagggagctccgtggctacccaacctcacagtgagcgagtggcagagcgggggtcctgcctccaaac

SEQ ID NO: 36634 - DNA, 110 bp, synthetic construct
  source 1..110: mol_type = other DNA
tggctacccaacctcacagtgagcgagtggcagagcgggggtcctgcctccaaacagccccttctccaacctcctgctgcccttgaggaggcctggcaggggggtacttc

SEQ ID NO: 36635 - DNA, 110 bp, synthetic construct
  source 1..110: mol_type = other DNA
gttttttttccttggttgttgctcgtcccacctccgtcccccttccatagagctgcacggcctaacttctctgactgttaatgaccttagcagctgatgttttagcggca

SEQ ID NO: 36636 - DNA, 110 bp, synthetic construct
  source 1..110: mol_type = other DNA
ctgtgcacagtcccttcgtcaaatgctcagcaggtaaaccttcagaggtgctgttgacttcattccgggtcccagacccgtgcgccctctgtctcctgagaccagtctcc

SEQ ID NO: 36637 - DNA, 110 bp, synthetic construct
  source 1..110: mol_type = other DNA
gacttcattccgggtcccagacccgtgcgccctctgtctcctgagaccagtctccaggtcagagccctgtgaatcctcgggccctccagttgccgcttctccctgcagac

SEQ ID NO: 36638 - DNA, 110 bp, synthetic construct
  source 1..110: mol_type = other DNA
gagcatggctggggcgtgcggggagaggaccggccggcaaacgagctggcagcaagaaagtgactccaacgacctccacactccacaggccctcccggctccgctccgcc

SEQ ID NO: 36639 - DNA, 110 bp, synthetic construct
  source 1..110: mol_type = other DNA
gaaagtgactccaacgacctccacactccacaggccctcccggctccgctccgccaggtctcgcgagactggcccgacttccggcgccccacctcccggatctcgcggtg

SEQ ID NO: 36640 - DNA, 110 bp, synthetic construct
  source 1..110: mol_type = other DNA
ccctccacactgttatccatagcggctgtagttagcggatttctttactgctggccaccttcaagcttttattgctaacgtacatataggagcttctgacagaggatacc

SEQ ID NO: 36641 - DNA, 110 bp, synthetic construct
  source 1..110: mol_type = other DNA
cgactccccattgttaacatttatggccggccaggccgtggcccgggaacattgtgtatggcggatcattcactttttcctcccaattcccctgggaagcaaaagatttc

SEQ ID NO: 36642 - DNA, 110 bp, synthetic construct
  source 1..110: mol_type = other DNA
tgcactggaggtgcttctagaatgagcgagaggtaggacatggggacaggataagcatgggcagagctatggggggattggagcagggagaagagatgtgacctgggctt

SEQ ID NO: 36643 - DNA, 110 bp, synthetic construct
  source 1..110: mol_type = other DNA
catgggcagagctatggggggattggagcagggagaagagatgtgacctgggcttctgggcttcttggggctactgacataagaggagtgattggggagttcccgtcgtg

SEQ ID NO: 36644 - DNA, 110 bp, synthetic construct
  source 1..110: mol_type = other DNA
tcctctgatccccgcccccagctcccacagtcactaatctgctttatgttgctgctgattacctcttctgggagtttgattccagtggaatcatacaccatgaccttttg

SEQ ID NO: 36645 - DNA, 110 bp, synthetic construct
  source 1..110: mol_type = other DNA
aagggggaggtgggcgcatggtcagaatagtttgcttctgtttatgagttttgtagcaggtgtgctttggaatgttctcgtgcgtacatgtctctatctgtcaatgcctc

SEQ ID NO: 36646 - DNA, 110 bp, synthetic construct
  source 1..110: mol_type = other DNA
gcaggtgtgctttggaatgttctcgtgcgtacatgtctctatctgtcaatgcctctttaagcattccaaggtcaaaagcctgcagaaacaactgaaactcttgtctcctg

SEQ ID NO: 36647 - DNA, 110 bp, synthetic construct
  source 1..110: mol_type = other DNA
cataactgcttgttaacattttagtgtatttcttcccagtatctgcctataataaatatactgcctgaaagtacacacacacacatctatatatacacctattaataact

SEQ ID NO: 36648 - DNA, 110 bp, synthetic construct; identical to SEQ ID NO: 36647
  source 1..110: mol_type = other DNA

SEQ ID NO: 36649 - DNA, 110 bp, synthetic construct
  source 1..110: mol_type = other DNA
cggggagctcctaccggccaatcttatggaagttgttttatagccaacctgacgtcaggttctttccattttcactcccaatgtttgggtggaggcctttacgccttcac

SEQ ID NO: 36650 - DNA, 110 bp, synthetic construct
  source 1..110: mol_type = other DNA
ccgaggcctgtaagcagtacggcagggagaccctcatctatctgggcttcctggaggaagaaggaatcctcgagaaggccgatagcaccgccgtgaggagctgcctcacc

SEQ ID NO: 36651 - DNA, 110 bp, synthetic construct
  source 1..110: mol_type = other DNA
ggaagaaggaatcctcgagaaggccgatagcaccgccgtgaggagctgcctcaccaggatcacagccattggcgaggtagtatccgtgtgactcccgggagagctctttt

SEQ ID NO: 36652 - DNA, 110 bp, synthetic construct
  source 1..110: mol_type = other DNA
cagcacttaggatatacctggcatttagtaagagctcttctaatatttgttgaacaaactaaccaccaggcactgtttatgagcactagcacatttatgttgaagacatt

SEQ ID NO: 36653 - DNA, 110 bp, synthetic construct
  source 1..110: mol_type = other DNA
aaactaaagtggcctggttttgaatttcaaataatcagaactacctagtatgtatccttttgtgtccaacttctactcaagactattgcattttgaaccttttattaaaa

SEQ ID NO: 36654 - DNA, 110 bp, synthetic construct
  source 1..110: mol_type = other DNA
ccttttgtgtccaacttctactcaagactattgcattttgaaccttttattaaaagtctttcaaaggtttaagaggttcaatgacattttgtttacacaggtaacaaata

SEQ ID NO: 36655 - DNA, 110 bp, synthetic construct
  source 1..110: mol_type = other DNA
ccctgcatcgcttgccctggggcccactgctggcagggcagcaccaccactctgacctaggtcctcagtgacccccgagctgacagtccagggagatcttccttctggaa

SEQ ID NO: 36656 - DNA, 110 bp, synthetic construct
  source 1..110: mol_type = other DNA
cctaggtcctcagtgacccccgagctgacagtccagggagatcttccttctggaaagacgtcttcttgccatggacatctgagctcacttgccactttggagaagtcctt

SEQ ID NO: 36657 - DNA, 110 bp, synthetic construct; identical to SEQ ID NO: 36655
  source 1..110: mol_type = other DNA

SEQ ID NO: 36658 - DNA, 110 bp, synthetic construct; identical to SEQ ID NO: 36656
  source 1..110: mol_type = other DNA

SEQ ID NO: 36659 - DNA, 110 bp, synthetic construct
  source 1..110: mol_type = other DNA
accacagccacaacaacacagaatccgagcctcatctgtgacctgcgccgtagcttgcatcaacactggatcctaaactcactgagtgaggctagggatcaaacctgcat

SEQ ID NO: 36660 - DNA, 110 bp, synthetic construct; identical to SEQ ID NO: 36659
  source 1..110: mol_type = other DNA

SEQ ID NO: 36661 - DNA, 110 bp, synthetic construct
  source 1..110: mol_type = other DNA
cataaatgaacaaaagcatgtcgatcaatctgcacaactcaattacaaatttagttgccagaaactcaaaaacatctgtccataataaaacaaacagaggtgcataacta

SEQ ID NO: 36662 - DNA, 110 bp, synthetic construct
  source 1..110: mol_type = other DNA
ccagataatcacagcacagatagatgataacacaatgtggggtagagatggagaaatgttcagcttggaaaagcactgaggagccattatgttaatctgaggtaacatga

SEQ ID NO: 36663 - DNA, 110 bp, synthetic construct
  source 1..110: mol_type = other DNA
gagacgaacattctacaccaaatgcaaccatatggacgaatctcactgacaatatgttaagcaaaagcagcctgacatggaagtgtggatgctgtaaggcttctttattt

SEQ ID NO: 36664 - DNA, 110 bp, synthetic construct
  source 1..110: mol_type = other DNA
gttaagcaaaagcagcctgacatggaagtgtggatgctgtaaggcttctttatttaaagctccaaatgggctaatctctgatgttaggagtcagggctgtgttttagcct

SEQ ID NO: 36665 - DNA, 110 bp, synthetic construct
  source 1..110: mol_type = other DNA
ttaatcaactttcagttagctgcctccgcctctaaaatgtgagtgagctctagaagttcaggggtcatttcttttgttcatacctgtgtccccagccctgagagcagtgt

SEQ ID NO: 36666 - DNA, 110 bp, synthetic construct
  source 1..110: mol_type = other DNA
cgggaggtctatggccttcatggctgctacgtagttcggaaagttcgagctggatgtgctctccactgggctaatgtccacggcaatcaggcgctccaccagctctggct

SEQ ID NO: 36667 - DNA, 110 bp, synthetic construct
  source 1..110: mol_type = other DNA
gtgctctccactgggctaatgtccacggcaatcaggcgctccaccagctctggctgcaggagaaaatgagatggggaccctagggcaggcacagtgggtttcaggcatag

SEQ ID NO: 36668 - DNA, 110 bp, synthetic construct
  source 1..110: mol_type = other DNA
gggctcatacagtcacccctgaggccccatcgtgccggctcagcgacatccgggggtgggggccctctgcattctatttcttttcacttctgtcccccacagggcagagg

SEQ ID NO: 36669 - DNA, 110 bp, synthetic construct
  source 1..110: mol_type = other DNA
gtgggggccctctgcattctatttcttttcacttctgtcccccacagggcagaggtcacgggggtgaggaaaacaaagagccagagtcctgctgcccctctagggaggct

SEQ ID NO: 36670 - DNA, 110 bp, synthetic construct
  source 1..110: mol_type = other DNA
ctgtgtaatttggcgaaagccagcatttgtcccactgtattcatgagaccactgaggcctgcagaggggaagggaccatccccgggtcactcgggcagtgtagctcaccc

SEQ ID NO: 36671 - DNA, 110 bp, synthetic construct
  source 1..110: mol_type = other DNA
ggcctgcagaggggaagggaccatccccgggtcactcgggcagtgtagctcaccctctgattctttgcaattatccttccgtggatctatttctgtctctacctagggtc

SEQ ID NO: 36672 - DNA, 110 bp, synthetic construct
  source 1..110: mol_type = other DNA
gcctggagcccggatcctgggcagcatgggtcctggagaggagctggttgggggcagcaggcagatccggtttgcccagtgccctgcttctttaaagaagcaatgattgc

SEQ ID NO: 36673 - DNA, 110 bp, synthetic construct
  source 1..110: mol_type = other DNA
agatgtgtaggtgggggctggacagggaggacagagaagggacaggttcggattctggagctcacagtggatgagcagtcccaacagattgaacacctccccactgacca

SEQ ID NO: 36674 - DNA, 110 bp, synthetic construct
  source 1..110: mol_type = other DNA
gctcttaatttattactttgtcagaaacagctgtatgatgcccagtgctgtcttcatctctgcggctgtaagacaagagcccgtgttttatacttcactgagattttctt

SEQ ID NO: 36675 - DNA, 110 bp, synthetic construct
  source 1..110: mol_type = other DNA
cagcattaccttgagctgcagtgtaggccacagttgctgcttggatctggcattactgtggttgggtgtaggctggcagcagcagctctaattcaactgttagcccagga

SEQ ID NO: 36676 - DNA, 110 bp, synthetic construct
  source 1..110: mol_type = other DNA
ctgtggttgggtgtaggctggcagcagcagctctaattcaactgttagcccaggaatttccatatactgcaggtgcagtcctaaaaagaaaaacaaaacaaaaacagaca

SEQ ID NO: 36677 - DNA, 110 bp, synthetic construct
  source 1..110: mol_type = other DNA
cgctgacaaatgacatgagaggttcaaggctatggctgtgtgaaatttacaccctggatcccacacagagaagggtctgaataccacaggttggcgtccacaccggcggc

SEQ ID NO: 36678 - DNA, 110 bp, synthetic construct
  source 1..110: mol_type = other DNA
ggatcccacacagagaagggtctgaataccacaggttggcgtccacaccggcggcctgatccctgtgctctagtaggtcgaagtgcaaggccaaaggcagagtgaaatta

SEQ ID NO: 36679 - DNA, 110 bp, synthetic construct
  source 1..110: mol_type = other DNA
gatattgattgagagcctgcagccactgtcatgggcactggggtgtgaaacagggccagcttccgcccttaaggagcttgcacggtagggagggaaagacacaccaagca

SEQ ID NO: 36680 - DNA, 110 bp, synthetic construct
  source 1..110: mol_type = other DNA
ccagcttccgcccttaaggagcttgcacggtagggagggaaagacacaccaagcagccaatcgtagttccttaattgtgattacgaggtgttaggaaaagccctgattgg

SEQ ID NO: 36681 - DNA, 110 bp, synthetic construct
  source 1..110: mol_type = other DNA
ccaggcattgagaattatacatgacccaaagcactctgcccacaactccattagagctcttatcagtttctactgagatatctgtgtctacatctcttcaaagcaatttt

SEQ ID NO: 36682 - DNA, 110 bp, synthetic construct
  source 1..110: mol_type = other DNA
gctcttatcagtttctactgagatatctgtgtctacatctcttcaaagcaattttgtagccacacactaggcagaaaagggactaaaggatttcaaaacagtataggggg

SEQ ID NO: 36683 - DNA, 110 bp, synthetic construct; identical to SEQ ID NO: 36681
  source 1..110: mol_type = other DNA

SEQ ID NO: 36684 - DNA, 110 bp, synthetic construct; identical to SEQ ID NO: 36682
  source 1..110: mol_type = other DNA

SEQ ID NO: 36685 - DNA, 110 bp, synthetic construct
  source 1..110: mol_type = other DNA
ccgcacccgtggcatatggaaattcccaggttaggggttgagtcagagctgcagctgcctacctacgccacagtcgctgtgacgccagatgcgagccacgtctgcaacct

SEQ ID NO: 36686 - DNA, 110 bp, synthetic construct; identical to SEQ ID NO: 36685
  source 1..110: mol_type = other DNA

SEQ ID NO: 36687 - DNA, 110 bp, synthetic construct
  source 1..110: mol_type = other DNA
tgagtagggagtgtggagatgggatgggtgagccgtgtcagggggtggggctaaggtgaggtggcctgtgagcttgtgttgacggtccctgggctagattctgtggtcca

SEQ ID NO: 36688 - DNA, 110 bp, synthetic construct
  source 1..110: mol_type = other DNA
gtgaggtggcctgtgagcttgtgttgacggtccctgggctagattctgtggtccaggtgagtctgtgacagctctgaggaggaagtcttctaggctggggtcagcctgaa

SEQ ID NO: 36689 - DNA, 110 bp, synthetic construct; identical to SEQ ID NO: 36687
  source 1..110: mol_type = other DNA

SEQ ID NO: 36690 - DNA, 110 bp, synthetic construct; identical to SEQ ID NO: 36688
  source 1..110: mol_type = other DNA

SEQ ID NO: 36691 - DNA, 110 bp, synthetic construct
  source 1..110: mol_type = other DNA
gtcctcatggatcctagtcgggtttgttaccactgagccatgatgcaaactcctatttttatttgttattattcctctggcagactgcagactcagagcacagccagctt

SEQ ID NO: 36692 - DNA, 110 bp, synthetic construct
  source 1..110: mol_type = other DNA
tttttatttgttattattcctctggcagactgcagactcagagcacagccagcttgggcaggaggctggaaatgtctgccaggaagcagcgaggagcctgttggtgtttg

SEQ ID NO: 36693 - DNA, 110 bp, synthetic construct
  source 1..110: mol_type = other DNA
tatcttattgaagtagagttgattaacagtgttgtgtttaaaaatttcttggttttaagtcttcaccggcctttgcttttcttggtttaaaaatccttattgttctcagg

SEQ ID NO: 36694 - DNA, 110 bp, synthetic construct
  source 1..110: mol_type = other DNA
taagtcttcaccggcctttgcttttcttggtttaaaaatccttattgttctcaggaatcataccttccgcagcctccaggcagtcaggccgccctcagccccacacagct

SEQ ID NO: 36695 - DNA, 110 bp, synthetic construct
  source 1..110: mol_type = other DNA
ttaacccaccgagcaagaccagggattgaagccacattttcgaggattctagtcaggtttgtaagcctctgagctacaacagaacctcccagaagggccgtcctttctgc

SEQ ID NO: 36696 - DNA, 110 bp, synthetic construct
  source 1..110: mol_type = other DNA
ggtttgtaagcctctgagctacaacagaacctcccagaagggccgtcctttctgcaccccgccctagcctcccaggcggaagtctcaccacagccccggagagccctctg

SEQ ID NO: 36697 - DNA, 110 bp, synthetic construct
  source 1..110: mol_type = other DNA
agcctggaaacttccatatgctgtgggcgtggccctaaaaacaacaacaacaaagaagtgaatcattttaaagacaaatagtgtgtaaatgataatatagaagttctgca

SEQ ID NO: 36698 - DNA, 110 bp, synthetic construct; identical to SEQ ID NO: 36697
  source 1..110: mol_type = other DNA

SEQ ID NO: 36699 - DNA, 110 bp, synthetic construct
  source 1..110: mol_type = other DNA
accaatcttaaccagaggaaacaggctcagagaggttaagtgtcttgatggagatcacacagcttttgccctggctctccccaccccactgacctttcatccacactgca

SEQ ID NO: 36700 - DNA, 110 bp, synthetic construct
  source 1..110: mol_type = other DNA
catatatatacagacttcattcattcacgtgttgatagacatttaggtggtttccatggtttccatctattcacaagctattgtgaatactgctgctttgaacatagggg

SEQ ID NO: 36701 - DNA, 110 bp, synthetic construct; identical to SEQ ID NO: 36700
  source 1..110: mol_type = other DNA

SEQ ID NO: 36702 - DNA, 110 bp, synthetic construct
  source 1..110: mol_type = other DNA
tctgctcacatcacatgcctgggccacagccctgtgcggtgtgggtgttacccacagtatgtagacaaggaaaatgagggtccgaggccaactgactctgcagtctcaca

SEQ ID NO: 36703 - DNA, 110 bp, synthetic construct
  source 1..110: mol_type = other DNA
agtatgtagacaaggaaaatgagggtccgaggccaactgactctgcagtctcacagctggtgcgtggagaccccacctccgaagccccactggttctgccacgtggctgg

SEQ ID NO: 36704 - DNA, 110 bp, synthetic construct
  source 1..110: mol_type = other DNA
tatagaggatttttaaaaaattagtttatttaaaaagtgtaacttgaggtgttctcttgtgctgcaggtgttaagggaccagtgttgtcactgcagtggtttgggtttga

SEQ ID NO: 36705 - DNA, 110 bp, synthetic construct
  source 1..110: mol_type = other DNA
aaaaattagtttatttaaaaagtgtaacttgaggtgttctcttgtgctgcaggtgttaagggaccagtgttgtcactgcagtggtttgggtttgatccctggcccaggaa

SEQ ID NO: 36706 - DNA, 110 bp, synthetic construct
  source 1..110: mol_type = other DNA
ggtcacagtttttaatgatagggaaatagatcggcctattcatttatttatttgctttttatttagggccgtagattcgggggaaaaaaaagaagatcccaggctatggg

SEQ ID NO: 36707 - DNA, 110 bp, synthetic construct
  source 1..110: mol_type = other DNA
tgatagggaaatagatcggcctattcatttatttatttgctttttatttagggccgtagattcgggggaaaaaaaagaagatcccaggctatgggtcaaattggagctac

SEQ ID NO: 36708 - DNA, 110 bp, synthetic construct
  source 1..110: mol_type = other DNA
tgttttgacaaacaaatctttgcctgtgcattaaatttgagtaagcatgaagcggagttaaacccgtctccttgattccctctttggagtctcttatcctcagtcttcag

SEQ ID NO: 36709 - DNA, 110 bp, synthetic construct
  source 1..110: mol_type = other DNA
ctcacagtaccacatacagcatgtggattacacttcagataatactgctttagagctccagtagttggatttcatcctctgatggtatctttttttatgctaaggccatt

SEQ ID NO: 36710 - DNA, 110 bp, synthetic construct
  source 1..110: mol_type = other DNA
ctccagtagttggatttcatcctctgatggtatctttttttatgctaaggccattcataaatttggctgcaaggcatgattaagaactgctattcaggagttcccgctgt

SEQ ID NO: 36711 - DNA, 110 bp, synthetic construct
  source 1..110: mol_type = other DNA
gaggtaggtttccagtcttatgtcaaattatatgtcaattcagaacgtgatatacaaggaatattgtccagtattctctagaaaaataaactcgttttcttcctactaag

SEQ ID NO: 36712 - DNA, 110 bp, synthetic construct
  source 1..110: mol_type = other DNA
tttgcagtaggccggtggtccccccaaaataaccaaaacctgtgaggatatcattgttacgtggcaaggggcggctcgttcgcagatgggctgaagcgtgctcagccgct

SEQ ID NO: 36713 - DNA, 110 bp, synthetic construct
  source 1..110: mol_type = other DNA
ggactgtgtggccaacattctggctttctaggggttgctggaggaacaaattgctcttacttaactcagagctgcaattctgtgggcagacactagggggagaaagaggt

SEQ ID NO: 36714 - DNA, 110 bp, synthetic construct
  source 1..110: mol_type = other DNA
cttacttaactcagagctgcaattctgtgggcagacactagggggagaaagaggttcaaaaaggtttgagaggttcttgaagttcccatcgtggctcagtggttaacaaa

SEQ ID NO: 36715 - DNA, 110 bp, synthetic construct
  source 1..110: mol_type = other DNA
agtcacataccgtaaatccacttgtacacttcagtggttgcagcccattgtctgtgaagctcgaccatcgccaccatctcaccaccaccactccctttggagccgggttt

SEQ ID NO: 36716 - DNA, 110 bp, synthetic construct
  source 1..110: mol_type = other DNA
agggtcccttcacgtcaccacacgcgcatgcaacaggactgtgtccgcatcgacggacctgcctgctgccggcctaatgcacattccccacaacttaaaaccatgcgacg

SEQ ID NO: 36717 - DNA, 110 bp, synthetic construct
  source 1..110: mol_type = other DNA
gacctgcctgctgccggcctaatgcacattccccacaacttaaaaccatgcgacggcctcgcacgtcctttggagtaaaagccaaggtcatgatggaaccagtgccgtcg

SEQ ID NO: 36718 - DNA, 110 bp, synthetic construct
  source 1..110: mol_type = other DNA
actgttatgtacggcatgatattcctcttgcagagttaaatgcaactacaagcaaaagcagtgctgagaggaagtttatagcgatacaatcgttatctcaggaaaaaagg

SEQ ID NO: 36719 - DNA, 110 bp, synthetic construct
  source 1..110: mol_type = other DNA
aagcagtgctgagaggaagtttatagcgatacaatcgttatctcaggaaaaaaggaaaaaacttaaacaacctaaccttacaccttaatctagagaacagcagacaaagc

SEQ ID NO: 36720 - DNA, 110 bp, synthetic construct
  source 1..110: mol_type = other DNA
tgcactgggcacactccatgcacgcagctgctactcaaagccctgggagttccctggtggcctagtggctaaggactcagcgctgtcactgttgcggctcctgttggatc

SEQ ID NO: 36721 - DNA, 110 bp, synthetic construct
  source 1..110: mol_type = other DNA
ggtggcctagtggctaaggactcagcgctgtcactgttgcggctcctgttggatccctggcaccggaacctctgcatgctgtgggtatgctcgctccccctccaaaaaag

SEQ ID NO: 36722 - DNA, 110 bp, synthetic construct
  source 1..110: mol_type = other DNA
ggtcttctgcaacccattcctaccactgctcataatgcctggacctgacccagccgttccatggggtcaaagagaaagactgagtccttgatgacatcaagcctttaagt

SEQ ID NO: 36723 - DNA, 110 bp, synthetic construct
  source 1..110: mol_type = other DNA
gttccatggggtcaaagagaaagactgagtccttgatgacatcaagcctttaagttaacaacccttgagcagtttgactcatgacctcttatcgtgcaaagttcacactt

SEQ ID NO: 36724 - DNA, 110 bp, synthetic construct
  source 1..110: mol_type = other DNA
cctccagttgatgctcactggctgttggctgctccaggtggcctctccagtgtggcagcctctgggtggttgatgtcttacatagcagctagcttcctccagggtgagca

SEQ ID NO: 36725 - DNA, 110 bp, synthetic construct
  source 1..110: mol_type = other DNA
cagcctctgggtggttgatgtcttacatagcagctagcttcctccagggtgagcatcccaagaaagcctgatggaggctgtatggctctttctgactaaacctggagagt

SEQ ID NO: 36726 - DNA, 110 bp, synthetic construct
  source 1..110: mol_type = other DNA
caaaaaaaaaaaaaaaaaaaaaaaaaaaaaaaagagagagagagtccttgctgatactgtccagctgctacactgttcctgaaatcacttacctccagacgtctggctct

SEQ ID NO: 36727 - DNA, 110 bp, synthetic construct
  source 1..110: mol_type = other DNA
actgtccagctgctacactgttcctgaaatcacttacctccagacgtctggctctggcttctctacagtcctgccactctgatccctgacttgttattccctggagggag

SEQ ID NO: 36728 - DNA, 110 bp, synthetic construct
  source 1..110: mol_type = other DNA
tccctgacttgaccttgtgacgtgatgtggcttgaagcatcaagatgaataacaatgtcaaggatgggaaacctattgcctgcctagctgtgcggaggaatttttgtttt

SEQ ID NO: 36729 - DNA, 110 bp, synthetic construct
  source 1..110: mol_type = other DNA
tgtcaaggatgggaaacctattgcctgcctagctgtgcggaggaatttttgttttgttttttttaaaagctgatccccatgcaagcatttccatacagtgtgtaggggag

SEQ ID NO: 36730 - DNA, 110 bp, synthetic construct
  source 1..110: mol_type = other DNA
ttagcaatgtttatcatataatcttaaaaaaaaatcagcatgaacttgccttgctccttctcccaccccactgactaaaaggcacatgtgatggcaggagctgaagtagc

SEQ ID NO: 36731 - DNA, 110 bp, synthetic construct
  source 1..110: mol_type = other DNA
ccttctcccaccccactgactaaaaggcacatgtgatggcaggagctgaagtagccactttggacccagatgggaaggctgtatgttgaggatggccgagctgtcctcct

SEQ ID NO: 36732 - DNA, 110 bp, synthetic construct
  source 1..110: mol_type = other DNA
gagtggtcttggacaagtcatttgattattcaggatctcaatttcttcatttgtagcttttcaaggtctgatgcagttttctaagagattgagagcagtgggcaccggcc

SEQ ID NO: 36733 - DNA, 110 bp, synthetic construct
  source 1..110: mol_type = other DNA
gcttttcaaggtctgatgcagttttctaagagattgagagcagtgggcaccggcctgaactttcttagccaaaggtataagcatagagaaatacagtagcagcaaatttc

SEQ ID NO: 36734 - DNA, 110 bp, synthetic construct
  source 1..110: mol_type = other DNA
caacacacagaagagaccaggatcatgaattccactaaagaagagggtagccagcctcacacccagctgtaacacgtaagagcgcatttgcttgttaagtcttcagttag

SEQ ID NO: 36735 - DNA, 110 bp, synthetic construct
  source 1..110: mol_type = other DNA
ctcacacccagctgtaacacgtaagagcgcatttgcttgttaagtcttcagttaggtccagcatccctgacgaatgatgctccttggagagatgtataacacagagatac

SEQ ID NO: 36736 - DNA, 110 bp, synthetic construct
  source 1..110: mol_type = other DNA
gtcccaagccccagcctgtttgactgtagaggggtgggaagttctccctgggttttgctagctgctgtggtcacccctccaaggtgggatcaatcctttctcctaaaaat

SEQ ID NO: 36737 - DNA, 110 bp, synthetic construct
  source 1..110: mol_type = other DNA
tgctagctgctgtggtcacccctccaaggtgggatcaatcctttctcctaaaaatatggctcagatattgaggctgatgatgccacagatgtactaagagaataggaaag

SEQ ID NO: 36738 - DNA, 110 bp, synthetic construct
  source 1..110: mol_type = other DNA
ctagttttctgcatatgcattttcgggggacatagacattcagtctatagcatagggctctgtgcacaaccatccttcagctctgtctgaggcagtgtggccaggtggcc

SEQ ID NO: 36739 - DNA, 110 bp, synthetic construct
  source 1..110: mol_type = other DNA
ggctctgtgcacaaccatccttcagctctgtctgaggcagtgtggccaggtggcccaccagacacagacacggactattgtcagagaaagatgtcatttcctatgaacat

SEQ ID NO: 36740 - DNA, 110 bp, synthetic construct
  source 1..110: mol_type = other DNA
gctcggtgttaacatggtttggtcaggactcctctttgagtctttaaaaatataggaaatccttatgtaacaagaatagctagtatctattggtcttatactcttcatca

SEQ ID NO: 36741 - DNA, 110 bp, synthetic construct
  source 1..110: mol_type = other DNA
gaaatccttatgtaacaagaatagctagtatctattggtcttatactcttcatcaggcagtgtacaagggccttagatctaataacgcatttgctcttgaaacaatccca

SEQ ID NO: 36742 - DNA, 110 bp, synthetic construct; identical to SEQ ID NO: 36740
  source 1..110: mol_type = other DNA

SEQ ID NO: 36743 - DNA, 110 bp, synthetic construct; identical to SEQ ID NO: 36741
  source 1..110: mol_type = other DNA

SEQ ID NO: 36744 - DNA, 110 bp, synthetic construct
  source 1..110: mol_type = other DNA
cctgccctcttggattagggcccacttaatgacctcattttaacttaatcacccttaaaagaccctgtctccaaatactgttgcattctgagataaggatggtcaagatt

SEQ ID NO: 36745 - DNA, 110 bp, synthetic construct
  source 1..110: mol_type = other DNA
taaaagaccctgtctccaaatactgttgcattctgagataaggatggtcaagattttattccatgaacttttttttgggggggagggcaacacaactcagtccataataa

SEQ ID NO: 36746 - DNA, 110 bp, synthetic construct
  source 1..110: mol_type = other DNA
gcaggcagccacagctctttgctgtcttgagggaacttcccagaggacccaggatgttctggctgagaaattattggtagagctgactcatctggaaagctacgccaagc

SEQ ID NO: 36747 - DNA, 110 bp, synthetic construct
  source 1..110: mol_type = other DNA
gttctggctgagaaattattggtagagctgactcatctggaaagctacgccaagcatcatgagaggcaggacaccagcaaggctgtaaagtgtacgttatgaacactccc

SEQ ID NO: 36748 - DNA, 110 bp, synthetic construct
  source 1..110: mol_type = other DNA
tggtctataccacgttagtgaaggctgtgtcttagttgttgataacccaagcccagtgagtcccagtaggcagagatggacttattgtagataatgagtgttggcacctc

SEQ ID NO: 36749 - DNA, 110 bp, synthetic construct
  source 1..110: mol_type = other DNA
gtgagtcccagtaggcagagatggacttattgtagataatgagtgttggcacctcatcagggcagagagagcctgtgatctaaacaacagctctgataggaagggcggga

SEQ ID NO: 36750 - DNA, 110 bp, synthetic construct
  source 1..110: mol_type = other DNA
acagatccactccttggtgctgtgggttgaagtatgtccccctcccttctctctactcctgctgaaattctaacccccaatactcaggaggtgactttatttggaagtgc

SEQ ID NO: 36751 - DNA, 110 bp, synthetic construct
  source 1..110: mol_type = other DNA
gaggaatctgctgtccatctttccatttcagcctaaagccagcccccaattcctggatctctcctcgcctggccctgggcgctcaacctggccttgcctgtgctcacaga

SEQ ID NO: 36752 - DNA, 110 bp, synthetic construct
  source 1..110: mol_type = other DNA
gtcatgcttctattccatactctgtaaattaaccaagtggcgtccggcttcctagcccagtctctgattttgttcatgtacatggataccccctcttcaaaatgttaatg

SEQ ID NO: 36753 - DNA, 110 bp, synthetic construct
  source 1..110: mol_type = other DNA
cccagtctctgattttgttcatgtacatggataccccctcttcaaaatgttaatggaacaattcctgttgaacagtagaggtgaggagcctggaaatcatggtagagaaa

SEQ ID NO: 36754 - DNA, 110 bp, synthetic construct
  source 1..110: mol_type = other DNA
ccttaaaactacgggggccccgttgcaaaggccaggacccaggatggtgagcagaggagagctggttgggagaatggaggccaagtttggagtttgcctggaataagaag

SEQ ID NO: 36755 - DNA, 110 bp, synthetic construct
  source 1..110: mol_type = other DNA
ggagagctggttgggagaatggaggccaagtttggagtttgcctggaataagaagtgctttcttctagccatgatacaagcattgcctggttgtgaagaagaggtgtggg

SEQ ID NO: 36756 - DNA, 110 bp, synthetic construct
  source 1..110: mol_type = other DNA
ctcacaactgcagccccttttctttctttaggtgattatgtgtcacttgcaattaaagagtctcagtatgacagtggcctgcctctaagacctgggggtgactatcgtgg

SEQ ID NO: 36757 - DNA, 110 bp, synthetic construct
  source 1..110: mol_type = other DNA
taggtgattacacttggccgtatgagggtagacccatcgagcttttggaatgagaagctgcctagaaactaaaaggctcaagggcataaaaatacatgaaaccatggtgt

SEQ ID NO: 36758 - DNA, 110 bp, synthetic construct
  source 1..110: mol_type = other DNA
agctgcctagaaactaaaaggctcaagggcataaaaatacatgaaaccatggtgttcctgctgtggctcaacgggttaagtacccaatgttatctctgtgagggtacaga

SEQ ID NO: 36759 - DNA, 110 bp, synthetic construct
  source 1..110: mol_type = other DNA
cagaacacagatcaaagagcgttgctaaaagagtgtgcccaagagggagacagtcatagccatgtgagaggattttgaatgatcgtcagtaaatgtggcgaattgatgcc

SEQ ID NO: 36760 - DNA, 110 bp, synthetic construct
  source 1..110: mol_type = other DNA
atagccatgtgagaggattttgaatgatcgtcagtaaatgtggcgaattgatgccctggaaggtcatccctccagactcacctcctcccctggaaggggaggaagtggaa

SEQ ID NO: 36761 - DNA, 110 bp, synthetic construct
  source 1..110: mol_type = other DNA
gtggtaagagggtcatgcccttgggtctaggacagattcaaaggagtgaattcacagaacaaacgagcttagaagagtttctggcacatgggaagcgctaaattcacatc

SEQ ID NO: 36762 - DNA, 110 bp, synthetic construct
  source 1..110: mol_type = other DNA
agaacaaacgagcttagaagagtttctggcacatgggaagcgctaaattcacatcagcaattccactcttcttattatctcgttttaaaaacaaatttaggagagccaaa

SEQ ID NO: 36763 - DNA, 110 bp, synthetic construct
  source 1..110: mol_type = other DNA
cttgtaagggtttgattagaagatattaatgaaaagatccaaatctttggacaatcatcatagctactacttactctggaccaggcactgttctaggcactttacatttt

SEQ ID NO: 36764 - DNA, 110 bp, synthetic construct
  source 1..110: mol_type = other DNA
catcatagctactacttactctggaccaggcactgttctaggcactttacattttatttactcctcaaaacatccttatagacaggtactactattgtcgctattttaca

SEQ ID NO: 36765 - DNA, 110 bp, synthetic construct
  source 1..110: mol_type = other DNA
aatgaaaagcctctcctgggtggggatgggacgggccaagcccagagattaaatggctgcattggcgaggccagggtttccgcagtggttttcggcgtaacccctggaga

SEQ ID NO: 36766 - DNA, 110 bp, synthetic construct
  source 1..110: mol_type = other DNA
gctgcattggcgaggccagggtttccgcagtggttttcggcgtaacccctggagacacaaatgtttaaatgaagatttttcagaaccatccacaggctctcgaggtaaat

SEQ ID NO: 36767 - DNA, 110 bp, synthetic construct; identical to SEQ ID NO: 36765
  source 1..110: mol_type = other DNA

SEQ ID NO: 36768 - DNA, 110 bp, synthetic construct; identical to SEQ ID NO: 36766
  source 1..110: mol_type = other DNA

SEQ ID NO: 36769 - DNA, 110 bp, synthetic construct
  source 1..110: mol_type = other DNA
acagctcaaaatgctcagaatagatccccgtctttctctgacttcagccgagaaggatgctaattccaaaatgtgagcttgtcgaagccagttctgtttgagaggagtct

SEQ ID NO: 36770 - DNA, 110 bp, synthetic construct
  source 1..110: mol_type = other DNA
taattaaacatgctctcttctgctctatttattgcagtctctactttgcagctgtaatgttctccgttataaaaaagctgtatcagtttgtgtcggatcctgcctcttat

SEQ ID NO: 36771 - DNA, 110 bp, synthetic construct
  source 1..110: mol_type = other DNA
tggcaggctggctgtgcctgatcacctgtgagccccgctcggcctcacttccctggacacagcccgtggtgttggtaatgctgccacgtcccctcccacagattcctcca

SEQ ID NO: 36772 - DNA, 110 bp, synthetic construct
  source 1..110: mol_type = other DNA
gacacagcccgtggtgttggtaatgctgccacgtcccctcccacagattcctccaaaagggcaaacgtcttctttggccaggctgcctggagaggtcctgcagcagctac

SEQ ID NO: 36773 - DNA, 110 bp, synthetic construct
  source 1..110: mol_type = other DNA
attacttggtctaaggatcagggcgaggtcccgcgtgccgtctgttttggtaataaagttttattagcacacagccattgttatgcatttatgtagggtctgtggctgtt

SEQ ID NO: 36774 - DNA, 110 bp, synthetic construct
  source 1..110: mol_type = other DNA
aagttttattagcacacagccattgttatgcatttatgtagggtctgtggctgtttttgtgtttcacgtcagatgtgcagagttgccacagagatcataccgtctgcgaa

SEQ ID NO: 36775 - DNA, 110 bp, synthetic construct
  source 1..110: mol_type = other DNA
actgcagtcagatttttaaccccctacgccagagcatgaactcctaactgtatcgttttggagctgcagaaactctaagtagtatctgtttcaactctctccttttgcag

SEQ ID NO: 36776 - DNA, 110 bp, synthetic construct
  source 1..110: mol_type = other DNA
ttttggagctgcagaaactctaagtagtatctgtttcaactctctccttttgcagaaagagagaggaagtccagaagctttaggagacagccaggatttgaacccaacaa

SEQ ID NO: 36777 - DNA, 110 bp, synthetic construct
  source 1..110: mol_type = other DNA
ccccagggccgcgctgtgctaagtcatgaagttcagatttcaaattcagaaatgacctttgaggtcacttggtccagttcccaagcaatggtcaatggacctgttaaatc

SEQ ID NO: 36778 - DNA, 110 bp, synthetic construct
  source 1..110: mol_type = other DNA
cctttgaggtcacttggtccagttcccaagcaatggtcaatggacctgttaaatcataatcagctcaggacaatttacaaatgagagtttccggggatacacacttagag

SEQ ID NO: 36779 - DNA, 110 bp, synthetic construct
  source 1..110: mol_type = other DNA
ctccatcctaccaactctccccaccctgcaaggttacgggtcatcagaagttgtgcccaattgcctccgaaatgcttaaattcacagaaagagctcttctcccgtcacat

SEQ ID NO: 36780 - DNA, 110 bp, synthetic construct
  source 1..110: mol_type = other DNA
cccaattgcctccgaaatgcttaaattcacagaaagagctcttctcccgtcacatgacccgagacaaagagatccctcagcctcctgctaagtctgcaaacgagagaggg

SEQ ID NO: 36781 - DNA, 110 bp, synthetic construct
  source 1..110: mol_type = other DNA
cagagagatttgatcccaaaaggcagctcagagatgtcccctgagagcaccgggttagaaatcaattttaatctctcatctacaatttcagggcaaatcagcccctagaa

SEQ ID NO: 36782 - DNA, 110 bp, synthetic construct
  source 1..110: mol_type = other DNA
tagaaatcaattttaatctctcatctacaatttcagggcaaatcagcccctagaatacaccagcctcattagcaaagcaaatgacacatgctcccccatctatccaagca

SEQ ID NO: 36783 - DNA, 110 bp, synthetic construct
  source 1..110: mol_type = other DNA
ggcaaacaaggagaccccatatttcagcatcagcctatgtcctcaagggccatgagccagaaatctttgataatccatgtgggccatgcagcaggaattagaaagcaaac

SEQ ID NO: 36784 - DNA, 110 bp, synthetic construct
  source 1..110: mol_type = other DNA
gccagaaatctttgataatccatgtgggccatgcagcaggaattagaaagcaaactgttgtttatatgaagctattgagatttggtgcagggggcggtggttgtcacctt

SEQ ID NO: 36785 - DNA, 110 bp, synthetic construct
  source 1..110: mol_type = other DNA
gaaacatccctgactcctaggatcctataattatgccttccttacaaccccttcggtaacaagctctcgaggctaccctttcaaagggcaaacccttacaaaccacagag

SEQ ID NO: 36786 - DNA, 110 bp, synthetic construct
  source 1..110: mol_type = other DNA
caccatgtgcatgctcccatgaatcacagctctcatccacacaagtcattccttgaggggactggggaacagaagagaagaaatccctagggatatcagaaactctatgg

SEQ ID NO: 36787 - DNA, 110 bp, synthetic construct
  source 1..110: mol_type = other DNA
ggagatgcaccacctagatcccccttcccgagacgcttctggaggaatccagcatcagccaactccagctcctctgcaggacacatttcccaggctactcccagtgactg

SEQ ID NO: 36788 - DNA, 110 bp, synthetic construct
  source 1..110: mol_type = other DNA
cagccaactccagctcctctgcaggacacatttcccaggctactcccagtgactgagaagggctgggccattcctgcctgtgacgcaggtctcctctgagggacaagcca

SEQ ID NO: 36789 - DNA, 110 bp, synthetic construct
  source 1..110: mol_type = other DNA
cctctcatggcccttctgctgataactggtcaacctctagtttctttcctgtctggtcctcccagttcaactcagtatttagatactttcccagctccccatcctagacg

SEQ ID NO: 36790 - DNA, 110 bp, synthetic construct
  source 1..110: mol_type = other DNA
gtcctcccagttcaactcagtatttagatactttcccagctccccatcctagacgtggccccttgcacacagttgagccttttccctttatggttgtggaagcttctgca

SEQ ID NO: 36791 - DNA, 110 bp, synthetic construct
  source 1..110: mol_type = other DNA
tcaactttctgagagcagcttcaacgcagaggaatattttactctataatttattaagcccccttaatatgccaggtgttgtataaacacttcatatacattatttcctg

SEQ ID NO: 36792 - DNA, 110 bp, synthetic construct
  source 1..110: mol_type = other DNA
aagcccccttaatatgccaggtgttgtataaacacttcatatacattatttcctgtgcacgtgtgtgtgtgtgtataatcagatcataatattactgtccatattttaca

SEQ ID NO: 36793 - DNA, 110 bp, synthetic construct
  source 1..110: mol_type = other DNA
cctaagaccctgcagtcacctaggatgctgtcaccccacctacctttcctctcacctttgctcctggccgggcttgcctcccggtctgatggctcttccagcctccttca

SEQ ID NO: 36794 - DNA, 110 bp, synthetic construct
  source 1..110: mol_type = other DNA
ctttgctcctggccgggcttgcctcccggtctgatggctcttccagcctccttcagctccctctgcagaaactcacaggtgttttcccaaataaaattgttgtacattta

SEQ ID NO: 36795 - DNA, 110 bp, synthetic construct
  source 1..110: mol_type = other DNA
ggagctttgtaaaaacaagcaccccaggtgggaatgtgggtatatgtacacttagcatctttcatatggtgcaacaggtttgcagaatgctgtcacctatacctgcaaac

SEQ ID NO: 36796 - DNA, 110 bp, synthetic construct
  source 1..110: mol_type = other DNA
catctttcatatggtgcaacaggtttgcagaatgctgtcacctatacctgcaaacgcaccactcagtttaagaaacaaagccacacacgcatattggaagccccccagaa

SEQ ID NO: 36797 - DNA, 110 bp, synthetic construct
  source 1..110: mol_type = other DNA
ggaaacattcctgaccattccatccgtgttttccaggaaaatctagactttcttctttgctgggtgctgcacccactttcagcctataacagagcttcctagcctatatg

SEQ ID NO: 36798 - DNA, 110 bp, synthetic construct
  source 1..110: mol_type = other DNA
agtcactttgggtcatattaccttgagcagctgctatatgccagacctagtgggggaatccaaactgaaaaggcacagctctagaaactgagagtacacatcttatccat

SEQ ID NO: 36799 - DNA, 110 bp, synthetic construct
  source 1..110: mol_type = other DNA
actttacaaggcacaatggactctggagatatgattaaataaatgaagaatcctgcagtagggagatgatgctgggttttgcccgtgggtctgatgtggtcgccattcct

SEQ ID NO: 36800 - DNA, 110 bp, synthetic construct
  source 1..110: mol_type = other DNA
cagtagggagatgatgctgggttttgcccgtgggtctgatgtggtcgccattcctctcatgaggcagagaccagaagatactggatgagagaagagggatgaggcatgtg

SEQ ID NO: 36801 - DNA, 110 bp, synthetic construct
  source 1..110: mol_type = other DNA
agtttggcagagtaattttatgtctgttgaatctaataatttaaaaatgggggcttgtgaatctggggttaacagatgcaaatgattgcctttggaatgcataagcaatg

SEQ ID NO: 36802 - DNA, 110 bp, synthetic construct
  source 1..110: mol_type = other DNA
ttttatgtctgttgaatctaataatttaaaaatgggggcttgtgaatctggggttaacagatgcaaatgattgcctttggaatgcataagcaatgagaccctgctgtaga

SEQ ID NO: 36803 - DNA, 110 bp, synthetic construct
  source 1..110: mol_type = other DNA
gtgctgctgctgctcatctctacgtcaactgaccagcccacttggcttttcagcacttccagcacctcccaactaggtcccctgtgaattgcttctattgaaatggctgg

SEQ ID NO: 36804 - DNA, 110 bp, synthetic construct
  source 1..110: mol_type = other DNA
cttccagcacctcccaactaggtcccctgtgaattgcttctattgaaatggctggtgcaggctctctgatccttgctagtgcctgactgagaaacacataatgataatac

SEQ ID NO: 36805 - DNA, 110 bp, synthetic construct
  source 1..110: mol_type = other DNA
atctccgtggtttagcaattaaaatctagtctttattcaggcaaagttcaccatggatctggcaaaaaccctaaggccgttttctttcaagcagtgactcatggacccaa

SEQ ID NO: 36806 - DNA, 110 bp, synthetic construct
  source 1..110: mol_type = other DNA
aaggtcaaatagacaccctgcgtgttgaaagtgttacaatcatataattactcctaaatgatggctgagcaaagctatgtggtaaaagccaatgcaaacatgaaaaataa

SEQ ID NO: 36807 - DNA, 110 bp, synthetic construct
  source 1..110: mol_type = other DNA
tgcttcgactgcttttaaaaagttcattgatttgtagctaataccaagttgtcatagtttcatgagtaacagcttgtggtttgcagaatcaaagccttttcctgaatcaa

SEQ ID NO: 36808 - DNA, 110 bp, synthetic construct
  source 1..110: mol_type = other DNA
agtttcatgagtaacagcttgtggtttgcagaatcaaagccttttcctgaatcaataatagcagatacactgaggtggcctgagcatctgcagaggggagaggagccaag

SEQ ID NO: 36809 - DNA, 110 bp, synthetic construct
  source 1..110: mol_type = other DNA
accatggcaatgaaaggaaaagatgggaagaggatccctctggcattttttgtggagaacttaatccatgcacttggcaaaaaagggtccctgctctgaacaagcttata

SEQ ID NO: 36810 - DNA, 110 bp, synthetic construct
  source 1..110: mol_type = other DNA
agaacttaatccatgcacttggcaaaaaagggtccctgctctgaacaagcttataagtggtaagagggagaaatctaggacccagggaacaaaagtagcattgagctcta

SEQ ID NO: 36811 - DNA, 110 bp, synthetic construct
  source 1..110: mol_type = other DNA
ctgtgtgtacccatgaggcaggccagaagtgtcagggaattaatgttcccaagggcaaactcttgactaacaaggaacaggcgttggtagataaattctccagcttcctc

SEQ ID NO: 36812 - DNA, 110 bp, synthetic construct
  source 1..110: mol_type = other DNA
caaactcttgactaacaaggaacaggcgttggtagataaattctccagcttcctcgctaacaggtgggagaattctgaggtgagtcccacttgcctacagtgataactct

SEQ ID NO: 36813 - DNA, 110 bp, synthetic construct
  source 1..110: mol_type = other DNA
tgtatactttagcacaatgtaaaaggaagacgatgtggtcacaggagtctacttggcattcccagatttctggttgttttttttttaggctgcttcaaacccacatcaca

SEQ ID NO: 36814 - DNA, 110 bp, synthetic construct
  source 1..110: mol_type = other DNA
caggatccctaacccactgcgctgggccaaggatcaaacctgcatctcaccagagacctaagctgctgcagagacaatgctggatccttaacctgtgccacagtgggacc

SEQ ID NO: 36815 - DNA, 110 bp, synthetic construct
  source 1..110: mol_type = other DNA
acctaagctgctgcagagacaatgctggatccttaacctgtgccacagtgggacctcctctcctaggagaggatattctaatcttaaagatatgtggccttataatgaac

SEQ ID NO: 36816 - DNA, 110 bp, synthetic construct
  source 1..110: mol_type = other DNA
acttggaaacccgtgtggctttcctagtaagatgcttccatgggtctttttgcctatttcaattaagctgcataatatacccagtactaggagctggtcctgagtcataa

SEQ ID NO: 36817 - DNA, 110 bp, synthetic construct
  source 1..110: mol_type = other DNA
agatagagtttgactcagccaggggttctgtcatttgctagttgtaaataccctttgcacattatcttacctgtctgaggtgtttttttgtttttgcatataaaatggtt

SEQ ID NO: 36818 - DNA, 110 bp, synthetic construct
  source 1..110: mol_type = other DNA
tgctagttgtaaataccctttgcacattatcttacctgtctgaggtgtttttttgtttttgcatataaaatggttatcatataactgtttcttagggaaatactgtttgc

SEQ ID NO: 36819 - DNA, 110 bp, synthetic construct
  source 1..110: mol_type = other DNA
acatgttgatgcatcgaaatcatccagagagcattttagaacacacagcccaaagatttccagttccaccaagatagagtagccccattcctcttaatcctcccccttca

SEQ ID NO: 36820 - DNA, 110 bp, synthetic construct
  source 1..110: mol_type = other DNA
atttccagttccaccaagatagagtagccccattcctcttaatcctcccccttcatctaaaaacatcggccacagcccaacaaagaagcagtgccgtctctgaaagatag

SEQ ID NO: 36821 - DNA, 110 bp, synthetic construct
  source 1..110: mol_type = other DNA
agcagacatttattgagtagctgctgaggctgaagtgttttgccaagggggaatggcatatataagtaaaacagttcctagccttcatttcatccaaggggctgtgttct

SEQ ID NO: 36822 - DNA, 110 bp, synthetic construct
  source 1..110: mol_type = other DNA
gcatatataagtaaaacagttcctagccttcatttcatccaaggggctgtgttctaatgctgacacagagctatagcagacttagctgtcacgtcacatcatagggtctt

SEQ ID NO: 36823 - DNA, 110 bp, synthetic construct
  source 1..110: mol_type = other DNA
tttcacagaaccccccctcctccccaagtggcatcagtccttcttccttgatctcccaatgcatgttgttgtacttctattatagctcttatcacactctgccttgtagc

SEQ ID NO: 36824 - DNA, 110 bp, synthetic construct
  source 1..110: mol_type = other DNA
ccaatgcatgttgttgtacttctattatagctcttatcacactctgccttgtagcatagtcatttctgtgtgttttcccctttggactcagagctcctagagggcaaaca

SEQ ID NO: 36825 - DNA, 110 bp, synthetic construct
  source 1..110: mol_type = other DNA
attttaattactaacaagttctcagatgatgcccaggctgccagtctgggaaccatatattgagaaccattgttctttctgatcttccctttctgctcagtctgattttg

SEQ ID NO: 36826 - DNA, 110 bp, synthetic construct
  source 1..110: mol_type = other DNA
tatattgagaaccattgttctttctgatcttccctttctgctcagtctgattttgatgcagcagatataaaattgggcctcttgaaaacattcaccctcactgttaacct

SEQ ID NO: 36827 - DNA, 110 bp, synthetic construct
  source 1..110: mol_type = other DNA
aaggctgagcctggacagtgagtcacgttcatccagagctccaccttcattcttctgtgtgtcaccaccttttccattttctgccaagacacatgaagacagctgctgat

SEQ ID NO: 36828 - DNA, 110 bp, synthetic construct
  source 1..110: mol_type = other DNA
tttcttttttttgtcttcttagggctatacccacggcatatggaagtttctaggctgggggttgaattggaactgtagctgcaggcctagtcacagccacagcaatgcca

SEQ ID NO: 36829 - DNA, 110 bp, synthetic construct; identical to SEQ ID NO: 36828
  source 1..110: mol_type = other DNA

SEQ ID NO: 36830 - DNA, 110 bp, synthetic construct
  source 1..110: mol_type = other DNA
gtttggcgtggtgccctctgtgtactagaggaagaaagcgtaccttgtttgcactccaaccagatactggtgcatcatgttacagctctgcttggttctgagctcctctg

SEQ ID NO: 36831 - DNA, 110 bp, synthetic construct
  source 1..110: mol_type = other DNA
ccaaccagatactggtgcatcatgttacagctctgcttggttctgagctcctctgttcaatctcgtcctgacagatgctgttgttgccaccccttagcaagacaaatgca

SEQ ID NO: 36832 - DNA, 110 bp, synthetic construct
  source 1..110: mol_type = other DNA
gttgtgtgatattttggtacattttcactttagctgaatacacctttcatttcattcttttaaatggtgcgagcacattgcaaatcagctctctgatcaccttgtagtca

SEQ ID NO: 36833 - DNA, 110 bp, synthetic construct
  source 1..110: mol_type = other DNA
gtaagggaaggaggtatctgagtaaagttgcacggaaatgggtatgtccacacacacacatttgtatgaaaaaccccgtgccaaactccagccagtccttttgcaaaggc

SEQ ID NO: 36834 - DNA, 110 bp, synthetic construct
  source 1..110: mol_type = other DNA
gttaaagacctagcgttgctgcgagctgtggtgtaagttgcagatgtagctcagatcccaagttgccgtggctgtggttgtggcctgcaactgcagctccagttcatccc

SEQ ID NO: 36835 - DNA, 110 bp, synthetic construct; identical to SEQ ID NO: 36834
  source 1..110: mol_type = other DNA

SEQ ID NO: 36836 - DNA, 110 bp, synthetic construct
  source 1..110: mol_type = other DNA
tttttcttgtatccttataaaaacttacgttactactttggtccttttccagaatggatttggtggtagtggtagtggtgatgtaatgataatagctaggtttaatcaaa

SEQ ID NO: 36837 - DNA, 110 bp, synthetic construct; identical to SEQ ID NO: 36836
  source 1..110: mol_type = other DNA

SEQ ID NO: 36838 - DNA, 110 bp, synthetic construct
  source 1..110: mol_type = other DNA
tgccatggcctcttcaacccgcacaaggctttctgctcatagacatgtattttcagattttttttttctccagataaagtcaaattggccatcacagctgaaatgcccac

SEQ ID NO: 36839 - DNA, 110 bp, synthetic construct
  source 1..110: mol_type = other DNA
gattttttttttctccagataaagtcaaattggccatcacagctgaaatgcccacagaaaggcagtctttagaatgagaattggaaaacgctcaattatattgtgatgaa

SEQ ID NO: 36840 - DNA, 110 bp, synthetic construct
  source 1..110: mol_type = other DNA
taacacagacacttcacatgttgttccactcccccctccccctttttaagttggcatttcaattttttgttcaaaaattctcatctctttacttggcaccttccatattt

SEQ ID NO: 36841 - DNA, 110 bp, synthetic construct
  source 1..110: mol_type = other DNA
atttcaattttttgttcaaaaattctcatctctttacttggcaccttccatattttctttcccacgctgtcctcctcctttccctgtggttttccttccccatcacttct

SEQ ID NO: 36842 - DNA, 110 bp, synthetic construct
  source 1..110: mol_type = other DNA
gaatgtttacgtcttttttgtttttcttgtctgacagtctttgccttttgagctgtagatatttagatcatttgcatgctgtatgattgttgatatggttagttttaaat

SEQ ID NO: 36843 - DNA, 110 bp, synthetic construct
  source 1..110: mol_type = other DNA
gtcagaaggttgatttaggaagaccttttgcatttgtatggcagaaaaatatgttgtatctcaattacaggcccaatttgctattaaatagaaagggagttccctttgtg

SEQ ID NO: 36844 - DNA, 110 bp, synthetic construct
  source 1..110: mol_type = other DNA
ttttgcatttgtatggcagaaaaatatgttgtatctcaattacaggcccaatttgctattaaatagaaagggagttccctttgtggctcagcgattaacaaacctgacta

SEQ ID NO: 36845 - DNA, 110 bp, synthetic construct
  source 1..110: mol_type = other DNA
gttcctagtcggattcgttaaccactttgccacgacgggaactcctggtttgggttgttaaaataatatctccatttctctcctcaccgttcttgtgcttttattacttt

SEQ ID NO: 36846 - DNA, 110 bp, synthetic construct; identical to SEQ ID NO: 36845
  source 1..110: mol_type = other DNA

SEQ ID NO: 36847 - DNA, 110 bp, synthetic construct
  source 1..110: mol_type = other DNA
acttaggttgggaatgaatgagcaagacttttctgggcttttttggatagcaagacctcagggatgtggtacgtgtccctaggcatcagtgaaaccctgacgcctgccct

SEQ ID NO: 36848 - DNA, 110 bp, synthetic construct
  source 1..110: mol_type = other DNA
cctcagggatgtggtacgtgtccctaggcatcagtgaaaccctgacgcctgcccttttgctggtcttggaacttgtattccccctccgtctgatggtgcaggtcctgttg

SEQ ID NO: 36849 - DNA, 110 bp, synthetic construct
  source 1..110: mol_type = other DNA
tcagtgacgtacaaaagcagacacatgtgtgtcttgaacacagacacagaaacgcatagggagccctccttctgtgtcgggcgctctgctaggatcttacgtgcgagtct

SEQ ID NO: 36850 - DNA, 110 bp, synthetic construct
  source 1..110: mol_type = other DNA
atagggagccctccttctgtgtcgggcgctctgctaggatcttacgtgcgagtctcctgtttataccacatcagtgccttctagctggtattctcattttacaggtataa

SEQ ID NO: 36851 - DNA, 110 bp, synthetic construct
  source 1..110: mol_type = other DNA
ttgactaaaccatccacggtccctgccctcgaggtctgcgattggccactgaggcgcatatttccacttcctgtgttccatttgttatgttaattttccaccaagctcaa

SEQ ID NO: 36852 - DNA, 110 bp, synthetic construct
  source 1..110: mol_type = other DNA
gcatatttccacttcctgtgttccatttgttatgttaattttccaccaagctcaagccccacctctgtcaattatttttgtttcaaccttctaattacaacattatatga

SEQ ID NO: 36853 - DNA, 110 bp, synthetic construct; identical to SEQ ID NO: 36851
  source 1..110: mol_type = other DNA

SEQ ID NO: 36854 - DNA, 110 bp, synthetic construct; identical to SEQ ID NO: 36852
  source 1..110: mol_type = other DNA

SEQ ID NO: 36855 - DNA, 110 bp, synthetic construct
  source 1..110: mol_type = other DNA
cgaggacctactgtctgtaaggcaatgcacctaaggatggaggagatactgcaaaatttaggaccatgcccctgctgtctgtatgtacatatagttaggaataaacacgt

SEQ ID NO: 36856 - DNA, 110 bp, synthetic construct
  source 1..110: mol_type = other DNA
atttaggaccatgcccctgctgtctgtatgtacatatagttaggaataaacacgtgagtatgaaggggtgctatggtggaaatggtgagaaagggatcaaggggctggat

SEQ ID NO: 36857 - DNA, 110 bp, synthetic construct
  source 1..110: mol_type = other DNA
actgaaaggaaacaaaccactgatgtgcccaacaacacagatgaagttcagaaacagagtgtacagaaggaaagaagtcagaagcaaaaatatgttctctctgattccac

SEQ ID NO: 36858 - DNA, 110 bp, synthetic construct
  source 1..110: mol_type = other DNA
agagtgtacagaaggaaagaagtcagaagcaaaaatatgttctctctgattccacttatgtgaaattctggaacaaacaagactaatctatgataacagaaagtaaacca

SEQ ID NO: 36859 - DNA, 110 bp, synthetic construct
  source 1..110: mol_type = other DNA
agtgcttcttgtttgtaaactgtgatcttcgcttgcccaggggcctagggaaaggaggaggtgaatagcttatttttaaaattctctaagggtcagcacatctccattcc

SEQ ID NO: 36860 - DNA, 110 bp, synthetic construct
  source 1..110: mol_type = other DNA
aggaggtgaatagcttatttttaaaattctctaagggtcagcacatctccattcctcagaatttatctcatggcttgttactctttctcgtagagttaaaatagcctgtt

SEQ ID NO: 36861 - DNA, 110 bp, synthetic construct
  source 1..110: mol_type = other DNA
aaggtcaaaaccgtgttcttcagccacccttactgtctcctccgtggctttgtcacatcaatcacttctctccctttgtctcgtactcagcgtctccttcaccgctttct

SEQ ID NO: 36862 - DNA, 110 bp, synthetic construct
  source 1..110: mol_type = other DNA
catcaatcacttctctccctttgtctcgtactcagcgtctccttcaccgctttcttccctctcggcgtacagacttgagcaagtcttctccatcttaaaaaaaaaacaaa

SEQ ID NO: 36863 - DNA, 110 bp, synthetic construct
  source 1..110: mol_type = other DNA
tcccgagatttctgccagccctcttccagacaacagcatggttcctcagctgtccttctagtagggagacagatggaacctcgggggcttcctgtttaggcgtctcagaa

SEQ ID NO: 36864 - DNA, 110 bp, synthetic construct
  source 1..110: mol_type = other DNA
ttctagtagggagacagatggaacctcgggggcttcctgtttaggcgtctcagaattcggagttgttatgatgtgtgggctttgaaaatgccacactttagggaagctga

SEQ ID NO: 36865 - DNA, 110 bp, synthetic construct
  source 1..110: mol_type = other DNA
ctgatgacgtgaaggggaggatggaggtgagggtgagaatccgtggggatccgttccattttggagatgttaactttgagagacctgagggacgtctaggtggaggactt

SEQ ID NO: 36866 - DNA, 110 bp, synthetic construct
  source 1..110: mol_type = other DNA
ccattttggagatgttaactttgagagacctgagggacgtctaggtggaggactttggttgacacctgaagatacagactggggtgagacagacggatctgtgaaattaa

SEQ ID NO: 36867 - DNA, 110 bp, synthetic construct
  source 1..110: mol_type = other DNA
ggcggtaactatttgaagagctatcatgtgaaagaaggttaaagcttatttttattctttatgtcctcatacaacagaaaatgtgtgagcaatttaagctcaattaaaga

SEQ ID NO: 36868 - DNA, 110 bp, synthetic construct
  source 1..110: mol_type = other DNA
tctttatgtcctcatacaacagaaaatgtgtgagcaatttaagctcaattaaagagaaaaagtgttttcaccgatccatattccaagatggtgtcgactgcctttgttat

SEQ ID NO: 36869 - DNA, 110 bp, synthetic construct
  source 1..110: mol_type = other DNA
ctcctgagagtagttttgggaattaaatatgatgggaccatttcagtgcctggcgtggagctgatcccccataattgctaactattacaataattactgggttttccccc

SEQ ID NO: 36870 - DNA, 110 bp, synthetic construct
  source 1..110: mol_type = other DNA
gtgcttggagagagttcccatggcgaacccctacccggaaagaggcatgctgcagagacaaggggtgagctgtacttcaggaaccaggcttttccaaaatggatggctca

SEQ ID NO: 36871 - DNA, 110 bp, synthetic construct
  source 1..110: mol_type = other DNA
agacaaggggtgagctgtacttcaggaaccaggcttttccaaaatggatggctcagaactgctctgctgttgtggactctcctctttcttcccttttttttttttttttg

SEQ ID NO: 36872 - DNA, 110 bp, synthetic construct
  source 1..110: mol_type = other DNA
aagggaagcgggtaagtggtgacaaggagtctaggaaggcgtttggtgtcaggtcaaaatgcacctggaacacctgctggattagctcagagtttgggtttggtttgatg

SEQ ID NO: 36873 - DNA, 110 bp, synthetic construct
  source 1..110: mol_type = other DNA
aaaatgcacctggaacacctgctggattagctcagagtttgggtttggtttgatgcgatggggcggagaaatgggacggtgaggttttccatggaggaagcagcagatga

SEQ ID NO: 36874 - DNA, 110 bp, synthetic construct
  source 1..110: mol_type = other DNA
aataatatttattttacaagcaatcagactctgacacagtattcttcctcctatcacttttgaaaagcacggggggcctcgggttgactcggccacatggtcaacttcct

SEQ ID NO: 36875 - DNA, 110 bp, synthetic construct
  source 1..110: mol_type = other DNA
acttttgaaaagcacggggggcctcgggttgactcggccacatggtcaacttcctaaagagctggtttgggacgtgggatgaagaaagtgccaggatctgtctgggtgct

SEQ ID NO: 36876 - DNA, 110 bp, synthetic construct; identical to SEQ ID NO: 36874
  source 1..110: mol_type = other DNA

SEQ ID NO: 36877 - DNA, 110 bp, synthetic construct; identical to SEQ ID NO: 36875
  source 1..110: mol_type = other DNA

SEQ ID NO: 36878 - DNA, 110 bp, synthetic construct
  source 1..110: mol_type = other DNA
atagttgtctttctctgtctgactgacttcacttaatatgataatttctagatccatccatgttgcttgtagcagcatttgcatgttttagatgtttgtctagattaagt

SEQ ID NO: 36879 - DNA, 110 bp, synthetic construct; identical to SEQ ID NO: 36878
  source 1..110: mol_type = other DNA

SEQ ID NO: 36880 - DNA, 110 bp, synthetic construct
  source 1..110: mol_type = other DNA
ccaaccagggctgaggggagcctgcagaggtgaggctcgtggggcccctgccatttacgtgttcaaactgtgccctgaactcggtcccacacagctggtctcccacatgg

SEQ ID NO: 36881 - DNA, 110 bp, synthetic construct
  source 1..110: mol_type = other DNA
tacgtgttcaaactgtgccctgaactcggtcccacacagctggtctcccacatggccagggccttggtcttccatctgtgtatccaaagagtccctaaaacaaaggaata

SEQ ID NO: 36882 - DNA, 110 bp, synthetic construct
  source 1..110: mol_type = other DNA
cccaggtcacctaggcctttgcctcggcacctccctggagcattagaaatgccaagcttcagatctgtcccctgatctttcccgtcagaatctgcatttggacaagatcc

SEQ ID NO: 36883 - DNA, 110 bp, synthetic construct
  source 1..110: mol_type = other DNA
gcttcagatctgtcccctgatctttcccgtcagaatctgcatttggacaagatccccgggggatctgtgtgcgttacggcaggttgccgccttcccatcgcacaggctga

SEQ ID NO: 36884 - DNA, 110 bp, synthetic construct
  source 1..110: mol_type = other DNA
tttatatgtcatgctaagtttgtaattaccgaaatgtagaaatatagtggaccgaaatgagtttctggtcttctcggcattcctgcccccatccagccacgtctgagcgg

SEQ ID NO: 36885 - DNA, 110 bp, synthetic construct
  source 1..110: mol_type = other DNA
aatgagtttctggtcttctcggcattcctgcccccatccagccacgtctgagcggcctggatcgtgaaaggggacgattgatgcgtggggagcggggggcaggtgctcag

SEQ ID NO: 36886 - DNA, 110 bp, synthetic construct
  source 1..110: mol_type = other DNA
gaggaggagtgatgattctcttttctggtgtcagccaagtgttttatcacctaccgccatccccggggcacctggtggcccctgagaagggccgcctggccttgtccacc

SEQ ID NO: 36887 - DNA, 110 bp, synthetic construct
  source 1..110: mol_type = other DNA
gggccaggggtggggggatggcagtgatttctttcccaaagctaaacacacagaactcatgtgttattgctcccttttcctggtcttttcaaactacataacttgacata

SEQ ID NO: 36888 - DNA, 110 bp, synthetic construct
  source 1..110: mol_type = other DNA
ctcatgtgttattgctcccttttcctggtcttttcaaactacataacttgacataggaaaaccgtagaatagtcttgtaaaaaagccttcctcttcctttaagccacccc

SEQ ID NO: 36889 - DNA, 110 bp, synthetic construct
  source 1..110: mol_type = other DNA
caggaagcaacttcggtgaattgtgaatccagtgaatacgtcctacaaggaaatgtcagaatttctagtggagaagtgattgattcccactcgagtaatctcttctgtgc

SEQ ID NO: 36890 - DNA, 110 bp, synthetic construct
  source 1..110: mol_type = other DNA
ggtagtttccaggagaggagcaggagtggcccactcgctgagtgcaagggattcccatgtgccgctgtgtttagttcatccattcgcccagccacaggggtcttccaccc

SEQ ID NO: 36891 - DNA, 110 bp, synthetic construct
  source 1..110: mol_type = other DNA
catgtgccgctgtgtttagttcatccattcgcccagccacaggggtcttccacccatacgtaaactgtcctgtgactgctgggtgacagagccggttcttgtgtccccct

SEQ ID NO: 36892 - DNA, 110 bp, synthetic construct
  source 1..110: mol_type = other DNA
tcttgctgtttctatgctgcctctaaggtcaggacttcggaatggttctgctttaggatcaaaagctttcctgagcacctgaacaaagaggaaatttaaggcataggcac

SEQ ID NO: 36893 - DNA, 110 bp, synthetic construct
  source 1..110: mol_type = other DNA
ggatcaaaagctttcctgagcacctgaacaaagaggaaatttaaggcataggcacatttaaattcaggagtcactcagttctgtgaagaaaagcaggtggagggagttcc

SEQ ID NO: 36894 - DNA, 110 bp, synthetic construct
  source 1..110: mol_type = other DNA
cggtgtcctgtcgtggggcgctgatgacctgggtctgggggtggcttccactcacgtgtctgcctgtgcttttctctgctcctgcccgcacagatccggagcttggtgtc

SEQ ID NO: 36895 - DNA, 110 bp, synthetic construct
  source 1..110: mol_type = other DNA
gtgtctgcctgtgcttttctctgctcctgcccgcacagatccggagcttggtgtcggcgcgctacccgaacacgacggccacgatgcggggcccattgtccccaagatat

SEQ ID NO: 36896 - DNA, 110 bp, synthetic construct
  source 1..110: mol_type = other DNA
gaggaggggcgcagctcactgtggcaccttccggccagggtccccactgctgctgagagaaggcacttgaaggggacgaagcatttgccttttatgaaaaaaagcccctg

SEQ ID NO: 36897 - DNA, 110 bp, synthetic construct
  source 1..110: mol_type = other DNA
agcttcattctccatgcacaagctctcagggtaccacctgcatgagctttgggagtgggcactagccatcactgccatctcagactccagaggccttcttgggagcatgt

SEQ ID NO: 36898 - DNA, 110 bp, synthetic construct
  source 1..110: mol_type = other DNA
gtgcaaaggcagggatggatgctcacctggcagcctgtcccaggaactagcccgagacctgagacatggccatcctctcgtgtgtcacattttcctgcctctttacaaag

SEQ ID NO: 36899 - DNA, 110 bp, synthetic construct
  source 1..110: mol_type = other DNA
cccgcctcacttttagaaccatttaggaattttctggatgactcacctttgaaactgccccatcgctgcaactttgggagatataccccgcactgcaccttctctggcca

SEQ ID NO: 36900 - DNA, 110 bp, synthetic construct
  source 1..110: mol_type = other DNA
tgccccatcgctgcaactttgggagatataccccgcactgcaccttctctggccaaatctgctgcccttaagctggcgtgggacctgagctttcacctagaacgggaggg

SEQ ID NO: 36901 - DNA, 110 bp, synthetic construct
  source 1..110: mol_type = other DNA
cccggagctctgcctcctgtgtttgccaagaatttattgctgtgcacatcctttcatggtatgaactgccctggtatctttccaagaaagctctatttttgctcggctta

SEQ ID NO: 36902 - DNA, 110 bp, synthetic construct
  source 1..110: mol_type = other DNA
atggtatgaactgccctggtatctttccaagaaagctctatttttgctcggcttagccagggttgaggacaaggggttgcaaagatgcaaacctacagactgcatgggcc

SEQ ID NO: 36903 - DNA, 110 bp, synthetic construct
  source 1..110: mol_type = other DNA
gttttagtggctttgcatcggaaacagggactaagaccaagcacagatttcttattacaaatcacaatatcaggagttcccgctgtggcccagtggttaacgaatccaac

SEQ ID NO: 36904 - DNA, 110 bp, synthetic construct; identical to SEQ ID NO: 36903
  source 1..110: mol_type = other DNA

SEQ ID NO: 36905 - DNA, 110 bp, synthetic construct
  source 1..110: mol_type = other DNA
cccacagaaccaggggctccatgtacagagggatgtgcaatgccagaggacactctacccagctcaactgccaggtctcccctaggggaagaaaccatcgaacttaattt

SEQ ID NO: 36906 - DNA, 110 bp, synthetic construct
  source 1..110: mol_type = other DNA
cttccaatggagaataagaccatgcaatcacaattcctgcctgggttgtctttgcacagctctggtatctgcgcactacaataactctatctcagagttcttgttgtggc

SEQ ID NO: 36907 - DNA, 110 bp, synthetic construct
  source 1..110: mol_type = other DNA
aatcacaattcctgcctgggttgtctttgcacagctctggtatctgcgcactacaataactctatctcagagttcttgttgtggctcagcagttacgaacccaactagta

SEQ ID NO: 36908 - DNA, 110 bp, synthetic construct
  source 1..110: mol_type = other DNA
gggtactggaaatttgctaaaaaagaggagatttcagttactctcatcacacagaaaatatgtaagatatattaattagctcaactatagtaatcattccactctctgta

SEQ ID NO: 36909 - DNA, 110 bp, synthetic construct
  source 1..110: mol_type = other DNA
aaatatgtaagatatattaattagctcaactatagtaatcattccactctctgtatgtatatcaaatcattatggaagttcctgtcgtggctcagcagaaacgaatctga

SEQ ID NO: 36910 - DNA, 110 bp, synthetic construct
  source 1..110: mol_type = other DNA
gctttatcttttgaggccagaactggactgcaggctttttaagggctcgattcatattttggacgttttcataacagcttcaacatctgccgaagcaccttgaacattgt

SEQ ID NO: 36911 - DNA, 110 bp, synthetic construct
  source 1..110: mol_type = other DNA
attttggacgttttcataacagcttcaacatctgccgaagcaccttgaacattgtgtgggcatcaaggctttactagtggattaattggatgggagctagttttagaagg

SEQ ID NO: 36912 - DNA, 110 bp, synthetic construct
  source 1..110: mol_type = other DNA
catacatggagcagccctgtaccatgttatctaagtaatttcccaagatatcttgttgcagtggatgcctcagctgaccttctgaccaagcaattacatctttggaaatt

SEQ ID NO: 36913 - DNA, 110 bp, synthetic construct
  source 1..110: mol_type = other DNA
aactgttctagatcaatgcaccctgcttcactcccccttgatcagcttcactgtcgctctgccatcatcaaggagaaagcccgccattgtccttctggctttgactgaat

SEQ ID NO: 36914 - DNA, 110 bp, synthetic construct
  source 1..110: mol_type = other DNA
gctctgccatcatcaaggagaaagcccgccattgtccttctggctttgactgaattgccaagacactgtcagttatttccagcagttagggttctaaccctcacatcccg

SEQ ID NO: 36915 - DNA, 110 bp, synthetic construct
  source 1..110: mol_type = other DNA
tctccatctagtggatacctcctaagctagtgtttatgttgctgtacctgggctctcccagataaagaagggttttgcctcttacttccctttgtctggtttctggtgtt

SEQ ID NO: 36916 - DNA, 110 bp, synthetic construct
  source 1..110: mol_type = other DNA
tcttcatggcagcctgacccggtcgcctgtggctggggaagacggtgcttggtacagtgcagtctggtctttttgcttctccatttccagggccagcatctgttaaaaac

SEQ ID NO: 36917 - DNA, 110 bp, synthetic construct
  source 1..110: mol_type = other DNA
agtgcagtctggtctttttgcttctccatttccagggccagcatctgttaaaaacaaaggctcacgcttcgagtgggagggtgtgtgcggtggggctgctggtgtggatg

SEQ ID NO: 36918 - DNA, 110 bp, synthetic construct
  source 1..110: mol_type = other DNA
ggggttatttcatttatgtgacaccccctcttaaaaatctgattaatttttatcttctagctcagtctccagtggagcaaatgttttgtttcttagccttggtgacctag

SEQ ID NO: 36919 - DNA, 110 bp, synthetic construct
  source 1..110: mol_type = other DNA
taggagacaataggattagaggtagaggagtgaaattgagtgtgtttggggtctccaagaccaccttcaggttcaatgatccactagaagtactcagaaaactcagaaaa

SEQ ID NO: 36920 - DNA, 110 bp, synthetic construct
  source 1..110: mol_type = other DNA
caagaccaccttcaggttcaatgatccactagaagtactcagaaaactcagaaaagctgttatgttcatggttatcatttattgccgtggaaggatacagaggagaatca

SEQ ID NO: 36921 - DNA, 110 bp, synthetic construct
  source 1..110: mol_type = other DNA
acaaatttgaattgcctcagggcacttatcttcagcctgtaagttaaaagtcctcccatggaagcaaaactaaggagttgaggcagggaccaacgggagtcagccgtatg

SEQ ID NO: 36922 - DNA, 110 bp, synthetic construct
  source 1..110: mol_type = other DNA
ccatggaagcaaaactaaggagttgaggcagggaccaacgggagtcagccgtatgagtgactagctcgtgaatgtattcacctgtcggggaacaaatgtgcgtccatctt

SEQ ID NO: 36923 - DNA, 110 bp, synthetic construct
  source 1..110: mol_type = other DNA
gttttgattaaccaagctgcttattgccaaggaaggtgttgattacccacaagatacccattgttggttgtggcctgagaacgggatttgcagaaacttatgcagagaca

SEQ ID NO: 36924 - DNA, 110 bp, synthetic construct
  source 1..110: mol_type = other DNA
acccattgttggttgtggcctgagaacgggatttgcagaaacttatgcagagacaactccagtgttgagctgtctctgttcttcctacagatggggctttggcattagaa

SEQ ID NO: 36925 - DNA, 110 bp, synthetic construct
  source 1..110: mol_type = other DNA
ccttacaaaagagtatgtgggcgacatggctgcagagattttgggaccatgtaatctacacgtgggagactgttctacccaccctcccagctcaggtggattagccatca

SEQ ID NO: 36926 - DNA, 110 bp, synthetic construct
  source 1..110: mol_type = other DNA
ctacacgtgggagactgttctacccaccctcccagctcaggtggattagccatcagccatccaagggcagagggcctgggacctcgtctgcagtctctccctgctctgtt

SEQ ID NO: 36927 - DNA, 110 bp, synthetic construct
  source 1..110: mol_type = other DNA
atacagcccatgcaggagtccctctcatccaccctctttgcacaataaccctcttagaagggttattgctttttcctccctgagaccttccggagcgtctttctctgcca

SEQ ID NO: 36928 - DNA, 110 bp, synthetic construct
  source 1..110: mol_type = other DNA
agaagggttattgctttttcctccctgagaccttccggagcgtctttctctgccattgctttgctccccttgtctggttccttctctctgcttatccctgaaaagtagat

SEQ ID NO: 36929 - DNA, 110 bp, synthetic construct
  source 1..110: mol_type = other DNA
tgggggctcctgccctgactgctgcctgctccttccatagagtcttaaggtagaaaccccaaaaaaggcaaatatattccattttaccattactttaggctttgagcccc

SEQ ID NO: 36930 - DNA, 110 bp, synthetic construct
  source 1..110: mol_type = other DNA
accccaaaaaaggcaaatatattccattttaccattactttaggctttgagccccaatcctagtgaggccaccgtggaaactgtcatcccctgaggagtggaccaaagtg

SEQ ID NO: 36931 - DNA, 110 bp, synthetic construct
  source 1..110: mol_type = other DNA
agagctactcatgggcccagcagcatcagcaagatctgggaggtggacctcaatgcagatgctccagccccatcacagaatcactgaatcattatctgcagggtggagcc

SEQ ID NO: 36932 - DNA, 110 bp, synthetic construct
  source 1..110: mol_type = other DNA
cagatgctccagccccatcacagaatcactgaatcattatctgcagggtggagcccaggagtgtgtattttaataagctctccacccctgcccaagtttttgattctgta

SEQ ID NO: 36933 - DNA, 110 bp, synthetic construct
  source 1..110: mol_type = other DNA
gtttgtactaaggtacctaacattctagtccagaaaggagatccttctcccagcacgtggctgccgaccatggtgtaaaagagccagcccttcccgctctgctctccacc

SEQ ID NO: 36934 - DNA, 110 bp, synthetic construct
  source 1..110: mol_type = other DNA
cgtggctgccgaccatggtgtaaaagagccagcccttcccgctctgctctccaccccatcatctgctgggaatcccagtctctaaaaaggtgcacaaacagaggagttga

SEQ ID NO: 36935 - DNA, 110 bp, synthetic construct
  source 1..110: mol_type = other DNA
caatgttggacctgtgattgttctcaccaatctgctggtttcatggtctggcctatctcaatccatggcaagtccatcctgttgacagctcagacccagttcactcagcc

SEQ ID NO: 36936 - DNA, 110 bp, synthetic construct
  source 1..110: mol_type = other DNA
tacatcaagggatgtgtaataaatcatacaagtatctcctcctgataaatttataaaaatacatgccgtcaaatcctgattccatactaccacgcaagacctaacatgtt

SEQ ID NO: 36937 - DNA, 110 bp, synthetic construct
  source 1..110: mol_type = other DNA
aaaatacatgccgtcaaatcctgattccatactaccacgcaagacctaacatgttttattcatttctggatgtttccctttatgaagaatgaggaaacatgttttattca

SEQ ID NO: 36938 - DNA, 110 bp, synthetic construct
  source 1..110: mol_type = other DNA
agaaactcagtcttgaggcatcaagattattggagccttggttggaaggtgtgtctagcaaatactgtatgataccacctacgtgcagaatctaaaatagtcaaactcat

SEQ ID NO: 36939 - DNA, 110 bp, synthetic construct
  source 1..110: mol_type = other DNA
tagcaaatactgtatgataccacctacgtgcagaatctaaaatagtcaaactcatagaagcagagactagtatgggggtcgccagcagctgggaggagaggaaagcagag

SEQ ID NO: 36940 - DNA, 110 bp, synthetic construct
  source 1..110: mol_type = other DNA
caagagtctaggcccaggaggtcccataacgaatctgactagcattcataaggacacatgttctatccccggccttgctccgcgggttaaggatcccgtgttgctatacc

SEQ ID NO: 36941 - DNA, 110 bp, synthetic construct
  source 1..110: mol_type = other DNA
tcataaggacacatgttctatccccggccttgctccgcgggttaaggatcccgtgttgctatacctgtggcgtaggccagccactgtagctccaatttgacccctaacct

SEQ ID NO: 36942 - DNA, 110 bp, synthetic construct
  source 1..110: mol_type = other DNA
gatgctggatcagagtttatctgttcctaaagtttacacctccaccgacgatgctgaatggattttcccacggcaggtctctcaaagctaatggaaaattccccaacagc

SEQ ID NO: 36943 - DNA, 110 bp, synthetic construct
  source 1..110: mol_type = other DNA
gaatggattttcccacggcaggtctctcaaagctaatggaaaattccccaacagcaaaagagcaaagcaaatgagaactgaaactaacagtgaaagcccaactaggcctg

SEQ ID NO: 36944 - DNA, 110 bp, synthetic construct
  source 1..110: mol_type = other DNA
ctacttggatttgtaacaacggagtcacaacggcaggtcctaatttccttttaagatgatgaaaattatttggaaacagagagaggtgacggtcgcacagcatgtaaata

SEQ ID NO: 36945 - DNA, 110 bp, synthetic construct; identical to SEQ ID NO: 36944
  source 1..110: mol_type = other DNA

SEQ ID NO: 36946 - DNA, 110 bp, synthetic construct
  source 1..110: mol_type = other DNA
tctcaacctaatcaccccccgaaagaccctgcctcctaaaaccatcacattgggggtgaagagctgccctatgtgaattctgggctgatacaatgtaacagattttgtgt

SEQ ID NO: 36947 - DNA, 110 bp, synthetic construct
  source 1..110: mol_type = other DNA
gtgaagagctgccctatgtgaattctgggctgatacaatgtaacagattttgtgtctatcatttattctcctctgcagggggtgactgcctgtgattcattcaataggac

SEQ ID NO: 36948 - DNA, 110 bp, synthetic construct
  source 1..110: mol_type = other DNA
gtttggaagctggtgtcatggggtcccgatcatcccatttgacaagttagattttcacctccgttcccatgaggacagggtctgtgaacggtaaagtgttgaggctgagg

SEQ ID NO: 36949 - DNA, 110 bp, synthetic construct
  source 1..110: mol_type = other DNA
cagaactgcgaaagtggtctggatcctgctagttgcactaagaaggtagatttgcagtgtctacagagccagaagcccactccggggctggccccagcctggcgccttgg

SEQ ID NO: 36950 - DNA, 110 bp, synthetic construct
  source 1..110: mol_type = other DNA
agtgtctacagagccagaagcccactccggggctggccccagcctggcgccttggagcccactgaaggctgccagaccctggctgggccggatgctctgcctgcaagagg

SEQ ID NO: 36951 - DNA, 110 bp, synthetic construct; identical to SEQ ID NO: 36949
  source 1..110: mol_type = other DNA

SEQ ID NO: 36952 - DNA, 110 bp, synthetic construct; identical to SEQ ID NO: 36950
  source 1..110: mol_type = other DNA

SEQ ID NO: 36953 - DNA, 110 bp, synthetic construct
  source 1..110: mol_type = other DNA
gataatgataaaagaatctgactatagaggtctcagtcactgtggggatgtaggtttgatctctggcccagctcagtgggttaaaggagccagcacagctgcagctgtgg

SEQ ID NO: 36954 - DNA, 110 bp, synthetic construct
  source 1..110: mol_type = other DNA
aggtgccagagacacagcagtgagcaaggcaaccaaagggccaaaggtggtctcgtttacattgcggtccagtaaatgaacacagctagagtcagaaaagaaattagcaa

SEQ ID NO: 36955 - DNA, 110 bp, synthetic construct
  source 1..110: mol_type = other DNA
tttacattgcggtccagtaaatgaacacagctagagtcagaaaagaaattagcaacaatgggtatcccaaaagaggagagggagccaggaaaccagcgaggtaagatgcc

SEQ ID NO: 36956 - DNA, 110 bp, synthetic construct
  source 1..110: mol_type = other DNA
ggttcaaggttaccctccttgccaagtacaagatacggtctgctgtgctatacggtagcctacaaacatggccataattcctctatgcctgtgtcctgttgacctgtagc

SEQ ID NO: 36957 - DNA, 110 bp, synthetic construct
  source 1..110: mol_type = other DNA
cgcccctgtggtcctgcgggccaccggcaaggccaccttgaaggcagaacacaatttttcgtgatcagtcttccttctaagccccagccttcaggaagtcctgggatggc

SEQ ID NO: 36958 - DNA, 110 bp, synthetic construct
  source 1..110: mol_type = other DNA
aagtcaaaatgttgggcattcgcattctggactggttggttcttggttgtctacgggagctggctgtttgagctgttggttctggttctaagagtatccacagggctgtg

SEQ ID NO: 36959 - DNA, 110 bp, synthetic construct
  source 1..110: mol_type = other DNA
agggaagatggagccatggctttggagcagacaggaatctggcacctgtgctggggagagggcatcagtagtagaaactgctcagctgtcctacctcagagttgctgccg

SEQ ID NO: 36960 - DNA, 110 bp, synthetic construct
  source 1..110: mol_type = other DNA
gagagggcatcagtagtagaaactgctcagctgtcctacctcagagttgctgccggagtggctttagccatttttctgccccgtgtctctgcccttgaggtgcatgatcc

SEQ ID NO: 36961 - DNA, 110 bp, synthetic construct
  source 1..110: mol_type = other DNA
ggatctctttggattcatcttttctgggactctgtacttcctgtacctggatatctgtttccttctccaggtttgagaatattttcagctatagtttcatcaaattttga

SEQ ID NO: 36962 - DNA, 110 bp, synthetic construct
  source 1..110: mol_type = other DNA
gtgtactagttgacacatccgccagcaaggaaagggctcaagctcactctgtttcccaaaattcgtgccaacacgatacgctaaggcaatcttactgattcagaccaaaa

SEQ ID NO: 36963 - DNA, 110 bp, synthetic construct
  source 1..110: mol_type = other DNA
aatgctcagacctcaagctgatcaaaaacgagcaagccaatttactgaaggagcatcatcaaccttggagtttttcctaccgatacctcccagacccggctcacctctga

SEQ ID NO: 36964 - DNA, 110 bp, synthetic construct
  source 1..110: mol_type = other DNA
tcatcaaccttggagtttttcctaccgatacctcccagacccggctcacctctgaggcaggctaggagccgcaagctttcctgctttcaagctgaccgcaaagaagctca

SEQ ID NO: 36965 - DNA, 110 bp, synthetic construct
  source 1..110: mol_type = other DNA
ccgaaatgactttgcctagcaagcccactccagggtatatgcccaagagaaataaaaacatatatccacatacaaacttgcacatgaatgtttatatcagcattatccat

SEQ ID NO: 36966 - DNA, 110 bp, synthetic construct
  source 1..110: mol_type = other DNA
gcccaggctagtcaacctcaagcagtaaaacgtctcagttgcaggccactgagtctgccagactacctgagctccaatctccgtcacctcttgtacgacctgggacaagt

SEQ ID NO: 36967 - DNA, 110 bp, synthetic construct
  source 1..110: mol_type = other DNA
tgccagactacctgagctccaatctccgtcacctcttgtacgacctgggacaagttactactctgaaccacatttttcttttaaggaaaggaataaggggagaagacaat

SEQ ID NO: 36968 - DNA, 110 bp, synthetic construct
  source 1..110: mol_type = other DNA
caccagctaacattcgctaagtgttaatctgtgtcagccactattccctgcttcccgtttaatcccgtcaatgacgaggtaagtgctctcttatatctcgtttataaacg

SEQ ID NO: 36969 - DNA, 110 bp, synthetic construct
  source 1..110: mol_type = other DNA
cgtttaatcccgtcaatgacgaggtaagtgctctcttatatctcgtttataaacgaggcaaaagtggggctcagagagcttaaggaacacccttgctaaaggagccaaca

SEQ ID NO: 36970 - DNA, 110 bp, synthetic construct
  source 1..110: mol_type = other DNA
actgctgatgagtatttaattatgtcccaatgttgtacgatgacaaacggtgctgctatgaactctatatcttgtgacgctctgtccaatcagagctgcagtgctggcct

SEQ ID NO: 36971 - DNA, 110 bp, synthetic construct
  source 1..110: mol_type = other DNA
cccaatgttgtacgatgacaaacggtgctgctatgaactctatatcttgtgacgctctgtccaatcagagctgcagtgctggcctaggccacagccacagcaatgccaga

SEQ ID NO: 36972 - DNA, 110 bp, synthetic construct
  source 1..110: mol_type = other DNA
ccacgatgggaactccccctgaagcttttaatttttttttttatttgtttgtttttgccagcctatggcatatggagttcccgggataaggatcagatgtgagccacagt

SEQ ID NO: 36973 - DNA, 110 bp, synthetic construct
  source 1..110: mol_type = other DNA
tgtttgtttttgccagcctatggcatatggagttcccgggataaggatcagatgtgagccacagttgcaacctacgctgcagctaaggcaacatcagatcctgaactcac

SEQ ID NO: 36974 - DNA, 110 bp, synthetic construct
  source 1..110: mol_type = other DNA
ccagagccagggatcaaatccaagctgcagttgcaaactacctaacccactgtcccacatcgggaactcccctaaagcttaaacctttagcttcagggttaaattgcctc

SEQ ID NO: 36975 - DNA, 110 bp, synthetic construct
  source 1..110: mol_type = other DNA
cacatcgggaactcccctaaagcttaaacctttagcttcagggttaaattgcctctgcagggaactcacgtttgtcctggaggaaacagctgcggaggctggctctccac

SEQ ID NO: 36976 - DNA, 110 bp, synthetic construct
  source 1..110: mol_type = other DNA
aactcttttaattctacttctctgattatgatttattcttgaagcttcaaatataggcaagtttccaaagttctgtccttgccatattttcttctccatctgtgcaggat

SEQ ID NO: 36977 - DNA, 110 bp, synthetic construct
  source 1..110: mol_type = other DNA
catcttaaatcctgcctatagtcctcaaaaagatcaccactctaaccctccagcggttttcacaaatctgagtgaactccttctcctgaaacccctgtccttcaggattc

SEQ ID NO: 36978 - DNA, 110 bp, synthetic construct
  source 1..110: mol_type = other DNA
ctagcctgggaacttccatctgcatggatgcggctcaacagaaaaaacaaaaaacacagaaatgcaaaagaacacgttgaaaagaccaaagagtcggagggaagatggct

SEQ ID NO: 36979 - DNA, 110 bp, synthetic construct; identical to SEQ ID NO: 36978
  source 1..110: mol_type = other DNA

SEQ ID NO: 36980 - DNA, 110 bp, synthetic construct
  source 1..110: mol_type = other DNA
ggtgaaattaggtgtaacagttcagacatgtcacttccatttactgagtttcagttttttcttttttggggggccgctcacgcggcatatggaagttcccaggctagggg

SEQ ID NO: 36981 - DNA, 110 bp, synthetic construct; identical to SEQ ID NO: 36980
  source 1..110: mol_type = other DNA

SEQ ID NO: 36982 - DNA, 110 bp, synthetic construct
  source 1..110: mol_type = other DNA
tgtcaatggcaaagggttttactgtcacctcccggacaggtccttcaccatctctgccatctggtgaatttgttcccatctggaatctcccaccaggtagctggaccatg

SEQ ID NO: 36983 - DNA, 110 bp, synthetic construct
  source 1..110: mol_type = other DNA
gccatctggtgaatttgttcccatctggaatctcccaccaggtagctggaccatgccagtcgtctgcccatttcctgtacagaaaaaaagagttgtcagtaacacacgaa

SEQ ID NO: 36984 - DNA, 110 bp, synthetic construct
  source 1..110: mol_type = other DNA
ggctttgtatatttgagaatcaaaaaagcatctctataaaatttgattacagggagttctgttgtggctcagcagtaacaaacgggactgggatccatgagaaatttgat

SEQ ID NO: 36985 - DNA, 110 bp, synthetic construct
  source 1..110: mol_type = other DNA
gttctgttgtggctcagcagtaacaaacgggactgggatccatgagaaatttgatccctggcctccctcagcaggttaaggatccagctataggttgcagacagcttgga

SEQ ID NO: 36986 - DNA, 110 bp, synthetic construct
  source 1..110: mol_type = other DNA
acatgcagggatgggagagaaggcctccagcgggcgggaagagcaggcgcaaagggtcagagtccttggcgtgcaatgcagatagcactcatctgggtgccttggttttg

SEQ ID NO: 36987 - DNA, 110 bp, synthetic construct
  source 1..110: mol_type = other DNA
gtcagagtccttggcgtgcaatgcagatagcactcatctgggtgccttggttttgggttgccaacctgggcaagacccttccaaccccagaccagggaaatgcctcttag

SEQ ID NO: 36988 - DNA, 110 bp, synthetic construct
  source 1..110: mol_type = other DNA
gaggaaacttagaaaaatttttccataaagcaaacttataaatccttccctttggctccgtcttcactcccccttcactgtgttgacgagagctggagtgcttccaggtt

SEQ ID NO: 36989 - DNA, 110 bp, synthetic construct
  source 1..110: mol_type = other DNA
ctccgtcttcactcccccttcactgtgttgacgagagctggagtgcttccaggtttttggtcaggcgggtgctttcgggactgatggggctctccaggtaggtggttcct

SEQ ID NO: 36990 - DNA, 110 bp, synthetic construct
  source 1..110: mol_type = other DNA
ggatttcttaagaataatttcttctcacatgacatatatgaccccatggttttgcttttactacaagaatagtcatgagttttgccactgcagtggaaaaaactaaactt

SEQ ID NO: 36991 - DNA, 110 bp, synthetic construct; identical to SEQ ID NO: 36990
  source 1..110: mol_type = other DNA

SEQ ID NO: 36992 - DNA, 110 bp, synthetic construct
  source 1..110: mol_type = other DNA
tccagatgagaagtgttgggagctgcaagagggttcagcagggaacctggccttgtcagggggatgcaggaaggtcttccctggggctgaagaatgcgtctgagttctag

SEQ ID NO: 36993 - DNA, 110 bp, synthetic construct
  source 1..110: mol_type = other DNA
cagctgcccataacatctgctcagccaataagcaagacccagagctcctaaaccagactccgatggaggagaaacatgctttgcaggtgcctaagagatggtaggtggag

SEQ ID NO: 36994 - DNA, 110 bp, synthetic construct
  source 1..110: mol_type = other DNA
gactccgatggaggagaaacatgctttgcaggtgcctaagagatggtaggtggagctgaggaggcttttgtgaagattgaaccagatagggttttgtaaaggagctggca

SEQ ID NO: 36995 - DNA, 110 bp, synthetic construct
  source 1..110: mol_type = other DNA
gtggaggctcagtcactcactattcagcgagatggctgacagaggccgttggctgcctcgcagtcgtatagctgtcccgttttgttgactgcgaccacctccaggggggc

SEQ ID NO: 36996 - DNA, 110 bp, synthetic construct
  source 1..110: mol_type = other DNA
tgcaggacgtgaattgttgttttgtcccgcaaatctcgcctgttggtcacttaatagggagctgggttctcagactgactgctgaggtgtcccagtgcttgtgtccggtg

SEQ ID NO: 36997 - DNA, 110 bp, synthetic construct
  source 1..110: mol_type = other DNA
agggagctgggttctcagactgactgctgaggtgtcccagtgcttgtgtccggtgaccttaattttactcgatcatggccccacatcgccagagcaatttgcaaatcaca

SEQ ID NO: 36998 - DNA, 110 bp, synthetic construct
  source 1..110: mol_type = other DNA
ctgggagggaggagctgtccacctcaggggccagctgtcccccctgtggttttggcctcacacaccatagcagatgcctcacgtgagatgcaaccaccctgcctttgcag

SEQ ID NO: 36999 - DNA, 110 bp, synthetic construct
  source 1..110: mol_type = other DNA
cctcacacaccatagcagatgcctcacgtgagatgcaaccaccctgcctttgcagggatgatggtcaagatattgaacgactgggaccacttgggcaccgaccaggggct

SEQ ID NO: 37000 - DNA, 110 bp, synthetic construct
  source 1..110: mol_type = other DNA
tcttactccagcatttggggaagtaaataaatctcgccaggagccagatgggtcctagcctccacttttatgatttgtctccgagttctagggctcattccttcttgaat

SEQ ID NO: 37001 - DNA, 110 bp, synthetic construct
  source 1..110: mol_type = other DNA
tagcctccacttttatgatttgtctccgagttctagggctcattccttcttgaatgctcaaagttcctgcatgttgcatgctggcctgcttaggaggctgctccgggctt

SEQ ID NO: 37002 - DNA, 110 bp, synthetic construct
  source 1..110: mol_type = other DNA
acagcgctgagctcacagcgcttgtgctgcgtgacatcggcatgaaggaggtggcggagcagctgcagaagaccctgcacaagggtgagcaagccccctccacactctgc

SEQ ID NO: 37003 - DNA, 110 bp, synthetic construct
  source 1..110: mol_type = other DNA
ggagcagctgcagaagaccctgcacaagggtgagcaagccccctccacactctgctgcagaggtccagaccccacccctctcttccagtatcccctggtctgcaccctcc

SEQ ID NO: 37004 - DNA, 110 bp, synthetic construct
  source 1..110: mol_type = other DNA
ccgccagagtccagggccgccggcagaactttattttaaaaaaatgacgaaacgggtctgtacatatttacaggctcggggcaaggaggctcgggtccagcagcaggggc

SEQ ID NO: 37005 - DNA, 110 bp, synthetic construct
  source 1..110: mol_type = other DNA
gtctgtacatatttacaggctcggggcaaggaggctcgggtccagcagcaggggcgcaggccactcacttcttggagagtttgacttgcttgtgcttggggggcgcccac

SEQ ID NO: 37006 - DNA, 110 bp, synthetic construct
  source 1..110: mol_type = other DNA
ccgtgtttgggtcgggagtggtatgtgggagttcggggctgtcctctgcccctgcagtttgaggcgacagtctgcctatggtactgtaactgtgtctggctgtgagtgtg

SEQ ID NO: 37007 - DNA, 110 bp, synthetic construct
  source 1..110: mol_type = other DNA
agtttgaggcgacagtctgcctatggtactgtaactgtgtctggctgtgagtgtggcggggggagggtaggtggacgcctgtgcccaaaagggtgtgacttccttgggct

SEQ ID NO: 37008 - DNA, 110 bp, synthetic construct
  source 1..110: mol_type = other DNA
gggactgtccagagggtggatgggggcacctctgatcgtctcttccgagctggtctcgtttgcccacagccggctttcttttcaggccagcttcttccagaaatggaggc

SEQ ID NO: 37009 - DNA, 110 bp, synthetic construct
  source 1..110: mol_type = other DNA
tcgtttgcccacagccggctttcttttcaggccagcttcttccagaaatggaggcggtgctccttaggaaacgggcaccgctcagagcagagcacctgtgccaccgatga

SEQ ID NO: 37010 - DNA, 110 bp, synthetic construct
  source 1..110: mol_type = other DNA
gcaacctggggttggggcagaggagaccaggaaggtgaggtggcggaggcaccgaccgcagggaccaggaggccagcaggatggacggacaatcttaccagcgaggttga

SEQ ID NO: 37011 - DNA, 110 bp, synthetic construct
  source 1..110: mol_type = other DNA
tctgggtcacctccttattctcccgaatcaccccataaaagtgctttgtatgggttagtagtacagtattcagactctgcatctgaatctcagcatctccattcattcac

SEQ ID NO: 37012 - DNA, 110 bp, synthetic construct
  source 1..110: mol_type = other DNA
tagtagtacagtattcagactctgcatctgaatctcagcatctccattcattcactgggtgaccttgagtaagcgacttgacctctctgtgcctcagctttctcatccgt

SEQ ID NO: 37013 - DNA, 110 bp, synthetic construct
  source 1..110: mol_type = other DNA
ataacaattctttcttatattctaagacatttaagaaatcatcaaacatgttactatagaaacacctgtgcggagttgtggcagaaactattcattactgtccaacagcc

SEQ ID NO: 37014 - DNA, 110 bp, synthetic construct
  source 1..110: mol_type = other DNA
ggaggctctggctgctgcacaaggaaacctttaagctgcagttcgctttatgaaccctaatgctgcccacccaacaaggtctaaccctactcaccctctcgtccagatca

SEQ ID NO: 37015 - DNA, 110 bp, synthetic construct
  source 1..110: mol_type = other DNA
ggtgtattaggaaatctggttgctagccagagggcaaggggcttgcaggagcaatgtagtgacatggatgagatctgctctcgggcagaactgaaagctgactggattcc

SEQ ID NO: 37016 - DNA, 110 bp, synthetic construct
  source 1..110: mol_type = other DNA
gtagtgacatggatgagatctgctctcgggcagaactgaaagctgactggattccaggcaggagagaatgcagggcaagactccgggagtctgaggcctctgggacatcc

SEQ ID NO: 37017 - DNA, 110 bp, synthetic construct
  source 1..110: mol_type = other DNA
cctccatatgctgtgggtgcggccctaggaaaaacaaaacaaaataaaaagaacaaagacaatacaatgaaaaaaacctcctatcccgtacccatctcattccctcccca

SEQ ID NO: 37018 - DNA, 110 bp, synthetic construct
  source 1..110: mol_type = other DNA
aagacaatacaatgaaaaaaacctcctatcccgtacccatctcattccctccccaaaggcaatcaaaatcaccaatttctggtgaggatccttccagaaatatgcttctg

SEQ ID NO: 37019 - DNA, 110 bp, synthetic construct
  source 1..110: mol_type = other DNA
cctgacacccttcttaaagatgactttgaccagactgaggacttttcttatgttggttcagtagcttgggaaaaagaaattcctcacacaaatactcttggtgtctccag

SEQ ID NO: 37020 - DNA, 110 bp, synthetic construct
  source 1..110: mol_type = other DNA
gttcagtagcttgggaaaaagaaattcctcacacaaatactcttggtgtctccagctccgggaggaggggccttgggtgtcccaggaagaatcatggggagaggggctga

SEQ ID NO: 37021 - DNA, 110 bp, synthetic construct
  source 1..110: mol_type = other DNA
tgggggtggagggactcggatgatacaccttgcctactctctggcagccccatcctcctctgaggctccagggggtgatcagtgggaatgagatgcttagcaatccctat

SEQ ID NO: 37022 - DNA, 110 bp, synthetic construct
  source 1..110: mol_type = other DNA
tcctctgaggctccagggggtgatcagtgggaatgagatgcttagcaatccctatcttgcctagagcgtcctgcggtttctgtggctccagcctgttagtttcagaccag

SEQ ID NO: 37023 - DNA, 110 bp, synthetic construct
  source 1..110: mol_type = other DNA
ggccaccctagaccttggaactccaaacaaggagttattgagtaactcaaaaatgcattgagcaaagggccatccaggagggttttttttggttttgtttttttgtcttt

SEQ ID NO: 37024 - DNA, 110 bp, synthetic construct
  source 1..110: mol_type = other DNA
ctagcaggatgggtgtccctcacttgttacctttcttcctggtgtccctcaccgtcagttgatagctacttactaggtacagtgtgtagcctgggtcttgccctctacaa

SEQ ID NO: 37025 - DNA, 110 bp, synthetic construct
  source 1..110: mol_type = other DNA
tttatgtgagacattcttgggaattttcgccctgatctcccacagcaggaaatatttgccctaaattgagaagctctcaggtgaaaatggcccctctgctgtccctgagt

SEQ ID NO: 37026 - DNA, 110 bp, synthetic construct
  source 1..110: mol_type = other DNA
ttgccctaaattgagaagctctcaggtgaaaatggcccctctgctgtccctgagtaagtaagtgtgactctgtcatcctctaaacaaagcctagaatgtctcagatcaat

SEQ ID NO: 37027 - DNA, 110 bp, synthetic construct
  source 1..110: mol_type = other DNA
tgctgagccccgatgggaacgcctactcgtgaatattcattaagcagctagctttgccaggtcaaggttaatctcctttggagggacagagaaggaacaagaatagcccg

SEQ ID NO: 37028 - DNA, 110 bp, synthetic construct; identical to SEQ ID NO: 37027
  source 1..110: mol_type = other DNA

SEQ ID NO: 37029 - DNA, 110 bp, synthetic construct
  source 1..110: mol_type = other DNA
caagagcttggctccctaacacctctcagctccctctgtcaaagagtcctgggactcttgcttccttgataccaaccaggcttcctgaccagtttctgggccctgcctcc

SEQ ID NO: 37030 - DNA, 110 bp, synthetic construct
  source 1..110: mol_type = other DNA
gccagtcttgagccactgcctgagcactgaacctggctttgaatcccaccataccactccctagctccgtgagtgcgcgcaaggcttggttgggctccctcgggctcact

SEQ ID NO: 37031 - DNA, 110 bp, synthetic construct
  source 1..110: mol_type = other DNA
ttggaggagaaagtcatccagatgccttctttctcgtcctcctgggaaaagtcttggcgattagatgtgaccccaagtttgtcgtcccaaagtctgtatttctgaccctc

SEQ ID NO: 37032 - DNA, 110 bp, synthetic construct
  source 1..110: mol_type = other DNA
ggcgattagatgtgaccccaagtttgtcgtcccaaagtctgtatttctgaccctcacactacatggagatgggggtctggtgatagaaaaaaaggaggtacagggaaagg

SEQ ID NO: 37033 - DNA, 110 bp, synthetic construct
  source 1..110: mol_type = other DNA
agttttcctaacttgtcacatcctatgccccctgcctagaaacccatcacccagtgctgaattagatgtcattcctatctactcttagtgccccgtgcttcacctaagag

SEQ ID NO: 37034 - DNA, 110 bp, synthetic construct
  source 1..110: mol_type = other DNA
atcacctaccaataggctcaagccgactgctcagcagacattcaggaattctctagcgtatccctggccctgtgctaggccctggggcgggatggggaacccagggtggc

SEQ ID NO: 37035 - DNA, 110 bp, synthetic construct
  source 1..110: mol_type = other DNA
agtggcaagtccagccgtggagctcagaattgccataacgctaaagctgcgatgagcgtaaatgctattttgagagctctgcaaccatgcaacgtgagaggagactatgt

SEQ ID NO: 37036 - DNA, 110 bp, synthetic construct
  source 1..110: mol_type = other DNA
gcgtaaatgctattttgagagctctgcaaccatgcaacgtgagaggagactatgtgtgattatattggtggccaagtcacaggttttgctaatactaatgtggtccattg

SEQ ID NO: 37037 - DNA, 110 bp, synthetic construct
  source 1..110: mol_type = other DNA
ggtgccaagcaaccaagctgttttggtgccaaggctctgtagtctttgagcccagtctgcagcttggcctcctgagcccctgactgttccaagagagaccattagaaggc

SEQ ID NO: 37038 - DNA, 110 bp, synthetic construct
  source 1..110: mol_type = other DNA
tctgcagcttggcctcctgagcccctgactgttccaagagagaccattagaaggcgcaagggcttcggtcccgttagaggtgagggaaaaaccgactccacacgcggtgg

SEQ ID NO: 37039 - DNA, 110 bp, synthetic construct
  source 1..110: mol_type = other DNA
ggcaagatgacttccatttttaaaaatcagcttaattggaagtcccattgtggctcggcagaaatgaatctgaccagcatccgtgaggacttgggttcaatccctggcct

SEQ ID NO: 37040 - DNA, 110 bp, synthetic construct; identical to SEQ ID NO: 37039
  source 1..110: mol_type = other DNA

SEQ ID NO: 37041 - DNA, 110 bp, synthetic construct
  source 1..110: mol_type = other DNA
tttggcagccccacggcatatggagtttccaggccagatagccgagcagcaaccgcgatctacatcgaagctgcagcaatgctggatgactaacctattgtgcgtggcca

SEQ ID NO: 37042 - DNA, 110 bp, synthetic construct
  source 1..110: mol_type = other DNA
ttgccaacccataaacgaagtttggtgtatgtgtttcttctgtatggtaatccagcacagacaccattcccctcagagtgcggaggcctttttgaaaccctgggctaaaa

SEQ ID NO: 37043 - DNA, 110 bp, synthetic construct
  source 1..110: mol_type = other DNA
actatctgagatctcagaggtgggactttgtctggtcctgttaaaatagaactggcttttccagtcctcctagtgtcctaagaagtggaagctgggcagcctctaagcct

SEQ ID NO: 37044 - DNA, 110 bp, synthetic construct
  source 1..110: mol_type = other DNA
cttttccagtcctcctagtgtcctaagaagtggaagctgggcagcctctaagcctggcctgagaggtggttccccgcctccccaccaccaagctgctgttactgcttctt

SEQ ID NO: 37045 - DNA, 110 bp, synthetic construct
  source 1..110: mol_type = other DNA
aatgctgtgccaaggagtttgcccggtgatttaagagctgatggggagccactgtggattggtgactgcgttcagagatgccggttactaagaaccggaggaaccggagg

SEQ ID NO: 37046 - DNA, 110 bp, synthetic construct
  source 1..110: mol_type = other DNA
gtgctggagataaaagatggctagcactgggtctttgtcctgtgagcagttcttccaaatataagctctgtgtgatcttgagtaaattattcaacgtaatggtgcctcag

SEQ ID NO: 37047 - DNA, 110 bp, synthetic construct
  source 1..110: mol_type = other DNA
cgccgcccagtattatctttcacttactaattctctttataccaattcatttataaagtcaaattatttttgcctcatcctgagcaatgagatctgtcatttcatggttt

SEQ ID NO: 37048 - DNA, 110 bp, synthetic construct
  source 1..110: mol_type = other DNA
tctccactcctgggccttggcaattgctgttccctctgcctgggattcctctaggctttttcatgatcagctctttcttatttttcaagttccagcttaaagttccttcc

SEQ ID NO: 37049 - DNA, 110 bp, synthetic construct
  source 1..110: mol_type = other DNA
ctttttcatgatcagctctttcttatttttcaagttccagcttaaagttccttcccagagaggccttccctgatgatcctatatgaagcagcttccccagtcacttggtc

SEQ ID NO: 37050 - DNA, 110 bp, synthetic construct; identical to SEQ ID NO: 37048
  source 1..110: mol_type = other DNA

SEQ ID NO: 37051 - DNA, 110 bp, synthetic construct; identical to SEQ ID NO: 37049
  source 1..110: mol_type = other DNA

SEQ ID NO: 37052 - DNA, 110 bp, synthetic construct
  source 1..110: mol_type = other DNA
aattgcgctgggtgctggggacacagtgacgggtgagagcagagctgtgtcctcctgttgcgtagagcctagaagaggaagatgggaggaaacaagtgaactgatattcc

SEQ ID NO: 37053 - DNA, 110 bp, synthetic construct
  source 1..110: mol_type = other DNA
ccccaaattttatggcagctccgttttgggatatttttaaatcgcctttgcgctgcaacgtggcctcaggatattctcagctatgctctcggccggtgcctctttgatca

SEQ ID NO: 37054 - DNA, 110 bp, synthetic construct
  source 1..110: mol_type = other DNA
agcagagtctcgtgatgtaaacaaggtcccaggagctctgctggtgaggaaactgaggcttccactcacctgcccagtgatccggccgtccctgcaccaggctcccactc

SEQ ID NO: 37055 - DNA, 110 bp, synthetic construct
  source 1..110: mol_type = other DNA
tggggacttgtgtgtccctctctgcccggaacctgactcagggccaggcacgcagtcactgcccaggaaccgtgactgagtaaacccatgacgtgagagctttgcgcgtc

SEQ ID NO: 37056 - DNA, 110 bp, synthetic construct
  source 1..110: mol_type = other DNA
agcaaacacagctggacacccacccagcctctatgccgttggggtcaggtacccaaagctcagggcaggtgagcctctgtctctcactcaagggttgattctcattggtc

SEQ ID NO: 37057 - DNA, 110 bp, synthetic construct
  source 1..110: mol_type = other DNA
cctagcctggtacccttcatatgccgaaggagcggccctagaagtggcaaaagcacaaaaaaacaaaaaaacaaaaaccctgtgccccagagccccaaggttcattcatt

SEQ ID NO: 37058 - DNA, 110 bp, synthetic construct; identical to SEQ ID NO: 37057
  source 1..110: mol_type = other DNA

SEQ ID NO: 37059 - DNA, 110 bp, synthetic construct
  source 1..110: mol_type = other DNA
gtgtttttccctggatctacccccgcaggctccccgcttcccaaaaggaacctgtatgacttattgagcggtgcattctttcggactttgtacaaacagagacgtaattt

SEQ ID NO: 37060 - DNA, 110 bp, synthetic construct
  source 1..110: mol_type = other DNA
atgacttattgagcggtgcattctttcggactttgtacaaacagagacgtaatttgatcgcgtggtttggaccgcagctctgggctgataactccctccatctggccctg

SEQ ID NO: 37061 - DNA, 110 bp, synthetic construct
  source 1..110: mol_type = other DNA
cccctgctcttcccagcacagttcactggccactgtagctgtgccatcatctgtgccgatctttccactccagttatctgaatgtcaagaggaccatccagggagttcct

SEQ ID NO: 37062 - DNA, 110 bp, synthetic construct
  source 1..110: mol_type = other DNA
tctcttggtggaggggaccccggcagcctgaccagaaatagtcagttcctgagggactttgctgatgggaggaaaggtctggcgaggccacagcggccaggtcaggggtg

SEQ ID NO: 37063 - DNA, 110 bp, synthetic construct
  source 1..110: mol_type = other DNA
actttgctgatgggaggaaaggtctggcgaggccacagcggccaggtcaggggtggcaggtggggggtgtgccagcatctctgggcacgtctgcacctcaggtcctcccg

SEQ ID NO: 37064 - DNA, 110 bp, synthetic construct
  source 1..110: mol_type = other DNA
agcgcatcccccactgagccccaccatgacctcaggcctggccaggtctcttccggatgcctcagctacatctaaccactgttgggtcccaaacctaggagtcttcctgg

SEQ ID NO: 37065 - DNA, 110 bp, synthetic construct
  source 1..110: mol_type = other DNA
tggttctccctgaggctcctgggtgagtgatgaccaacttaacatgcaaatcatccggaagaagcgttcaccaaccagcactcgagcgaggatcagctctttggagacga

SEQ ID NO: 37066 - DNA, 110 bp, synthetic construct
  source 1..110: mol_type = other DNA
cggaagaagcgttcaccaaccagcactcgagcgaggatcagctctttggagacgaggtagagcaggtgaaagtcttaagctcaagagtcaaaaacacccagctgggagtt

SEQ ID NO: 37067 - DNA, 110 bp, synthetic construct
  source 1..110: mol_type = other DNA
cacatcgtaaacacccatctgaacatgggtgaatggctgagtacttctcaccatactagatactaggatatgagtgagagacttgcagctgaaaccaccccccaactgca

SEQ ID NO: 37068 - DNA, 110 bp, synthetic construct
  source 1..110: mol_type = other DNA
ctagatactaggatatgagtgagagacttgcagctgaaaccaccccccaactgcagttgaagttgcatatgagtcacctaatgatatggataattaattgcattgaaatg

SEQ ID NO: 37069 - DNA, 110 bp, synthetic construct
  source 1..110: mol_type = other DNA
ggaagaagagggaacacgccccactcatttataaactaaaacattgacacccagagctaacaacggcagcataagaaaataagatttcaagtcaatcccattggggaaca

SEQ ID NO: 37070 - DNA, 110 bp, synthetic construct
  source 1..110: mol_type = other DNA
gttcacgttcaccctgcaacactctggctcagggttccactggcatcttcccatacatctctcttcagccccaaagtctcacaaacacctgttccttgagtgtttccgtc

SEQ ID NO: 37071 - DNA, 110 bp, synthetic construct
  source 1..110: mol_type = other DNA
ctggcttgggccctctcttttgaagaggcttcaaacctctctttttagaggtccttgctgctgaccactcatgcctggagctggatgaaaggccagccgaccaatgaaca

SEQ ID NO: 37072 - DNA, 110 bp, synthetic construct
  source 1..110: mol_type = other DNA
atcatgagattaaacaggaccatggatgtaaagagtcctagcttggacctaacttagagttcgctctcaacagattaaatggttgacatgggtcacctcatcaatttccc

SEQ ID NO: 37073 - DNA, 110 bp, synthetic construct
  source 1..110: mol_type = other DNA
caggcttctcagaaatggttattttgatcgtgggctagaaaaacctgtcagaattcttaaacctggtatgaagcctagccatagaagatgagctggttaatagctgccca

SEQ ID NO: 37074 - DNA, 110 bp, synthetic construct
  source 1..110: mol_type = other DNA
tagaaaaacctgtcagaattcttaaacctggtatgaagcctagccatagaagatgagctggttaatagctgcccaagaaactgagtgcaaaagaacaggaaaggatagtg

SEQ ID NO: 37075 - DNA, 110 bp, synthetic construct; identical to SEQ ID NO: 37073
  source 1..110: mol_type = other DNA

SEQ ID NO: 37076 - DNA, 110 bp, synthetic construct; identical to SEQ ID NO: 37074
  source 1..110: mol_type = other DNA

SEQ ID NO: 37077 - DNA, 110 bp, synthetic construct
  source 1..110: mol_type = other DNA
aggcttcctcaggaagccacttgacggctgagcaatgggtccagggctttggtgccattcgtagggttcacactggcctctacccacagctcggatgtcaccccttacca

SEQ ID NO: 37078 - DNA, 110 bp, synthetic construct
  source 1..110: mol_type = other DNA
cattcgtagggttcacactggcctctacccacagctcggatgtcaccccttaccatcctccctctactcgccgctaccctccaaccaccttggtctccagttccttcctc

SEQ ID NO: 37079 - DNA, 110 bp, synthetic construct
  source 1..110: mol_type = other DNA
tttatggaatagatttcctgaagtgggcttatctgggttagaggctgtatgtgtttttttgtttttttaatgtgccagatgttgccagacagcttcccaaataggtggta

SEQ ID NO: 37080 - DNA, 110 bp, synthetic construct
  source 1..110: mol_type = other DNA
tttttgtttttttaatgtgccagatgttgccagacagcttcccaaataggtggtagcatttcttatttatagcacaaacacacgaaagaatcccttctcctcaagtcttt

SEQ ID NO: 37081 - DNA, 110 bp, synthetic construct
  source 1..110: mol_type = other DNA
ttaatcactacttagcgttggcagtgaggtgtagtatgaaggagaaatcaaaaaatcacccttgggagttcccgttgtgctcggtgggttaaggacctgactagtatcca

SEQ ID NO: 37082 - DNA, 110 bp, synthetic construct
  source 1..110: mol_type = other DNA
tcacccttgggagttcccgttgtgctcggtgggttaaggacctgactagtatccatgaaggttacagctccgattggacccctggcctggaaactcccatatgccacagg

SEQ ID NO: 37083 - DNA, 110 bp, synthetic construct
  source 1..110: mol_type = other DNA
gattgctgaaaataatataaaatatttagtcgctttgtcatgcagcaaggagcggtgttgaccataaatagaccaagaaagctattcaggaaccaaagcaaatcaggata

SEQ ID NO: 37084 - DNA, 110 bp, synthetic construct
  source 1..110: mol_type = other DNA
ttcccaaatgacctcccagatggcatctgacacatattgtcagccatgtgagggaggtcaccttggacttcccagctttcccagaacctcagttgacaccatgggaagca

SEQ ID NO: 37085 - DNA, 110 bp, synthetic construct
  source 1..110: mol_type = other DNA
ggtcaccttggacttcccagctttcccagaacctcagttgacaccatgggaagcaagaatattaccagcgcacccacacagtcatgaaactaataaagtgttattgtttc

SEQ ID NO: 37086 - DNA, 110 bp, synthetic construct
  source 1..110: mol_type = other DNA
taccctcaacttcaggtgcccatcagaaccccagattgtcacctgtgcttctgaccaaccagctataaattagaggtgctaacgagcatccccaactcaggatgcctgtt

SEQ ID NO: 37087 - DNA, 110 bp, synthetic construct
  source 1..110: mol_type = other DNA
caaccagctataaattagaggtgctaacgagcatccccaactcaggatgcctgttgcaagaccaggtcgttactagtaactggccttctccttgggtgccattaatttgc

SEQ ID NO: 37088 - DNA, 110 bp, synthetic construct
  source 1..110: mol_type = other DNA
gacgcatggtctgttatccatcatacggagacttttaggtggaagataatgtatcagttagctttggctatgtaacaagtcactgcaagcacttagtcgcttaaaacaac

SEQ ID NO: 37089 - DNA, 110 bp, synthetic construct
  source 1..110: mol_type = other DNA
agttagctttggctatgtaacaagtcactgcaagcacttagtcgcttaaaacaacgccgtaggtagttgatgactctgtattcactgagggtttctcgcagtttgggcca

SEQ ID NO: 37090 - DNA, 110 bp, synthetic construct
  source 1..110: mol_type = other DNA
aaaaaaaaaaaaaaaaaaaagaagaagaagaagaagcctccatcagctgatggaggcaagacccagcgcaggtgtcaggcataggaacctccagctcagctcccacgtac

SEQ ID NO: 37091 - DNA, 110 bp, synthetic construct
  source 1..110: mol_type = other DNA
gcaagacccagcgcaggtgtcaggcataggaacctccagctcagctcccacgtaccatctcacagagggaaatgtgttctgcaaatatacaaagctggccacctgcctga

SEQ ID NO: 37092 - DNA, 110 bp, synthetic construct
  source 1..110: mol_type = other DNA
cgccatgacgggaactcctgacatcagttttgatgggcatattcatgcctgagaaatggacaaactctccagatgaggacttcttatttcccagagagctccttataact

SEQ ID NO: 37093 - DNA, 110 bp, synthetic construct
  source 1..110: mol_type = other DNA
atggacaaactctccagatgaggacttcttatttcccagagagctccttataactttgaccaagatgctactgaggcagacacaccttgccacgttcgcattctagtttt

SEQ ID NO: 37094 - DNA, 110 bp, synthetic construct
  source 1..110: mol_type = other DNA
gtccaattcaacccctcgcctgggaacttccatgtgccatgggtgcagcccttaaaaaaaaaaaaaaagaatcatcccacccggcatccctaattccccagatgattccc

SEQ ID NO: 37095 - DNA, 110 bp, synthetic construct
  source 1..110: mol_type = other DNA
aaaaaaaaaaaaagaatcatcccacccggcatccctaattccccagatgattccctaacctgggtgtttctggctatcccagagaaggggtgctcccagcatttgaggga

SEQ ID NO: 37096 - DNA, 110 bp, synthetic construct
  source 1..110: mol_type = other DNA
agtcagaagaggtggaactgaaattcaatctcaggtctgccctgccccttagctcaagctcttagtcgctgcctgacaatgcttaaccaaagcacagaggctcagcaagg

SEQ ID NO: 37097 - DNA, 110 bp, synthetic construct
  source 1..110: mol_type = other DNA
atgttgacatccagacaggtcttagaagctatgtgtttacaatgtcagagcctatatcagcctggattcctgagtcactgtgtggaggaatccttttctcctcgtgccca

SEQ ID NO: 37098 - DNA, 110 bp, synthetic construct
  source 1..110: mol_type = other DNA
gctaggggtcgagtcagagctgcagcttgccggcctgcgccacaaccatagcaccaccagatctgagcctcagcgagatataccacagctggcaatgtgggattcttaac

SEQ ID NO: 37099 - DNA, 110 bp, synthetic construct
  source 1..110: mol_type = other DNA
gaatgcacattccaggaggagaaatggaccacagacaaggaacttgacatgatgagaaacatcacacagggaaattaaacgggggaaggaaagagaaatcgatagtggag

SEQ ID NO: 37100 - DNA, 110 bp, synthetic construct
  source 1..110: mol_type = other DNA
tgaaaaaaaaaataaggatggtcacctctcccaagtttggccaccctggacttcctctggacttttaaggacaactctttactttcagcttgtgaattatgtgtttggat

SEQ ID NO: 37101 - DNA, 110 bp, synthetic construct
  source 1..110: mol_type = other DNA
cctctaccaatttttttccaggtagattgtggggtcctaccagcccaacatgacaacactatttttgcatgcattcagctagaatggttttatatggccaggatcctaga

SEQ ID NO: 37102 - DNA, 110 bp, synthetic construct
  source 1..110: mol_type = other DNA
cctctcatgatgtatcctggaaagtgagatccagggagctgaaatagggaacacgtagacctgacctgcaccccattcagagcgtgaagcacagctgtctctggcaactc

SEQ ID NO: 37103 - DNA, 110 bp, synthetic construct
  source 1..110: mol_type = other DNA
tgtgccctgccagctatgcccccaagcttgaaagctaatcttaaaggtaactgcaaaagacaacagtgataggggttatttggggaagaaagagaaggtcacacgaagag

SEQ ID NO: 37104 - DNA, 110 bp, synthetic construct
  source 1..110: mol_type = other DNA
ctgctgtcagccaggcagtaccgtgacccctccgctcccagcatctgtcctccgtggctgtacggcaagctccttaatgtcattgagcgcaaccagactgcaacctagac

SEQ ID NO: 37105 - DNA, 110 bp, synthetic construct
  source 1..110: mol_type = other DNA
ggctgtacggcaagctccttaatgtcattgagcgcaaccagactgcaacctagacaaacgagggccacgttctcttgctcatcttagcatcctcggcacctcgtgctgtg

SEQ ID NO: 37106 - DNA, 110 bp, synthetic construct
  source 1..110: mol_type = other DNA
ggaaagcagaaaccaaagaaagaagatacttgggctcaaactgtgcaccacgcgctgcacccggagagcttaaaaaggagctgatggtggctaagcatgaaaagagcttc

SEQ ID NO: 37107 - DNA, 110 bp, synthetic construct
  source 1..110: mol_type = other DNA
tgtcctctttgcctgacaggtaaggtacatgggatggtctcagctctgatcatgcaggagaaaaaccctcctaggcaaagatgcactcaaccacaaaacatgtgctctcc

SEQ ID NO: 37108 - DNA, 110 bp, synthetic construct
  source 1..110: mol_type = other DNA
ctgaattccttcattctgatggaagaaagtccaagcctgtgagatttcttgaaatattttcccactaaaatcacgactatcataccaatgggctttaaagctttcactca

SEQ ID NO: 37109 - DNA, 110 bp, synthetic construct
  source 1..110: mol_type = other DNA
attttcccactaaaatcacgactatcataccaatgggctttaaagctttcactcatgggtattcttcttgttctttatggcgtcgttgcataatagccctaattcccagg

SEQ ID NO: 37110 - DNA, 110 bp, synthetic construct
  source 1..110: mol_type = other DNA
tctgatgagttaatatcaggacttaataatacacaaggcccagtaaaaacatcgtctcttctctctagctttccgtgaggcagattcattacctttcatctgtctttcca

SEQ ID NO: 37111 - DNA, 110 bp, synthetic construct
  source 1..110: mol_type = other DNA
agactcttgaaaccaaggagtgttcaaagaatcaagctggatctgccctcatctgccatcccctgtctaaatgccaaagttttgctccactgagatggtgacggctgaca

SEQ ID NO: 37112 - DNA, 110 bp, synthetic construct
  source 1..110: mol_type = other DNA
acctatttggcttcccttatcgtgtgacgtgtctgcttcaaagctctgataaggggaaatagagaaactatgccgagatctcatttacctagaagaaaactgatgctttg

SEQ ID NO: 37113 - DNA, 110 bp, synthetic construct
  source 1..110: mol_type = other DNA
gaaatagagaaactatgccgagatctcatttacctagaagaaaactgatgctttgagctggaatcacctagaggcaatgcagtggagaggctgaaatgggagatgagtta

SEQ ID NO: 37114 - DNA, 110 bp, synthetic construct
  source 1..110: mol_type = other DNA
atttgtgaggtaacggtagcaagcattggttaaggcagtgggtggatgagacaggggtgggaatgttaggagaccatggactgtaactgcccactttggccaggcatgat

SEQ ID NO: 37115 - DNA, 110 bp, synthetic construct
  source 1..110: mol_type = other DNA
ttggttaaggcagtgggtggatgagacaggggtgggaatgttaggagaccatggactgtaactgcccactttggccaggcatgataatagccacttccctgagttatccc

SEQ ID NO: 37116 - DNA, 110 bp, synthetic construct
  source 1..110: mol_type = other DNA
tctggctgaggtgtgaatggctgattccagcaggtatcagtaacagatggagcaagctaattatgtctcttatatgtgagtggagataaagctgttaattgctaattgta

SEQ ID NO: 37117 - DNA, 110 bp, synthetic construct
  source 1..110: mol_type = other DNA
acatgaggttttgggtttgattcctggcctcggaatgttgggttaagtattcaacattgccgtgagctgtggtgcaggctgcagatgtggcttgaatcctgcattgttgt

SEQ ID NO: 37118 - DNA, 110 bp, synthetic construct; identical to SEQ ID NO: 37117
  source 1..110: mol_type = other DNA

SEQ ID NO: 37119 - DNA, 110 bp, synthetic construct
  source 1..110: mol_type = other DNA
aagagagtaagaaagttatgatgggaatttctcagctgaaaaaaactcatgaatgaatggattgaacattcctgacaggtgaaggctgtgattgtttcaggatcaaaata

SEQ ID NO: 37120 - DNA, 110 bp, synthetic construct
  source 1..110: mol_type = other DNA
ggagccagggaaaccccagatgcaaggagcatctgagtaacttgcgtagcgataagcctttgcctctgaatgcattccagctgcaaatgtacgtctgctcattgttttgt

SEQ ID NO: 37121 - DNA, 110 bp, synthetic construct
  source 1..110: mol_type = other DNA
gcctttgcctctgaatgcattccagctgcaaatgtacgtctgctcattgttttgtattaacgtccactgaagatgtcgtcttgaacacttgtacgtgaaataaatgtcta

SEQ ID NO: 37122 - DNA, 110 bp, synthetic construct
  source 1..110: mol_type = other DNA
atactagttgggtgcttaacccacagagacacactgggagcgcttagtttttagcttccttgctgctcagattgcaggcttcatttgcacctgagcaccttccttcccct

SEQ ID NO: 37123 - DNA, 110 bp, synthetic construct
  source 1..110: mol_type = other DNA
ttccttgctgctcagattgcaggcttcatttgcacctgagcaccttccttcccctgtagaagccaccagcatcctatttattcccctgcagagtccagttcaaaggctga

SEQ ID NO: 37124 - DNA, 110 bp, synthetic construct
  source 1..110: mol_type = other DNA
ctagatgtgcctcttgaagatgtactcttttgaggctttagtgaaatctactcagtattttaggcaaagtcaaaattgcagttccagtcatgactcagtggtaatgaacc

SEQ ID NO: 37125 - DNA, 110 bp, synthetic construct
  source 1..110: mol_type = other DNA
ccctcctcaccaccaccccctgcccgggggagacctgcgacaggggaacttacgcaggagatattcagccgtgtcctgttcgtagtcagcatcttcagggaagtgatcga

SEQ ID NO: 37126 - DNA, 110 bp, synthetic construct; identical to SEQ ID NO: 37125
  source 1..110: mol_type = other DNA

SEQ ID NO: 37127 - DNA, 110 bp, synthetic construct
  source 1..110: mol_type = other DNA
aattcaataaagtgatgtccataaagcctccaacaaggcgctggacacatactggtgctaagtaaaagttaggttgagctttcttccctttgacttagtttgagctttct

SEQ ID NO: 37128 - DNA, 110 bp, synthetic construct
  source 1..110: mol_type = other DNA
ccaagaagcatttttaacatcaatgcactggtcatttggaaaatatccacttatggagttacacacagaccttccaaatgtggcccatttcattgcacaagagaaaacaa

SEQ ID NO: 37129 - DNA, 110 bp, synthetic construct
  source 1..110: mol_type = other DNA
acctcatggttcccggtcagattcgttaaccactctgccacaacgggaacttctacaaaagctatgttaagggaaggaggtattactgtggtgaaaaggggggaaataga

SEQ ID NO: 37130 - DNA, 110 bp, synthetic construct
  source 1..110: mol_type = other DNA
cagctcagccacccggacgctctggtctttcctaaatgggccagctcctgccccagggcctttgcacctgtgacgaccacccaaacccctctctcccctcaccttcttcc

SEQ ID NO: 37131 - DNA, 110 bp, synthetic construct
  source 1..110: mol_type = other DNA
gggcctttgcacctgtgacgaccacccaaacccctctctcccctcaccttcttcccagcttggctgaaatgtcaacgtctcagtgaggcttttctacgaccctatttaaa

SEQ ID NO: 37132 - DNA, 110 bp, synthetic construct
  source 1..110: mol_type = other DNA
attattacaagccttcaaaagatctttctcatagttgcatgcagtgggttttttgtttttttgtgtcttttctagggccgatctccccggcatatggagcttcccaggtt

SEQ ID NO: 37133 - DNA, 110 bp, synthetic construct
  source 1..110: mol_type = other DNA
accaagtaaaattggtcctattttgtttctgtttgcttgtgtgattgcttgatgaataaccatgatagttgcccatttcatttcagctactttatacatttttttcagag

SEQ ID NO: 37134 - DNA, 110 bp, synthetic construct
  source 1..110: mol_type = other DNA
ctcagatccagcattgctgtggctgtggccgttttggggtttgtgggtcaggggtgaggtagagaatggctgaaggagtcggggcagcttcacctgggaactagaggatt

SEQ ID NO: 37135 - DNA, 110 bp, synthetic construct
  source 1..110: mol_type = other DNA
gaggtagagaatggctgaaggagtcggggcagcttcacctgggaactagaggattttggggggacccaagaaccacccaagagtgaggaagaagctgtattggagaggcc

SEQ ID NO: 37136 - DNA, 110 bp, synthetic construct; identical to SEQ ID NO: 37134
  source 1..110: mol_type = other DNA

SEQ ID NO: 37137 - DNA, 110 bp, synthetic construct; identical to SEQ ID NO: 37135
  source 1..110: mol_type = other DNA

SEQ ID NO: 37138 - DNA, 110 bp, synthetic construct
  source 1..110: mol_type = other DNA
ctttttaaacctgtatgccatgcttatgacttaaagcgtggacactgcagataagctgcagttgagaatcactgctctgtgccgttatcagaggccactgctctaccaat

SEQ ID NO: 37139 - DNA, 110 bp, synthetic construct
  source 1..110: mol_type = other DNA
ctgcagttgagaatcactgctctgtgccgttatcagaggccactgctctaccaatttcttatctctccttctagagatcctctctgcatgtgtgtgagcacacgtgagtc

SEQ ID NO: 37140 - DNA, 110 bp, synthetic construct
  source 1..110: mol_type = other DNA
tgttgcttcaactcaaatcttcctcgccgcacaaaagcagctgcagacaacacataaaccaacagacccggctggggttctcctaaaatgttgttcacaaattcagccag

SEQ ID NO: 37141 - DNA, 110 bp, synthetic construct
  source 1..110: mol_type = other DNA
tgtgtttccaagtgagactacactatggctttattttttgtgctacctttgccaggtttttgtgtctatataatggtagctcaaaaaaaaagaaccgagagacttttctt

SEQ ID NO: 37142 - DNA, 110 bp, synthetic construct
  source 1..110: mol_type = other DNA
tacgctttaccgtgaaactcactatctgtggggttttgaccctgtatggtaacccctagatctaactgaatgacatatgtcaattcatgagataatgaaaaagagtgtgc

SEQ ID NO: 37143 - DNA, 110 bp, synthetic construct
  source 1..110: mol_type = other DNA
ctagatctaactgaatgacatatgtcaattcatgagataatgaaaaagagtgtgctacaccctctggtggatagtcttcctcatctaatgacaccaccacttaaactact

SEQ ID NO: 37144 - DNA, 110 bp, synthetic construct
  source 1..110: mol_type = other DNA
ctgacccctggtgagtttaaggcatagaacccacccagacgtggagggcttggaggagcatcagctgagcgaatatagtcaaacacagagcagtgtctgacccccagaca

SEQ ID NO: 37145 - DNA, 110 bp, synthetic construct
  source 1..110: mol_type = other DNA
tgactaggatccttgaggatacaggatccaaacctggcctcactcagtgggttaaggatttggtgttgctacaagttgcttcgtaggtcctagatgcagcttggatctga

SEQ ID NO: 37146 - DNA, 110 bp, synthetic construct
  source 1..110: mol_type = other DNA
ggatttggtgttgctacaagttgcttcgtaggtcctagatgcagcttggatctgagttgctgtggctatggcctagggctgccactgcagctctcattcgacccccagcc

SEQ ID NO: 37147 - DNA, 110 bp, synthetic construct
  source 1..110: mol_type = other DNA
tcctctctcttagccttcagatctctgctgcactctcacctcatcaggaaagcctctgacttcttcccagaagctctctttcctctgggttaacccgcagcaccctgtta

SEQ ID NO: 37148 - DNA, 110 bp, synthetic construct
  source 1..110: mol_type = other DNA
tagaattattttagatgaatcagatctctttaacaagactcagtgagaaccactgtcttgcttatgtcacaagtaattatttcgtgcctataggtaaggccctgtactaa

SEQ ID NO: 37149 - DNA, 110 bp, synthetic construct
  source 1..110: mol_type = other DNA
tcttgcttatgtcacaagtaattatttcgtgcctataggtaaggccctgtactaagcactgtaggaaaatgagctgctgccttccttttggaataaacttggaataaact

SEQ ID NO: 37150 - DNA, 110 bp, synthetic construct
  source 1..110: mol_type = other DNA
acaaaaatatcacagaaggccagaaatagtccagaactattttgtggtgttgactgaaaaaaatgctcaacctaaaagttgagaattatattttagttggcagatttact

SEQ ID NO: 37151 - DNA, 110 bp, synthetic construct
  source 1..110: mol_type = other DNA
gaaatctttgtgtgttctgcttttgttttcttagtctcagaactttacctcgggtcagtgctggagatagagtgttattttatggcagagctgggtgaacaggttcctga

SEQ ID NO: 37152 - DNA, 110 bp, synthetic construct
  source 1..110: mol_type = other DNA
cagtgctggagatagagtgttattttatggcagagctgggtgaacaggttcctgaagtgtgtcttctggatgctaagtatccatgaggatgcaggttcgattcctggcct

SEQ ID NO: 37153 - DNA, 110 bp, synthetic construct
  source 1..110: mol_type = other DNA
cattttatagtcattgaaaagttaaggcatttgcccacagccacctaagtaggaagcagtagagcttcagtagaagagccttcacccttaacgtccactctttcacctcc

SEQ ID NO: 37154 - DNA, 110 bp, synthetic construct
  source 1..110: mol_type = other DNA
gcagtagagcttcagtagaagagccttcacccttaacgtccactctttcacctcctgaggtcaggcaatgcagaaccttctaggccatggagaagattttggattcctac

SEQ ID NO: 37155 - DNA, 110 bp, synthetic construct
  source 1..110: mol_type = other DNA
cagggatattagtcagatccactaccactgagccacagcgggagcgccatcttcttgatttatttgctgacttatcagctgcttcttgcttagagcatcatctcagggaa

SEQ ID NO: 37156 - DNA, 110 bp, synthetic construct
  source 1..110: mol_type = other DNA
tgatttatttgctgacttatcagctgcttcttgcttagagcatcatctcagggaaggcagcggtctgtctggaaggagaaagatctctgaggccacgagctcaggcctgg

SEQ ID NO: 37157 - DNA, 110 bp, synthetic construct
  source 1..110: mol_type = other DNA
cactgcgccacgacgggaactcccctcctagggatctttaaaataccgatacctggctcctgttcccagccagtctgctttatgtggtctggggcataacccaagcagct

SEQ ID NO: 37158 - DNA, 110 bp, synthetic construct
  source 1..110: mol_type = other DNA
gctcctgttcccagccagtctgctttatgtggtctggggcataacccaagcagctaggttttaaaacgttcccccccagggaattccaatgtgcggcagagtttgggaac

SEQ ID NO: 37159 - DNA, 110 bp, synthetic construct
  source 1..110: mol_type = other DNA
ctgtaagagtgtacttcttatttctggcttcttctttagcaaacaggaacttggtatcagccaattccaagtctaaagatgagttctatgctgaagagtcccacatagct

SEQ ID NO: 37160 - DNA, 110 bp, synthetic construct
  source 1..110: mol_type = other DNA
atcagccaattccaagtctaaagatgagttctatgctgaagagtcccacatagcttcagcatcttccctgaattcaatcacacatctgtctgtctacttgacagactctt

SEQ ID NO: 37161 - DNA, 110 bp, synthetic construct
  source 1..110: mol_type = other DNA
gccacagtggcacctcccccttactcattcttcaagagcctaagccatgcctgaaaatcagctgggcaatttatccatctccttcctgggcccctacctgcatctagtcc

SEQ ID NO: 37162 - DNA, 110 bp, synthetic construct
  source 1..110: mol_type = other DNA
gtcctagggatggaatcctgaggccacttctctgtgcctcagtctcctctctttcgagaatacccgagctgtgagaattacacgagctgatatgagtggcgtgcttagcg

SEQ ID NO: 37163 - DNA, 110 bp, synthetic construct
  source 1..110: mol_type = other DNA
tttaacattcctcttcccttgttagctagaatgccactgtagagactcttgccgttgtcggttgtctggttaccccaaaggaaatttggagaagaaaggcaaaataaata

SEQ ID NO: 37164 - DNA, 110 bp, synthetic construct
  source 1..110: mol_type = other DNA
tttgcaaccagcaccaaacccaaattctataaaatagatacgaatacgtaaggctagtttttaaaaagttcataactctctttttcatagaagtggcaaatttaagtgat

SEQ ID NO: 37165 - DNA, 110 bp, synthetic construct; identical to SEQ ID NO: 37164
  source 1..110: mol_type = other DNA

SEQ ID NO: 37166 - DNA, 110 bp, synthetic construct
  source 1..110: mol_type = other DNA
ttccttcattctgcaaacatttcgttgagggcctgccttgcttggaaaggccagctgagagcttcaggagtttgctgtagctgaggcgccctgggagcggctggtgaacc

SEQ ID NO: 37167 - DNA, 110 bp, synthetic construct
  source 1..110: mol_type = other DNA
ccaccatgttcttagagaccaagctgagcaaaaatgaagctagaagcacctaaaacattaattctaaactcacacgaggggtgggtgtttaaaaaggggaaaaactgtgt

SEQ ID NO: 37168 - DNA, 110 bp, synthetic construct
  source 1..110: mol_type = other DNA
gcaggaggcgccccccgggggaaagagtttccatcccatgtgttggaagcatccgatctcatggaatctaagaccccatctgtcgttagccacatcctaatgtcagagac

SEQ ID NO: 37169 - DNA, 110 bp, synthetic construct
  source 1..110: mol_type = other DNA
gtttaccccctctggctcctctgcccttatcctttgaacttgctagaggaggagacaggttgaacacggctgagtcactccacttgtcccagctgatatcattctagaat

SEQ ID NO: 37170 - DNA, 110 bp, synthetic construct
  source 1..110: mol_type = other DNA
caggttgaacacggctgagtcactccacttgtcccagctgatatcattctagaattcactcaattcccatctgaccccttggacatgtgagagggtccagccaagaccag

SEQ ID NO: 37171 - DNA, 110 bp, synthetic construct
  source 1..110: mol_type = other DNA
gatcgaacccacgcctctatagcaagagctgctgccattggattcttaactcacggcaccacagagggaactcctatttagcagaattttttaaacagaaaatttaaaac

SEQ ID NO: 37172 - DNA, 110 bp, synthetic construct
  source 1..110: mol_type = other DNA
gttataacaccacggacctcatagggttgttgggaagatgaaatgattaactgagccatagccaacactcattgagctggtactcccatgctatcttcttaccgattggc

SEQ ID NO: 37173 - DNA, 110 bp, synthetic construct
  source 1..110: mol_type = other DNA
tggcttacctaaggcaagcagtggtcctgggcgttaaatctagatccatccaactatgtcatctttcctctcaggtcattaaaggatacaaggaatgcgtggtgctcaat

SEQ ID NO: 37174 - DNA, 110 bp, synthetic construct
  source 1..110: mol_type = other DNA
atgtcatctttcctctcaggtcattaaaggatacaaggaatgcgtggtgctcaattagctacagaaaaatcccgatttccacacagagataaggggtttgtgtgccctat

SEQ ID NO: 37175 - DNA, 110 bp, synthetic construct
  source 1..110: mol_type = other DNA
accttagtctatgataaacgtggcacttcaaagcactgatgaaaagagtattcaataaatggtgttagaatcacagggcagctatttggaaaagtcactctttaacaagc

SEQ ID NO: 37176 - DNA, 110 bp, synthetic construct
  source 1..110: mol_type = other DNA
ccgacacatagactatagcctcttgaagtaacagaggaaccaagaatgctgtcgggatgtggtttcacttctgctctaccccaactagctacggaatacctcatgtctgg

SEQ ID NO: 37177 - DNA, 110 bp, synthetic construct
  source 1..110: mol_type = other DNA
atagttcaaacaattttcataaacacacccatgcagccaacagccagataaggcgtgagaccattatcatagctcctcagacacctgccccactaaccagcaccctcggt

SEQ ID NO: 37178 - DNA, 110 bp, synthetic construct
  source 1..110: mol_type = other DNA
tctcctttctccccacacaagctgcacatacgtgtgtaaacattggttgatgcataaaacacatctagtaccgcagacaaatgtgccaggactaaaggaaaggaagtcac

SEQ ID NO: 37179 - DNA, 110 bp, synthetic construct
  source 1..110: mol_type = other DNA
gattcctccagagaccacatcatctcttacctccaacagggctccctgcttccaatgcttttaaaatcttttagcagattcactgagataaaattcatataccacacaat

SEQ ID NO: 37180 - DNA, 110 bp, synthetic construct
  source 1..110: mol_type = other DNA
tgcttttaaaatcttttagcagattcactgagataaaattcatataccacacaattcactcgaagatgcagcttggatctggccttgctgttgctgtggtgtaggccagc

SEQ ID NO: 37181 - DNA, 110 bp, synthetic construct
  source 1..110: mol_type = other DNA
ttgtttccactgcgccccgacagaagggatctcctgccttttcaaatgagaaacctagaccctcctagctccattttgtgaagcttcttgggcccaaggtgttgaaaaac

SEQ ID NO: 37182 - DNA, 110 bp, synthetic construct
  source 1..110: mol_type = other DNA
ctccctgagtgaggccagggatcaaccccatgtgctcgtggatcctagttgggttcgttaatcgctgagctccgatgcgaactcccctctctgcggtttcttaatttatc

SEQ ID NO: 37183 - DNA, 110 bp, synthetic construct
  source 1..110: mol_type = other DNA
cgttaatcgctgagctccgatgcgaactcccctctctgcggtttcttaatttatctactttggttcttatctgttgatttcctggtgtgataaatgagactgtagcatca

SEQ ID NO: 37184 - DNA, 110 bp, synthetic construct
  source 1..110: mol_type = other DNA
cgcagaaggttcaggctgtctctataaatcactgttgatagaaacggtgtcaggtgaccttatggctggtctggggtatcgggaggcctgccttgaggtcctagcttctt

SEQ ID NO: 37185 - DNA, 110 bp, synthetic construct
  source 1..110: mol_type = other DNA
gaccttatggctggtctggggtatcgggaggcctgccttgaggtcctagcttctttggttcacctcctacttggtttttggtcttgtttatttacttaacaactatttat

SEQ ID NO: 37186 - DNA, 110 bp, synthetic construct
  source 1..110: mol_type = other DNA
ctgacaccaagtgtggcctgtagaccagcagcctcgacatcccctgggagcttgttagaaatgcagattctcagggcccaggtttagacctttggatccaggtttaataa

SEQ ID NO: 37187 - DNA, 110 bp, synthetic construct
  source 1..110: mol_type = other DNA
tgggtgcagagtgaggtggagcaactggatggaaactcagggttctactggcccggctttaaaagctttcttcagagagagctcgctgtgtttggctgtatcttgcttta

SEQ ID NO: 37188 - DNA, 110 bp, synthetic construct
  source 1..110: mol_type = other DNA
ttgtaaattcagctaactgttactaaccaaactttcaccaggtctttaaatttcatcttttgcctccgagaattagctcctgcctgtagattcaaatccatcactcacca

SEQ ID NO: 37189 - DNA, 110 bp, synthetic construct
  source 1..110: mol_type = other DNA
agaattacattggggattaatctgatgggggacttgaggggctgcagtgctgcttgaggatggtccgggaagattttaacactgagaacgccaagttcataaagacctga

SEQ ID NO: 37190 - DNA, 110 bp, synthetic construct
  source 1..110: mol_type = other DNA
ggggaaaaacaatcttttgagaattgatgagttcgcaacttacatctccagcagatgcagcctgagagatagtataaatcccgaagagtccagaatctgagtaactggcg

SEQ ID NO: 37191 - DNA, 110 bp, synthetic construct
  source 1..110: mol_type = other DNA
tgcagcctgagagatagtataaatcccgaagagtccagaatctgagtaactggcgttaaaagcagaaacctgaaatataatgaaactttactcattctactgggtaaaac

SEQ ID NO: 37192 - DNA, 110 bp, synthetic construct
  source 1..110: mol_type = other DNA
gcagctacctcccagcgacgaaattctggtgctgcggtgacattgagcaggaactccatcaggatctcactacagaaggcatgaagataagagttaccgtcaaaaaattt

SEQ ID NO: 37193 - DNA, 110 bp, synthetic construct
  source 1..110: mol_type = other DNA
ccatcaggatctcactacagaaggcatgaagataagagttaccgtcaaaaaatttaaaaccagcatccactcctcagaactgcaatgctctcaatattccacttcaggca

SEQ ID NO: 37194 - DNA, 110 bp, synthetic construct
  source 1..110: mol_type = other DNA
tggttgccctatgtgttgtttagggcagtcaaccccagtttttttcatttttttcccacatagccagcccagctctctctgagtctgatcttaaagccagtgtgtctgtt

SEQ ID NO: 37195 - DNA, 110 bp, synthetic construct
  source 1..110: mol_type = other DNA
gaatttggttccctgacaaactataatgggatcctagacagtagaagccaggtggcagaacttaactattagaaaaaagatgggatccattactacaataagcgaaaggg

SEQ ID NO: 37196 - DNA, 110 bp, synthetic construct
  source 1..110: mol_type = other DNA
ctcagccctgaagttattttgacttggtctccagttagagcagctctaaggtccgttacatcaagttgctatatatgaaagtgttggagaaacagaatgggaagatgagc

SEQ ID NO: 37197 - DNA, 110 bp, synthetic construct
  source 1..110: mol_type = other DNA
aaacaaaataccagaatgatgtaaagcttaaaaaaagaagtctctattggaagaaattctgtagttcaaacatccagtattttgtgactctctttgaaaacccttttctg

SEQ ID NO: 37198 - DNA, 110 bp, synthetic construct
  source 1..110: mol_type = other DNA
tgcaaggaaattgactacggctacttaacaggaattgagaaagtggtcccaaggatactagctctcaacccgccgctgcctcaactccaatctcggggaaccagtggctg

SEQ ID NO: 37199 - DNA, 110 bp, synthetic construct
  source 1..110: mol_type = other DNA
taaacaacagtcagtaagaggcaaaactagaactcagaccaggtctggctgatcataaagtatctgtgctcttaggagctacgcagcagttctcaaacttgcctgagggt

SEQ ID NO: 37200 - DNA, 110 bp, synthetic construct
  source 1..110: mol_type = other DNA
taaagtatctgtgctcttaggagctacgcagcagttctcaaacttgcctgagggtgagaatcacctgggggctggttaacaaatctcaaattccccaggaaaggcctatg

SEQ ID NO: 37201 - DNA, 110 bp, synthetic construct
  source 1..110: mol_type = other DNA
agccaaggttctcttggggacagcaggacagagaatttggaattagggctgtcctggagttctgtagctcaagaagtctcacagttcttcctagacagaaattctaggct

SEQ ID NO: 37202 - DNA, 110 bp, synthetic construct
  source 1..110: mol_type = other DNA
ggagttctgtagctcaagaagtctcacagttcttcctagacagaaattctaggctgcagaattcttttatcagcctttgcttccaagtgtcaacccacagaatttctaca

SEQ ID NO: 37203 - DNA, 110 bp, synthetic construct
  source 1..110: mol_type = other DNA
agagggaaggtgtgacctcactaaccctgacaggagggaaagctttaaatatccacagatgtgactaagttctagcagaatacctacattgcttgtcaattagatttgtc

SEQ ID NO: 37204 - DNA, 110 bp, synthetic construct
  source 1..110: mol_type = other DNA
ctgctgtggctgagtcgaactcagggtccttagcttttagagagatattgaaaattggagtctgttcagatgtggctgagcaaactgtgtggtctgaggaacagcaaaat

SEQ ID NO: 37205 - DNA, 110 bp, synthetic construct
  source 1..110: mol_type = other DNA
gaaattgattttagaatggatgttttctcaggcagaatggctcccacgttggccgtaaaagtcaaagctaatcgttgacatggtgcttgagattcatggggctgaaagag

SEQ ID NO: 37206 - DNA, 110 bp, synthetic construct
  source 1..110: mol_type = other DNA
ttaaatagcatcctcaaggtccacccagttgtaatggaattttacagtttgctcaagtttgggacccttggtcctggtgttcagctaagggggtggaggtcccctgatat

SEQ ID NO: 37207 - DNA, 110 bp, synthetic construct
  source 1..110: mol_type = other DNA
atatcgaacagcattgctctatatttaggaaaaggaaaggaaaacaagaaatacactcaaagctttagattctaaggatctgatactatggtatggaaacaaactccttt

SEQ ID NO: 37208 - DNA, 110 bp, synthetic construct
  source 1..110: mol_type = other DNA
tgtataattacagtacttatctcctcggttgtaatacttaaatgagttaatgtatctgaagtgcttggagcagtttttggtacataaccagcactatataaattttagct

SEQ ID NO: 37209 - DNA, 110 bp, synthetic construct
  source 1..110: mol_type = other DNA
ctgaagtgcttggagcagtttttggtacataaccagcactatataaattttagctgttttgcaattaaaagttatttttattagagcagaatttagcctttggtaagaac

SEQ ID NO: 37210 - DNA, 110 bp, synthetic construct
  source 1..110: mol_type = other DNA
catttgcttttgattttctgaatagatttagtgtggacacgtttttaaggcgatcacaaaactctgaatagctgccattttgcattgaagagatccatttcctgacttgg

SEQ ID NO: 37211 - DNA, 110 bp, synthetic construct
  source 1..110: mol_type = other DNA
ccctagagattcgggactgattttcccctcagattttccctctcctagctagcgctgacttccaaaggttggctagtgccctcctgaggcatgtccccatctgtccatcc

SEQ ID NO: 37212 - DNA, 110 bp, synthetic construct
  source 1..110: mol_type = other DNA
agttgttctatgatacgatcaaggactttccggagctgacgttcggagtgatactgattaaaaatgccattgggaatttccgcgtcaccctagacagtgttctggtgttc

SEQ ID NO: 37213 - DNA, 110 bp, synthetic construct
  source 1..110: mol_type = other DNA
tgtggtcatcaggaactcaggttcctaccttctgctaacttctggcagctccaccgttccctgaaagtcctctcttggatcctttgcctctggtccctagagggtagacg

SEQ ID NO: 37214 - DNA, 110 bp, synthetic construct
  source 1..110: mol_type = other DNA
tggcagggaccccaacataattttattagatgtcatgggtgaatgcgtggacaggcacagggtatgttctgacatttcatcaaactgtggatgcttggaggactgcatga

SEQ ID NO: 37215 - DNA, 110 bp, synthetic construct
  source 1..110: mol_type = other DNA
cacagggtatgttctgacatttcatcaaactgtggatgcttggaggactgcatgaagctgtaataagcaggcttctttccttttttccggaatatcactgataagtaagt

SEQ ID NO: 37216 - DNA, 110 bp, synthetic construct
  source 1..110: mol_type = other DNA
ggagggggtaaggcctgaattgggttgctctgggctcaaatcctagctctactgcttactatctcttggggaaggggctcaattttcccatctgtcaaatggtgataatc

SEQ ID NO: 37217 - DNA, 110 bp, synthetic construct
  source 1..110: mol_type = other DNA
aacatgacaggaacataaacaagctagctatttttctctcatatactagtccagttagaaggcagccaggccatgggaggtgacctcattttgttgaggagccaggctct

SEQ ID NO: 37218 - DNA, 110 bp, synthetic construct
  source 1..110: mol_type = other DNA
aaacagtttggcagttagtgaaacacacaccaaacacaaaactgaatttcagacagccaacaatttcggtcctagctatggaggaaaaatgaaaacgtgtgcccacaaaa

SEQ ID NO: 37219 - DNA, 110 bp, synthetic construct
  source 1..110: mol_type = other DNA
gccaacaatttcggtcctagctatggaggaaaaatgaaaacgtgtgcccacaaaaggacttctacaagaatgttcatagcatctctattaaaaactacaacatgggagtt

SEQ ID NO: 37220 - DNA, 110 bp, synthetic construct
  source 1..110: mol_type = other DNA
cacctataccctaaacatccacaatcacggctaacatcattcaagccccaggcaaatgcttctctgtgcccttcgctctccgtgtctctaaaacaaaaggcagctgctct

SEQ ID NO: 37221 - DNA, 110 bp, synthetic construct
  source 1..110: mol_type = other DNA
atgcttctctgtgcccttcgctctccgtgtctctaaaacaaaaggcagctgctctcaaatgccaagaaagatagtctctgctgcccctgctgattttggaaacaaacact

SEQ ID NO: 37222 - DNA, 110 bp, synthetic construct
  source 1..110: mol_type = other DNA
aggcaaagaagcaggttaacacagctttctggagaaagagcactccagggagagggacgagccagtgcaaaagctctgaggcataaggagatctctgaatagactgggac

SEQ ID NO: 37223 - DNA, 110 bp, synthetic construct
  source 1..110: mol_type = other DNA
gacgagccagtgcaaaagctctgaggcataaggagatctctgaatagactgggacacatgcctgtccccagccccagattctcctatccatttagttgcctgcagacaga

SEQ ID NO: 37224 - DNA, 110 bp, synthetic construct
  source 1..110: mol_type = other DNA
aaaagcatgccaactcaggaaaccagggatgtggtataaactggaaagaaagctccaagacagagcacaggtttcatgttgacaatgtcgtgaaacacaaacctgccatt

SEQ ID NO: 37225 - DNA, 110 bp, synthetic construct
  source 1..110: mol_type = other DNA
caagacagagcacaggtttcatgttgacaatgtcgtgaaacacaaacctgccatttggggacaaagaaattgccctgagaacctgaagtggtggattcggacatgggctc

SEQ ID NO: 37226 - DNA, 110 bp, synthetic construct
  source 1..110: mol_type = other DNA
ttcaggcccccatcccccaggaaaatgcaggtcccatctcagaacagaacgtccaccaggaccgtggccttggagcgtgtgctgccaggtggtgtgcatcagggaatttt

SEQ ID NO: 37227 - DNA, 110 bp, synthetic construct
  source 1..110: mol_type = other DNA
ccaggaccgtggccttggagcgtgtgctgccaggtggtgtgcatcagggaattttcaagtgttctggaacatccagatcccatggaacctcccccagcagcctaaggggg

SEQ ID NO: 37228 - DNA, 110 bp, synthetic construct; identical to SEQ ID NO: 37226
  source 1..110: mol_type = other DNA

SEQ ID NO: 37229 - DNA, 110 bp, synthetic construct; identical to SEQ ID NO: 37227
  source 1..110: mol_type = other DNA

SEQ ID NO: 37230 - DNA, 110 bp, synthetic construct
  source 1..110: mol_type = other DNA
tctcccagattcccagtatctgaagtgtatccctgttctgacgagtcttccaaggtgattttggaattgtatgatattcagggggacccaaccaaaagcagacagtcccc

SEQ ID NO: 37231 - DNA, 110 bp, synthetic construct
  source 1..110: mol_type = other DNA
tgattttggaattgtatgatattcagggggacccaaccaaaagcagacagtcccctggaattacgggttcctcagactggatttttatggcattgttgcccctgaattga

SEQ ID NO: 37232 - DNA, 110 bp, synthetic construct
  source 1..110: mol_type = other DNA
ctttaacccaccgtaatgggccaggggacggaatccaggtcttcaaagtgaccccaactgaggtaggagaagatgggcccccgggctgaggacagcagggacttgttagg

SEQ ID NO: 37233 - DNA, 110 bp, synthetic construct
  source 1..110: mol_type = other DNA
ggacggaatccaggtcttcaaagtgaccccaactgaggtaggagaagatgggcccccgggctgaggacagcagggacttgttaggctgagtaaattgcttgcttctcttt

SEQ ID NO: 37234 - DNA, 110 bp, synthetic construct
  source 1..110: mol_type = other DNA
caagccaggagttaaacccaagccacacagcaacctgagccatagcagtgacaatgccagacacataatcagctgagccacccggaaactccagtttatttatttattgt

SEQ ID NO: 37235 - DNA, 110 bp, synthetic construct
  source 1..110: mol_type = other DNA
agatcttgcttcaagccatcacttgccgctgtctcttcaagatcgttgtcaccactatagagccaagtgtcccaggagaaagaggtgtcatcttctcactgagctcctgg

SEQ ID NO: 37236 - DNA, 110 bp, synthetic construct
  source 1..110: mol_type = other DNA
tatagagccaagtgtcccaggagaaagaggtgtcatcttctcactgagctcctggccacacccaccagaggggataacctgtccccatccacggaaagctccctgcagcc

SEQ ID NO: 37237 - DNA, 110 bp, synthetic construct
  source 1..110: mol_type = other DNA
tttgatttccttcattctgagccggggactgctatttaccactgcggaatagcacagccgtgttagttaacgtctcgttgccaggaaagcctggatccccagagaaggtc

SEQ ID NO: 37238 - DNA, 110 bp, synthetic construct
  source 1..110: mol_type = other DNA
agtcaagtttgtgaccgctgcgccacagtgggaatgccccagaattgcagctttcaatgatgctggctcacctgatggggcggctgtccccagagggaagccagagagat

SEQ ID NO: 37239 - DNA, 110 bp, synthetic construct; identical to SEQ ID NO: 37238
  source 1..110: mol_type = other DNA

SEQ ID NO: 37240 - DNA, 110 bp, synthetic construct
  source 1..110: mol_type = other DNA
agtccaattaagttctaattaagttctgatctctcgtcttccagttaagctaatccaaaggcatggctcaatgtcaggggatcggttaagaacatccagctgactgtaat

SEQ ID NO: 37241 - DNA, 110 bp, synthetic construct
  source 1..110: mol_type = other DNA
caaaggcatggctcaatgtcaggggatcggttaagaacatccagctgactgtaatgtctaatctttatgatagttacacgagtcaaacttaatttgcttcagtggaatac

SEQ ID NO: 37242 - DNA, 110 bp, synthetic construct
  source 1..110: mol_type = other DNA
gtccaatacaagggccactagccatatgtagctgtttaagcttattagaagtagaacaaaaaattcagttccaaagttgcactaatcacacttcaagtgctcaatatccg

SEQ ID NO: 37243 - DNA, 110 bp, synthetic construct
  source 1..110: mol_type = other DNA
cgacccacgggagcctgtcgtgtgctttgctctgaggacaggaagcagctgatctcgcctctctgggcaggaagaggttagacacaggggctctgggagagaaaccgctc

SEQ ID NO: 37244 - DNA, 110 bp, synthetic construct
  source 1..110: mol_type = other DNA
ctgggaggcagcccggggcttcgaggagctgattatccacatgctgtccaacactgctcggtactgcaccagcccctcggagagcagatctcatttctccggctctgcaa

SEQ ID NO: 37245 - DNA, 110 bp, synthetic construct
  source 1..110: mol_type = other DNA
gctcggtactgcaccagcccctcggagagcagatctcatttctccggctctgcaaactcctttccaaacaacgtccaaggtgaaccggagtagcagagagcttaggggca

SEQ ID NO: 37246 - DNA, 110 bp, synthetic construct
  source 1..110: mol_type = other DNA
aactcagcaacgacaccttctgaaagaaaacaaagttctataccacctaacttatgattgtaaaatagaatattatcttttctttagcatgacttaattacacagcacaa

SEQ ID NO: 37247 - DNA, 110 bp, synthetic construct
  source 1..110: mol_type = other DNA
ctttgggaataaacagttcacatccatcaattcttacctttacgtttcccaaaagaatatgcccacataacccatgcccttctcaccactgacagctgtcaacaccttgg

SEQ ID NO: 37248 - DNA, 110 bp, synthetic construct
  source 1..110: mol_type = other DNA
aatatgcccacataacccatgcccttctcaccactgacagctgtcaacaccttggaattggtatactgggtaatacacttcgaaatgtgtttatttaaatccctgtcctc

SEQ ID NO: 37249 - DNA, 110 bp, synthetic construct
  source 1..110: mol_type = other DNA
tattttatgaaagccaaaagagtgtccctttttaacttgacagactcctgttaagtcaaaggctagacaatgaatgtgaattgcaatctcaggaagagcatcaccagaca

SEQ ID NO: 37250 - DNA, 110 bp, synthetic construct
  source 1..110: mol_type = other DNA
tcaaaggctagacaatgaatgtgaattgcaatctcaggaagagcatcaccagacatggcaaaaatccacccagagaagggtttaatgggctgcatttaatcgcttatgta

SEQ ID NO: 37251 - DNA, 110 bp, synthetic construct
  source 1..110: mol_type = other DNA
gcacagaagaactaagtaacttgtcacactcacactagaaggtgacggaacctggattggacatcggaccacaaagactttatggtcaactagacctgcgttcaaatgtc

SEQ ID NO: 37252 - DNA, 110 bp, synthetic construct
  source 1..110: mol_type = other DNA
attggacatcggaccacaaagactttatggtcaactagacctgcgttcaaatgtcagcttctctaccagccaccactaggacgtcccccaggtgacccctcagttgacct

SEQ ID NO: 37253 - DNA, 110 bp, synthetic construct
  source 1..110: mol_type = other DNA
gtcgcagaatctggcacagccgtcacttctaaggtcttgaaaaccaaagtctgggctggagctcagaggagcatcggctgatggcttccggaggcagcagggttggggct

SEQ ID NO: 37254 - DNA, 110 bp, synthetic construct
  source 1..110: mol_type = other DNA
atcagtcggcttttcagttgacgtgtggaatggtccatcatctgccgtatagaaaatgcagccagtcccagggatgtactttaggattttttttttttttaacagagact

SEQ ID NO: 37255 - DNA, 110 bp, synthetic construct
  source 1..110: mol_type = other DNA
atgcagccagtcccagggatgtactttaggattttttttttttttaacagagactcttaaaagtgggacttgggaaggactaggaaccgtgaggacgtgggttggatccc

SEQ ID NO: 37256 - DNA, 110 bp, synthetic construct
  source 1..110: mol_type = other DNA
gcatagaaccaaaagagatttttagtaagggcttttcattttattttcttttaaaacagagctcgattgatgtgcaacgtacgtgccataaaatttgctccttttagttg

SEQ ID NO: 37257 - DNA, 110 bp, synthetic construct
  source 1..110: mol_type = other DNA
acagagctcgattgatgtgcaacgtacgtgccataaaatttgctccttttagttgaaaatccagtgatttctaggaattcacggagtcatgcatctatcgccacgatatc

SEQ ID NO: 37258 - DNA, 110 bp, synthetic construct
  source 1..110: mol_type = other DNA
ccatgtattttcattctgcaaatatcgagtacttcttgtgaggcaggtgcttatatacatcagtgaacaaatcagaccaaaatcccagctcatcaggtgaatgcttgaat

SEQ ID NO: 37259 - DNA, 110 bp, synthetic construct
  source 1..110: mol_type = other DNA
aagttcccaggccagggatcaaacctgcaccacaatagcaacccaagccgaggcactgacaaccacagatccttaacgtgcaacaatgcaggagagctcccagtctacct

SEQ ID NO: 37260 - DNA, 110 bp, synthetic construct
  source 1..110: mol_type = other DNA
ctgacaaccacagatccttaacgtgcaacaatgcaggagagctcccagtctaccttgttttgaagaaaaacttgaaacagcatctaggtctcatagagaaggaaaaagag

SEQ ID NO: 37261 - DNA, 110 bp, synthetic construct
  source 1..110: mol_type = other DNA
tgggggtggagaccagtgagctggggagaagagaagaatcatcagaagttttgtatttgccaagggaggagcggcacgtatcggggggctgagggggtgtaggtgttcca

SEQ ID NO: 37262 - DNA, 110 bp, synthetic construct
  source 1..110: mol_type = other DNA
ggaggtagcctgactcccatgttccaggcactcaggtgaagagctgagcaagggagggaggacacagcaggggtgggacacatcgagtcccagggacctgtggatgtcca

SEQ ID NO: 37263 - DNA, 110 bp, synthetic construct
  source 1..110: mol_type = other DNA
aacttccatatgctttgggtgcggccctaaaaaagcaaaacaaaaaccaaaaccactggttactttgtatcatttatgttagagctgcttcctgggagtagacttggtgt

SEQ ID NO: 37264 - DNA, 110 bp, synthetic construct
  source 1..110: mol_type = other DNA
atttgaagtgaaataagcgactcctagacagatgttccttcctgctcctggttgttcccttcatctgccttctcctgctccacctgagctaacatttctgggctcagtgt

SEQ ID NO: 37265 - DNA, 110 bp, synthetic construct
  source 1..110: mol_type = other DNA
ttttggatcctcatgcttgagctttcatctgaggagaaatgccacagcagaggtgctcacagactgctggtatggtcacagggagactgtgttggtcccatgatgtgata

SEQ ID NO: 37266 - DNA, 110 bp, synthetic construct
  source 1..110: mol_type = other DNA
ccttttctgccacacaactgagcatgaatgcaccgcctttcaggcccatttctattatcccttcatgatcgctcctttggaacatgcccaaagctccagtctgaaagctc

SEQ ID NO: 37267 - DNA, 110 bp, synthetic construct
  source 1..110: mol_type = other DNA
tatcccttcatgatcgctcctttggaacatgcccaaagctccagtctgaaagctcttgggttgggagagggaactgctgtccctgtttcctagagagtctgccttttgct

SEQ ID NO: 37268 - DNA, 110 bp, synthetic construct
  source 1..110: mol_type = other DNA
tcctcatggatactagtccagtttgttactgctgagccacagcgggttttaacacagcagttttagctcctcctgtttaaaatgacttttttgaaagagagtgagaatga

SEQ ID NO: 37269 - DNA, 110 bp, synthetic construct
  source 1..110: mol_type = other DNA
agaagcttgcaggtcacttatgtagagactgagctggggccttgaggtcctgagctcatcatttttcctgcactttctccagctcagttggaagcaaccaaccaatctca

SEQ ID NO: 37270 - DNA, 110 bp, synthetic construct
  source 1..110: mol_type = other DNA
tcatcatttttcctgcactttctccagctcagttggaagcaaccaaccaatctcattatatttgtcagtttgactaaagtgttttttgtttgttgttattgttatctggt

SEQ ID NO: 37271 - DNA, 110 bp, synthetic construct
  source 1..110: mol_type = other DNA
cagagccacatttgggagtacgtctggctggtgcctgctctaatatttttagactcagcaatatatcccatcaagatgccacgtgtaaagaatagggtctttccaagaaa

SEQ ID NO: 37272 - DNA, 110 bp, synthetic construct
  source 1..110: mol_type = other DNA
cagcaatatatcccatcaagatgccacgtgtaaagaatagggtctttccaagaaaacattgctcctggcaaatagagatttgtggggggggggcgattgctttattttgc

SEQ ID NO: 37273 - DNA, 110 bp, synthetic construct
  source 1..110: mol_type = other DNA
ccctccatctgccattttcaaatttttggcaaacaaacagctgttatttcataccgaaaaaaaaatcaataaacatgacttttatgaaaggttagaatatagaccggaaa

SEQ ID NO: 37274 - DNA, 110 bp, synthetic construct
  source 1..110: mol_type = other DNA
tctccagatggttcatgctcggagcttaccgaagccttcttgtctgctaggaagtctcttggggagggcagaattctagaaccacgagaggagagggtacgttcgaggtt

SEQ ID NO: 37275 - DNA, 110 bp, synthetic construct
  source 1..110: mol_type = other DNA
gaagcctccgaagtttgctcatccttcctgggaggggagaagtcgtggttgaggaagctacagatggagcggcagatgggacgtgaaagcctatcagagtcacccgggat

SEQ ID NO: 37276 - DNA, 110 bp, synthetic construct
  source 1..110: mol_type = other DNA
agctacagatggagcggcagatgggacgtgaaagcctatcagagtcacccgggataaaaccattcatctgcaaaattcatatgtttttgcgtggggcgacttcaccaaaa

SEQ ID NO: 37277 - DNA, 110 bp, synthetic construct
  source 1..110: mol_type = other DNA
cagcagtttcacagggccctctggtgatcatgatgacaactgcggtgaccgacatgggtggacacacagggaaacctcagtgggaaaacgagacaggaccaccgagggtg

SEQ ID NO: 37278 - DNA, 110 bp, synthetic construct
  source 1..110: mol_type = other DNA
gggtggacacacagggaaacctcagtgggaaaacgagacaggaccaccgagggtgaatgggaagaggcgctgatgaaatgatgccgagacactccccaaatgtgtcaggg

SEQ ID NO: 37279 - DNA, 110 bp, synthetic construct
  source 1..110: mol_type = other DNA
gagcgccgtgatgctttattcaatggctggagatgccatgataaagctatgagcggagaaaatactggtaggagaggatatatgtttcaatgcctttagaactggctcgt

SEQ ID NO: 37280 - DNA, 110 bp, synthetic construct
  source 1..110: mol_type = other DNA
cccttcctgttcacgtgcgagtttggcgtgacccggagaacggccatccctgtcgagggccgcagaggccgaggtgatggccacgcccatttcaacagctgctggaaata

SEQ ID NO: 37281 - DNA, 110 bp, synthetic construct
  source 1..110: mol_type = other DNA
agggccgcagaggccgaggtgatggccacgcccatttcaacagctgctggaaataacttctgcctcctggtttcaggggggctggcgtggcttgtgggccaggacgtgcc

SEQ ID NO: 37282 - DNA, 110 bp, synthetic construct
  source 1..110: mol_type = other DNA
agtcaagaaagaagggaccatatatcctgggcttcctgcctacagtcaacaaaggttccagacttggctatgggtggggggcgtgcccaccttgattttgttcagctttc

SEQ ID NO: 37283 - DNA, 110 bp, synthetic construct
  source 1..110: mol_type = other DNA
ttccagacttggctatgggtggggggcgtgcccaccttgattttgttcagctttcctacactccaaggctggggatcctgtgagccctttgaactgtgctttcctaaagc

SEQ ID NO: 37284 - DNA, 110 bp, synthetic construct
  source 1..110: mol_type = other DNA
aaggtttgacttctaaaggtagcccatgtccaggaatcatttcaggagctctccgtaaccctcgcaggagatctggagacagttctgcagggacagaccctggggtaatg

SEQ ID NO: 37285 - DNA, 110 bp, synthetic construct
  source 1..110: mol_type = other DNA
catctgcgggaggctaaggaggagaacgcggccacccgtcacccagggaaacggagctgaagaattcgtcaacagatacgacggttacaaaatgctcccacccgctcatc

SEQ ID NO: 37286 - DNA, 110 bp, synthetic construct; identical to SEQ ID NO: 37285
  source 1..110: mol_type = other DNA

SEQ ID NO: 37287 - DNA, 110 bp, synthetic construct
  source 1..110: mol_type = other DNA
ctttgcagaccctaaggcctctcaccgcaactactcaactctgccatagggcgcgagctgccttatttaaatgagtgagtgcagctgtgtctgaataaaactttatttac

SEQ ID NO: 37288 - DNA, 110 bp, synthetic construct
  source 1..110: mol_type = other DNA
gacgggctagccaggctccttcatgaagcccatcccccatttgctcgggagactccaccctctctcccagtttatggacatcactctactgtttccctctctttccttta

SEQ ID NO: 37289 - DNA, 110 bp, synthetic construct
  source 1..110: mol_type = other DNA
caaagtggcatctctgttccctccccaggctcctgatgagcagccatgtgctaagttctaggaactgctccccactggggtccttcagcaccaagggggtcacagctccc

SEQ ID NO: 37290 - DNA, 110 bp, synthetic construct
  source 1..110: mol_type = other DNA
ttctaggaactgctccccactggggtccttcagcaccaagggggtcacagctccccggctgccttccttaccatcctggttggcctttctttctttctttcttagggccg

SEQ ID NO: 37291 - DNA, 110 bp, synthetic construct
  source 1..110: mol_type = other DNA
atacttgttgggtttgttactgctgagccatgacaggaactcccagtaagcttttattattatatcattttatagataagaggattaaggcacacagctagctggtcact

SEQ ID NO: 37292 - DNA, 110 bp, synthetic construct
  source 1..110: mol_type = other DNA
attattatatcattttatagataagaggattaaggcacacagctagctggtcactgggggaacattctgggcctccataggggcactctgtctcctaagactttgttctt

SEQ ID NO: 37293 - DNA, 110 bp, synthetic construct
  source 1..110: mol_type = other DNA
ttgctgtgccctgattgctgccgactgtacttggtaccgtgtcaccctggaacttttgtttcagatgtataagatcccctgttcaataagccaactgttggtgtctctgt

SEQ ID NO: 37294 - DNA, 110 bp, synthetic construct
  source 1..110: mol_type = other DNA
aacagtgactgctatttggggaagtcaggtcctcagctagcaggaatctagatggccaagaggaatttttacattatattgaagcagaaaagtcctccttcttcaaatga

SEQ ID NO: 37295 - DNA, 110 bp, synthetic construct
  source 1..110: mol_type = other DNA
agttcatgtatcttcattcctgagtctgtgctccaacccctaggttgtattgcttctccactgtgtgcttgggagaaaactgcggaaatgtatctatacccaactcacag

SEQ ID NO: 37296 - DNA, 110 bp, synthetic construct
  source 1..110: mol_type = other DNA
ctccactgtgtgcttgggagaaaactgcggaaatgtatctatacccaactcacaggaatagctgagccccacaggaacaggatatgcctttgaggctctgagcatggttg

SEQ ID NO: 37297 - DNA, 110 bp, synthetic construct
  source 1..110: mol_type = other DNA
tgggtcttgtatctctctatgattatgatgactttaattaagggcctcatttctcttctctttcactgaatcttatccagcttcactccagtcctttccagtaaggcttc

SEQ ID NO: 37298 - DNA, 110 bp, synthetic construct
  source 1..110: mol_type = other DNA
gtgaccaaggtttgggcaactctgtaataaagttgcctggggagaatccatactacccactgtttggaatgatttttaatttaaaatagaaataattttaatattatctg

SEQ ID NO: 37299 - DNA, 110 bp, synthetic construct
  source 1..110: mol_type = other DNA
agttgagtcagagtagagaagacttagcaagggctggccaggataaatgccattgggccagctgtggctgccggccggcggcaatgggagttcggattcccatcctgcca

SEQ ID NO: 37300 - DNA, 110 bp, synthetic construct
  source 1..110: mol_type = other DNA
ggccagctgtggctgccggccggcggcaatgggagttcggattcccatcctgccacagtgacttggagatggatgccttgtcctttctgatgagtgcatgtaagtgaaag

SEQ ID NO: 37301 - DNA, 110 bp, synthetic construct
  source 1..110: mol_type = other DNA
atacattgcttccttatgctctataagcttggaaagcaggggtctttctgcatcctaaactgaccctcgtgcaattagaaattaggttgccagtggaagtgctatatcag

SEQ ID NO: 37302 - DNA, 110 bp, synthetic construct
  source 1..110: mol_type = other DNA
taaactgaccctcgtgcaattagaaattaggttgccagtggaagtgctatatcagtgtaaacagcacaatagcctttggctctgcctaacaagatcagcaagctaggctc

SEQ ID NO: 37303 - DNA, 110 bp, synthetic construct
  source 1..110: mol_type = other DNA
aacaatgttgcaaagaacataacggttccattttacagatgaagacaaaggatccaaaagattaagtaaacagctcaccaagcggcagtacaaggctttgaacccaagtc

SEQ ID NO: 37304 - DNA, 110 bp, synthetic construct
  source 1..110: mol_type = other DNA
aaaagattaagtaaacagctcaccaagcggcagtacaaggctttgaacccaagtcttcctgacacctgagtacactacagcctggagtgaccagaggcttgatcagaaag

SEQ ID NO: 37305 - DNA, 110 bp, synthetic construct; identical to SEQ ID NO: 37303
  source 1..110: mol_type = other DNA

SEQ ID NO: 37306 - DNA, 110 bp, synthetic construct; identical to SEQ ID NO: 37304
  source 1..110: mol_type = other DNA

SEQ ID NO: 37307 - DNA, 110 bp, synthetic construct
  source 1..110: mol_type = other DNA
attaattatcatttccaaagaccacaaggacactgtgctatgcctggaacaggttgcttgatgtacagaccattgactgcacattcatctgacctgaaagcccaatagct

SEQ ID NO: 37308 - DNA, 110 bp, synthetic construct
  source 1..110: mol_type = other DNA
gcttgatgtacagaccattgactgcacattcatctgacctgaaagcccaatagctagacttccaacaccctggctcacaagacccctgaggctaactggttctatgatta

SEQ ID NO: 37309 - DNA, 110 bp, synthetic construct
  source 1..110: mol_type = other DNA
tctttctctgtatctccagctctatcttagtctttctcctcctcctcccttttcctccttccagcatctctggaggaggtaggtgagcagacagccaaaactcacagccc

SEQ ID NO: 37310 - DNA, 110 bp, synthetic construct; identical to SEQ ID NO: 37309
  source 1..110: mol_type = other DNA

SEQ ID NO: 37311 - DNA, 110 bp, synthetic construct
  source 1..110: mol_type = other DNA
aattaggttagaaaagagtatgactcatatcttgctggcagactctccgtattgtcctcccattttgcatgcaagctgtcatgtggaagacacccacgtggcaaggagca

SEQ ID NO: 37312 - DNA, 110 bp, synthetic construct
  source 1..110: mol_type = other DNA
cctcccattttgcatgcaagctgtcatgtggaagacacccacgtggcaaggagcaaagaactcagtgctgcaacaatcactaaggcagcttagaaatagatacttttggg

SEQ ID NO: 37313 - DNA, 110 bp, synthetic construct
  source 1..110: mol_type = other DNA
agtgtgagcctgtgaatgtcattttgcatcaagtatgactttttcccaggggggagaggtgctcttcatttaacctggaatccagcttatatgattctgtgctataaata

SEQ ID NO: 37314 - DNA, 110 bp, synthetic construct
  source 1..110: mol_type = other DNA
tggatctgaaattaagaagtttaaactggacctgaccgagattgttaatagctgaaggtagtaagaaagttacaggatctgccacccagtggggtagagatagttgataa

SEQ ID NO: 37315 - DNA, 110 bp, synthetic construct
  source 1..110: mol_type = other DNA
aggtagtaagaaagttacaggatctgccacccagtggggtagagatagttgataataggattgaaaaactggttccatgcttctaccccatggaactgaaacttcttccc

SEQ ID NO: 37316 - DNA, 110 bp, synthetic construct; identical to SEQ ID NO: 37314
  source 1..110: mol_type = other DNA

SEQ ID NO: 37317 - DNA, 110 bp, synthetic construct; identical to SEQ ID NO: 37315
  source 1..110: mol_type = other DNA

SEQ ID NO: 37318 - DNA, 110 bp, synthetic construct
  source 1..110: mol_type = other DNA
ttgctgagtgcttcacagaagcaaagcccaaggatggcacctttctaggcgctatcacttatgcaggaggccacagctgtccctgattccacaaaggtgtctctacagct

SEQ ID NO: 37319 - DNA, 110 bp, synthetic construct
  source 1..110: mol_type = other DNA
ccctttagtgtcttacaaccagatttttctatcttcaggttaacttgcaatcaccaggcccatcttcccccagctgagcatctcaaagaagcacttaacaatggtgtgat

SEQ ID NO: 37320 - DNA, 110 bp, synthetic construct
  source 1..110: mol_type = other DNA
ggctgagtcctctgcccccctacccccatcctggatggaaccgagaaagtcctgaggcgctctgccctaaaatcgtccttccgctttagaccccagatcatactgactat

SEQ ID NO: 37321 - DNA, 110 bp, synthetic construct
  source 1..110: mol_type = other DNA
ggcgctctgccctaaaatcgtccttccgctttagaccccagatcatactgactattcattaggcttctactgcgattcttccaaacacacacatggctggcagttatgtg

SEQ ID NO: 37322 - DNA, 110 bp, synthetic construct
  source 1..110: mol_type = other DNA
gctcaaggaacacatttcctactaggtcacaaaacctgccttctgctctcaaggtcactactagtgtttgggctgggagtaccccagctgccttcactttcctcctgtgc

SEQ ID NO: 37323 - DNA, 110 bp, synthetic construct
  source 1..110: mol_type = other DNA
cactactagtgtttgggctgggagtaccccagctgccttcactttcctcctgtgccccaggaaactacaagttgcaaaacctttctaggcagcttctgaaataccctatg

SEQ ID NO: 37324 - DNA, 110 bp, synthetic construct
  source 1..110: mol_type = other DNA
tgcctcactctcaccctctgtggcacctctggaaacttctgtgaagtcctcagagtctgaggaacccagtttgggaagctctagtctagagaaataagcagtcagacata

SEQ ID NO: 37325 - DNA, 110 bp, synthetic construct
  source 1..110: mol_type = other DNA
tctgaggaacccagtttgggaagctctagtctagagaaataagcagtcagacataggattagttaaacctgggttaaatatcaccctgccatctgggggctgaggacctt

SEQ ID NO: 37326 - DNA, 110 bp, synthetic construct
  source 1..110: mol_type = other DNA
tataggtgtttatcttttttcaagttttcattatcttgttgactaggcaagggggcagggcagttggctgaagaccttgctctgctccaggtgacagtgccaggcttacc

SEQ ID NO: 37327 - DNA, 110 bp, synthetic construct
  source 1..110: mol_type = other DNA
cagggcagttggctgaagaccttgctctgctccaggtgacagtgccaggcttaccagcttctctataaaggaccagatcaaagatagtttagacattgagggctgtaggg

SEQ ID NO: 37328 - DNA, 110 bp, synthetic construct
  source 1..110: mol_type = other DNA
aatctgaatgaaagcctggccaggtagagtatacatggtcgtagtttttccctttcattactttaatatattgtgccacttgtttctgacctgcagagtttctgctgaaa

SEQ ID NO: 37329 - DNA, 110 bp, synthetic construct
  source 1..110: mol_type = other DNA
cattactttaatatattgtgccacttgtttctgacctgcagagtttctgctgaaaggtcagctgatagccttatgggggggctcttgcatgtaacttctggcttttccct

SEQ ID NO: 37330 - DNA, 110 bp, synthetic construct
  source 1..110: mol_type = other DNA
taacccattcgtttactaattttacacatttcctgagtatctactatgtgccaggcacagttctcagtcctggggatacagaagagactctgtgcaaagccctcagagag

SEQ ID NO: 37331 - DNA, 110 bp, synthetic construct
  source 1..110: mol_type = other DNA
cacagttctcagtcctggggatacagaagagactctgtgcaaagccctcagagagcttaaactgcaagggagagaaggaaataacagagcagtagatccagaatttacgt

SEQ ID NO: 37332 - DNA, 110 bp, synthetic construct; identical to SEQ ID NO: 37330
  source 1..110: mol_type = other DNA

SEQ ID NO: 37333 - DNA, 110 bp, synthetic construct; identical to SEQ ID NO: 37331
  source 1..110: mol_type = other DNA

SEQ ID NO: 37334 - DNA, 110 bp, synthetic construct
  source 1..110: mol_type = other DNA
gacttatttatcatgccttgtttactgtctcttgcagttagaatgactgaacctgccatgcgggcatgggttttggtccacagaattcactgctctatcatcagtaccag

SEQ ID NO: 37335 - DNA, 110 bp, synthetic construct
  source 1..110: mol_type = other DNA
caacccacaggacagcccccaccaacagagaaatatccggccccagacaccaatagcacactcaaccactgtcatctacaacaaagtcattttctcagggtccacaaacc

SEQ ID NO: 37336 - DNA, 110 bp, synthetic construct
  source 1..110: mol_type = other DNA
agagagggagggagggcggtaaaaagagaggagagcagtgactgcctttctggtttcaggttgcagctttcaggccatctgatacttccttgctcctggtttcccaaaat

SEQ ID NO: 37337 - DNA, 110 bp, synthetic construct
  source 1..110: mol_type = other DNA
tcaggttgcagctttcaggccatctgatacttccttgctcctggtttcccaaaataaccccccttctggcttcaaggatgcccagtggggttacttgcaaccaatgtggc

SEQ ID NO: 37338 - DNA, 110 bp, synthetic construct
  source 1..110: mol_type = other DNA
ggttctaatcttctccacgtcactcacacatgtgggcctgaaagcaaggtttctcaagttcaggaccacggccatgggggcccagaacattctcttttgtgaggggctgg

SEQ ID NO: 37339 - DNA, 110 bp, synthetic construct
  source 1..110: mol_type = other DNA
aagttcaggaccacggccatgggggcccagaacattctcttttgtgaggggctggcctgtaggacgctgagcagcacccctgacctccactctacagatgccagcagcac

SEQ ID NO: 37340 - DNA, 110 bp, synthetic construct
  source 1..110: mol_type = other DNA
tgtctcttccaagtgagatgagaacagtggcccccagggaaggccggctgctcaggacagtagagctggaggcgtcgcatcacacagccttttggctaaacatcaaatgc

SEQ ID NO: 37341 - DNA, 110 bp, synthetic construct
  source 1..110: mol_type = other DNA
ttccgtctgcccaaattccctcttaggaatagacatttctccccaggactgtgcccccagctctgccaggcctctttctgaggacttcctgggcttgggcttcatcgtca

SEQ ID NO: 37342 - DNA, 110 bp, synthetic construct
  source 1..110: mol_type = other DNA
ccctttcacttgtttttataggttccaaagaaaactgatttatcagactttgagctggaagtaagtgttgagtgttatgcatgtgagctctgggagggacctccggttta

SEQ ID NO: 37343 - DNA, 110 bp, synthetic construct
  source 1..110: mol_type = other DNA
tggaagtaagtgttgagtgttatgcatgtgagctctgggagggacctccggtttaaaaacaaaatgtggttttttttgctcctacttcatttttaacattcttctgttct

SEQ ID NO: 37344 - DNA, 110 bp, synthetic construct
  source 1..110: mol_type = other DNA
ctgtgttgagttactgttttcggagtaaaggcagtcttctaatcctgcatctgttttctgtgagtaggattggggcctgttcgtggagaagtttagcaattaaagcctca

SEQ ID NO: 37345 - DNA, 110 bp, synthetic construct
  source 1..110: mol_type = other DNA
ttctgtgagtaggattggggcctgttcgtggagaagtttagcaattaaagcctcaggacttttatttcctaatgcttggaatactccccaaactcagtgtctttcttttt

SEQ ID NO: 37346 - DNA, 110 bp, synthetic construct
  source 1..110: mol_type = other DNA
cgttgtcttagacatccttctgccctcctgttcctgcaaactgctcattaaatctaggagcttgatccgaataggatttgatttggtcacggtgcggaacccctttgtat

SEQ ID NO: 37347 - DNA, 110 bp, synthetic construct
  source 1..110: mol_type = other DNA
tgccacgagtacataggtagttttgcagtgttggagctgtatcttctgaattccccagagtgggattgctggctcaaagagcgagcgagtgcggtaaatgggtacagagt

SEQ ID NO: 37348 - DNA, 110 bp, synthetic construct
  source 1..110: mol_type = other DNA
tttccttctggtccttccgccacccaaccgcacatgttttgaagtgtccctgagcttgcaaggggaccagcgagggggcccttccaccaaagagtcagcagaggagttct

SEQ ID NO: 37349 - DNA, 110 bp, synthetic construct
  source 1..110: mol_type = other DNA
ttgcaaggggaccagcgagggggcccttccaccaaagagtcagcagaggagttcttgctgtagcacaacaagatcagcggtgtctctgcagtgccaggacgcaggttcga

SEQ ID NO: 37350 - DNA, 110 bp, synthetic construct
  source 1..110: mol_type = other DNA
cttccttccacactaaagggatacaaagaagcatgtggcactgtctgctccctcagggagccagtccaccctgggcaacctgcatgccctctgtgagtgtgccagactgt

SEQ ID NO: 37351 - DNA, 110 bp, synthetic construct
  source 1..110: mol_type = other DNA
gggagccagtccaccctgggcaacctgcatgccctctgtgagtgtgccagactgtgcactgttgctggtactgagcaatgtctgcagctgctcgctggggtaatttggtc

SEQ ID NO: 37352 - DNA, 110 bp, synthetic construct
  source 1..110: mol_type = other DNA
ggcatcttggaatgacagatcacatttgcaacaacttgatgacaacagcttgttggccttgaagcatctccccactgtacatgggtcagctgccctcaggcacgtggaga

SEQ ID NO: 37353 - DNA, 110 bp, synthetic construct
  source 1..110: mol_type = other DNA
ttgtcagcaacacctgccaccacagttaccatgaccaccacaaacagtcttcatagaaataaaaagcagatctgccaattaagcccaagggaacattagctgtatgcagt

SEQ ID NO: 37354 - DNA, 110 bp, synthetic construct
  source 1..110: mol_type = other DNA
cagccctcctctacccccacctccgtgtataccccttcctcaaaatcataccctccactccccatagggggaactgctaatttattgagggttaccatttgtgtgtcttt

SEQ ID NO: 37355 - DNA, 110 bp, synthetic construct
  source 1..110: mol_type = other DNA
ttgtgccgcaggtcttgggcccttttgctggatttcatggttctcttcgagtcgtcctccttccggaactgtatccacaccgcgtcgtctttgctgtccttgtcaaaggt

SEQ ID NO: 37356 - DNA, 110 bp, synthetic construct
  source 1..110: mol_type = other DNA
cctccttccggaactgtatccacaccgcgtcgtctttgctgtccttgtcaaaggttttcctgtagagccttaataaaaaggcctctgctccgacagccaggtattctcgc

SEQ ID NO: 37357 - DNA, 110 bp, synthetic construct
  source 1..110: mol_type = other DNA
caggacaggtgggagtgtgcagactacatgaattcaaatcctgtctccatcacgccccagctgtgtgtttctgggagacatccttaacctctctgggcttccgcttgctc

SEQ ID NO: 37358 - DNA, 110 bp, synthetic construct
  source 1..110: mol_type = other DNA
ttttttttttcctgcttgccagttgaacttggaaatgtatttcccccataaactaatttgggaagatatcctgcttcaatgatgttaagtcctactagcataagtgggtc

SEQ ID NO: 37359 - DNA, 110 bp, synthetic construct
  source 1..110: mol_type = other DNA
atttgggaagatatcctgcttcaatgatgttaagtcctactagcataagtgggtcaggatagtctgggtttaatttccaattcatagagtttgaggaaagaatggcttga

SEQ ID NO: 37360 - DNA, 110 bp, synthetic construct
  source 1..110: mol_type = other DNA
atttgttccccaggggatatttgtccaggtgcccaggccaaaaccaggaagtggcttgctcatttccatccacatgtgtgtggactctgggtgcctcctttctgtagaat

SEQ ID NO: 37361 - DNA, 110 bp, synthetic construct
  source 1..110: mol_type = other DNA
gggagcagcagagttcttacacgaggatctgctttggccttgaagagccttgcgtttgcatctcagctctgtcttttatttataagatgagctctcttgggcatgttatt

SEQ ID NO: 37362 - DNA, 110 bp, synthetic construct
  source 1..110: mol_type = other DNA
attttagttgagtttttcttactcacttgtatgcctggtgcctcttcatctcatgctttgccacagatgctccttggaggcacctttctgtggagttcaagctccttggt

SEQ ID NO: 37363 - DNA, 110 bp, synthetic construct
  source 1..110: mol_type = other DNA
ctttgccacagatgctccttggaggcacctttctgtggagttcaagctccttggtttccctgtgacctcagcttttagatgcattgaagagaatttatagttctgaagtt

SEQ ID NO: 37364 - DNA, 110 bp, synthetic construct
  source 1..110: mol_type = other DNA
tactccatgtagaggctgatggcaagtgccaaacttcaattcacagttgaatagttgtgataagagaccacatggccctcaaagtctcaaacatttactctgaacctttg

SEQ ID NO: 37365 - DNA, 110 bp, synthetic construct
  source 1..110: mol_type = other DNA
gacagatttgccccccaggggatggtggcctccccttgttgccatcaaaagctcattaccaagcccagggaatcacatttacattgctaattgaagaagaaagctacagt

SEQ ID NO: 37366 - DNA, 110 bp, synthetic construct
  source 1..110: mol_type = other DNA
ttaccaagcccagggaatcacatttacattgctaattgaagaagaaagctacagtaagcatgagagaattatggtatctaggaaaaactggccccagttcccctgagggt

SEQ ID NO: 37367 - DNA, 110 bp, synthetic construct
  source 1..110: mol_type = other DNA
ttaggggtcttttgtgtttttattaaaatttaaaaaaatttggtctagtcttgtgaaaaacaccttggataatttgatggggattgtattggatctgtagattgccttgg

SEQ ID NO: 37368 - DNA, 110 bp, synthetic construct; identical to SEQ ID NO: 37367
  source 1..110: mol_type = other DNA

SEQ ID NO: 37369 - DNA, 110 bp, synthetic construct; identical to SEQ ID NO: 37367
  source 1..110: mol_type = other DNA

SEQ ID NO: 37370 - DNA, 110 bp, synthetic construct; identical to SEQ ID NO: 37367
  source 1..110: mol_type = other DNA

SEQ ID NO: 37371 - DNA, 110 bp, synthetic construct
  source 1..110: mol_type = other DNA
atgtggctgagcagacgaatgctccaaagcagagaggtctagatgcatttcatcagcatctgtagactgagcaccctcagcaggggccaccccattctgcctctttactt

SEQ ID NO: 37372 - DNA, 110 bp, synthetic construct
  source 1..110: mol_type = other DNA
caggatagttatgaaagttcttcccttgtttctgggccatcactccacccaagagcttcctagggctgctgaaacagatcactgcaaacttggtggcttaaaacaataga

SEQ ID NO: 37373 - DNA, 110 bp, synthetic construct
  source 1..110: mol_type = other DNA
cttcctagggctgctgaaacagatcactgcaaacttggtggcttaaaacaatagaatctattctcttgtggttctggaaccccaaagtctgaaattgaggtgttaacagg

SEQ ID NO: 37374 - DNA, 110 bp, synthetic construct
  source 1..110: mol_type = other DNA
tcttccagtgcagaccaacacctctcagtctttacatctttacagtcctaaaggcagatagggttgtgccggttccagatccccagttctcagggaaggaatctgattgt

SEQ ID NO: 37375 - DNA, 110 bp, synthetic construct
  source 1..110: mol_type = other DNA
ctctgcagtggctttctgttctaaattgtggctacatttccaggatgacttaagccaatgtgataaaaagatccagggtcagcttagggaagtcttgctttctcttttcc

SEQ ID NO: 37376 - DNA, 110 bp, synthetic construct
  source 1..110: mol_type = other DNA
agataaggagaggatttttatcgtggcgcatgcatgggccatcccacaagctcaacttctagtgggaatattgccaaacagaagccaagtcactcagcctccggccagca

SEQ ID NO: 37377 - DNA, 110 bp, synthetic construct
  source 1..110: mol_type = other DNA
ccccctccccagcaacccagcgatacttccctagagctggataattgttagctgttccaaaggctgtggtctgtggaccccaactaggatcatcctttaccccccatgca

SEQ ID NO: 37378 - DNA, 110 bp, synthetic construct
  source 1..110: mol_type = other DNA
tgcagagatatccacaagtgccatgtggatttgactactgcctgtcagacaacgggcaactaaattagacttcctccaggactcctgcccgcaacgggatcttcagattg

SEQ ID NO: 37379 - DNA, 110 bp, synthetic construct
  source 1..110: mol_type = other DNA
gcaactaaattagacttcctccaggactcctgcccgcaacgggatcttcagattgcaactcgtgcaacagatcacgggttgaatctgcaaaatcccgagggccagtttcc

SEQ ID NO: 37380 - DNA, 110 bp, synthetic construct
  source 1..110: mol_type = other DNA
gtatatatagaagggataaataacaaggtcatactgcagagaactagattcagtaccctgtgataaaccgtaatggaaacgaatatgaaaaagaatatatactttactgt

SEQ ID NO: 37381 - DNA, 110 bp, synthetic construct
  source 1..110: mol_type = other DNA
gcagagaactagattcagtaccctgtgataaaccgtaatggaaacgaatatgaaaaagaatatatactttactgtacagcagaaattaacacaacactgtacatcaacta

SEQ ID NO: 37382 - DNA, 110 bp, synthetic construct
  source 1..110: mol_type = other DNA
cttgggtggctaaagaggagtagatctctgcacccatctgccagaatctgaacagtttatttaggcttttgcatccttggaacagcttctagggggaaaaggtaggtgaa

SEQ ID NO: 37383 - DNA, 110 bp, synthetic construct
  source 1..110: mol_type = other DNA
tttatttaggcttttgcatccttggaacagcttctagggggaaaaggtaggtgaaatgtacatttcaagggcagaagagggagtgaggagcttctgattccccagctcta

SEQ ID NO: 37384 - DNA, 110 bp, synthetic construct
  source 1..110: mol_type = other DNA
ctttgaaggaagtttttaaagagtttttccaaaggtgtttgaatgttctggaaccgactgtgtaaggtgcacatgtcaggatccagatttctattattttatagacatac

SEQ ID NO: 37385 - DNA, 110 bp, synthetic construct
  source 1..110: mol_type = other DNA
gactgtgtaaggtgcacatgtcaggatccagatttctattattttatagacatacttcatggaagtcaggaaggaaggccataataaccataagaactagatggtatcat

SEQ ID NO: 37386 - DNA, 110 bp, synthetic construct
  source 1..110: mol_type = other DNA
aagaactgattaagattttgaaagctctgtctaagacagggcaggaattaaccatgagaaacagtcacggctataggagctcacacttgactgcttcctgtgtgccaagt

SEQ ID NO: 37387 - DNA, 110 bp, synthetic construct
  source 1..110: mol_type = other DNA
atagtgtgattacaaaaaaaaaagcctctctttatgctttagctttgaagtaatgcaaatcccttcagatgaaacctttatcaagaatcctgtcattttagggctggtga

SEQ ID NO: 37388 - DNA, 110 bp, synthetic construct
  source 1..110: mol_type = other DNA
tcgggcacacatcacgtgacctcctggtccttccgttttgggtgaggctgcttctctctgatcacatgccagctttccaggttcccgcaacagccgattgctctctcccc

SEQ ID NO: 37389 - DNA, 110 bp, synthetic construct
  source 1..110: mol_type = other DNA
ttcaactgaaccacacaagtcaaactgacagcactgatggcctgcacccagtctacacccagactgggacttgaacctgttacggcagctacccagcagccctgcgctgc

SEQ ID NO: 37390 - DNA, 110 bp, synthetic construct
  source 1..110: mol_type = other DNA
tgacagcactgatggcctgcacccagtctacacccagactgggacttgaacctgttacggcagctacccagcagccctgcgctgcagcgtatcagctctgacgacagccg

SEQ ID NO: 37391 - DNA, 110 bp, synthetic construct
  source 1..110: mol_type = other DNA
tgatttttctaagcctcggttctgcctgtaaatgggaggggtgtgggttcgtgataaaggacggaaagcacttgacactatggtctgctcaacagatagaacccactgtg

SEQ ID NO: 37392 - DNA, 110 bp, synthetic construct
  source 1..110: mol_type = other DNA
aaaggacggaaagcacttgacactatggtctgctcaacagatagaacccactgtgctttattattcccattaaattttagtttttaaaattttactgagatagagtgggt

SEQ ID NO: 37393 - DNA, 110 bp, synthetic construct
  source 1..110: mol_type = other DNA
tcaccttgcctggggcaaagtcttgccactccaggcagtggtgccaccatccttatgaactgcagtccgtttggatgggtcttccaagtgaagctgccggtgtgaatgtg

SEQ ID NO: 37394 - DNA, 110 bp, synthetic construct
  source 1..110: mol_type = other DNA
tgaactgcagtccgtttggatgggtcttccaagtgaagctgccggtgtgaatgtgtggttctgctttcccctctgtaaagtgaaaatgataaataccacagagaccatct

SEQ ID NO: 37395 - DNA, 110 bp, synthetic construct
  source 1..110: mol_type = other DNA
ttttgtctgataaattaagaacaggctgcagacaacaaatcctagtcatgggtttacatggtgtaacagaaattagtcatgggttttatttatttgttaataactggagt

SEQ ID NO: 37396 - DNA, 110 bp, synthetic construct
  source 1..110: mol_type = other DNA
acatggtgtaacagaaattagtcatgggttttatttatttgttaataactggagtgttgtggatgctgaccagagcagatgtagcttgtcaatagttgctttatttctct

SEQ ID NO: 37397 - DNA, 110 bp, synthetic construct
  source 1..110: mol_type = other DNA
agccaggagacagatgcagtccctcagattgcatggagagaaatggagaggagagatctggggcgaagctctgggtgctctttgggaagaggaagacctagcaagcaaga

SEQ ID NO: 37398 - DNA, 110 bp, synthetic construct
  source 1..110: mol_type = other DNA
atctggggcgaagctctgggtgctctttgggaagaggaagacctagcaagcaagaccatacaaggacaggacggaagccagcgagtgtggcatccatcacccaaatgaag

SEQ ID NO: 37399 - DNA, 110 bp, synthetic construct
  source 1..110: mol_type = other DNA
gctcagatgcctggctgggagcctcttcagttactgccccctgttacacaaagtgggggttccggcgttcctggtctaactctcctgatatttcaggaggtccacccatc

SEQ ID NO: 37400 - DNA, 110 bp, synthetic construct
  source 1..110: mol_type = other DNA
ggggttccggcgttcctggtctaactctcctgatatttcaggaggtccacccatcatgtcctaagctggggggcttcacccgaaaggctcttctgaaaaggggctggact

SEQ ID NO: 37401 - DNA, 110 bp, synthetic construct
  source 1..110: mol_type = other DNA
tagctgtggggaccctccctggttcctggggctctggaattcttcaagcagaattatcaccccttccttggaagcaatgggcatcccaccaaagggctcttgctgaattc

SEQ ID NO: 37402 - DNA, 110 bp, synthetic construct
  source 1..110: mol_type = other DNA
atcaccccttccttggaagcaatgggcatcccaccaaagggctcttgctgaattccttggcatgaggcgctgccagggttaaaggcttgagctttgggctcttggctctg

SEQ ID NO: 37403 - DNA, 110 bp, synthetic construct
  source 1..110: mol_type = other DNA
acctgctacacccagaacctcaggctcaccttgcctgtccccagaccagcctcccctctgtccccctgacaattatctgcctagatattcagcctcaaaaagaaagtaag

SEQ ID NO: 37404 - DNA, 110 bp, synthetic construct
  source 1..110: mol_type = other DNA
ctctgtccccctgacaattatctgcctagatattcagcctcaaaaagaaagtaaggaaagaagagaaggaggaatggagggagggaggaaggaaagaaggaaagagagaa

SEQ ID NO: 37405 - DNA, 110 bp, synthetic construct
  source 1..110: mol_type = other DNA
tgaaactgcacaaagcatcttcacttgcttaactcagggaaacaaccacatcctaaacctagaagaaagctctcctcctgacgttcacccagagagtgggctgtgtgggg

SEQ ID NO: 37406 - DNA, 110 bp, synthetic construct
  source 1..110: mol_type = other DNA
aacctagaagaaagctctcctcctgacgttcacccagagagtgggctgtgtggggtcaggacagagggcctgatgttctcgtctgggccacgcaggtaggggagcgacct

SEQ ID NO: 37407 - DNA, 110 bp, synthetic construct
  source 1..110: mol_type = other DNA
cggatgaaaatgagaagccatttctggggggtccagaacagacgtcggccaacgatggcccaggggccaagtccagctgccccctcttcatataaataaagttttattgg

SEQ ID NO: 37408 - DNA, 110 bp, synthetic construct
  source 1..110: mol_type = other DNA
aggcgaacaactggaaatgggctttaaatggatgctacgctcagagtcccggagaaaagcaagtgctctgaacgctcacctccgaggccctgcaggacaactgttgaatg

SEQ ID NO: 37409 - DNA, 110 bp, synthetic construct
  source 1..110: mol_type = other DNA
aaagcaagtgctctgaacgctcacctccgaggccctgcaggacaactgttgaatgcacacggtcagatgacatcaggattaagagtctttttttttttttttttggtctt

SEQ ID NO: 37410 - DNA, 110 bp, synthetic construct
  source 1..110: mol_type = other DNA
caactcagaagtctctaagtgcactctgtgcagcctgtgttctgtgacaaaaatagcgactggcctggacacaaggtccttgtccagctcaacagcttcatcttctgccc

SEQ ID NO: 37411 - DNA, 110 bp, synthetic construct
  source 1..110: mol_type = other DNA
gcgactggcctggacacaaggtccttgtccagctcaacagcttcatcttctgcccacatgccttgactcgtcatgcacattcctgtttcccattgcctgtatgtctatgc

SEQ ID NO: 37412 - DNA, 110 bp, synthetic construct
  source 1..110: mol_type = other DNA
gttgctccctttccatgggggaggagactgaggcccaaagcagctagaacatttacccgtgtcacacagagatgagggcactaggggacgcctggacccacagtcctttt

SEQ ID NO: 37413 - DNA, 110 bp, synthetic construct
  source 1..110: mol_type = other DNA
ggcctaacatcggtttttgtaaatagtttgactggcactcagcctcacctctgcgcctggggctgcttctgcactacaagagcggagctgagtagccgcgacaaggactc

SEQ ID NO: 37414 - DNA, 110 bp, synthetic construct
  source 1..110: mol_type = other DNA
tgcccagtgacagacatctcacaacggtcagcggctggtccgaggtcagcttttcccagatacaaatcgacagcatcaaacactgtacggccttctgacccaacaattcc

SEQ ID NO: 37415 - DNA, 110 bp, synthetic construct
  source 1..110: mol_type = other DNA
ccagatacaaatcgacagcatcaaacactgtacggccttctgacccaacaattccacttctaagatacgacgctcaggagagaagaaagggcagaagtttcaaaacattc

SEQ ID NO: 37416 - DNA, 110 bp, synthetic construct
  source 1..110: mol_type = other DNA
gctttccctcagccctgccctctccttccttctgctccgtccccatttaaattgccaagaggtgttcaccatcttcggtttattttcacaaacagacacagcccacttct

SEQ ID NO: 37417 - DNA, 110 bp, synthetic construct
  source 1..110: mol_type = other DNA
caagaggtgttcaccatcttcggtttattttcacaaacagacacagcccacttctagctggtgagccaagcctagcaatgtgagaggcacctctggtccagatttgcatt

SEQ ID NO: 37418 - DNA, 110 bp, synthetic construct
  source 1..110: mol_type = other DNA
ctgcatgataaaaataaacctataaacgagggcttacaaaaagcattcagctgaataagcatttcggaaactaaaggatcaacgattctgactgaatagatcattcttcc

SEQ ID NO: 37419 - DNA, 110 bp, synthetic construct
  source 1..110: mol_type = other DNA
taagcatttcggaaactaaaggatcaacgattctgactgaatagatcattcttcccctgtccttaggcataagtcagttgacctgagacaaaaaatgacagcaagttatc

SEQ ID NO: 37420 - DNA, 110 bp, synthetic construct
  source 1..110: mol_type = other DNA
gggagaacaacacagaaggttccgtgctgatgacagttctggaagaggaaacgtccctctgtgctgctgaaaatgagggatgcggcccctttttaaaccgtcaccatcct

SEQ ID NO: 37421 - DNA, 110 bp, synthetic construct
  source 1..110: mol_type = other DNA
cctctgtgctgctgaaaatgagggatgcggcccctttttaaaccgtcaccatcctcagctgaaagcagccagggctgggacccaaaaacccctggagtaacaggcatgac

SEQ ID NO: 37422 - DNA, 110 bp, synthetic construct
  source 1..110: mol_type = other DNA
aaactggtccatggtggaaactaagctcttccaggcagtttacaggcagagtataaagaacacaggttggcattcccgtcgtggctcactggttaacaaatccgactagt

SEQ ID NO: 37423 - DNA, 110 bp, synthetic construct
  source 1..110: mol_type = other DNA
gtcactcctataaatcaggatgtaccccctcaagatttagctcccgaaattctaaccactgaagatgatggccttaggacatggggtctttggctggagccctccctagt

SEQ ID NO: 37424 - DNA, 110 bp, synthetic construct
  source 1..110: mol_type = other DNA
aaagttcagcagcgaggagattaatgaaaggctcttgcaaaaattcagagggaaacgatgactgaatgtgggagtgacggacgcgatacagagggatgaacacaagacaa

SEQ ID NO: 37425 - DNA, 110 bp, synthetic construct
  source 1..110: mol_type = other DNA
cgatgactgaatgtgggagtgacggacgcgatacagagggatgaacacaagacaagctgtagggaataagatgttacagctgatgatacgggggaactgattcatccaaa

SEQ ID NO: 37426 - DNA, 110 bp, synthetic construct
  source 1..110: mol_type = other DNA
aatgaggaaactgaggctcaggaagatttcataatggaagggttttttggttttgttttgttggaaatagcagaaacagatctggtgaaggcaagccagaaagggagact

SEQ ID NO: 37427 - DNA, 110 bp, synthetic construct
  source 1..110: mol_type = other DNA
aaaaaatctagaaaaaccggggcactgcataggagctaagtgtatgcagcaaatggatcaaagtttcaggctcactgtggagctgaatgataacaaggtcttgaggttac

SEQ ID NO: 37428 - DNA, 110 bp, synthetic construct
  source 1..110: mol_type = other DNA
gttgctgtaagctgtggtgttaggttgcagatgcaggacgaggctagggtcctatgttgctgtggctatggcatagctctctttggacccctagcctgggaacctccata

SEQ ID NO: 37429 - DNA, 110 bp, synthetic construct
  source 1..110: mol_type = other DNA
cttccactttgaaagaataatgtgctactgatccttggcaatagattatgctgcgtgggggtggttagagttgattgcaactgtgcctggattggtgcacatttattgtg

SEQ ID NO: 37430 - DNA, 110 bp, synthetic construct
  source 1..110: mol_type = other DNA
tcggagaagatcctttcatgctggagtgtcttgggctgatcctttacttttcctgtttctcctttgccaggatcgatgtgtcgcagaatgatcttccttgggaatttatg

SEQ ID NO: 37431 - DNA, 110 bp, synthetic construct
  source 1..110: mol_type = other DNA
tttgtggttaaaaaaaaccaaggcagtgacgtattctagaaatacttggcctgcgctgtagtgtggattgggatcagctgcgtgtgaggttctggcgtttagccccgagg

SEQ ID NO: 37432 - DNA, 110 bp, synthetic construct
  source 1..110: mol_type = other DNA
caaagctggagtcgggagagcttggtatgatcccgatgggggtcttctgggctattacctaaaataacagtacctgcgatcagggcatacggatgagcacaaactaggaa

SEQ ID NO: 37433 - DNA, 110 bp, synthetic construct
  source 1..110: mol_type = other DNA
acgtactcctctgcattatttccaggagcaagcaggacttagttttcatgggaggaggaagagctgggaagactcgcctaggagtatctgactgggactcatccttgagt

SEQ ID NO: 37434 - DNA, 110 bp, synthetic construct
  source 1..110: mol_type = other DNA
ttctggctgcacccatagcatatggaagtttcctgggccaggattgaatccaagccgcagctacagcaaaccggatcctttagcccaactgcaccagtctgggatttgaa

SEQ ID NO: 37435 - DNA, 110 bp, synthetic construct
  source 1..110: mol_type = other DNA
cgcagctacagcaaaccggatcctttagcccaactgcaccagtctgggatttgaacccatgcttctgcagtgacatgagcccctgcagtcggatgcttaacccattgtgc

SEQ ID NO: 37436 - DNA, 110 bp, synthetic construct
  source 1..110: mol_type = other DNA
cagagacccttgctgtgccgaccacccatcatcccagctaccgttgatgggacattcttggtgccaagaggctgagcggatcctgagtggttacacccacttgacagatg

SEQ ID NO: 37437 - DNA, 110 bp, synthetic construct
  source 1..110: mol_type = other DNA
ctcagtttcccaacgtgcttcttagggttgtcctcggattacctggacagcccttgtggattccaaaccagcatctggccagcaagaataaaagtgttcccttccagttg

SEQ ID NO: 37438 - DNA, 110 bp, synthetic construct
  source 1..110: mol_type = other DNA
ctgggctcgtgtgccctagctgcccacggggatgttcggactcaggccaacgccacacacaactggaccctggacctggtgaatcactgtcccctgctggaggtaagccc

SEQ ID NO: 37439 - DNA, 110 bp, synthetic construct
  source 1..110: mol_type = other DNA
tatcatcagaacagcttgggtggcgcttagctggagaagagcaggaaggaagggtattcaggcgggggaccagcgaggtaaagaccaggccccgcccttgggcggtacaa

SEQ ID NO: 37440 - DNA, 110 bp, synthetic construct
  source 1..110: mol_type = other DNA
ggtaaccccatccttccctgtgtgaccccgatctctctccttcggggtcaccattggcagcatttgtaacatgcaactgttttctgtgccaatgctttctaaataaacaa

SEQ ID NO: 37441 - DNA, 110 bp, synthetic construct
  source 1..110: mol_type = other DNA
ggtgtacctgagaatacgtgtctctcctgtgtttttgtttaagaaatactctaaactttccaggaagggacttttgtcgttctgcaggcttgcagatttagagagtaatt

SEQ ID NO: 37442 - DNA, 110 bp, synthetic construct
  source 1..110: mol_type = other DNA
ctttccaggaagggacttttgtcgttctgcaggcttgcagatttagagagtaattaagaaataagactccctgaagaaaacggagaaagcccaaccgcgaacttgaaacc

SEQ ID NO: 37443 - DNA, 110 bp, synthetic construct
  source 1..110: mol_type = other DNA
cggccaagagaagccagggacccaggccctggtggatcccctcgtgcccacccttgtggaacagagatgagctcttcccaccgtgtcttggggcaaattacagatctatg

SEQ ID NO: 37444 - DNA, 110 bp, synthetic construct
  source 1..110: mol_type = other DNA
gtggaacagagatgagctcttcccaccgtgtcttggggcaaattacagatctatgagccaaggagatgactgtagttgtttcaagccactaaattttaaggcggtttgtt

SEQ ID NO: 37445 - DNA, 110 bp, synthetic construct
  source 1..110: mol_type = other DNA
tttcccttttacaaaaacaggtgaaaagcagaaatagtatttggtgttgcagccgtcacagaggcagggcacccgcagtgggcacggccccgccaggctccttcccggga

SEQ ID NO: 37446 - DNA, 110 bp, synthetic construct
  source 1..110: mol_type = other DNA
aacgctcacgcaaaataaaatatcttatgctccttcattaagcagggacaaaccacacgcttaagttggtgtttcttcagggggcgtattttgcctcatcgtgttctcta

SEQ ID NO: 37447 - DNA, 110 bp, synthetic construct
  source 1..110: mol_type = other DNA
atttgaggtttttacatcctcaggcaactggctaataaaatcacagggaaacgcagggtggggagcaaagctccactatgtgagttgggacgccagagacagcgcttctg

SEQ ID NO: 37448 - DNA, 110 bp, synthetic construct
  source 1..110: mol_type = other DNA
gggtggggagcaaagctccactatgtgagttgggacgccagagacagcgcttctgtgagagaccgaaactagcccctaggtcccttactaggaaagcaggaaaagggggt

SEQ ID NO: 37449 - DNA, 110 bp, synthetic construct
  source 1..110: mol_type = other DNA
agaagtaccaccccggggaagcttggtgcccattgtccgacccgggcaagaacgaaatctgcatccgtaaactgaaatctcatccccttactctactgatgcaaaaaccg

SEQ ID NO: 37450 - DNA, 110 bp, synthetic construct
  source 1..110: mol_type = other DNA
tttaggtcccggacagcagggagttccccagccatgtcttcagaagagcttctcgtcctggagagatggagagaatgggcaatgtcaggggaccttcacctgtcgctgag

SEQ ID NO: 37451 - DNA, 110 bp, synthetic construct
  source 1..110: mol_type = other DNA
cattgctgtgtaagagcagttaggtccttgctttatctcagcatcgtcctgtctggggatcatgctccaggtgtcagatggatccccactcctgccccctgtgtttcagc

SEQ ID NO: 37452 - DNA, 110 bp, synthetic construct
  source 1..110: mol_type = other DNA
ggaagacgggaagtagctaggagcggtgagaaagtctaaattttattttatactcttagctatggctcacgttaatacttttaccgtgaacattgagtgcttaaaaaaat

SEQ ID NO: 37453 - DNA, 110 bp, synthetic construct
  source 1..110: mol_type = other DNA
gtgagttcggcctcacagcatgggcacttcccgcaaggctctccttaacaggtgagcaaacagaggcacagagaggtggagtaacttgcccaaggcaacacagctagcaa

SEQ ID NO: 37454 - DNA, 110 bp, synthetic construct
  source 1..110: mol_type = other DNA
gcaaacagaggcacagagaggtggagtaacttgcccaaggcaacacagctagcaatggcagagggtccaatccacatccaagccctctagttacagagggagccctcagg

SEQ ID NO: 37455 - DNA, 110 bp, synthetic construct
  source 1..110: mol_type = other DNA
ccaagaagaaattagtaagtaggagaaatgcaaggagctcagaattactgacactgcagaagcttagctgagcacagcacaccgggcttgtggaggtgtcacagcctacg

SEQ ID NO: 37456 - DNA, 110 bp, synthetic construct
  source 1..110: mol_type = other DNA
gcagaagcttagctgagcacagcacaccgggcttgtggaggtgtcacagcctacgtgaccagatttgtctagacctaagggagccgaacaaagagggacccactgtgccc

SEQ ID NO: 37457 - DNA, 110 bp, synthetic construct
  source 1..110: mol_type = other DNA
aactccctaggtacccttccacctttcattttgcacatgcttcctaccccctgacatcttttcttttcttgtgaagctagagatgctttttttttccccctgtaacagac

SEQ ID NO: 37458 - DNA, 110 bp, synthetic construct
  source 1..110: mol_type = other DNA
cttcattatctctacttgacaggtgaggaaacagaggcacagagagatgaaggattcttctcaaggcactcagctgggaagcggcagagccaaggtacatagaactccac

SEQ ID NO: 37459 - DNA, 110 bp, synthetic construct
  source 1..110: mol_type = other DNA
ccctatagccgtgctgtccggtaaggtagccggtagcctctatcaacatgtagctattgagcattttcagtgtgactagtccagattgagatattgtcttaaaaattttt

SEQ ID NO: 37460 - DNA, 110 bp, synthetic construct
  source 1..110: mol_type = other DNA
acatgtagctattgagcattttcagtgtgactagtccagattgagatattgtcttaaaaatttttaaattacaggagttcccatcatggctcagcggtaatgaacccaac

SEQ ID NO: 37461 - DNA, 110 bp, synthetic construct
  source 1..110: mol_type = other DNA
acccattgagccatgacaggaactctgatgtttccatcataccttttctgtttctccttcagctccaggtagaatatttgaccactgttgtctcaaaccataagaccctg

SEQ ID NO: 37462 - DNA, 110 bp, synthetic construct
  source 1..110: mol_type = other DNA
tatgccatgccagggagggctccctcagcttccagcatcctcacaaatttcccaaattggtctgctttctttttgtaactgagaacaccccagggagaggtgtggacatg

SEQ ID NO: 37463 - DNA, 110 bp, synthetic construct
  source 1..110: mol_type = other DNA
gttccgtcatctgcatctcagcctccagaatggctttttgaggaacagaggcagatgtaaacagaattagaggcacaaatgtaggagtgtgttatatgtatatgtgtatc

SEQ ID NO: 37464 - DNA, 110 bp, synthetic construct
  source 1..110: mol_type = other DNA
agttttcattttctccagtttcaggagattgttcagctccctggagcccatctatctggaccttttgggcatcggaactgccagctcagtctccaagggtgcctctcctt

SEQ ID NO: 37465 - DNA, 110 bp, synthetic construct
  source 1..110: mol_type = other DNA
tgcaatggttgcttgtgaggaatagcaatgattcaggtaaaccattcagcacagtgctaaacatgctgaagtgttcatcttgccctttccagattcatttcttgggcaga

SEQ ID NO: 37466 - DNA, 110 bp, synthetic construct
  source 1..110: mol_type = other DNA
gctaaacatgctgaagtgttcatcttgccctttccagattcatttcttgggcagatgctactcctttccccctgtccggaaaaacactgagttttgtagagcgatctgtt

SEQ ID NO: 37467 - DNA, 110 bp, synthetic construct
  source 1..110: mol_type = other DNA
gaccatgacataaatctgtgtgaggctgtggattcagagagaagtgggtggccttatgtgtgttttggaggtaaaatgaacaaaacatgatgggtgaataggaagtgata

SEQ ID NO: 37468 - DNA, 110 bp, synthetic construct
  source 1..110: mol_type = other DNA
cttctttagctacttgggttgttaatggaatatagggcaagacaatgctatggatttgaaataccctgtccttcttgggaagtctttgaatgcttctaaccaccagccgg

SEQ ID NO: 37469 - DNA, 110 bp, synthetic construct
  source 1..110: mol_type = other DNA
acacaccttatctgtgccattataatatgatcaaggtggagctgacctcctgcaggtttcctaggttaccagcagcaggcaagcatcacatcagtgtcacctcgtctttt

SEQ ID NO: 37470 - DNA, 110 bp, synthetic construct
  source 1..110: mol_type = other DNA
aaatgaaggacacagccataaaccttccaaatagttttgttcccacagggagtcctttagcagctgtctctgacaggatgccgcatttcacatcctctccatgccacttt

SEQ ID NO: 37471 - DNA, 110 bp, synthetic construct
  source 1..110: mol_type = other DNA
gatacaaattaactatacaacatatatgtgcacataactcatatacattgacacggttaacacagctaggcacatgcttgtatcacagtaaaagcacatacatgttgttc

SEQ ID NO: 37472 - DNA, 110 bp, synthetic construct
  source 1..110: mol_type = other DNA
cctccgtcaggatctccttgtctttctaattagatttcactgaactttttcagtgaaaccccttccggagaaattctctaatgaaatgaagaagcaatattctcaaatta

SEQ ID NO: 37473 - DNA, 110 bp, synthetic construct
  source 1..110: mol_type = other DNA
aaccactgagccatgccgggaactcctgatttttcttacatttataatctctattcatcatttaggatacaagcagaaggcttcactcattttcatttccagcttagatt

SEQ ID NO: 37474 - DNA, 110 bp, synthetic construct
  source 1..110: mol_type = other DNA
catcatttaggatacaagcagaaggcttcactcattttcatttccagcttagatttttaagacaattcttaggcgcttttgatggggaggttttgccttaaatagaaaac

SEQ ID NO: 37475 - DNA, 110 bp, synthetic construct
  source 1..110: mol_type = other DNA
ttgggatcagggacttgtgcttagaaaacttcggttcttaactttaaagctttatttgaagaacagttgtttcacaatcatgcacaagaccttggcttagtacacaatca

SEQ ID NO: 37476 - DNA, 110 bp, synthetic construct
  source 1..110: mol_type = other DNA
agtggtattatgagggttaaatgagctaatatgtataaagtttgaggactgtgcctggcatgtagtaagtgccacacatgttttaactaagaaagcatccatgttagtgc

SEQ ID NO: 37477 - DNA, 110 bp, synthetic construct
  source 1..110: mol_type = other DNA
ggctggcagagacacggccagaatgctccatcacggcccctcctgctccttccctcactccgatcctgagctacattaatggggaaaaaattgtcttgttttgtaagaca

SEQ ID NO: 37478 - DNA, 110 bp, synthetic construct
  source 1..110: mol_type = other DNA
atggttcccaaaggggaaagggggaaaggataaatgaggagtttgggattaacagacacacactgctgtatataaaacagataaaaaaggacctactgtatagcacaagg

SEQ ID NO: 37479 - DNA, 110 bp, synthetic construct; identical to SEQ ID NO: 37478
  source 1..110: mol_type = other DNA

SEQ ID NO: 37480 - DNA, 110 bp, synthetic construct
  source 1..110: mol_type = other DNA
ttgtaatgacctgctagtgagcctgcttctccaccatcctctgaccatgagctccttgagcctagggtggtgtggctgggtatacagtagtgctcagtaaacactgctag

SEQ ID NO: 37481 - DNA, 110 bp, synthetic construct
  source 1..110: mol_type = other DNA
ttgagcctagggtggtgtggctgggtatacagtagtgctcagtaaacactgctagaatgaatgcctggacctctttcctaagtcccaagcctaagttgaatccgaatatg

SEQ ID NO: 37482 - DNA, 110 bp, synthetic construct
  source 1..110: mol_type = other DNA
acctgaagtgattctgaaagagttggaaacatccggagaaatcaagtcattgagtaaaactaagcccatcccatgggaccactgaaaggagaataagctagagtgctatg

SEQ ID NO: 37483 - DNA, 110 bp, synthetic construct
  source 1..110: mol_type = other DNA
aaaactaagcccatcccatgggaccactgaaaggagaataagctagagtgctatgaacctacaggcaacaggtttctacaaactgccctacctaacagtgctgttattac

SEQ ID NO: 37484 - DNA, 110 bp, synthetic construct
  source 1..110: mol_type = other DNA
ctcctcttctccctcccacccaactccaaccagtttgacctgccaacatttctacatctctacctgctccccgacgcccccctgcctccagctccagcccagtccgtctc

SEQ ID NO: 37485 - DNA, 110 bp, synthetic construct
  source 1..110: mol_type = other DNA
gtggcctggatttggtttagtgtggcacacgactttagcctgaacggtcgttcaggaaaacagcaagctgtccacatccagcacaagccccctgggtgagccggggtgcc

SEQ ID NO: 37486 - DNA, 110 bp, synthetic construct
  source 1..110: mol_type = other DNA
aataactgtatcacttgtaacacccttatgaaaccatatcagtggccttaagagttgacaccttttggggatcagtgaagttacagagctggggagctgccccactcatg

SEQ ID NO: 37487 - DNA, 110 bp, synthetic construct
  source 1..110: mol_type = other DNA
tgacaccttttggggatcagtgaagttacagagctggggagctgccccactcatggctgcatttacagcttcctccctggctatgttataatcaaagctctagtgataac

SEQ ID NO: 37488 - DNA, 110 bp, synthetic construct
  source 1..110: mol_type = other DNA
catggatcctagtcaggttcattaaccactgacccacgatgggaactcctaaccctgcacttaaaagctctaagagacccctgtggcaaagcagtagcaaaaaaaccttc

SEQ ID NO: 37489 - DNA, 110 bp, synthetic construct
  source 1..110: mol_type = other DNA
tgcacttaaaagctctaagagacccctgtggcaaagcagtagcaaaaaaaccttcccattggccttcttgtctcttcctcttgcccaggtacagtagaacccccaaaata

SEQ ID NO: 37490 - DNA, 110 bp, synthetic construct; identical to SEQ ID NO: 37488
  source 1..110: mol_type = other DNA

SEQ ID NO: 37491 - DNA, 110 bp, synthetic construct; identical to SEQ ID NO: 37489
  source 1..110: mol_type = other DNA

SEQ ID NO: 37492 - DNA, 110 bp, synthetic construct
  source 1..110: mol_type = other DNA
tgaagcctgcgcctacttgagctgcctggaggaaagaggttgggtttgaaagttagactgccctactccctgactgtgtgtctttgggtaaatttctcaccttctctggg

SEQ ID NO: 37493 - DNA, 110 bp, synthetic construct
  source 1..110: mol_type = other DNA
tccccacaaaccctctgcacaatccgaggactcaccacattctgaggctgttggacgagtttcacgagagcaggatggctgtaacctggggagaggaagacacggttaga

SEQ ID NO: 37494 - DNA, 110 bp, synthetic construct
  source 1..110: mol_type = other DNA
tcaagtcgaaactcattatcaaggctcactgggccgtcatggtctggtcctcctgcagcttcccttctcctcacccacccaccccgtgctctgcaaaacgcctcccccat

SEQ ID NO: 37495 - DNA, 110 bp, synthetic construct
  source 1..110: mol_type = other DNA
taaagcagaataatactttgtatcacgagaacatcacataaaattcaaatgtcgttgtgcataaagctgtactggcccccgggcctacccacgcactcatgcaagtctgt

SEQ ID NO: 37496 - DNA, 110 bp, synthetic construct
  source 1..110: mol_type = other DNA
tgtgcataaagctgtactggcccccgggcctacccacgcactcatgcaagtctgtgctgcctttggctaccaccacaggcttgaggagtagttgggacagagaccatatc

SEQ ID NO: 37497 - DNA, 110 bp, synthetic construct
  source 1..110: mol_type = other DNA
aataaatcccagaacttccctatcttggagttggtttcaggtgtttgacccaaacctgcccacgatccctgacctcttacagaaaccagtcctttctaggtcggtgtgtg

SEQ ID NO: 37498 - DNA, 110 bp, synthetic construct
  source 1..110: mol_type = other DNA
ctgcccacgatccctgacctcttacagaaaccagtcctttctaggtcggtgtgtgcactagctgtgtgctccatgcacgtcatgaaacctctctggtctctccattcttt

SEQ ID NO: 37499 - DNA, 110 bp, synthetic construct
  source 1..110: mol_type = other DNA
gctgtgcagtttgtatggtgcaaggggagccacttctaccccagggcctttgcacttgctggaaggcttgtttgcacatctgcgcaccccagctctatttcatttttcag

SEQ ID NO: 37500 - DNA, 110 bp, synthetic construct
  source 1..110: mol_type = other DNA
ttgctggaaggcttgtttgcacatctgcgcaccccagctctatttcatttttcagattcacgtgccctcctccgtgagcctgccctattgaaagcagggcccgcctagcc

SEQ ID NO: 37501 - DNA, 110 bp, synthetic construct
  source 1..110: mol_type = other DNA
ttttttggcagtacctgagccaggaatcaaatcccagagggctcagatcacacagctatgacctatgctatagctgtggcaatgcccaatcctgaacccactgcaccagg

SEQ ID NO: 37502 - DNA, 110 bp, synthetic construct
  source 1..110: mol_type = other DNA
ctatgacctatgctatagctgtggcaatgcccaatcctgaacccactgcaccaggcgagggatggaactggcgcttccacagtgaacagagtccctgcagtcgggttctt

SEQ ID NO: 37503 - DNA, 110 bp, synthetic construct
  source 1..110: mol_type = other DNA
ctaggagatcttgttttctgttggctgcaaactaatctttgtgatctcattgctaggaagtattttcatgcatgaggccgtaatgcaacacagatgtattattgtagtaa

SEQ ID NO: 37504 - DNA, 110 bp, synthetic construct
  source 1..110: mol_type = other DNA
gatcgaacctgtgtcctggtactgaagagacgccaccaccgataccactgtgctgaagcttttatttgtttaacttcctccttcaaactgtttatatgaactttagggga

SEQ ID NO: 37505 - DNA, 110 bp, synthetic construct
  source 1..110: mol_type = other DNA
aagcttttatttgtttaacttcctccttcaaactgtttatatgaactttaggggaagaaggtaatggtacaggcagacctcgctttattgtgatttgcagatattacgga

SEQ ID NO: 37506 - DNA, 110 bp, synthetic construct
  source 1..110: mol_type = other DNA
tgtcattgtggatgttggtgacttcaggtcatgtccttgtattttcagtatcttgcatcgtgttgcctctcctggggagttactgtattggaaacctgatggatctttgg

SEQ ID NO: 37507 - DNA, 110 bp, synthetic construct
  source 1..110: mol_type = other DNA
agcagggaaggaattattcccaactcctccagcaccttgatcttgagagctgaccagtgatacctgagttacagaggttttcatggtcacatagtaacaaatggccaggc

SEQ ID NO: 37508 - DNA, 110 bp, synthetic construct
  source 1..110: mol_type = other DNA
gcaggaactccttggatgaacttattaatttaaaactctaaaggcagctgcacagaatagcgtaagtctttgtgaaatgttagctcctcgcctgctcctttgctaattgt

SEQ ID NO: 37509 - DNA, 110 bp, synthetic construct
  source 1..110: mol_type = other DNA
actgctattttcagtgccaaatgtcatctgctgcatgaaatcctctctgacctatactgaagatctccccttctatggctccctgccccagacttatcacccaaggatgg

SEQ ID NO: 37510 - DNA, 110 bp, synthetic construct
  source 1..110: mol_type = other DNA
actgaagatctccccttctatggctccctgccccagacttatcacccaaggatggaactgcctcttctctttatcatcagcagaagttaaggcatgtctagagcccgctt

SEQ ID NO: 37511 - DNA, 110 bp, synthetic construct
  source 1..110: mol_type = other DNA
gtgattctcctccaaaggaccaaggcccaactttgaatgcccacagtcacagggagctcgcttctctaagaagctcacccgtctgtacacagaggagtctagggcttaac

SEQ ID NO: 37512 - DNA, 110 bp, synthetic construct
  source 1..110: mol_type = other DNA
taagacacggtgaatgaagggtccagcagagtgttccggaaatggcccaactacgtagctgctgcagcagcagccagcccctgtattcacctgtgaattgcaaaacgcac

SEQ ID NO: 37513 - DNA, 110 bp, synthetic construct
  source 1..110: mol_type = other DNA
ctccccttgaaggaagcagatgccctttcaggaggatccggagtctgcacttggttcagctcctccagagttgcaaggactgtggttcccggttcagcggaagggaccag

SEQ ID NO: 37514 - DNA, 110 bp, synthetic construct
  source 1..110: mol_type = other DNA
tcagctcctccagagttgcaaggactgtggttcccggttcagcggaagggaccagccgttatggaattggggtgccgtctacatccagcgccccatttccatgcggttct

SEQ ID NO: 37515 - DNA, 110 bp, synthetic construct
  source 1..110: mol_type = other DNA
tagttctgtaggctgcatccttcagcggatatttttttttatgttatattgttcgatttttcacaacagcttgacaagtttttttattttccccattttgtcccatgacg

SEQ ID NO: 37516 - DNA, 110 bp, synthetic construct
  source 1..110: mol_type = other DNA
agagatgctctggatgtggcagggcgagcaccacgtttgggccacttagagtgtgggtgccttgggttttttccagcatgagggaaataagtaagactttgtggaaacca

SEQ ID NO: 37517 - DNA, 110 bp, synthetic construct
  source 1..110: mol_type = other DNA
tagacgggaaatgcagggcatctgggtcacagcctcaccaacacgcagctatgagtcctgagactaaggacttaggctttcagagcttcacttagccatctgtacaatgg

SEQ ID NO: 37518 - DNA, 110 bp, synthetic construct
  source 1..110: mol_type = other DNA
caggatgctggccccagagagcagaggtgcatgtcaaaggaaggatttcagtgagcccaggctcttgcatcgttccctgaactgaaaagcactcaattccttaactcaag

SEQ ID NO: 37519 - DNA, 110 bp, synthetic construct
  source 1..110: mol_type = other DNA
cccaggctcttgcatcgttccctgaactgaaaagcactcaattccttaactcaagctatctgatgttctttaattagcactcgtcttttgataccccaactacctgaact

SEQ ID NO: 37520 - DNA, 110 bp, synthetic construct
  source 1..110: mol_type = other DNA
atgataaatattcaccaaccccatttcagcaaaaccatgtcgaaagattctgcagtcatcttctagctaaaaatacctgattcttccaggctaagcacgttagcgagacg

SEQ ID NO: 37521 - DNA, 110 bp, synthetic construct
  source 1..110: mol_type = other DNA
tcatcttctagctaaaaatacctgattcttccaggctaagcacgttagcgagacgctcctgatcatcttaaagaatctgtaatagagttttaagtccaaccaaggaagcc

SEQ ID NO: 37522 - DNA, 110 bp, synthetic construct
  source 1..110: mol_type = other DNA
catcgctggaatctctgcccttcagtcctatgtcccccttctctatgtgtgtcgcatgggccttcttataaggatgccaggcattggacttagggcccatactctaatcc

SEQ ID NO: 37523 - DNA, 110 bp, synthetic construct
  source 1..110: mol_type = other DNA
ctgccttacaggagtctgtttactctactactggtgggggccaggactcagcctttgacctttctgggagcttgggaagaaacgtggacctaactctccatcagagtcta

SEQ ID NO: 37524 - DNA, 110 bp, synthetic construct
  source 1..110: mol_type = other DNA
tgacctttctgggagcttgggaagaaacgtggacctaactctccatcagagtctataatttgacagcccaacagcctccacaatcttcaaggatgcaaaggtggaaaccc

SEQ ID NO: 37525 - DNA, 110 bp, synthetic construct
  source 1..110: mol_type = other DNA
ttttttctgcgcaggacctcttcaatgaaactatttgagatctttactgaagaagctgttagctcctctgagtggggaacgaaggggatattttaaaggctgtgtccagg

SEQ ID NO: 37526 - DNA, 110 bp, synthetic construct
  source 1..110: mol_type = other DNA
ataaagtcacaaatgagacagcccttgcatgaagagtgtctttaaaacagttattgaatctagctaaaatgtatcttcaggaaaaaaaaaaaaactgagcagcatgggga

SEQ ID NO: 37527 - DNA, 110 bp, synthetic construct
  source 1..110: mol_type = other DNA
aagctccaaataaccataatgcataaccctcatttatgatggaacaatggaaaaagaatctctagcttgcaggttgcccttcatctattcagtgcccacagcagacatta

SEQ ID NO: 37528 - DNA, 110 bp, synthetic construct
  source 1..110: mol_type = other DNA
gaatctctagcttgcaggttgcccttcatctattcagtgcccacagcagacattaccaatcaatcatgatccacctccttcctgagtcagacagagttcttctccaaagt

SEQ ID NO: 37529 - DNA, 110 bp, synthetic construct
  source 1..110: mol_type = other DNA
aaaagtcttaatgaagtatagttaatgtgcagggttgtaatcttttctgctgtacaatacagtgattcagatacacacacgcacacacatctattctctttcagattctt

SEQ ID NO: 37530 - DNA, 110 bp, synthetic construct; identical to SEQ ID NO: 37529
  source 1..110: mol_type = other DNA

SEQ ID NO: 37531 - DNA, 110 bp, synthetic construct
  source 1..110: mol_type = other DNA
tagtttctgtgcctgctcgaacatctcttccctgcaggcaagcctgatgccccggggttttcagacacagtcaatctctcccttttaccttcacccctcccgttgtaact

SEQ ID NO: 37532 - DNA, 110 bp, synthetic construct
  source 1..110: mol_type = other DNA
tttcaaacaaatgatactttaggttcaaagtgaatgtaccatgagttggcaatttgtaatatgttttcccttaaaaggaaatcaaaataaaattcctttagaccttccgc

SEQ ID NO: 37533 - DNA, 110 bp, synthetic construct
  source 1..110: mol_type = other DNA
gtaatatgttttcccttaaaaggaaatcaaaataaaattcctttagaccttccgctatcagctgcgtacttgaaacagagaaggtaggacaggaagactgacaaacaaaa

SEQ ID NO: 37534 - DNA, 110 bp, synthetic construct; identical to SEQ ID NO: 37532
  source 1..110: mol_type = other DNA

SEQ ID NO: 37535 - DNA, 110 bp, synthetic construct; identical to SEQ ID NO: 37533
  source 1..110: mol_type = other DNA

SEQ ID NO: 37536 - DNA, 110 bp, synthetic construct
  source 1..110: mol_type = other DNA
gaccctaaatgacaggtgccaccacttcaagcagctcttctggaccagtcacccacaccagctgatcacactgcttttctttcgggacattctcttttcattgctgatcg

SEQ ID NO: 37537 - DNA, 110 bp, synthetic construct
  source 1..110: mol_type = other DNA
caccagctgatcacactgcttttctttcgggacattctcttttcattgctgatcgccagctaatatcattgccttgacttgtctggaacctccctggccctgctttccca

SEQ ID NO: 37538 - DNA, 110 bp, synthetic construct
  source 1..110: mol_type = other DNA
aatacctttcttcgtatcagtagtatttgcgatatagttccaataggaccttgatatatgtgcctttttctcatctgccatttcttaacttagcaatgaatctctttgac

SEQ ID NO: 37539 - DNA, 110 bp, synthetic construct
  source 1..110: mol_type = other DNA
gtgaaatcaggtgcataaagctctcatccctccaccatccagtttttaagttctattttgcggtcgggccagcacctgggcctttaagctctttggaatatagacacaga

SEQ ID NO: 37540 - DNA, 110 bp, synthetic construct
  source 1..110: mol_type = other DNA
tctgccattaagtcacccagtctacagcagtatttgtcatggacactctagactactaattccatctgcagtaggtgaaggccatcaccaatgggcactttgttttcttt

SEQ ID NO: 37541 - DNA, 110 bp, synthetic construct
  source 1..110: mol_type = other DNA
ctcccaccaggtgaggtgggcagtcttgggtgagctctacggaagctcgaagtagaagattatgcagttcagtccaaagcaggacccagccccacacatgctagaatgac

SEQ ID NO: 37542 - DNA, 110 bp, synthetic construct
  source 1..110: mol_type = other DNA
aacgacagacacataaacacaggcaactaagcacctctgctccacttgcccatctaacttcagtttccgcaaatcaaatattatttgaaaaacatgtctaaaaggaaaga

SEQ ID NO: 37543 - DNA, 110 bp, synthetic construct
  source 1..110: mol_type = other DNA
atcagctctgtggtgaggacccccttctgtctaccaacaagtcatcaagaagggactggaacccagctctgtcagattcccaagcttagggtatttgtgtttgttcattt

SEQ ID NO: 37544 - DNA, 110 bp, synthetic construct
  source 1..110: mol_type = other DNA
caccgtcccacatttgcttttaaaaactgtcacagctgagcagaatctttggagtgggtctctggacagaagtccaccatcttcccagatggccagcatctctgatcaaa

SEQ ID NO: 37545 - DNA, 110 bp, synthetic construct
  source 1..110: mol_type = other DNA
gggtctctggacagaagtccaccatcttcccagatggccagcatctctgatcaaagcaccttccccttctactggccttgcctcctgaattaatgacttatgagcagtga

SEQ ID NO: 37546 - DNA, 110 bp, synthetic construct
  source 1..110: mol_type = other DNA
aaatcagagctgcagccgcgggcctacaccacagccatggcaatgccagattcaacttgcatgtgcaacctacaccacagcttgtggcaaggctggatctttaacctact

SEQ ID NO: 37547 - DNA, 110 bp, synthetic construct; identical to SEQ ID NO: 37546
  source 1..110: mol_type = other DNA

SEQ ID NO: 37548 - DNA, 110 bp, synthetic construct
  source 1..110: mol_type = other DNA
tggtatccctatcttcatcccaaatgttcactaagaacttgatgtgtgaaaaggtaaaactctaggcataaatactctaaaaatggcttttaatatttttgtagcagggg

SEQ ID NO: 37549 - DNA, 110 bp, synthetic construct
  source 1..110: mol_type = other DNA
aaaactctaggcataaatactctaaaaatggcttttaatatttttgtagcaggggcacttttatcccccaagggggatcttacactcaactttaaaataatcagcaggcc

SEQ ID NO: 37550 - DNA, 110 bp, synthetic construct
  source 1..110: mol_type = other DNA
caagttacatgagacgagaggatgagcatccttagagtttatgggcactggatgagagaagaaaggtcttacatcttgtcaaggtagctctggggctgggtgcatccttc

SEQ ID NO: 37551 - DNA, 110 bp, synthetic construct
  source 1..110: mol_type = other DNA
agttgaataagtctattgaagaaggcaaatccaaggattgcgagtctgcaattaccagaataagtgacacagagtgaactgtgctatgtctcttcgtggtagatagagga

SEQ ID NO: 37552 - DNA, 110 bp, synthetic construct
  source 1..110: mol_type = other DNA
cagaataagtgacacagagtgaactgtgctatgtctcttcgtggtagatagaggaagcttcatgttctgcctaagaggtgaaggcaggtttcagagaattcactaggcag

SEQ ID NO: 37553 - DNA, 110 bp, synthetic construct
  source 1..110: mol_type = other DNA
gagggaggatggatgcttccttagaggctctgcaggctgcatggctctgccaacggtttggttccagacttacagcctccagaaatgggaagcaataaggttctgttgtt

SEQ ID NO: 37554 - DNA, 110 bp, synthetic construct
  source 1..110: mol_type = other DNA
ggaaacagagctgacagaggccagaggaaggcttccgttggacgttaaatttacgttgtagggaattactctgaggctgaagtgcaacccatgaccccactaccaccagc

SEQ ID NO: 37555 - DNA, 110 bp, synthetic construct
  source 1..110: mol_type = other DNA
cataatttacctgtcgtatcaagacagaaggaaatgaaatgggggtagggcaaggctggatggtgtggagtgattcttgtgtgtgggttccctttgggtcagagccagtc

SEQ ID NO: 37556 - DNA, 110 bp, synthetic construct
  source 1..110: mol_type = other DNA
ctggatggtgtggagtgattcttgtgtgtgggttccctttgggtcagagccagtcccctacacggagctcagaattcctccatccaatcatccatcacattctcatttga

SEQ ID NO: 37557 - DNA, 110 bp, synthetic construct
  source 1..110: mol_type = other DNA
atgggagattggggtctgtgcttccagcaccagagctgcccccatggatggactgtgacgagagatggagcagaacctactgcctcttcgcttccttcactcattcctgc

SEQ ID NO: 37558 - DNA, 110 bp, synthetic construct
  source 1..110: mol_type = other DNA
ctttttccaaatcgaggaaagaagcctcacgtgcgtaggtgaaagattcctaggatgttttgttcataggatgagatgctcacggcctggaagggacaggattgccatgt

SEQ ID NO: 37559 - DNA, 110 bp, synthetic construct
  source 1..110: mol_type = other DNA
tgttttgttcataggatgagatgctcacggcctggaagggacaggattgccatgtctgcgagagataagctaagtaagacagaaaccctgcagatggatgggaaaaagct

SEQ ID NO: 37560 - DNA, 110 bp, synthetic construct
  source 1..110: mol_type = other DNA
ctctcagccactcctcgaaacaccctcaagagggagctgttgttattagccccatttacagatggaaaaagtgaggcccaagggattaattcgttcaagttcagaaggtg

SEQ ID NO: 37561 - DNA, 110 bp, synthetic construct
  source 1..110: mol_type = other DNA
ataggcacctagctcacaactgctggattctgaataccaggctttttctgctttacttgctctggccgaatcagtcaatgtgcaattccaataacattgagatggcagga

SEQ ID NO: 37562 - DNA, 110 bp, synthetic construct
  source 1..110: mol_type = other DNA
gccagcacactcctgcccaagggccaagtccagcccaccacatgtttttgtaaataaagttttatttaaacaccagcatgcccttttgtgtacatctcatctatggctat

SEQ ID NO: 37563 - DNA, 110 bp, synthetic construct
  source 1..110: mol_type = other DNA
aaagttttatttaaacaccagcatgcccttttgtgtacatctcatctatggctattttctcactccagggcagagatgagttgctgtgatcgagaccgtatggcctggtt

SEQ ID NO: 37564 - DNA, 110 bp, synthetic construct
  source 1..110: mol_type = other DNA
aatgtgcccctggcatcgtgctgagggatttgaggccgttcgctcacccaaagctctgatcagatgagatgggacctctgttcactcccatttcaaagatggggagacag

SEQ ID NO: 37565 - DNA, 110 bp, synthetic construct
  source 1..110: mol_type = other DNA
ctgatcagatgagatgggacctctgttcactcccatttcaaagatggggagacagaggccctgagggatgaagggatggaaggagccactgagcgtgtaagagacagagc

SEQ ID NO: 37566 - DNA, 110 bp, synthetic construct
  source 1..110: mol_type = other DNA
catgctggcaccttcatgggtcacaggcaaatgtgggggagccctgtgggtgcaggcctcctgtaattaccagggacatcacagttgcagaaacaaatagaagcaaatgt

SEQ ID NO: 37567 - DNA, 110 bp, synthetic construct
  source 1..110: mol_type = other DNA
gcctcctgtaattaccagggacatcacagttgcagaaacaaatagaagcaaatgtataacagcttcatgcagggatattcatgtctcggtctcatgacagccctgggtgg

SEQ ID NO: 37568 - DNA, 110 bp, synthetic construct
  source 1..110: mol_type = other DNA
acaacttttcctcagcaacagcaagttctcaacatacatcattgcctccctgttccttttgccctacatctggatcctgaaagtcctaggatgatttcagggatcaggtg

SEQ ID NO: 37569 - DNA, 110 bp, synthetic construct
  source 1..110: mol_type = other DNA
agataatcaaacaaagacgtatgtttgatgcaattacacatggtaataaataccacacaggaaaacacagggtgaaatgggactggataacaggagtagctgatgagggt

SEQ ID NO: 37570 - DNA, 110 bp, synthetic construct
  source 1..110: mol_type = other DNA
cacaggaaaacacagggtgaaatgggactggataacaggagtagctgatgagggttgggagggagaggtcctgagagaccccttcgaaggagtgacaattaagctgatgg

SEQ ID NO: 37571 - DNA, 110 bp, synthetic construct
  source 1..110: mol_type = other DNA
tgggcagtgtcaccgccatctgctccagggtgaacccccaaagcgagtgagcatctctcatttcctaagcgcctctcatcacatgaccatttgacagcaatgacccctga

SEQ ID NO: 37572 - DNA, 110 bp, synthetic construct
  source 1..110: mol_type = other DNA
tctcatttcctaagcgcctctcatcacatgaccatttgacagcaatgacccctgatgtttaaagacaggtatgtgccatgtatcagggtatgatgccacagccactgcgt

SEQ ID NO: 37573 - DNA, 110 bp, synthetic construct
  source 1..110: mol_type = other DNA
aaagccatgctagggggccgagcttcctgctaacaggggtacaaagagggtgaatcaccactcaagagcctggagttgtgcaaaagatgatgagtggcaggaaagagatt

SEQ ID NO: 37574 - DNA, 110 bp, synthetic construct
  source 1..110: mol_type = other DNA
tggagtgaatgctgctgagcagcttctcccatggcctcccaacacacctgtggcgtttctctcctgtttgcaaagtaaacaagaaggcttgtcccacctgcccgtgttga

SEQ ID NO: 37575 - DNA, 110 bp, synthetic construct
  source 1..110: mol_type = other DNA
ctcggactgagccattctggttgcttttccagagatgtttcatgaggatgaagtaagatggcatcttgaactaggcattcttgtgcctgtttcatgtctcctctgctcag

SEQ ID NO: 37576 - DNA, 110 bp, synthetic construct
  source 1..110: mol_type = other DNA
cttccataggccatgggtgtggccctaaaaaataaataaataaataaaaatttaaaataaactagaatgagcagagagtgccaaacgggcagaaaacgttcttgtatttc

SEQ ID NO: 37577 - DNA, 110 bp, synthetic construct
  source 1..110: mol_type = other DNA
aataaactagaatgagcagagagtgccaaacgggcagaaaacgttcttgtatttcccctcccccgattcactgccagacatcaccatcaaggctgcctggctttcgatta

SEQ ID NO: 37578 - DNA, 110 bp, synthetic construct
  source 1..110: mol_type = other DNA
gtaaactctgagaagcaagtcatttgggaactgttagcaccaggaagcaggaatgagagagccctttctggagaaagtgaacgccacttctcagaggcattaacttcata

SEQ ID NO: 37579 - DNA, 110 bp, synthetic construct
  source 1..110: mol_type = other DNA
tccccatctcgtcaatagttaggattaaatgagatggtctgtggaaagctctctgcaaggacaggcacagagcacgcgctccatcaaagccagctgttactgctaattgc

SEQ ID NO: 37580 - DNA, 110 bp, synthetic construct
  source 1..110: mol_type = other DNA
ctccatatgctgtgggagcagccctagaaaagacagaaacaaaaatcaaaacgtacaagcagcagcaacaaaaagccactgcagccattcagtgtttaacccaaaggcca

SEQ ID NO: 37581 - DNA, 110 bp, synthetic construct
  source 1..110: mol_type = other DNA
ggagtgactcaatgaaaggaaattatgggcaaacaaccagccaggctatacccgtaaaggtcacagctttagggcttgttctcccccaggcccactggacaccaaactca

SEQ ID NO: 37582 - DNA, 110 bp, synthetic construct
  source 1..110: mol_type = other DNA
acctcccactgcatgaactgagggctgtgagaagtcaaaacccgtccctaccctgatggtctcagtctgtaaatcagtacagatcagggtcagaaacgctggacacgggt

SEQ ID NO: 37583 - DNA, 110 bp, synthetic construct
  source 1..110: mol_type = other DNA
agaaaactgtaactacatgaccaccacgagcaagaagacccttagcaccgaaaactgccttgagcaccacctggaaaaatcttggcgtctccacgggctctgttgcaccc

SEQ ID NO: 37584 - DNA, 110 bp, synthetic construct
  source 1..110: mol_type = other DNA
ccgctgcttccgacccaggaattcctcctgcagagcagggtttctcagtcccatgcgctcagctcccccttcttgggagaaacagtctgcagtgccgcctcactgcctgc

SEQ ID NO: 37585 - DNA, 110 bp, synthetic construct
  source 1..110: mol_type = other DNA
ttcaagcgggcttgattttaaaattccatttctagatcatgtctcctgcagtacctgtcctgcctctggtgacacagaacagctggagtgtcaccccttttgtaggggga

SEQ ID NO: 37586 - DNA, 110 bp, synthetic construct
  source 1..110: mol_type = other DNA
gatttttacgagccttccagtaaagctgaggtagaataaaggtctttgatagtcatgtatcattatctgtaattttgtttttctcaagatgatggaggaggatttacaag

SEQ ID NO: 37587 - DNA, 110 bp, synthetic construct
  source 1..110: mol_type = other DNA
atgaaggaaatggagcacgtccccaggtcaggaagttggggggctagatccacaccaggctggtaagggcggccgtgggcccagcaggcccagttgagtcaggaggccca

SEQ ID NO: 37588 - DNA, 110 bp, synthetic construct
  source 1..110: mol_type = other DNA
ggcaggccccgcagccccacagcgcagggcagaggggggccggctgcccccccccacacacagcctagaggacaggatgaggccctggggggacaaaggacaggtcggac

SEQ ID NO: 37589 - DNA, 110 bp, synthetic construct
  source 1..110: mol_type = other DNA
accccttccacagaggggcttgctccttccctccctcagatctctgctcacaaaagcgcccaagccctgaggccgccctcgctccgtcttcagacgcctccccagcccct

SEQ ID NO: 37590 - DNA, 110 bp, synthetic construct
  source 1..110: mol_type = other DNA
tcgggttccagattctccccgtccactttctctccttctttcctgaaactttacgtccctccggcgtcaccctaacgccgcacctggtctggtcagccaacactgagctc

SEQ ID NO: 37591 - DNA, 110 bp, synthetic construct
  source 1..110: mol_type = other DNA
ccttaaaactgatttctgaggctactgttaggaaatgaacgctggctaaattaatccagctcaggggcaaaggatcttacaaaattaaaagagtgctaaatgcatggaag

SEQ ID NO: 37592 - DNA, 110 bp, synthetic construct
  source 1..110: mol_type = other DNA
acccgccaggaagtatcgagttcagggaccggtggacgctgagaaaaacctcgggaacaaagtagacagcagcccctgcgttccccccagtccggtggccaccgccgaac

SEQ ID NO: 37593 - DNA, 110 bp, synthetic construct
  source 1..110: mol_type = other DNA
cttcctcactccccccccccttttaccctggcagcatccttggggggaggactcccttctttctctccctcttcctttttgtttgttcctgtgaaatgttaaatctctgt

SEQ ID NO: 37594 - DNA, 110 bp, synthetic construct
  source 1..110: mol_type = other DNA
aggggtcaaactggagctgtggccgccagcccacaccacggccacagcaacgccagattcttaaccgactaagagaggccagggatcgaagctgcatcctcacagatgct

SEQ ID NO: 37595 - DNA, 110 bp, synthetic construct; identical to SEQ ID NO: 37594
  source 1..110: mol_type = other DNA

SEQ ID NO: 37596 - DNA, 110 bp, synthetic construct
  source 1..110: mol_type = other DNA
tctaggaaacaccccagaggaacaggggatgggggtctgccattataaacatgcccttgaccagcaggtaaaaaccagccccatcattctgaaacccaacagaaactcac

SEQ ID NO: 37597 - DNA, 110 bp, synthetic construct
  source 1..110: mol_type = other DNA
cttgaccagcaggtaaaaaccagccccatcattctgaaacccaacagaaactcactaagatcggcatgcctgggccaccacagtgagtctctgtacgtcattggccgctg

SEQ ID NO: 37598 - DNA, 110 bp, synthetic construct
  source 1..110: mol_type = other DNA
gcttgagagggcctgccaatggtcagctcaagagccaaactccgccggtccccaagcctccggaacccagtaacaaggggaaggtcccacgagcctccagaggaaggaac

SEQ ID NO: 37599 - DNA, 110 bp, synthetic construct
  source 1..110: mol_type = other DNA
ggggctgatccgggctgcacacagagaagcatacctgtgttgtggcgccctccacaggccaactctgagagctgccgtactccctctgggccccagaggggtgcctcccc

SEQ ID NO: 37600 - DNA, 110 bp, synthetic construct
  source 1..110: mol_type = other DNA
gatcgaacccgccttctcgtggttcctcgtcagctttgtttctgcagagccacaatgggaacttcagatcatttttcttaaagggggatttttctgggtgtcctggcagg

SEQ ID NO: 37601 - DNA, 110 bp, synthetic construct
  source 1..110: mol_type = other DNA
gctgtgtccccagggatttcggttcagtggggtagttcacgtcaccaaaaatctgacagaggttgtcgaggaagcagaaaacgtgtttctttacagatcattttcttcaa

SEQ ID NO: 37602 - DNA, 110 bp, synthetic construct
  source 1..110: mol_type = other DNA
taggacctgcagcccacacccacgactgtgcctgagtgagaccctgcctgtcatagcgcacagcagacaggatcacgaccccacagcagcaacctctgaaacttgggtcc

SEQ ID NO: 37603 - DNA, 110 bp, synthetic construct
  source 1..110: mol_type = other DNA
cctgcagaggtggtcacaccctctcctgcagcctcagggtctttgcctgagaggtgagacaacgcccccacccggttccctctgcggtcagggtccccacacctggcggg

SEQ ID NO: 37604 - DNA, 110 bp, synthetic construct
  source 1..110: mol_type = other DNA
agggtctttgcctgagaggtgagacaacgcccccacccggttccctctgcggtcagggtccccacacctggcggggtggggacagtcccccaggcctggcaggccggtgt

SEQ ID NO: 37605 - DNA, 110 bp, synthetic construct
  source 1..110: mol_type = other DNA
gaggtggggttggctattgcagatttcttggaatcctccgtcctcgcagctgtctgcctgtctggtcgcagtgatcctccggcaggacaagcggtaggccccgttctgca

SEQ ID NO: 37606 - DNA, 110 bp, synthetic construct
  source 1..110: mol_type = other DNA
gcctgtctggtcgcagtgatcctccggcaggacaagcggtaggccccgttctgcacctttctgtctctgcgcgtggaagagcgttaggccttaaagaatggagccttagg

SEQ ID NO: 37607 - DNA, 110 bp, synthetic construct
  source 1..110: mol_type = other DNA
gcagccccgggcagtggggtgggtcaaagactgcaagacagagctgctccagccagtctggacaggcgcccacatggcgatttgggcacctccacctgccaccaaaggtg

SEQ ID NO: 37608 - DNA, 110 bp, synthetic construct
  source 1..110: mol_type = other DNA
gtctggacaggcgcccacatggcgatttgggcacctccacctgccaccaaaggtgcaggcctcaccccgtgggtccatcacagcagagtcaagggggctgcacccacggc

SEQ ID NO: 37609 - DNA, 110 bp, synthetic construct
  source 1..110: mol_type = other DNA
ggggggctccagggtgtgacctttgagcccccagactccaaaagcaggggacagtacataggtcaccctggagcatggaagcctctagaccttcattctccaattgtgtg

SEQ ID NO: 37610 - DNA, 110 bp, synthetic construct
  source 1..110: mol_type = other DNA
acataggtcaccctggagcatggaagcctctagaccttcattctccaattgtgtgacagctcggggctttggatgcgagactctggggggccgaagaggtgggtctctgc

SEQ ID NO: 37611 - DNA, 110 bp, synthetic construct
  source 1..110: mol_type = other DNA
gctacagtaaccaaaacagcatggtaatggcaaaaaatagacatatagatcaacggaaaaaacagaatccagaagtaaacccacataccaatcttcaaggaaggaggcaa

SEQ ID NO: 37612 - DNA, 110 bp, synthetic construct; identical to SEQ ID NO: 37611
  source 1..110: mol_type = other DNA

SEQ ID NO: 37613 - DNA, 110 bp, synthetic construct
  source 1..110: mol_type = other DNA
cggtcttggctccgccatttcccatgacctcaggcaagcaattcgtgctgccttggccgtgatttctgcatctgtacaatgggtacagtcctcagagcatcatgctctgt

SEQ ID NO: 37614 - DNA, 110 bp, synthetic construct
  source 1..110: mol_type = other DNA
ttcgaagctaatcacgccaagcccactgggatccaagcagctcgttagctccgtcacctgcaattgccaagtgagagtgttatccgagccgccactcagggctggggtgg

SEQ ID NO: 37615 - DNA, 110 bp, synthetic construct
  source 1..110: mol_type = other DNA
acctgcaattgccaagtgagagtgttatccgagccgccactcagggctggggtggggtccctgcacacacggtctcatcacattccgagaagcagccgacttaaagaggc

SEQ ID NO: 37616 - DNA, 110 bp, synthetic construct
  source 1..110: mol_type = other DNA
tgtgccttttctgagatagactcaacatgctgagctctctagctggctgagggtggattgctggggcctgtgaaaacaaggcgtgttcctgccaaattggatttgtccat

SEQ ID NO: 37617 - DNA, 110 bp, synthetic construct
  source 1..110: mol_type = other DNA
gattgctggggcctgtgaaaacaaggcgtgttcctgccaaattggatttgtccatgaaggagaccatgtttggagtgggtttcaatctcaggacacccgcagccattgat

SEQ ID NO: 37618 - DNA, 110 bp, synthetic construct
  source 1..110: mol_type = other DNA
tctactcttgtgaagtcactaagcacagcccactctcaccgtatgaggagttatggtacagcaccttgagagggaagatctgtataagttatctggagggttttatttgg

SEQ ID NO: 37619 - DNA, 110 bp, synthetic construct
  source 1..110: mol_type = other DNA
attttcttagggtgaatcctgtagcaccttcctctcacactaattattactgtgtaacttgcaaacatattagctacaagcaactaaacagcgtttgaactactatgccc

SEQ ID NO: 37620 - DNA, 110 bp, synthetic construct
  source 1..110: mol_type = other DNA
ctccactagatccttgtaacttggaggtagacatatgtacaaatgggtgtggtcgtgttgcaatagaactgttacaaaatcaggcagtggatcagacttagtcctgaggc

SEQ ID NO: 37621 - DNA, 110 bp, synthetic construct
  source 1..110: mol_type = other DNA
tcacaaagactctgggaacccctggtgtctcttcttgtaaaggtataataccatgatgagggtcacagttacgatctcatctaaacttaattatcttccaaaggccccat

SEQ ID NO: 37622 - DNA, 110 bp, synthetic construct
  source 1..110: mol_type = other DNA
ttcaagggtcatacatgttgtcaaatctatgtattagaattccattccttttatgtttatataatattccattgtgcgtgtgtgtttgtacaccacattttgtttctgtt

SEQ ID NO: 37623 - DNA, 110 bp, synthetic construct
  source 1..110: mol_type = other DNA
tttacctgataattttgtagctttattcttttgaagtaagatttctggagttgccgtcatggtgcagcggaaacgaacctgagtaggaaccatgaggttgcgggttcaat

SEQ ID NO: 37624 - DNA, 110 bp, synthetic construct; identical to SEQ ID NO: 37623
  source 1..110: mol_type = other DNA

SEQ ID NO: 37625 - DNA, 110 bp, synthetic construct
  source 1..110: mol_type = other DNA
cggtgctccagatcctgagcagctcaccagggtgtgagagggtgaggagggggggataatccctttcttaccccttctccagtttctttctcccactgtcactccctcct

SEQ ID NO: 37626 - DNA, 110 bp, synthetic construct
  source 1..110: mol_type = other DNA
ataatccctttcttaccccttctccagtttctttctcccactgtcactccctcctagctaaggccctgccctgggcactaccaaggctgtgactgagggattgtcttttg

SEQ ID NO: 37627 - DNA, 110 bp, synthetic construct; identical to SEQ ID NO: 37625
  source 1..110: mol_type = other DNA

SEQ ID NO: 37628 - DNA, 110 bp, synthetic construct; identical to SEQ ID NO: 37626
  source 1..110: mol_type = other DNA

SEQ ID NO: 37629 - DNA, 110 bp, synthetic construct
  source 1..110: mol_type = other DNA
gttggggtaggcacagtcttggttggaggactgtgcccgaggcagcaagaacactgagaccccagtcttggcttgagtgaaatgtcacctcattgcacaggtgctgctga

SEQ ID NO: 37630 - DNA, 110 bp, synthetic construct
  source 1..110: mol_type = other DNA
acacagcatatttatctctgctgagagcctttcctccatacactgtggggcctagttaccaagtctgcagggataagcagacagcccagtgggcacacaggttggctgag

SEQ ID NO: 37631 - DNA, 110 bp, synthetic construct
  source 1..110: mol_type = other DNA
ataagagcttaacaaaagtgacaacttgcttttggaaactatagcaacacagtgatcacttggatcacttagaatcatattaccatgcgctaaagactgttacctataga

SEQ ID NO: 37632 - DNA, 110 bp, synthetic construct
  source 1..110: mol_type = other DNA
tcacttggatcacttagaatcatattaccatgcgctaaagactgttacctatagattaaagtcataaattcagtaaaccctcacttgatggaatgagtaaatattgaggg

SEQ ID NO: 37633 - DNA, 110 bp, synthetic construct
  source 1..110: mol_type = other DNA
ggggcagaccccacctcagcaacggggttcctggtttcaagatcactaagagacatctttgtttcttcatggtcttccttcaagctattctttttttccattaaggggct

SEQ ID NO: 37634 - DNA, 110 bp, synthetic construct
  source 1..110: mol_type = other DNA
agttcccagcagaacatttaagcaaaggccctggggcagggccacgcctggagcgttcaaaaagctggaaggagggctagtggctgagaacttggaaggaaatgaggtca

SEQ ID NO: 37635 - DNA, 110 bp, synthetic construct
  source 1..110: mol_type = other DNA
gaactcccgtttagaaccatttcttattttaggcattttaataggagtgcagtgatagctcattgtggttttaatttgcgtttccctaatggttaaagatagcgaaaatc

SEQ ID NO: 37636 - DNA, 110 bp, synthetic construct
  source 1..110: mol_type = other DNA
gaactcctaatgccaatcttttcttaagtagttaaaacagtttttgctcccactagctgtgtgaaagaatttctgttgccccatacccactgatgctttgcattttcaag

SEQ ID NO: 37637 - DNA, 110 bp, synthetic construct
  source 1..110: mol_type = other DNA
tagatatgttgacagagccattccatggcctgacgctcagtcctgtgtcctggctgaagtacagctgtcatcacattcacatctgtccatactgtggcactgagctaaga

SEQ ID NO: 37638 - DNA, 110 bp, synthetic construct
  source 1..110: mol_type = other DNA
ccgcatctgggacctaagagcacagcttgtggcaacgcccaattctcaacccactgagtgaggccagggattgaatctctgtcctcctagacactagctgggttcttaac

SEQ ID NO: 37639 - DNA, 110 bp, synthetic construct; identical to SEQ ID NO: 37638
  source 1..110: mol_type = other DNA

SEQ ID NO: 37640 - DNA, 110 bp, synthetic construct
  source 1..110: mol_type = other DNA
ctaggcaggcacacagaagcccccacacaaacaaatcaccatcctcaagatggcttttagcatgagttcccacgaggggcctcgagtatgtggagtagggaataaaaatg

SEQ ID NO: 37641 - DNA, 110 bp, synthetic construct
  source 1..110: mol_type = other DNA
tttagcatgagttcccacgaggggcctcgagtatgtggagtagggaataaaaatgtagtaagcacgggatctgtgcagataaaacgaggcaggtgcagacctctggggtg

SEQ ID NO: 37642 - DNA, 110 bp, synthetic construct
  source 1..110: mol_type = other DNA
gcagagtcgctgaacctttgaagaagtgacccagggctcaagccagctttgcaatgcttattcgtccctggattttacaacttgcccggaacctgaaaatcgctttgttt

SEQ ID NO: 37643 - DNA, 110 bp, synthetic construct
  source 1..110: mol_type = other DNA
aacttggcgactggaggccttcttttctggagtcaccagagttcagctccaagaacctgaaagaaaatgtttggcatggagcttgaaggcttccatcagggattctttga

SEQ ID NO: 37644 - DNA, 110 bp, synthetic construct
  source 1..110: mol_type = other DNA
tgggatgttagtcaaagagtcatccttccacttccttgaaggatcctgagattaagctgaggcagatcatgtgcccaggtctaaaaataactccaccccttctaatacgg

SEQ ID NO: 37645 - DNA, 110 bp, synthetic construct
  source 1..110: mol_type = other DNA
ctcccaggccagtcatggcctctcacctgagacccatgagaagtcctttgccagaggctaaagttttctcctcaacagaatgttttaaaaattaaagttacagtgataac

SEQ ID NO: 37646 - DNA, 110 bp, synthetic construct
  source 1..110: mol_type = other DNA
aaatccctgatggcacatcgtagtcagccatcatgttccttcctcctcccctaagaattcagaggactcttcctcacataattcatgtcagattatgttggttctatgat

SEQ ID NO: 37647 - DNA, 110 bp, synthetic construct
  source 1..110: mol_type = other DNA
tgtatagatgattatgctgttttacatctttttcttttctcatctcttctcttcttttcttttttctttttgggtcttcacctgtggcatatggaagttcctggctaggg

SEQ ID NO: 37648 - DNA, 110 bp, synthetic construct
  source 1..110: mol_type = other DNA
gctgttttacatctttttcttttctcatctcttctcttcttttcttttttctttttgggtcttcacctgtggcatatggaagttcctggctaggggttgaatcagagctg

SEQ ID NO: 37649 - DNA, 110 bp, synthetic construct
  source 1..110: mol_type = other DNA
agtcttatcttgaacattttaaaaggtcatttttttcctgccatgttatgtttccttggctaacttaactttttcggtttctgcacttttatcctccagatctcagtaag

SEQ ID NO: 37650 - DNA, 110 bp, synthetic construct
  source 1..110: mol_type = other DNA
agggagggagaaaaggaggaggagggaggttgagttgtgaagaggaagaactactttaaattaacacataaaccaacatgtacgatgcacagagtatttgctgggcctta

SEQ ID NO: 37651 - DNA, 110 bp, synthetic construct
  source 1..110: mol_type = other DNA
ttaaattaacacataaaccaacatgtacgatgcacagagtatttgctgggccttaaacaaggatttgaagtctatactaggaaggatggatggattcaaagtcactttgt

SEQ ID NO: 37652 - DNA, 110 bp, synthetic construct
  source 1..110: mol_type = other DNA
acatccctgcctgcagttcctcgtgggaaaggtgttcacattctgcttggacccctgtgccctgtggacagcactgccttcagctctgaagcagctgggtcagggtggat

SEQ ID NO: 37653 - DNA, 110 bp, synthetic construct
  source 1..110: mol_type = other DNA
tgtgccctgtggacagcactgccttcagctctgaagcagctgggtcagggtggatggaggccctccttggggcagcttataaagtggtatgggatcatccccaggcgtca

SEQ ID NO: 37654 - DNA, 110 bp, synthetic construct
  source 1..110: mol_type = other DNA
agctctactccagacacagcaaatcaagaatcccaaatcctgaacatcagtgattcagcttgcttctaggatgggggtctcatgccagtaaggataagctgaaaagacca

SEQ ID NO: 37655 - DNA, 110 bp, synthetic construct
  source 1..110: mol_type = other DNA
tacctgggccttgagccatgattataccacctatgaaatgataaaggcagtttgcttcgtgggcaagagctcctggaaggagaaagggaggtcatgctgcacagcacagg

SEQ ID NO: 37656 - DNA, 110 bp, synthetic construct
  source 1..110: mol_type = other DNA
ttcgtgggcaagagctcctggaaggagaaagggaggtcatgctgcacagcacagggaactttacccagtcacttgtgatagaacatgataggagataatacgagaaaaag

SEQ ID NO: 37657 - DNA, 110 bp, synthetic construct
  source 1..110: mol_type = other DNA
cacatctcctgggaggcttctctgccccacccaggcttccaccagcccctcttccagctatttccactttgcatgtggggggttgtgatttgcgtccagatgtcttgctg

SEQ ID NO: 37658 - DNA, 110 bp, synthetic construct
  source 1..110: mol_type = other DNA
tcaacctttccatcctctttttaatttttatttttatatagataaagcttcaatacaaacactgtagtgactggtttcctaattgcagagggttgctttgtaaactgtat

SEQ ID NO: 37659 - DNA, 110 bp, synthetic construct
  source 1..110: mol_type = other DNA
ataccccatgttatatataatacatgcatacttgatacccacagagaaggagggtgcgtttttatatgaatttaaggaatacataaactgggaaaaaggaggaacttttc

SEQ ID NO: 37660 - DNA, 110 bp, synthetic construct
  source 1..110: mol_type = other DNA
caccagcctgtttgctgtcactggaccttcagctcatatcacaccccaggacatcccaaacactttacaaaagtaggtgggacttttttggtctatttcctagtacaaac

SEQ ID NO: 37661 - DNA, 110 bp, synthetic construct
  source 1..110: mol_type = other DNA
ggatcaggagttaaatagcgtctcaacatcccattagaagaagactggtggtctagtggttagaacactgcatgtcatatcatagctaaaaaaaaaaaaaaaaacaaaga

SEQ ID NO: 37662 - DNA, 110 bp, synthetic construct
  source 1..110: mol_type = other DNA
gtggttagaacactgcatgtcatatcatagctaaaaaaaaaaaaaaaaacaaagaagagtaatgggaggtaaaacgcgaagtctggtctctggccacatttcctttcaat

SEQ ID NO: 37663 - DNA, 110 bp, synthetic construct
  source 1..110: mol_type = other DNA
aattttttaaaaactggagctgacacaaaaatgtgaacctctggtttctctgcgaaagatcataacaactggtaatgctgggctgtatttcagtaagcttttgcaaccca

SEQ ID NO: 37664 - DNA, 110 bp, synthetic construct
  source 1..110: mol_type = other DNA
gcacagagtgtctcacgcctgatttctcaccctgagctctgctcagggggtgctgtgggtctgcagctgtagtggctcagaatttaatccatgtggagcctgatggcaag

SEQ ID NO: 37665 - DNA, 110 bp, synthetic construct
  source 1..110: mol_type = other DNA
tgggtctgcagctgtagtggctcagaatttaatccatgtggagcctgatggcaagtgccaagtatcagttcacaaactgcagggaacattactttggtggggaccctgtg

SEQ ID NO: 37666 - DNA, 110 bp, synthetic construct
  source 1..110: mol_type = other DNA
tcatggctccatgtccctagagtgtgggtgagggcatgaaatgaagtacttccggggaaggctggaattcagctggaggatccaaggtcggagctctgagagctgctgcc

SEQ ID NO: 37667 - DNA, 110 bp, synthetic construct
  source 1..110: mol_type = other DNA
cactgtcctgtgagtcacctcccccctcagcatccctcccacacgctgcactcgtcatccctgcctccccagcccgctctccttgcgctttcaaaagactgacaggaggc

SEQ ID NO: 37668 - DNA, 110 bp, synthetic construct
  source 1..110: mol_type = other DNA
agcctgaccgtaagcagattctcatcaggggctcagaactttccagtgaccccatctgtctcactgggcaaaggggcagctggtcaggcacagccgagttccagcagttc

SEQ ID NO: 37669 - DNA, 110 bp, synthetic construct
  source 1..110: mol_type = other DNA
gtttgtgtccaaagttggtgtccaaagcatgcgctcgaggctttaggaaggagctgggccttggcattagagtctacgagctgagttcaagtcctaactttgctgcgtga

SEQ ID NO: 37670 - DNA, 110 bp, synthetic construct
  source 1..110: mol_type = other DNA
tggaccctgcatgtgtattcataggcactagcgatgtggtgaaggaaaaggagaacagcagatgtcagctggggtgacagagtagcacaggtgggcaggggctcagagaa

SEQ ID NO: 37671 - DNA, 110 bp, synthetic construct
  source 1..110: mol_type = other DNA
cagcagatgtcagctggggtgacagagtagcacaggtgggcaggggctcagagaagggaacagagggacctggagtggcaccgggagtgccctggtgtgggggcacaggt

SEQ ID NO: 37672 - DNA, 110 bp, synthetic construct
  source 1..110: mol_type = other DNA
caggctgggggatggctgagaggggctgatatccttcctggaatataaagcaattccctttaaagcggccttcccccaagtcaccctctcccagaccttgaatttacatt

SEQ ID NO: 37673 - DNA, 110 bp, synthetic construct
  source 1..110: mol_type = other DNA
tgaatttcagcaacatggatactagtcaggttcatttccactgagccacaactccccaggtcattttatatagctggctgcctgtggcaactttgtagctagcctttgcc

SEQ ID NO: 37674 - DNA, 110 bp, synthetic construct
  source 1..110: mol_type = other DNA
cagtgtgctgaaggatccagagttacccaaccaggttgggcctgatgtttcagatgtgggcatctctgagcaggaaactctatagatgcctgagagccagtgggacatac

SEQ ID NO: 37675 - DNA, 110 bp, synthetic construct
  source 1..110: mol_type = other DNA
gtgggcatctctgagcaggaaactctatagatgcctgagagccagtgggacatacttttcaacttgtaataagtggtgcaaaatcaattaaataatcctcagactgcccg

SEQ ID NO: 37676 - DNA, 110 bp, synthetic construct
  source 1..110: mol_type = other DNA
tatccattattgtcaataagctgttgaagtcttccccaagtcttcccctggaagttgcagactttcaaccaactggagttccaaaatagttaggcagattctgccagtgt

SEQ ID NO: 37677 - DNA, 110 bp, synthetic construct
  source 1..110: mol_type = other DNA
agtgaggctagtgattgaacctgcttcctcatggatattagtcagattcatttccactgagacttgactggaactcggaaaatatgtcacattagctcaaattaaattca

SEQ ID NO: 37678 - DNA, 110 bp, synthetic construct
  source 1..110: mol_type = other DNA
actgagacttgactggaactcggaaaatatgtcacattagctcaaattaaattcactgccctccatgtcgctgttggtaggcaactaggaagatgttatgggcagccaag

SEQ ID NO: 37679 - DNA, 110 bp, synthetic construct
  source 1..110: mol_type = other DNA
gcattgggttcactgagaaggctaggggtcagtaaacagcattctggcctggcatgtcaggtgtgtttcttcagcagtagtctcatagcagtgcctggatcagtccaagt

SEQ ID NO: 37680 - DNA, 110 bp, synthetic construct
  source 1..110: mol_type = other DNA
gtgtctcaaaaacccatcttgcctcagtcccaattcaggctctgcttatccagagggaaggggagagagggaggggcccatggtcactccctgtcgcttgcttgggggaa

SEQ ID NO: 37681 - DNA, 110 bp, synthetic construct
  source 1..110: mol_type = other DNA
accaactagaaacaaaaaatccaaaggaacccacagcctggtacataagagcacaccacttaaaagtcacgataaagaaaaactttatgagcaagcaggtgtggggagac

SEQ ID NO: 37682 - DNA, 110 bp, synthetic construct
  source 1..110: mol_type = other DNA
gtagagctgaaacttctagaaaaaaaaagtataaaatctttgtagcctcaggttaagcaaatatttcttagctacaacaccaaaagcatgatccacaagagaaaaatgat

SEQ ID NO: 37683 - DNA, 110 bp, synthetic construct; identical to SEQ ID NO: 37682
  source 1..110: mol_type = other DNA

SEQ ID NO: 37684 - DNA, 110 bp, synthetic construct
  source 1..110: mol_type = other DNA
gcagcctggatttgatccctggccctcagactttagcctgccacaggcacggccaaaaaactcccaacaaaataaaaccaagcgtctccttggcaggcagctccctcctg

SEQ ID NO: 37685 - DNA, 110 bp, synthetic construct
  source 1..110: mol_type = other DNA
aaaaactcccaacaaaataaaaccaagcgtctccttggcaggcagctccctcctggccctggtcaggggtgcctgccctcagcccctctcctggggccagtctctcatta

SEQ ID NO: 37686 - DNA, 110 bp, synthetic construct
  source 1..110: mol_type = other DNA
accagctcagcaatcaccagagaaggtgtctgggtccagactcctgcctctcaagaaaaaaaaaacaggccagctgattccattgagcctatcaatattttttagcaatg

SEQ ID NO: 37687 - DNA, 110 bp, synthetic construct
  source 1..110: mol_type = other DNA
gcctctcaagaaaaaaaaaacaggccagctgattccattgagcctatcaatattttttagcaatgtgacatctgatcactgtggtgtaagaattaatttctatattaata

SEQ ID NO: 37688 - DNA, 110 bp, synthetic construct; identical to SEQ ID NO: 37686
  source 1..110: mol_type = other DNA

SEQ ID NO: 37689 - DNA, 110 bp, synthetic construct; identical to SEQ ID NO: 37687
  source 1..110: mol_type = other DNA

SEQ ID NO: 37690 - DNA, 110 bp, synthetic construct
  source 1..110: mol_type = other DNA
atgatctcatttttataattaaggtttaaggggaacagaaataggtaaacaggaaaggggaaaaatagctgcttacaaatccccacttattcttccatttctataggatt

SEQ ID NO: 37691 - DNA, 110 bp, synthetic construct
  source 1..110: mol_type = other DNA
aggggaaaaatagctgcttacaaatccccacttattcttccatttctataggattagaggcaaaggtctgtcttctgtgacttcatgctgacacagggcactgtattctt

SEQ ID NO: 37692 - DNA, 110 bp, synthetic construct
  source 1..110: mol_type = other DNA
cagaacactcactcctgtgagaggagcctctgcagtataattattctccagtgtgtgggtcacctaccagggagtcttggatatgattatatttcaagtcccccatgcct

SEQ ID NO: 37693 - DNA, 110 bp, synthetic construct
  source 1..110: mol_type = other DNA
tgggtcacctaccagggagtcttggatatgattatatttcaagtcccccatgcctaccggttttggtgtggttcctcctttatatctttagttgtgagagatattttctg

SEQ ID NO: 37694 - DNA, 110 bp, synthetic construct
  source 1..110: mol_type = other DNA
tctaatttatgtcccccatgcgactggggcttcccccttgcaatctattaaggcatcaagctttattctttgctgtgtctgaagggtgtaactggccagtttggcaaggc

SEQ ID NO: 37695 - DNA, 110 bp, synthetic construct
  source 1..110: mol_type = other DNA
ccagagaccctgacagtgatgctgtatgtttgtgcctgcttctgcattgttcccggctcagctaacctgggtcagaggcttgtgctagtacaagtcagtattatttcatt

SEQ ID NO: 37696 - DNA, 110 bp, synthetic construct
  source 1..110: mol_type = other DNA
caacaataactccctttcagggttcacaccctccccatttatttctcagtactctccagctgtcctcacagcacagaaggtatgtcaggctcgctaagggaaggcagaag

SEQ ID NO: 37697 - DNA, 110 bp, synthetic construct
  source 1..110: mol_type = other DNA
ccagctgtcctcacagcacagaaggtatgtcaggctcgctaagggaaggcagaagcatctcttactctaacctatacttaaaaatttccttcaacgttgactgaatgtct

SEQ ID NO: 37698 - DNA, 110 bp, synthetic construct
  source 1..110: mol_type = other DNA
tcaacctttcccttcacacccccttccggccatcctactaccatcattgagaaacgctttgctcaacaaagcattaaatattattttctgttacatacccatttcttctt

SEQ ID NO: 37699 - DNA, 110 bp, synthetic construct
  source 1..110: mol_type = other DNA
catttgaacctaactagtgacgtccacaggggcactacttccaaataagctcatggtctgtggtatgggggttaggacttcaaaactaggagttttgaggggacacaagg

SEQ ID NO: 37700 - DNA, 110 bp, synthetic construct
  source 1..110: mol_type = other DNA
caccctactctcaggtaacagagaagcagcctttcaccaggatgcagccattagccctccactgaagccagttcaccagcagtaccagggaagctgcatctcagatgctg

SEQ ID NO: 37701 - DNA, 110 bp, synthetic construct
  source 1..110: mol_type = other DNA
cctccactgaagccagttcaccagcagtaccagggaagctgcatctcagatgctgcccctgcccctgaccatgtcgcaggcctagcaccaagtgagaggagatgcaaaag

SEQ ID NO: 37702 - DNA, 110 bp, synthetic construct; identical to SEQ ID NO: 37700
  source 1..110: mol_type = other DNA

SEQ ID NO: 37703 - DNA, 110 bp, synthetic construct; identical to SEQ ID NO: 37701
  source 1..110: mol_type = other DNA

SEQ ID NO: 37704 - DNA, 110 bp, synthetic construct
  source 1..110: mol_type = other DNA
ccaactggtatcattcttcttcctaaagaacacctttggatatttttcacagtatggatctaatggtgatgaaaactgtcagctctactatgtgtgcataattctttatt

SEQ ID NO: 37705 - DNA, 110 bp, synthetic construct
  source 1..110: mol_type = other DNA
gagggacctggggcctctccctgcacatatgcatgcagctcacgctggggccaggaaatgtgtcacctggcatcttgctccttcggatgactcaaaaaaacgccctggac

SEQ ID NO: 37706 - DNA, 110 bp, synthetic construct
  source 1..110: mol_type = other DNA
aaatgtgtcacctggcatcttgctccttcggatgactcaaaaaaacgccctggacggaccctacctgagtgcaggagtgatcagccagccaccagcctctgtctgcagct

SEQ ID NO: 37707 - DNA, 110 bp, synthetic construct
  source 1..110: mol_type = other DNA
gcactgaggccacctccaccactccggctccaccctcaaagacgtgggagtgggcagctgagcaagtgtccacccatctcattcctcagagatgtcactgcaggtgacgg

SEQ ID NO: 37708 - DNA, 110 bp, synthetic construct
  source 1..110: mol_type = other DNA
agctgagcaagtgtccacccatctcattcctcagagatgtcactgcaggtgacggagaggacagggtcctgacagtgtctatctgcctgctgacctggaagctgacctgg

SEQ ID NO: 37709 - DNA, 110 bp, synthetic construct
  source 1..110: mol_type = other DNA
gtagtttctcacttctcacttaaaccagtatcccatcctcccaccagcaaccatgcccaaagtggcagagggtgtgaaatgacacactctaagcagcttttgaaaccaag

SEQ ID NO: 37710 - DNA, 110 bp, synthetic construct
  source 1..110: mol_type = other DNA
cacacacacacacacagactcatacagagagaagcccccagacctgggcgtgggggccattagtctcatcagactgagctggggaagggaggtgatacagaaactgacca

SEQ ID NO: 37711 - DNA, 110 bp, synthetic construct
  source 1..110: mol_type = other DNA
gccattagtctcatcagactgagctggggaagggaggtgatacagaaactgaccacacttatgactcaacccagccagaacccccattgggacttgaacccacagttttt

SEQ ID NO: 37712 - DNA, 110 bp, synthetic construct
  source 1..110: mol_type = other DNA
tggcattagagcagaggagctctgaggatcagccggcagacaaagaaactgtcatcctgcaaactgggcctggaggggactgggcagacacagggagcagctctttctac

SEQ ID NO: 37713 - DNA, 110 bp, synthetic construct
  source 1..110: mol_type = other DNA
tttctgccttttctcccacagctctgtgacaggcatgagtggctgggcattagaggtacagcttagaggtagactctcagaagggctggcccagtgccctgaccactggc

SEQ ID NO: 37714 - DNA, 110 bp, synthetic construct
  source 1..110: mol_type = other DNA
aatgcctgctgtacatttgccagatgaggccatggggccacgggggcgcgggagcactcctttattcctcccagctgcctacaaatctacacttacctcaaaagggttcg

SEQ ID NO: 37715 - DNA, 110 bp, synthetic construct
  source 1..110: mol_type = other DNA
gcaagcaagcaagatgcctgtaaaaaaggatgttgtttttcacacatttggaaagattttgagagtttaagcaccgacccacgtgggccagggccgtggcctagggtggg

SEQ ID NO: 37716 - DNA, 110 bp, synthetic construct
  source 1..110: mol_type = other DNA
attttgagagtttaagcaccgacccacgtgggccagggccgtggcctagggtggggggcaagggtgtgatgtgagcccatctgctagcctgtaggacatcccaaagtccc

SEQ ID NO: 37717 - DNA, 110 bp, synthetic construct
  source 1..110: mol_type = other DNA
atgggaggcaaatccccctttgcttggactctgtttctcttagcatctccatcaactccacgctgtatccagcctcactgtagaaggagctactacgcagcagggcctcc

SEQ ID NO: 37718 - DNA, 110 bp, synthetic construct
  source 1..110: mol_type = other DNA
aaggtccggcaaaagaatgttctgaaaagagaaaagcacgagctcaggttatgtgggagtttcccttaagaacagcagccacaggatggggcttaaaaataactgggttt

SEQ ID NO: 37719 - DNA, 110 bp, synthetic construct
  source 1..110: mol_type = other DNA
ctccctggccaaacttaaaggaagcttgctgaacaaatgaagatccactcttgctagcaggctttgtattctggcatgcagtgcatctggatacagtgggttcatttctt

SEQ ID NO: 37720 - DNA, 110 bp, synthetic construct
  source 1..110: mol_type = other DNA
ggctcaagtcagaggctgtggctctcagccccaagggagcccagcacaggagtgtggaagctcccaggcaccagagacaacaagctcctgagtgcagagctcaagtctag

SEQ ID NO: 37721 - DNA, 110 bp, synthetic construct
  source 1..110: mol_type = other DNA
ggaagctcccaggcaccagagacaacaagctcctgagtgcagagctcaagtctagaatgagataaaggggtgactgtggggcctgggcagagtcatgtgatgatgtgtgt

SEQ ID NO: 37722 - DNA, 110 bp, synthetic construct
  source 1..110: mol_type = other DNA
atgccacagatgaggcaacactggatccttaacccacagcactgggccagcccaaaattgaactcaaacaccagcagcaacccaagttgctgcagagacaatgctgggtc

SEQ ID NO: 37723 - DNA, 110 bp, synthetic construct
  source 1..110: mol_type = other DNA
agcctaactgtcgccaccattggatttatgaactattagcagagattaacactgagatctctagatggtaccatccctccattcttcaaggaaacccacaagctacttgg

SEQ ID NO: 37724 - DNA, 110 bp, synthetic construct
  source 1..110: mol_type = other DNA
gatctctagatggtaccatccctccattcttcaaggaaacccacaagctacttggtgactagttgatttccattttggagaaagtggttcttttccacactgggactgac

SEQ ID NO: 37725 - DNA, 110 bp, synthetic construct
  source 1..110: mol_type = other DNA
ctgtggtctctttactgtgttgttggttttgcaacattagcgccctagtcctgctgtgtgacaggcaataggagataattggtagctgagttctcctggcttgacccagt

SEQ ID NO: 37726 - DNA, 110 bp, synthetic construct
  source 1..110: mol_type = other DNA
attacagtatttttaagtatcaatttctcttcttttctaatccagccattctttcattttatagctggaggccaagaaaatatgatatgagtattcaggggtctaaagaa

SEQ ID NO: 37727 - DNA, 110 bp, synthetic construct
  source 1..110: mol_type = other DNA
attttatagctggaggccaagaaaatatgatatgagtattcaggggtctaaagaaaagagtgaaaatgatgtaaactaacatctgatactagagagatcaggtctaatga

SEQ ID NO: 37728 - DNA, 110 bp, synthetic construct
  source 1..110: mol_type = other DNA
caacaatcttgcatgcaataaagcttcagctaagacagggaagcagggcctgcgtgcagctttcttgtctggcttgtatgatcggctcacagcttttctggaaaaggatt

SEQ ID NO: 37729 - DNA, 110 bp, synthetic construct
  source 1..110: mol_type = other DNA
ataacctaaaccatgtgagagggtaatttacagaatgtaccacagctgggcttatttgatgcttttctaatgatcagattatgattatgggtttgggggagaaaggcaca

SEQ ID NO: 37730 - DNA, 110 bp, synthetic construct
  source 1..110: mol_type = other DNA
aatttagagtcaagattctccaaaaactggatgttgactccgtactgtaaatgtgtctctgtccagataggccctgcatttggcttgttggacagctctccacactgacc

SEQ ID NO: 37731 - DNA, 110 bp, synthetic construct
  source 1..110: mol_type = other DNA
gtcgcttctggatgtctgtgagagcaaggccaattgatttggcatcaggatggggacacgagaaaggaaaaggctgtcaagactgacaggagcagtcagtggagcccccg

SEQ ID NO: 37732 - DNA, 110 bp, synthetic construct
  source 1..110: mol_type = other DNA
gtgtgactaaaatgatattatttctgctcggggaattttcagggctggtcttcatttgcttttgattggaacaagtacaatcaaccattctcgaatgcactctttgcagt

SEQ ID NO: 37733 - DNA, 110 bp, synthetic construct
  source 1..110: mol_type = other DNA
ttgcttttgattggaacaagtacaatcaaccattctcgaatgcactctttgcagtcagcaagcttcagagactttagaatcttgtcataaattgttgacttgcttagagc

SEQ ID NO: 37734 - DNA, 110 bp, synthetic construct
  source 1..110: mol_type = other DNA
gcagggtgggagaagcaggcacctgccatggttcgagtaatgagtggaagggaatcagccaggtggggggaggtggatactccacacacacaagcaagtggctcctgaca

SEQ ID NO: 37735 - DNA, 110 bp, synthetic construct
  source 1..110: mol_type = other DNA
acctcgccgcccatgtgtcctgcttcggtgcgcggttgcggcagaggtcacccctccaggagggggtggagcgccacatggctccgccccttcaagtctgagccacacat

SEQ ID NO: 37736 - DNA, 110 bp, synthetic construct
  source 1..110: mol_type = other DNA
ccaggagggggtggagcgccacatggctccgccccttcaagtctgagccacacatctgtctccagctacagctgcttctgcagtctttacatgggcttctcaaagtgtat

SEQ ID NO: 37737 - DNA, 110 bp, synthetic construct
  source 1..110: mol_type = other DNA
atggatgccctgagggtccttggctcagcgggtggaagtggtgggcaaggaaccagggagatggtgttagctgtatcatggggccaggactgtgagatctcagggtgagt

SEQ ID NO: 37738 - DNA, 110 bp, synthetic construct
  source 1..110: mol_type = other DNA
gggagatggtgttagctgtatcatggggccaggactgtgagatctcagggtgagtgagcagggctgtgctggccacatcagcggtggaatctgctgagagcaggtctctg

SEQ ID NO: 37739 - DNA, 110 bp, synthetic construct
  source 1..110: mol_type = other DNA
aaaggaccctcatgagagaggttgagctggaggcacccacactacacagatcctggagccacaaaaactgtgccataatgaatgcttattgttggaaagagctttgtttt

SEQ ID NO: 37740 - DNA, 110 bp, synthetic construct
  source 1..110: mol_type = other DNA
cttatctgctctgaatcaacactccctttggtggaagacagaaggaacgcgtcctccatacgcaggacctctcagcaagattcctgcagttaaatgggggtgatggaaac

SEQ ID NO: 37741 - DNA, 110 bp, synthetic construct
  source 1..110: mol_type = other DNA
cactgaaagtactgtactgaccatgaaggttgtatcataaagcatgagatcagaatgagcccagtgagaggacatctgggctccatcaggggagccctgggtgcacagat

SEQ ID NO: 37742 - DNA, 110 bp, synthetic construct
  source 1..110: mol_type = other DNA
cacacacacacacacacaccccccagtggcttgaacaacttccttgttacagtttaaaggcaaggcgaccaagctctcacccgcccacttaggaagtctttgcactgact

SEQ ID NO: 37743 - DNA, 110 bp, synthetic construct
  source 1..110: mol_type = other DNA
aaaggcaaggcgaccaagctctcacccgcccacttaggaagtctttgcactgactacacttggcccaccccaggatccctctctgctggggcatctcaaagtccccagaa

SEQ ID NO: 37744 - DNA, 110 bp, synthetic construct
  source 1..110: mol_type = other DNA
cccagccatgcagaaggccccagtctaaacttctggctgggggcagagagcctctgtggataggccgggggcacagacccaatcagcagcttagagatggcactggcatt

SEQ ID NO: 37745 - DNA, 110 bp, synthetic construct
  source 1..110: mol_type = other DNA
gtggataggccgggggcacagacccaatcagcagcttagagatggcactggcattagcctcaagtcggccgtactttcttgtaggagctaccaacacctcctctcacctt

SEQ ID NO: 37746 - DNA, 110 bp, synthetic construct
  source 1..110: mol_type = other DNA
gagtaattctgcgttcaaacagcagactcaggctctgcagtcaggaccctacattctcgtccacaaccactcggacaccagcaggtcaaccatggaagcctccaggaccc

SEQ ID NO: 37747 - DNA, 110 bp, synthetic construct
  source 1..110: mol_type = other DNA
ccataggtttcaaactcatgagtatagagctggcacccgatccaggggtgaattctttgctttggcttcacccagagccggccccacgcctgcagagatgcagaccacag

SEQ ID NO: 37748 - DNA, 110 bp, synthetic construct
  source 1..110: mol_type = other DNA
tcgggaccctgaggggagtggggtgggggcaggcctcgcggaaggtactctggaactttctctgcagacagtgtgtggttcaaatgagcctaggagctggggctggcgtg

SEQ ID NO: 37749 - DNA, 110 bp, synthetic construct
  source 1..110: mol_type = other DNA
ctttctctgcagacagtgtgtggttcaaatgagcctaggagctggggctggcgtgggtttccattttggatccttggaaaaaagtgttttacctgagcaggtggtggctg

SEQ ID NO: 37750 - DNA, 110 bp, synthetic construct
  source 1..110: mol_type = other DNA
ttataacaaatgcaagaacacatagtaagttaaagctacaacattttcaagtccgttggctcctcctgttgaatcctgcacagtcaccaaggggataaaagcatccagca

SEQ ID NO: 37751 - DNA, 110 bp, synthetic construct
  source 1..110: mol_type = other DNA
agaaattcaacaaggaaattccagactagagagagctgtagaaggactaagatgagccctctacacatccccgggggaatggaaaattattcagcttggaaaagacccaa

SEQ ID NO: 37752 - DNA, 110 bp, synthetic construct
  source 1..110: mol_type = other DNA
ctggccacatctgagaccaagggctatgtgcagccctgggcagctggctggccttcacatcctcttcgggcactgatttcacctgcataaaccttggccctgctgctgca

SEQ ID NO: 37753 - DNA, 110 bp, synthetic construct
  source 1..110: mol_type = other DNA
tatacttaagaccagctattagtgaagttcaggatgatgctgtcttcatccagcacctataataattaaaaatcaagaaggtattgcatttaggcaaatgtttgattttg

SEQ ID NO: 37754 - DNA, 110 bp, synthetic construct
  source 1..110: mol_type = other DNA
ctgactgaagatgtttcaaattatagaatcatagcctcggcactaacgatgttaacgcctcaaacctccgtcctgacgtggcgatcgtgccgttccccgagcttgccttc

SEQ ID NO: 37755 - DNA, 110 bp, synthetic construct
  source 1..110: mol_type = other DNA
cgcctcaaacctccgtcctgacgtggcgatcgtgccgttccccgagcttgccttcccttcagcaagaactgctctgaggaccagggtgcccttggagagaagatgccttg

SEQ ID NO: 37756 - DNA, 110 bp, synthetic construct
  source 1..110: mol_type = other DNA
gacagcccgggttcaggttccctgccagaatgtacgcaggaattttctcacaatgttgcagcctcagcagttgagtgttgtccactccaggctgagcctagctcctcagc

SEQ ID NO: 37757 - DNA, 110 bp, synthetic construct
  source 1..110: mol_type = other DNA
gttcctaaattctcttcatagtgcgagaggatcacggtcaacctttccctctcaccaaggctgcagttctccatcagcactcagccaggccagcgccagggctcaggtta

SEQ ID NO: 37758 - DNA, 110 bp, synthetic construct
  source 1..110: mol_type = other DNA
caaggctgcagttctccatcagcactcagccaggccagcgccagggctcaggttactagctaggggccaggactgacttccacaggagtgcggaaaataaacatcagtta

SEQ ID NO: 37759 - DNA, 110 bp, synthetic construct
  source 1..110: mol_type = other DNA
ctgcttcctgggaagtatcagcacacctcagcctgcctcaggcaggagcagccgggcagctccggagaccagcgtgaactcaatttaaccacacgtctctctttcagttt

SEQ ID NO: 37760 - DNA, 110 bp, synthetic construct
  source 1..110: mol_type = other DNA
gggatcgtatcccattccatcacagcttctcaaacttgaatgagcattagagtcaccgggagagcctgacaatgcttagctgggccctacacccaaagtttctgatttaa

SEQ ID NO: 37761 - DNA, 110 bp, synthetic construct
  source 1..110: mol_type = other DNA
ccgggagagcctgacaatgcttagctgggccctacacccaaagtttctgatttaagaggtgtggcgtgtggacacaagaatccacattactaacaagttctgaagtactg

SEQ ID NO: 37762 - DNA, 110 bp, synthetic construct
  source 1..110: mol_type = other DNA
aacagtagcaaatctgacgttaggtagagtgtctttttcaaaatatagataagatttaatcttcagcttgtccataggaaagcggctcctgttttgggttgttacctcca

SEQ ID NO: 37763 - DNA, 110 bp, synthetic construct
  source 1..110: mol_type = other DNA
ttaatcttcagcttgtccataggaaagcggctcctgttttgggttgttacctccaaagtgatgagtctggtccacatccagacctagggctctaaagagtttgtttcatt

SEQ ID NO: 37764 - DNA, 110 bp, synthetic construct
  source 1..110: mol_type = other DNA
tttgcctcattgccttcctccccgaaggtcacctgtatccacttctctgtcataagaaattgctcttacatttttgccttgacttatttttatttttattgttttggcca

SEQ ID NO: 37765 - DNA, 110 bp, synthetic construct
  source 1..110: mol_type = other DNA
aggtcacctgtatccacttctctgtcataagaaattgctcttacatttttgccttgacttatttttatttttattgttttggccatgcccatggcatgcagaagttccca

SEQ ID NO: 37766 - DNA, 110 bp, synthetic construct
  source 1..110: mol_type = other DNA
gccataagggggcctcagttcaggtttcttgagaaaatgtttaacaagctgctcgaacacttgagcctgttctgtgttaacctctggagtgatgtcagccaaggtctgga

SEQ ID NO: 37767 - DNA, 110 bp, synthetic construct
  source 1..110: mol_type = other DNA
ggtccagttcctgtctcgcagtcagtaagcagcttgtctgcattggcttctattaggaacagaaacagtctttggtcacttaataaatcaccgacttcccacagaagaca

SEQ ID NO: 37768 - DNA, 110 bp, synthetic construct
  source 1..110: mol_type = other DNA
ggaacagaaacagtctttggtcacttaataaatcaccgacttcccacagaagacatgtccttttcattaaagagggagggaaattaggccactgccttagagctatagaa

SEQ ID NO: 37769 - DNA, 110 bp, synthetic construct
  source 1..110: mol_type = other DNA
gcttttacaggaatcctttgttacagctttgttagcctgctcgccttcagcggctcccagtccagtcctgggcccccgcagtcccatcaccgcccctcctccacgcccct

SEQ ID NO: 37770 - DNA, 110 bp, synthetic construct
  source 1..110: mol_type = other DNA
ggagtttttcatcatttgcgcataggaccctgctccacaaaggcgagctggacgaagactctccatagtggagtgttcaatccaagtgtatttcaggatcttgagatgaa

SEQ ID NO: 37771 - DNA, 110 bp, synthetic construct
  source 1..110: mol_type = other DNA
catacagcctgcaaagactaaaatattcactatttgactctttacagaaagaaaatgctgatttctgttctacacactgttttggggaaactttattataatactgtgta

SEQ ID NO: 37772 - DNA, 110 bp, synthetic construct; identical to SEQ ID NO: 37771
  source 1..110: mol_type = other DNA

SEQ ID NO: 37773 - DNA, 110 bp, synthetic construct
  source 1..110: mol_type = other DNA
cagagacacagagagacagaggaggggggtttggatggtgaggtcgaaggcagggagtgactgagatgaggaagagtgggacagggtttaagggcgacaagatctgcctc

SEQ ID NO: 37774 - DNA, 110 bp, synthetic construct
  source 1..110: mol_type = other DNA
agtgactgagatgaggaagagtgggacagggtttaagggcgacaagatctgcctcccttcaggaagcgcccagacggctcccgtttgcacccctaatcccgccccctcta

SEQ ID NO: 37775 - DNA, 110 bp, synthetic construct
  source 1..110: mol_type = other DNA
tttattttattcctccgctctcttctccaagcacaagataaaagaatatgtagatattaagctacatatttttgtgggttgcgttttctctgagagagacatactcattc

SEQ ID NO: 37776 - DNA, 110 bp, synthetic construct
  source 1..110: mol_type = other DNA
atgacaactaattatggttggagtcttgggaattgaggacatagcggattccaggacgtgaaagcctagctccatttctccatgctggcaagggcaccttctactcaaag

SEQ ID NO: 37777 - DNA, 110 bp, synthetic construct
  source 1..110: mol_type = other DNA
acgtgaaagcctagctccatttctccatgctggcaagggcaccttctactcaaaggccccaaacgctggggaggtagcgaagtagtttgcagcccaacgcaggggaggag

SEQ ID NO: 37778 - DNA, 110 bp, synthetic construct
  source 1..110: mol_type = other DNA
aagatgctggaaacctaccctgtcatcccggttctcagctaacccctgaagggtcctattctcatccccaaaagaaataggaaaaagagggtgcctcctctagcatcaga

SEQ ID NO: 37779 - DNA, 110 bp, synthetic construct
  source 1..110: mol_type = other DNA
gactcttagtgtttttaatcttcttaaatgtaaggccaggtcttgcttgtccacgcgggtgggcaacaggggtgccataaatagatgagctccacagatcttttgttttt

SEQ ID NO: 37780 - DNA, 110 bp, synthetic construct
  source 1..110: mol_type = other DNA
caaccacatgcactgtcaggagaatgcttggggagccttggtccacctggcagtaaagaggtgcctttctctcaccctctgcggtggcatcagaggaggccttgggaagc

SEQ ID NO: 37781 - DNA, 110 bp, synthetic construct
  source 1..110: mol_type = other DNA
aagaggtgcctttctctcaccctctgcggtggcatcagaggaggccttgggaagcttcgggactttcattaccacttagcactaagaaggctgtgctcccagcccccttt

SEQ ID NO: 37782 - DNA, 110 bp, synthetic construct
  source 1..110: mol_type = other DNA
tttttctagaatccattcctatttgtgcatggcaatttcctgcgtgacttttactttctttcttcccactgtaacctcccctgagatcatttcatgctcttaccatcttc

SEQ ID NO: 37783 - DNA, 110 bp, synthetic construct
  source 1..110: mol_type = other DNA
ttggatagctagtgcagcaggctgagggctgtctctggttcataagggctgagattttatttgagcacagcttaaccactgactagctgaactaaatgaaagccggtaac

SEQ ID NO: 37784 - DNA, 110 bp, synthetic construct
  source 1..110: mol_type = other DNA
gacacaatggagaggtagcccatgaatattattattttatgataataaaggtgtagttacgctttattgtaaagtagtgtagctctcatgaaaatactctaaaaactgaa

SEQ ID NO: 37785 - DNA, 110 bp, synthetic construct
  source 1..110: mol_type = other DNA
cagcccctgtctgaagaagctcctgctgagataaccagattcttcaagttgatgtcctcaaagcatctcctgcacttggctctttaacaggatccattctgccaccaaaa

SEQ ID NO: 37786 - DNA, 110 bp, synthetic construct
  source 1..110: mol_type = other DNA
attatatttttatttaattggagccctttatctcaattgccataaaatggaaaatgattacaccaggggccagtaatggtgaaaaccactttatagttctgcttgtcaca

SEQ ID NO: 37787 - DNA, 110 bp, synthetic construct
  source 1..110: mol_type = other DNA
gattacaccaggggccagtaatggtgaaaaccactttatagttctgcttgtcacatagttctttcataatctggttccaatgtatattggaaaattcactctcattccta

SEQ ID NO: 37788 - DNA, 110 bp, synthetic construct
  source 1..110: mol_type = other DNA
ttttgttccctgacaccctgattttgctcttggctctgcagaagtggccgttgagtatttctgtttttttgtatcttctttcccacagttttcctcaactgtacatacat

SEQ ID NO: 37789 - DNA, 110 bp, synthetic construct
  source 1..110: mol_type = other DNA
caaccatgtttccagaagtagctgaagtggggagggggggttagacacgacagtggtcacttccagcacacagacacacctaactgcccttttcctctgctgcagtggcc

SEQ ID NO: 37790 - DNA, 110 bp, synthetic construct
  source 1..110: mol_type = other DNA
tataaccctaatggatataatttggtggatgtagtgcctgtggaggatttggacttgacaaagctaccagaaggggtatagagactaaagagctgtgtctaccctcgtaa

SEQ ID NO: 37791 - DNA, 110 bp, synthetic construct
  source 1..110: mol_type = other DNA
ccaagcaaacatcacattattaatttgtcagaaatgctattacctagagaaccggtttcaaattgtagcttttgttacatggcatcagagcaactcacgctgagcattta

SEQ ID NO: 37792 - DNA, 110 bp, synthetic construct
  source 1..110: mol_type = other DNA
gcatgattttcttgaaatatatttctcacagtcatatctagaccctagtctacaagctgtcaaaaagctgtacataattatgctcattaagaaaaacagacatatattca

SEQ ID NO: 37793 - DNA, 110 bp, synthetic construct
  source 1..110: mol_type = other DNA
aggccaagccacagcccttcccctcttctttgctcaggcggccagaatttcccggtgtggctctatgtgatctcccagctgtggtgtattaggaggatgggaatacaccc

SEQ ID NO: 37794 - DNA, 110 bp, synthetic construct
  source 1..110: mol_type = other DNA
ttatttaacgtctcattccccagtgtagggaggagaggggaagtaggccaggtacacagctcccaatttttctaagagcccccaaatgcttatctctttctcctcctgct

SEQ ID NO: 37795 - DNA, 110 bp, synthetic construct
  source 1..110: mol_type = other DNA
ctttgcctctttggtccttctcatcactggatcatacttcaaatatgcctccagcctggagaaagagagcagcctccttcctcctctactccttctagaataacatagca

SEQ ID NO: 37796 - DNA, 110 bp, synthetic construct
  source 1..110: mol_type = other DNA
ctggagaaagagagcagcctccttcctcctctactccttctagaataacatagcattcagtgttgtcattttcctacaaggtggagcctacactggaaaaaccaatgatg

SEQ ID NO: 37797 - DNA, 110 bp, synthetic construct
  source 1..110: mol_type = other DNA
ttctaacaagggattccaatgtgggccatctgcgggtcttagagctacaactcataggaaaatcattctttcctcttgtgagtctttttgaatccaggcgattaatgttg

SEQ ID NO: 37798 - DNA, 110 bp, synthetic construct
  source 1..110: mol_type = other DNA
gcaaaataattcttccaattttttttaaaaaggtatatatctaaaactgcctggatggaacttgtactctcctcctttcttctagccatttatttagctaatagtcattg

SEQ ID NO: 37799 - DNA, 110 bp, synthetic construct
  source 1..110: mol_type = other DNA
tggaacttgtactctcctcctttcttctagccatttatttagctaatagtcattgaatgcataccctgagccagacactaatgtcccagttgggagagacaaataagcaa

SEQ ID NO: 37800 - DNA, 110 bp, synthetic construct; identical to SEQ ID NO: 37798
  source 1..110: mol_type = other DNA

SEQ ID NO: 37801 - DNA, 110 bp, synthetic construct; identical to SEQ ID NO: 37799
  source 1..110: mol_type = other DNA

SEQ ID NO: 37802 - DNA, 110 bp, synthetic construct
  source 1..110: mol_type = other DNA
cagtgcctggttgagacatagctctcagagaacatgcccccggggccaaccactgacatgctcacatgggtcaagtgcaaataacagtggaaaataccaagaactgcaag

SEQ ID NO: 37803 - DNA, 110 bp, synthetic construct
  source 1..110: mol_type = other DNA
acaggaggtcggggatgtgacacacaaagatgtccaagctctgtggactctgaatccccggacgtctctaagcagagacacacgagtactccatccctacccaacacttc

SEQ ID NO: 37804 - DNA, 110 bp, synthetic construct
  source 1..110: mol_type = other DNA
aatcatccataaacccttctggctcatggtgttcatataagacactgtatccagtgcagatggagagcttcctgtcatacagaaggacatatcagctgaggccaaggcag

SEQ ID NO: 37805 - DNA, 110 bp, synthetic construct
  source 1..110: mol_type = other DNA
aaagaatccgagcgcagcagctctagtcactgtggaggcatgagatcgatccccggccccacgcagtgggttaaaaggatccggcattgctcagattcaatccctggccc

SEQ ID NO: 37806 - DNA, 110 bp, synthetic construct
  source 1..110: mol_type = other DNA
aatgtgtcgtatttgagcctcacaagcattcgagacctgcttgttctggagtttccactgtggagcagctggttaaggatccagcattggtgcagctgtggtgcaggttg

SEQ ID NO: 37807 - DNA, 110 bp, synthetic construct
  source 1..110: mol_type = other DNA
aaggccacctatcacttagccttctgatgaatgtgaatttctgttccctatgtatgttgagagttttaccttctccagggagtagatctctcccataaatgcataagttg

SEQ ID NO: 37808 - DNA, 110 bp, synthetic construct
  source 1..110: mol_type = other DNA
tgacagcatttgcagagatagataagatatctcaaaataaatgcacttgctcagagaagtagaaataccacatgcccttcccttgagaatagattaagactattcaaaaa

SEQ ID NO: 37809 - DNA, 110 bp, synthetic construct
  source 1..110: mol_type = other DNA
gaagtagaaataccacatgcccttcccttgagaatagattaagactattcaaaaatgtttttagaagcaaaaagtcagcatgtttctggaaatgacagagaacctcagaa

SEQ ID NO: 37810 - DNA, 110 bp, synthetic construct
  source 1..110: mol_type = other DNA
aaagcattgagtttcctcgggttctgagccccacacatcagttcactcacttatttacctagtgtttgtctagtcctgttttgtgccaagtcacattctgagcattgaaa

SEQ ID NO: 37811 - DNA, 110 bp, synthetic construct
  source 1..110: mol_type = other DNA
aagatggctccttcaaaccgaggctggacagccactggcccctgatatggaaaggggacctggagaatcagagagggattcccgggtccgagcgccccacacctggctgt

SEQ ID NO: 37812 - DNA, 110 bp, synthetic construct
  source 1..110: mol_type = other DNA
ggacctggagaatcagagagggattcccgggtccgagcgccccacacctggctgtgccctggaatctcctggaccttctagagtcctgcctcctgagaagatctctggag

SEQ ID NO: 37813 - DNA, 110 bp, synthetic construct
  source 1..110: mol_type = other DNA
gaacaggagaagcatcaaggaaaatcataaaacaagtcttccttctagcttcgactagagcactttaaaaggacttaatttacaatatccttcacttaaacctcatgatt

SEQ ID NO: 37814 - DNA, 110 bp, synthetic construct
  source 1..110: mol_type = other DNA
tagagcactttaaaaggacttaatttacaatatccttcacttaaacctcatgatttaccaaaagccacataactattgatgacttataggtaggacatagccataaaata

SEQ ID NO: 37815 - DNA, 110 bp, synthetic construct
  source 1..110: mol_type = other DNA
cagaagtcaggtggagcatttttttctcccattatcactatttaaaaacggcatcatcactatttactgtgcaagagctgtatgtaggcacctctcagaggaaatacctg

SEQ ID NO: 37816 - DNA, 110 bp, synthetic construct
  source 1..110: mol_type = other DNA
atcactatttactgtgcaagagctgtatgtaggcacctctcagaggaaatacctggttcatgaggtggcaatgagaaaggacactgcggtagagggagaggtcaagttca

SEQ ID NO: 37817 - DNA, 110 bp, synthetic construct
  source 1..110: mol_type = other DNA
agccatgggagggatgcatacggtgtcttgccagcccaaggaagcccccatgtgactgcagccccagctgacatcacatggagcaggagaactgtctgcctgatcccagc

SEQ ID NO: 37818 - DNA, 110 bp, synthetic construct
  source 1..110: mol_type = other DNA
ctgcagccccagctgacatcacatggagcaggagaactgtctgcctgatcccagccaactcacaaaatcatgagaggcaataacatggttattttactggatttcaaaac

SEQ ID NO: 37819 - DNA, 110 bp, synthetic construct
  source 1..110: mol_type = other DNA
tagtcttcacagtggccacagcctggcacgcatcacaggagggcatagggtatgtaaagagatcggcacagtgccagtccagagaaagccctccataatcagtgactctg

SEQ ID NO: 37820 - DNA, 110 bp, synthetic construct
  source 1..110: mol_type = other DNA
tcacctccaatggcccatgagaggcactgacaaattcttacactaggccactctcaccagtgagctgtaggaggcatagagccgggctgggcaatgctttcaagttgccc

SEQ ID NO: 37821 - DNA, 110 bp, synthetic construct
  source 1..110: mol_type = other DNA
accagtgagctgtaggaggcatagagccgggctgggcaatgctttcaagttgccctggggtctctgtgccacccaccagcattgagagccactgcctgaggccttggacc

SEQ ID NO: 37822 - DNA, 110 bp, synthetic construct
  source 1..110: mol_type = other DNA
cccccagatgcaggacagggggcccactcagggtaaatctatcccctgtaagtgggtaacaacagtgcccacactgcacacaaggagccgaccctccccccaatccaggc

SEQ ID NO: 37823 - DNA, 110 bp, synthetic construct
  source 1..110: mol_type = other DNA
gtaacaacagtgcccacactgcacacaaggagccgaccctccccccaatccaggcagggatatgtccccggatagagaacagggtcccacttggggtgccttcatccccc

SEQ ID NO: 37824 - DNA, 110 bp, synthetic construct
  source 1..110: mol_type = other DNA
acatcgagtagctgagcggtgaaatccagtaatgctagacctgaaatcccaccatctgactgcgacaacagtcaagcactactctcctgaaggtaaagtgattcagaaaa

SEQ ID NO: 37825 - DNA, 110 bp, synthetic construct
  source 1..110: mol_type = other DNA
ctgactgcgacaacagtcaagcactactctcctgaaggtaaagtgattcagaaaattgacccaagggagacacagaggatgcagaaaacacaccctacttatgggctctc

SEQ ID NO: 37826 - DNA, 110 bp, synthetic construct
  source 1..110: mol_type = other DNA
tgagccctatttctgcagaattcaaaactaagcactcgaggcacttttgtaaccatagccatgaccagggtaaagtagagaaaatacaggtgtaggaattgggactctag

SEQ ID NO: 37827 - DNA, 110 bp, synthetic construct
  source 1..110: mol_type = other DNA
tagccatgaccagggtaaagtagagaaaatacaggtgtaggaattgggactctaggccctgggttcagttctaccaggatcttcaccatcacaatggttagatgacccag

SEQ ID NO: 37828 - DNA, 110 bp, synthetic construct
  source 1..110: mol_type = other DNA
tggaaatatttctttatgtcactcctctgttaaaagccactagggattccttgttgcctccctactaagagctaaagtctccagttggaattgaaaatgcagagtctggc

SEQ ID NO: 37829 - DNA, 110 bp, synthetic construct
  source 1..110: mol_type = other DNA
cccttggaatcatgttggccccagatggataattcaggacagctgatgagcaaccttaactccccttggctatgaaaagtaatgtagtcacaagttccagagattagaca

SEQ ID NO: 37830 - DNA, 110 bp, synthetic construct
  source 1..110: mol_type = other DNA
ttaactccccttggctatgaaaagtaatgtagtcacaagttccagagattagacattttggaggggctgtgtcctggctaccatgtgagaaggaaggtatacaatgttca

SEQ ID NO: 37831 - DNA, 110 bp, synthetic construct
  source 1..110: mol_type = other DNA
cagaaataggcagcttctcgtgactaggggcaggggtggggggcctcttcattgcttctgcacaccttcactgccagttgacttataaggaaagcacatgttagaagaac

SEQ ID NO: 37832 - DNA, 110 bp, synthetic construct
  source 1..110: mol_type = other DNA
aagcagtgttttaatttgtcagcgacctgaagtagtattaactgttggggcaaatgagaagctggccaaaaaccttgacaagctgaggaatgaaatgtctgtggggactt

SEQ ID NO: 37833 - DNA, 110 bp, synthetic construct
  source 1..110: mol_type = other DNA
gagaagctggccaaaaaccttgacaagctgaggaatgaaatgtctgtggggactttgaaaactccagcatattcttgggaatctaaaggcacctgccagtgcaggacgat

SEQ ID NO: 37834 - DNA, 110 bp, synthetic construct
  source 1..110: mol_type = other DNA
gactcccctccccccacctctagtcagtcaattaccagctgttttgtcttatcacagcacagctttgactttggcattaatcaaaaaaggtttgtgaatagccccccgaa

SEQ ID NO: 37835 - DNA, 110 bp, synthetic construct
  source 1..110: mol_type = other DNA
gaatctctctcctctgctggacttccataaggctcactggcactctctggatgatacaggccccatgatttatctcctcgtcctcctgcctctataaaactaggctccct

SEQ ID NO: 37836 - DNA, 110 bp, synthetic construct
  source 1..110: mol_type = other DNA
gtcccagctccagaatcacacacctggctcaagtgccctttggaccaactatcagttgctggttctgctctcttgtatgactcctcaaggccttgacctcgtgtattctg

SEQ ID NO: 37837 - DNA, 110 bp, synthetic construct
  source 1..110: mol_type = other DNA
ttgctggttctgctctcttgtatgactcctcaaggccttgacctcgtgtattctgggggatacaggtgctgccttgatatcttcctgggcccctcacctttcactggcta

SEQ ID NO: 37838 - DNA, 110 bp, synthetic construct; identical to SEQ ID NO: 37836
  source 1..110: mol_type = other DNA

SEQ ID NO: 37839 - DNA, 110 bp, synthetic construct; identical to SEQ ID NO: 37837
  source 1..110: mol_type = other DNA

SEQ ID NO: 37840 - DNA, 110 bp, synthetic construct
  source 1..110: mol_type = other DNA
taggatttggagttcctacagcatcacaatgagcagtgcatcagtagagaagtaacgagttagaggagaaggtgtgtgggcttttcagggcggccgacctcaggacagtg

SEQ ID NO: 37841 - DNA, 110 bp, synthetic construct
  source 1..110: mol_type = other DNA
cgagttagaggagaaggtgtgtgggcttttcagggcggccgacctcaggacagtggatggaggagtgagactaatgggaggtgaggtctactccagttgggttgtcacat

SEQ ID NO: 37842 - DNA, 110 bp, synthetic construct
  source 1..110: mol_type = other DNA
gatgtgtttatatatgtacacacacacacatacttctattactagggaatacattttccaaaaagcatagtaatgaagctatttctggtatgtgcttccccccctttaaa

SEQ ID NO: 37843 - DNA, 110 bp, synthetic construct
  source 1..110: mol_type = other DNA
agacccgcagaggcaggacgctggcttcctcataacacaccacatagtgcagaggttgtgattgctccaggtccacagccagatgctagtggggcccgcactgtgaaccc

SEQ ID NO: 37844 - DNA, 110 bp, synthetic construct
  source 1..110: mol_type = other DNA
ttgtgattgctccaggtccacagccagatgctagtggggcccgcactgtgaacccagggcctcggaaggtgggtgaggccaaatggctttgctgggaacttgcctgcccc

SEQ ID NO: 37845 - DNA, 110 bp, synthetic construct
  source 1..110: mol_type = other DNA
tctcctttgaccctggtctgttggtagtttctcatcatggagcttgttgaatatgtcctgctgtctgagtgaatgaatctgaatgaaatcagtgtttctggtgagcctcc

SEQ ID NO: 37846 - DNA, 110 bp, synthetic construct
  source 1..110: mol_type = other DNA
ggtaatggggaaggatagacaccccaggggctgctgagctgggtgaccgctgaagactctgccacttgccgtggaggaatctgtaagtgacaaccggggagttctatgga

SEQ ID NO: 37847 - DNA, 110 bp, synthetic construct
  source 1..110: mol_type = other DNA
tgggactttcatcttttaaactcatcagtgcttcagagcccttgttccctcccagggtcaccacctggtttggggtctttgccctgacacctccgtgggcagacagacac

SEQ ID NO: 37848 - DNA, 110 bp, synthetic construct
  source 1..110: mol_type = other DNA
cctcacccctcgctctcctctttagagacacccctccagggacactgccacaagaatcccagtcaaggacaacagggctcctccacaccaccttttctacacatgcccag

SEQ ID NO: 37849 - DNA, 110 bp, synthetic construct
  source 1..110: mol_type = other DNA
atcccagtcaaggacaacagggctcctccacaccaccttttctacacatgcccagttcttctccacttccacttaaagaggtgaaaaagacccatttgaagaaaactcag

SEQ ID NO: 37850 - DNA, 110 bp, synthetic construct
  source 1..110: mol_type = other DNA
ctcctctcctccttccatccccctgactctcggttctggggttcagccctaacacgggatgctcaccagctttctaatcggccggaagtaactccagaatccagcgagtg

SEQ ID NO: 37851 - DNA, 110 bp, synthetic construct
  source 1..110: mol_type = other DNA
gggatgctcaccagctttctaatcggccggaagtaactccagaatccagcgagtggaagaaaatgactgtagatgcagcctgaggaagggctccgaaattttgtgccctg

SEQ ID NO: 37852 - DNA, 110 bp, synthetic construct
  source 1..110: mol_type = other DNA
cagtggaaactccctagggcacgtgcgtcttagaatttgaggaaattaccaagcgttttagggtatgagctcagggcctccaacactttgatttgaatgtagactctgcc

SEQ ID NO: 37853 - DNA, 110 bp, synthetic construct
  source 1..110: mol_type = other DNA
tgtaagcccagagataaccattgttggttattgtgcataatcctctcattctaagagctacatttcagcatttaagttagggttgtggcaactattcgcttttgtatcct

SEQ ID NO: 37854 - DNA, 110 bp, synthetic construct
  source 1..110: mol_type = other DNA
ccggagttggcgtgatctgtggcatagattgcagacacagcccagatcctatgtggctgtggcgcaggccataaattacagctccgattcgatccctagcctgggaacct

SEQ ID NO: 37855 - DNA, 110 bp, synthetic construct; identical to SEQ ID NO: 37854
  source 1..110: mol_type = other DNA

SEQ ID NO: 37856 - DNA, 110 bp, synthetic construct
  source 1..110: mol_type = other DNA
agttgggctgaaagctgctccagtggatagatgaagcttgtttccagccctggcggcagatggttctgtggccactcagggtccctcacagtgccagtcatccaagtctt

SEQ ID NO: 37857 - DNA, 110 bp, synthetic construct
  source 1..110: mol_type = other DNA
tggttgggtccctgaaggtcatcacagtctttctccttagaggtcctgccctcccatcagagtgttgccagggaacacggccacttaggagagcctagaactctgttctt

SEQ ID NO: 37858 - DNA, 110 bp, synthetic construct
  source 1..110: mol_type = other DNA
tccctcccccctccttccttaaatgtgctcaggacaaaaatgtgtgcttctaccagtagccagacagcctgctccgtcaggacgttgagaggaagatgcgctgaccccac

SEQ ID NO: 37859 - DNA, 110 bp, synthetic construct
  source 1..110: mol_type = other DNA
gtagccagacagcctgctccgtcaggacgttgagaggaagatgcgctgaccccacagcagctactggacaggcctctgggcaccacgggagccccagcctcatgctctgc

SEQ ID NO: 37860 - DNA, 110 bp, synthetic construct
  source 1..110: mol_type = other DNA
gctcatggctgtcttttttccaagacagctgtgcttttgggtatttgagcctcttgggtggccttaaaccccagccctggggtggggagagacattacctggctgtctcc

SEQ ID NO: 37861 - DNA, 110 bp, synthetic construct
  source 1..110: mol_type = other DNA
aagttccacgagagtacgtggttttgtctgttttgatcactactgtatccccagcacctggctcatggaaagctctcactaagtatcttttttgaacagatgaatagtag

SEQ ID NO: 37862 - DNA, 110 bp, synthetic construct
  source 1..110: mol_type = other DNA
acctggctcatggaaagctctcactaagtatcttttttgaacagatgaatagtagcgtggtgttcacaagaacctattctcccctcttctcatctaaacttctgatccca

SEQ ID NO: 37863 - DNA, 110 bp, synthetic construct
  source 1..110: mol_type = other DNA
ctccatctctaggtgtggctgcagtttgtcaccaggtcaggatttcgatcacagcctggaatcaccagggaatggcgacacccctctgagaattgcccacggcaaaggtc

SEQ ID NO: 37864 - DNA, 110 bp, synthetic construct
  source 1..110: mol_type = other DNA
gagataaatttgaaatccagttttgacagtagccagctagcccaggaatgccacgtgattagtgcagagttttagactttgggaggtcaggatgccacgaagccagcctg

SEQ ID NO: 37865 - DNA, 110 bp, synthetic construct
  source 1..110: mol_type = other DNA
ccacccagcctctcttttatagtaatagcctatccggcacggaaaggaacaacaacgacaaaaaattgctgtcttttgcgccgtaattaaagtattgctttctcaataaa

SEQ ID NO: 37866 - DNA, 110 bp, synthetic construct
  source 1..110: mol_type = other DNA
gcaaattcaaccaaccacccattgtgtagcactgtagtatttgctactgaaaacaatttccacttaagcttgattgaaaaattcccatttaaggactgattcaacctgtg

SEQ ID NO: 37867 - DNA, 110 bp, synthetic construct
  source 1..110: mol_type = other DNA
ctttgtagcggtcctccttctggaatgttctatgcattctcctttgtatttatgaagactgactgctctgatgcgacttatttacagtatcccattgggtaagctacatg

SEQ ID NO: 37868 - DNA, 110 bp, synthetic construct
  source 1..110: mol_type = other DNA
agactgactgctctgatgcgacttatttacagtatcccattgggtaagctacatgttctcattctacgtaatttaaatatttctcatttcacttttctctttattagcta

SEQ ID NO: 37869 - DNA, 110 bp, synthetic construct
  source 1..110: mol_type = other DNA
gcagggggtgctgtactggctcccgttaccttccctctaggcgggcagcttggactgggagtggagtgcactgatgcatgcatggggggatctggtgaaaatgggactgt

SEQ ID NO: 37870 - DNA, 110 bp, synthetic construct
  source 1..110: mol_type = other DNA
gcccagcaacacaaagggtgagccaggaaaaacaacaacaataacaagactctgtatcttattttgtaactgcacccagaatatatttttcaaatgataggggagaattg

SEQ ID NO: 37871 - DNA, 110 bp, synthetic construct
  source 1..110: mol_type = other DNA
tgcagagaccactctgcctttggctctcagacctaggacaaaccagctgaaattggtccttattacacagtcagccctgcagggaccagaccctatggacatgcaggctg

SEQ ID NO: 37872 - DNA, 110 bp, synthetic construct
  source 1..110: mol_type = other DNA
gctcaccgacagtattcacaaaggcaggggatgcctttgagacagaagctaaaggtggtgggatgtgtgggtgtctaggtgagactggcaggagacacaaaaacagaaag

SEQ ID NO: 37873 - DNA, 110 bp, synthetic construct
  source 1..110: mol_type = other DNA
cttccaccctccactcccaagaaccaggagtttcagtcccctgtccttagagcgtctccaggcagctcacacatcattagatggttcttgattgtttgctttcatcttga

SEQ ID NO: 37874 - DNA, 110 bp, synthetic construct
  source 1..110: mol_type = other DNA
tatagtggagatgacggttctgatgtgtcccttttttctgatctgaagaccctgtctgttttgtatgctccctacctactatagggaatagctttagcatctctggtaaa

SEQ ID NO: 37875 - DNA, 110 bp, synthetic construct
  source 1..110: mol_type = other DNA
ctgttttgtatgctccctacctactatagggaatagctttagcatctctggtaaatggtcatcttttttttttttttttgctttttagggctgcacctgcagcatatgga

SEQ ID NO: 37876 - DNA, 110 bp, synthetic construct
  source 1..110: mol_type = other DNA
aagattcctggatgtaaaaggtcagatgacttccccagaggacaccaattgaaatcctgaagcaggtgatactacatcaaggcacggcactccctcggcgagcttgccaa

SEQ ID NO: 37877 - DNA, 110 bp, synthetic construct
  source 1..110: mol_type = other DNA
ggaaagtgggcaggtggcaaagggacaaggtcagcctctccactgcctcggttattgtgcctttgtgattccagctcctccagcctgaagcaggggaggaggtgtctctt

SEQ ID NO: 37878 - DNA, 110 bp, synthetic construct
  source 1..110: mol_type = other DNA
ttaaccagatgagcaaaccttttttttataataagctgtgccctgaaaaatgacagtggttttcagtggctgttcagatgttctgtgatggcctttgctgtggtggaatt

SEQ ID NO: 37879 - DNA, 110 bp, synthetic construct
  source 1..110: mol_type = other DNA
gtggttttcagtggctgttcagatgttctgtgatggcctttgctgtggtggaatttcccttgcagagctgtaggcctaaactggggtcctgcatttaatatgtacctttt

SEQ ID NO: 37880 - DNA, 110 bp, synthetic construct
  source 1..110: mol_type = other DNA
tattagcattatctgtgaggagaagaaaggtgctctaggaagactctttgccatgttttttctgctagatgttaagctgtaatgggttgtattgctttgtgttggtagct

SEQ ID NO: 37881 - DNA, 110 bp, synthetic construct
  source 1..110: mol_type = other DNA
tttagtctactgtctgatagatgatcttcagggggaatttaccacaggtgtattaaggtgcctttgcaacagattggtgagagggcatcaaaaaatgtgagaatcttaat

SEQ ID NO: 37882 - DNA, 110 bp, synthetic construct
  source 1..110: mol_type = other DNA
caaccaacagtatatttagacaaggcacattttctatccgacagttttaggtcgtcaaagttttcttaagctgaaatttcaatcatagtttttcttcccattgaccttaa

SEQ ID NO: 37883 - DNA, 110 bp, synthetic construct
  source 1..110: mol_type = other DNA
gaacatgggatctcagctctgactgcgacactcacccacccgcgcacggttcaggcccagagcttcgcaaggattactgctctgatgtcttctcgggagagcacaggaga

SEQ ID NO: 37884 - DNA, 110 bp, synthetic construct
  source 1..110: mol_type = other DNA
cccagagcttcgcaaggattactgctctgatgtcttctcgggagagcacaggagaagttagccctgaggtcatctctgtgataacttcctcaccatcctgaacatttcag

SEQ ID NO: 37885 - DNA, 110 bp, synthetic construct; identical to SEQ ID NO: 37883
  source 1..110: mol_type = other DNA

SEQ ID NO: 37886 - DNA, 110 bp, synthetic construct; identical to SEQ ID NO: 37884
  source 1..110: mol_type = other DNA

SEQ ID NO: 37887 - DNA, 110 bp, synthetic construct
  source 1..110: mol_type = other DNA
tccagaagcttaaagaataaactaagccagtgtctgcagtggggaaacagagtaacgctgttggaactgcacctctgagcttcacatctggagaaaactgaagattacaa

SEQ ID NO: 37888 - DNA, 110 bp, synthetic construct
  source 1..110: mol_type = other DNA
agagatggtaacaggtaggaagaagtgggttggaaagcagagacattgagggcgatgaacgttaccccttggggtgtcttctcagtgcatttggcaagaaaagccttgtg

SEQ ID NO: 37889 - DNA, 110 bp, synthetic construct
  source 1..110: mol_type = other DNA
cagtggaaagatacacagttgatccctgaacaacatgggtttgaactgtgtaggtccacttatatacagatagttttaaatagtcaatactgcagtgcgtgacctgtact

SEQ ID NO: 37890 - DNA, 110 bp, synthetic construct
  source 1..110: mol_type = other DNA
actataaacattcttctcatagcatcattatggctctcggctgttatttattcctgctgaggaaccttaaaaatgtagctgctgtgtatcttatcatttaaaaaaaatgg

SEQ ID NO: 37891 - DNA, 110 bp, synthetic construct
  source 1..110: mol_type = other DNA
tgactgttgtatgtgccattggtctcccaggctgtagctctcagagaggatcaaattgaaacacataagtactaactaggattcagtcctcttgactggaagtcacagct

SEQ ID NO: 37892 - DNA, 110 bp, synthetic construct
  source 1..110: mol_type = other DNA
aactggtttccccttccttcctgtgtattgatattactgatcattttatcagcttggaaagctacaagtgagatcgacaacctaagcagcactgagcaaaagtcgctttt

SEQ ID NO: 37893 - DNA, 110 bp, synthetic construct
  source 1..110: mol_type = other DNA
ttaaattccacaagacaaagatcttgtctattttatttactaatctgtactcagagcttgatgataatagatatgatacatacatcccagtttatggtgtagacaccaag

SEQ ID NO: 37894 - DNA, 110 bp, synthetic construct
  source 1..110: mol_type = other DNA
tgtactcagagcttgatgataatagatatgatacatacatcccagtttatggtgtagacaccaagtgaatattcgtagaatgaaatgattagtaaacttacatataaatg

SEQ ID NO: 37895 - DNA, 110 bp, synthetic construct
  source 1..110: mol_type = other DNA
atttaaatcaccccaaagagaagtcccgtctccattagcagttacttgccttctctctacccccctcccagcttctagcaactgctgatatactttctatgtctctagat

SEQ ID NO: 37896 - DNA, 110 bp, synthetic construct
  source 1..110: mol_type = other DNA
gcaacataaaatgctgacacgtcacaatgcgatagagccccacgtccatcacactgtatgtgccagagcccatggtggctcatgacagctggaagcaaaacttgcagtga

SEQ ID NO: 37897 - DNA, 110 bp, synthetic construct
  source 1..110: mol_type = other DNA
gtatgtgccagagcccatggtggctcatgacagctggaagcaaaacttgcagtgagagagaatgactagtgaatggagtgtccagttcagagcgcactgccctgactgcg

SEQ ID NO: 37898 - DNA, 110 bp, synthetic construct
  source 1..110: mol_type = other DNA
actatacggtgggccctcaatccatcacagatgtcctgagaaaaggaagctacaggagatttcagacagaagagcagagagctctgtgacaggctcagagaagatgtccc

SEQ ID NO: 37899 - DNA, 110 bp, synthetic construct
  source 1..110: mol_type = other DNA
gagatttcagacagaagagcagagagctctgtgacaggctcagagaagatgtcccatagccagcgctggatggagaaggggccacgagccaaggaatgccagccactctg

SEQ ID NO: 37900 - DNA, 110 bp, synthetic construct; identical to SEQ ID NO: 37898
  source 1..110: mol_type = other DNA

SEQ ID NO: 37901 - DNA, 110 bp, synthetic construct; identical to SEQ ID NO: 37899
  source 1..110: mol_type = other DNA

SEQ ID NO: 37902 - DNA, 110 bp, synthetic construct
  source 1..110: mol_type = other DNA
aacagggctcaatgtagaacccagggccccagatttcgatgcggctgcctgtgttggggcataattgatggggctaatggctgtgctggcaagtcacggctagctcccca

SEQ ID NO: 37903 - DNA, 110 bp, synthetic construct
  source 1..110: mol_type = other DNA
ggggcataattgatggggctaatggctgtgctggcaagtcacggctagctccccaaaggtccatgaacctggcaggaatcctggccatcccctgaaaatgagggacagta

SEQ ID NO: 37904 - DNA, 110 bp, synthetic construct
  source 1..110: mol_type = other DNA
tagtagttaccatttcctttgctcgtcgttacttagtacagatctgtttctatatctagaatgattttccttctgcctaaagtattccctttaacatttcttgtgctaca

SEQ ID NO: 37905 - DNA, 110 bp, synthetic construct; identical to SEQ ID NO: 37904
  source 1..110: mol_type = other DNA

SEQ ID NO: 37906 - DNA, 110 bp, synthetic construct
  source 1..110: mol_type = other DNA
tgattcagaagcacctactaaaatcacacttattgagaggaagtgaggagggtggtagaagggaatacagcaaggagctgagttttcatccaggttagcatggaaaaccc

SEQ ID NO: 37907 - DNA, 110 bp, synthetic construct
  source 1..110: mol_type = other DNA
cattgtcagcaggaagcagagcaggagtgggcctacgatacagctgggaaacagaggtgagggagaggagcagtaggcagggctgacacagtagaaaggagccaacacca

SEQ ID NO: 37908 - DNA, 110 bp, synthetic construct
  source 1..110: mol_type = other DNA
ctgtagctcagaaccactcagactcactatggacttcctcacatggagtctcagctcagcccctcctgcaaaggagctataatacatactcttagactaatgattgttga

SEQ ID NO: 37909 - DNA, 110 bp, synthetic construct
  source 1..110: mol_type = other DNA
tcagcccctcctgcaaaggagctataatacatactcttagactaatgattgttgatgtatgaacaaattacgttcattttgctcatggctaaattccatccgcagactcg

SEQ ID NO: 37910 - DNA, 110 bp, synthetic construct
  source 1..110: mol_type = other DNA
tcagtctgacttctgcctcataatcatcaaaactgtccttggtgaagacaactagtgacctcctcgtccatagaccctttgccgtcctcagcttacctgagccctcagtg

SEQ ID NO: 37911 - DNA, 110 bp, synthetic construct
  source 1..110: mol_type = other DNA
tgacctcctcgtccatagaccctttgccgtcctcagcttacctgagccctcagtggcactacatacagtcgaccacatcctccttctgaaatcatctgtttccttagcta

SEQ ID NO: 37912 - DNA, 110 bp, synthetic construct
  source 1..110: mol_type = other DNA
gcttagcttccgtttacactaagctgctactgcaaagaaaataattacttgccacagtaactttaaggttgatgttctactttacaactgaagtcacttgcttttttatt

SEQ ID NO: 37913 - DNA, 110 bp, synthetic construct
  source 1..110: mol_type = other DNA
cacacgactcatcttgtatgcagccagcctctactgagcacactgtgggcccggagagtgtgaccctgagtaagacacagtcatttgcttctaagaaatccttgttagag

SEQ ID NO: 37914 - DNA, 110 bp, synthetic construct
  source 1..110: mol_type = other DNA
cacctccatccaggtaagacatcgcagatttaaaagtctaaaacactactcttttatctccacccagctgcctttccccacctctaacccactgcctccagtttctcagg

SEQ ID NO: 37915 - DNA, 110 bp, synthetic construct
  source 1..110: mol_type = other DNA
ttgctctcactcactgctgcatttgggagtgcagacagggatctagccacagaatctggggaggtgtggattcagcacttagggcattgggtgtgcctgcagacccagag

SEQ ID NO: 37916 - DNA, 110 bp, synthetic construct
  source 1..110: mol_type = other DNA
tgtggaacctcccaacaggaatgtctgcttggaagctggtcttagcagagctctaagaacagaatcctgagggcaaggccagcaagaagaaagccagcagacagcgtgac

SEQ ID NO: 37917 - DNA, 110 bp, synthetic construct
  source 1..110: mol_type = other DNA
tctgttatttgctcagcgtccccagctggtaggtagcagacgctggattccaatctaggccctccaactctggagtcttcaccattgctgccttcccatatcacgtcact

SEQ ID NO: 37918 - DNA, 110 bp, synthetic construct
  source 1..110: mol_type = other DNA
ggtcagggcaagccccagaggggataactgtgagttaagacttgaaggaggtgcacagagatattgggggtagagcattccagggagaggaagcagcaagtacaaaggcc

SEQ ID NO: 37919 - DNA, 110 bp, synthetic construct
  source 1..110: mol_type = other DNA
cagagatattgggggtagagcattccagggagaggaagcagcaagtacaaaggccctggcgcagggctggacctctatgaggtgggtatggtcttgttcctggctgcatc

SEQ ID NO: 37920 - DNA, 110 bp, synthetic construct
  source 1..110: mol_type = other DNA
tgctaatcatcttacttacaataacctccagatcagctagtaaatgttgcttgctttctgttcattggaatcctgtacaagtcaaatgatatacgggtaaggaagaaata

SEQ ID NO: 37921 - DNA, 110 bp, synthetic construct
  source 1..110: mol_type = other DNA
catgtgacccagagtcaggtggccacgacagctgcccatcatagaaaggccccctgtcatgccaagcagatcatctgctcatgctctaaggattgcttgcatcttgatta

SEQ ID NO: 37922 - DNA, 110 bp, synthetic construct
  source 1..110: mol_type = other DNA
acagcgggtgctgggtgaataggcttcagcttcagggcttgccaatttatgttagctctgtcactggaaacccagtgcatacctgccaggtgagccttgctggtagttta

SEQ ID NO: 37923 - DNA, 110 bp, synthetic construct
  source 1..110: mol_type = other DNA
ctctgtcactggaaacccagtgcatacctgccaggtgagccttgctggtagtttatgctctcagtgaattcacattcttgttgggaaatgatcccgtgttcaactatgaa

SEQ ID NO: 37924 - DNA, 110 bp, synthetic construct
  source 1..110: mol_type = other DNA
gcaccgctgagcaggagtccccagtgcctgggccgcttggttctccatctcaggcctgaggccccagcagcaggagcaggtgctgtagaactgactttagggacaggact

SEQ ID NO: 37925 - DNA, 110 bp, synthetic construct
  source 1..110: mol_type = other DNA
ctgaggccccagcagcaggagcaggtgctgtagaactgactttagggacaggacttctgcaggtggtcaggacgcaacaaccctaagacctgcattctccaggggagtct

SEQ ID NO: 37926 - DNA, 110 bp, synthetic construct
  source 1..110: mol_type = other DNA
cgaagcctgacaatggagagtacaggctgcagaagaatccaactcttcacaccagaagagtctcagtttttacgtgcaagcttcgagtgagccagagtaaaagcaaagtg

SEQ ID NO: 37927 - DNA, 110 bp, synthetic construct
  source 1..110: mol_type = other DNA
taacagcggtcacttttggcggtgtttggagcttgagggaggagccctattaaccctcatactatactcttctaaactgttctatttactgggcatgtattatttctata

SEQ ID NO: 37928 - DNA, 110 bp, synthetic construct
  source 1..110: mol_type = other DNA
ctcatactatactcttctaaactgttctatttactgggcatgtattatttctatacttttatttatttatttatttatttgctttttagggccgcacctgccgcatatgg

SEQ ID NO: 37929 - DNA, 110 bp, synthetic construct
  source 1..110: mol_type = other DNA
aagcagctcttgacacagccacagcagttacagagagagaggctcttaggccaggtagtcacaagggaactccctgagagctttcctgaagacaccaatcaaacctgctg

SEQ ID NO: 37930 - DNA, 110 bp, synthetic construct
  source 1..110: mol_type = other DNA
tagtcacaagggaactccctgagagctttcctgaagacaccaatcaaacctgctgaattcatcagacctggtttcagtcatgcctccctagcctggcgccatactgaaaa

SEQ ID NO: 37931 - DNA, 110 bp, synthetic construct
  source 1..110: mol_type = other DNA
tattctgaattccctattttcctgcacccttgtgggcatgcagatacaccctcctctagaaatgaatccactcctatactgtgcatcctcaggctaccatttaaaaactc

SEQ ID NO: 37932 - DNA, 110 bp, synthetic construct
  source 1..110: mol_type = other DNA
ctagaaatgaatccactcctatactgtgcatcctcaggctaccatttaaaaactcttctaccagagatatttgttcaggagagactttaggattgctttatctatccatt

SEQ ID NO: 37933 - DNA, 110 bp, synthetic construct
  source 1..110: mol_type = other DNA
ctggaaacaatccaatctgactgactctaggttcataaacagttaacctgggacgagcaggtacctggcagctcttgcactggctcaactctgtgctgttactgggagaa

SEQ ID NO: 37934 - DNA, 110 bp, synthetic construct
  source 1..110: mol_type = other DNA
gatgagggaagtgttctagagccttaactgtgggttgtgttcggtagcgggaccaagctggaaatcaaacgtaagtgcacttttctactcctttttctttcttatacggt

SEQ ID NO: 37935 - DNA, 110 bp, synthetic construct
  source 1..110: mol_type = other DNA
ttcaagtgtgtgtttatgttgtctcattaaactcttgggggatcgcagggctactttttttcagccctaaagctaaccaatagctaacactcatgagcagaaaaatggaa

SEQ ID NO: 37936 - DNA, 110 bp, synthetic construct
  source 1..110: mol_type = other DNA
gatttagccaagaggaagatggccatgagggaggtggttgagggaagaagctgaacattatttcactgcacagcctctctctcagcttgacttttgagcttctgccagtt

SEQ ID NO: 37937 - DNA, 110 bp, synthetic construct
  source 1..110: mol_type = other DNA
caaacttaattggtagagattttagctgctttttaaagaagtcttgaatatttcgattggtacttaaatatttcctctaaagatggggggattcattagaagtgatgtct

SEQ ID NO: 37938 - DNA, 110 bp, synthetic construct
  source 1..110: mol_type = other DNA
taaagtgtacgctcttcttttttttttttttggtctgttgggttttttggcctagcctggggcatgcagaagttcccaggtgcggaattgaacccacgctgcagtagtga

SEQ ID NO: 37939 - DNA, 110 bp, synthetic construct
  source 1..110: mol_type = other DNA
ttttttggtctgttgggttttttggcctagcctggggcatgcagaagttcccaggtgcggaattgaacccacgctgcagtagtgaccagagccactgcagtgacaatgct

SEQ ID NO: 37940 - DNA, 110 bp, synthetic construct
  source 1..110: mol_type = other DNA
tatagccagtttaaaaccatgacaaaatactgttttgcatcttatcaagctggaaaaaatcttagaaattcataatatccatgtgctggtgaagaaatgggaaaaggggt

SEQ ID NO: 37941 - DNA, 110 bp, synthetic construct
  source 1..110: mol_type = other DNA
agagaggatactatcatgccttattcaggttttcatttcccctaagtgctgtggggacttgggttcaatccctggcctcagctctttgggttaaggagccggcattgctg

SEQ ID NO: 37942 - DNA, 110 bp, synthetic construct
  source 1..110: mol_type = other DNA
gatttctgccatgccaagaatttggaagttattacttccatgctcacactaagaaaaagctgagcaaactgaaaatcaacaattttccttagattcatcagaaaactgat

SEQ ID NO: 37943 - DNA, 110 bp, synthetic construct
  source 1..110: mol_type = other DNA
aaagctgagcaaactgaaaatcaacaattttccttagattcatcagaaaactgatgcctctaaaactggaaagagagacgaacattgagaatcacagtttagtgagaggg

SEQ ID NO: 37944 - DNA, 110 bp, synthetic construct
  source 1..110: mol_type = other DNA
taggggcaaatccaaaaggtttcagcctattgtattaaacaggtcgtatcttctaggagcttagaggcagggaggtcatgtcttacatggataaccataacacagggcag

SEQ ID NO: 37945 - DNA, 110 bp, synthetic construct
  source 1..110: mol_type = other DNA
cctgcagacagagtcggggctgtaagacttccattgtttactttataaattctgaatcatttggagctctagtgtgcatatattccagtagaggtccgattcaacaatta

SEQ ID NO: 37946 - DNA, 110 bp, synthetic construct
  source 1..110: mol_type = other DNA
atcatttggagctctagtgtgcatatattccagtagaggtccgattcaacaattatgcaacaaacaagtcaaatcaaatcaaatgtctcatcttggagttcccactgtgg

SEQ ID NO: 37947 - DNA, 110 bp, synthetic construct
  source 1..110: mol_type = other DNA
tgagtcgcagctgtgaaaacgtggaatcctcaaccgctaggccaccagagactacctagacattttgctttttatgttttgtgacaacttgactgcttaatcaacagttc

SEQ ID NO: 37948 - DNA, 110 bp, synthetic construct
  source 1..110: mol_type = other DNA
aactggaattgggactgtggggataaatgatgatcagcactccattctggatcccagaccctgcccagctctaatgcttggcaattctgtagctcagccaattgagccac

SEQ ID NO: 37949 - DNA, 110 bp, synthetic construct
  source 1..110: mol_type = other DNA
gttcctcctgaggtattgggaataaaaatcctaaattaagtctggggcttgatcgaggtagtttgtgcaaagagctgggcatataagtatgccatccacaaatggcctct

SEQ ID NO: 37950 - DNA, 110 bp, synthetic construct
  source 1..110: mol_type = other DNA
ccagtttctattcccaaaaaggatacatggcaacaattcctgatgtatccacgtgctacatatacctagggtctcagccccagtgtgcgggggaccacagcccctcaggt

SEQ ID NO: 37951 - DNA, 110 bp, synthetic construct
  source 1..110: mol_type = other DNA
ctacatatacctagggtctcagccccagtgtgcgggggaccacagcccctcaggtacacgtcacaagagctctgtcccagacagaagcatcctctgcactgtgagctgaa

SEQ ID NO: 37952 - DNA, 110 bp, synthetic construct
  source 1..110: mol_type = other DNA
acatcagccataagactagtctagtcctgttaaactgacatgtttataagtgagtcacaagattctgaagggaaaccagctatctttaaactttcactggtgtgagactt

SEQ ID NO: 37953 - DNA, 110 bp, synthetic construct
  source 1..110: mol_type = other DNA
cacaagattctgaagggaaaccagctatctttaaactttcactggtgtgagacttggtgctacttgctttgaggttacaaacagtaaactcaggtatttacccttaaggt

SEQ ID NO: 37954 - DNA, 110 bp, synthetic construct
  source 1..110: mol_type = other DNA
tccaaataaacttccttgaagactctgtctcttataccttttgaatattccttactgtgttaagcagaccattgggcagttaacatacaccagtaataaaaatatctaaa

SEQ ID NO: 37955 - DNA, 110 bp, synthetic construct
  source 1..110: mol_type = other DNA
tgtgttaagcagaccattgggcagttaacatacaccagtaataaaaatatctaaagagtaaaggtgtctcaaaattacaagactgcttaatactgcttaaaggtacagac

SEQ ID NO: 37956 - DNA, 110 bp, synthetic construct
  source 1..110: mol_type = other DNA
tgtgccatggtcagatcacatgccatcgtagcttcaggtgatcagaggcaggaagagtttactcctggaggaaaagtgacttattatttgcttgctctacccttgttgac

SEQ ID NO: 37957 - DNA, 110 bp, synthetic construct
  source 1..110: mol_type = other DNA
tagttcacagttctccggggcaaacaagtcacagtgatgccgaggcttgttcatgtgccagtaaatattgtcagaccaccgcttatgaaaggaaggggagatcatacggc

SEQ ID NO: 37958 - DNA, 110 bp, synthetic construct
  source 1..110: mol_type = other DNA
tgccagtaaatattgtcagaccaccgcttatgaaaggaaggggagatcatacggctcatatagcagtaatgaagatatggaaccagattggttaacttggcctgctgata

SEQ ID NO: 37959 - DNA, 110 bp, synthetic construct
  source 1..110: mol_type = other DNA
tggaaatagaacaattactaggaagctataagctaaagagttcccagagctaacaaaggattgagaggtggtagagttctgaacagacccagaaaagagactttgttgaa

SEQ ID NO: 37960 - DNA, 110 bp, synthetic construct
  source 1..110: mol_type = other DNA
aaggattgagaggtggtagagttctgaacagacccagaaaagagactttgttgaatgtctgggaccccagaagggtcatgcctggttttcgggtgaaagtattcctaaat

SEQ ID NO: 37961 - DNA, 110 bp, synthetic construct
  source 1..110: mol_type = other DNA
gctcggttgattgtggacccatacaggtgccttttgggatggatttaaccgtcatgggcagtgacgtggttcattctgtgttcaggctgggatcatagaagagatgttag

SEQ ID NO: 37962 - DNA, 110 bp, synthetic construct
  source 1..110: mol_type = other DNA
actctttctgaggcagtgacccacaaccttatgctttatggcattaccatgtttttagcttttgttgtgctaccacactgtgaaagtgcctgaatttccttttttactat

SEQ ID NO: 37963 - DNA, 110 bp, synthetic construct
  source 1..110: mol_type = other DNA
gaaaaaagaaaaaaaaaagagtcacagacataggaaaatcaagtaggatatatgacgcaggaggaaataccaacaggctgttggaggttgggggagagggaggattgggg

SEQ ID NO: 37964 - DNA, 110 bp, synthetic construct
  source 1..110: mol_type = other DNA
aactccagagatacttttgtcaggaccctgctatgaattctccaggtgtttgtaccttcttgaccttgagtgaaaagtgaatgactgggaacttggatgcgggtagatgt

SEQ ID NO: 37965 - DNA, 110 bp, synthetic construct
  source 1..110: mol_type = other DNA
ccaatgtgccagagtagaaaaagcatcacctgtgattgacacctcactctgctgcttgttccgagtggcttagagaaggttgcttcttggaacttgggttctaaactctt

SEQ ID NO: 37966 - DNA, 110 bp, synthetic construct
  source 1..110: mol_type = other DNA
ttgttccgagtggcttagagaaggttgcttcttggaacttgggttctaaactcttatttagtggcagcaacagaaattcttgcccagagttgagggaatttcacgtgcag

SEQ ID NO: 37967 - DNA, 110 bp, synthetic construct
  source 1..110: mol_type = other DNA
gctggttatcttttgagatacagagatagactgaaaaggcaaatcctccttgtaaagaccaaccagaggaccgcaactttacgccgtctccagagtgctggcgggaccat

SEQ ID NO: 37968 - DNA, 110 bp, synthetic construct
  source 1..110: mol_type = other DNA
acttgaccaaggcaccctatgaggactctggcttctctgtctcagcttgccagctaaagcagctaaagcacgctggagttccaggaggagccacccagcgcctgaatatt

SEQ ID NO: 37969 - DNA, 110 bp, synthetic construct
  source 1..110: mol_type = other DNA
aaagcagctaaagcacgctggagttccaggaggagccacccagcgcctgaatatttgaaagggaccaaccctggacttgtaaaactgtagccgagtttttttcaagtact

SEQ ID NO: 37970 - DNA, 110 bp, synthetic construct
  source 1..110: mol_type = other DNA
tgtcaagacctgttttcttacctataaagtagtgtctaaggccccttccagtgttaacatgtcagcactccactactttttcttcagggcttgggcaccaatttgggttc

SEQ ID NO: 37971 - DNA, 110 bp, synthetic construct
  source 1..110: mol_type = other DNA
ccacagtcacatctgacttgtctcgagccctgactgttctgcatgtggaagccattcctgcaaactagctgacaccatagtagcccagcataggcacagggtcggctgct

SEQ ID NO: 37972 - DNA, 110 bp, synthetic construct
  source 1..110: mol_type = other DNA
tgactccaaggcgtttccactaaaaagctgtggaccagtgaaggctacaaaataaagaaagtaagagagaaatggcagaggctgtgatgcaggcggtccacatcccccat

SEQ ID NO: 37973 - DNA, 110 bp, synthetic construct
  source 1..110: mol_type = other DNA
aagataggacgcttccaagaggtgcaagtaggcaagcacagaagctctgccccaaggatctgaggatctgatgggctacagttttatcatccaaggggagaagggatcgg

SEQ ID NO: 37974 - DNA, 110 bp, synthetic construct
  source 1..110: mol_type = other DNA
ccttctccgggccggggggatgcctgggtttgctggggactccaggagcctcctggccaggtaagggtcaggaagtcagctcggcagcataatcagagacagtgtttctt

SEQ ID NO: 37975 - DNA, 110 bp, synthetic construct
  source 1..110: mol_type = other DNA
gccaggtaagggtcaggaagtcagctcggcagcataatcagagacagtgtttcttgaagggagcagccttgcctatgcccagccacgtggctcctttgcaccctcccaac

SEQ ID NO: 37976 - DNA, 110 bp, synthetic construct
  source 1..110: mol_type = other DNA
cttgagggtgtggaggttgaggaagacatggtgactaaactggacgctgtgaatgtaggcgtgagacttcaaaccccgacctatggggaaggatgaaaggctgtgagaag

SEQ ID NO: 37977 - DNA, 110 bp, synthetic construct
  source 1..110: mol_type = other DNA
taggcgtgagacttcaaaccccgacctatggggaaggatgaaaggctgtgagaagggcggactccggaagagcaaggagcagtgtggctttcattactctgtaccacaac

SEQ ID NO: 37978 - DNA, 110 bp, synthetic construct
  source 1..110: mol_type = other DNA
agaaagatgatgccagaactaaactgagaggatttctcgtcctgccttggttcggactacagagccccagcttctaacctcaccccccacccctgagctgtgaacagacc

SEQ ID NO: 37979 - DNA, 110 bp, synthetic construct
  source 1..110: mol_type = other DNA
gtcttccttcataccttcatcttctcagatctgaatatagcaaatgtatacacatacacacccacaccctcattgttttcctctagcaataggcttttaccatctttacc

SEQ ID NO: 37980 - DNA, 110 bp, synthetic construct
  source 1..110: mol_type = other DNA
acacacccacaccctcattgttttcctctagcaataggcttttaccatctttacctgacaatgaccccagggcggaggtcaaaattcttcttcacaatctctaatagctc

SEQ ID NO: 37981 - DNA, 110 bp, synthetic construct
  source 1..110: mol_type = other DNA
ttatgctcccgaaaaggccacccatcaatgagaatgaccccacttcaagttcatggtttatagctctgctgggctcaccctgcaccacccatcaatttatgtctacttat

SEQ ID NO: 37982 - DNA, 110 bp, synthetic construct
  source 1..110: mol_type = other DNA
gtttatagctctgctgggctcaccctgcaccacccatcaatttatgtctacttattcttagttggctccgactctcactccccagttattctcaactaggaccttgttca

SEQ ID NO: 37983 - DNA, 110 bp, synthetic construct
  source 1..110: mol_type = other DNA
ctcggtatctgcctgcagggaaaatagctcagcctttagcatcaccttcctgattaaacctcatcatcctggggattggccctcagtttgccttccattccttggtttct

SEQ ID NO: 37984 - DNA, 110 bp, synthetic construct
  source 1..110: mol_type = other DNA
acggactcaccaggttaggataaaataataaagaatctgctccgttctcctaaatcatacctgctaagctctaagtgcagcccgctcttctcatccctgctgctggtacc

SEQ ID NO: 37985 - DNA, 110 bp, synthetic construct
  source 1..110: mol_type = other DNA
tagggcttgtggaaactgcagctcccagaaccaaaccacaagctctagaaggggtcgagcaggacagaggtgtcaaggtcattctcaatctcgagcagggccttcttttt

SEQ ID NO: 37986 - DNA, 110 bp, synthetic construct
  source 1..110: mol_type = other DNA
cccgatgcccagtcacccaagtaaatgccataggtcccatttgggggaaggccagaaggaatcattaccatgttcagttgctgtgtgtcaccgggtccttcctcctggag

SEQ ID NO: 37987 - DNA, 110 bp, synthetic construct
  source 1..110: mol_type = other DNA
aaggaatcattaccatgttcagttgctgtgtgtcaccgggtccttcctcctggagttccagcttcttctttagtaaataggttccgggttcaaaaacagcatagaggagt

SEQ ID NO: 37988 - DNA, 110 bp, synthetic construct
  source 1..110: mol_type = other DNA
gactcgcttctccatgaagatggagtaaagaatggatcaagtgtaactcttcagggtactgttattggattctttcatacaacgcacaaggactcaaaggctaaagtatt

SEQ ID NO: 37989 - DNA, 110 bp, synthetic construct
  source 1..110: mol_type = other DNA
gtactgttattggattctttcatacaacgcacaaggactcaaaggctaaagtattcatggcccgtttgggttttcatattctcttggaaaaaacaacaacaacaaagaaa

SEQ ID NO: 37990 - DNA, 110 bp, synthetic construct; identical to SEQ ID NO: 37988
  source 1..110: mol_type = other DNA

SEQ ID NO: 37991 - DNA, 110 bp, synthetic construct; identical to SEQ ID NO: 37989
  source 1..110: mol_type = other DNA

SEQ ID NO: 37992 - DNA, 110 bp, synthetic construct
  source 1..110: mol_type = other DNA
gccaaagaacacttcattcctttccgacctctctgcagcaatactggacatatcctccttccagaaaatcaccttcctaagtttcagcaacaatgctctctctcctgatt

SEQ ID NO: 37993 - DNA, 110 bp, synthetic construct
  source 1..110: mol_type = other DNA
ccaatggtcaactaaaattattctcattcatgaccttcaactctctagaccccttcattctcaagctgcaccacctctgcaaacccccactcctgaaccaattgcatgac

SEQ ID NO: 37994 - DNA, 110 bp, synthetic construct
  source 1..110: mol_type = other DNA
ttgtgctttcacaaacctcagggtttggtctgtataaggttctgagtctctgatctgatggtcacctgcttggttccagctgctggcagctgtgtggacattccagattg

SEQ ID NO: 37995 - DNA, 110 bp, synthetic construct
  source 1..110: mol_type = other DNA
ttaaccactgcgccacgacgggaactcctctatctacattcttggtggactccgttcctttgtttctgctggcaccttatcagtgcttgtccactttgccattagctcct

SEQ ID NO: 37996 - DNA, 110 bp, synthetic construct
  source 1..110: mol_type = other DNA
tcctttgtttctgctggcaccttatcagtgcttgtccactttgccattagctcctggccaaagcagcctttggacaccaacatttgctttgttttctgactgtccgctgc

SEQ ID NO: 37997 - DNA, 110 bp, synthetic construct
  source 1..110: mol_type = other DNA
ttcctcccaatgaagtctttgaaaaagccaactacaagcttactgggaagggaataataatttataacagacaagcagaaaaaaaagtttgacttactaccattgcacct

SEQ ID NO: 37998 - DNA, 110 bp, synthetic construct
  source 1..110: mol_type = other DNA
attctatagtgaaagatttaatttcctcttttagggtcctaagtccatattctatttcttattatcatgcctgtatgcaatgtattttgaattcaaacggcctctcatag

SEQ ID NO: 37999 - DNA, 110 bp, synthetic construct
  source 1..110: mol_type = other DNA
attctggatgccaagaatcatggtttgtggtcatcctttccactgtcatgagttgatcatcctccttcattttagaataggcttccccatcatttgggttaatataagtc

SEQ ID NO: 38000 - DNA, 110 bp, synthetic construct
  source 1..110: mol_type = other DNA
tttaataaaaacaaacaaaaactctcccaaaccctcttcttttcatatgttctcactcctgccttctgtgattgtctggtgacgtctgagcagcagtcacagctgactag

SEQ ID NO: 38001 - DNA, 110 bp, synthetic construct
  source 1..110: mol_type = other DNA
ctcctgccttctgtgattgtctggtgacgtctgagcagcagtcacagctgactagtgaacttaccatgaacccacctcaagtaatttcatcctctgccctctgcggttcc

SEQ ID NO: 38002 - DNA, 110 bp, synthetic construct
  source 1..110: mol_type = other DNA
aaaaagcacagtccttaatatgtttgttccctcagctttcaactataaagaatgcttttcagagtgcctgttgtggttcagtgagttaagaatctgacatcgtgtccgta

SEQ ID NO: 38003 - DNA, 110 bp, synthetic construct
  source 1..110: mol_type = other DNA
ctttcaactataaagaatgcttttcagagtgcctgttgtggttcagtgagttaagaatctgacatcgtgtccgtaaggatatgggtttgatctctggctcactcagtggg

SEQ ID NO: 38004 - DNA, 110 bp, synthetic construct
  source 1..110: mol_type = other DNA
tgtgctatatacattttgcattttttatctcaaatacttccaacaaacctgaaattcccatttcatagctaaagaattaggctgcgaaaggtttacaagaactaaggcat

SEQ ID NO: 38005 - DNA, 110 bp, synthetic construct
  source 1..110: mol_type = other DNA
tatctcaaatacttccaacaaacctgaaattcccatttcatagctaaagaattaggctgcgaaaggtttacaagaactaaggcatgaaaatagtaaaaataaaaatggtt

SEQ ID NO: 38006 - DNA, 110 bp, synthetic construct
  source 1..110: mol_type = other DNA
ttgtaacaaaagaatcaatgtgtccaaaatgtcaggagtgcccagattgaggaggaagagtaaatgaataggaagtaggggacggctggctgctgggcagctttaaaggc

SEQ ID NO: 38007 - DNA, 110 bp, synthetic construct
  source 1..110: mol_type = other DNA
aagagtaaatgaataggaagtaggggacggctggctgctgggcagctttaaaggctcatttaaggttaggtttcatcaattccaagtgagaccagttagcatggttcatt

SEQ ID NO: 38008 - DNA, 110 bp, synthetic construct
  source 1..110: mol_type = other DNA
aagttgtttagtgatttgggttcctttttcttggtcatggtcttatcactcatcgtcccgcacagaacccagcttcctcttttttctggttccaaaagatctagaacttt

SEQ ID NO: 38009 - DNA, 110 bp, synthetic construct
  source 1..110: mol_type = other DNA
ggtttcttggcattctatgcatttctctcctgatgttcttgtcacattacatcaccaattctcctgtctgtcccccatgagagtctatgagcttgttgggatgagagatt

SEQ ID NO: 38010 - DNA, 110 bp, synthetic construct
  source 1..110: mol_type = other DNA
caattctcctgtctgtcccccatgagagtctatgagcttgttgggatgagagattctgattcattcatctttatatcttcagttcttaaatagtagctaccacctggtga

SEQ ID NO: 38011 - DNA, 110 bp, synthetic construct
  source 1..110: mol_type = other DNA
taaggcaggtactattccagaagaggactctgtagctaagagagattaggtaatacagattagatggctgtgttagttgcacagaaagtaggggtaaaaccaggactcaa

SEQ ID NO: 38012 - DNA, 110 bp, synthetic construct
  source 1..110: mol_type = other DNA
aaagtggaatttgaaagtgccacgcacagttggcccccctgagcttacttaagctaattggagacatctctgggacatcttctggttcccatttcaccaacagcaatgag

SEQ ID NO: 38013 - DNA, 110 bp, synthetic construct
  source 1..110: mol_type = other DNA
gaacaaatgtctgattccattatttaaatttaaaaataggcgaaaaatcctccatgctagaattcaggatagatttttccttttgaaaggcaggcagaggtagacttagg

SEQ ID NO: 38014 - DNA, 110 bp, synthetic construct
  source 1..110: mol_type = other DNA
tatggtgccaacaatcacctgggaaataagaattgttttaatcctttctccccagccatatacttaaaagtttgcagtgataaaaaatgttccctgcagtagctgcaact

SEQ ID NO: 38015 - DNA, 110 bp, synthetic construct
  source 1..110: mol_type = other DNA
ccatatacttaaaagtttgcagtgataaaaaatgttccctgcagtagctgcaactgatagacctgccatctggttacacagcagtggtagggagagtcatttctcttgat

SEQ ID NO: 38016 - DNA, 110 bp, synthetic construct
  source 1..110: mol_type = other DNA
gttcctataggacctggaaacgtgcatccagatggatttcagtccatagctacggattagtaacattacattccctccttcttgaaccagcatgtccatcatggttgtct

SEQ ID NO: 38017 - DNA, 110 bp, synthetic construct
  source 1..110: mol_type = other DNA
atccagctagatttacaagttaagacagatgctcattttgaacttgaatttttgtcttggtgataagcactatcatatgtgtgtgaacatgcctacaaatcaataagatt

SEQ ID NO: 38018 - DNA, 110 bp, synthetic construct
  source 1..110: mol_type = other DNA
aaagaagcctcagtggaaaaactatacatttatccattgcaggtaaggaaaaggtgagaattgataggataaccttatacacagaggaagagatagcaaacgtcattctc

SEQ ID NO: 38019 - DNA, 110 bp, synthetic construct
  source 1..110: mol_type = other DNA
aatgtcattttatagttgcccacacccaaggagctatgcaccattgctttcctcttttacaaatgacaaaattataaaatggaaaagacaaataacttgccctaatttac

SEQ ID NO: 38020 - DNA, 110 bp, synthetic construct
  source 1..110: mol_type = other DNA
gagttactttcctactcagcaatgggatagagtttttatgaataacttatgcagcattttccatgtttcaattacatttggagtagctgatgcataaactcattattgac

SEQ ID NO: 38021 - DNA, 110 bp, synthetic construct
  source 1..110: mol_type = other DNA
cttatgcagcattttccatgtttcaattacatttggagtagctgatgcataaactcattattgactcaggatccctgagttttaaagcagtttgcaaggtatttttaaat

SEQ ID NO: 38022 - DNA, 110 bp, synthetic construct; identical to SEQ ID NO: 38020
  source 1..110: mol_type = other DNA

SEQ ID NO: 38023 - DNA, 110 bp, synthetic construct; identical to SEQ ID NO: 38021
  source 1..110: mol_type = other DNA

SEQ ID NO: 38024 - DNA, 110 bp, synthetic construct
  source 1..110: mol_type = other DNA
attgtctgtaaatttcccctgcaatcttgctttatttttgtatcgtgcaattgcggtgcttgcttatactcagtttgtgtgctgcatgtctttcaattccacatatcaaa

SEQ ID NO: 38025 - DNA, 110 bp, synthetic construct
  source 1..110: mol_type = other DNA
gtcagattataagtgttggtccttatgccagctaagcaaccaatagagacctaaaaaattctttgcgaatcttctgtgagatacactgtaactgtgtgtgtgtatatgag

SEQ ID NO: 38026 - DNA, 110 bp, synthetic construct
  source 1..110: mol_type = other DNA
tgcttcactcattttggatacacagagcatctgtcatctccaaaagccttggtgagaggccaggtaacatatcttgaacatatagatggttaatgaccttggatgagctt

SEQ ID NO: 38027 - DNA, 110 bp, synthetic construct
  source 1..110: mol_type = other DNA
gaggccaggtaacatatcttgaacatatagatggttaatgaccttggatgagctttgactcataaggaatagaaactgaggaaaatcagcagataacatcctctcatcct

SEQ ID NO: 38028 - DNA, 110 bp, synthetic construct
  source 1..110: mol_type = other DNA
tagatttatacacctgagagggtatatacaattttggaacagtttcttttggagaccaaatctacattttgatatgcaggaggtagctctaatgaccagctatgtccagg

SEQ ID NO: 38029 - DNA, 110 bp, synthetic construct
  source 1..110: mol_type = other DNA
catacaggttctacacatcaatgactgcaatacaaacagcaattgtaaaagaggcagagtctatcaataacaaatcactaaggaataccaatgatgtttaacaaaattta

SEQ ID NO: 38030 - DNA, 110 bp, synthetic construct
  source 1..110: mol_type = other DNA
acagcaattgtaaaagaggcagagtctatcaataacaaatcactaaggaataccaatgatgtttaacaaaatttaaaaatatgttccacgttactagtggtaaggaaatg

SEQ ID NO: 38031 - DNA, 110 bp, synthetic construct
  source 1..110: mol_type = other DNA
atgctaaagcctgaatttaaaacatatttttggaaagaagactaattttagggatgagaattttcttatggagggtgagacacataggtggtctcattagacagatatct

SEQ ID NO: 38032 - DNA, 110 bp, synthetic construct; identical to SEQ ID NO: 38031
  source 1..110: mol_type = other DNA

SEQ ID NO: 38033 - DNA, 110 bp, synthetic construct
  source 1..110: mol_type = other DNA
aaggcgttatctctttgtttagaaagaaatctatatagtggcaatttcccaggaagagggagctgtaacctaacgagaaagacttggtttttagtatttacaggtggctg

SEQ ID NO: 38034 - DNA, 110 bp, synthetic construct
  source 1..110: mol_type = other DNA
gagggagctgtaacctaacgagaaagacttggtttttagtatttacaggtggctggaatatttgaagttcatggaatggattatttttcctctcccacattcaatgatag

SEQ ID NO: 38035 - DNA, 110 bp, synthetic construct
  source 1..110: mol_type = other DNA
ccctgcctcaaagctgtgccattgttgcttgactgctcgtcccttgtctctgcattcccttccttccctgatcagcaactgtttgaaactgccccttggaactcagggaa

SEQ ID NO: 38036 - DNA, 110 bp, synthetic construct
  source 1..110: mol_type = other DNA
tcccttccttccctgatcagcaactgtttgaaactgccccttggaactcagggaaaatcatgaaggctgaatgagacccatttcctaaaaactagaaatgggagacagag

SEQ ID NO: 38037 - DNA, 110 bp, synthetic construct
  source 1..110: mol_type = other DNA
aggggaaaaggactgcagcttgaaaatctaggaccaaatttccatctatcaaacacaaatagtaaagataactagggtctggaagccatgggaaaatcaggcaatgaact

SEQ ID NO: 38038 - DNA, 110 bp, synthetic construct
  source 1..110: mol_type = other DNA
caaatagtaaagataactagggtctggaagccatgggaaaatcaggcaatgaactgcaattgcatgttacaaaatagttgaatgtagatatttctatactttaattttat

SEQ ID NO: 38039 - DNA, 110 bp, synthetic construct
  source 1..110: mol_type = other DNA
ctgttttctctgcaaaatcccatttattaacccagtttatatcctgtggcatacagttttcatcagtattatgtgatctgagactcagtcaaagaatttcctgtcagctg

SEQ ID NO: 38040 - DNA, 110 bp, synthetic construct
  source 1..110: mol_type = other DNA
cgaagctcataataaatcttagttattatttcataaagctccagatgtccactggccttaatgagaataaggtatctggcagtgctgggttttagttagaatgaagaata

SEQ ID NO: 38041 - DNA, 110 bp, synthetic construct
  source 1..110: mol_type = other DNA
ttcacaacattgaaatgcttgttaaagaataaaacctttcttatttcagccaacagctctggaacttaacactacagccagcttgtacttagtcttgtggtgactggata

SEQ ID NO: 38042 - DNA, 110 bp, synthetic construct
  source 1..110: mol_type = other DNA
gctcagtacttgagtatagtaatagcaaagctctagagtagattgaattctcaaacttggaatatcttccttattaagatcaggttcctaattaggaaggagtgggactc

SEQ ID NO: 38043 - DNA, 110 bp, synthetic construct
  source 1..110: mol_type = other DNA
aaatactgtaagcacaaacattttttcagtggtttaaaatgaccaacagtaaacttaatctcattctgtctgcaaatgtgttagttatcgcaaaagcaaaatggttaaaa

SEQ ID NO: 38044 - DNA, 110 bp, synthetic construct
  source 1..110: mol_type = other DNA
tgtcttgcttttccaacctggccttgcatattcctcccttggcaaagctaagactgttgttataattaactttgggatcattctcctcctcactgggtcattcctctctt

SEQ ID NO: 38045 - DNA, 110 bp, synthetic construct
  source 1..110: mol_type = other DNA
tcttttagagacccagatgagacatgaagtgaggaagtccaagaaggctggccatgtgcataataaggaagaggaagagctgaggaacatttagaaaggaaaacagggtt

SEQ ID NO: 38046 - DNA, 110 bp, synthetic construct
  source 1..110: mol_type = other DNA
agtagaggaggaagctagtgggggatgacgggaaatacaatcagagttaatcagaagctgtaccaggttgggtctttatagttatggtatggggttaaggttttgtgctg

SEQ ID NO: 38047 - DNA, 110 bp, synthetic construct
  source 1..110: mol_type = other DNA
agctgtaccaggttgggtctttatagttatggtatggggttaaggttttgtgctgaaggaggtaaaatcccattgaggtgtcttaagaagagaagtagcatgatcgggct

SEQ ID NO: 38048 - DNA, 110 bp, synthetic construct; identical to SEQ ID NO: 38046
  source 1..110: mol_type = other DNA

SEQ ID NO: 38049 - DNA, 110 bp, synthetic construct; identical to SEQ ID NO: 38047
  source 1..110: mol_type = other DNA

SEQ ID NO: 38050 - DNA, 110 bp, synthetic construct
  source 1..110: mol_type = other DNA
ctccttgcagggcatcataagactaaaatggtatagttccttcatgcattatgagttgggaatagggagctttcctattcaaggaaattgtggcaaaagttttcatgaat

SEQ ID NO: 38051 - DNA, 110 bp, synthetic construct
  source 1..110: mol_type = other DNA
ttgggaatagggagctttcctattcaaggaaattgtggcaaaagttttcatgaataaggtgggggggggtgcggtatgctgagccttgagggagtcaagaacatttgtct

SEQ ID NO: 38052 - DNA, 110 bp, synthetic construct; identical to SEQ ID NO: 38050
  source 1..110: mol_type = other DNA

SEQ ID NO: 38053 - DNA, 110 bp, synthetic construct; identical to SEQ ID NO: 38051
  source 1..110: mol_type = other DNA

SEQ ID NO: 38054 - DNA, 110 bp, synthetic construct
  source 1..110: mol_type = other DNA
tgtgccacaacaggaactcccctaagtgtaatattaataatacccacaaattcggtctgtgctccctaattacaggctataaacttgaatccaaacaactttggaaccag

SEQ ID NO: 38055 - DNA, 110 bp, synthetic construct
  source 1..110: mol_type = other DNA
agcatctgtgaggcactgagctgtattttctaggtatagttctggtgtcttaataaatgatttctaagatgtataaggtagataccaccaatcattctttacttacaaga

SEQ ID NO: 38056 - DNA, 110 bp, synthetic construct
  source 1..110: mol_type = other DNA
tcatacaaaatggataatcatgttttccttagacctcacaagtcctaaccagcgtcatttaaaacctccattaggggcctctctgtaaaagaatctataaatttacctgg

SEQ ID NO: 38057 - DNA, 110 bp, synthetic construct
  source 1..110: mol_type = other DNA
accattctctaatgtcttaccttagaaccaactgatccattcactatcctgtagcataaaggcattttacttgtactctctagagaatagcacacttcaagggagtgagt

SEQ ID NO: 38058 - DNA, 110 bp, synthetic construct
  source 1..110: mol_type = other DNA
ataaaggcattttacttgtactctctagagaatagcacacttcaagggagtgagttctggcaaacatctagttagttcagtccatatagacaagcctaattttgcaatac

SEQ ID NO: 38059 - DNA, 110 bp, synthetic construct
  source 1..110: mol_type = other DNA
attttcaagtctcccagagcaacttcacagagcatttatgaaggtataaaaatgcatatgtgatgtgccccatgtggtgttgcaggaacaggaagcacacaacacatttc

SEQ ID NO: 38060 - DNA, 110 bp, synthetic construct
  source 1..110: mol_type = other DNA
atatgtgatgtgccccatgtggtgttgcaggaacaggaagcacacaacacatttcaggtcccttttctctcccagagactttcaaaggcttgcctgaaatatcaaactaa

SEQ ID NO: 38061 - DNA, 110 bp, synthetic construct
  source 1..110: mol_type = other DNA
atcccgaagcatcctctgtagcccagatcaagctctgcctcccagtgaccccaaaacccacaccaattttcccttctctcaaccacagcagcaattagcacagtcctttc

SEQ ID NO: 38062 - DNA, 110 bp, synthetic construct
  source 1..110: mol_type = other DNA
cagcagatataacagaccctgaagcaggagaataactgacaagttcaaagaacagcaaggaggccagtgtgcctggagctgaatgaagaagatagagagtggaaaatatt

SEQ ID NO: 38063 - DNA, 110 bp, synthetic construct
  source 1..110: mol_type = other DNA
gatttatatagcacaggcagaatagatttagcataaccgttaagggccccaggattctagaatggcaaatgagcattggctttgacttaaaatcaccagctacattatga

SEQ ID NO: 38064 - DNA, 110 bp, synthetic construct
  source 1..110: mol_type = other DNA
tctagaatggcaaatgagcattggctttgacttaaaatcaccagctacattatgagagtcagcctatctttggaactttgaagccaggcactgacttgtcctctctagct

SEQ ID NO: 38065 - DNA, 110 bp, synthetic construct
  source 1..110: mol_type = other DNA
tttactctgggcaaccactacataaaaacctgtggctctgctcttatctaggcaatcaaaggctcagagggaagctgagactcacacacccttgtgaggctgtaatgaga

SEQ ID NO: 38066 - DNA, 110 bp, synthetic construct
  source 1..110: mol_type = other DNA
ggagaagagagagaacctaaggagcaaagagaaggacagaggaggatggtagagtgggaggtaggatattagaaagattcttcaaaagaagtaacaagatggccagaaga

SEQ ID NO: 38067 - DNA, 110 bp, synthetic construct
  source 1..110: mol_type = other DNA
gggaggtaggatattagaaagattcttcaaaagaagtaacaagatggccagaagaaggagaggggagttcattttcttgattcctcttcaacttctgatttctgcacgta

SEQ ID NO: 38068 - DNA, 110 bp, synthetic construct
  source 1..110: mol_type = other DNA
gtacagttcctttcttgtgtcactgaacaggaactgtcaatgcctgtttcctacctgaagcatgtcatctctctaaagaaaatccacttggaatcctaaatccactccct

SEQ ID NO: 38069 - DNA, 110 bp, synthetic construct
  source 1..110: mol_type = other DNA
aggctgagtaggaatgagggtaagtaatgtgtccagagatgcagtgagacagcaccaggggctgggattcaaatcccagcggcctgacagcagactctacagccaactgt

SEQ ID NO: 38070 - DNA, 110 bp, synthetic construct
  source 1..110: mol_type = other DNA
acttaaaaactctccaatcaggcacatctcagtcactaacactccagctgtgaagggttttccacagaagagagggcaatactaccatctcaaagccaagagtaggctaa

SEQ ID NO: 38071 - DNA, 110 bp, synthetic construct
  source 1..110: mol_type = other DNA
ggttttccacagaagagagggcaatactaccatctcaaagccaagagtaggctaagagcctgaaaaatgccttgggaataaaccttacattattctttccactgaaacat

SEQ ID NO: 38072 - DNA, 110 bp, synthetic construct
  source 1..110: mol_type = other DNA
atgggcatttgtggtgcgggaatgatttagcccactgttttggggggataatatggttggcaggtgtggtatgtgtcctatggctcccttgacagccacagctatttctc

SEQ ID NO: 38073 - DNA, 110 bp, synthetic construct
  source 1..110: mol_type = other DNA
tattgaccctgcttggtggcatagctggcaggatatcagaaaagcctacctgaggtcacctggagactagtttggaccagcgctcagtaggaagtatggctccttaagcc

SEQ ID NO: 38074 - DNA, 110 bp, synthetic construct
  source 1..110: mol_type = other DNA
ttcaatccaccgcaggtaaaagctctttttagtgaaaatggttaagatataaagagaagaggtggatgcaactaggggttctcatactaagtgaagtaagtcaggaagag

SEQ ID NO: 38075 - DNA, 110 bp, synthetic construct
  source 1..110: mol_type = other DNA
taggggttagtgcccagaaaaccaatccagtggatgtcagataccaggctggtacagcaagaccaactctagccatcagtgctctagctgaggcttcttttactgccaga

SEQ ID NO: 38076 - DNA, 110 bp, synthetic construct
  source 1..110: mol_type = other DNA
ggacatgaaccacagcaatgacccaagccactgcagagacaacataggatccttaactggccatgcaaatagagaactcctacgggtctctttttagagctttccttaca

SEQ ID NO: 38077 - DNA, 110 bp, synthetic construct
  source 1..110: mol_type = other DNA
actggccatgcaaatagagaactcctacgggtctctttttagagctttccttacatggcctctgtgttgatctctttctacttggccttcttaaaaggggacaccagctt

SEQ ID NO: 38078 - DNA, 110 bp, synthetic construct
  source 1..110: mol_type = other DNA
catgctactcatcagagataatccagtgaggcccattttctccaaactatcaccacacaatacacacagcaaccaaaagactatctctatgtggcccaaaatgtttattc

SEQ ID NO: 38079 - DNA, 110 bp, synthetic construct
  source 1..110: mol_type = other DNA
cacaatacacacagcaaccaaaagactatctctatgtggcccaaaatgtttattcagcttcagcacatgtaagatattctactgaattctattcagtaaaaacataaatg

SEQ ID NO: 38080 - DNA, 110 bp, synthetic construct; identical to SEQ ID NO: 38078
  source 1..110: mol_type = other DNA

SEQ ID NO: 38081 - DNA, 110 bp, synthetic construct; identical to SEQ ID NO: 38079
  source 1..110: mol_type = other DNA

SEQ ID NO: 38082 - DNA, 110 bp, synthetic construct
  source 1..110: mol_type = other DNA
gatactagttgggttcttaacccactcagccacaacatgaactctgagacacaacaggagctccttaaaggatgttaaactaacattttccactctctattaaagtatgc

SEQ ID NO: 38083 - DNA, 110 bp, synthetic construct
  source 1..110: mol_type = other DNA
catgaactctgagacacaacaggagctccttaaaggatgttaaactaacattttccactctctattaaagtatgccataactctcccagacttcaggcaatattacaaaa

SEQ ID NO: 38084 - DNA, 110 bp, synthetic construct
  source 1..110: mol_type = other DNA
gttttactggtgagagcgtctgaatcccatcctccacttcactggggactttgggcttaaatgatcatacaatactatttataaatctaaattatcacagcaagtcagga

SEQ ID NO: 38085 - DNA, 110 bp, synthetic construct
  source 1..110: mol_type = other DNA
cttaaatgatcatacaatactatttataaatctaaattatcacagcaagtcaggatactaagctgccacaccttatggtccaaaaacaaatccacaatctacaaattgtg

SEQ ID NO: 38086 - DNA, 110 bp, synthetic construct
  source 1..110: mol_type = other DNA
tacagcatagatgtgaatatatgtgtagactggggaaaaaacaaagtttaaaatgtacaaagtcagatcttagcctaggaacaactgctccaaacatgtgatatgtaaaa

SEQ ID NO: 38087 - DNA, 110 bp, synthetic construct
  source 1..110: mol_type = other DNA
catggagatatggtttgagggaaaaagcctgggcaataagagtgaggacacaccacaaaagctgcaaataggagttgccatcatggtgcagtggttaacgaatccgacta

SEQ ID NO: 38088 - DNA, 110 bp, synthetic construct; identical to SEQ ID NO: 38087
  source 1..110: mol_type = other DNA

SEQ ID NO: 38089 - DNA, 110 bp, synthetic construct
  source 1..110: mol_type = other DNA
attctaagaacatggctgcaaacacatacactcacattttcaaatgagtaaacatgagtaaaacgcatttaggtagaagtaaggctttaatagtttctagtagacatttt

SEQ ID NO: 38090 - DNA, 110 bp, synthetic construct
  source 1..110: mol_type = other DNA
gagtaaaacgcatttaggtagaagtaaggctttaatagtttctagtagacattttccccaaatgatgcataataaaataactccatttcagaaaacaaggaaatctctga

SEQ ID NO: 38091 - DNA, 110 bp, synthetic construct
  source 1..110: mol_type = other DNA
tttctctctataagcaatcaagggcagtctcaaaaaacctttaccccatagcctttgtaattaatgctatagtggtcaaatgcattaaccacttggtttcccagagcttt

SEQ ID NO: 38092 - DNA, 110 bp, synthetic construct
  source 1..110: mol_type = other DNA
tgtaattaatgctatagtggtcaaatgcattaaccacttggtttcccagagctttgccttcagtaggtatcatctaaagcaaaaacagaaaagaatttggtacatgagat

SEQ ID NO: 38093 - DNA, 110 bp, synthetic construct
  source 1..110: mol_type = other DNA
ctagtctcctggactgagatgagaacttctgtctctagcatgaaatccaaaccctaagcttatttagaaaactagtaccaaggttaatcttctccaaacaacaaattgtg

SEQ ID NO: 38094 - DNA, 110 bp, synthetic construct
  source 1..110: mol_type = other DNA
ctgattcaagcagaactcagtttctccttgctcctaccataatctttatcttgaagtatctgtctacaggggatgggtccttgttgctcgagctgggacccatctaatct

SEQ ID NO: 38095 - DNA, 110 bp, synthetic construct
  source 1..110: mol_type = other DNA
tatgtctcatccacaaagtcctatgtgatcaagaccccacttctggatcaggacctctagtttctattacatgatggtgttggttagagagtttgagttgatgatgagac

SEQ ID NO: 38096 - DNA, 110 bp, synthetic construct
  source 1..110: mol_type = other DNA
tctagtttctattacatgatggtgttggttagagagtttgagttgatgatgagacaaagctgactatccaatctggcttttgttctattttcaaattgtgttgttggact

SEQ ID NO: 38097 - DNA, 110 bp, synthetic construct
  source 1..110: mol_type = other DNA
ttttctttgcagaaatgtccaattatttgggcagagggcagtcaagcctatgctgaattgtagacactgctgtgttcctgcacctgtttcagttatcagagtctcctaaa

SEQ ID NO: 38098 - DNA, 110 bp, synthetic construct
  source 1..110: mol_type = other DNA
aattgtagacactgctgtgttcctgcacctgtttcagttatcagagtctcctaaaaagcttcacaacctaccactgtccacacaggctttctggttcccatgttgcaagg

SEQ ID NO: 38099 - DNA, 110 bp, synthetic construct
  source 1..110: mol_type = other DNA
cctcagagctgcaggtacaatgcaattatgtaaatctcaacatttttcatactgaccacatcccagaaattggcatctggggcccgggggaccttttcagaggagcagca

SEQ ID NO: 38100 - DNA, 110 bp, synthetic construct
  source 1..110: mol_type = other DNA
ccacatcccagaaattggcatctggggcccgggggaccttttcagaggagcagcactgaactgagctgagctgttggtttgttgtaataaaacagatggcagtgaataga

SEQ ID NO: 38101 - DNA, 110 bp, synthetic construct
  source 1..110: mol_type = other DNA
cagatgacacagacgtgacttatcaaagtccctggccagtgaagtgtgttcatcaatagctatgaagtttgagaaggattccataggtaaggataatctcttccaaaatg

SEQ ID NO: 38102 - DNA, 110 bp, synthetic construct
  source 1..110: mol_type = other DNA
atagctatgaagtttgagaaggattccataggtaaggataatctcttccaaaatgtttttcgccaagaagaggcagtagcctgtcttctaaggaaaggcttcagtccagt

SEQ ID NO: 38103 - DNA, 110 bp, synthetic construct
  source 1..110: mol_type = other DNA
atatggatcagatagtcgtaacctatactgcagctgcagtaatgccagaaactcaacccaatgtgctgatctggggaatcaaacttctgtaccttggcattgcagagaca

SEQ ID NO: 38104 - DNA, 110 bp, synthetic construct
  source 1..110: mol_type = other DNA
ctgatcaagaacaatttgaacgccctctcagacgtctggattgggctccacgaccccaccgaggtatgcttacatcttctcctatctgtaacctctcaagatgccatggc

SEQ ID NO: 38105 - DNA, 110 bp, synthetic construct
  source 1..110: mol_type = other DNA
ccaccgaggtatgcttacatcttctcctatctgtaacctctcaagatgccatggccacccaggctcacttcctgtcccctgtgcctttctagaaataacctagagtccct

SEQ ID NO: 38106 - DNA, 110 bp, synthetic construct
  source 1..110: mol_type = other DNA
atacagcgccaaagaaaacattttaatggatcctttgattatgaacatgcaaagccaaaatctagcttcaaaatagagaaattcaagaagatacagcactaaataatttg

SEQ ID NO: 38107 - DNA, 110 bp, synthetic construct
  source 1..110: mol_type = other DNA
caatttacctatattgggccttgtccaatagcgattttagagttgggccatgtgccatgagcttcatggtccttttgctcttctttcccctagacttagagtcaccactt

SEQ ID NO: 38108 - DNA, 110 bp, synthetic construct
  source 1..110: mol_type = other DNA
agatgtatatgtgagcagaccttcaggagagcctagcttggccctatttgatgccacatgtgtgaaaccctgaatgggagcatcctagccgagctcagttaaatccagaa

SEQ ID NO: 38109 - DNA, 110 bp, synthetic construct
  source 1..110: mol_type = other DNA
acatgtgtgaaaccctgaatgggagcatcctagccgagctcagttaaatccagaatgactagagataaaaacaaagtggttgattattgttctgaaacacttaagtttag

SEQ ID NO: 38110 - DNA, 110 bp, synthetic construct
  source 1..110: mol_type = other DNA
ttccagaaattattttgggcccgactgggtgccctgttcaaccagctaaacagcaatattgaaaccaagggggaaattttttcctgtgcttaaggtaaaggttacagttg

SEQ ID NO: 38111 - DNA, 110 bp, synthetic construct
  source 1..110: mol_type = other DNA
atattgaaaccaagggggaaattttttcctgtgcttaaggtaaaggttacagttgtaatcattgtcccacagtatttctataaactggagtcattaaattgttttctaac

SEQ ID NO: 38112 - DNA, 110 bp, synthetic construct
  source 1..110: mol_type = other DNA
aattcttaatgtgataaatatcaatatatataacatacagacaaaagctccttggagtctgcaataaggttaggagtatgaaagtgtcatcagaggcaaaagcttgagaa

SEQ ID NO: 38113 - DNA, 110 bp, synthetic construct
  source 1..110: mol_type = other DNA
agtgatgccagggagacttggctgttgacctgatgagtgacttggagtaaggctgttaaagtggaacaggaaagaaatgaccagattcacgatatacccagatgtatttt

SEQ ID NO: 38114 - DNA, 110 bp, synthetic construct
  source 1..110: mol_type = other DNA
agtaaggctgttaaagtggaacaggaaagaaatgaccagattcacgatatacccagatgtattttaatgccaattaaaaagtcagatttttcaaattttgctttatgaat

SEQ ID NO: 38115 - DNA, 110 bp, synthetic construct
  source 1..110: mol_type = other DNA
tgttcatgggggtgaaaaaactgatatgaaaggtgagttaaggtttaaatatgttgatgactttgaggtgttggtgagaagtccaagcagaaatatctttcaggagttcc

SEQ ID NO: 38116 - DNA, 110 bp, synthetic construct
  source 1..110: mol_type = other DNA
taaatatgttgatgactttgaggtgttggtgagaagtccaagcagaaatatctttcaggagttcctattgtggcacagtggaaacgaatctgaccaggagccatgaggtt

SEQ ID NO: 38117 - DNA, 110 bp, synthetic construct
  source 1..110: mol_type = other DNA
ctatcagttctggcctcccttttgtctcttgttgagggtctgccttacatcatgtcctcggcctgaaatgatttgtgcgttgtgagcttctgcttatcattcaggtttca

SEQ ID NO: 38118 - DNA, 110 bp, synthetic construct
  source 1..110: mol_type = other DNA
cccttcaatgtaatagagtttcacagataaagagtacaaaaacatccatcaaacgcattgaccttgtgtatttactacttttatgccaggaactgctttgtactttgcat

SEQ ID NO: 38119 - DNA, 110 bp, synthetic construct
  source 1..110: mol_type = other DNA
tttgaatctgagctgcagctgtggcctatgcttcaactagggtggtgccagaccatttaacctattgcaccagggtagggatagaacccatgactctgcagtgacctgag

SEQ ID NO: 38120 - DNA, 110 bp, synthetic construct
  source 1..110: mol_type = other DNA
tttaacctattgcaccagggtagggatagaacccatgactctgcagtgacctgagccactgcagctggattcctaacccactgtgctacagcgagagctccagaactatg

SEQ ID NO: 38121 - DNA, 110 bp, synthetic construct
  source 1..110: mol_type = other DNA
tctagcgtggttggttgcttgaaggccattgggattctcagagtttatctctatcactccagatataaggtcaggttagtggatttattaaatccaagcacaaatatgat

SEQ ID NO: 38122 - DNA, 110 bp, synthetic construct
  source 1..110: mol_type = other DNA
aggtatctttttcttatgaaaaatagtcgacattaaactattaaagcaataaaactcagaagatccagagagaatttaatgctgtgaagatcggccacaaaattgttctt

SEQ ID NO: 38123 - DNA, 110 bp, synthetic construct; identical to SEQ ID NO: 38122
  source 1..110: mol_type = other DNA

SEQ ID NO: 38124 - DNA, 110 bp, synthetic construct
  source 1..110: mol_type = other DNA
accatttatttgaaaaagaagcaagagaaacagccagagaaacagtcttgaacgcaggtccaaagaaattagaaccatgtcaactctgttcttccagctcttccttttac

SEQ ID NO: 38125 - DNA, 110 bp, synthetic construct
  source 1..110: mol_type = other DNA
acattttacttttcatttggcaggggaagttgtacaaactttatctactgtcttgagcaatacacattgtccaatttcggataccattcctactgtgactaactacctcc

SEQ ID NO: 38126 - DNA, 110 bp, synthetic construct
  source 1..110: mol_type = other DNA
cccacacaaactccttgtcataggggagatgtccagaggttacacctcctacacttttcttgactcagtgtgtttttgcctaatttagctctgcagattagtcattgccc

SEQ ID NO: 38127 - DNA, 110 bp, synthetic construct
  source 1..110: mol_type = other DNA
taggcccacaaatcatttgattcacttggtactccttttgtaccggagtatacgtaaacagtttaatataaaaattagctgatctctattcttatacccaggtgatgaga

SEQ ID NO: 38128 - DNA, 110 bp, synthetic construct
  source 1..110: mol_type = other DNA
ctggcattatcaccactgtagctcgagttgctggcatgggtttgatacctggcctgagaacttcttcatgcttccacatgctatgggtgaagccaaaccaacaaataaaa

SEQ ID NO: 38129 - DNA, 110 bp, synthetic construct
  source 1..110: mol_type = other DNA
atgttttataagtagttggtcataaataacttaggattctatccagctctcctctaccagtttaatgaggtaaaggagaacagacatcatattaaattatgtcagttttt

SEQ ID NO: 38130 - DNA, 110 bp, synthetic construct
  source 1..110: mol_type = other DNA
catagccatacaattgaatacttactattaaaagaaataatctatggatatgtgctatagcatggatgggcttctgaaacattatactctgggaagaaagccacaaataa

SEQ ID NO: 38131 - DNA, 110 bp, synthetic construct; identical to SEQ ID NO: 38130
  source 1..110: mol_type = other DNA

SEQ ID NO: 38132 - DNA, 110 bp, synthetic construct
  source 1..110: mol_type = other DNA
tggaacacaaccatgtcctttaagttacttattatttatggctgcttccatgctacaatgacagagtaaagtagtttaaataaagaccaactggccggtaaagtagcaac

SEQ ID NO: 38133 - DNA, 110 bp, synthetic construct
  source 1..110: mol_type = other DNA
caatgacagagtaaagtagtttaaataaagaccaactggccggtaaagtagcaactatctggtactatctggctcttcccagaataatcttaacagtctttggttgagga

SEQ ID NO: 38134 - DNA, 110 bp, synthetic construct
  source 1..110: mol_type = other DNA
tatttccaattcatttggagaagctggcaacagctcagataaataaatgtgacaaaattagcaccttgcaaaaaaaaactaagagaatagtacattagagcaatagaaac

SEQ ID NO: 38135 - DNA, 110 bp, synthetic construct
  source 1..110: mol_type = other DNA
tcctctttcctttatgtcctgtttctgggtagcagtgaggctgatattgtgattctctcttacttttgtccttaggacccctttgatttgatccgcctatttttgttgct

SEQ ID NO: 38136 - DNA, 110 bp, synthetic construct
  source 1..110: mol_type = other DNA
ctaatacctttgagaaaagagggtaatgatattggaatttcatgctcataacaaaactgaacttcaaaagcctttcatgatcgcatatatcaagagtctacttcgcgttg

SEQ ID NO: 38137 - DNA, 110 bp, synthetic construct
  source 1..110: mol_type = other DNA
actgaacttcaaaagcctttcatgatcgcatatatcaagagtctacttcgcgttgctctcacattcgctatcaagacacattcatttcttattttaaatataattatcat

SEQ ID NO: 38138 - DNA, 110 bp, synthetic construct
  source 1..110: mol_type = other DNA
ggccctctgcatgggaattggcactataagaagaaatgagggtagggagttaatttggacttatacaatttaatttacctgtggaaacaaagttttccttcataaagacc

SEQ ID NO: 38139 - DNA, 110 bp, synthetic construct
  source 1..110: mol_type = other DNA
ataagaagaaatgagggtagggagttaatttggacttatacaatttaatttacctgtggaaacaaagttttccttcataaagaccaacttgaagcattttctactgtaca

SEQ ID NO: 38140 - DNA, 110 bp, synthetic construct; identical to SEQ ID NO: 38138
  source 1..110: mol_type = other DNA

SEQ ID NO: 38141 - DNA, 110 bp, synthetic construct; identical to SEQ ID NO: 38139
  source 1..110: mol_type = other DNA

SEQ ID NO: 38142 - DNA, 110 bp, synthetic construct
  source 1..110: mol_type = other DNA
tgtgtaagactgatatagatagatagatagatatgcatgcaatggaaagtcaattttcttgacttgttcatgtggttgagattggctttctttttcctctttgtttcgtt

SEQ ID NO: 38143 - DNA, 110 bp, synthetic construct
  source 1..110: mol_type = other DNA
gatgcaaagaaacgcatgcaaaggaatcaactctttttgtttattactgtggagcggtgattctcaatcattttatcacattccttaaaaggcttttttttcccttaaag

SEQ ID NO: 38144 - DNA, 110 bp, synthetic construct
  source 1..110: mol_type = other DNA
gggtggaaaaggtctagtgtgggaatggtttaagttgcactcagcttcctgaaagttatgcacaaataccacaatagcctctctggatgtgctcaaggagggcagattac

SEQ ID NO: 38145 - DNA, 110 bp, synthetic construct
  source 1..110: mol_type = other DNA
ggtgataactgcaataagtaggacatgaggaaatgaaacccaagggacagcaactgaggaactctagttcactcacacacacacagacacacaggaaattaggtattatt

SEQ ID NO: 38146 - DNA, 110 bp, synthetic construct
  source 1..110: mol_type = other DNA
ctcataaaacaaaaacccataaaacaaaaatgctgatctcagctcttcctggaaggattaaagttgaagcatgatgggaataatgttttcaacatcttcttttcattgag

SEQ ID NO: 38147 - DNA, 110 bp, synthetic construct
  source 1..110: mol_type = other DNA
gattaaagttgaagcatgatgggaataatgttttcaacatcttcttttcattgagctgtggctttgtggattaaaaaattaagtagaaacacctgactacaacaggtcat

SEQ ID NO: 38148 - DNA, 110 bp, synthetic construct
  source 1..110: mol_type = other DNA
caggaaatcatcctgagagctacctggaagcaagaagactcacaggaaccagcgctgccccaccctgccacaaaagaaatcctgtgaaccatgaaccactgcctactcat

SEQ ID NO: 38149 - DNA, 110 bp, synthetic construct
  source 1..110: mol_type = other DNA
tctctaagggaaaagcctggaaagaatatcttgtagctctttactgctgcaacataaaggtattcctggagctaaaatgtcctcaattttggctctcaggaatttctcac

SEQ ID NO: 38150 - DNA, 110 bp, synthetic construct
  source 1..110: mol_type = other DNA
aaaggtattcctggagctaaaatgtcctcaattttggctctcaggaatttctcactctatgctagtttgtttttaacatgaaaaccatttccctaataagcaagggagaa

SEQ ID NO: 38151 - DNA, 110 bp, synthetic construct; identical to SEQ ID NO: 38149
  source 1..110: mol_type = other DNA

SEQ ID NO: 38152 - DNA, 110 bp, synthetic construct; identical to SEQ ID NO: 38150
  source 1..110: mol_type = other DNA

SEQ ID NO: 38153 - DNA, 110 bp, synthetic construct
  source 1..110: mol_type = other DNA
ccacacaaggtcaagttcatattaatgtgtttttttttttttctccaaattctggctaccttggtgactttctaatactttcgcatagctttttttaaccagatttttaa

SEQ ID NO: 38154 - DNA, 110 bp, synthetic construct
  source 1..110: mol_type = other DNA
ctaccttggtgactttctaatactttcgcatagctttttttaaccagatttttaataatttttggtgaaaggtctgctacaagctagattgtcattgccagaattagaca

SEQ ID NO: 38155 - DNA, 110 bp, synthetic construct
  source 1..110: mol_type = other DNA
aacattctctaggtccatccacattgctgcaaatggcaatatttcaatattccctcttcatctttaaacttgtgccacttgacttatgatagtcttagtgtaagctctta

SEQ ID NO: 38156 - DNA, 110 bp, synthetic construct
  source 1..110: mol_type = other DNA
ggcacaaacacttgatagaaggaaacctcccgagtggactgggcccaaactgggagttgcaaggccctatcggttcatgacacgggagtaataaagcaaggatgcagcac

SEQ ID NO: 38157 - DNA, 110 bp, synthetic construct
  source 1..110: mol_type = other DNA
ggtaggggtggtataacccagctaggccctctttggccttctctgagttccaaagggcagtttcaaacattcgttatttatcagggaaggaaagggatgcagaaatgaag

SEQ ID NO: 38158 - DNA, 110 bp, synthetic construct
  source 1..110: mol_type = other DNA
agttccaaagggcagtttcaaacattcgttatttatcagggaaggaaagggatgcagaaatgaagaagaagcagtcaagagacagtagtgtaggcttggggcatggtcct

SEQ ID NO: 38159 - DNA, 110 bp, synthetic construct
  source 1..110: mol_type = other DNA
cagaacttgctactgtgaaatttatgaatcagagaactgattaaatgagtgcgttgtagagttttaagaagttcagggtcacctcaaccatctgttctggttagtgcaca

SEQ ID NO: 38160 - DNA, 110 bp, synthetic construct
  source 1..110: mol_type = other DNA
caacataaattacatcagctgtgaaaattagtcctgagtcacctgcttaggatccagtgagggtcaccaaattcccttgccctctctggttgcttttactgggcttctct

SEQ ID NO: 38161 - DNA, 110 bp, synthetic construct
  source 1..110: mol_type = other DNA
gaaacagctgccaccagaggagttggcttttgggcatttacatgcgagttagactcatattagctacatgaatgctttgcattctgtcacctccctccttcagaactccg

SEQ ID NO: 38162 - DNA, 110 bp, synthetic construct
  source 1..110: mol_type = other DNA
catattagctacatgaatgctttgcattctgtcacctccctccttcagaactccgttctaaattcaggtctcacatgaatgcatctgttcactttagtgcagagaagtct

SEQ ID NO: 38163 - DNA, 110 bp, synthetic construct
  source 1..110: mol_type = other DNA
caggtttttattccttccccagtgaagcctctcaaaccccttatatttagctcaataggaaggcaactttgttactagaatattgagtgctgatgatttacttgtttata

SEQ ID NO: 38164 - DNA, 110 bp, synthetic construct
  source 1..110: mol_type = other DNA
cataaaaggcaaaatcactgtaataagaagtgatcaaatcaccctatactgtctacagcaggcttgctcagtatccatcctatacacattactgataatttcccaagttt

SEQ ID NO: 38165 - DNA, 110 bp, synthetic construct; identical to SEQ ID NO: 38164
  source 1..110: mol_type = other DNA

SEQ ID NO: 38166 - DNA, 110 bp, synthetic construct
  source 1..110: mol_type = other DNA
ttctcctgcctgcctcctataggcaggagggcaggggcaggggtgggtcctaaggctaattaagctagagggaggattccaaaatggcacccgccagcaccagtgttcac

SEQ ID NO: 38167 - DNA, 110 bp, synthetic construct
  source 1..110: mol_type = other DNA
gctgagccccaatgggaaatccccactgacaactttaatagacattttcccccggagccaactgtaccatcattcctaaaccactagctgtttaataccatgagaaccaa

SEQ ID NO: 38168 - DNA, 110 bp, synthetic construct
  source 1..110: mol_type = other DNA
gactcagacaccaaaaatgacaaaaaaagatgcaaggctaaaatgagtaagggctccagggtctatgagaaacagtttacccaatttccccaaaccctccccacaggcag

SEQ ID NO: 38169 - DNA, 110 bp, synthetic construct
  source 1..110: mol_type = other DNA
ccagggtctatgagaaacagtttacccaatttccccaaaccctccccacaggcagcactaccagagaacaagcatttaaactaaacctaccctggaaacaaaatcgagca

SEQ ID NO: 38170 - DNA, 110 bp, synthetic construct
  source 1..110: mol_type = other DNA
ggaatgggagtatgaacaggtcgccccacagaaagataacgtcaaaacattttaccaaaaatgtgttcctacgaagacacagaaattccaagtatgtaattgagcaacgc

SEQ ID NO: 38171 - DNA, 110 bp, synthetic construct
  source 1..110: mol_type = other DNA
cataataaaattttgttagaaccaagccacactcaattattcacagattctctatagctgcttttaccctatgatggtgtcgaggacttgagacagggacccaacagccc

SEQ ID NO: 38172 - DNA, 110 bp, synthetic construct
  source 1..110: mol_type = other DNA
caggttcgttactgctgagccacaacaggaaatcctctttacaatttttaatgtttagatgttgccagcgagctctttcctttctcgcctttatttcttaactccttaca

SEQ ID NO: 38173 - DNA, 110 bp, synthetic construct
  source 1..110: mol_type = other DNA
ttagtaggaattgagcctgagcccctcaccgtccccttttccattgctcccccacagaactgaaattactttcttcttcctctttcttccctgacaggctgagaactcgg

SEQ ID NO: 38174 - DNA, 110 bp, synthetic construct
  source 1..110: mol_type = other DNA
agaactgaaattactttcttcttcctctttcttccctgacaggctgagaactcggtgaagctccacactgtatctgatatacattctgtagaaaagaaatgccgagaaca

SEQ ID NO: 38175 - DNA, 110 bp, synthetic construct
  source 1..110: mol_type = other DNA
aggcagggtggtgttagtgagggcctagtgggaagccagcacttttgggaccattttcctagtgaaaagcttgcttgtaatgaagcttccttacccccagggtgtcagta

SEQ ID NO: 38176 - DNA, 110 bp, synthetic construct
  source 1..110: mol_type = other DNA
ttcagaaaatggtttctgtatatttttaattcagcttttctagttgtcctaggcaggagaatcaatgtgcctctggccattccatcccactcagatgtagaggcagatag

SEQ ID NO: 38177 - DNA, 110 bp, synthetic construct
  source 1..110: mol_type = other DNA
ggagaatcaatgtgcctctggccattccatcccactcagatgtagaggcagatagcttatacatgttcatttattcccttttgcatttcttatatggctagacatctata

SEQ ID NO: 38178 - DNA, 110 bp, synthetic construct
  source 1..110: mol_type = other DNA
aatatgagcaatctttgcgggtttaaatagtatatggcagcttgtctctttgtgtgtttagtgactttgtactttcatggttctgaaacttcagctggaggacttattgg

SEQ ID NO: 38179 - DNA, 110 bp, synthetic construct
  source 1..110: mol_type = other DNA
gtttagtgactttgtactttcatggttctgaaacttcagctggaggacttattggatgcctgggattcaagtgcattccccagagagagtttacatttagtttgaccagg

SEQ ID NO: 38180 - DNA, 110 bp, synthetic construct
  source 1..110: mol_type = other DNA
ctcacactcttctgcgggtgaatttgtctaatctctgatctgctggaaactccttgaggagtgagactgcatcttctggcccaggctgttctgatctgcctgagacggag

SEQ ID NO: 38181 - DNA, 110 bp, synthetic construct
  source 1..110: mol_type = other DNA
gaggagtgagactgcatcttctggcccaggctgttctgatctgcctgagacggagggtttcctgggtcctgtgactttcagtgctcaaaccaggaacgtctcaggcagac

SEQ ID NO: 38182 - DNA, 110 bp, synthetic construct
  source 1..110: mol_type = other DNA
actcctagaagtactcattcttgatctcttacagaaatggtccaaattctggggtcatttgtggagctttgaccattctgagaatcatctgtccacaggagaaaccaaac

SEQ ID NO: 38183 - DNA, 110 bp, synthetic construct
  source 1..110: mol_type = other DNA
ccttaaacacattgaagccctgtaaagccatgcttgtgattggagcaaaaagctaggagctagcactggaaggctcgaaggctggatggatagcttgcccagactggctg

SEQ ID NO: 38184 - DNA, 110 bp, synthetic construct
  source 1..110: mol_type = other DNA
acgggaactcccagccccttaatcttgccaaaaagaaaagaaaagatcctttgactttgctcttgccttagttacaattctcccccttgaaacttctctgcaacagtgat

SEQ ID NO: 38185 - DNA, 110 bp, synthetic construct
  source 1..110: mol_type = other DNA
agacaggcctgcaaacgggaggcagatggagaaggagcacagggaaccagagggaaggccccacaggagggctgcgatgaagttccccgaaggtttcctctgcagggcag

SEQ ID NO: 38186 - DNA, 110 bp, synthetic construct
  source 1..110: mol_type = other DNA
aggccccacaggagggctgcgatgaagttccccgaaggtttcctctgcagggcaggcaagatgagcgaggctggacctgcacagcccactgaagccctgggaggagtggt

SEQ ID NO: 38187 - DNA, 110 bp, synthetic construct
  source 1..110: mol_type = other DNA
ctaaggccattttgctgtaagtcctggactttatccaggcctcaaatttctaacctgctttaaaatttttttctttttttatctttttaaggccgcacccgcagcatgtg

SEQ ID NO: 38188 - DNA, 110 bp, synthetic construct
  source 1..110: mol_type = other DNA
acctggaacctagatgttcaacaaatacttgttgaaaggtaaagagaaactgctttgctactcagactcagaaactagctcaaggagttcctgttgtggctcagcagtaa

SEQ ID NO: 38189 - DNA, 110 bp, synthetic construct
  source 1..110: mol_type = other DNA
gccctggcaggatggtctagtggtagtttgctcatgtaaactctttccagctacatggggtagactcggatctgcattctacgtgggatccccttcggttatgcctgacc

SEQ ID NO: 38190 - DNA, 110 bp, synthetic construct
  source 1..110: mol_type = other DNA
tggggtagactcggatctgcattctacgtgggatccccttcggttatgcctgacccaaggttttgcttggacttgggctgtcccttcgattcttctgaaaggaactgctt

SEQ ID NO: 38191 - DNA, 110 bp, synthetic construct
  source 1..110: mol_type = other DNA
aatgctttcatctcaaggatttgagcttgattttatattggttgccagggagtgttttgtgttatttaatcagtggtatggagtagagagacaaatatattattatgctg

SEQ ID NO: 38192 - DNA, 110 bp, synthetic construct
  source 1..110: mol_type = other DNA
ccacatagggtttcacctgcttcagaaactctgcagccagcagggtcactgaggtggtgccatcaccaacctagaagaggataacaggaaattcgcgttttctcatgttc

SEQ ID NO: 38193 - DNA, 110 bp, synthetic construct
  source 1..110: mol_type = other DNA
ggtgccatcaccaacctagaagaggataacaggaaattcgcgttttctcatgttcatggataaagccctgaaagtccattcgtaggcaatctacccatttaaactgggac

SEQ ID NO: 38194 - DNA, 110 bp, synthetic construct
  source 1..110: mol_type = other DNA
tctggagtgaaccactgtgaggagaagagcactcaggttacagctgcttgcttctcttcctgatccaactctccactgatgtttcctatgagtccgtcccaccgcaagtc

SEQ ID NO: 38195 - DNA, 110 bp, synthetic construct
  source 1..110: mol_type = other DNA
ctgtcagtggagggtgtatatagattctgttggatgtgagcataggctggtggggggtgttggctgggtgtgtgtctgctgcgtgtgggggtgtgtgtattatctcatgg

SEQ ID NO: 38196 - DNA, 110 bp, synthetic construct
  source 1..110: mol_type = other DNA
ggtgttggctgggtgtgtgtctgctgcgtgtgggggtgtgtgtattatctcatgggttgtgtctgcgtgtttgtagtgtttgttaagggtgaagttaaatggtatctgtg

SEQ ID NO: 38197 - DNA, 110 bp, synthetic construct
  source 1..110: mol_type = other DNA
actgcagcatcttctattgcctgttgttgtttgttcctccattagaccataggagcatctttgaggtgggagaacccgggaccctttaaaaagacgctacagggagttcc

SEQ ID NO: 38198 - DNA, 110 bp, synthetic construct
  source 1..110: mol_type = other DNA
accataggagcatctttgaggtgggagaacccgggaccctttaaaaagacgctacagggagttcccttcgtggctcagaggttgcgggtttgatccctggcctcgctcag

SEQ ID NO: 38199 - DNA, 110 bp, synthetic construct
  source 1..110: mol_type = other DNA
ctaaccaggcccaaccctgcttagcttccaagatcagacaagatcgggtgcgtacagggaggtatggccacagaccaacttgtttttcaaatgtgaaaagactaagaaaa

SEQ ID NO: 38200 - DNA, 110 bp, synthetic construct
  source 1..110: mol_type = other DNA
tttagcatctggtggagcctgtggaccccttctcagaacaagatctttaaatacaaagaattacaaagtccaccagtgatcattgaagcacatttatcaatatagtaaaa

SEQ ID NO: 38201 - DNA, 110 bp, synthetic construct
  source 1..110: mol_type = other DNA
aagaattacaaagtccaccagtgatcattgaagcacatttatcaatatagtaaaacatttgctgaaggaacatgtaccttattactgtattaaataaagccacccatttg

SEQ ID NO: 38202 - DNA, 110 bp, synthetic construct
  source 1..110: mol_type = other DNA
gaaaaaatgcaaatccacaaagctatctctcctttggaaaccaaacagattctagaaaagaattcagggattgatgtgcatgtatttgaaaggggaggggcagtactttc

SEQ ID NO: 38203 - DNA, 110 bp, synthetic construct
  source 1..110: mol_type = other DNA
gctggtcttccctcctctttctctggccccgtcagttgcctgtggcaaattcattggtctggggccagagcttggagagaaggtagccagagagcaggtagcctgctgct

SEQ ID NO: 38204 - DNA, 110 bp, synthetic construct
  source 1..110: mol_type = other DNA
aattcatgggcgagaatgccaggatcccaaatgatctcacacggtttgatgtagcgcctgctctttagaaaaagcagctgcatgagcgtagaggcgctgaggcctgatgt

SEQ ID NO: 38205 - DNA, 110 bp, synthetic construct
  source 1..110: mol_type = other DNA
gcctgctctttagaaaaagcagctgcatgagcgtagaggcgctgaggcctgatgtggctggagtgcttgggataaagatccagggattttgtgggctgttggctcggaac

SEQ ID NO: 38206 - DNA, 110 bp, synthetic construct
  source 1..110: mol_type = other DNA
tcagaatgctaggggaggagggcagtgatgagtgaccctgtccctggagagcccgacctcattttcagaatggagcttcctccagtctccccccgccccaagctgctgct

SEQ ID NO: 38207 - DNA, 110 bp, synthetic construct
  source 1..110: mol_type = other DNA
catgattttccttgaaaccttatttcctattttatgtgaaaatattttgtgtcctatctgtgagtgtgtgacagtcccgaagtaattcttttatagtttccttttgttag

SEQ ID NO: 38208 - DNA, 110 bp, synthetic construct
  source 1..110: mol_type = other DNA
cattactccagacactttgggtggactttatggcctgaagtatttttggtgatctccagtagtttgagcaaagacctggtagcttcttctcctctcttttctttccccct

SEQ ID NO: 38209 - DNA, 110 bp, synthetic construct
  source 1..110: mol_type = other DNA
accactgagccatgatgggaactcccactatccttctgtatctttatttatagcttttgttttaaagtctatttcattctatatgattactgctatgctcattttcttat

SEQ ID NO: 38210 - DNA, 110 bp, synthetic construct
  source 1..110: mol_type = other DNA
gagtatgcttcttcctagtgaatctatcacttaatttctctttatatctgtctttcctaaagcagcttacctttttcttagatgatgtgaaaaatgtctctcgctcatga

SEQ ID NO: 38211 - DNA, 110 bp, synthetic construct
  source 1..110: mol_type = other DNA
gataaggtggtatgtggtaaacgccaaataagtggtacaagcattgggaagaaaaggtgatagtagaggctgcagtagtgttgaaaggctggagagaccaagggtctcaa

SEQ ID NO: 38212 - DNA, 110 bp, synthetic construct
  source 1..110: mol_type = other DNA
tgcctcagcccgtggccgcacagtgcttgccttccgggagctttctggctgatgccagagattctgcagccagcctaggcgttctgtgaagctgcttgaggacctctaga

SEQ ID NO: 38213 - DNA, 110 bp, synthetic construct
  source 1..110: mol_type = other DNA
aagactgacctgtcttgactgtgtgttcctgaagtaagtatgcacatgccgtatgatgcatttacatgccatgcatttcactcgggactgagtcaaagctgcaatcaacc

SEQ ID NO: 38214 - DNA, 110 bp, synthetic construct
  source 1..110: mol_type = other DNA
atgcatttacatgccatgcatttcactcgggactgagtcaaagctgcaatcaaccaaaatctcacaaccaaacaatgcatggtgcatacaacatggctttgggggaagga

SEQ ID NO: 38215 - DNA, 110 bp, synthetic construct
  source 1..110: mol_type = other DNA
cccttgacagtggggaaatggtggtctaataacagagctgactacatgaactatggaaggacactgacttctcagtctgcaccagatgtcatggtacccacagtgtgctt

SEQ ID NO: 38216 - DNA, 110 bp, synthetic construct
  source 1..110: mol_type = other DNA
ccgagacaagcactgatattattcccattctacagacctgcacactgagcctcagcaaggttaaacgcctggccccagggagcccagcttcaaagtgttaggacaaagat

SEQ ID NO: 38217 - DNA, 110 bp, synthetic construct
  source 1..110: mol_type = other DNA
aatgtcacgacaaaaagagagacataaaatgcatcgaagtattaacaatgtttttttttttttggagtaaaattgaaatcctattaggagctggggatcatatgctgttt

SEQ ID NO: 38218 - DNA, 110 bp, synthetic construct
  source 1..110: mol_type = other DNA
ttttttttggagtaaaattgaaatcctattaggagctggggatcatatgctgtttcttcctttttgattctcaacacctcgaaggtaagaattaatggccacttttacag

SEQ ID NO: 38219 - DNA, 110 bp, synthetic construct
  source 1..110: mol_type = other DNA
tccaaagatccttagttgtgctaagtattagaagtagtctctgctttctatctgagccattgggcatgaagtttcccaagtctagagatcacatggcagctccttggtga

SEQ ID NO: 38220 - DNA, 110 bp, synthetic construct
  source 1..110: mol_type = other DNA
gccattgggcatgaagtttcccaagtctagagatcacatggcagctccttggtgaccaggactttgactccctcaccaggcctaggtttcccaaaggtagaaaatatgtc

SEQ ID NO: 38221 - DNA, 110 bp, synthetic construct; identical to SEQ ID NO: 38219
  source 1..110: mol_type = other DNA

SEQ ID NO: 38222 - DNA, 110 bp, synthetic construct; identical to SEQ ID NO: 38220
  source 1..110: mol_type = other DNA

SEQ ID NO: 38223 - DNA, 110 bp, synthetic construct
  source 1..110: mol_type = other DNA
aagggatcaggcccctgcttcttggatgacagttgcccagaggggcactttaccctaagatgctttaaacactgtcagctagctcatttagcttagtcactcagtggaat

SEQ ID NO: 38224 - DNA, 110 bp, synthetic construct
  source 1..110: mol_type = other DNA
taagatgctttaaacactgtcagctagctcatttagcttagtcactcagtggaatttacatatgaataattgatatgggactttcagatcaaggtgctaaacttcccacc

SEQ ID NO: 38225 - DNA, 110 bp, synthetic construct
  source 1..110: mol_type = other DNA
aattttctgtggtctgctaagtcaggtaccacgcttccatccactttctaatttcaacatttttgacctctcttgtctgctgctgtttccgctcccattctctttttcct

SEQ ID NO: 38226 - DNA, 110 bp, synthetic construct
  source 1..110: mol_type = other DNA
aagtcaccagcagaaacaggaacccagccggtagctccggactccacatgacgttctgttccgtatcacgatgctcacaacttccaaagttcccaaggagactctcctta

SEQ ID NO: 38227 - DNA, 110 bp, synthetic construct
  source 1..110: mol_type = other DNA
caggcctgtgagcatcttaaacacgagggaagcacagcgtgaacgtgaggcattacacaggagggggctgcagggcttcccatcaccctttggatgtatcaggtggggga

SEQ ID NO: 38228 - DNA, 110 bp, synthetic construct
  source 1..110: mol_type = other DNA
cacaggagggggctgcagggcttcccatcaccctttggatgtatcaggtgggggagctatgactgggaactcataaggtaccatcaaggtcaagtcaacagcctagtgtg

SEQ ID NO: 38229 - DNA, 110 bp, synthetic construct
  source 1..110: mol_type = other DNA
acctgcactcacgtcatttctgggggcatcgccaagagccattctggagtggccaccagctgctgcataaaggcccacaccaacaggtgacagcccagcacggactgtcc

SEQ ID NO: 38230 - DNA, 110 bp, synthetic construct
  source 1..110: mol_type = other DNA
ccagctgctgcataaaggcccacaccaacaggtgacagcccagcacggactgtccagagtggacaccagccacagtgtgagaaggggcctggaagctcctctgggctcag

SEQ ID NO: 38231 - DNA, 110 bp, synthetic construct
  source 1..110: mol_type = other DNA
cagatggtcagcccttcaccatgtcctcattcgcattgggctctaaccactgggccataattcaccttccagggaacagatgtccacctccctggtgcactgtcgcctcc

SEQ ID NO: 38232 - DNA, 110 bp, synthetic construct
  source 1..110: mol_type = other DNA
cataattcaccttccagggaacagatgtccacctccctggtgcactgtcgcctccaccaccacggggtcctatactgtttaggggctcagggacccagcagagatcaaag

SEQ ID NO: 38233 - DNA, 110 bp, synthetic construct
  source 1..110: mol_type = other DNA
gatccccctctcttcaacaagaagccgctctcaagccctgcctttctctgcacgctctttctggagagagccttcctcaccactccccaccccctcccaggggtcccaaa

SEQ ID NO: 38234 - DNA, 110 bp, synthetic construct
  source 1..110: mol_type = other DNA
gaatgaacttagtccttacttccacttcttacactattaacatttctccatgccccaataaaacaaatttatcctttaccagggggaaaaaattaaaataactgaaaaaa

SEQ ID NO: 38235 - DNA, 110 bp, synthetic construct; identical to SEQ ID NO: 38234
  source 1..110: mol_type = other DNA

SEQ ID NO: 38236 - DNA, 110 bp, synthetic construct
  source 1..110: mol_type = other DNA
aaccacagtctctcaagcacgctaaatttgtgggttttttggttttttttgtttttttttttttctagcctggcacctaccataattataaactaacaccaaggggagaa

SEQ ID NO: 38237 - DNA, 110 bp, synthetic construct
  source 1..110: mol_type = other DNA
agcacgctaaatttgtgggttttttggttttttttgtttttttttttttctagcctggcacctaccataattataaactaacaccaaggggagaaatgatttaccaaaaa

SEQ ID NO: 38238 - DNA, 110 bp, synthetic construct
  source 1..110: mol_type = other DNA
ggctcatcgctgtgtactaaatgtaaattctagaaatctggttctagaagctagatatgatctgggagtatagggtattctacattgaacttaccactgtattagaggaa

SEQ ID NO: 38239 - DNA, 110 bp, synthetic construct
  source 1..110: mol_type = other DNA
gatacagtcctcacacagcttgtgttctgaacgatggtgtgctgccggctgccggggttttagtcacaagagagtggacaaccacagagagtacagcaagatgaaaaaag

SEQ ID NO: 38240 - DNA, 110 bp, synthetic construct
  source 1..110: mol_type = other DNA
atcctctgagagtaaaaggaccttggaccgtgtgcctcccctacagaacacaagggggcactcagtcttgcttggaaaaacctgcagatacagctcagcttgtgtagtcc

SEQ ID NO: 38241 - DNA, 110 bp, synthetic construct
  source 1..110: mol_type = other DNA
gggagtcagagcctaggttttcccagaagctgcctgtacctaactgcccagccctctgtcctccactgctggttgttcaggagctctggcctctggcaggagccttcacc

SEQ ID NO: 38242 - DNA, 110 bp, synthetic construct
  source 1..110: mol_type = other DNA
aaatgcaggttcttgaagttcccaggctaggagtcatattggagctgcacctcaaaaaaacatgctgcaggtctacaccaccgccacagctacactggatctgagccaag

SEQ ID NO: 38243 - DNA, 110 bp, synthetic construct
  source 1..110: mol_type = other DNA
aaaaacatgctgcaggtctacaccaccgccacagctacactggatctgagccaagctgatctataacctatgccacagcttgaggcaatgctgagcaaggccagggattg

SEQ ID NO: 38244 - DNA, 110 bp, synthetic construct
  source 1..110: mol_type = other DNA
ccctcctgcccctcccaccatggctttgactcctaagtccactaactcacagcaggcaagagatagcttttgagcttgcaccctcgtgttagacagcgaataatttcatt

SEQ ID NO: 38245 - DNA, 110 bp, synthetic construct
  source 1..110: mol_type = other DNA
gacacacataggaagcacttatgctcaaacacactctcctactcgcctcccaagagcaacaagcccccacagcaacaccagatctgagctgcatttgtaacctacaccat

SEQ ID NO: 38246 - DNA, 110 bp, synthetic construct
  source 1..110: mol_type = other DNA
ggctttctcataaagatttcaggaaaaactgacaagttaaaagggtaaaacctctcagagggtcggctcaggtgactgacccactcaggagcaccttggtgtgatctcgg

SEQ ID NO: 38247 - DNA, 110 bp, synthetic construct
  source 1..110: mol_type = other DNA
cagagggtcggctcaggtgactgacccactcaggagcaccttggtgtgatctcggttccaaggacttggtccaggctcaggtgaagggtgatacctcccatcctccgtgg

SEQ ID NO: 38248 - DNA, 110 bp, synthetic construct
  source 1..110: mol_type = other DNA
aatttctaatgtcagtctccaaaagatttggatatcagggagggaacttggtaaatgattctaaagttgaactggaaaaaataagccgataattatctgttttcaaacat

SEQ ID NO: 38249 - DNA, 110 bp, synthetic construct
  source 1..110: mol_type = other DNA
tgattctaaagttgaactggaaaaaataagccgataattatctgttttcaaacatgagagagctcaagggagaatggccagttggtactgtattgtaaggttacagaaga

SEQ ID NO: 38250 - DNA, 110 bp, synthetic construct
  source 1..110: mol_type = other DNA
agtacctgacatggaactcgcacttagaaagtggtgacctttttcctctttgctccttgtccctttcctccagaacgtccctaaagcttctgggaacatcagtaggacct

SEQ ID NO: 38251 - DNA, 110 bp, synthetic construct
  source 1..110: mol_type = other DNA
cttgtccctttcctccagaacgtccctaaagcttctgggaacatcagtaggacctgtcttgtctgtatgggctgaccatgcagtagtgtgggcgtgttcattgctgattc

SEQ ID NO: 38252 - DNA, 110 bp, synthetic construct
  source 1..110: mol_type = other DNA
cccatgtctgttgcaaatgaaaagcgaatatacatttgaaggttttagtatttttactccatttactgatttactgatatttctgcagtagtaataccctgcttcacttt

SEQ ID NO: 38253 - DNA, 110 bp, synthetic construct
  source 1..110: mol_type = other DNA
aagcttagtcacaactggggctcggaactgatccctggcccaggaactccatatgccaccgggccagggggaaaaagagaaagctcaaatgaagccaattaagctttatc

SEQ ID NO: 38254 - DNA, 110 bp, synthetic construct
  source 1..110: mol_type = other DNA
ccaccgggccagggggaaaaagagaaagctcaaatgaagccaattaagctttatcttgccatgctccttccttccaggcagtcttcccagcctccttcacatcaataagc

SEQ ID NO: 38255 - DNA, 110 bp, synthetic construct
  source 1..110: mol_type = other DNA
tgactcttgtatttatgactcgttttgccttgtatccttcagtagaacatcccgtccaatccaaagtatttcatgctttaacatttcctattatctccttccttacttct

SEQ ID NO: 38256 - DNA, 110 bp, synthetic construct
  source 1..110: mol_type = other DNA
cagggagcctcgatgtgtccctcctcgtctaggtcattgacatctaagaggtggacaaagggaccctcgataatggggactcccaggctgagtggaagctgtatttggta

SEQ ID NO: 38257 - DNA, 110 bp, synthetic construct
  source 1..110: mol_type = other DNA
ggagcctgctctctctgcctcagggtcaaatcggcctgtcttcctcagaagccatgtgctgtgtgtccctggtcaagcttcttacagagacaggccggtgactcccgtct

SEQ ID NO: 38258 - DNA, 110 bp, synthetic construct
  source 1..110: mol_type = other DNA
agcgtggatcaatgaggcggcaactgtaaaagtgaggagagagccttggatgaaagtgggagtgcacatgaaatcatactatcagtgtgtttacagctgacgttgaatat

SEQ ID NO: 38259 - DNA, 110 bp, synthetic construct
  source 1..110: mol_type = other DNA
gtgggagtgcacatgaaatcatactatcagtgtgtttacagctgacgttgaatataaggtctgctctaaggagagatggacaggtttccccaaaagtcccaagaggtcag

SEQ ID NO: 38260 - DNA, 110 bp, synthetic construct
  source 1..110: mol_type = other DNA
tatttgtgcctgagaaggagtttgttgggggtagaggtcaggggtgaactctccgcagtggaagggcattccaggtagaaggaacagtcggtaaaaagggactggagctt

SEQ ID NO: 38261 - DNA, 110 bp, synthetic construct
  source 1..110: mol_type = other DNA
catcagtaacaccctcaggacctccctgtgctacctgccttcccacaaggatccgaaccagccagctcctgctttgtaagtatttcctgcttgcaatctatgtatttact

SEQ ID NO: 38262 - DNA, 110 bp, synthetic construct
  source 1..110: mol_type = other DNA
atatttgtttgtttattgtcttccttctttagaatgtaagcttcctgagcttgtctcttttgttcacaggcctggaactgtggctgtcacagagtaggcactcaggaaat

SEQ ID NO: 38263 - DNA, 110 bp, synthetic construct
  source 1..110: mol_type = other DNA
tgagttatgtgtttggtgtctttacaccttcgtttctgaaacagctcagtcgttctgcaggcgtgtggtagacagctactctgtatttttaacaaatgatgacattcctc

SEQ ID NO: 38264 - DNA, 110 bp, synthetic construct
  source 1..110: mol_type = other DNA
actatagtttgtttccaccaatagtagccccttggcactgctgttgtcattaggaaaagctattgtggcttcagtcaaggatgttttacaatggcaagtccaagataaga

SEQ ID NO: 38265 - DNA, 110 bp, synthetic construct
  source 1..110: mol_type = other DNA
aaagctattgtggcttcagtcaaggatgttttacaatggcaagtccaagataagatgcacccattagaaaggtttgtcttcaaatagtgcccctaactgggatagcaaat

SEQ ID NO: 38266 - DNA, 110 bp, synthetic construct; identical to SEQ ID NO: 38264
  source 1..110: mol_type = other DNA

SEQ ID NO: 38267 - DNA, 110 bp, synthetic construct; identical to SEQ ID NO: 38265
  source 1..110: mol_type = other DNA

SEQ ID NO: 38268 - DNA, 110 bp, synthetic construct
  source 1..110: mol_type = other DNA
gctgtcccacaggtacctcacactcggtaagtcctcatctcccttccccttcaaagctctttctgtgccctcctcctggttaacggagacacagccagcttggaccaaac

SEQ ID NO: 38269 - DNA, 110 bp, synthetic construct
  source 1..110: mol_type = other DNA
tcaggttcattaaccactgagccatgataggaactccaattatactctttgatgtgcttgttggattcattccccaactggactttaagctccttaaagacagtgactta

SEQ ID NO: 38270 - DNA, 110 bp, synthetic construct; identical to SEQ ID NO: 38269
  source 1..110: mol_type = other DNA

SEQ ID NO: 38271 - DNA, 110 bp, synthetic construct
  source 1..110: mol_type = other DNA
acttgttttccttaaaaccgaagtcattgaaattctgtctcagtgtctgaagacgtatacaaggttaccctgagagcagagaggacttgtgtgtgccatgattcacgagt

SEQ ID NO: 38272 - DNA, 110 bp, synthetic construct
  source 1..110: mol_type = other DNA
atactaagaatttcaagttccctgccttccaaaagactggagtgtttgccttaactagactgatcatcttaaagctgtactccggcactctgatcactattctacctaaa

SEQ ID NO: 38273 - DNA, 110 bp, synthetic construct
  source 1..110: mol_type = other DNA
tagactgatcatcttaaagctgtactccggcactctgatcactattctacctaaatttgccaggctgacgtcactgagatagaaaagtttaaatatgacctgactgctta

SEQ ID NO: 38274 - DNA, 110 bp, synthetic construct; identical to SEQ ID NO: 38272
  source 1..110: mol_type = other DNA

SEQ ID NO: 38275 - DNA, 110 bp, synthetic construct; identical to SEQ ID NO: 38273
  source 1..110: mol_type = other DNA

SEQ ID NO: 38276 - DNA, 110 bp, synthetic construct
  source 1..110: mol_type = other DNA
tacactggtactacgggcaatggattcaggcaagcctgaccaagctcctacactgccctcacgggcatggcctggggagctggaggaggcttgttgctaagtggaaatgt

SEQ ID NO: 38277 - DNA, 110 bp, synthetic construct
  source 1..110: mol_type = other DNA
ccctcacgggcatggcctggggagctggaggaggcttgttgctaagtggaaatgttcctccctgtattgcttctttggaaagttcttagagatggctgagaattttgatc

SEQ ID NO: 38278 - DNA, 110 bp, synthetic construct
  source 1..110: mol_type = other DNA
acattggtctactgttctatggcaaaacgacatcctcttctttctctatctaagcttataaaaatagttactaattttgccactctgttgagtggtctgtcttttcttct

SEQ ID NO: 38279 - DNA, 110 bp, synthetic construct
  source 1..110: mol_type = other DNA
ttataaaaatagttactaattttgccactctgttgagtggtctgtcttttcttctttgatctcgtatttgcttttaaccatagaaagctttaacaataatgcagaatggt

SEQ ID NO: 38280 - DNA, 110 bp, synthetic construct
  source 1..110: mol_type = other DNA
gaacaagtctgtgcattagaatcatctgaggaataacttttaaaagagtccctcgtcttagccaggagagtcatttgaatcaaatggatataatgtcaggcagcagttct

SEQ ID NO: 38281 - DNA, 110 bp, synthetic construct
  source 1..110: mol_type = other DNA
taaaaataaaggtggtaatactcagaacgcatcactttttaattcttttttctattttttttctcttgcagttccctaagacacaattagcataccacactgtccaaatt

SEQ ID NO: 38282 - DNA, 110 bp, synthetic construct; identical to SEQ ID NO: 38281
  source 1..110: mol_type = other DNA

SEQ ID NO: 38283 - DNA, 110 bp, synthetic construct
  source 1..110: mol_type = other DNA
gctctctgcccatctgcaaatatcaacaccatgtccaatccttcccactccagatcctagaggatttgaacccctattccagcccataccctacttcccccagtggtagt

SEQ ID NO: 38284 - DNA, 110 bp, synthetic construct
  source 1..110: mol_type = other DNA
gagggaaggtctctagcccaagggaacaaagcaggttgacttcagagctcagactggactccaagtctcctgaaattcagcctggccctccttctctggccagccacatc

SEQ ID NO: 38285 - DNA, 110 bp, synthetic construct
  source 1..110: mol_type = other DNA
tcccacaggtaatagtcatactctgttaaaaataggaaaaacaatcatctaaatgcaatggataaacagaaacatagcaagagtcgatacacaggcaaagggaaaaattt

SEQ ID NO: 38286 - DNA, 110 bp, synthetic construct
  source 1..110: mol_type = other DNA
tttaagacagctcacagaatagcctcaagggcaagaccttggccttataatgcagctttggcttctatgacaacatatgctagtatcagttgtttcaccctgaatatgcc

SEQ ID NO: 38287 - DNA, 110 bp, synthetic construct
  source 1..110: mol_type = other DNA
ctttggcttctatgacaacatatgctagtatcagttgtttcaccctgaatatgcccatgttttcttgttacttcttccactactaggtgctggctctggcttcttcactc

SEQ ID NO: 38288 - DNA, 110 bp, synthetic construct
  source 1..110: mol_type = other DNA
ggcaagaatgcctcttgtaaaatgtaaagtaccttccattgccctctagttctctcttctaattggtcatcagggcacttagcaataccgtccttatgatgtaccagttt

SEQ ID NO: 38289 - DNA, 110 bp, synthetic construct
  source 1..110: mol_type = other DNA
gggttagaaaatacaagaaaggatagagaatgagcctgcaggagttgaaggcagcttcctagatgctgtttgagctatatctcgacaaatgaggaaaatattcttcagga

SEQ ID NO: 38290 - DNA, 110 bp, synthetic construct
  source 1..110: mol_type = other DNA
ttcctagatgctgtttgagctatatctcgacaaatgaggaaaatattcttcaggaggaggtgagaaagcccatgtggtgcacaaagaaggtgtgacggggtatcagcatg

SEQ ID NO: 38291 - DNA, 110 bp, synthetic construct
  source 1..110: mol_type = other DNA
agcttagtggattaagggtctggcattgtcatgagctgtggtatatgtaggttgcagaatcggatgccttgttgctgtggctgtagttatggccagcagctgcagttcct

SEQ ID NO: 38292 - DNA, 110 bp, synthetic construct
  source 1..110: mol_type = other DNA
gggtctggcattgtcatgagctgtggtatatgtaggttgcagaatcggatgccttgttgctgtggctgtagttatggccagcagctgcagttcctattcgacccctagcc

SEQ ID NO: 38293 - DNA, 110 bp, synthetic construct; identical to SEQ ID NO: 38291
  source 1..110: mol_type = other DNA

SEQ ID NO: 38294 - DNA, 110 bp, synthetic construct; identical to SEQ ID NO: 38292
  source 1..110: mol_type = other DNA

SEQ ID NO: 38295 - DNA, 110 bp, synthetic construct
  source 1..110: mol_type = other DNA
aacaatagaatctttgagagccacatcttttgaatttgttactgtgctgcacaatatgcttaggtttaaaagaaaaagagtatgactttcaagccagggttattaataac

SEQ ID NO: 38296 - DNA, 110 bp, synthetic construct
  source 1..110: mol_type = other DNA
acttggtgattatcataaaggcctcagttggctctgattctcattttgtacttaagaagcaatcacaaaaaaagtagctgatttaggaatttgatcaactaaaccaagct

SEQ ID NO: 38297 - DNA, 110 bp, synthetic construct
  source 1..110: mol_type = other DNA
ggaactcccagattctgaatatattttaaagatagggtgagagagaagagtcagggaccattcagtaattttaggtctggacaattggaaaggtggagttgccttgaaat

SEQ ID NO: 38298 - DNA, 110 bp, synthetic construct; identical to SEQ ID NO: 38297
  source 1..110: mol_type = other DNA

SEQ ID NO: 38299 - DNA, 110 bp, synthetic construct
  source 1..110: mol_type = other DNA
ttaaactccattcttatgcgctgtcttgcaatttacagaaatgtttgaacttatcatcttaagctgtaattgtttgaggtgtgcttgttacctatacttcccttccctct

SEQ ID NO: 38300 - DNA, 110 bp, synthetic construct
  source 1..110: mol_type = other DNA
tgttctagactctgaatgttggcatctgactcatttgagtcagagattctgctgcttacaccgataatcaccaggcagcttgcctgctaagtttcctgccatctctaaat

SEQ ID NO: 38301 - DNA, 110 bp, synthetic construct
  source 1..110: mol_type = other DNA
ttacaccgataatcaccaggcagcttgcctgctaagtttcctgccatctctaaattgatctccacttccaggcaacctcaactttctgatgttttcaacttccttatgat

SEQ ID NO: 38302 - DNA, 110 bp, synthetic construct
  source 1..110: mol_type = other DNA
ccattcccataggctacagtgttcattgtgcccctgaaggtgagcaatgtggcggctgcaccagggcatggaaacgtgggaggctggttgggaattcccacgtgggtgtt

SEQ ID NO: 38303 - DNA, 110 bp, synthetic construct
  source 1..110: mol_type = other DNA
tggaactcagagccatgcttgctgtgcactggtgtgtggctccctggccctggggatttcagtaaaggccttggtgatggtcgggaactatagagttccccggctgaacc

SEQ ID NO: 38304 - DNA, 110 bp, synthetic construct
  source 1..110: mol_type = other DNA
atttcagtaaaggccttggtgatggtcgggaactatagagttccccggctgaacctgttcacccacatccttgaacagacagggaaacaaggattctgcaaatggaacaa

SEQ ID NO: 38305 - DNA, 110 bp, synthetic construct; identical to SEQ ID NO: 38303
  source 1..110: mol_type = other DNA

SEQ ID NO: 38306 - DNA, 110 bp, synthetic construct; identical to SEQ ID NO: 38304
  source 1..110: mol_type = other DNA

SEQ ID NO: 38307 - DNA, 110 bp, synthetic construct
  source 1..110: mol_type = other DNA
attcctctcttctttcatgaacctggaaggaaattccccacagattaacagaactgcctgaagctggtgactgccaagcaaggggagccaatgacaactaccaaaataaa

SEQ ID NO: 38308 - DNA, 110 bp, synthetic construct
  source 1..110: mol_type = other DNA
atgaattgtacgtttcactgagctggcatttaacagacaggcacacaaataaacaggataattctagactgtagtaggggccacagaggaaataaacaggatgctataat

SEQ ID NO: 38309 - DNA, 110 bp, synthetic construct
  source 1..110: mol_type = other DNA
cctctttctctttgacagataattaattaattaattaattaattctgatgtactttaatgtatttaccagctattgaactcagcaggctctgtattcctttctactcttg

SEQ ID NO: 38310 - DNA, 110 bp, synthetic construct
  source 1..110: mol_type = other DNA
ggaataagataacatgacgagcagcagcccagagcttatgactgccaaggccaggtgaagttggaaggtctacgggttcaaagcatcacacttggttctaaacccgggat

SEQ ID NO: 38311 - DNA, 110 bp, synthetic construct
  source 1..110: mol_type = other DNA
ctctcaacttgccagtacattttccttgctggcctcaaactttggatctatcatggccctagctttcttagatcctggccctgagctgagtatgtaggagaggttcccag

SEQ ID NO: 38312 - DNA, 110 bp, synthetic construct
  source 1..110: mol_type = other DNA
tcatgtatatgcataatgcattatattacagtatttgtttctctgtgagttttggtcattagtacaatggaaaaacatgggctctgtagggaaataagcttggcttcaaa

SEQ ID NO: 38313 - DNA, 110 bp, synthetic construct
  source 1..110: mol_type = other DNA
cagacatttttttttttggaagtggttccaggttccagtgaacaagaaatgagagggggagaataaaacaattcaagagtgcattattgtgcaggccaccaatgtggttg

SEQ ID NO: 38314 - DNA, 110 bp, synthetic construct
  source 1..110: mol_type = other DNA
ggggagaataaaacaattcaagagtgcattattgtgcaggccaccaatgtggttgatgagcttgatcctgctagtaccttgtaaaggagctgtgcaatcatgttccagaa

SEQ ID NO: 38315 - DNA, 110 bp, synthetic construct
  source 1..110: mol_type = other DNA
agtcagggaagtgccaggccaggctgaggagcagcattccagtgggtgggtctaatgtcagggaggtggattccatcccatttccagctgcaccaaacgctgattttggc

SEQ ID NO: 38316 - DNA, 110 bp, synthetic construct
  source 1..110: mol_type = other DNA
agtgctcacctttcctcagtaaaatatatggaaacacaaaattttgaaaacatttgcaggatgctcaagaccccctgaaggcctttcatggactcaaggtaataacaatg

SEQ ID NO: 38317 - DNA, 110 bp, synthetic construct; identical to SEQ ID NO: 38316
  source 1..110: mol_type = other DNA

SEQ ID NO: 38318 - DNA, 110 bp, synthetic construct
  source 1..110: mol_type = other DNA
agagtataaacttactgacagctggtgcttgtcaaaggagttgtaaaggcgaaggtgccagacttgacgtgatgggagtgtttccttggtaataaagtcttccctagatg

SEQ ID NO: 38319 - DNA, 110 bp, synthetic construct
  source 1..110: mol_type = other DNA
agtagtgtttaacgcccattcttattaggatgaacgtggtgacaataaagtgagaggagcacagactcaacagcaactaggtgaaatagttgatgcaagcccaacacaca

SEQ ID NO: 38320 - DNA, 110 bp, synthetic construct
  source 1..110: mol_type = other DNA
atgtattacaactttttaaagtcctattttttcccccatcttaattgcaagacgagggagtctaattgtgatcactgtgcacagaatctaggaaaagacaactgcctcca

SEQ ID NO: 38321 - DNA, 110 bp, synthetic construct
  source 1..110: mol_type = other DNA
ctttaccataaatcacgtgttttgtcaagcttctatcacatcctgattcttcactgtcaacatcaacaacgcatacaatgtaactgggtgaaaactatgggaagacatct

SEQ ID NO: 38322 - DNA, 110 bp, synthetic construct
  source 1..110: mol_type = other DNA
gtttccagccagggtgtgggggaaaagccaaagctggcaacgagcgacccaccctcaggtgtatagcccgccggaagggacctgcagtctagagagcagtaatcaggact

SEQ ID NO: 38323 - DNA, 110 bp, synthetic construct
  source 1..110: mol_type = other DNA
gggtactttcaagtatatgtatgtgaatgaatgtctgtgagattaaaattatcattagaaataggatcctgcaatcccactcctgggcgtacatcggagaaaactctagt

SEQ ID NO: 38324 - DNA, 110 bp, synthetic construct
  source 1..110: mol_type = other DNA
cttttcgtttcatgtatcttttcatttcttcctaaggcgagagatgtaaaaataataatcctcagcacctccgtttttatttgggatgtgagcagatctgttttataccc

SEQ ID NO: 38325 - DNA, 110 bp, synthetic construct
  source 1..110: mol_type = other DNA
taatcctcagcacctccgtttttatttgggatgtgagcagatctgttttatacccttcccccgaagacagggtacagggtcgtaatagtgaagatctttcaggaacgaac

SEQ ID NO: 38326 - DNA, 110 bp, synthetic construct
  source 1..110: mol_type = other DNA
tttgactttttcatcccctctccccaactcattgagctttttttttttttctatcagctaccgtattgaattcctccaatattgctaatgctcttccttcttccatgagc

SEQ ID NO: 38327 - DNA, 110 bp, synthetic construct
  source 1..110: mol_type = other DNA
agctaccgtattgaattcctccaatattgctaatgctcttccttcttccatgagccagaggagtttgaggactagaagaatggatgaaaggaaaccttcccttctccagg

SEQ ID NO: 38328 - DNA, 110 bp, synthetic construct; identical to SEQ ID NO: 38326
  source 1..110: mol_type = other DNA

SEQ ID NO: 38329 - DNA, 110 bp, synthetic construct; identical to SEQ ID NO: 38327
  source 1..110: mol_type = other DNA

SEQ ID NO: 38330 - DNA, 110 bp, synthetic construct
  source 1..110: mol_type = other DNA
cccagagggggcacgtccttcagcttagaaccactttataccttctgtacctgagaaaggcccctccagttgtcaaaacccagctcaaaatcttccttcccttcttgcct

SEQ ID NO: 38331 - DNA, 110 bp, synthetic construct
  source 1..110: mol_type = other DNA
accacagccacagctatagcagatctgaactgcatctgtgacatacactacagcttgtggcaatgctgcatctgtgacatacactacagcttgtggcaatgctggatcct

SEQ ID NO: 38332 - DNA, 110 bp, synthetic construct; identical to SEQ ID NO: 38331
  source 1..110: mol_type = other DNA

SEQ ID NO: 38333 - DNA, 110 bp, synthetic construct; identical to SEQ ID NO: 38331
  source 1..110: mol_type = other DNA

SEQ ID NO: 38334 - DNA, 110 bp, synthetic construct; identical to SEQ ID NO: 38331
  source 1..110: mol_type = other DNA

SEQ ID NO: 38335 - DNA, 110 bp, synthetic construct
  source 1..110: mol_type = other DNA
gaccaggccagggtgtttactcagctgtttaaccaagaatctagataaacatatggaacatttaagatgcatttcttggagtctttataactgagataagttgtaataac

SEQ ID NO: 38336 - DNA, 110 bp, synthetic construct
  source 1..110: mol_type = other DNA
gaaagatgtggagcaaagagctctctaccgagcaggagctaaaaacagataaacgtttataagtatttgaacgtgggaatgcgatcaacacatcttagagtggtggggat

SEQ ID NO: 38337 - DNA, 110 bp, synthetic construct
  source 1..110: mol_type = other DNA
agtatagggatttcttttgcgaaagacattgagagaggagacaatgacaactaatgtttgaaagctggaaagcagataagcagttgagcagacctttaaaacaggcatgg

SEQ ID NO: 38338 - DNA, 110 bp, synthetic construct
  source 1..110: mol_type = other DNA
gtttgaaagctggaaagcagataagcagttgagcagacctttaaaacaggcatgggaatgctgagcactgaccctattaatactgcagaatcctcaaaagattcagcaaa

SEQ ID NO: 38339 - DNA, 110 bp, synthetic construct
  source 1..110: mol_type = other DNA
cccccacaagagtatctactacatgctaaacactcaatatgtgcatttgtatgcaggctttccagagagctcttcttttaagcaaatgtacatttcttctggcttgagag

SEQ ID NO: 38340 - DNA, 110 bp, synthetic construct
  source 1..110: mol_type = other DNA
agagattcaaaccgtctgaggaagcagatgagaacttggcctgcaatgtttttaatgcctttgggataacctactagaatccagaccatcagcattagagagagagcggc

SEQ ID NO: 38341 - DNA, 110 bp, synthetic construct
  source 1..110: mol_type = other DNA
tgcctttgggataacctactagaatccagaccatcagcattagagagagagcggctgatgagctgaaatccctaggttctacttctgatacacaagtgcagggtaaaccc

SEQ ID NO: 38342 - DNA, 110 bp, synthetic construct
  source 1..110: mol_type = other DNA
atgtctaactaagtaattaaaacacttagaaaggtactctgccccactatctatcagtggaattgcagttccctctggaaatatcccagacataccaaattctctcagta

SEQ ID NO: 38343 - DNA, 110 bp, synthetic construct
  source 1..110: mol_type = other DNA
gatctcagatatgcacagagatgcatgtacaaggatattcttctcaaagctgtccagcaatttcaaaagtttggaaggacttgcactatagggaatagttaaatgattta

SEQ ID NO: 38344 - DNA, 110 bp, synthetic construct
  source 1..110: mol_type = other DNA
aaagtatgcatactgcatgaaatgaggaccccaggctgggcctctataagctgctaattgaaaaccttgtcaaaagtgggagaaagaggcagaggagaaaaaacaactgt

SEQ ID NO: 38345 - DNA, 110 bp, synthetic construct
  source 1..110: mol_type = other DNA
aattgaaaaccttgtcaaaagtgggagaaagaggcagaggagaaaaaacaactgttggcaggactttttcatactgtgaacagcaacacaccctcccagagggtggacct

SEQ ID NO: 38346 - DNA, 110 bp, synthetic construct
  source 1..110: mol_type = other DNA
ggagtgcttgatctttgggatgctcatagtccaatgccaagatagcaccctgtgtggtgaatgctctaaaaagggaggaaggttgggggaaggtgactgacgaggagaga

SEQ ID NO: 38347 - DNA, 110 bp, synthetic construct
  source 1..110: mol_type = other DNA
ggtgaatgctctaaaaagggaggaaggttgggggaaggtgactgacgaggagagacacccgagctatatcttaacgatgcaaggagttcactgagaagacagaggcgtaa

SEQ ID NO: 38348 - DNA, 110 bp, synthetic construct; identical to SEQ ID NO: 38346
  source 1..110: mol_type = other DNA

SEQ ID NO: 38349 - DNA, 110 bp, synthetic construct; identical to SEQ ID NO: 38347
  source 1..110: mol_type = other DNA

SEQ ID NO: 38350 - DNA, 110 bp, synthetic construct
  source 1..110: mol_type = other DNA
tgtctccaagtagatagtgtccgaattgagatgaattgtaggacacgcagctagtgttggagaattgcttgatgtgggggggtggaaacccacactaaagtccagcaatt

SEQ ID NO: 38351 - DNA, 110 bp, synthetic construct
  source 1..110: mol_type = other DNA
gttggagaattgcttgatgtgggggggtggaaacccacactaaagtccagcaattccacttatacaaacttaccctataaaagtcataatggatatctgcaaagattgat

SEQ ID NO: 38352 - DNA, 110 bp, synthetic construct
  source 1..110: mol_type = other DNA
gattaagaacacttggtcaagttaagtagcaatacttgagtaaccaagcctccatgagaaggtgagatttgaggatgatttgtaagcttaaaaagcattagtatctctaa

SEQ ID NO: 38353 - DNA, 110 bp, synthetic construct
  source 1..110: mol_type = other DNA
gagaaggtgagatttgaggatgatttgtaagcttaaaaagcattagtatctctaaaggtatctataggaagagtttcctggggacagggaacaggcagtacaaaggtcct

SEQ ID NO: 38354 - DNA, 110 bp, synthetic construct
  source 1..110: mol_type = other DNA
ccattccagacccgttccagaaccaacagtctatgacttggagtctgtattataatctgtagtgagtagggcatgtgttttatcagggaactgataacaatggtgctggt

SEQ ID NO: 38355 - DNA, 110 bp, synthetic construct
  source 1..110: mol_type = other DNA
tctgtagtgagtagggcatgtgttttatcagggaactgataacaatggtgctggtgaagaggatggcattgccaactaaaataagaggaagaagttatagaaatggggtt

SEQ ID NO: 38356 - DNA, 110 bp, synthetic construct; identical to SEQ ID NO: 38354
  source 1..110: mol_type = other DNA

SEQ ID NO: 38357 - DNA, 110 bp, synthetic construct; identical to SEQ ID NO: 38355
  source 1..110: mol_type = other DNA

SEQ ID NO: 38358 - DNA, 110 bp, synthetic construct
  source 1..110: mol_type = other DNA
tccttcctcagtccccctctattctgggaccccaggaaatatcgagagctgaagaagacatctttggaagcacaggaggctgaagccattgcggatgttttgtgagtatg

SEQ ID NO: 38359 - DNA, 110 bp, synthetic construct
  source 1..110: mol_type = other DNA
tgggacatgggttcaaatcctggtctgggaatttccacatgctatgggtgagaggccaaaaaaaaaaaaatattgttattgagcatttagatcatgtggcagacaacttt

SEQ ID NO: 38360 - DNA, 110 bp, synthetic construct
  source 1..110: mol_type = other DNA
ccaaaaaaaaaaaaatattgttattgagcatttagatcatgtggcagacaactttatgctgttttaatgacggcattttagactcgttgggtttggagttcaatatcgct

SEQ ID NO: 38361 - DNA, 110 bp, synthetic construct
  source 1..110: mol_type = other DNA
acatcaattcaaaaagatacaggtgggggttcctgttgtgaatcagcagtaacgaatgcaattggtatccacgaggacgcagatttaatccctggcctcgctcagtgggt

SEQ ID NO: 38362 - DNA, 110 bp, synthetic construct; identical to SEQ ID NO: 38361
  source 1..110: mol_type = other DNA

SEQ ID NO: 38363 - DNA, 110 bp, synthetic construct
  source 1..110: mol_type = other DNA
attctactcagacccttccaggaatacaacactcccttttcaaagcagccaacagatagctcaggtgaaaattacttgctaggctgtcagtaactttaaacaacctacat

SEQ ID NO: 38364 - DNA, 110 bp, synthetic construct
  source 1..110: mol_type = other DNA
tcaaaatccctccaggatcaagccgttgcaaaagggcaccactctccctctcttgagctttgttttaattccttatctgtcccttacttccaccactgttctctgtaact

SEQ ID NO: 38365 - DNA, 110 bp, synthetic construct
  source 1..110: mol_type = other DNA
agctttgttttaattccttatctgtcccttacttccaccactgttctctgtaactggaatgacatttagaagacaattcttatcgcatctctttcctgctgttactttcc

SEQ ID NO: 38366 - DNA, 110 bp, synthetic construct; identical to SEQ ID NO: 38364
  source 1..110: mol_type = other DNA

SEQ ID NO: 38367 - DNA, 110 bp, synthetic construct; identical to SEQ ID NO: 38365
  source 1..110: mol_type = other DNA

SEQ ID NO: 38368 - DNA, 110 bp, synthetic construct
  source 1..110: mol_type = other DNA
tcaaaggcataatcagtatctattagcttcctttctttctgacgtgtagttccgtcttgaaaaaaataaattagaagtcacgacagggagacccagtagaagttcccagg

SEQ ID NO: 38369 - DNA, 110 bp, synthetic construct
  source 1..110: mol_type = other DNA
aatgatctgcgacacaactaaatagatcggatagtgatgaggcagtccccttgtcactcatgattgtgaggaaaaagcctgagtttggtattagtctgtcttcaacacct

SEQ ID NO: 38370 - DNA, 110 bp, synthetic construct
  source 1..110: mol_type = other DNA
taaataacttgtctaaagtcatagagctgggaaaggatgtaggtaggctttgaacacaggcagtctgactccagagccattactagataaacatgagcaggggctcctca

SEQ ID NO: 38371 - DNA, 110 bp, synthetic construct
  source 1..110: mol_type = other DNA
atgacacctgtcacacatttgctgttgtatgtgatttttctcctctatgaaacccaaagctcttggagggtaaaaatagtgtttcattcataatttagtctcaggtgcca

SEQ ID NO: 38372 - DNA, 110 bp, synthetic construct
  source 1..110: mol_type = other DNA
tagggggcagtgcgtcaaatctactttaacaaaggaacaggtcactgcctcacgactctctagcttctctcttgcttctttctgtctgtgacaaagaataagtaagagct

SEQ ID NO: 38373 - DNA, 110 bp, synthetic construct
  source 1..110: mol_type = other DNA
ggcattcagcggacactggtgctcttttctgggagtggtcaatccagttttttctgcagcagccagaggaaataggaaggactaaagcggtgaaggtgaagacaggagca

SEQ ID NO: 38374 - DNA, 110 bp, synthetic construct
  source 1..110: mol_type = other DNA
cagcagtgtcagaaactgtcttcagttttaattgaagtgtgtaaaaatcctgagagggaaagctagagtttcttaaaatgtaaacttgaggaagacctccccaaacagta

SEQ ID NO: 38375 - DNA, 110 bp, synthetic construct
  source 1..110: mol_type = other DNA
gggaaagctagagtttcttaaaatgtaaacttgaggaagacctccccaaacagtaaaagttgtcttaattgacttcgaggttgattcctggccgaatttcggtttgtgtc

SEQ ID NO: 38376 - DNA, 110 bp, synthetic construct
  source 1..110: mol_type = other DNA
tagccaaccaagttctatgccaacctcttaagtctctaacacaaaataattaagtaactgcaagctaagacaaaatgactttcccagaaacaagtcagaaaaagtgcaag

SEQ ID NO: 38377 - DNA, 110 bp, synthetic construct; identical to SEQ ID NO: 38376
  source 1..110: mol_type = other DNA

SEQ ID NO: 38378 - DNA, 110 bp, synthetic construct
  source 1..110: mol_type = other DNA
ttctgtatgtctccaacatggtagcaactaggataaacattttaagcaaaatattaataaatctaatcctctcctggagaactaggttaatgtgcatttccagcagattc

SEQ ID NO: 38379 - DNA, 110 bp, synthetic construct
  source 1..110: mol_type = other DNA
ccccatggaggaatcaagaagattagagtcacacctgtgcagatagctgagtttctattccctagttatcccccctaccccctgcctcatgaaaaggtagtagttaatct

SEQ ID NO: 38380 - DNA, 110 bp, synthetic construct
  source 1..110: mol_type = other DNA
gatgtttcattacagtaagacctgaagacaatcagctctttccacatagtgggggaatcaagggtgggcactgaaagcaaatagaattttgggagctggaatggtcatac

SEQ ID NO: 38381 - DNA, 110 bp, synthetic construct
  source 1..110: mol_type = other DNA
aatcaagggtgggcactgaaagcaaatagaattttgggagctggaatggtcatactgaaactggtaaagaggaagtatttgcattaaagtgaccacttctgcatcacatt

SEQ ID NO: 38382 - DNA, 110 bp, synthetic construct
  source 1..110: mol_type = other DNA
accagtgcatggagtgcttccatgctcaggccctgattacctgtgagttggagaagttccaaaactagccagctgaatgcactagcatcacaccaacaaaaccaaagact

SEQ ID NO: 38383 - DNA, 110 bp, synthetic construct
  source 1..110: mol_type = other DNA
gttccaaaactagccagctgaatgcactagcatcacaccaacaaaaccaaagacttaatggatgcaggaagcaaatatgtagaagaactcataagccacatgacttccat

SEQ ID NO: 38384 - DNA, 110 bp, synthetic construct
  source 1..110: mol_type = other DNA
aagtctttatttgacatgtaagaaatatgtcataactgtcacaaaagataaataatgcaagtatgacacagagacaagtatgtcttaggagctaccagtatcacatccat

SEQ ID NO: 38385 - DNA, 110 bp, synthetic construct; identical to SEQ ID NO: 38384
  source 1..110: mol_type = other DNA

SEQ ID NO: 38386 - DNA, 110 bp, synthetic construct
  source 1..110: mol_type = other DNA
agaattatcgcatggaaaaattcaccatgcagtataattgtcagaaaacaatcagagtcagagatcattcacattgatcacagtgatacaacttagaggttgtgggcttc

SEQ ID NO: 38387 - DNA, 110 bp, synthetic construct
  source 1..110: mol_type = other DNA
agtcagagatcattcacattgatcacagtgatacaacttagaggttgtgggcttcgtttaaatctttgaatgtatttacagtaagtctttttattctaggacttgtaaat

SEQ ID NO: 38388 - DNA, 110 bp, synthetic construct
  source 1..110: mol_type = other DNA
ttatattttgccccacagcatttttagagtaattttataaagcaaggcactttgatatacttttccttcttcttggatccttcagattctaagatggcaagagcagcagg

SEQ ID NO: 38389 - DNA, 110 bp, synthetic construct
  source 1..110: mol_type = other DNA
ttccagggatagtgctagcctgctggtggatgtgctgggttcgtacacagtacagtgcagttctgcattagtcccggagctgtttttgacctgctaatgggcggggctgg

SEQ ID NO: 38390 - DNA, 110 bp, synthetic construct
  source 1..110: mol_type = other DNA
taacatgtgttcattcacccatacttcagcaactatttatagaatgtcagctaccagtacaaagcactgtgtgagggctgggcagctaatcatgaatctccacatggagc

SEQ ID NO: 38391 - DNA, 110 bp, synthetic construct
  source 1..110: mol_type = other DNA
agtacaaagcactgtgtgagggctgggcagctaatcatgaatctccacatggagcttctgctctaggaaaaaattttcaactagcaatatgataaggactacaaagaaat

SEQ ID NO: 38392 - DNA, 110 bp, synthetic construct
  source 1..110: mol_type = other DNA
taaccgggtttcaggggtctgtatttctgccaagtaggtggataccttcttagaatatagggatgaggccatccaaccccaagaagaaatagtgataaaatcggcaaaac

SEQ ID NO: 38393 - DNA, 110 bp, synthetic construct
  source 1..110: mol_type = other DNA
atattcattttagaaagtcaggtgtcttaacatcacgccattttcagaaaaagcgatgctataaaaccagcaatggtttgctaacagatacaggaaaaggaatcaccatt

SEQ ID NO: 38394 - DNA, 110 bp, synthetic construct
  source 1..110: mol_type = other DNA
tccaatgagggcaaatggatgtttcttcaggcagctaagggaggaggagataataccacatttgcagtgttgcaggtaaggttttgtgttggcagtggacaacttgcaga

SEQ ID NO: 38395 - DNA, 110 bp, synthetic construct
  source 1..110: mol_type = other DNA
cccagcacccgtgtcacctaagtagagctaaaggctttgcatacattatcacgtctgccagatgaatatcgtcttttacagatgcagagacaaaggctcagaaagatcac

SEQ ID NO: 38396 - DNA, 110 bp, synthetic construct
  source 1..110: mol_type = other DNA
attctccaatttgtcccatctctttcacttttgcacacacacatacactctgcccttagtctttttttggctcatttgagagcaagctgcagatgtgatactctgatacc

SEQ ID NO: 38397 - DNA, 110 bp, synthetic construct
  source 1..110: mol_type = other DNA
aggccttttccctttctaactcacctttcatgtagacgccactgctttttcttctaaattcttaaaaacagaaaaaaattaaaagataaattctcaacacaactgaacaa

SEQ ID NO: 38398 - DNA, 110 bp, synthetic construct
  source 1..110: mol_type = other DNA
ctaactcacctttcatgtagacgccactgctttttcttctaaattcttaaaaacagaaaaaaattaaaagataaattctcaacacaactgaacaaaagtgatgccattag

SEQ ID NO: 38399 - DNA, 110 bp, synthetic construct
  source 1..110: mol_type = other DNA
caaagggattatcttgtcactagagatggaagtgtaagatttgtgcttagcatggtaaataatgtcgttcttatccaagccagtagttcttattcccattttcttgatct

SEQ ID NO: 38400 - DNA, 110 bp, synthetic construct
  source 1..110: mol_type = other DNA
catgaaatcagaaatgatttcatgctagatctcaaaggtcacttcagagcttttttgaaaaaattattgctttatcagttttcatttttgctacataactggaatggccg

SEQ ID NO: 38401 - DNA, 110 bp, synthetic construct
  source 1..110: mol_type = other DNA
attttgaatgtggtacaagctatgacaaagacttgcccttcccggggcgggagcgaggaatgtggtatggagcactgcttctcagactttaatgtgcttatgaaacattt

SEQ ID NO: 38402 - DNA, 110 bp, synthetic construct
  source 1..110: mol_type = other DNA
ttggctgttgaaaacatccctcacatccttccactttctgtttactcaccgcagtgaacttagaggccacgtgttccagcagatcttagatggacaagggctacccatcc

SEQ ID NO: 38403 - DNA, 110 bp, synthetic construct
  source 1..110: mol_type = other DNA
gaacttagaggccacgtgttccagcagatcttagatggacaagggctacccatcccatagaaaaccaccacatgggtgaggaaaaacacctttatggtttaggatttatt

SEQ ID NO: 38404 - DNA, 110 bp, synthetic construct
  source 1..110: mol_type = other DNA
actgaggatgacctctgagctgcactgaaggggagcatgaagtcccccttccatgagggtacacgctgtggagcactgctctgtctgcttggccaggctctagttcctat

SEQ ID NO: 38405 - DNA, 110 bp, synthetic construct
  source 1..110: mol_type = other DNA
tgtgcccacagctatgtgaccaagtcccccactccatcctccaagctggactttttaacaggaagggcattagtgagcataaaacccatcatccttttatatttcattgt

SEQ ID NO: 38406 - DNA, 110 bp, synthetic construct
  source 1..110: mol_type = other DNA
taacaggaagggcattagtgagcataaaacccatcatccttttatatttcattgttcctcttcttatatctggttgtcaacaaatgttcaacaggaaatttttcttttat

SEQ ID NO: 38407 - DNA, 110 bp, synthetic construct
  source 1..110: mol_type = other DNA
ctatgtacaatcatgaaccctccactctcaattctagcttctgttgaatgggagttgcaaaccacctacagctacagagagtttatgagcacgaggactcagaataggta

SEQ ID NO: 38408 - DNA, 110 bp, synthetic construct
  source 1..110: mol_type = other DNA
agagtgagatggcctctgaggagagtatagagggcctatgactgagctttaggaacccttatcttaaggctagacggaagcaaacgggcagagaaagtggaggaacagcc

SEQ ID NO: 38409 - DNA, 110 bp, synthetic construct
  source 1..110: mol_type = other DNA
cagtggatcatcctagatccttcctggctgatgacactggaaatgttgtctccctgcagtctcagatacctactaagctggctgagatgcactgcccagacaacttgggg

SEQ ID NO: 38410 - DNA, 110 bp, synthetic construct
  source 1..110: mol_type = other DNA
acaagaaaatgtctgtgtcccacatctcaaactatgaaaaggggcctccagcagagtaaatggaaaattttgttcttatcactatgccgaaattagggtttacatctgta

SEQ ID NO: 38411 - DNA, 110 bp, synthetic construct
  source 1..110: mol_type = other DNA
cccacatcctcttggatacaagttggattcattaccactgaactacaatggaactccgagactgacctgaccagtttgtttttttgttttgttttgtttgtttttggtct

SEQ ID NO: 38412 - DNA, 110 bp, synthetic construct
  source 1..110: mol_type = other DNA
tggtaagaattgggcacttttccaggatgcagtatatgctctgaatcagaggcatctatatggtgctatgtccccagtaggaagaaatgtgtgcatagaaaccaagaagt

SEQ ID NO: 38413 - DNA, 110 bp, synthetic construct
  source 1..110: mol_type = other DNA
aaccacagactaggaacattccaaatttacattcctgggtagtcctacaaacctcaagatatgggttaagttaaatgtgatgaagtactgatataaagtggtgaagagct

SEQ ID NO: 38414 - DNA, 110 bp, synthetic construct
  source 1..110: mol_type = other DNA
aagatatgggttaagttaaatgtgatgaagtactgatataaagtggtgaagagctgctgcaaggcttctgaggctaggtcagaaggactgcaacttccaccacattctct

SEQ ID NO: 38415 - DNA, 110 bp, synthetic construct
  source 1..110: mol_type = other DNA
ggattagtggctatttttcctgattcatgcttctgctaccataaaccctggatagttatataaaacaagctacttgctctcaatgtaatattaaaaaccaatattttaat

SEQ ID NO: 38416 - DNA, 110 bp, synthetic construct
  source 1..110: mol_type = other DNA
agatgctggaaatacagcagtgaacaagatagacaccttccacaccctcacggagcttacggtctagtagggaagacagacattaaacaaacaaacatacaaacaactga

SEQ ID NO: 38417 - DNA, 110 bp, synthetic construct
  source 1..110: mol_type = other DNA
cttacggtctagtagggaagacagacattaaacaaacaaacatacaaacaactgatgaaataattatcattccagaaaagtagtaaacaattttggaggcaaaacagctc

SEQ ID NO: 38418 - DNA, 110 bp, synthetic construct
  source 1..110: mol_type = other DNA
ccatctagaattttaaacacattttacatgaatatttcaccttctcaaggaaaggctgcttcaaccaacataaagacaggaaattcataggcaaacagagactcactgct

SEQ ID NO: 38419 - DNA, 110 bp, synthetic construct
  source 1..110: mol_type = other DNA
ctgcttcaaccaacataaagacaggaaattcataggcaaacagagactcactgctgtcagtaacaggaatcaaagctttctggtcatcttaaaaatacctcagtttagag

SEQ ID NO: 38420 - DNA, 110 bp, synthetic construct
  source 1..110: mol_type = other DNA
aatttgcttaaaagcaaatatgaattagttcacttaactaagaatatattaatacatcataaaagaagtataaaagagtgctcaggggagttcccataatggctcagtgg

SEQ ID NO: 38421 - DNA, 110 bp, synthetic construct; identical to SEQ ID NO: 38420
  source 1..110: mol_type = other DNA

SEQ ID NO: 38422 - DNA, 110 bp, synthetic construct
  source 1..110: mol_type = other DNA
caatatatgcttttcaaatatcacctctcactcactttggacaaaaagaatatgagatctattcttctttcctcaaaccaaggaatccacatgaattatgttgatgacct

SEQ ID NO: 38423 - DNA, 110 bp, synthetic construct
  source 1..110: mol_type = other DNA
ccgtattcggaagggcagaaaaagtctttacaccaatttaaaaactttcccccgagcttgtgggattaacatataaaactcaatggacaaggcaggtgggtcccctgctt

SEQ ID NO: 38424 - DNA, 110 bp, synthetic construct
  source 1..110: mol_type = other DNA
gcttgtgggattaacatataaaactcaatggacaaggcaggtgggtcccctgcttccctccaaattgaagccaagattaattacggtattcacctgttcctgaagcaggc

SEQ ID NO: 38425 - DNA, 110 bp, synthetic construct
  source 1..110: mol_type = other DNA
tcttcctagaaagtctcaaaagtttctctcttattctttccaaaataaatgcaagagacagagagctgttgtgctccctggttagttctctctcaaggatggacactttt

SEQ ID NO: 38426 - DNA, 110 bp, synthetic construct
  source 1..110: mol_type = other DNA
agacagagagctgttgtgctccctggttagttctctctcaaggatggacactttttcttcgtcatcataagggataagcagatgagccaatgaattttcatgtcagtttg

SEQ ID NO: 38427 - DNA, 110 bp, synthetic construct
  source 1..110: mol_type = other DNA
ggcattcttcaaggtgttagggcccacaggtgagcatcttttgccagcaacagattccttatcataagaggagctcctttaccctcaagtctcaataaagatcgtaaatg

SEQ ID NO: 38428 - DNA, 110 bp, synthetic construct
  source 1..110: mol_type = other DNA
ccagttcaggggctgttgaggggcatgagttcatctggctgggagtatttatgagccagggtttaaaggacaccattcaacaattcttggcccagggctgttttggctac

SEQ ID NO: 38429 - DNA, 110 bp, synthetic construct
  source 1..110: mol_type = other DNA
agggatgctgtctgtcctctgacctgttatgccaagttcagcgtaggcaggcaactgcccattttatagaccaagagcttgagatccagaggtacatttactggccattt

SEQ ID NO: 38430 - DNA, 110 bp, synthetic construct
  source 1..110: mol_type = other DNA
ccttctgcctccagataaaaataaggccttcccttccctgcctagtttgaacaagacactctgaaagtctcatgcaaatgaccagcttcctcagaacagaccagtggagc

SEQ ID NO: 38431 - DNA, 110 bp, synthetic construct
  source 1..110: mol_type = other DNA
acactctgaaagtctcatgcaaatgaccagcttcctcagaacagaccagtggagcagagcggcatcttgacaaacttgagcacaggggcatgttggacaaaattccagaa

SEQ ID NO: 38432 - DNA, 110 bp, synthetic construct
  source 1..110: mol_type = other DNA
ccctgggtgactccctcaggcttccatctccttttggggctacctctcaggatgggtagagggatggagccttggtttggaaagggctgcaatgtcaaggacaggacctg

SEQ ID NO: 38433 - DNA, 110 bp, synthetic construct
  source 1..110: mol_type = other DNA
gtagagggatggagccttggtttggaaagggctgcaatgtcaaggacaggacctgcctgctctaggaagcttgtgaatgcatgtgtgcgccagcttcctgtttgcctctt

SEQ ID NO: 38434 - DNA, 110 bp, synthetic construct
  source 1..110: mol_type = other DNA
ttggagtagagggtctcaaagttcaccaaatttctatgatactgtgagggcatctcttggattttggagctgcctgagaggccccagggtcatatagatgaagcttatat

SEQ ID NO: 38435 - DNA, 110 bp, synthetic construct
  source 1..110: mol_type = other DNA
atagaacatctaggggagcccaactataaaaacatccatgctttacatgcatttatataaccagctatctctaaggtatatttttgtatctctagatctggtattgttta

SEQ ID NO: 38436 - DNA, 110 bp, synthetic construct
  source 1..110: mol_type = other DNA
tgtctgtaactctaggtgttatcgattttacttccactgaatacatttcctctcaccccatgtctgtgttgcagcccccgtttgataatctgaccctcaaatctggtctc

SEQ ID NO: 38437 - DNA, 110 bp, synthetic construct
  source 1..110: mol_type = other DNA
atggcaactttacagcatgatgttagaggaaaaagtgtttggaaagggaataaggaaggcaaacaagaaaagcaagctttgaataagcaaattttcttaaaaggaatata

SEQ ID NO: 38438 - DNA, 110 bp, synthetic construct
  source 1..110: mol_type = other DNA
ctgagaccagcaagcaggtctggctcaggctcctattaacctcactattttgtccttgatcctagtgcgcatgagattttgtgtgagctcttttaagactctatttcccc

SEQ ID NO: 38439 - DNA, 110 bp, synthetic construct
  source 1..110: mol_type = other DNA
ccctttctctcatccttcctcttctactttttaatttttaaatttttgacaagcaaaatcatgattggagttttgatgagaagtattattggggataggagtaagtatta

SEQ ID NO: 38440 - DNA, 110 bp, synthetic construct
  source 1..110: mol_type = other DNA
tttagatctctggctggcacttccccctagccagaagcatctataagcttgagagaaaggagtatgggaactagtccattatatttcccagagcaacatggagaaggata

SEQ ID NO: 38441 - DNA, 110 bp, synthetic construct
  source 1..110: mol_type = other DNA
tgctgagatccccaagaacaggagcaaggcctggatctgccaggtcaactctgaagaataacataagtcaaagggcaagactgctgttgtttcagtaatcattccaacca

SEQ ID NO: 38442 - DNA, 110 bp, synthetic construct
  source 1..110: mol_type = other DNA
cccaagaaaggaatctggcaactcatagatgtttcctggcaggaaagaacagatgaagacactcaactctttgataggccagaaaagagaaaagactaaaccgcttcatt

SEQ ID NO: 38443 - DNA, 110 bp, synthetic construct
  source 1..110: mol_type = other DNA
gcttctaagaacaaaaagagtaataatacactgcagaaatgtgaaggtgacagtaaaaacacatagagctactggttattacttttagtaaagtaacatgtataatggta

SEQ ID NO: 38444 - DNA, 110 bp, synthetic construct
  source 1..110: mol_type = other DNA
gaagaattaaaagtaatattccaggtgcgaagctgaaaatagtttccaccattgtcaaaaagtttggccatgtgcttcccggaagtccgggaaagaaagaaacatggtag

SEQ ID NO: 38445 - DNA, 110 bp, synthetic construct; identical to SEQ ID NO: 38444
  source 1..110: mol_type = other DNA

SEQ ID NO: 38446 - DNA, 110 bp, synthetic construct
  source 1..110: mol_type = other DNA
aataatgttttttctttcctctagggggctgaaatatacacatgccttctcagagacctttcttcagcttcaggaataggctgggtttggggaatacctggactcctata

SEQ ID NO: 38447 - DNA, 110 bp, synthetic construct
  source 1..110: mol_type = other DNA
tgtacttagaaaactcttgccttaggccttagtttatttcttctcattattcacatggtcacctaactggaaagactatttctgagctctgcttctggttcccttcaaat

SEQ ID NO: 38448 - DNA, 110 bp, synthetic construct
  source 1..110: mol_type = other DNA
attagcataagttttgaagtctcttcaaaacatgtagtaacctctcaaatgttgagtgaattatcaaattcacttgctaagtgaaaattacacctgtccctaggaatatt

SEQ ID NO: 38449 - DNA, 110 bp, synthetic construct
  source 1..110: mol_type = other DNA
gtgaattatcaaattcacttgctaagtgaaaattacacctgtccctaggaatattaggtgtagaactaatcaggatacactgaaggttatagaccttatacttggaattc

SEQ ID NO: 38450 - DNA, 110 bp, synthetic construct
  source 1..110: mol_type = other DNA
tgctgagtagaatattcttggttgttagttttttcttatcgctctaagtatattgtgccacacacccttcttgcctgcagagtttctgctgaaaaatcagctgataacct

SEQ ID NO: 38451 - DNA, 110 bp, synthetic construct; identical to SEQ ID NO: 38450
  source 1..110: mol_type = other DNA

SEQ ID NO: 38452 - DNA, 110 bp, synthetic construct
  source 1..110: mol_type = other DNA
aattaaacaaccaaatatgtccaataactactaaagaaggcaaaattaagctctaaacaaacacatactcttctgaaaaaggcatctctaacctcagatggtgtcactgt

SEQ ID NO: 38453 - DNA, 110 bp, synthetic construct
  source 1..110: mol_type = other DNA
aacaaacacatactcttctgaaaaaggcatctctaacctcagatggtgtcactgtagaattccacaaaatacttaaaagatgagtaactctaactctacatattcaattc

SEQ ID NO: 38454 - DNA, 110 bp, synthetic construct
  source 1..110: mol_type = other DNA
tatactcagttaagtcagcttccagtatctgctgtcaaccatattcaaagctagtactgaataaacgagaaccagaacagaaaaacctctctcaatggtcagtccagtct

SEQ ID NO: 38455 - DNA, 110 bp, synthetic construct
  source 1..110: mol_type = other DNA
ctttttcaagaaaatctcattgaggctgagtatgcaaccagaccagagcccacatggaaggtagctttccttcggtcaaaaggtgtgacagccatttcaggataggtatt

SEQ ID NO: 38456 - DNA, 110 bp, synthetic construct
  source 1..110: mol_type = other DNA
gggcttgaccaaatggctcttgtactttaaagccagaatatctttataccatcagccctcagtcagtcgttgaataggtgccctataattttctccatactaagtatttt

SEQ ID NO: 38457 - DNA, 110 bp, synthetic construct
  source 1..110: mol_type = other DNA
gattgccttcacaacttcagtggacagcctcttcatgtgtcagagcacgtccatcctatcagagtggcccattcatgatttacatttatcacggctttaagatattgttt

SEQ ID NO: 38458 - DNA, 110 bp, synthetic construct
  source 1..110: mol_type = other DNA
gggtcaatacttcactttgctcactgggttgaggatcggtgtagctacaagccgaggaataggttgtagatggggctcaaactggtgttgctatggctgtggtgtacacc

SEQ ID NO: 38459 - DNA, 110 bp, synthetic construct
  source 1..110: mol_type = other DNA
agcaggaactcccagattgctttttaatactgcacttactaataaagcatttacagaaagtccttgacgtcagctcatggtcatcttcctgacccccctttatattttaa

SEQ ID NO: 38460 - DNA, 110 bp, synthetic construct
  source 1..110: mol_type = other DNA
gcaggggtaacctggggactccatacttgtgactagcatctaaagcgaaaacagtcttaggggtctgggcccttaaacctgtggcatctggtgctaactctgagaagtta

SEQ ID NO: 38461 - DNA, 110 bp, synthetic construct
  source 1..110: mol_type = other DNA
cttaggggtctgggcccttaaacctgtggcatctggtgctaactctgagaagttagtaccagaactgaattgaattataggatatacttggtgtccagagaatcagagaa

SEQ ID NO: 38462 - DNA, 110 bp, synthetic construct
  source 1..110: mol_type = other DNA
aagatagactggcaacccagctacgttggccagcctgtgaagagttttaaaacttgaacaattcaaacatgctccactcgtccctaccatccctgatgcctcacctgctc

SEQ ID NO: 38463 - DNA, 110 bp, synthetic construct
  source 1..110: mol_type = other DNA
tccagctcagagccttcacaacagtctgagtgttaaaggtttaaaaaaaaagcagcccatgtgaatctaggccaggcagcctctgcatgtgtcatagtaataaaattacc

SEQ ID NO: 38464 - DNA, 110 bp, synthetic construct
  source 1..110: mol_type = other DNA
tctctcaccttctgtcctcaccatcccaaggctctgcctttcctctccctacatagctaggtgcctaagctcaatgtatacctggagatgaccaggaatctagaggatgc

SEQ ID NO: 38465 - DNA, 110 bp, synthetic construct
  source 1..110: mol_type = other DNA
gtaagccctgtttcccatcctctcttctataagcttcaggatatttcttaagcatactttccttctttcattaaacaaatacattttctaggatttgaataataagttaa

SEQ ID NO: 38466 - DNA, 110 bp, synthetic construct
  source 1..110: mol_type = other DNA
gagccatccttctgtttgtaggctccctgggaacctccagatccatctcccaatgctagcactctaggtgcttcatcagctggtccctccattcagcttgaactccatgc

SEQ ID NO: 38467 - DNA, 110 bp, synthetic construct
  source 1..110: mol_type = other DNA
aacacagatgtctagttaatctgtttatattgtaagcacatgtgtatgttaacggagcacagacccctttaataagccagagttggaatataaaccaggagaattttaaa

SEQ ID NO: 38468 - DNA, 110 bp, synthetic construct
  source 1..110: mol_type = other DNA
ttcagcagaaactctgcaggccagaagggagtagcacaaaatatttaaagtggtggaagggaaaactgacaacaaaggatattctacccaacatggctcttattcaaact

SEQ ID NO: 38469 - DNA, 110 bp, synthetic construct; identical to SEQ ID NO: 38468
  source 1..110: mol_type = other DNA

SEQ ID NO: 38470 - DNA, 110 bp, synthetic construct
  source 1..110: mol_type = other DNA
gcactattctacactctttatagcatttcctggaagagtcgtatacggatagcatgtttatttccacaatttaccctctgtgtttcttgctctacactaaccctacagga

SEQ ID NO: 38471 - DNA, 110 bp, synthetic construct
  source 1..110: mol_type = other DNA
gcatgtttagtggttgatgctggctatcagctggaagcatcagtagctctccctattgactagtttgggcttgcttacaacatggtgagaaccagagagaagccatctct

SEQ ID NO: 38472 - DNA, 110 bp, synthetic construct
  source 1..110: mol_type = other DNA
tattttaattagaaatgtatagcaacattatctttttttattccttcattgcatcattgatgtacagttggccctttatatccatgggttctgcatctgtggattcaact

SEQ ID NO: 38473 - DNA, 110 bp, synthetic construct
  source 1..110: mol_type = other DNA
tgcgcgatgggtacaggggtctgaaggcctcaggaacagcttctggaaaaggcgcttcaaaccatgcctggaaggggaggagggttttatgttcagtctgggctgagcca

SEQ ID NO: 38474 - DNA, 110 bp, synthetic construct
  source 1..110: mol_type = other DNA
tggaccctcagggaaacagtctcctagctgctgcttctctttcactgtctctattctgaacgactcagtggcagcagccctgagttttttaacccctcaaacctaaagaa

SEQ ID NO: 38475 - DNA, 110 bp, synthetic construct
  source 1..110: mol_type = other DNA
tctagagcatatttggaatctgaagttgctatatctgaggagttggttcagaaatacagtaattctgctcttggtcatgtgaactgcacaataaaagaacttagacgcct

SEQ ID NO: 38476 - DNA, 110 bp, synthetic construct
  source 1..110: mol_type = other DNA
caatcctttcagagcctgaatagaacaagaggcagatgcaggacacaagtgtctccttttgtcatgtctcactgactgagctgggacatctcatctttttgctgccctca

SEQ ID NO: 38477 - DNA, 110 bp, synthetic construct
  source 1..110: mol_type = other DNA
ctctagagcaccattctttcaagtctcacactgccaatacacatgaggcattccggcccctaagcacgttctttctcactaggccagtaagattatgacatattgtggaa

SEQ ID NO: 38478 - DNA, 110 bp, synthetic construct
  source 1..110: mol_type = other DNA
attattataaaatactcctaattctcaccatcagatgacaataactgatgacaaaaacaagctagataattaggcaaatggtaaattaggcaactggggcctgggtcaag

SEQ ID NO: 38479 - DNA, 110 bp, synthetic construct
  source 1..110: mol_type = other DNA
aacaagctagataattaggcaaatggtaaattaggcaactggggcctgggtcaagaaccacctgggcttgaatcccagcttgacagctactagctcttgtctggagcaaa

SEQ ID NO: 38480 - DNA, 110 bp, synthetic construct
  source 1..110: mol_type = other DNA
ctgctgccctggagcctcacctctttcactcaccccaggaagcctcctgtatgcgccaacaggccatgtctctctactagcatcagcccctattcccatatgctcccttc

SEQ ID NO: 38481 - DNA, 110 bp, synthetic construct
  source 1..110: mol_type = other DNA
gactgggctgcaggatctacaaccagtcctgagaccatctccctgtgcctcaccactgggagggggagggcagttcgttcccaggcacttcaagggactgtgttagctcc

SEQ ID NO: 38482 - DNA, 110 bp, synthetic construct
  source 1..110: mol_type = other DNA
ctgggagggggagggcagttcgttcccaggcacttcaagggactgtgttagctcccccgccaggacagtgagatgatcttcgctgcctcctcaggacagaagctaccacg

SEQ ID NO: 38483 - DNA, 110 bp, synthetic construct
  source 1..110: mol_type = other DNA
tgtccctcatcttctggtagtcctcctcgtagttgtcgatctcgtttttgatgttctcatgctgtgtgaggagcttctcggcttcggtcagggtgttgggcatgtcctcc

SEQ ID NO: 38484 - DNA, 110 bp, synthetic construct
  source 1..110: mol_type = other DNA
ctcatgctgtgtgaggagcttctcggcttcggtcagggtgttgggcatgtcctccgaggcgatggccgtctgggtcctggagagccaggactggaagtcgtccaggtccc

SEQ ID NO: 38485 - DNA, 110 bp, synthetic construct
  source 1..110: mol_type = other DNA
caagcttctgttttctcgacaaaatcccagtgcaccgtgttccatacacacatgaacatggggtgcggggatgtggatgtggaaggaccacgtgagggggccaaaggctc

SEQ ID NO: 38486 - DNA, 110 bp, synthetic construct
  source 1..110: mol_type = other DNA
acatggggtgcggggatgtggatgtggaaggaccacgtgagggggccaaaggctctcctgcaggttggaagggtctaacgccacatggcagggactccacgctggtgctg

SEQ ID NO: 38487 - DNA, 110 bp, synthetic construct
  source 1..110: mol_type = other DNA
gaatgagcacagcactagagatcaaccaaccagagctaagtcaaggggtcagagcttctgagcccgggtgacatcatgtatcagcagcaaggagaggctcagagcccact

SEQ ID NO: 38488 - DNA, 110 bp, synthetic construct
  source 1..110: mol_type = other DNA
ttctgagcccgggtgacatcatgtatcagcagcaaggagaggctcagagcccactggagttgatctatcggtactctggctacacaagtgggaatttcatgggtgtgatc

SEQ ID NO: 38489 - DNA, 110 bp, synthetic construct
  source 1..110: mol_type = other DNA
ccactcaaatcctactacagaaactctgctttcctgtctcttgtttgtgagcttcctgaggacatggataaaaaagcgtcccccagtgcccagcaaagagctatggacag

SEQ ID NO: 38490 - DNA, 110 bp, synthetic construct
  source 1..110: mol_type = other DNA
ctgaggacatggataaaaaagcgtcccccagtgcccagcaaagagctatggacagcagccctcggtcaggcagaatattaaacaggggctaacaccattcattactctaa

SEQ ID NO: 38491 - DNA, 110 bp, synthetic construct
  source 1..110: mol_type = other DNA
gacaaataaacctgtgaatgaaatacatcctcccccctcttcccagtgaaaacattctaagtctgagctccttccttccttcctcctcctctcaggagccacatttgggg

SEQ ID NO: 38492 - DNA, 110 bp, synthetic construct
  source 1..110: mol_type = other DNA
tctaagtctgagctccttccttccttcctcctcctctcaggagccacatttggggcaccaagaagagttaaaataagaaacatacccagtctgccacgactaccttttca

SEQ ID NO: 38493 - DNA, 110 bp, synthetic construct
  source 1..110: mol_type = other DNA
acaaccatggcaacagcactttagtccacttggagcctagtctgagggacagatgaatggcttttagctgctgtagcaaaatggaggtattctagggtccatatactaca

SEQ ID NO: 38494 - DNA, 110 bp, synthetic construct
  source 1..110: mol_type = other DNA
tgctggacttgttcagagtagcatgcaaatccacttacatgtttacatcctacctcaaataggagcttaaaaagcaagccagtcaaagcaggatcttcattggcaacacc

SEQ ID NO: 38495 - DNA, 110 bp, synthetic construct
  source 1..110: mol_type = other DNA
aggacaaacaagcaggagactgagaagaagcagctaaagagagaggaagaaattcagggaaatttagagatgaaaatattgcacaaatgaggggccgcctgagccaaaat

SEQ ID NO: 38496 - DNA, 110 bp, synthetic construct
  source 1..110: mol_type = other DNA
ttttaaaagaatggagggataggattagagcaaatatagactttggaggagtttgtctgtaaatggaagtgatacatggcagcggttggaggagtcaaaaggcagaaata

SEQ ID NO: 38497 - DNA, 110 bp, synthetic construct
  source 1..110: mol_type = other DNA
tctgtaaatggaagtgatacatggcagcggttggaggagtcaaaaggcagaaataacggcatgtttgtaaactgatgggaaagattcatttaataggaaacaaaaattgt

SEQ ID NO: 38498 - DNA, 110 bp, synthetic construct
  source 1..110: mol_type = other DNA
ctattgtgaatagagctgcagtgaacatgcgagtgcatgtgaagacagtcttttcaacaagtggaactgaaaaatctggacagctgcatgtaaatcaatgaaactggaac

SEQ ID NO: 38499 - DNA, 110 bp, synthetic construct; identical to SEQ ID NO: 38498
  source 1..110: mol_type = other DNA

SEQ ID NO: 38500 - DNA, 110 bp, synthetic construct
  source 1..110: mol_type = other DNA
ataaattttcgagaaaaaaaggaataaagcagaactcctagcatcatgtatagtcaagcagataagcgtttgctctgactcaattttcaagcactgatgggcctatttgt

SEQ ID NO: 38501 - DNA, 110 bp, synthetic construct
  source 1..110: mol_type = other DNA
aagcagataagcgtttgctctgactcaattttcaagcactgatgggcctatttgtctcatcaaagatagaaataatgagttttaaaggtgtagaagaaagaaggcactgt

SEQ ID NO: 38502 - DNA, 110 bp, synthetic construct
  source 1..110: mol_type = other DNA
ccctgtaccttctttgaactaattttttattaagggttccagtgtgtgtttgatgagaggataatctgttgttgaggtcatttagagaaaatgttgaagtgtttgctact

SEQ ID NO: 38503 - DNA, 110 bp, synthetic construct
  source 1..110: mol_type = other DNA
ttagcccattcaatatgttcttcttggttccatgtccccacaaccacagaggttttcccgctatccttgtcctaaaacatgaaaaaaatatttgtgacaatgcatgcttg

SEQ ID NO: 38504 - DNA, 110 bp, synthetic construct
  source 1..110: mol_type = other DNA
ggaggtccaaacatgaaggcctttataagtataacttttcattacagttttagaacaaaattttctaaatagctgtaaaatactacatttcagagtgaagatttatggcc

SEQ ID NO: 38505 - DNA, 110 bp, synthetic construct
  source 1..110: mol_type = other DNA
atacctaacacattatttgccaatgagaaaagtttcaggaagtctgctttttttttgaaaccacagaaattgagtccactttaaactttttcacatctttatgcattgat

SEQ ID NO: 38506 - DNA, 110 bp, synthetic construct
  source 1..110: mol_type = other DNA
ccactgcaccagtccatttgggaacacccaaatggactttttaaaactgaaaaatataatatctgaaatgaaaaaataactatatgagctccatagcagaatggaattga

SEQ ID NO: 38507 - DNA, 110 bp, synthetic construct
  source 1..110: mol_type = other DNA
ataatatctgaaatgaaaaaataactatatgagctccatagcagaatggaattgacaggaaagagtcagttaacttgaagatggattgacagaagttatccaaacagaag

SEQ ID NO: 38508 - DNA, 110 bp, synthetic construct
  source 1..110: mol_type = other DNA
gtattttttgtgttatattggtagaaaaatgcatagctttatttgcaacctgttagtaatttatactaagaagaagcgagtctgggatttcccgtcatggctcggtggtt

SEQ ID NO: 38509 - DNA, 110 bp, synthetic construct
  source 1..110: mol_type = other DNA
gggccatatcctgggccctctctggtgggcagagttgtgtccaggagcaactatgagctcagggggtcttaagacagcctatctgctggtggctgagggtgtgtccctgc

SEQ ID NO: 38510 - DNA, 110 bp, synthetic construct
  source 1..110: mol_type = other DNA
tcccagttcaaatttttgaagaccactgcctgctcctagacagagctttattagacaatttgtgttaacctacaagttcctggagctctataaaaccttgtggatttgaa

SEQ ID NO: 38511 - DNA, 110 bp, synthetic construct
  source 1..110: mol_type = other DNA
caatttgtgttaacctacaagttcctggagctctataaaaccttgtggatttgaatacaaagggaaaatgtcagttatttccaaattaaccctcctgctgtgctttcaaa

SEQ ID NO: 38512 - DNA, 110 bp, synthetic construct
  source 1..110: mol_type = other DNA
ttttatttctaggattggattggtttgttgaaggccagtgttcttttttaataagacttttgaaataggaagattagcaaatagccagatctcttttagccagtgcatct

SEQ ID NO: 38513 - DNA, 110 bp, synthetic construct
  source 1..110: mol_type = other DNA
ataaaatgttttggttagaggcaaagacgtatgtctagctacttgaaaaatagtcaaacttacttacattcatccagggaaaagtagttgtccacagctaaatgacatgg

SEQ ID NO: 38514 - DNA, 110 bp, synthetic construct; identical to SEQ ID NO: 38513
  source 1..110: mol_type = other DNA

SEQ ID NO: 38515 - DNA, 110 bp, synthetic construct
  source 1..110: mol_type = other DNA
aaagtgtattgacacttcattgttttgaagccaaatcaacaaataacgagtgtacctgttctctgagacccacccacatcgttcttgcttgcaaacagctctctgtcttg

SEQ ID NO: 38516 - DNA, 110 bp, synthetic construct
  source 1..110: mol_type = other DNA
aataaatggtggaataaataaatggggaagagacaactttcttctgcaaaagaattctaaattatttatctaggtactctaccatcaaagatgtagaacacgctcctcta

SEQ ID NO: 38517 - DNA, 110 bp, synthetic construct
  source 1..110: mol_type = other DNA
tctaaattatttatctaggtactctaccatcaaagatgtagaacacgctcctctaccctctaagtatgggctgagcatagtgttttccttctaaaggaagattgggaaga

SEQ ID NO: 38518 - DNA, 110 bp, synthetic construct
  source 1..110: mol_type = other DNA
gcctctcttgtatgatgactttttaacaattatgaacaccccaactagtcaaattccatctttccattctgaccattgcttgtaagagcttgtatgtgtatcattccatc

SEQ ID NO: 38519 - DNA, 110 bp, synthetic construct
  source 1..110: mol_type = other DNA
gcaattgtaatatagtggtttatgaaaggacaatgcatatcaagttttccttacatatcaaggccagaaaaagttaccttttttgtggtcttttgttatgaaccgaattt

SEQ ID NO: 38520 - DNA, 110 bp, synthetic construct
  source 1..110: mol_type = other DNA
tgctcacaattttcttaatctattaaataactaccttccctttatatgggcatgtagaaaccctagttatctggaatgtttacttaaaccccaaaacctcttagccttca

SEQ ID NO: 38521 - DNA, 110 bp, synthetic construct
  source 1..110: mol_type = other DNA
agaaaccctagttatctggaatgtttacttaaaccccaaaacctcttagccttcatttgaaatacaatgacttcaaacaagatgaaaaatttttaaatcctcactatttg

SEQ ID NO: 38522 - DNA, 110 bp, synthetic construct
  source 1..110: mol_type = other DNA
atggccctggagtgcatttggtgaattccttggggagattttggttatcacaaggtttttagtgaggaagaaggagttctcccggcattcagtgggcaaaggctagagat

SEQ ID NO: 38523 - DNA, 110 bp, synthetic construct
  source 1..110: mol_type = other DNA
tttttagtgaggaagaaggagttctcccggcattcagtgggcaaaggctagagatgcctatctttttgaaattcaccagagtcccatacaaagaacagcaaaccattcct

SEQ ID NO: 38524 - DNA, 110 bp, synthetic construct
  source 1..110: mol_type = other DNA
gaatttagttctgcatgttaaaaccagtacagctcatcactaaatatattaaaaaagtttgtcacttttctgggtcttctgaagaatttgatgtcttcatggctgggaag

SEQ ID NO: 38525 - DNA, 110 bp, synthetic construct
  source 1..110: mol_type = other DNA
ggccttaatgtaaagccagctggtttatgattcagtaaagaaattttagtttgcagagtagtttttttttccttaatactttgaaaaaggtacagattgtatccagagaa

SEQ ID NO: 38526 - DNA, 110 bp, synthetic construct
  source 1..110: mol_type = other DNA
tagtcccccagatcaattttcattttacatacaactgtgctgaataattccatactggataaaagcattgcaccttaaaagcttgccaagtctctccaattttttgtctc

SEQ ID NO: 38527 - DNA, 110 bp, synthetic construct
  source 1..110: mol_type = other DNA
atgatttaatgtctgtcttttccactagcctgtaagatctatgaagacagaaatataactgcgtttacttaatatctagctcagtggctggcacctagaaagtagtcaat

SEQ ID NO: 38528 - DNA, 110 bp, synthetic construct
  source 1..110: mol_type = other DNA
tggcttcactgctttttatatttccttttagttagaaggcacattagtatatgaaggcaacagaaatataagaaattagttcctggggatcttattaatacagaggaata

SEQ ID NO: 38529 - DNA, 110 bp, synthetic construct
  source 1..110: mol_type = other DNA
atacagggcttttccctcaaagagctttaagttgtgagggagataaaagcttgaaagagctattgctctcatatgggactgtttggtgtaaaatgaggacaaatacaatc

SEQ ID NO: 38530 - DNA, 110 bp, synthetic construct
  source 1..110: mol_type = other DNA
agagctattgctctcatatgggactgtttggtgtaaaatgaggacaaatacaatccagatggcatagcagacctaccttgaacaattaaaggtcatttaatccactggaa

SEQ ID NO: 38531 - DNA, 110 bp, synthetic construct
  source 1..110: mol_type = other DNA
caaagtcaacatatgattggcttatcatcaaaattcacttacatggcagttcactgtagatgatgttttgctaaaggtggtatttgcagagggagatgtagagccaataa

SEQ ID NO: 38532 - DNA, 110 bp, synthetic construct
  source 1..110: mol_type = other DNA
taaaatataaaacaaagagcttatctaggttcagaagactgatctaatctcaacgagtgttaagacataacaagaactggaaactcaggtttgtgcttacttgcctaaga

SEQ ID NO: 38533 - DNA, 110 bp, synthetic construct
  source 1..110: mol_type = other DNA
cccatgcaagaggcttctcactgcctgagagcccatgcatgcacaaagaaagatatttctatggcgatcccacaactcttcctctgtcttccccaacaatggagacttgc

SEQ ID NO: 38534 - DNA, 110 bp, synthetic construct
  source 1..110: mol_type = other DNA
tgtgtgtctcaggctttggtatgctggacagttgtaccagtcctcggtgtggcccttgctctgcttttctctcctcagaccagctgctgtactctcctccaaggctttga

SEQ ID NO: 38535 - DNA, 110 bp, synthetic construct
  source 1..110: mol_type = other DNA
aattaagttgaattccatttaattctacaatcctactttcttaaaatttgggggcacaattgcagattgttcttcaaacagtgataagtcagggattctggtcttacttc

SEQ ID NO: 38536 - DNA, 110 bp, synthetic construct
  source 1..110: mol_type = other DNA
acaattgcagattgttcttcaaacagtgataagtcagggattctggtcttacttccatgtgccttgttatttaagttaaattccataaatattatggatggacataactt

SEQ ID NO: 38537 - DNA, 110 bp, synthetic construct
  source 1..110: mol_type = other DNA
agggcaaatgtgagaataaaaccaagaatttttttttaatatgtatatgttggcatatataacagccaaagtactaattccacatggagtggtgaagataaagtagggaa

SEQ ID NO: 38538 - DNA, 110 bp, synthetic construct
  source 1..110: mol_type = other DNA
tatataacagccaaagtactaattccacatggagtggtgaagataaagtagggaactgtctaggaaaatgcagccacactaacttaagggcatctctgataaaatgtgaa

SEQ ID NO: 38539 - DNA, 110 bp, synthetic construct
  source 1..110: mol_type = other DNA
atgagggagcattgactatttcctgggaggcactggagaatacccaagctcccgtcactctgtcctccagcttatctcctcctgctcagataagctagaatcaggaaaag

SEQ ID NO: 38540 - DNA, 110 bp, synthetic construct
  source 1..110: mol_type = other DNA
gaagtgagtataagacaatggtacccttactttcactgaggtgatttcatcgatggggtatcctcacagactcataatggcaaaagctgttttagacactcattttttta

SEQ ID NO: 38541 - DNA, 110 bp, synthetic construct
  source 1..110: mol_type = other DNA
cacgacgggaactccagtccttgtaattcttgacttgcagatccatcactccagtctttgcttgtgttatcacatagcttctccctgtgtgattctatcttctcataagg

SEQ ID NO: 38542 - DNA, 110 bp, synthetic construct
  source 1..110: mol_type = other DNA
ctaagaatatcatgacacaagcatacatttttggatcagaacttctgggaaggtttttttccaactttgtcttattttttgtagtctgactctttctttacagtcactcc

SEQ ID NO: 38543 - DNA, 110 bp, synthetic construct
  source 1..110: mol_type = other DNA
tgagcccttccctggaaccctctcaggtaccctggcccaatcacaactaaaccacggataagtggaatcttcacacagctttccgtgggtctagccgggcctgggcatgc

SEQ ID NO: 38544 - DNA, 110 bp, synthetic construct
  source 1..110: mol_type = other DNA
aggaggtgggaagaactggtttatgttagtacacactttgaaagcagagctgatggcatttgctgatggtttgtgtagtagggtggaagtgagaaagaaaaatcaggggt

SEQ ID NO: 38545 - DNA, 110 bp, synthetic construct
  source 1..110: mol_type = other DNA
ggtagcaccaaatttttaagtaagaaatattgagaattttcccataccgtgtggggaatggattcaatttaagcagctaaaagtaattgtattcagatgagatgataaat

SEQ ID NO: 38546 - DNA, 110 bp, synthetic construct
  source 1..110: mol_type = other DNA
agagaacccaaacatttagtccatgttatgtacctcacacataataaattcccggtaaatgtgtttaggatatgagctaggatatttttggtcttctccttgcaactgac

SEQ ID NO: 38547 - DNA, 110 bp, synthetic construct
  source 1..110: mol_type = other DNA
cagcccccagactatgagtggactatgtttcagaagtgcctttgtgaactaatcgcttgatactcagacatcattttttcattgatacaatgagcttgtgaaagtctctt

SEQ ID NO: 38548 - DNA, 110 bp, synthetic construct
  source 1..110: mol_type = other DNA
aaactggtagactctggctaatataacttatgctctggattctggagttgcctattcctttttgattactctgtgttatctgcaggccactagctttctagctctttcct

SEQ ID NO: 38549 - DNA, 110 bp, synthetic construct
  source 1..110: mol_type = other DNA
ccaagggagacacttatgacacaggcaagggtggcagcagcgaaaatggtgagatgtggttagattctggatttattttaacagtagagctgacaagatctgtaaagatt

SEQ ID NO: 38550 - DNA, 110 bp, synthetic construct
  source 1..110: mol_type = other DNA
gtggttagattctggatttattttaacagtagagctgacaagatctgtaaagattttacccaatctttccagcctagaggtcaataccttcccatttatttgtattaata

SEQ ID NO: 38551 - DNA, 110 bp, synthetic construct
  source 1..110: mol_type = other DNA
gctggggctgaatcacacaaatctttatcagttactgaaacaagtacagatttcattccaaccgcagtgatgggaatctattggaaagggttgggaggtgaagggtggtt

SEQ ID NO: 38552 - DNA, 110 bp, synthetic construct
  source 1..110: mol_type = other DNA
gggattatgtctagattacttgaaggtgagggactttcattgtaccaatcttttggaaggtagggagagagaggttgcacaggatctggcctcagatactctctcttcat

SEQ ID NO: 38553 - DNA, 110 bp, synthetic construct
  source 1..110: mol_type = other DNA
gaaggtagggagagagaggttgcacaggatctggcctcagatactctctcttcatagctcaggtgctcactgaatggttacgcagcatcttcattcttgtgtgcatgacc

SEQ ID NO: 38554 - DNA, 110 bp, synthetic construct
  source 1..110: mol_type = other DNA
ataagcacatctcttcctctcagaggcatcacacctctttggaaatccttagaccaaacttacaagaagaaaggggtggatcacagggagccagccaaagcattcaaaca

SEQ ID NO: 38555 - DNA, 110 bp, synthetic construct
  source 1..110: mol_type = other DNA
aaccctcagtgcattcccccacccccaatctgtctcatttagaaaccataagtttctcaaagtctgtacatcagtcggtatctattctgtaaagaagttcattgtgtcct

SEQ ID NO: 38556 - DNA, 110 bp, synthetic construct; identical to SEQ ID NO: 38555
  source 1..110: mol_type = other DNA

SEQ ID NO: 38557 - DNA, 110 bp, synthetic construct
  source 1..110: mol_type = other DNA
aggccagaaaatcatctcccaccaatggaaggagcacaacagctgaccaagtctgggaagagaaactttgcttttttctccctcacttccttaccagtgtcaaagaagta

SEQ ID NO: 38558 - DNA, 110 bp, synthetic construct
  source 1..110: mol_type = other DNA
tttttgtactggaagattctctgcagaatatctattctaacttcctgattttttggacataaccgagacccaaaggaactacctgattaaggatccaggatcaattgatg

SEQ ID NO: 38559 - DNA, 110 bp, synthetic construct
  source 1..110: mol_type = other DNA
gacataaccgagacccaaaggaactacctgattaaggatccaggatcaattgatgagttaatatgcagataaggatagtcctcagacagacctcaggttcccagtcaagt

SEQ ID NO: 38560 - DNA, 110 bp, synthetic construct
  source 1..110: mol_type = other DNA
tctgtagggttatgggaaggccatatcgttctgctgaggaatgtatggatggactgtacaaactcttggagctactgtcccctccactccaacctcctatttggatgagt

SEQ ID NO: 38561 - DNA, 110 bp, synthetic construct
  source 1..110: mol_type = other DNA
ttgtatctttagcattggaatgcatctattcacagaacttgaatctccttattgattagatctcagatgaaaatagcctgttgttgccttcctatcagaagaagtggaaa

SEQ ID NO: 38562 - DNA, 110 bp, synthetic construct
  source 1..110: mol_type = other DNA
ttagatctcagatgaaaatagcctgttgttgccttcctatcagaagaagtggaaaactttagaaatctttccatctatcctggaatgagatacatgtctataataaaaga

SEQ ID NO: 38563 - DNA, 110 bp, synthetic construct
  source 1..110: mol_type = other DNA
tatctgataaatagagcatcttatctttggaaaaatatatatatctgcatgtacacacagttatgcatgtgatttttaggggttgtgtttgcctcaacagccttagggcc

SEQ ID NO: 38564 - DNA, 110 bp, synthetic construct
  source 1..110: mol_type = other DNA
tcttttcaaattttaaacaattcactagtggcctctaaaacataatgcattttcttcagagtgacttttgatttttccacgcatcaagcacatttccttgggtcatgcca

SEQ ID NO: 38565 - DNA, 110 bp, synthetic construct; identical to SEQ ID NO: 38564
  source 1..110: mol_type = other DNA

SEQ ID NO: 38566 - DNA, 110 bp, synthetic construct
  source 1..110: mol_type = other DNA
ggttgctattagcaacagacagttatttctaaaccattcaagacaggacgaatggcaaacattgtgtgcctagtgatttgaacctccacatatgaactctgttgaatgct

SEQ ID NO: 38567 - DNA, 110 bp, synthetic construct
  source 1..110: mol_type = other DNA
caaacattgtgtgcctagtgatttgaacctccacatatgaactctgttgaatgcttgagagctaagatgaaactcattcacattcttgcaaaccattgccatgacaacat

SEQ ID NO: 38568 - DNA, 110 bp, synthetic construct
  source 1..110: mol_type = other DNA
tactgggcagaatcccagagcagtagcaaattcagagtgaacttgtgtcactaaaagtggaaggggaaaggtattgaaatatggagggtgagggcagtaattggtatctg

SEQ ID NO: 38569 - DNA, 110 bp, synthetic construct
  source 1..110: mol_type = other DNA
cacatgacttagtcatcattgaaagaagcctgctgatacatcatttttctacaaaaacaagagaaattgttttaagatttaccgagtaagtctatgaaatgtaacaatgt

SEQ ID NO: 38570 - DNA, 110 bp, synthetic construct; identical to SEQ ID NO: 38569
  source 1..110: mol_type = other DNA

SEQ ID NO: 38571 - DNA, 110 bp, synthetic construct
  source 1..110: mol_type = other DNA
accccacacatactgaacttggtgatgcatcctgctttagctaaatacttgtgaacactatatgaacagaggccttaagtgtatttgcacaatttgtcttgatctcttgt

SEQ ID NO: 38572 - DNA, 110 bp, synthetic construct
  source 1..110: mol_type = other DNA
cccctgagcaccaggtaactaagcatgttactaatgtggcagggccctgaatcttcatagggtttttctcctatctttcggagcttgtgtatattaccaaagcctccagt

SEQ ID NO: 38573 - DNA, 110 bp, synthetic construct
  source 1..110: mol_type = other DNA
agcatattagatattggcaaatgctatgagaaagggagggagctaggggcaaggggtggagaatgttaggaaggaggattgatcttataaatgtagggtgaacaaggaag

SEQ ID NO: 38574 - DNA, 110 bp, synthetic construct
  source 1..110: mol_type = other DNA
ccatctccccttgtcaagcctattggcctgttattatcctaaatgagtgaccatgtggagcaaatcactaacatgaaggacaaggcagaattaccaggggagaaagcatg

SEQ ID NO: 38575 - DNA, 110 bp, synthetic construct
  source 1..110: mol_type = other DNA
atctgttgattctactacccttcttcttcatgcactgcagtccccacaaggaatagcatctagtgggtaggagcacaggtgagcgagcacaaagaatggagctgattgca

SEQ ID NO: 38576 - DNA, 110 bp, synthetic construct
  source 1..110: mol_type = other DNA
gaagaggtgctgtatctctctggggcctcttttataaaggtactgatccccttaatgagagtgccagttaaccacaaaagacttccttatccaaggacagaaaccagaat

SEQ ID NO: 38577 - DNA, 110 bp, synthetic construct
  source 1..110: mol_type = other DNA
tgagagtgccagttaaccacaaaagacttccttatccaaggacagaaaccagaattcatgagaatcctctttagggggccacagtgcattaacctcaaattttgactcaa

SEQ ID NO: 38578 - DNA, 110 bp, synthetic construct
  source 1..110: mol_type = other DNA
catgttcatggctcatgttatatttctattggagagcacaagtctggaactatgtgaaaatttcattttcatttaacatttcctccccaggtccccacaacacactgcca

SEQ ID NO: 38579 - DNA, 110 bp, synthetic construct
  source 1..110: mol_type = other DNA
tgacactgttgttgggctgcatcacagctcgacttctccctctgtccactcccgttttcccacacccctacataggtactgatcccaaggtgttccttaagcatcctctg

SEQ ID NO: 38580 - DNA, 110 bp, synthetic construct
  source 1..110: mol_type = other DNA
ttagagtaaaccctttttttccatcatctatcttgatcctcacacctgtgaaccaacaaaaggtttggcttggctgatggtctccagctatgttctaaacccatatttca

SEQ ID NO: 38581 - DNA, 110 bp, synthetic construct
  source 1..110: mol_type = other DNA
acaaaaggtttggcttggctgatggtctccagctatgttctaaacccatatttcacatcatgcctagaatcccaaagtcttgccttccctgataccagcacattgacact

SEQ ID NO: 38582 - DNA, 110 bp, synthetic construct
  source 1..110: mol_type = other DNA
ccagccctcaccagactgctctgatctcagacaccagtcacaagtgtggagtccccagggccaccctcattttacaccagctgactaaaaattcaaggatttccacaact

SEQ ID NO: 38583 - DNA, 110 bp, synthetic construct
  source 1..110: mol_type = other DNA
cagggccaccctcattttacaccagctgactaaaaattcaaggatttccacaactactctcagatttgataatttggtaggatgactcacagaactcagaaaggtgctag

SEQ ID NO: 38584 - DNA, 110 bp, synthetic construct
  source 1..110: mol_type = other DNA
aagtacagattataagaaactgagatccaaagaaattcaaaaacctgccaaggctccacagctactgaggaacaaaagaatttcatctgctatatttttatatttgcttc

SEQ ID NO: 38585 - DNA, 110 bp, synthetic construct
  source 1..110: mol_type = other DNA
gataaatctatggtagccatgaggagtagagatcacagctgatgtgcactgagctcctaccatatgccatgcagtacactgctgagcaccgcacataaccctcctaccac

SEQ ID NO: 38586 - DNA, 110 bp, synthetic construct
  source 1..110: mol_type = other DNA
cttgtcaagatggtcaaattggtcaattcagctaaagacattaactttggtaccaatgaaaggcagtcttattttaagagtcagggagcaaaatctaaggaggaagtggt

SEQ ID NO: 38587 - DNA, 110 bp, synthetic construct
  source 1..110: mol_type = other DNA
atatggataccaatacaaacacacacacatgtgaggccctcagatgaaaaaccataactatgttagagacttacttatgctcagtaggtgcttgctgatacttgctgaat

SEQ ID NO: 38588 - DNA, 110 bp, synthetic construct
  source 1..110: mol_type = other DNA
aattgaggtcaggtaggctgatcagttaccagggaaactagcacctcccccttgataagctatcatagtgaagatgttctgatctaaagattagaacagtcactagctga

SEQ ID NO: 38589 - DNA, 110 bp, synthetic construct
  source 1..110: mol_type = other DNA
tgctgagcggcttcagtggtgtaaattctcacaattcctggcgcccagctgcttggcagcattaaatatacactgtgaaccttactttcctctcttctccaggagctgca

SEQ ID NO: 38590 - DNA, 110 bp, synthetic construct
  source 1..110: mol_type = other DNA
agacaactcatattgcctgaggcaaaaagaaaattgtacacctctatattaggtcttatatatttattttaaggttaatttttcccctcagaacactaaagagttggaaa

SEQ ID NO: 38591 - DNA, 110 bp, synthetic construct; identical to SEQ ID NO: 38590
  source 1..110: mol_type = other DNA

SEQ ID NO: 38592 - DNA, 110 bp, synthetic construct
  source 1..110: mol_type = other DNA
aagactgatgagaccatgttaaatcttcatgcagaaaattcaagatacccacaagtcaaattaccccattacagtatagccataagccaggtatcaaatagctgcccagg

SEQ ID NO: 38593 - DNA, 110 bp, synthetic construct
  source 1..110: mol_type = other DNA
tcaaattaccccattacagtatagccataagccaggtatcaaatagctgcccaggggaatttcgagagctgtgccctcatcatgatgccaggaaaactaaagacagagtg

SEQ ID NO: 38594 - DNA, 110 bp, synthetic construct
  source 1..110: mol_type = other DNA
tcagtataacccccttcagtcagctggaggatgacctagcaacagaagctaacgtcctaaaatagtgtaataatagaaggaactggaccaggaagaggaggcatctgctc

SEQ ID NO: 38595 - DNA, 110 bp, synthetic construct
  source 1..110: mol_type = other DNA
gcagacaactctatccctctccttctatggtaccaaattctgaaacagtattcgccatattttcagtgttacccaatatattgtcaaagatgggcagcatggttataata

SEQ ID NO: 38596 - DNA, 110 bp, synthetic construct
  source 1..110: mol_type = other DNA
taacagccctatgaggtgagcagtgttattacctccaccttatagatgaggaagttgaagcttaaaaatgaagtgtaaaaaaatcacgcaggagagttcccgtcgtggct

SEQ ID NO: 38597 - DNA, 110 bp, synthetic construct
  source 1..110: mol_type = other DNA
tctacaattttaagatggctttgaacactttttcacaaagaagattccaagaactctaacatttattcctgtaagataaactaaaaatatataggagccagtgatatagg

SEQ ID NO: 38598 - DNA, 110 bp, synthetic construct
  source 1..110: mol_type = other DNA
tccacttaattttggcatatcggtctgactggtgccagatgaacttcttggtcctctttttgacagtcttgggcttcaggaggggtctgagagcggccatgatgccaggc

SEQ ID NO: 38599 - DNA, 110 bp, synthetic construct
  source 1..110: mol_type = other DNA
ctttttgacagtcttgggcttcaggaggggtctgagagcggccatgatgccaggcaaggaaatggctgccacctccataaagcagcgctgaggaagagccacctttagct

SEQ ID NO: 38600 - DNA, 110 bp, synthetic construct
  source 1..110: mol_type = other DNA
tttgctccaccggggatgtttggcagtgtgcagagacactttgggttgtcacagctggagaagagactgctactgctatctagttaacagagtccagggatgcctctgtt

SEQ ID NO: 38601 - DNA, 110 bp, synthetic construct
  source 1..110: mol_type = other DNA
cagtgtctctggagcactgggacaaaggttccacccctgacccggcacagtgggttaagtatccagcactgccaaagctgtggtgtaggtcacaattatggcttagatct

SEQ ID NO: 38602 - DNA, 110 bp, synthetic construct
  source 1..110: mol_type = other DNA
taagtatccagcactgccaaagctgtggtgtaggtcacaattatggcttagatctgattccaggcctggattctccatatgcagaggggtgccccccccaaaaaagttgc

SEQ ID NO: 38603 - DNA, 110 bp, synthetic construct
  source 1..110: mol_type = other DNA
ctccccctcctcccccaacaccatccttctagctacactggaaccacacagaggactgaaatgggagagatgtttgcctgtactgttgcccagagcaactccttttaaaa

SEQ ID NO: 38604 - DNA, 110 bp, synthetic construct
  source 1..110: mol_type = other DNA
ggggagcctccgtgttgccacacaagccctcgggagccatcctgacgctgctgggtggtgagcacagtagtgctgggctcagtgtggcagatgtccaccggccacctggg

SEQ ID NO: 38605 - DNA, 110 bp, synthetic construct
  source 1..110: mol_type = other DNA
tggtgagcacagtagtgctgggctcagtgtggcagatgtccaccggccacctgggcactaaatatagccccaaacagagccctctctgcctggaacctgcagagtaggct

SEQ ID NO: 38606 - DNA, 110 bp, synthetic construct
  source 1..110: mol_type = other DNA
gtgccaggaacaagcagaccagagcgctctatcttcttcctgccccttccttcccagggggctgccgtctctctcacacaggctccaagtcctcctttcacggacctccc

SEQ ID NO: 38607 - DNA, 110 bp, synthetic construct
  source 1..110: mol_type = other DNA
cctcactctctgctcacatgtccttgagaaaataaaagtaatcagacagggactctcttatctttacaaccccaaatctattcatcacagagctgcctttcctttatgac

SEQ ID NO: 38608 - DNA, 110 bp, synthetic construct
  source 1..110: mol_type = other DNA
tcttatctttacaaccccaaatctattcatcacagagctgcctttcctttatgacagcagatggactgtccactttcaaatgcttgcttcagtgggtcctaccccctctg

SEQ ID NO: 38609 - DNA, 110 bp, synthetic construct
  source 1..110: mol_type = other DNA
aagtgtccatgagagacttcctagctaatctctttgtccggtgtttcctttattttccctcttttcttctctgcctccagcttcctgcctcagggcctttgctctggcca

SEQ ID NO: 38610 - DNA, 110 bp, synthetic construct
  source 1..110: mol_type = other DNA
tagtatgaaattaaaatctgtcaacaaggtatatatatgcctcaactagataaactcaaaaagctcggtgtaagaagcttgaatttattctgaaacgtcagctttttgtg

SEQ ID NO: 38611 - DNA, 110 bp, synthetic construct; identical to SEQ ID NO: 38610
  source 1..110: mol_type = other DNA

SEQ ID NO: 38612 - DNA, 110 bp, synthetic construct
  source 1..110: mol_type = other DNA
cctcctgcagcctaatcagacatctgggtacacaggccgtgaaatcagaatccgcctcccaagcaccacggccacggccaactttccatcaatgaaatattcatttgctc

SEQ ID NO: 38613 - DNA, 110 bp, synthetic construct
  source 1..110: mol_type = other DNA
tctctcgtcttcctcctgagcacataaatgcgtttcctctccatcacgctgcgatctccttcccagccagacttcagggtgaggtatgcttggtgaggccacagcttgtc

SEQ ID NO: 38614 - DNA, 110 bp, synthetic construct
  source 1..110: mol_type = other DNA
ctccttcccagccagacttcagggtgaggtatgcttggtgaggccacagcttgtcatgaccgaaaaagtgtacaaaggacacattgccaagtgcatggtccctttcagcc

SEQ ID NO: 38615 - DNA, 110 bp, synthetic construct
  source 1..110: mol_type = other DNA
tttattgaagaatctctattaaatccagtgatagcaacctacggttttaaaaacgaaggacggggaaaaccacctctcgtgcaaagaaacgatccagtaccaaatgacct

SEQ ID NO: 38616 - DNA, 110 bp, synthetic construct
  source 1..110: mol_type = other DNA
actactcatttgatagcttaggaaacggaagtctgctgcccaaaggtagagccaggacttagacccggtctatggtgacctcagaacctgagctctaagctgcgctgtcc

SEQ ID NO: 38617 - DNA, 110 bp, synthetic construct
  source 1..110: mol_type = other DNA
gacttagacccggtctatggtgacctcagaacctgagctctaagctgcgctgtcccttgagtgagcatgaccaggtgacttgcttaatgtcgacgtgtcgagctgatctg

SEQ ID NO: 38618 - DNA, 110 bp, synthetic construct
  source 1..110: mol_type = other DNA
caggctctgattgagggggaatgggctgtctctacaagaaagacagagcagggagaaggccacctcccccgggagagcagggaacagtggcggcagggtagggggtcggg

SEQ ID NO: 38619 - DNA, 110 bp, synthetic construct
  source 1..110: mol_type = other DNA
aaggccacctcccccgggagagcagggaacagtggcggcagggtagggggtcgggggctgactcaccaggctgtgcatgatgcgcacgccgtcggggttcactgtgagcg

SEQ ID NO: 38620 - DNA, 110 bp, synthetic construct
  source 1..110: mol_type = other DNA
cacacaccctgtgccaggttcacgctgtccccacagggcattgttctctgccttatcacgttcctgccttttgaaacgcaagctctgttaacgaacagccgccccgccgc

SEQ ID NO: 38621 - DNA, 110 bp, synthetic construct
  source 1..110: mol_type = other DNA
ccttccaggaaccagtcctgacccctcctcccaggtgctgggagaaaacatcccctccccaggcactcactaagtctataccacggggtggttatttacagccagcgctt

SEQ ID NO: 38622 - DNA, 110 bp, synthetic construct
  source 1..110: mol_type = other DNA
tccccaggcactcactaagtctataccacggggtggttatttacagccagcgcttctctcccctggtagttaatgggggctaaaggtgagtctttgtggattaccccaga

SEQ ID NO: 38623 - DNA, 110 bp, synthetic construct
  source 1..110: mol_type = other DNA
gcttctgtcctcggggagcctgctgtgcagctgactgtcctgtggtgtggaccacagttccaagtctcgccagatcccagcggtacttgatggaaccgaattcctctgga

SEQ ID NO: 38624 - DNA, 110 bp, synthetic construct
  source 1..110: mol_type = other DNA
ggagtgcagacatttgggctcaggcccatctccccaattccctttagaacaaaatcatatgaagtgggtccttactcggtgccattttagtgctggtgttgcctgagatg

SEQ ID NO: 38625 - DNA, 110 bp, synthetic construct
  source 1..110: mol_type = other DNA
tgcctgctggtctggactccacccattattgatgagggacaggatgggacagaaggaaactggtccttgtccctgaggcttcagtgtcctcctctgcagcttgggtggtg

SEQ ID NO: 38626 - DNA, 110 bp, synthetic construct
  source 1..110: mol_type = other DNA
gaaactggtccttgtccctgaggcttcagtgtcctcctctgcagcttgggtggtgtgcgcgctggggcagtcctgcgggatgatcatccttctcctcccccagttctaaa

SEQ ID NO: 38627 - DNA, 110 bp, synthetic construct
  source 1..110: mol_type = other DNA
ttcaagggcattgccaaaaaaatttttttccgctttttaaaaagatgactttcagtaccttataactcgagtttatagtttcactgatacagttacctccaacgacaaga

SEQ ID NO: 38628 - DNA, 110 bp, synthetic construct
  source 1..110: mol_type = other DNA
tgatgaggctttaaagcagttgtcatgaatatgtgcacacctgttctacaagggaattcccacttgtaaatatgaatcttcagaatctgagcccaaggctagctgagctt

SEQ ID NO: 38629 - DNA, 110 bp, synthetic construct
  source 1..110: mol_type = other DNA
acaccagagtgctatattagagcttttgtaagtaaggtatttttatcattaactcttggccaaagctcatttgttccaaatgggctgccttaactgagtatgctcacctg

SEQ ID NO: 38630 - DNA, 110 bp, synthetic construct
  source 1..110: mol_type = other DNA
ttggccaaagctcatttgttccaaatgggctgccttaactgagtatgctcacctgagtatgcagtgagcacctggaaaatacaggtttgttgcaaatgatccacagagaa

SEQ ID NO: 38631 - DNA, 110 bp, synthetic construct; identical to SEQ ID NO: 38629
  source 1..110: mol_type = other DNA

SEQ ID NO: 38632 - DNA, 110 bp, synthetic construct; identical to SEQ ID NO: 38630
  source 1..110: mol_type = other DNA

SEQ ID NO: 38633 - DNA, 110 bp, synthetic construct
  source 1..110: mol_type = other DNA
atgtggcttatgatccaagcgacatctcctatcctcctgcctgggagaagctttataacacccgtctggccaggtcccattcactggccaacaatgctccttctaacttt

SEQ ID NO: 38634 - DNA, 110 bp, synthetic construct
  source 1..110: mol_type = other DNA
cctgggcacagcccatagatctgggggctggtgggaagaagggcccagcagttgtcaaggttactgggcctgagtctcagaatgggagctttgggagctgatgaggatct

SEQ ID NO: 38635 - DNA, 110 bp, synthetic construct
  source 1..110: mol_type = other DNA
caaggttactgggcctgagtctcagaatgggagctttgggagctgatgaggatctgcacttgcccggtaaaatattctgtgcccactggagttctccattagaccccttg

SEQ ID NO: 38636 - DNA, 110 bp, synthetic construct
  source 1..110: mol_type = other DNA
acagacttttgccatctggaaaaggcggcctcataattggccatctcaggcctctcaagagcttctgaatctgtctggatcagccgaacagaattctggtcgtgtgggcc

SEQ ID NO: 38637 - DNA, 110 bp, synthetic construct
  source 1..110: mol_type = other DNA
gcaatgcaccaaaatatctccttattattatttttttgataaggtgacaccccaaacattttgcatcttttgagctctgcccccatatgtcactcctatatctgtgtcgg

SEQ ID NO: 38638 - DNA, 110 bp, synthetic construct
  source 1..110: mol_type = other DNA
acattttgcatcttttgagctctgcccccatatgtcactcctatatctgtgtcgggagatattttcaaatactcgaatgtttgccacttcaagaggatagtggacatttg

SEQ ID NO: 38639 - DNA, 110 bp, synthetic construct
  source 1..110: mol_type = other DNA
ggtagttctccctcccttcttggcctctcctttccccctcaagatgaaagtgcggcagaaatctcagaacttggagctccccgcagtaatttaagaagctcattctgtga

SEQ ID NO: 38640 - DNA, 110 bp, synthetic construct
  source 1..110: mol_type = other DNA
gcactgtatctccagaatctgcaggtcacctcccagctccgatttgaaatgtgtgtcagagaccacgctttgggagaagggtgcacattgccctccagggatcagaggga

SEQ ID NO: 38641 - DNA, 110 bp, synthetic construct
  source 1..110: mol_type = other DNA
ccgggcagcatcccgggacttctccttcctcctctccgagctactcctacattgagagtgaagagttagtctccaggacgtcactgtcatcccatcacacccctggtcat

SEQ ID NO: 38642 - DNA, 110 bp, synthetic construct
  source 1..110: mol_type = other DNA
aaaaagctaagtctcagggagcctgaaccatccaatggaaaatatttcactgtttaggataccacatagctacagtgacatggtcatgtagccatctccctggcaaggct

SEQ ID NO: 38643 - DNA, 110 bp, synthetic construct
  source 1..110: mol_type = other DNA
aggataccacatagctacagtgacatggtcatgtagccatctccctggcaaggctgctgaagctcctcagtcaaatgccattattatgatgactgggccactctctgtcc

SEQ ID NO: 38644 - DNA, 110 bp, synthetic construct
  source 1..110: mol_type = other DNA
gtgctgagcacttggactatgtacaaaggtggataatggaatcttcattttccatagtgtttacaacccaattagggagatatgtgacaactcacagaaataaaagcaag

SEQ ID NO: 38645 - DNA, 110 bp, synthetic construct
  source 1..110: mol_type = other DNA
agtgtttacaacccaattagggagatatgtgacaactcacagaaataaaagcaagagggaaattagcgctataagatattataagcagctagcaacaggggcccagaatg

SEQ ID NO: 38646 - DNA, 110 bp, synthetic construct
  source 1..110: mol_type = other DNA
cattccctgacttttctggcaatcaccagctgaaggtatcttcacagtagggcaggatgttgggccacagatgaaaagcaataggttacattcaatggagggaggtacat

SEQ ID NO: 38647 - DNA, 110 bp, synthetic construct
  source 1..110: mol_type = other DNA
agcccagggaacaacttcgagttactgccaacctgttcccaccactgtcacctgtgtgtgacagccagggaaagggggaagggctctggttcagtacatcagagaatacc

SEQ ID NO: 38648 - DNA, 110 bp, synthetic construct
  source 1..110: mol_type = other DNA
gtgtgacagccagggaaagggggaagggctctggttcagtacatcagagaataccctcctttcacagggtcatcaacatcattggaaaaataagtttctatcacatgatg

SEQ ID NO: 38649 - DNA, 110 bp, synthetic construct
  source 1..110: mol_type = other DNA
aacctaaaaacatgagttgggagggttgagtcactgggcaaattcagaatttgaaacgattttctttgctcatccaaagtcttactctccttccagtactttatatccgt

SEQ ID NO: 38650 - DNA, 110 bp, synthetic construct
  source 1..110: mol_type = other DNA
acgattttctttgctcatccaaagtcttactctccttccagtactttatatccgtcactttatcaactatgtcagaagtggtgagaagaagagcgtgttttccaggcagc

SEQ ID NO: 38651 - DNA, 110 bp, synthetic construct
  source 1..110: mol_type = other DNA
atatttaaaaccttccttcttgcaaattcatgccatggatcttaaagatctgcatagaggccaacaacagatgtgctggctggacatttttttaaaaaatccaattactg

SEQ ID NO: 38652 - DNA, 110 bp, synthetic construct
  source 1..110: mol_type = other DNA
aacacgattatctctcttagactctaggcgttcacatccatcattccaacccaggctctggattggtggggcggataccatcgctcccatttttcagatgagaaatcaaa

SEQ ID NO: 38653 - DNA, 110 bp, synthetic construct
  source 1..110: mol_type = other DNA
ctctggattggtggggcggataccatcgctcccatttttcagatgagaaatcaaagcttgaggatgacttactcaggatcactagagagtgacagaggcactagtaataa

SEQ ID NO: 38654 - DNA, 110 bp, synthetic construct; identical to SEQ ID NO: 38652
  source 1..110: mol_type = other DNA

SEQ ID NO: 38655 - DNA, 110 bp, synthetic construct; identical to SEQ ID NO: 38653
  source 1..110: mol_type = other DNA

SEQ ID NO: 38656 - DNA, 110 bp, synthetic construct
  source 1..110: mol_type = other DNA
aaaaaagagaagaaaagataaaagatgactatccttggtgtggaaggcctctcagttcctccaaagagtcacccgtaacaaggactcctggggtgttataactgaagcac

SEQ ID NO: 38657 - DNA, 110 bp, synthetic construct
  source 1..110: mol_type = other DNA
cttaaggacttgagttccctgaggatctgaaagcgggtgacataatttaagatgcactagctccgcctgggggtggcgaggggctagggggcagaacagaagggtaaaag

SEQ ID NO: 38658 - DNA, 110 bp, synthetic construct
  source 1..110: mol_type = other DNA
actagctccgcctgggggtggcgaggggctagggggcagaacagaagggtaaaagaagcttccccctggccgaggatgacaagattgacacacgggggacagtccatggc

SEQ ID NO: 38659 - DNA, 110 bp, synthetic construct
  source 1..110: mol_type = other DNA
tggagctatagccacttgccttcgccacagcctcagcaatgcaggatccgaatcatgtctgcaacttagaccacagctcatgacaatacctgatgcttaacccactgagt

SEQ ID NO: 38660 - DNA, 110 bp, synthetic construct; identical to SEQ ID NO: 38659
  source 1..110: mol_type = other DNA

SEQ ID NO: 38661 - DNA, 110 bp, synthetic construct
  source 1..110: mol_type = other DNA
ctgtaggggcttgcatggggcatggttagcttcctctctctttccttctcattatttttgtcttccttcccaattcactagctgaattttctgatccccctaagtttagt

SEQ ID NO: 38662 - DNA, 110 bp, synthetic construct
  source 1..110: mol_type = other DNA
caaaacctcatggttcctagtcagagtcgttgaccactcagccacgatgggaactcctcatgtcatatttttataaccagcttctccacttaatacttgacaataataat

SEQ ID NO: 38663 - DNA, 110 bp, synthetic construct; identical to SEQ ID NO: 38662
  source 1..110: mol_type = other DNA

SEQ ID NO: 38664 - DNA, 110 bp, synthetic construct
  source 1..110: mol_type = other DNA
gtagatttgtcagcttcttattcaacaatgtagttactatttagagggtcaagattataatagaattgcattaagaccattaaagctgtcctttagtaagttgtttagtg

SEQ ID NO: 38665 - DNA, 110 bp, synthetic construct
  source 1..110: mol_type = other DNA
tataatagaattgcattaagaccattaaagctgtcctttagtaagttgtttagtgaaaaaaaggctcatttggaattgttgaatgaacttagatatcctgagggttttac

SEQ ID NO: 38666 - DNA, 110 bp, synthetic construct
  source 1..110: mol_type = other DNA
gctgtgtggagaagagagaataggggacaagacggctacaagaagagcagctgaatggctgcagcactcaggcaagagatgttgactggctttgtgtgctgttcaagcgg

SEQ ID NO: 38667 - DNA, 110 bp, synthetic construct
  source 1..110: mol_type = other DNA
tgcagctagccctcaaatggtcatcccagcccagtccttgcaactgggttgacccccctagtgtagtgtccctgcccagctcagtcctccagcactccccactgccttac

SEQ ID NO: 38668 - DNA, 110 bp, synthetic construct
  source 1..110: mol_type = other DNA
ccctagtgtagtgtccctgcccagctcagtcctccagcactccccactgccttacgaatttgttctaaactcctgagtggcatttcaaggtctcatgctggcagttcctg

SEQ ID NO: 38669 - DNA, 110 bp, synthetic construct
  source 1..110: mol_type = other DNA
accctgtgccaattatattatcatgagcacatggtggttgttgagctgcttggatatgaaatgttttgctacatagtaaaacctccctgaaacaaggggcgcacaatcta

SEQ ID NO: 38670 - DNA, 110 bp, synthetic construct
  source 1..110: mol_type = other DNA
ctgagaggaactggagagacttttcagtctcatgcttctccagcccttctcccccctctctgagtgttagttggtgtccctgggggccttttaaccagggagtcaggtta

SEQ ID NO: 38671 - DNA, 110 bp, synthetic construct
  source 1..110: mol_type = other DNA
accttggtgcttctccatgtggcccttcttcccagcatgctagcttaagggtggccaagcttctcatgtggctgctggtttccaagagggaggaagcagaagctgccttg

SEQ ID NO: 38672 - DNA, 110 bp, synthetic construct
  source 1..110: mol_type = other DNA
caagcttctcatgtggctgctggtttccaagagggaggaagcagaagctgccttgagaaaggctgcatttgagagttccagaatactatttccagggcattctgtttttc

SEQ ID NO: 38673 - DNA, 110 bp, synthetic construct
  source 1..110: mol_type = other DNA
tgtgccacaccctgtgtgctcaatatgtggtcattactgttgttataagaaggtagagctcattgaggataattctgtcagaaacaggacttgaactagacagtgaagaa

SEQ ID NO: 38674 - DNA, 110 bp, synthetic construct
  source 1..110: mol_type = other DNA
tcgatattttccatcttcgagaacttatggggaaaccaaatgcttttaaaggcatggcaagaagaaagtaagaaaactacccaatttatttgggccaaagttgaggaaat

SEQ ID NO: 38675 - DNA, 110 bp, synthetic construct
  source 1..110: mol_type = other DNA
catagtataaaaaaaaaatgcctcctcagctgatcataactatggaaagaaaggggaaaagatttgcccaaggtcacaccagaaggaagcagtaaaggcagggttcaaat

SEQ ID NO: 38676 - DNA, 110 bp, synthetic construct
  source 1..110: mol_type = other DNA
caccaggttcttactactcagaggagacttctccatgggcaaaggtttccatattgagattctgtttacattcctgcaagaatgaagggattcctgccattctaaggagg

SEQ ID NO: 38677 - DNA, 110 bp, synthetic construct
  source 1..110: mol_type = other DNA
cacttcagggaagagggaaagtagcttcccaaatcatcactcaaaggtcctcagtttctctgagtgaatcaccacttaaccaatcattgggggcctggtcttagcctacg

SEQ ID NO: 38678 - DNA, 110 bp, synthetic construct
  source 1..110: mol_type = other DNA
ttctctgagtgaatcaccacttaaccaatcattgggggcctggtcttagcctacgttctctgaactacttatattgtggatagaatcaatttcatccaatcagtatgtct

SEQ ID NO: 38679 - DNA, 110 bp, synthetic construct
  source 1..110: mol_type = other DNA
atttaaaacatctgctcaagtgctgacctctccgcgacatgcgctcatattcccgccctggccagctgtgtgtcgacagagcccagctccctgaaaacccagagcagagg

SEQ ID NO: 38680 - DNA, 110 bp, synthetic construct
  source 1..110: mol_type = other DNA
ggggccggcggagggagctgtgtttaatgggtccagagtttcagttggggaagcggaaggttccgaagatggatgtcggtcatggctgtacagcaacgtgaaaatactca

SEQ ID NO: 38681 - DNA, 110 bp, synthetic construct
  source 1..110: mol_type = other DNA
gaaggttccgaagatggatgtcggtcatggctgtacagcaacgtgaaaatactcaatgccactgaactgtacccttggaaatggctaaaagggcaaatttttatgtcctg

SEQ ID NO: 38682 - DNA, 110 bp, synthetic construct
  source 1..110: mol_type = other DNA
atcctctgactccagacagcagatttgccttaggtagcaatcaaggaaccacactccccaataatggcagaatccatttcttcccacagcttgaggcttgaaccttcgtg

SEQ ID NO: 38683 - DNA, 110 bp, synthetic construct
  source 1..110: mol_type = other DNA
ccccaataatggcagaatccatttcttcccacagcttgaggcttgaaccttcgtgttgcaatgattccactcttgccacctaggagtcatttctctcctctcactcggtg

SEQ ID NO: 38684 - DNA, 110 bp, synthetic construct
  source 1..110: mol_type = other DNA
tgaatatagcaacagcagttataaagtgatgcaggtgttccatattggaggctcagttacaagtggcttttgctgccaactggtgagattttccggaataggaatgtttt

SEQ ID NO: 38685 - DNA, 110 bp, synthetic construct
  source 1..110: mol_type = other DNA
gttacaagtggcttttgctgccaactggtgagattttccggaataggaatgttttgagaaatgaaaaatgcagtcttgctttgatttacaagtggctacattttcagaaa

SEQ ID NO: 38686 - DNA, 110 bp, synthetic construct
  source 1..110: mol_type = other DNA
cattgtctttacttaaaattttttttaaactttatttttggtttcttttttttctcctctgggaaagcaatgtactgctgatgccacatttagcctgttgcttcatgggg

SEQ ID NO: 38687 - DNA, 110 bp, synthetic construct
  source 1..110: mol_type = other DNA
cctctgggaaagcaatgtactgctgatgccacatttagcctgttgcttcatggggttttttttttgggttttttggccatgcccacggcatgcgagagtttctgaccagg

SEQ ID NO: 38688 - DNA, 110 bp, synthetic construct
  source 1..110: mol_type = other DNA
ggcaacttctacttcctgtctctcattattggaagccaactaccatataagcaacgtgactacccagaaacatgctacaagaaaaaataagatcaagccacctacgagaa

SEQ ID NO: 38689 - DNA, 110 bp, synthetic construct
  source 1..110: mol_type = other DNA
attgccttcactcaacaaccaacacaaaaggatttcatttgtcttcactctagttatctgattttggcattatctgtaatttaaacagtttatatttgtggtatgacata

SEQ ID NO: 38690 - DNA, 110 bp, synthetic construct
  source 1..110: mol_type = other DNA
gaaagtatttcattaatattcagagaatcaagctgaactgtatcaagtacaaatgtaggaaagttcagaataaatctgtcacctatgcaacataatatcctcttactttt

SEQ ID NO: 38691 - DNA, 110 bp, synthetic construct
  source 1..110: mol_type = other DNA
ctttctgatagcacaatgtgataggcttaagaccccagttcctcagccatagaatatgagagaagcctagaaaaaaattcctgcgaaacaatcctattgtgagaaattga

SEQ ID NO: 38692 - DNA, 110 bp, synthetic construct
  source 1..110: mol_type = other DNA
atgagagaagcctagaaaaaaattcctgcgaaacaatcctattgtgagaaattgaagctttatattgcactgagaatacctgtgttcttatcatggatttttcatttttt

SEQ ID NO: 38693 - DNA, 110 bp, synthetic construct
  source 1..110: mol_type = other DNA
gaattaattaaaggaaaaggatacatatgtattcctaagaccacaaggcatgggaacttgagatcagaattaacattaccttttgctttgtgttgaacaatgtttagcct

SEQ ID NO: 38694 - DNA, 110 bp, synthetic construct
  source 1..110: mol_type = other DNA
tggcacctgttacttagtgaaccagttgtggaatgaaagaatgagctatcaagcctggacgagtcaaacactgtgatactgttgggacactgacgaagtacagcatgttc

SEQ ID NO: 38695 - DNA, 110 bp, synthetic construct
  source 1..110: mol_type = other DNA
ccttcaacagaatccaatccatcaggtcccattctgctgtccaacttgtccttgttactgaagaaccttgggggctggtcttcattttgctggggtttttttgccagcat

SEQ ID NO: 38696 - DNA, 110 bp, synthetic construct
  source 1..110: mol_type = other DNA
tactgaagaaccttgggggctggtcttcattttgctggggtttttttgccagcatccaaggcaaaagtggaagttcccaggccagggatgagtccacgtcacagctgcag

SEQ ID NO: 38697 - DNA, 110 bp, synthetic construct
  source 1..110: mol_type = other DNA
ggctgattcattattcacaattttagagatgaggcttagaaaagttgatgaggaagcgttcccactgtggcacaatgaggtcggtggcatcttgggggcactgggatgca

SEQ ID NO: 38698 - DNA, 110 bp, synthetic construct
  source 1..110: mol_type = other DNA
gaccctgtcgtaccactctttgctcaagctttcttttccctttgggcactgtggcttgaacagatgaagcactcttggggggccagcctctggcatcgagttagtttctt

SEQ ID NO: 38699 - DNA, 110 bp, synthetic construct
  source 1..110: mol_type = other DNA
aaagggggagtccagggatccaatgacagtgcattcctctgtttacctcgtagtgttaggcttatcagtcaatctctagaggccttaatttcctcttgtatttgaaaatc

SEQ ID NO: 38700 - DNA, 110 bp, synthetic construct
  source 1..110: mol_type = other DNA
ctcactgctctccccatcaccggcctcaggcagccactaatctcttctctatatccatgagctcagttctctttctttgtatttttcagatttcagaaataagtgagacc

SEQ ID NO: 38701 - DNA, 110 bp, synthetic construct
  source 1..110: mol_type = other DNA
gggcgtgagctcaccgctggcttctccctgcagatgccacgcgctctccccctggggcagaccagagcagcttcctcccggggggcacgtggctcagtgaaaacggcagt

SEQ ID NO: 38702 - DNA, 110 bp, synthetic construct
  source 1..110: mol_type = other DNA
ggcagaccagagcagcttcctcccggggggcacgtggctcagtgaaaacggcagtagggtatctgctctcctaagacctggtttcaagtccccaccctgcctgcccagac

SEQ ID NO: 38703 - DNA, 110 bp, synthetic construct
  source 1..110: mol_type = other DNA
caccgccaccatcactgtcatcatcatcttgcggttgctggagtgtggtttatttgcatgtacatcaaacagatcaatgtctcggggtatcagctgataacgtcgaatga

SEQ ID NO: 38704 - DNA, 110 bp, synthetic construct
  source 1..110: mol_type = other DNA
gcatgtacatcaaacagatcaatgtctcggggtatcagctgataacgtcgaatgatagtaaccacctgcagatctgaattccttctcttttatcaactgagtcatttaaa

SEQ ID NO: 38705 - DNA, 110 bp, synthetic construct
  source 1..110: mol_type = other DNA
ataactggaacatcttagagaatgagacagggcaggggtgggtactattaataattaagctgagaaaaatcaggtgaaagttgggatatatggttactctacaaatcttt

SEQ ID NO: 38706 - DNA, 110 bp, synthetic construct
  source 1..110: mol_type = other DNA
taagctgagaaaaatcaggtgaaagttgggatatatggttactctacaaatctttgaagactaatttggattttttggaaatatcaaatgtcacccagccaaatcagagt

SEQ ID NO: 38707 - DNA, 110 bp, synthetic construct
  source 1..110: mol_type = other DNA
atacgaacaggaaacagaaatgatcaattattttggcctccaattctccttttcgaaattagctcattcagacctggctcacaactttaagtcataaaagtcgtgcaaaa

SEQ ID NO: 38708 - DNA, 110 bp, synthetic construct
  source 1..110: mol_type = other DNA
taaccactgtggagaacactatgtaggtatcttaaaaagtaaaaatagagctaccatacaacccagcaatcctacttctgcacatatatccccaaaggatgaaaactcat

SEQ ID NO: 38709 - DNA, 110 bp, synthetic construct
  source 1..110: mol_type = other DNA
tttacaaaaacatgtctccttcacaaactaaccaagtttattttgccaatattgagtgtaacataaccccttcctaaacctataccagtttttaaaacctgcaaaagatt

SEQ ID NO: 38710 - DNA, 110 bp, synthetic construct
  source 1..110: mol_type = other DNA
gtgtaacataaccccttcctaaacctataccagtttttaaaacctgcaaaagattattttcctagcagaaatattgttttgtgcttagatcagctttcacatgaatactt

SEQ ID NO: 38711 - DNA, 110 bp, synthetic construct
  source 1..110: mol_type = other DNA
gtcatttattcttgatttgttattttcactctaaaaagaagacgtgaagttagtcattagctgagaaaagggaaatttttgaggtaagttaagagtattgaaagtttgca

SEQ ID NO: 38712 - DNA, 110 bp, synthetic construct
  source 1..110: mol_type = other DNA
gaaaaagagagcaaagcagtgttgaagaccttgttttccatttttcactgaaaccttccctggacttttgctcggagaaactactttcttctagggcctttaagaaatgt

SEQ ID NO: 38713 - DNA, 110 bp, synthetic construct
  source 1..110: mol_type = other DNA
ttccctggacttttgctcggagaaactactttcttctagggcctttaagaaatgtttcattttgctgcttgttcagcaagtggagttcgttattcagtagaagatggtaa

SEQ ID NO: 38714 - DNA, 110 bp, synthetic construct
  source 1..110: mol_type = other DNA
acacttcttctctccaaataaatcttcatctctttccatggagaagcagctatggatttttttggtttttcatttttggtactcttctctgcctagccctgtttggatac

SEQ ID NO: 38715 - DNA, 110 bp, synthetic construct
  source 1..110: mol_type = other DNA
caaggcttatcctggcttgagagccccgaggggagatccagaacgcttttccagctgtctgtgaggaggccggtggaccagtatgcggcttgttgatccagggttagaga

SEQ ID NO: 38716 - DNA, 110 bp, synthetic construct
  source 1..110: mol_type = other DNA
agcagtatcttcggcttctacctactagaagccagtagctccccctttcagccgtgaccaccagaatatttcttgaccctgccagatgtctgctggaggtgcaagcaccc

SEQ ID NO: 38717 - DNA, 110 bp, synthetic construct
  source 1..110: mol_type = other DNA
tggtcagccccagggagatgttgaaatgacagggggttttgttttctggttttgtctccatgcctgcagcgcgcgggagttgcaaggatcaaacccatgtcacagcagtg

SEQ ID NO: 38718 - DNA, 110 bp, synthetic construct
  source 1..110: mol_type = other DNA
atgacagggggttttgttttctggttttgtctccatgcctgcagcgcgcgggagttgcaaggatcaaacccatgtcacagcagtgacccaagccactgcagtgaccacac

SEQ ID NO: 38719 - DNA, 110 bp, synthetic construct
  source 1..110: mol_type = other DNA
gattgtttccacggcctcccagtggctaagcctcagagagacaacagcaggctcctctccaggaaatgagggtcatctttgcatcattttgccgccaccgtggctgcttc

SEQ ID NO: 38720 - DNA, 110 bp, synthetic construct
  source 1..110: mol_type = other DNA
tcccatatgtctgcaggctctcctcctccctctccaggctctctctcctgtcctaacactgcgtttcccagaccctgctctgctttcaagctaatgtttcaaaagaatca

SEQ ID NO: 38721 - DNA, 110 bp, synthetic construct
  source 1..110: mol_type = other DNA
acactgcgtttcccagaccctgctctgctttcaagctaatgtttcaaaagaatcattagagacgttttcaagtgggggaggacagaagtttgagcttatgctgaatgtct

SEQ ID NO: 38722 - DNA, 110 bp, synthetic construct
  source 1..110: mol_type = other DNA
ggaccttcccgggccagttgctttgtctcctcatcagactcagggactttaggaacagaagccagctttccttctaagacacagtcagggtctctgcctcttctgttctc

SEQ ID NO: 38723 - DNA, 110 bp, synthetic construct
  source 1..110: mol_type = other DNA
agcaccctcctgccccctccctggaaagtctccactcacctcccaaccctgagctctgctcactgtctttgaaactttccttccaaactgcatccttcctggaaagttta

SEQ ID NO: 38724 - DNA, 110 bp, synthetic construct
  source 1..110: mol_type = other DNA
ctgctcactgtctttgaaactttccttccaaactgcatccttcctggaaagtttataaaaggaccagatagcaatcctcctcttccaggaagtcttcctgggtggatccc

SEQ ID NO: 38725 - DNA, 110 bp, synthetic construct
  source 1..110: mol_type = other DNA
catcttatttaatcatcaaaacaaaggtctgtccagcgcgggtccccgttttgctgatgaggatgtgggagctcaaagaggtcacatagctcagaagaggccaagctgga

SEQ ID NO: 38726 - DNA, 110 bp, synthetic construct
  source 1..110: mol_type = other DNA
gatgaggatgtgggagctcaaagaggtcacatagctcagaagaggccaagctggatctcggatccagatgtttctcaaagaggtcacacagctcagaagaggccgagctg

SEQ ID NO: 38727 - DNA, 110 bp, synthetic construct
  source 1..110: mol_type = other DNA
aagctggacacaccactcctgttcatgtcctgctggtcacatggccacacttggtgacaagggcggctgtgaaatgcagctttattctgggctgccatgtgcccagttga

SEQ ID NO: 38728 - DNA, 110 bp, synthetic construct
  source 1..110: mol_type = other DNA
acagaaaagcgtgagctactgataggattagtctctctgagcttcactttctttcctaaatgaggaaggtggtctacacctcacctgcctaactcgggttttgtacagat

SEQ ID NO: 38729 - DNA, 110 bp, synthetic construct
  source 1..110: mol_type = other DNA
cttgcctcactcaggccctggagcccagagactggccccttagccctggctaccgagtcccaggttttgccaaggagcttggctgagcagcaaagggttttcaaagaaga

SEQ ID NO: 38730 - DNA, 110 bp, synthetic construct
  source 1..110: mol_type = other DNA
gaacaaagacaagtacaaaacatattctgaaatacctcatcatgccaggaatacatcgtagcttagatttaagattacatcagaaagacccagcagccaatttaaaggga

SEQ ID NO: 38731 - DNA, 110 bp, synthetic construct
  source 1..110: mol_type = other DNA
tcgtagcttagatttaagattacatcagaaagacccagcagccaatttaaagggaatttctctggccaaacatgggacaaatcgagcaaatggtaacagggtcattgaat

SEQ ID NO: 38732 - DNA, 110 bp, synthetic construct
  source 1..110: mol_type = other DNA
atgagggtcaggagagggaagagagggcgagggcaccaatccaccttctgggcccatgtgcacagcaaatccagggcagggcgcagggagacggctttgctgggtctttt

SEQ ID NO: 38733 - DNA, 110 bp, synthetic construct
  source 1..110: mol_type = other DNA
atgtgcacagcaaatccagggcagggcgcagggagacggctttgctgggtctttttctttagagaagaatgtggcacgtggagtgtgatatgagagccagttcccttctc

SEQ ID NO: 38734 - DNA, 110 bp, synthetic construct
  source 1..110: mol_type = other DNA
agtataaactctcacgaaaactctcctccatcagagtactcactgggtgattagctgtttggcacctctctcccacacaatataaggtgggctccagaatgtctttttag

SEQ ID NO: 38735 - DNA, 110 bp, synthetic construct
  source 1..110: mol_type = other DNA
tgtttggcacctctctcccacacaatataaggtgggctccagaatgtctttttagggctgcatccatagcatatctaagttcccaggctaggggtcaaatcggagtcgga

SEQ ID NO: 38736 - DNA, 110 bp, synthetic construct; identical to SEQ ID NO: 38734
  source 1..110: mol_type = other DNA

SEQ ID NO: 38737 - DNA, 110 bp, synthetic construct; identical to SEQ ID NO: 38735
  source 1..110: mol_type = other DNA

SEQ ID NO: 38738 - DNA, 110 bp, synthetic construct
  source 1..110: mol_type = other DNA
tagaccagagcaaagactagtccaaacacatctaaaatgtttgaaaggatttcatttttcactgtttcttcttacaatgcatgctgagccaagatagtcaacattcaact

SEQ ID NO: 38739 - DNA, 110 bp, synthetic construct
  source 1..110: mol_type = other DNA
taaatgttttgcactggtgctcatcctctgaaaactgaatgccaattgcaagacatgggcagagtggtgggcaggcaggggacagctggtgggggacctacaggttctag

SEQ ID NO: 38740 - DNA, 110 bp, synthetic construct
  source 1..110: mol_type = other DNA
tgggcagagtggtgggcaggcaggggacagctggtgggggacctacaggttctagcctgtgttagtgggttggcctggtgccctggctgccagcgcctgctgcatgaggg

SEQ ID NO: 38741 - DNA, 110 bp, synthetic construct
  source 1..110: mol_type = other DNA
cagccctggtgtacttggcctgtggaggtgaggcctggtcttcctgggagggggccgtgctttggagagggtgtgctgctgtcaccatactatgacctaactctccctga

SEQ ID NO: 38742 - DNA, 110 bp, synthetic construct
  source 1..110: mol_type = other DNA
cactggttctgcagcagcgttggctgtctgtgggccgatgggtgtggcttttgcaatcatgttggggcgcctggatttgggaagacttgcctcctttcctccgagcaata

SEQ ID NO: 38743 - DNA, 110 bp, synthetic construct
  source 1..110: mol_type = other DNA
aataatcaatgccatttaaaaattatgcgtttgtcttttaaaatttttgtcttccgcactaggctacagattgcagaaaggcaatgtatgttctttttggtgtggttcac

SEQ ID NO: 38744 - DNA, 110 bp, synthetic construct; identical to SEQ ID NO: 38743
  source 1..110: mol_type = other DNA

SEQ ID NO: 38745 - DNA, 110 bp, synthetic construct
  source 1..110: mol_type = other DNA
taaacaaattaccatctgtgacaacaggttagacaactaactctgactctgcctaggggcagaaatgactttaactactttccgtactggtttccaccggtgaaatccct

SEQ ID NO: 38746 - DNA, 110 bp, synthetic construct
  source 1..110: mol_type = other DNA
ggggcagaaatgactttaactactttccgtactggtttccaccggtgaaatccctcaacctcctggactctctgtgtgtctggaattttcacttttccccaaatcagcaa

SEQ ID NO: 38747 - DNA, 110 bp, synthetic construct
  source 1..110: mol_type = other DNA
tgagggaggtagaccccctgtttacttccctcgctggcctagagaaaacctaaagtttgaggcaggtaagagactggtgaggtcctgaatgggacagtgtgtatgaacaa

SEQ ID NO: 38748 - DNA, 110 bp, synthetic construct
  source 1..110: mol_type = other DNA
tctgtcacataggatctaaccataactaatccagtggtcacatttggtttctggaatcagattatctggcttgaaatcccagctccatcattttatagactccagtgtaa

SEQ ID NO: 38749 - DNA, 110 bp, synthetic construct
  source 1..110: mol_type = other DNA
ccaaacccacagaaccactgcttgttcatcagctcaaactcctcccacctcagggaggtcctcatagactcgctccagcccctctgcactgggacacagactcaggcagg

SEQ ID NO: 38750 - DNA, 110 bp, synthetic construct
  source 1..110: mol_type = other DNA
gaaaatcagtcttactgagattggaagtctggatgaggaggggggcaggcacaattagggtggagagaccagttaggaagctattgaagatttccagctgatagatgttg

SEQ ID NO: 38751 - DNA, 110 bp, synthetic construct
  source 1..110: mol_type = other DNA
ccttctgccttttaagtccttggcaaactctataaaagcctttccatttgataatatgtagaagcattacttgtctctcttctatccagtagcttattttgaaaggctga

SEQ ID NO: 38752 - DNA, 110 bp, synthetic construct
  source 1..110: mol_type = other DNA
atgtagaagcattacttgtctctcttctatccagtagcttattttgaaaggctgagctttttgaataaataagcaacctacacaattggaagggaaataaaacgcttgat

SEQ ID NO: 38753 - DNA, 110 bp, synthetic construct
  source 1..110: mol_type = other DNA
ttagcctctcctgcccacatttccttttgtagcctggacaattgccagaatcattttctcgctagcacattaagtttctatcccttctgttttactcctgtctattaagg

SEQ ID NO: 38754 - DNA, 110 bp, synthetic construct
  source 1..110: mol_type = other DNA
atggcagtttttcccacatgacctgctgtcatgtttactctgtagaccggtctttatattaaattctatggcttccccccccccccttctagctactgccatttttctgc

SEQ ID NO: 38755 - DNA, 110 bp, synthetic construct
  source 1..110: mol_type = other DNA
atattaaattctatggcttccccccccccccttctagctactgccatttttctgctccccttttgagaagcagaacttcaaaaaaaaagtttccatgcccattttctcca

SEQ ID NO: 38756 - DNA, 110 bp, synthetic construct
  source 1..110: mol_type = other DNA
aatcagccttgttcctttagtgacagtaactcatcagaggggtcagcttagtcggttggcacagttggtcagtacgtgctgctaaagaagccaaggctatggcttcattg

SEQ ID NO: 38757 - DNA, 110 bp, synthetic construct
  source 1..110: mol_type = other DNA
agcggaggcttgctgtgcgctgtccgttgtctgctgcacatggtgggtgttgttccaggagcctttgtgtaagctcccccattcagtaaactgcagccgtctctgggctc

SEQ ID NO: 38758 - DNA, 110 bp, synthetic construct
  source 1..110: mol_type = other DNA
caggagcctttgtgtaagctcccccattcagtaaactgcagccgtctctgggctcttttttcagtctcgaggctgggcaacttgcaggtctacagggtacagcccaacag

SEQ ID NO: 38759 - DNA, 110 bp, synthetic construct
  source 1..110: mol_type = other DNA
tgtagggaatattctgtgttctcaacattggggtaaaaaaagtggaggaggattaggccagtttattcaaaggacttggaagtgatgggctatgaattaatatgagaata

SEQ ID NO: 38760 - DNA, 110 bp, synthetic construct
  source 1..110: mol_type = other DNA
ggccagtttattcaaaggacttggaagtgatgggctatgaattaatatgagaataatttacttcctatggaatatagcactggactatagcacttgcaggaattccagat

SEQ ID NO: 38761 - DNA, 110 bp, synthetic construct
  source 1..110: mol_type = other DNA
atatggaaacacagacatggaggcattgctggataagagaaagatccaaaaacggggctgacagaccgtgcagcttatattgctgcttatgtccccttggagggacatat

SEQ ID NO: 38762 - DNA, 110 bp, synthetic construct
  source 1..110: mol_type = other DNA
agcagaataagctcattagtcaccacataggtgatagtaattaaagctatggtggaaggttaagaaagagacagggggcctaggaacatggtaaatatattggtataggg

SEQ ID NO: 38763 - DNA, 110 bp, synthetic construct
  source 1..110: mol_type = other DNA
tgaagtcatatcaaaagtggtgtttcatctctgggctttaaatagcttctacagttgaaccgtaaattcattcattcaatgaacaaattcatctacatgttggaagattc

SEQ ID NO: 38764 - DNA, 110 bp, synthetic construct
  source 1..110: mol_type = other DNA
ggattatttcagttttctattgttcagatattttcacctataatagcctaaaacgcagaagcagatgttctttttggtcacattatgatcgttgttacccaagcatgcca

SEQ ID NO: 38765 - DNA, 110 bp, synthetic construct
  source 1..110: mol_type = other DNA
atttttgcaaagggtatgtacagacagctcttcccaaaggatataggaatggtacacatgcatataaaaagatgctcgatattacccaccattggcaaaatcaaaaccat

SEQ ID NO: 38766 - DNA, 110 bp, synthetic construct; identical to SEQ ID NO: 38765
  source 1..110: mol_type = other DNA

SEQ ID NO: 38767 - DNA, 110 bp, synthetic construct
  source 1..110: mol_type = other DNA
ggaggagatttgtttagcttctaaaataatgtcaaaatgacatttttgcagcattaagaaaatgagaaaatctttaaaaaaaaatctggaaactcatggctcctgttgtg

SEQ ID NO: 38768 - DNA, 110 bp, synthetic construct; identical to SEQ ID NO: 38767
  source 1..110: mol_type = other DNA

SEQ ID NO: 38769 - DNA, 110 bp, synthetic construct
  source 1..110: mol_type = other DNA
tgaacagatatagcaagtcataactcttcttagtttttatgcaattcaagtaccgaaggaaatttttggaaacctcagtattgccaagtgttctacttaaagcatatttt

SEQ ID NO: 38770 - DNA, 110 bp, synthetic construct
  source 1..110: mol_type = other DNA
tttgtacttcccaatccaacaggcaaacacccagccctgataactccacaccatcacagcttggcatgagatccaggcaaagactccatatagttatgtacagacagatg

SEQ ID NO: 38771 - DNA, 110 bp, synthetic construct
  source 1..110: mol_type = other DNA
atagatcttgggctgagtattggagaagctagcaaccgggaaataccaatggacacagacaaaacaaagccccaacaaaatcttgttctctctaactagaagactagaaa

SEQ ID NO: 38772 - DNA, 110 bp, synthetic construct
  source 1..110: mol_type = other DNA
tcaacactgtgtgtgattacggagatgtattctgtagaatggagataagcttacgaggcaagtctcttgtcagtggctgtatttagggggactaattggctagagaagaa

SEQ ID NO: 38773 - DNA, 110 bp, synthetic construct
  source 1..110: mol_type = other DNA
attcccaaagtgttttctttggcccacatgacttcactgagatccaaattctcaaattcttgacgtttccatttgaatctcaaagctttaaaaaattaaaaattgaaaat

SEQ ID NO: 38774 - DNA, 110 bp, synthetic construct
  source 1..110: mol_type = other DNA
gtgatccagaggctttatgggataccatgtacaaggtagtagcacattgattagcctatcaaggaaatcctcatttgacctaggaataagtcttccaagagccctggaat

SEQ ID NO: 38775 - DNA, 110 bp, synthetic construct
  source 1..110: mol_type = other DNA
tgtgtgtatgtacatagtccatacaaaccagtatagaagtgcaggggtcaactgaagctctttagatggacagaataaatcagatctgttctggaaaggaaagcataggc

SEQ ID NO: 38776 - DNA, 110 bp, synthetic construct
  source 1..110: mol_type = other DNA
tattgttattttcttttttttaggtattaactctacctctgggccttttcaatgtattttcagattataactctcacctcttatatgtgtcatattgtcagcatatgtct

SEQ ID NO: 38777 - DNA, 110 bp, synthetic construct
  source 1..110: mol_type = other DNA
gtatatcatgagtgcgccttttgcttatttttcatgaagcagatgaaatctgagtgctcatttttaccattggattttccagggttaggagctttaggctttcgtcaaaa

SEQ ID NO: 38778 - DNA, 110 bp, synthetic construct
  source 1..110: mol_type = other DNA
gctcatttttaccattggattttccagggttaggagctttaggctttcgtcaaaatttttgttagcattgcatgttttggactgctatagaatagtgaacagtggacggt

SEQ ID NO: 38779 - DNA, 110 bp, synthetic construct
  source 1..110: mol_type = other DNA
tgaggatgaggcccccacatcggtaggtctgaaggccacctgtgaaatttcagtaaacaggtggagtcccagtgcagcggatgaggggtattatatccattcagtgttct

SEQ ID NO: 38780 - DNA, 110 bp, synthetic construct
  source 1..110: mol_type = other DNA
gaatttaatagtaccgctttctttggaacgcttcattgcaagactatagagtaagagacagttacttcagagtttaactagctagtatgcttctgagataataaaatata

SEQ ID NO: 38781 - DNA, 110 bp, synthetic construct
  source 1..110: mol_type = other DNA
ctgaattttgggtcttgaaaaatctccaagtgcctaataaggaagtggggaacctggcttgacaccagttcctgtaaacaggatatggggtttttgttgcctccaagctt

SEQ ID NO: 38782 - DNA, 110 bp, synthetic construct
  source 1..110: mol_type = other DNA
tcttctttactgtttcattatttctcaaccgtttcactgtcgagaaaataaggataatagaaaaatatgtgttttccatcacagagcagaagaaacttagtgggaatcct

SEQ ID NO: 38783 - DNA, 110 bp, synthetic construct
  source 1..110: mol_type = other DNA
agattcaagtgaagacaaagcctcagaagcagcaggatgaagagtcacttcctcaaggtcaaggaacatttacctttaataaccatcattagctgattccggctgacaga

SEQ ID NO: 38784 - DNA, 110 bp, synthetic construct
  source 1..110: mol_type = other DNA
aggtcaaggaacatttacctttaataaccatcattagctgattccggctgacagacgttctcctgagaaccagtggtaaaataattgccattctctgctctacttcttta

SEQ ID NO: 38785 - DNA, 110 bp, synthetic construct
  source 1..110: mol_type = other DNA
agtgaaccagggcacttcatttttctttgagtcagaagaagcttgagaaggaacatcatgttttttagttatggaaagcactagtgcttgagacctgctgtgacttttga

SEQ ID NO: 38786 - DNA, 110 bp, synthetic construct
  source 1..110: mol_type = other DNA
atgaatgaaagtttttaatagttttaatcatctggactggggcctttgatctccccagccctggtaagaattcatgttggtcaatttggattcatgaagacactgaggtt

SEQ ID NO: 38787 - DNA, 110 bp, synthetic construct
  source 1..110: mol_type = other DNA
acactttaggatcaaattaggtatctgttcttccaggaagctttctctgacctgacttcatccatagctttgttggtcctggccctattttatttcaaaaggataataaa

SEQ ID NO: 38788 - DNA, 110 bp, synthetic construct
  source 1..110: mol_type = other DNA
cttcatccatagctttgttggtcctggccctattttatttcaaaaggataataaatgtgtcatttttggaccaatgacactatattctccaaaagttacatgactattta

SEQ ID NO: 38789 - DNA, 110 bp, synthetic construct
  source 1..110: mol_type = other DNA
aaatggcaaaaagactaaataaataaataaatggttccttaaaatagtgttcactttctctaagaagctacttaggttctcatattgcctctacctctttaacttggcat

SEQ ID NO: 38790 - DNA, 110 bp, synthetic construct
  source 1..110: mol_type = other DNA
ttctctaagaagctacttaggttctcatattgcctctacctctttaacttggcatcgggtgtatgggggagtcaagtatttgagtcccttggaacatttgggggtgccct

SEQ ID NO: 38791 - DNA, 110 bp, synthetic construct; identical to SEQ ID NO: 38789
  source 1..110: mol_type = other DNA

SEQ ID NO: 38792 - DNA, 110 bp, synthetic construct; identical to SEQ ID NO: 38790
  source 1..110: mol_type = other DNA

SEQ ID NO: 38793 - DNA, 110 bp, synthetic construct
  source 1..110: mol_type = other DNA
tctaccccaagactgttctagaacaaattaatcccttaggaagtatctaggagacacctgggagagccactaaggaagggtaccttgttcctccaccattggcctccatc

SEQ ID NO: 38794 - DNA, 110 bp, synthetic construct
  source 1..110: mol_type = other DNA
acctgggagagccactaaggaagggtaccttgttcctccaccattggcctccatcagacccaaagacagtgaccaactagcctatcccatggccaacttcccagcaggga

SEQ ID NO: 38795 - DNA, 110 bp, synthetic construct
  source 1..110: mol_type = other DNA
cacacctgcacacatatgcaaactgttgtctcggggctgggtcctgggcttctgaagatggagtatgaaggagaatttcatcatgtagactttatgtctcttgaatttta

SEQ ID NO: 38796 - DNA, 110 bp, synthetic construct
  source 1..110: mol_type = other DNA
gctgggtcctgggcttctgaagatggagtatgaaggagaatttcatcatgtagactttatgtctcttgaattttaaacaatgtgaatgtattattaattcaaaaaactat

SEQ ID NO: 38797 - DNA, 110 bp, synthetic construct
  source 1..110: mol_type = other DNA
gtacagcctagaagagggtggtctctgggatcttgacagtgccagagggttgcaagtaaacagacctcgatcctcacaagtttgggaatatgtacactatcagaatttct

SEQ ID NO: 38798 - DNA, 110 bp, synthetic construct
  source 1..110: mol_type = other DNA
gtaaacagacctcgatcctcacaagtttgggaatatgtacactatcagaatttctgaaacatagaaacttttatgttttgttttggtatcaacttcttttgatattaaac

SEQ ID NO: 38799 - DNA, 110 bp, synthetic construct
  source 1..110: mol_type = other DNA
cattttctaaaatgaggaaacgtgaggacgcagggtcctgaaagagttaatcgcttgtgttgtggcgtctcaccacagaggaccaatacccttgtgccacttaacgccct

SEQ ID NO: 38800 - DNA, 110 bp, synthetic construct
  source 1..110: mol_type = other DNA
tgtgttgtggcgtctcaccacagaggaccaatacccttgtgccacttaacgccctaggggccacatcacagacagagaaccgtgctgtgaaagcccaggatgccaatgct

SEQ ID NO: 38801 - DNA, 110 bp, synthetic construct
  source 1..110: mol_type = other DNA
gttcaacaacttcagggcaaaagatcaaaatttgagggtcatcatgtgtatatgtaacagtattaatttaaaaattcacttaattaggagttcccgtcatggtgcagtgg

SEQ ID NO: 38802 - DNA, 110 bp, synthetic construct
  source 1..110: mol_type = other DNA
aggtgcaacagagacctctgttactcagcttgaaaatggccatggcctccatatattaaaaaataaaacgaataaaaaaaaaaaagtctacagatttttccacaagtaat

SEQ ID NO: 38803 - DNA, 110 bp, synthetic construct
  source 1..110: mol_type = other DNA
aatagcattgtgtataatagctgtaagtggctctcaaagcctgctgcacatgggcaccacttggggaggttttctaatgtgccagacccacctgccaaacattttgattt

SEQ ID NO: 38804 - DNA, 110 bp, synthetic construct
  source 1..110: mol_type = other DNA
atgccagatccaagccttatctgcaacatacaccacagctccggcaatcctcaacccgctgatcaaggccagggatggaacccacatcctcatagatcatagttggattc

SEQ ID NO: 38805 - DNA, 110 bp, synthetic construct; identical to SEQ ID NO: 38804
  source 1..110: mol_type = other DNA

SEQ ID NO: 38806 - DNA, 110 bp, synthetic construct
  source 1..110: mol_type = other DNA
tgaagatgttagaacggaagtgtagatagtgagctgtgtgatgacagggaccacttcttagtccagtgtgggatggatgtgtgagatatcatgtggacagtgaatcctca

SEQ ID NO: 38807 - DNA, 110 bp, synthetic construct
  source 1..110: mol_type = other DNA
caaaaccaaaaaaactaacactaaactaaactggaatttgactttctgggttacttaggcaagagctttcccacacaggttaagcagcaaaatgtttagtcttgttgcca

SEQ ID NO: 38808 - DNA, 110 bp, synthetic construct
  source 1..110: mol_type = other DNA
taggcaagagctttcccacacaggttaagcagcaaaatgtttagtcttgttgccagaatgcagaattcctttggggtttgtatccatttttgctgagatttggggcaaaa

SEQ ID NO: 38809 - DNA, 110 bp, synthetic construct; identical to SEQ ID NO: 38807
  source 1..110: mol_type = other DNA

SEQ ID NO: 38810 - DNA, 110 bp, synthetic construct; identical to SEQ ID NO: 38808
  source 1..110: mol_type = other DNA

SEQ ID NO: 38811 - DNA, 110 bp, synthetic construct
  source 1..110: mol_type = other DNA
gaggttattctaactgtatgcacagaaagtttctcgggtgtaatgtttacttccggaaagatatttagtatttttcatgtttaatgaaacagataatttcatgtttaatc

SEQ ID NO: 38812 - DNA, 110 bp, synthetic construct
  source 1..110: mol_type = other DNA
cgctgaaagggcaaatgagtattaacctagagcagaaataatatacaggatttaatagacaaatcgactgcaaatataaatcgcagtgtagttcaaggctaaattatatg

SEQ ID NO: 38813 - DNA, 110 bp, synthetic construct
  source 1..110: mol_type = other DNA
tagacaaatcgactgcaaatataaatcgcagtgtagttcaaggctaaattatatgttagattgtctggattcaaggaatgaaccacagttcaatattaggaaatgtattc

SEQ ID NO: 38814 - DNA, 110 bp, synthetic construct
  source 1..110: mol_type = other DNA
tgtggagtgacatagacaaagagctgtcatctattttttgtcctgttcctgtgccctcctcgatcttccttttctcaggtctgtcacccattgaatggagagatgagaac

SEQ ID NO: 38815 - DNA, 110 bp, synthetic construct
  source 1..110: mol_type = other DNA
agatgcttgttaaaacacagattactggatgccacccctagaatctgtcatatctggggtgggacccaaaatttgttcttctatcaagctctcatacaatgctggttcca

SEQ ID NO: 38816 - DNA, 110 bp, synthetic construct
  source 1..110: mol_type = other DNA
ggggtgggacccaaaatttgttcttctatcaagctctcatacaatgctggttccaaaatcatactttaaaaactactaatgtaaataatcaggtgatggtttattgagcg

SEQ ID NO: 38817 - DNA, 110 bp, synthetic construct
  source 1..110: mol_type = other DNA
tctcttgtggcagtggattaaggatttggcgatggccacaactgtggcatgggtttgatccctggcctgagaacttcatgctgtgggtgcagccagaaaaaaaaaaaaga

SEQ ID NO: 38818 - DNA, 110 bp, synthetic construct
  source 1..110: mol_type = other DNA
tgatccctggcctgagaacttcatgctgtgggtgcagccagaaaaaaaaaaaagagtctgccctgtaaaatacactgtcaatatagagacaagccatagattggtaaaaa

SEQ ID NO: 38819 - DNA, 110 bp, synthetic construct
  source 1..110: mol_type = other DNA
catccatgcacagagatggaccaccactgttggagaacgcccattcttcctgaactcctctgtaccgggatgtccattttcttcaccccaaatccattgctggcaatgga

SEQ ID NO: 38820 - DNA, 110 bp, synthetic construct
  source 1..110: mol_type = other DNA
ctccttcagtttctaagaggaatctgggcaagagtggagtcttgtcagggaggctacaggttaggcctggcctgttaatcccgggagattccctgagcccccttaacatt

SEQ ID NO: 38821 - DNA, 110 bp, synthetic construct
  source 1..110: mol_type = other DNA
acaggttaggcctggcctgttaatcccgggagattccctgagcccccttaacattcacatccctctccccccatctcagtgtgtctgatttttttcggaagaaatgaagg

SEQ ID NO: 38822 - DNA, 110 bp, synthetic construct
  source 1..110: mol_type = other DNA
gccaactttacttctactgcttcatttgttcctctgtgaacagatgtacttggatttgtgataccgtaagagaatgaggccaaccccactgcagctatatttagccaaca

SEQ ID NO: 38823 - DNA, 110 bp, synthetic construct
  source 1..110: mol_type = other DNA
ttgtgataccgtaagagaatgaggccaaccccactgcagctatatttagccaacattcagggagtgacctacataaaatctataatagactttaaatcatacctgagttt

SEQ ID NO: 38824 - DNA, 110 bp, synthetic construct
  source 1..110: mol_type = other DNA
aggctagacagatcgattagagacagatagtggtgaatatcttcttgggagcctgctctgtagtagagagaataaagagtcattgaaagcttttaagcaagggataacca

SEQ ID NO: 38825 - DNA, 110 bp, synthetic construct
  source 1..110: mol_type = other DNA
ctctgtagtagagagaataaagagtcattgaaagcttttaagcaagggataaccagatgacatctcaagtaataagatgactcttgtgactgaggaggaaagaccagctg

SEQ ID NO: 38826 - DNA, 110 bp, synthetic construct
  source 1..110: mol_type = other DNA
ttctgtgatgctgatttttgacacggtataacagtattgcatatatgataccacacccttagaatgtcaggttgaatttaaaaatcacaccataaataataagatggtag

SEQ ID NO: 38827 - DNA, 110 bp, synthetic construct
  source 1..110: mol_type = other DNA
tcccgtgagctcaggccatgggggagccttgatagtacgaagtatagggcattccttcaggaccaaggacagcagagatgattaaggttgaatgatgggtctgcaggaaa

SEQ ID NO: 38828 - DNA, 110 bp, synthetic construct
  source 1..110: mol_type = other DNA
acatttatttgtttatttattgttttggctatgcctgcaggatttggaagttcctgggccagggatcaaacccttgccataacggcaacctaagccgaagcagtggcaac

SEQ ID NO: 38829 - DNA, 110 bp, synthetic construct
  source 1..110: mol_type = other DNA
gggccagggatcaaacccttgccataacggcaacctaagccgaagcagtggcaacaccaaatccttaacctgctgaaccaccaggaaactcctacaatgtgtttggtttt

SEQ ID NO: 38830 - DNA, 110 bp, synthetic construct
  source 1..110: mol_type = other DNA
atctttctatggccagtgccttaggcagcacctagcaatcagtggatgttccacaaatgctagctgaactgaaagcaagtctggtctgagacttgagtcagcctcaggcc

SEQ ID NO: 38831 - DNA, 110 bp, synthetic construct
  source 1..110: mol_type = other DNA
atcctcaggaatactcgtgatatattttgttaaggaaataggaagccaatttcagtctcttaagggaaaaccaatactctcaattttctgttgatctccaaccatgagcc

SEQ ID NO: 38832 - DNA, 110 bp, synthetic construct
  source 1..110: mol_type = other DNA
tctcttaagggaaaaccaatactctcaattttctgttgatctccaaccatgagccatgttacatatctaaagaaccagacacctgaaggaaaaccccaaacctcctctct

SEQ ID NO: 38833 - DNA, 110 bp, synthetic construct
  source 1..110: mol_type = other DNA
aattaaaaggtagaactaaaggcatcctaatttagacagcatgagggaatcaccaagagcatagtctactttgatcatacaatattatctagctgcattagcccaaacta

SEQ ID NO: 38834 - DNA, 110 bp, synthetic construct
  source 1..110: mol_type = other DNA
attttttttgtattttctcaggcaaaaaaaaccacaacacaataggttttgaatagtgtttattttctgaatgaaggaccgacaagcaggtccctcttagatgttaactg

SEQ ID NO: 38835 - DNA, 110 bp, synthetic construct
  source 1..110: mol_type = other DNA
gtgtttattttctgaatgaaggaccgacaagcaggtccctcttagatgttaactgtgttgagctgaggtgaatattatgagaaaaccagtgattgctggagcccagtaat

SEQ ID NO: 38836 - DNA, 110 bp, synthetic construct
  source 1..110: mol_type = other DNA
tttctagattttttattgtttaagccactttcagctgggttatatggttacctgcagctggaagcaacctgattgtctgtctatctgactgtctatctgtctgtcttcta

SEQ ID NO: 38837 - DNA, 110 bp, synthetic construct
  source 1..110: mol_type = other DNA
ggttacctgcagctggaagcaacctgattgtctgtctatctgactgtctatctgtctgtcttctatgtatcatctgtcatctatctatctagagagaatgggggtggggg

SEQ ID NO: 38838 - DNA, 110 bp, synthetic construct
  source 1..110: mol_type = other DNA
ggtaaagaaagctctctcccttctcatgtggagagtgagggtaaggaattgattctttttcttccttttttcaacttcaggattgcttctgagtaggtaatatattcgca

SEQ ID NO: 38839 - DNA, 110 bp, synthetic construct
  source 1..110: mol_type = other DNA
tttttcttccttttttcaacttcaggattgcttctgagtaggtaatatattcgcatagacagaagttcaaaagatacaaaagtgtgcacagagaaaattccttccatctt

SEQ ID NO: 38840 - DNA, 110 bp, synthetic construct
  source 1..110: mol_type = other DNA
tgattctgcctcagtcttgtctggctcaagtaatcacttttatgaaatatttgggtagcttatggtgtcattttgtgtatatgatgaaatatattctcctttggcctata

SEQ ID NO: 38841 - DNA, 110 bp, synthetic construct
  source 1..110: mol_type = other DNA
atgaggaagttcacgggccagagatcaaacccaagccacagccgtgacaatgtggatccttaaccactaggccaccgggaaaatccttgatcatctttatacattacaga

SEQ ID NO: 38842 - DNA, 110 bp, synthetic construct
  source 1..110: mol_type = other DNA
atccttaaccactaggccaccgggaaaatccttgatcatctttatacattacagaaagcaggaggctggcaaggcaggtaaaaacgtcacttgatttgataaccgagatc

SEQ ID NO: 38843 - DNA, 110 bp, synthetic construct
  source 1..110: mol_type = other DNA
atgggatagttatggctgctttcaaacttctcagacaaatgagaaaactaatgattctttctgggccacgtgcctgaaggtctctgtctaatggggatcctggccagcct

SEQ ID NO: 38844 - DNA, 110 bp, synthetic construct
  source 1..110: mol_type = other DNA
agcatacaaagttagagaaatgagggtgtttgggcaaggagggagggtatttggaggtaaagaagctaacttctaagggtgggcgagggaatgcaggacactaagtggcc

SEQ ID NO: 38845 - DNA, 110 bp, synthetic construct
  source 1..110: mol_type = other DNA
ggtaaagaagctaacttctaagggtgggcgagggaatgcaggacactaagtggccacatttcatccccggttggcccctgttggcttcatctgagttcaagggataaggg

SEQ ID NO: 38846 - DNA, 110 bp, synthetic construct
  source 1..110: mol_type = other DNA
ctgaagacacagcatcaggtggcttgtaaagtaaattaggatatgtctactcagtaagacaaggtgcagctataaaaggggtaattatgaagattatgcaaaaatatgga

SEQ ID NO: 38847 - DNA, 110 bp, synthetic construct
  source 1..110: mol_type = other DNA
tctactcagtaagacaaggtgcagctataaaaggggtaattatgaagattatgcaaaaatatggatgttttccctctgattttccaaccttttaattagtcaagttaaat

SEQ ID NO: 38848 - DNA, 110 bp, synthetic construct
  source 1..110: mol_type = other DNA
agcagataaatatccttataggagccaaactggagtccaccctgagtgaccaggcttaaaataaattgtcctgaaataagggaaatgaactcctcttttaggacctagta

SEQ ID NO: 38849 - DNA, 110 bp, synthetic construct
  source 1..110: mol_type = other DNA
ttaaaataaattgtcctgaaataagggaaatgaactcctcttttaggacctagtaactatcacatggaccttacttgagagcagagtttgagtcagtgacacatattcac

SEQ ID NO: 38850 - DNA, 110 bp, synthetic construct
  source 1..110: mol_type = other DNA
ggcgtctatgggccctgcgccgcacctctctttcgctcgcctggctcggcgctacggcgatgtcttccagatccgcctgggcagctgcccggtggtggtgctgaacggcg

SEQ ID NO: 38851 - DNA, 110 bp, synthetic construct; identical to SEQ ID NO: 38850
  source 1..110: mol_type = other DNA

SEQ ID NO: 38852 - DNA, 110 bp, synthetic construct
  source 1..110: mol_type = other DNA
accctgggcagagggtgacaatggagaccatgttagggccaagagagggaccgtgttgggtccttcctaatcccttggggaaccacccatggttcagccttagacactgg

SEQ ID NO: 38853 - DNA, 110 bp, synthetic construct
  source 1..110: mol_type = other DNA
ttgggtccttcctaatcccttggggaaccacccatggttcagccttagacactggatgattttctgaccagggaggggtctttcttcatctgtctccaaacccaatttcc

SEQ ID NO: 38854 - DNA, 110 bp, synthetic construct
  source 1..110: mol_type = other DNA
ttgagagaaattttaacatacaccttataatcttctgaaatcaaacattcaagttctggattggaactccccctttccagagtggtgcacgagtctcttgaaggtttagg

SEQ ID NO: 38855 - DNA, 110 bp, synthetic construct
  source 1..110: mol_type = other DNA
ctggattggaactccccctttccagagtggtgcacgagtctcttgaaggtttaggagtttgtgtggtttgtctgtggtgaaggggcttggccttagtgacccaccaggag

SEQ ID NO: 38856 - DNA, 110 bp, synthetic construct
  source 1..110: mol_type = other DNA
aatattaaccaaactgccctaggaatttaggttggttgcctcacatctgaatcattttatcaattcaagtatcctctgagtggaaatacagcttttgagcttatccatta

SEQ ID NO: 38857 - DNA, 110 bp, synthetic construct
  source 1..110: mol_type = other DNA
ttgcctcacatctgaatcattttatcaattcaagtatcctctgagtggaaatacagcttttgagcttatccattaaagtggaataattactatggttatacagtttataa

SEQ ID NO: 38858 - DNA, 110 bp, synthetic construct
  source 1..110: mol_type = other DNA
acctgccaagcttcctgaagaataatagctaccttataaacatggaaacaacacagaataagaaatgaaggcagctgaagctgatagtcacacagatgtacccaaaagaa

SEQ ID NO: 38859 - DNA, 110 bp, synthetic construct
  source 1..110: mol_type = other DNA
ttttcaaccagaagctttggcaactttgcacatatgtgaccagtctatgtgaatgctttaaaaaaatcgttttaattggctcactccaagtaaggtagcttaaagggaca

SEQ ID NO: 38860 - DNA, 110 bp, synthetic construct
  source 1..110: mol_type = other DNA
ctttaaaaaaatcgttttaattggctcactccaagtaaggtagcttaaagggacaaagtcccattggtcatggaacatggaattatagggaagctgaaaagggagaaatg

SEQ ID NO: 38861 - DNA, 110 bp, synthetic construct
  source 1..110: mol_type = other DNA
gctctggaatctctctgaagcatgcccggttacggtgtggaattccacagggcgcgtggccctcttggactccatccaaaggagtaagctatcagaaggaactcatccta

SEQ ID NO: 38862 - DNA, 110 bp, synthetic construct
  source 1..110: mol_type = other DNA
tgaaggcgctctggtgactgctggaagtcctgactattccaggaacaagtgggtacattctctggccaagctctaggaggaagggagcttgcttctcagccactctgctg

SEQ ID NO: 38863 - DNA, 110 bp, synthetic construct
  source 1..110: mol_type = other DNA
ttctcttggcaggcatccctgagctcccaccaaatcccaggtctgatcaaaagaaggtacagggccaagttcaagttaactgctggtgatgtagaggacaaggcacccgc

SEQ ID NO: 38864 - DNA, 110 bp, synthetic construct
  source 1..110: mol_type = other DNA
aattagggcaaccaatgagacttaatagctcaaagtaagatccccccaaagaccgagttgttcagtctggaacaacagtctggactttcagccaaacaacacacacacac

SEQ ID NO: 38865 - DNA, 110 bp, synthetic construct
  source 1..110: mol_type = other DNA
taaggtatgtgcatgagccactgccaaatcactggggaaacagctttgagtgcgggcgaggggaagacatgggatggctccatgaaggagcaggacccaaatggggcatt

SEQ ID NO: 38866 - DNA, 110 bp, synthetic construct
  source 1..110: mol_type = other DNA
agttcctgaaatgaaatagtccaagaagcaggtagagagaggagaatgtttaatttagaacttacaacctgttaatagaaaactggaacaaaacaccaaactgagaggtt

SEQ ID NO: 38867 - DNA, 110 bp, synthetic construct
  source 1..110: mol_type = other DNA
tatttgcccccaggtcatctcctccccattcttccccatgtcagctaacatcaatttcatccctcctgcagctcagatgcctgactcctttcttcctctaatatcctaca

SEQ ID NO: 38868 - DNA, 110 bp, synthetic construct
  source 1..110: mol_type = other DNA
aaataaaatataagcaaaaaatgcacatgtgcatacatgcatacatatacatacacacattaccttttcttaaaaatggaacatggtcatcctgaatcacacctccataa

SEQ ID NO: 38869 - DNA, 110 bp, synthetic construct
  source 1..110: mol_type = other DNA
cacattaccttttcttaaaaatggaacatggtcatcctgaatcacacctccataaccataattctggaaataccgtctctcccaagagtgatccttgagcaaaccaaata

SEQ ID NO: 38870 - DNA, 110 bp, synthetic construct
  source 1..110: mol_type = other DNA
taggtttcctgaagtagaaaggaaacgcatcacagaagagagcttgaactgaatgagttttggaattgtttaccaggaataaagggaggagacaggtattacttgaacag

SEQ ID NO: 38871 - DNA, 110 bp, synthetic construct
  source 1..110: mol_type = other DNA
agtagacacatttcacagatacagaatctgcaaataatgaggactgacctttgttacagatcacacaacatattatttttcttgcttttaacagtgcattgtttttaaaa

SEQ ID NO: 38872 - DNA, 110 bp, synthetic construct
  source 1..110: mol_type = other DNA
attaagattttgtagaattagttactttttagactggttctcaaggagagtatcttttgcactttgtgcccagttcacgcttccttgtaggttgggaatgaaaaaagagt

SEQ ID NO: 38873 - DNA, 110 bp, synthetic construct
  source 1..110: mol_type = other DNA
ttagtgttaagtaaaattgtagctacttctgtttacctttactttctttccagcataccaggcattattgtcatttttcccaagatgaaaatgacaagtctaaagtgatt

SEQ ID NO: 38874 - DNA, 110 bp, synthetic construct
  source 1..110: mol_type = other DNA
agctagtgctgcaatggtccgattaagactttatgatatcttagctttgttacctccaaaaacttatgaaggtaaataaaatttgtggatgtctaataaaaattcttcaa

SEQ ID NO: 38875 - DNA, 110 bp, synthetic construct
  source 1..110: mol_type = other DNA
ggtaagtcatttggattgggacactggcacacaactatctgaaatcacagtcactggagttttcgttgtggtgtagtggaattgaatcggagtagtatccatgatgcggg

SEQ ID NO: 38876 - DNA, 110 bp, synthetic construct
  source 1..110: mol_type = other DNA
gtatccacatgctttcaagacagtaatgggagcagctccggagttgaaagtacatttggaaactgctgttcgagcaagccaagctagcaaagctaaagcagctgccaggc

SEQ ID NO: 38877 - DNA, 110 bp, synthetic construct
  source 1..110: mol_type = other DNA
aaagaaatgttagaaagttgagagttctgtgagtaaattatttttcagtggatataacagttcaatagggagaccctgatttaagggaacagagattgtagtaaacacag

SEQ ID NO: 38878 - DNA, 110 bp, synthetic construct
  source 1..110: mol_type = other DNA
atggatactagtcaggtttgttactgctgagccaccacaggagctccagtaatatatttttattgtttaataataagtatttctttaaaccattgtttatcatttacctc

SEQ ID NO: 38879 - DNA, 110 bp, synthetic construct; identical to SEQ ID NO: 38878
  source 1..110: mol_type = other DNA

SEQ ID NO: 38880 - DNA, 110 bp, synthetic construct
  source 1..110: mol_type = other DNA
gagaggattcaagaaaacgggttctgattgggaaaacaaaaagcacacaggagaaatagctcaagaatggcttccggagaagtgctgcatccatttgcaagaagggttcc

SEQ ID NO: 38881 - DNA, 110 bp, synthetic construct
  source 1..110: mol_type = other DNA
atagctcaagaatggcttccggagaagtgctgcatccatttgcaagaagggttcccacacatgtgtcaggcccctcactagaggtcttagatcatctcactgacccccca

SEQ ID NO: 38882 - DNA, 110 bp, synthetic construct
  source 1..110: mol_type = other DNA
ccagagagataagtttccttgttcgagctttggtaccaagtcagtggcagagctgggaactgaattgtctctagactcaaagctttgcaagctctgcctggttgcttctt

SEQ ID NO: 38883 - DNA, 110 bp, synthetic construct
  source 1..110: mol_type = other DNA
catgcctaaagaatgtggaactgattctttaggcaatagggagacatggaagacttaaaaattatttttgcattcatcatttttaataagccccccagaggcttacatga

SEQ ID NO: 38884 - DNA, 110 bp, synthetic construct
  source 1..110: mol_type = other DNA
ttggctggtgtcgggctctgcaatcttgggtagaaggagcctagctttggactgcaccctgcattccaggatacaacctgctaagcacagtctttgttctgcctaagact

SEQ ID NO: 38885 - DNA, 110 bp, synthetic construct
  source 1..110: mol_type = other DNA
ccttctgttactcttgtttttaggaaagaccagtactcaaaagaaacagatcatatctgtcctgagctcaggtaggacactccacggggactcccagaaaactctgggat

SEQ ID NO: 38886 - DNA, 110 bp, synthetic construct
  source 1..110: mol_type = other DNA
agctcttaacagtggtgtgtgtatttatttactttttggtttcaggtgagtgatggcctgctctttgatacctcagatgatgaggagctgagagagcagctggatatgca

SEQ ID NO: 38887 - DNA, 110 bp, synthetic construct
  source 1..110: mol_type = other DNA
aggagaagcagtcaagagccaggggttctgggagagcatggcatctaggcatccagggaggtggtccaggaggagagcttaccggatgtctcagagggagccaaaaagtg

SEQ ID NO: 38888 - DNA, 110 bp, synthetic construct
  source 1..110: mol_type = other DNA
gggaggtggtccaggaggagagcttaccggatgtctcagagggagccaaaaagtgtctgcagacctcagcaccaaagaaacggtggtaggaagagctgtttctggaaacc

SEQ ID NO: 38889 - DNA, 110 bp, synthetic construct
  source 1..110: mol_type = other DNA
actccaaagacctgggagtagagctgggtaagtacataacaagattctgaaaatcaaggatttggcggtttggtttaattttctgtctttttttttttcttccttagggg

SEQ ID NO: 38890 - DNA, 110 bp, synthetic construct
  source 1..110: mol_type = other DNA
tgtgacctatgctgcagcttgtggcaaagtcggatccttaaccctgagcgaggctagggattcaacctgcatcctcacagagataacatcaagtccttaccccgctgagt

SEQ ID NO: 38891 - DNA, 110 bp, synthetic construct; identical to SEQ ID NO: 38890
  source 1..110: mol_type = other DNA

SEQ ID NO: 38892 - DNA, 110 bp, synthetic construct
  source 1..110: mol_type = other DNA
ctgtgcttagaccctttcacgtgcccatgtgaaagacatcggcaacacttcttagcagacaagtaggcacagagaaactaagaaacttggccaaggtcacagaggaagag

SEQ ID NO: 38893 - DNA, 110 bp, synthetic construct
  source 1..110: mol_type = other DNA
agacaaaaagaaaaaaagagaaactaaggggctacagcctagggagacactgagattgtccaattatgaagctgagaccaaagcagtgtcctgggtcataggatggaatt

SEQ ID NO: 38894 - DNA, 110 bp, synthetic construct
  source 1..110: mol_type = other DNA
ttgtccaattatgaagctgagaccaaagcagtgtcctgggtcataggatggaattgactgtaaggaaaaaatagattttaaagtcaacttttcgcaggacccagttcaga

SEQ ID NO: 38895 - DNA, 110 bp, synthetic construct
  source 1..110: mol_type = other DNA
ttaagtcactgagatttggggcttacttgttgcaacagttagcctatcctaacatactattttagcttaaacagaaataacattaaccatttattctgaccttagctatt

SEQ ID NO: 38896 - DNA, 110 bp, synthetic construct
  source 1..110: mol_type = other DNA
ggcattctggagaccactaggtgtcactctgcacagatccctgcacttgaaggtgcgaaggcaagaaagaataggactcctcggtgaagctgttctcttcttcaggagtc

SEQ ID NO: 38897 - DNA, 110 bp, synthetic construct
  source 1..110: mol_type = other DNA
cgaaggcaagaaagaataggactcctcggtgaagctgttctcttcttcaggagtcacagtaaaaattctgcacacaatgaattaatccccctttctcaccaggtttaatt

SEQ ID NO: 38898 - DNA, 110 bp, synthetic construct
  source 1..110: mol_type = other DNA
agtgacacatagtatgtgagtgctatttctaggcaagttaagtgttgtaatttgtgtttaatttttaaatcccactattgctcctgtagaggcatttctgaagtttgata

SEQ ID NO: 38899 - DNA, 110 bp, synthetic construct
  source 1..110: mol_type = other DNA
gtttaatttttaaatcccactattgctcctgtagaggcatttctgaagtttgataagctcccttgcttgcggtaggatgtgtcaatttaagaatatccttcctaaacaca

SEQ ID NO: 38900 - DNA, 110 bp, synthetic construct
  source 1..110: mol_type = other DNA
tcaaaagggctagagggatcttcacatcatcctaagcccttttaacagctgacggaaaccagatcatataagcaacaaagaaaagagggttttccatctgcagcctatgt

SEQ ID NO: 38901 - DNA, 110 bp, synthetic construct
  source 1..110: mol_type = other DNA
aaaccagatcatataagcaacaaagaaaagagggttttccatctgcagcctatgtagctcatacccaagacctttgagatttctgatgtaattatctcttagttattata

SEQ ID NO: 38902 - DNA, 110 bp, synthetic construct; identical to SEQ ID NO: 38900
  source 1..110: mol_type = other DNA

SEQ ID NO: 38903 - DNA, 110 bp, synthetic construct; identical to SEQ ID NO: 38901
  source 1..110: mol_type = other DNA

SEQ ID NO: 38904 - DNA, 110 bp, synthetic construct
  source 1..110: mol_type = other DNA
atttatttgctctttatccattaactgggtatgtggcaactctggtgttcttgcgctaaccgggagcttggttatgggagccactatcaagtagtggttataataggtat

SEQ ID NO: 38905 - DNA, 110 bp, synthetic construct
  source 1..110: mol_type = other DNA
cattggagaatccctggaaatcagagactttaagctcaacctacttcatcttgaaatgattatctaaccctaaccctaactggatgatggattgactcttgacatttttg

SEQ ID NO: 38906 - DNA, 110 bp, synthetic construct
  source 1..110: mol_type = other DNA
actttctgacaaagaaaagctcaagaaggaaacatagctgagaatggaaacaggtagctatgatggagagggcacaccattaaaggtgaaaaacagaatcaatactgctg

SEQ ID NO: 38907 - DNA, 110 bp, synthetic construct
  source 1..110: mol_type = other DNA
aggtacccaaagagaggagtaatccagaagtctgtgtgggagtttctcatatataaatggccaagcattgaggtgcacatattcttgatgaatagctgagtgatgaaaga

SEQ ID NO: 38908 - DNA, 110 bp, synthetic construct
  source 1..110: mol_type = other DNA
aatggccaagcattgaggtgcacatattcttgatgaatagctgagtgatgaaagagatcagctgatattagaggtccttaagttctggaagatattggagttccagcaca

SEQ ID NO: 38909 - DNA, 110 bp, synthetic construct
  source 1..110: mol_type = other DNA
gaggccacctaacttacagaacagctgagacagagggacctcaaagccttagagaaaagtgcagaagatggactgagaggggcaaatcagaaagagagctgcacagacca

SEQ ID NO: 38910 - DNA, 110 bp, synthetic construct
  source 1..110: mol_type = other DNA
aaagtgcagaagatggactgagaggggcaaatcagaaagagagctgcacagaccattggtaccacctccaggacaccacagcctgacatgctagggtggaggctgggtgc

SEQ ID NO: 38911 - DNA, 110 bp, synthetic construct
  source 1..110: mol_type = other DNA
gactcaggctccggaggccagtcccagggagaggactggggtgcgtggtatggagacagcctaaggggctaaagagcagtgtgccatgggcaggggaacagtatgccatg

SEQ ID NO: 38912 - DNA, 110 bp, synthetic construct; identical to SEQ ID NO: 38911
  source 1..110: mol_type = other DNA

SEQ ID NO: 38913 - DNA, 110 bp, synthetic construct
  source 1..110: mol_type = other DNA
tttccaaaatgtactctaagttcaggtgtgaatgaagcataccagattcgactattacatatgtttaaaatataaagtcataactagctccaacgctaattcatttgaaa

SEQ ID NO: 38914 - DNA, 110 bp, synthetic construct
  source 1..110: mol_type = other DNA
aaatagacattaatcttaagctgaaaagtgatgtcgatgtctaaatatcaagtattatggttggtatatccacattttgtctaaatggtgtaatgactccttgatcttcc

SEQ ID NO: 38915 - DNA, 110 bp, synthetic construct
  source 1..110: mol_type = other DNA
gtggaaaggagggctgtaaatgagaaagaggctaccgacacctgcctgtattacatcccccaccttattcacagcagctgttgtcatctctttgcctatgggaaccctgt

SEQ ID NO: 38916 - DNA, 110 bp, synthetic construct
  source 1..110: mol_type = other DNA
ttcagtcttctgtgtttgcaaataagctgaaacctagacatatccttcatgaggagttaattatcagatgatacataggtttaaaaaacaagatgaagatcaggtatcat

SEQ ID NO: 38917 - DNA, 110 bp, synthetic construct
  source 1..110: mol_type = other DNA
cttctgcagatgtaactgcctccagaaaccaaatgataagatgcaaaacattttttgagaaagattattaagaattatgttaccatttatgaagtatcattgttctagtc

SEQ ID NO: 38918 - DNA, 110 bp, synthetic construct; identical to SEQ ID NO: 38917
  source 1..110: mol_type = other DNA

SEQ ID NO: 38919 - DNA, 110 bp, synthetic construct
  source 1..110: mol_type = other DNA
tgtcataaagataggaacgtttgcttctcctccaaataagcaccagtcagcacacccacatgagctgaccaaatgcccccttttattcttcagtgcccttcccttagcac

SEQ ID NO: 38920 - DNA, 110 bp, synthetic construct
  source 1..110: mol_type = other DNA
tgattatggcagttgtatttctcctaagtcatacatcaatacacaaagcatgtcaattttgctttatgtagattgggccttcgtaaatctgacttcaaaaaactgccaaa

SEQ ID NO: 38921 - DNA, 110 bp, synthetic construct
  source 1..110: mol_type = other DNA
gataataactatctttaaaaaaatgtatctcagaagaattgtagaaattcatcattagacacacacatgtgcacacacacaaatatccatcagcaaggtggggactcaat

SEQ ID NO: 38922 - DNA, 110 bp, synthetic construct; identical to SEQ ID NO: 38921
  source 1..110: mol_type = other DNA

SEQ ID NO: 38923 - DNA, 110 bp, synthetic construct
  source 1..110: mol_type = other DNA
tttgttgtttgtttgtttgggggtttcttggtcattcctgtggcatgtggaaattcctgggccaggaatcaaacccccacacaatccaagccactgcagtgacaatacta

SEQ ID NO: 38924 - DNA, 110 bp, synthetic construct
  source 1..110: mol_type = other DNA
tataggaaaaaacagaactaggtaggataccctgggtaaagggaaaccagaagccacactggcatttatattgttcctaaacccagtccaatatttaccatgtgacattt

SEQ ID NO: 38925 - DNA, 110 bp, synthetic construct
  source 1..110: mol_type = other DNA
acactggcatttatattgttcctaaacccagtccaatatttaccatgtgacattttgaataataagcagtggaaatctgattctggttaattaaacagaaaatgatattg

SEQ ID NO: 38926 - DNA, 110 bp, synthetic construct
  source 1..110: mol_type = other DNA
ttgccatcttttaaagaaggttcttgcccatttatgactgtcatttatgatatatttgttgctaacctacaaacattctgacagatgccaatagaactgttatttataat

SEQ ID NO: 38927 - DNA, 110 bp, synthetic construct; identical to SEQ ID NO: 38926
  source 1..110: mol_type = other DNA

SEQ ID NO: 38928 - DNA, 110 bp, synthetic construct
  source 1..110: mol_type = other DNA
tgttgtcaaaaccatgcaaaacaaatcaataatcctcagggaagaccgatgacaaaaccagacaactctttttagcatttagccccaacaagtgtcataaaattacagat

SEQ ID NO: 38929 - DNA, 110 bp, synthetic construct
  source 1..110: mol_type = other DNA
acctattgcttccagcttggctagctaatctaattgcaaaataaaacttttaatcttacccttgatactatttagtttctcaacagtagagaaaaatttgcatgaaaaga

SEQ ID NO: 38930 - DNA, 110 bp, synthetic construct; identical to SEQ ID NO: 38929
  source 1..110: mol_type = other DNA

SEQ ID NO: 38931 - DNA, 110 bp, synthetic construct
  source 1..110: mol_type = other DNA
accttgagtcactgctcaaagaagactggcagctgcagcactgaaagaatttacatcttgccttagtatccagatcacatagacatcataggcatctgagcacaggcaac

SEQ ID NO: 38932 - DNA, 110 bp, synthetic construct
  source 1..110: mol_type = other DNA
ccaacattgacaggcttggaattaactgggagaaagctagcatgaatcctatttgagtgagcattaattacagtgtctttattgtgttaaagttctaggtgaacatactc

SEQ ID NO: 38933 - DNA, 110 bp, synthetic construct
  source 1..110: mol_type = other DNA
actcctagccttttcatctctacttaccctacctccctgttttaataaaaaggtaaggagctttttcagtgactctcaagaccttctaaccatattcaccattttcttct

SEQ ID NO: 38934 - DNA, 110 bp, synthetic construct
  source 1..110: mol_type = other DNA
ttgaggcagagtgctaacatataccctcttacaaaattcctagacttactctaagatgtgacaggttacagctgaatcagtattggaaaactatggctttatttatgaac

SEQ ID NO: 38935 - DNA, 110 bp, synthetic construct
  source 1..110: mol_type = other DNA
atgtgacaggttacagctgaatcagtattggaaaactatggctttatttatgaacatgagtgagggggtatgtggtggtaggaaagcaggagaggaaaaagggtgagaaa

SEQ ID NO: 38936 - DNA, 110 bp, synthetic construct
  source 1..110: mol_type = other DNA
tcctcaattccctgaattgctctgatattatagctggcaatctccacacagttctcatcctaaacatatagactacagcacaaaatctttcgtgtcacagagaaaaagaa

SEQ ID NO: 38937 - DNA, 110 bp, synthetic construct
  source 1..110: mol_type = other DNA
tcggcatttctatttggcactggtggacagagtctgagttttagcaatagcttcccagatttcaaaatcttgaaaatctcagaaattatatcagtactccattaccaatc

SEQ ID NO: 38938 - DNA, 110 bp, synthetic construct
  source 1..110: mol_type = other DNA
aagaatgcagcaacagggggccctacaggcccagccttgcattacacaaacgtagatatgaaatgcatgctccttctctatcactcttgctctcagagaggggctgctgt

SEQ ID NO: 38939 - DNA, 110 bp, synthetic construct
  source 1..110: mol_type = other DNA
cagatacattgcagagatacacatgtatacactacctgcctggattcacatcctagctctgcttcttacaagttgtgtgactttgtgaatgctacttaatctctggacac

SEQ ID NO: 38940 - DNA, 110 bp, synthetic construct
  source 1..110: mol_type = other DNA
gctctgcttcttacaagttgtgtgactttgtgaatgctacttaatctctggacaccttaatttcccagtgcaaaactgaaataatgatagcacctacctcaaaaggttta

SEQ ID NO: 38941 - DNA, 110 bp, synthetic construct
  source 1..110: mol_type = other DNA
ggcctctgaaatctgattttatgtggccacaaaccctgcagaggaatttgatacagaagtctaggtactccccagctagttttacaaccactattctaatgtttcacata

SEQ ID NO: 38942 - DNA, 110 bp, synthetic construct
  source 1..110: mol_type = other DNA
gaagtctaggtactccccagctagttttacaaccactattctaatgtttcacatactactggtagatgaatgtgcccatgatgcactatttttcctaccagatttcgcca

SEQ ID NO: 38943 - DNA, 110 bp, synthetic construct; identical to SEQ ID NO: 38941
  source 1..110: mol_type = other DNA

SEQ ID NO: 38944 - DNA, 110 bp, synthetic construct; identical to SEQ ID NO: 38942
  source 1..110: mol_type = other DNA

SEQ ID NO: 38945 - DNA, 110 bp, synthetic construct
  source 1..110: mol_type = other DNA
tggttaggctgtatgccctggtttctgtgagccctcccacctttactctgatcccagtagtttacagcctcttcaaccaatctgaccctttcagtgttctgcgtggggtg

SEQ ID NO: 38946 - DNA, 110 bp, synthetic construct
  source 1..110: mol_type = other DNA
gaattctacaccctatctttccatgaaaggtttcctgatttttctaacctcactgatgtacccttactcaaaattccttttccacgaagaagtagtgccctacagtttag

SEQ ID NO: 38947 - DNA, 110 bp, synthetic construct
  source 1..110: mol_type = other DNA
atgtacccttactcaaaattccttttccacgaagaagtagtgccctacagtttagtgtctaataattcttaaattgttattactgccttttaaaagataatgtcaatctg

SEQ ID NO: 38948 - DNA, 110 bp, synthetic construct
  source 1..110: mol_type = other DNA
agtgtaaacactggcaggatatttaactacataagaaactaagttaagctttcagtgttctgagataaaataatcgatatttagtgagtccccttctttactacataaga

SEQ ID NO: 38949 - DNA, 110 bp, synthetic construct
  source 1..110: mol_type = other DNA
tatctaaaaaatagaaacatttcatggccaaggagagcagacttgtggttcccagggggaagaggggaaggagtgggatatacaggcagttttgggtttctggatgcaaa

SEQ ID NO: 38950 - DNA, 110 bp, synthetic construct; identical to SEQ ID NO: 38949
  source 1..110: mol_type = other DNA

SEQ ID NO: 38951 - DNA, 110 bp, synthetic construct
  source 1..110: mol_type = other DNA
tgtagtagattttgtatctatatcttcattctactcttaatttaccttcacttcttctagattcattttccattgatggccaaattgctaaattgcaaacacttgtactc

SEQ ID NO: 38952 - DNA, 110 bp, synthetic construct; identical to SEQ ID NO: 38951
  source 1..110: mol_type = other DNA

SEQ ID NO: 38953 - DNA, 110 bp, synthetic construct
  source 1..110: mol_type = other DNA
gttacattcatttattaaaagaaaatgtgttccagagttcctgtttagctcaaacgtgttaagaactcaacatagcgtctgtgaggatacgggtttgatccctggctttg

SEQ ID NO: 38954 - DNA, 110 bp, synthetic construct
  source 1..110: mol_type = other DNA
cccccatgtcatggggagcttgcattgggaggaggagctcttggagaatttggtattgagggacagcaaagcttgtgtgcaggagctccacaggactgtggaaaacagag

SEQ ID NO: 38955 - DNA, 110 bp, synthetic construct
  source 1..110: mol_type = other DNA
ttgcaggcatgcagaggcagggccatggtctgagctgcttctgtagctcctatggtaggtcagtagatcttagacaacagatgtgcactggtggctttgtgaacacagca

SEQ ID NO: 38956 - DNA, 110 bp, synthetic construct
  source 1..110: mol_type = other DNA
agatatctctcctacctccctaactgctcttcttccacattcataactcattaaaacagcaccgtcctcagttacctaagctataaaatgggaggagtccatggtgccta

SEQ ID NO: 38957 - DNA, 110 bp, synthetic construct
  source 1..110: mol_type = other DNA
acagcaccgtcctcagttacctaagctataaaatgggaggagtccatggtgcctattaccccttccccaccaactccatatcagccagtgaaataatccaggaaaagctc

SEQ ID NO: 38958 - DNA, 110 bp, synthetic construct
  source 1..110: mol_type = other DNA
tgggaatctcatttgactaaattttcttcctcaataaagaatcaagatgtttctcttaggatgcttaagcttcttaccatcaataataatttggtacttctttctgtagg

SEQ ID NO: 38959 - DNA, 110 bp, synthetic construct
  source 1..110: mol_type = other DNA
ttaggatgcttaagcttcttaccatcaataataatttggtacttctttctgtaggagtcctgtcttcactgataaatagcaaacagacccctctgacttttggagaggct

SEQ ID NO: 38960 - DNA, 110 bp, synthetic construct
  source 1..110: mol_type = other DNA
ccagggactgagcccacaccacaagagtaacctgaccatggcagtgacaatgccaggtccttaatctgaggagctaccagggaactccagcacattttttatttgatacc

SEQ ID NO: 38961 - DNA, 110 bp, synthetic construct
  source 1..110: mol_type = other DNA
atgcttccaagtatttccggttaaaagcaatctttttgcatgacagacgtatgatttgttcattagacatttatgggtagttaaattggcttttatattgtgaaccccaa

SEQ ID NO: 38962 - DNA, 110 bp, synthetic construct; identical to SEQ ID NO: 38961
  source 1..110: mol_type = other DNA

SEQ ID NO: 38963 - DNA, 110 bp, synthetic construct
  source 1..110: mol_type = other DNA
agctatactaaggaatatcaattttatctgaaaggcattgagaaaccattgttttaaaggtgaataggacagtggcataaccatatctggagtttccaagatccttccag

SEQ ID NO: 38964 - DNA, 110 bp, synthetic construct; identical to SEQ ID NO: 38963
  source 1..110: mol_type = other DNA

SEQ ID NO: 38965 - DNA, 110 bp, synthetic construct
  source 1..110: mol_type = other DNA
caaaactgaaactctatacccttaaaacaactactccccctttccaccctcctccaagcccctggtaaccaccatgttgctttctgtttctaagatgaagagaccatttt

SEQ ID NO: 38966 - DNA, 110 bp, synthetic construct
  source 1..110: mol_type = other DNA
gacagggcctccctcctaggggcccggctgtgtctcaggatcccattgggagtaggacaagaaagtctcaggtatgcttgacgttatgcaggtcagtgtggtcacactta

SEQ ID NO: 38967 - DNA, 110 bp, synthetic construct
  source 1..110: mol_type = other DNA
tgggtgagttccattattctatcttccaagtcacttactgtttgttccttcaggggaattatcctgttcttttaactggggatggttcctgtgcctcttcattttgctta

SEQ ID NO: 38968 - DNA, 110 bp, synthetic construct; identical to SEQ ID NO: 38967
  source 1..110: mol_type = other DNA

SEQ ID NO: 38969 - DNA, 110 bp, synthetic construct
  source 1..110: mol_type = other DNA
ggaggtagtttgtgacacagttgggtatggggtccaaggtgtcccaaagcttgtgttggcttgctgatggaaagttttggcacccacttggtcccaggcaatgtctggct

SEQ ID NO: 38970 - DNA, 110 bp, synthetic construct
  source 1..110: mol_type = other DNA
agagtttgtttaatcctctgtgataaaagaaaaggtgatttgatagaacacaaatgacaggcacaccacctacttccagataatactaaaaacaatgtagtcccaacaga

SEQ ID NO: 38971 - DNA, 110 bp, synthetic construct
  source 1..110: mol_type = other DNA
ccaccagaactctcaagtcatatttttcacttagataaccttcctctgccctttaagctcttcgaaactctgtgggagcttcttggaatttttttttttttgactcaacc

SEQ ID NO: 38972 - DNA, 110 bp, synthetic construct
  source 1..110: mol_type = other DNA
gatattgaaacagcttcagagacgtcacagagctcacatctgcctaatttcaggacagtatgatctttccatcagagttaccgaaggttcctttaaacagcgaaacatta

SEQ ID NO: 38973 - DNA, 110 bp, synthetic construct
  source 1..110: mol_type = other DNA
cagtatgatctttccatcagagttaccgaaggttcctttaaacagcgaaacattagagaatttcctttggtggacagatctagtcaggtctgaatcaggctggtttagtt

SEQ ID NO: 38974 - DNA, 110 bp, synthetic construct; identical to SEQ ID NO: 38972
  source 1..110: mol_type = other DNA

SEQ ID NO: 38975 - DNA, 110 bp, synthetic construct; identical to SEQ ID NO: 38973
  source 1..110: mol_type = other DNA

SEQ ID NO: 38976 - DNA, 110 bp, synthetic construct
  source 1..110: mol_type = other DNA
ttctgcagatcaccaaatttttccggacagttgtggaattctatctcttgaaggagtgatatcaccacttgcacacagcaccgtttactgtgtccaaggatgaagcgcca

SEQ ID NO: 38977 - DNA, 110 bp, synthetic construct; identical to SEQ ID NO: 38976
  source 1..110: mol_type = other DNA

SEQ ID NO: 38978 - DNA, 110 bp, synthetic construct
  source 1..110: mol_type = other DNA
atttttcccgtccaacaaagaactgttggaacaacttctggaacctctacaaggatcccaaagtgtactcatgtcactttaactcaatttttaccccagagcttatttac

SEQ ID NO: 38979 - DNA, 110 bp, synthetic construct
  source 1..110: mol_type = other DNA
tcccaaagtgtactcatgtcactttaactcaatttttaccccagagcttatttacatgaccagtgattaaaagaaagaaaggcttttccaatgatatcaggatttcactt

SEQ ID NO: 38980 - DNA, 110 bp, synthetic construct
  source 1..110: mol_type = other DNA
gtgaattccctttacctgacaggcttccttcccagcctgcagacccaaactactgatcagcacctccttgtggtaagtatgcgtggttgcaaactcaaagcttatccctc

SEQ ID NO: 38981 - DNA, 110 bp, synthetic construct
  source 1..110: mol_type = other DNA
atcagcacctccttgtggtaagtatgcgtggttgcaaactcaaagcttatccctcaaatcacccttgctcatctccttccacgccaggtgacaaagcctcctgcacccac

SEQ ID NO: 38982 - DNA, 110 bp, synthetic construct
  source 1..110: mol_type = other DNA
gtaaacagaagagctgggatttgaattcaagtgaactggctccaaaggcatcattcttaagcatgctactacagctgccccttagaaatgcatcagaaacacagagggga

SEQ ID NO: 38983 - DNA, 110 bp, synthetic construct
  source 1..110: mol_type = other DNA
cttaagcatgctactacagctgccccttagaaatgcatcagaaacacagaggggaaacttaagaaagtaccccgccctttctaagttgagttctgtggcttaagtttaaa

SEQ ID NO: 38984 - DNA, 110 bp, synthetic construct
  source 1..110: mol_type = other DNA
tcccctttggtaaccataagtttgtttcctatgtctgtgagtctctttctgtttcataaataagttcattcccacaacttgccttttttatacagcccccagggggttgt

SEQ ID NO: 38985 - DNA, 110 bp, synthetic construct; identical to SEQ ID NO: 38984
  source 1..110: mol_type = other DNA

SEQ ID NO: 38986 - DNA, 110 bp, synthetic construct
  source 1..110: mol_type = other DNA
ccactactgacctgtgctggtctctaccaccccgggggtggggtgggggaagcggagaggaggctcacagctgtcaaggagctaaagatggttttgctgggaaggttggg

SEQ ID NO: 38987 - DNA, 110 bp, synthetic construct
  source 1..110: mol_type = other DNA
atgttgccaatcttctattggttagaaaaaaacgactcggagaagaggattacagaggaccacaaacaccaggatgcagagatgactggggccatcttagaagctgccag

SEQ ID NO: 38988 - DNA, 110 bp, synthetic construct
  source 1..110: mol_type = other DNA
aggaccacaaacaccaggatgcagagatgactggggccatcttagaagctgccagcctagtctatagcttaccaacttcctagcacagtgtaaacttaggagaaattaat

SEQ ID NO: 38989 - DNA, 110 bp, synthetic construct
  source 1..110: mol_type = other DNA
ccacgtccttaaatgacgtaatgtctttctcccaacaactggactgtgtgtcacacttatatgccttcgagagatactggaatgcctgaggaaagaaaaggaacaacatt

SEQ ID NO: 38990 - DNA, 110 bp, synthetic construct
  source 1..110: mol_type = other DNA
cttatatgccttcgagagatactggaatgcctgaggaaagaaaaggaacaacattcagaataacaagtagaattcacatttcaaactctgcttcctggaagtcatatgga

SEQ ID NO: 38991 - DNA, 110 bp, synthetic construct
  source 1..110: mol_type = other DNA
catccttatgtcatttatttaaaatcaaggcaacagccatccttcgctttctgtagccagtccataagcccagtgggttgtcccctttataaactggcagctgccccttc

SEQ ID NO: 38992 - DNA, 110 bp, synthetic construct
  source 1..110: mol_type = other DNA
gccagtccataagcccagtgggttgtcccctttataaactggcagctgccccttctttttccagtccatttatctcctgcctggactgttataccagctgtctcctaact

SEQ ID NO: 38993 - DNA, 110 bp, synthetic construct
  source 1..110: mol_type = other DNA
ctttgtgtcattttaacatgcgccattcctattctcttctccagctctgcaatggccttgaaaaccaatagcatgttatcatagtgaaaattagcagccaggcatccatc

SEQ ID NO: 38994 - DNA, 110 bp, synthetic construct
  source 1..110: mol_type = other DNA
tgaggaattcctctgctaggctgaaatacctgtactttgaactgaatgcctgaactcccaggagctatgtcaagaagcagactaaggagagtaagctggccatctcggag

SEQ ID NO: 38995 - DNA, 110 bp, synthetic construct
  source 1..110: mol_type = other DNA
tcccaggagctatgtcaagaagcagactaaggagagtaagctggccatctcggagaaaaggtaccagggccaaatgcaaagccaaaggcctagcagcatccaggggtgtc

SEQ ID NO: 38996 - DNA, 110 bp, synthetic construct
  source 1..110: mol_type = other DNA
tacaccctactttctcaagcaatctcaggcagatgcaaagcacctgttcctcagcaagctcaatgacacctggcctgagtctgtggccctggtaacactcacctctaagt

SEQ ID NO: 38997 - DNA, 110 bp, synthetic construct
  source 1..110: mol_type = other DNA
attttgtccatagtttgtaacttttctctatagaaggatggttccaaagagctcactttgccatcacagaagcagaaataccaagtaaatttcagaattaccttgtcaat

SEQ ID NO: 38998 - DNA, 110 bp, synthetic construct
  source 1..110: mol_type = other DNA
tgtatcctccccggagcactgtacgctgtgcgactacaaggtaagaaataccctggattcagatactgcccaaactggagagatcccttccccaccctcttccacgaggc

SEQ ID NO: 38999 - DNA, 110 bp, synthetic construct
  source 1..110: mol_type = other DNA
attcttggtcactatatttcttttttcaaaacaccgatagttctttatttctaagtgaaactgtaagagaaatttgtttacttgcaaaaagcttgaggtctgaggattcc

SEQ ID NO: 39000 - DNA, 110 bp, synthetic construct
  source 1..110: mol_type = other DNA
ttaaaaaaaaattctgagagccaaggtcaagggaaatgaacaaagtatggtaccttaaacggttggtgtaggtatcaacacaggtcttcattttggccaacaaggtacca

SEQ ID NO: 39001 - DNA, 110 bp, synthetic construct; identical to SEQ ID NO: 39000
  source 1..110: mol_type = other DNA

SEQ ID NO: 39002 - DNA, 110 bp, synthetic construct
  source 1..110: mol_type = other DNA
aaataccacaattcaagaaagacacacaataaataattcatggtattcactatgtcattttgtagcaaacagttcccatctctttcctgagtcctcactgttctcacctc

SEQ ID NO: 39003 - DNA, 110 bp, synthetic construct; identical to SEQ ID NO: 39002
  source 1..110: mol_type = other DNA

SEQ ID NO: 39004 - DNA, 110 bp, synthetic construct
  source 1..110: mol_type = other DNA
attttcaaaattaaccacttacttctccaccaagaactctggccagtaagaaaattgttaacgaaccaaatatccaaatggtgataatccaagagaccaccttaagagaa

SEQ ID NO: 39005 - DNA, 110 bp, synthetic construct
  source 1..110: mol_type = other DNA
tgttaacgaaccaaatatccaaatggtgataatccaagagaccaccttaagagaaaaagaaatttaagcagttagtatctgtatagcaaataagctgataatttcccata

SEQ ID NO: 39006 - DNA, 110 bp, synthetic construct
  source 1..110: mol_type = other DNA
tctaggcctttctgagtgcgtcagatcagacttagaggttgtctccacatctcttgtagtagccatgacaagagatgtgacctcagagaaagagagtaaaagagagagaa

SEQ ID NO: 39007 - DNA, 110 bp, synthetic construct
  source 1..110: mol_type = other DNA
gtagtagccatgacaagagatgtgacctcagagaaagagagtaaaagagagagaagagactagctcataggccatgcagatagcgatgtggtaacattccagctgaggtt

SEQ ID NO: 39008 - DNA, 110 bp, synthetic construct
  source 1..110: mol_type = other DNA
aaaaccacaccatttggtatatatacacactccaagttaatagtgacaagcttcaacaaaaacatttacaaccgaagggcaaaaaaaatcatacatcaaaacttgtcaca

SEQ ID NO: 39009 - DNA, 110 bp, synthetic construct
  source 1..110: mol_type = other DNA
agctgagaatggattgcaggtacactgattccctcaactctcagaaaggccagctggacatgtgtctacgtgcagactggtgccagttactgtccctggacaagtatcct

SEQ ID NO: 39010 - DNA, 110 bp, synthetic construct
  source 1..110: mol_type = other DNA
ggacatgtgtctacgtgcagactggtgccagttactgtccctggacaagtatcctccaggctcaagcatcctcttacatttatcccagggtgctacagaaataatcactt

SEQ ID NO: 39011 - DNA, 110 bp, synthetic construct
  source 1..110: mol_type = other DNA
gtgttcaggaaggtgcatgctgcaggttctattttaccaccatagccagtaatctgaatgtatacctgaaagcatgacccttctactgcccatgctgcctgtggataagt

SEQ ID NO: 39012 - DNA, 110 bp, synthetic construct
  source 1..110: mol_type = other DNA
gaatgtatacctgaaagcatgacccttctactgcccatgctgcctgtggataagtagctgagaacatctactctagagtgctatattaatttaatataagctaaaaatga

SEQ ID NO: 39013 - DNA, 110 bp, synthetic construct
  source 1..110: mol_type = other DNA
ccacggagccacaacgggaactccatgatatccatctttaaatagagctaaggggtgttcctattgtggtgcagcggaagcaaatctgactaggaaccgtgaggtttcag

SEQ ID NO: 39014 - DNA, 110 bp, synthetic construct
  source 1..110: mol_type = other DNA
catccatctctagaatgtttttatttttcctgactggaaagtctgtacccattaaacacttaactcaccacggactccctccccccgactcccaccccagtcttggcaac

SEQ ID NO: 39015 - DNA, 110 bp, synthetic construct
  source 1..110: mol_type = other DNA
ctctggatcactgaaaacttcatgaaggagcagtaccagtccatagactggccgatggaaagtgctgtgatacagttgttcaaagacctaatgtagttataaaattattg

SEQ ID NO: 39016 - DNA, 110 bp, synthetic construct
  source 1..110: mol_type = other DNA
ggacaggtttttagaaatggaattaaccgtttcagggtttttcccctacagctttattgaggtataattgacgtataacactgtgtaagtttaaggtgtacagtgtgtgg

SEQ ID NO: 39017 - DNA, 110 bp, synthetic construct
  source 1..110: mol_type = other DNA
cgtgaatggcacttccactctgttattcaagctagaaaccttagacacatctttagctcatcttcctcaacattgctgcaaaataaggaagagaagggggagaaatagag

SEQ ID NO: 39018 - DNA, 110 bp, synthetic construct
  source 1..110: mol_type = other DNA
gctcatcttcctcaacattgctgcaaaataaggaagagaagggggagaaatagagatagggagtctcaggatcaaatccttcaaggagacaaagactacagttagaagca

SEQ ID NO: 39019 - DNA, 110 bp, synthetic construct
  source 1..110: mol_type = other DNA
ttggagtgtgcgagattttgtgtgcaccctgtaagaggagtctctgtttcctacagcccttttgctctcctgaaagcaagccctgctggtcttcaaagccaagtgttcta

SEQ ID NO: 39020 - DNA, 110 bp, synthetic construct
  source 1..110: mol_type = other DNA
ctgtggcttggatctgatcactggcctgggaactccacatgccatggggcagcgaaaggaggaaaaaaaaaaaaggaatgaagtactgatacatgctacaacatggatga

SEQ ID NO: 39021 - DNA, 110 bp, synthetic construct; identical to SEQ ID NO: 39020
  source 1..110: mol_type = other DNA

SEQ ID NO: 39022 - DNA, 110 bp, synthetic construct
  source 1..110: mol_type = other DNA
tttctctagatttttggtggcttgaaacactaaaattttgctaaattaagtttagtgatggtaattcatttaatgtctagaattttttttttggccacacccatggcatg

SEQ ID NO: 39023 - DNA, 110 bp, synthetic construct
  source 1..110: mol_type = other DNA
tccccacttgggaatgaaagggacaggaaaagggtagctgcagtggcactttgtgaacagctatgtggacaatgtgactgatgattgtacccactcatcaaagagcaggt

SEQ ID NO: 39024 - DNA, 110 bp, synthetic construct
  source 1..110: mol_type = other DNA
aacagctatgtggacaatgtgactgatgattgtacccactcatcaaagagcaggtttattggttttgcaatattggcacttatgagttgagaaactgggtggctttggaa

SEQ ID NO: 39025 - DNA, 110 bp, synthetic construct
  source 1..110: mol_type = other DNA
ctaatgggaaaggtcagaaagtgtcttgaattccatgcttggtcatacacagacttcacaatggcgatattaactaaatgccaatttcaagcacatgcttgacctgctat

SEQ ID NO: 39026 - DNA, 110 bp, synthetic construct
  source 1..110: mol_type = other DNA
tcacaatggcgatattaactaaatgccaatttcaagcacatgcttgacctgctatgaccttatatttttgtgaggcatagattagagggtagacacacagaaagccaggt

SEQ ID NO: 39027 - DNA, 110 bp, synthetic construct
  source 1..110: mol_type = other DNA
cacccttagtgctgtttcctggggaggggtttggggaaactcccctcgtgaaaatccaagagaggagacggagctgctattttaacattttcttattttgtagtcctaag

SEQ ID NO: 39028 - DNA, 110 bp, synthetic construct
  source 1..110: mol_type = other DNA
ccaagagaggagacggagctgctattttaacattttcttattttgtagtcctaagtgttctaagtgcacacatttataacctctggatttttagaaagggagtatttgaa

SEQ ID NO: 39029 - DNA, 110 bp, synthetic construct
  source 1..110: mol_type = other DNA
agtcccaaagagccgaaaaggtttgggtgctgggtgcccctcaccaccaccgcggtgccatccattgcaaaataaatactaacccataaaatgggtatacgggagcccaa

SEQ ID NO: 39030 - DNA, 110 bp, synthetic construct
  source 1..110: mol_type = other DNA
attcaggggtttggagttacagtctaagtcccctcctttttccttaacccacacgaatcagcgtgagtcatatcttggaaaatctgacttaacagatttttttccccctc

SEQ ID NO: 39031 - DNA, 110 bp, synthetic construct
  source 1..110: mol_type = other DNA
aactgtcctactccatccctatcagagatggagggttcacaggggcagagctgattctcaggttgaactgggggccgactgtgagtttgcatcctcaatatctcctgcgc

SEQ ID NO: 39032 - DNA, 110 bp, synthetic construct
  source 1..110: mol_type = other DNA
ccactttgagcatttaccaactgcaagtttgaatgtgaggcttgagaacaagcagaaggcacagatcctaaccctgagaggggggcccaagacagaggacacggaggtgg

SEQ ID NO: 39033 - DNA, 110 bp, synthetic construct
  source 1..110: mol_type = other DNA
gtatagggagacacccctccccccaccatggatctagtgcagcaaactgttcagtttctcttgccaggctggctgctgctctagctctgggctttctggaagccagctga

SEQ ID NO: 39034 - DNA, 110 bp, synthetic construct
  source 1..110: mol_type = other DNA
ttctcttgccaggctggctgctgctctagctctgggctttctggaagccagctgagttctcatggcaccatgtccaaggatgccagggaggcttagctgcccttagggtg

SEQ ID NO: 39035 - DNA, 110 bp, synthetic construct
  source 1..110: mol_type = other DNA
ctcctttgagctcatccctctgtccctctgggcatctctgcccggatgcctcctaggctcctccagctcaacaagtcataactgaactcatcttctttgctctaagcttg

SEQ ID NO: 39036 - DNA, 110 bp, synthetic construct
  source 1..110: mol_type = other DNA
aggacaaaaatgccccatggaagtacaggcattctctcctcccaccctggctattgctctccctcatgcctcaccagcaaacctggctgggttgcccaagctgcctccct

SEQ ID NO: 39037 - DNA, 110 bp, synthetic construct
  source 1..110: mol_type = other DNA
gctctccctcatgcctcaccagcaaacctggctgggttgcccaagctgcctccctctcaccccccaacccccatcccaattaaaaaatctattctgtatttcctctgtgc

SEQ ID NO: 39038 - DNA, 110 bp, synthetic construct
  source 1..110: mol_type = other DNA
accctcatttccacttcagcaaaccttcatacataaatgtgactgaccgtccagtaagttccctggacggtgacatgctgggtatgaagaaagtggaaagacaaggctct

SEQ ID NO: 39039 - DNA, 110 bp, synthetic construct
  source 1..110: mol_type = other DNA
aagttccctggacggtgacatgctgggtatgaagaaagtggaaagacaaggctctcatagcttctggatcgctgttgcttgtcttcctgtcatcagaggggaatctggaa

SEQ ID NO: 39040 - DNA, 110 bp, synthetic construct
  source 1..110: mol_type = other DNA
cccatgagcccactgggttgacacataaaatgaaccatcacagcttccttcaggaccagtgatgctgcagagacccccaaaggccagtccatctcacagaatcagaaaac

SEQ ID NO: 39041 - DNA, 110 bp, synthetic construct
  source 1..110: mol_type = other DNA
ggctttggtgaggactcattggtagcagggttctatgaatggccatttctctgcctctcttctatccccactggtgcctgggagattgacatcttttcgtagctccacgg

SEQ ID NO: 39042 - DNA, 110 bp, synthetic construct
  source 1..110: mol_type = other DNA
tctcttctatccccactggtgcctgggagattgacatcttttcgtagctccacggttgtcaccagtgtatgagctcatgcatacgtgaggcctctggaattccatttatt

SEQ ID NO: 39043 - DNA, 110 bp, synthetic construct
  source 1..110: mol_type = other DNA
tgagttctttatcatctttatcagatacttgattttcagatatttttctcccactcagtaggttgcctttttactttgttaataatttcctttacctgtgcagaagcttt

SEQ ID NO: 39044 - DNA, 110 bp, synthetic construct
  source 1..110: mol_type = other DNA
cagtaggttgcctttttactttgttaataatttcctttacctgtgcagaagctttttagtttgatatagtctcacttgtttatttttgcttttgttgcttttgctttcga

SEQ ID NO: 39045 - DNA, 110 bp, synthetic construct
  source 1..110: mol_type = other DNA
cttacacagtttttctttgatagttgagaattatcatcttgggtgaggtgaggtatgtctccctctctacccataccctccccaacacactcatgatgagttctgtcttc

SEQ ID NO: 39046 - DNA, 110 bp, synthetic construct
  source 1..110: mol_type = other DNA
attatctgggttgctccttgctatcggttggccattatttctagcattttcactggataggcctaccagtagctctcttcttttgttttgctttttttttttttttttta

SEQ ID NO: 39047 - DNA, 110 bp, synthetic construct
  source 1..110: mol_type = other DNA
taaatgtaaagatatccagtctcccttctgtcttctgctccactgatttatatgtactcgtgctttctttagtgacttaatagctgatatagcaaggctgattattttgt

SEQ ID NO: 39048 - DNA, 110 bp, synthetic construct
  source 1..110: mol_type = other DNA
actcgtgctttctttagtgacttaatagctgatatagcaaggctgattattttgtttttcacaatatatttggctcctgctggcaactattttgcagtataaattaagag

SEQ ID NO: 39049 - DNA, 110 bp, synthetic construct
  source 1..110: mol_type = other DNA
gtctagaacaagacaaatttttggcgttcatcaaaaggaacagatgaacaatggttttctacattaaatctttgttggccaccctgcagaacatttctagcttgacgagt

SEQ ID NO: 39050 - DNA, 110 bp, synthetic construct
  source 1..110: mol_type = other DNA
ctcccttccatacccagctgccagatcaactgatgacactcattttatctatcttaagtactcagctctgacccactctccccatggatggagggagggcatggtgaagc

SEQ ID NO: 39051 - DNA, 110 bp, synthetic construct
  source 1..110: mol_type = other DNA
aggttagaataggatccagctctcctggcagctagtccttcctcccaggctagacgtggtgtggacaaggacccagcaggtagaccaaccaggcttaaaagccagctcca

SEQ ID NO: 39052 - DNA, 110 bp, synthetic construct
  source 1..110: mol_type = other DNA
gtggtgtggacaaggacccagcaggtagaccaaccaggcttaaaagccagctccaccccttgttaaccttacacctgccaaggcaggttggagagctctgagcttcactg

SEQ ID NO: 39053 - DNA, 110 bp, synthetic construct; identical to SEQ ID NO: 39051
  source 1..110: mol_type = other DNA

SEQ ID NO: 39054 - DNA, 110 bp, synthetic construct; identical to SEQ ID NO: 39052
  source 1..110: mol_type = other DNA

SEQ ID NO: 39055 - DNA, 110 bp, synthetic construct
  source 1..110: mol_type = other DNA
gctctacgagggcagagaccatggctgctttgtacacactgtgcccctggtacctccaaatgccttcttttactaatgagctgctggaatagacttgccctttcaaggtt

SEQ ID NO: 39056 - DNA, 110 bp, synthetic construct
  source 1..110: mol_type = other DNA
ccaaatgccttcttttactaatgagctgctggaatagacttgccctttcaaggttcccatcctcttttcctctgtttctggctgtgcactagtccagtgattctgctact

SEQ ID NO: 39057 - DNA, 110 bp, synthetic construct
  source 1..110: mol_type = other DNA
tcagtgctaaaaagaaatgagccaatcaagccatgaatagacatggaggaaacttaaatgtatattactaagggaaagaagccagtctgaaaaggctacctactgtatga

SEQ ID NO: 39058 - DNA, 110 bp, synthetic construct; identical to SEQ ID NO: 39057
  source 1..110: mol_type = other DNA

SEQ ID NO: 39059 - DNA, 110 bp, synthetic construct
  source 1..110: mol_type = other DNA
attctgttagggatgatgaaagccttctggaggtgaatggtggtgatggttgcacgacatggtgcatgtgcttaatgccactaaattggagagttaaaacggcacgtttt

SEQ ID NO: 39060 - DNA, 110 bp, synthetic construct
  source 1..110: mol_type = other DNA
gacatggtgcatgtgcttaatgccactaaattggagagttaaaacggcacgttttacaattttcaaaagcagagatgcataagcactttacacggaataaacatgtcatg

SEQ ID NO: 39061 - DNA, 110 bp, synthetic construct
  source 1..110: mol_type = other DNA
acaattggaaagtaatcacttaaataggccagtatacatatcaatttgtgaaagtgatgataactacaaggaaccccaaaaggataaacataaagatgtaaaaaggatat

SEQ ID NO: 39062 - DNA, 110 bp, synthetic construct
  source 1..110: mol_type = other DNA
cacacagataaatccccgagcctggatttgatcccaagactctccaaagcccaccttcttgcatgacagtgtgtcctcactcgtctaagcattaacatcagggtaatcag

SEQ ID NO: 39063 - DNA, 110 bp, synthetic construct
  source 1..110: mol_type = other DNA
ttcttgcatgacagtgtgtcctcactcgtctaagcattaacatcagggtaatcagctctataggacaattggcccagtttctgcagcaagtcaataatatggaggaaaaa

SEQ ID NO: 39064 - DNA, 110 bp, synthetic construct
  source 1..110: mol_type = other DNA
tagagaaaaagaaaactaagacaactaagtctagggaaaagtcctcaatgatccaaccagttattttagaagtagccacatgtaggcgttcctgttgtggctcagtggtt

SEQ ID NO: 39065 - DNA, 110 bp, synthetic construct
  source 1..110: mol_type = other DNA
ctaagacaactaagtctagggaaaagtcctcaatgatccaaccagttattttagaagtagccacatgtaggcgttcctgttgtggctcagtggttaaggaatccaactag

SEQ ID NO: 39066 - DNA, 110 bp, synthetic construct
  source 1..110: mol_type = other DNA
tcctggtccctggaatgccttctctgatctcgctgcctctcacatctccccattccctcaatatgcagtggaacacctcaactccactaaagagagtttcctgagtttca

SEQ ID NO: 39067 - DNA, 110 bp, synthetic construct
  source 1..110: mol_type = other DNA
cctcaatatgcagtggaacacctcaactccactaaagagagtttcctgagtttcactacacacatttatctaatattttctatattctgctactattttccatactctaa

SEQ ID NO: 39068 - DNA, 110 bp, synthetic construct
  source 1..110: mol_type = other DNA
catttaccccccagctctcctggggctccccatcaccctcaggaggaagcccgatgtcttatggagacctttaaggtctctagtgcctacctcctctcccagggtcaccc

SEQ ID NO: 39069 - DNA, 110 bp, synthetic construct
  source 1..110: mol_type = other DNA
gtcttatggagacctttaaggtctctagtgcctacctcctctcccagggtcacccacaccattccattctctgtcttccttccttctataaccgaactagtgccctgtgg

SEQ ID NO: 39070 - DNA, 110 bp, synthetic construct
  source 1..110: mol_type = other DNA
agaatttggcttctcaccagaagcagaggaatctaatattgttagcctgctcagttctctgcccccagggctgcatgaactgctttctctgcctttatgagtgtcttttt

SEQ ID NO: 39071 - DNA, 110 bp, synthetic construct
  source 1..110: mol_type = other DNA
tctctgcccccagggctgcatgaactgctttctctgcctttatgagtgtctttttctacatttatttgcacagagtccatcctgtcccatacatggtgaaacctctgaac

SEQ ID NO: 39072 - DNA, 110 bp, synthetic construct
  source 1..110: mol_type = other DNA
gaacgaagttctgtctttctgtggtgagaatggaacagttgtttgcctcttctctgtggcttccagctggtcctattatgctatcatgctgtcactccctatgtccctct

SEQ ID NO: 39073 - DNA, 110 bp, synthetic construct
  source 1..110: mol_type = other DNA
gtggcttccagctggtcctattatgctatcatgctgtcactccctatgtccctctaccctcttccccctcccttccagtacaaagcatctctttgccatcttccctctga

SEQ ID NO: 39074 - DNA, 110 bp, synthetic construct
  source 1..110: mol_type = other DNA
cagctcagcagtgaatgggtcgggagcagcccacggttcctctcagcattcacgcagtgcccctgctcctttgcaaggctcagcttcctgtgactggagggactgcaagt

SEQ ID NO: 39075 - DNA, 110 bp, synthetic construct
  source 1..110: mol_type = other DNA
ggaacctccttatgctgctggtgaggccctaaaagacaaaaaaagaccccccccaaaaaaaaactgcacagaactaaacacacacacaccccagtacgagtaaaactggg

SEQ ID NO: 39076 - DNA, 110 bp, synthetic construct; identical to SEQ ID NO: 39075
  source 1..110: mol_type = other DNA

SEQ ID NO: 39077 - DNA, 110 bp, synthetic construct
  source 1..110: mol_type = other DNA
tttccccagtggagtcttcctacatcctagggttggggaggtcatgactttcaatggggcatattgggttatatgggacatgctacccccatcctggaaactgaccagtg

SEQ ID NO: 39078 - DNA, 110 bp, synthetic construct
  source 1..110: mol_type = other DNA
ggggcatattgggttatatgggacatgctacccccatcctggaaactgaccagtgattttcatcttagactacaatagcagaaactccacttttttttttttctttttat

SEQ ID NO: 39079 - DNA, 110 bp, synthetic construct
  source 1..110: mol_type = other DNA
gtttgttagatttttgaaggacagagttttagtgtcatctttcccagggaaatagagcagcgatattaaggacatgatagccgttttagagaaaggatcagtgtatttac

SEQ ID NO: 39080 - DNA, 110 bp, synthetic construct
  source 1..110: mol_type = other DNA
agcagcgatattaaggacatgatagccgttttagagaaaggatcagtgtatttaccctttcctccctgccttgctcctgccgcccccccagaacacacatacacacacac

SEQ ID NO: 39081 - DNA, 110 bp, synthetic construct
  source 1..110: mol_type = other DNA
gatcacttttattacacctggttttttgaaagtggggcttgacaatgtgaaccaatgtcctagcatctggggagggggtgtcaataattgatctcaagattctcagtcta

SEQ ID NO: 39082 - DNA, 110 bp, synthetic construct
  source 1..110: mol_type = other DNA
tgtcctagcatctggggagggggtgtcaataattgatctcaagattctcagtctaggattccttccttcctttgtttaacaaatatttatttggcacttactgtctacta

SEQ ID NO: 39083 - DNA, 110 bp, synthetic construct
  source 1..110: mol_type = other DNA
tgtgcttagttcatattattagttctttataagtctgataaactcaggcctgcgcctaaatagacctagtgtggtcttggaccacaattctctcagccacattgctcgtt

SEQ ID NO: 39084 - DNA, 110 bp, synthetic construct
  source 1..110: mol_type = other DNA
cagctgttttatgaacatcctcttctgaattatcagggcaggaaaaggtaggctcaggataagtagcgggtgcttgtttaatatttgctgaggttttggagagagatgtg

SEQ ID NO: 39085 - DNA, 110 bp, synthetic construct
  source 1..110: mol_type = other DNA
aggataagtagcgggtgcttgtttaatatttgctgaggttttggagagagatgtggaggcactaggccctagttctgcctccaggtctgtctaaggcaaatctcagcgct

SEQ ID NO: 39086 - DNA, 110 bp, synthetic construct
  source 1..110: mol_type = other DNA
gggtgagggcaaggagcaaggtggggtggggtggtgggaacacaaggatggaacgacatgtttgaagcaatttgtgaagaaagagtttaaaagttacattaaggaatcca

SEQ ID NO: 39087 - DNA, 110 bp, synthetic construct
  source 1..110: mol_type = other DNA
ctccattcttttcagcagcctgttaccagccattctttctctccctctggccacactgtttggggctccgaggatgttctaacatctccagtttctggaatgtcttaata

SEQ ID NO: 39088 - DNA, 110 bp, synthetic construct
  source 1..110: mol_type = other DNA
agaatgaactttatccattaatttctctaaaacatacttgtgttttgagcagcaaatcagccacacccctgtgcatctaccatctaacagaaaaggggtcactgcagact

SEQ ID NO: 39089 - DNA, 110 bp, synthetic construct
  source 1..110: mol_type = other DNA
cagaaatcttttgggtttgagatcctcagcagttcacctccctggaagctcatcccctgtcatatcagagatgaccccagcagcacactagtgcactggcttcttctcag

SEQ ID NO: 39090 - DNA, 110 bp, synthetic construct
  source 1..110: mol_type = other DNA
tgaagacagttttcactgggcaaataattcttgggctgacagtcattttctttctatgctttctttctttctttctttctttatttatttatttattcaatggctgcact

SEQ ID NO: 39091 - DNA, 110 bp, synthetic construct
  source 1..110: mol_type = other DNA
atgctttctttctttctttctttctttatttatttatttattcaatggctgcactctggcatgtggaaattcccaggccaggaccaactctgcagctgcagcagtgccaa

SEQ ID NO: 39092 - DNA, 110 bp, synthetic construct
  source 1..110: mol_type = other DNA
catggttcctagtcagattcgtttccatcatgccacaatgggaactctgatatacatcttaatttatcaaaatatacctcagatttatagtatcttaattccagtgaagt

SEQ ID NO: 39093 - DNA, 110 bp, synthetic construct; identical to SEQ ID NO: 39092
  source 1..110: mol_type = other DNA

SEQ ID NO: 39094 - DNA, 110 bp, synthetic construct
  source 1..110: mol_type = other DNA
ggaatctcccctcacaaggatctgtgagtttagggactgtgcctccatctaccccgaccccctaataggaagcaagaaattagcgcattaggatgtgcatgttccatatg

SEQ ID NO: 39095 - DNA, 110 bp, synthetic construct
  source 1..110: mol_type = other DNA
gaccccctaataggaagcaagaaattagcgcattaggatgtgcatgttccatatgcttgttgtgaaagctggaaacatgtgaccagtgacactgggactttttctgtggg

SEQ ID NO: 39096 - DNA, 110 bp, synthetic construct
  source 1..110: mol_type = other DNA
agaggaagcgagggagcaaagccagcatccccaccgtgaagttttccttctggtccagacttggaggttctgagcttgcagtgattaaggaaggtggaatctcccttcct

SEQ ID NO: 39097 - DNA, 110 bp, synthetic construct
  source 1..110: mol_type = other DNA
ggaacgtccctgggctccaagatggccttgcagagttccttcacttgctggaatgggacagtcctccagctcgggcaggcctgcgacttccatcaggactgtgcccaggc

SEQ ID NO: 39098 - DNA, 110 bp, synthetic construct
  source 1..110: mol_type = other DNA
cccaggaaggagggcgtgtcaccacttaattggtgatgacacccagggcagaccagttcccagctgctggttttctgacctttccggagctgcagccacctctgtcctct

SEQ ID NO: 39099 - DNA, 110 bp, synthetic construct
  source 1..110: mol_type = other DNA
gttcccagctgctggttttctgacctttccggagctgcagccacctctgtcctctccccacacacgtgtgtgaacaagacacacgcacacgggcgcctgcaatgcaccgg

SEQ ID NO: 39100 - DNA, 110 bp, synthetic construct
  source 1..110: mol_type = other DNA
ggggtccttgctgcttcaaacacaggcttcgtctgcctctagccctaaactacaggtgtgacttctcagctctgtaccaggagggaccctcttggaatcagtctccaaac

SEQ ID NO: 39101 - DNA, 110 bp, synthetic construct
  source 1..110: mol_type = other DNA
gccgcccccacctccaggaagcatctggaaatgagagcctgggagaggggagccccaccaccttggccagcatcacccttggcgcagatccccagctacaaaaagaaacg

SEQ ID NO: 39102 - DNA, 110 bp, synthetic construct
  source 1..110: mol_type = other DNA
caccaccttggccagcatcacccttggcgcagatccccagctacaaaaagaaacgtggagaagaaagcagggagccagggtaaggcagacagagacctcaacagtacagg

SEQ ID NO: 39103 - DNA, 110 bp, synthetic construct
  source 1..110: mol_type = other DNA
tgagtggtctctctcagtttgcccctcttgaaaatacatgctagtcactgccgcttaagaggagttgaggcctggatggagaggtttttgtccaagccacacagcttccc

SEQ ID NO: 39104 - DNA, 110 bp, synthetic construct
  source 1..110: mol_type = other DNA
acaaagaactccagtcctcatgactaagagacaaataaaacttttaagaggctgtagcaatgtgttaatgaagatttgttcaaagtaatatgagaatccagaaggctgac

SEQ ID NO: 39105 - DNA, 110 bp, synthetic construct
  source 1..110: mol_type = other DNA
ttcctataggcatggaagcctgtaggacattgcaggtgtcctcttaggccactctgagctgggggagactgggccaggcatccgtctcctcttgtaccagatgtgccacc

SEQ ID NO: 39106 - DNA, 110 bp, synthetic construct
  source 1..110: mol_type = other DNA
gagctgggggagactgggccaggcatccgtctcctcttgtaccagatgtgccaccccaccattcctgctctgccaagtgtgacacgagacactattcctgctctgccatg

SEQ ID NO: 39107 - DNA, 110 bp, synthetic construct
  source 1..110: mol_type = other DNA
ccctttgttggcacagcagaaacaaatctgattattatccaagtttgtgactatataggtagcaaaacccaagtcataattgttccctggccaacaacaactgtgagatg

SEQ ID NO: 39108 - DNA, 110 bp, synthetic construct
  source 1..110: mol_type = other DNA
taggtagcaaaacccaagtcataattgttccctggccaacaacaactgtgagatgcctaggattctaagatattaaaatgtgggggagggagtgcccattgtggctcagt

SEQ ID NO: 39109 - DNA, 110 bp, synthetic construct
  source 1..110: mol_type = other DNA
ctgagcaccccagcacgcccggcacagagcggggtcggggggggcgccctctgtggccccagggtgatttctgcttccctgtcggtgaaatgaggcacttgagactgaga

SEQ ID NO: 39110 - DNA, 110 bp, synthetic construct
  source 1..110: mol_type = other DNA
gccccagggtgatttctgcttccctgtcggtgaaatgaggcacttgagactgagagcttccagatctcctccagccctggttctggtgccatgatccagcccaggaagtg

SEQ ID NO: 39111 - DNA, 110 bp, synthetic construct
  source 1..110: mol_type = other DNA
gagttgagattttctttttttatatggatatttaattgcttcaaatgcaaatgttgaaaggactttccatttccaattgagtcaacttacctttactgaacaccagttgg

SEQ ID NO: 39112 - DNA, 110 bp, synthetic construct; identical to SEQ ID NO: 39111
  source 1..110: mol_type = other DNA

SEQ ID NO: 39113 - DNA, 110 bp, synthetic construct
  source 1..110: mol_type = other DNA
atctcaccaatatatcaaggaaatgcatcaataatgtatgagaactttcctttatcctcactggttcttcatttctcatcaatttccacagcttcaacactcacctacat

SEQ ID NO: 39114 - DNA, 110 bp, synthetic construct; identical to SEQ ID NO: 39113
  source 1..110: mol_type = other DNA

SEQ ID NO: 39115 - DNA, 110 bp, synthetic construct
  source 1..110: mol_type = other DNA
aactcagtatttatttagttccttctttctccagctctcacacaactagatgatgtcaaaaatcacctacaagaggacacaatcttggaactcagttttccttataaatg

SEQ ID NO: 39116 - DNA, 110 bp, synthetic construct
  source 1..110: mol_type = other DNA
tatttacatcaaggaaattagtgcatgcgacacatctatagctttttccaccagaaagctctttgttaaacatttaccagcagagttctcgctggggtgcagtgggttaa

SEQ ID NO: 39117 - DNA, 110 bp, synthetic construct
  source 1..110: mol_type = other DNA
aagctctttgttaaacatttaccagcagagttctcgctggggtgcagtgggttaagaatctgactgtagaggctctggtcactgcaaaggcaagggttagagccccagcc

SEQ ID NO: 39118 - DNA, 110 bp, synthetic construct; identical to SEQ ID NO: 39116
  source 1..110: mol_type = other DNA

SEQ ID NO: 39119 - DNA, 110 bp, synthetic construct
  source 1..110: mol_type = other DNA
ttccaccagaaagctctttgttaaacatttaccagcagagttctcgctggggtgcagtgggttaagaatctgactgtagaggctctggtcactgcaaaggcaagggttag

SEQ ID NO: 39120 - DNA, 110 bp, synthetic construct
  source 1..110: mol_type = other DNA
ctgcttcccgcattcgtcattatcaaggaactgaagaccctgagctgtagagccagcagatctgatcttggatcttggctgcgtcccaggtttgttgcgtgagcttaggg

SEQ ID NO: 39121 - DNA, 110 bp, synthetic construct
  source 1..110: mol_type = other DNA
gcagatctgatcttggatcttggctgcgtcccaggtttgttgcgtgagcttagggaggatttgaccttctcagccttctttccccctaattacaaaaagggggtgagctt

SEQ ID NO: 39122 - DNA, 110 bp, synthetic construct
  source 1..110: mol_type = other DNA
cattgtcttgcccagcgtccagttcccagaaaactctggaggctttgcaggcctcagacactggggtgtctcatctggagagaaaagaggggcacaggagtcactggagt

SEQ ID NO: 39123 - DNA, 110 bp, synthetic construct
  source 1..110: mol_type = other DNA
gccttgggtaaatacagattagcttgtctgtgtcagctttgctgtaaacaggggctcaggacgagggagtctatttctttcacttggaaagctagaggcaattatctgtc

SEQ ID NO: 39124 - DNA, 110 bp, synthetic construct
  source 1..110: mol_type = other DNA
ggtatttcaggtttttttctttagaaattgccggaaatgttgatgtcttcacagtgcacaaccactaccttctgacccaaaagcacctgcttggccatgatggcttccag

SEQ ID NO: 39125 - DNA, 110 bp, synthetic construct
  source 1..110: mol_type = other DNA
ctcagttgcttcaaatcagaattcgagttgggttgtcttaggtataaagtgaagactaagagagggtggccctttgttcctggctccccgaaattaggatgttgtcctcc

SEQ ID NO: 39126 - DNA, 110 bp, synthetic construct
  source 1..110: mol_type = other DNA
ctaagagagggtggccctttgttcctggctccccgaaattaggatgttgtcctcccctcttatctgctaagaaaaaaatgtggcttttgggtgaccactgatttagctat

SEQ ID NO: 39127 - DNA, 110 bp, synthetic construct
  source 1..110: mol_type = other DNA
gcagggctagcagccaacaggtctgggagctagccctatctatcactgtgcccatggtagttggcctgccacaatagaagggatcctgcagcccacatagggacactcct

SEQ ID NO: 39128 - DNA, 110 bp, synthetic construct
  source 1..110: mol_type = other DNA
aacaggtctgggagctagccctatctatcactgtgcccatggtagttggcctgccacaatagaagggatcctgcagcccacatagggacactcctagagcatatagctct

SEQ ID NO: 39129 - DNA, 110 bp, synthetic construct
  source 1..110: mol_type = other DNA
agagctcccacttcaggccaggggagggaagcaaaaaccctgaagcaaagcttagagaccaagatcccttaggactaagcagctgactttcagcccttttcgggggccct

SEQ ID NO: 39130 - DNA, 110 bp, synthetic construct
  source 1..110: mol_type = other DNA
agaccaagatcccttaggactaagcagctgactttcagcccttttcgggggccctccggtccacttgctctgtgacggcaggtctacagaatgcggtgcccggccatcgg

SEQ ID NO: 39131 - DNA, 110 bp, synthetic construct
  source 1..110: mol_type = other DNA
gtctcaaggtgagacgaatggcactgcagtgtgttgagaataaacgctaaggacagatgtggaggtagcttaggggaatgaagacaaaccctccatgatgtcctataatg

SEQ ID NO: 39132 - DNA, 110 bp, synthetic construct
  source 1..110: mol_type = other DNA
aagacacaggccctccctctgcccagagggcattgtttgggtgagatttttttctcacagtggcttaccatggaaagaatttcgagcatccatcaaaggccgttgttttc

SEQ ID NO: 39133 - DNA, 110 bp, synthetic construct
  source 1..110: mol_type = other DNA
cacagtggcttaccatggaaagaatttcgagcatccatcaaaggccgttgttttcctaaaacctgcacccttgtgagcaggaggcttggcttgtggcgacggagactcat

SEQ ID NO: 39134 - DNA, 110 bp, synthetic construct
  source 1..110: mol_type = other DNA
gctgcaaaagaaaaacttgtacaagactactctcggaccacgactgaaaaatgcattgagttggagacatttttcagtgctggctacactccaggcactggtaggtgctg

SEQ ID NO: 39135 - DNA, 110 bp, synthetic construct
  source 1..110: mol_type = other DNA
ttgagttggagacatttttcagtgctggctacactccaggcactggtaggtgctggtgatacagagatgaattaactcgcaggtgctgtgccagctctgagcacgatcca

SEQ ID NO: 39136 - DNA, 110 bp, synthetic construct
  source 1..110: mol_type = other DNA
atgcggtgccatgcggtgccatgtggtcaccagagagaatgagaccacctacaggtcttgagttagcagactggccgtgaggcgttgtgaaaggagaaaaaagccagctg

SEQ ID NO: 39137 - DNA, 110 bp, synthetic construct
  source 1..110: mol_type = other DNA
tcttgagttagcagactggccgtgaggcgttgtgaaaggagaaaaaagccagctgcagacaagtctgtaatacatcataccacttctgtgactaaactaaagcatcaatg

SEQ ID NO: 39138 - DNA, 110 bp, synthetic construct
  source 1..110: mol_type = other DNA
caggtgcgcattctggatcatccatgaagctatttaaaattgcctgacatgtaaccacgacagattttaaagatcaaaacacaggtgtgcatcagtgttgcacaattccg

SEQ ID NO: 39139 - DNA, 110 bp, synthetic construct
  source 1..110: mol_type = other DNA
gggtaaatgatggagttaaacacaaaatgttttcacttagaaagagtctcaatatctctttagttccttaaatcttttttttttccactgtacagcatggggaccaagtt

SEQ ID NO: 39140 - DNA, 110 bp, synthetic construct; identical to SEQ ID NO: 39139
  source 1..110: mol_type = other DNA

SEQ ID NO: 39141 - DNA, 110 bp, synthetic construct
  source 1..110: mol_type = other DNA
cccaggtgacctcgcccaggtacaggccactgaataccatttatatgctcatgggtcccacacagtctttgatccacctcccacgacggaaacccagatcctggctttgt

SEQ ID NO: 39142 - DNA, 110 bp, synthetic construct
  source 1..110: mol_type = other DNA
aacagtatgcatgtaaatcagtgatgcaaaagagggaaccaggcccttaaaacgtgactaaacaggctctacaatattggcactcttgatttattctgcaaactcttcca

SEQ ID NO: 39143 - DNA, 110 bp, synthetic construct
  source 1..110: mol_type = other DNA
tgacaaagaaagagcacctctggtttggtgtcactacgccgtctattcctttgccagctcttgtgccctagtgtctgcattcgaggaagagcaaggtgacgtgggctctg

SEQ ID NO: 39144 - DNA, 110 bp, synthetic construct
  source 1..110: mol_type = other DNA
agctcttgtgccctagtgtctgcattcgaggaagagcaaggtgacgtgggctctgtgatgaatattgctccagcattttgatgacttgtatataatattgaaatacagag

SEQ ID NO: 39145 - DNA, 110 bp, synthetic construct
  source 1..110: mol_type = other DNA
ggctgtacatacgtgattgtaatttttttcttcttttagaatttacatatcagacggaagatgctgcgacaggaactgcttcgataattgtcaataatgaaggtatgtgt

SEQ ID NO: 39146 - DNA, 110 bp, synthetic construct
  source 1..110: mol_type = other DNA
ggaagatgctgcgacaggaactgcttcgataattgtcaataatgaaggtatgtgtttcacatgtcggagtgtcatttccagaactggagcagaagcatccattttcaccc

SEQ ID NO: 39147 - DNA, 110 bp, synthetic construct
  source 1..110: mol_type = other DNA
caactgcagcaacaccagatcctttaactcacggtgccaagccggggatggaacctgcgcatctgcagtgacctgaactgctgcagtcggattcctaaccccactgtgcc

SEQ ID NO: 39148 - DNA, 110 bp, synthetic construct
  source 1..110: mol_type = other DNA
tgcgcatctgcagtgacctgaactgctgcagtcggattcctaaccccactgtgccacagtgggacttcccatgattcttaataaattctcatgtgactattaacaactta

SEQ ID NO: 39149 - DNA, 110 bp, synthetic construct
  source 1..110: mol_type = other DNA
cctcccaccccaaaacttttcacttaatggatctgagtgcagtctggccatcgggttttttaaactccctaggagattctactgtccactcacagcttttttggccccac

SEQ ID NO: 39150 - DNA, 110 bp, synthetic construct
  source 1..110: mol_type = other DNA
ttttttaaactccctaggagattctactgtccactcacagcttttttggccccacccacagcatgtggaagttctggggccagggatggaactcgggccgatgcagtgac

SEQ ID NO: 39151 - DNA, 110 bp, synthetic construct
  source 1..110: mol_type = other DNA
acattgaagcccagagaagcaaaatgacttgccaaagagcccacagctagattgcatcagcttgttcagatcacagctcccatatcctccctcctgaacaacctcagcaa

SEQ ID NO: 39152 - DNA, 110 bp, synthetic construct
  source 1..110: mol_type = other DNA
atcagcttgttcagatcacagctcccatatcctccctcctgaacaacctcagcaacagccaaaggaccaaagtgtttggccttggccagtctttgaagggaagccaacac

SEQ ID NO: 39153 - DNA, 110 bp, synthetic construct
  source 1..110: mol_type = other DNA
ctcctcttgccaggcgttatccttcctattgctatttagctttgcacatctttcgcttaaatgagaagctcccggagcccttttgagcccctgctctgaacgtgcccagg

SEQ ID NO: 39154 - DNA, 110 bp, synthetic construct
  source 1..110: mol_type = other DNA
gtgcccacccccaaaaaaaacccaaatacaaatgtaaacagcactagcaattttacaaagattcctaagtattcaaggacaaatatcaaagttgttagtacggccgtttc

SEQ ID NO: 39155 - DNA, 110 bp, synthetic construct
  source 1..110: mol_type = other DNA
caaagattcctaagtattcaaggacaaatatcaaagttgttagtacggccgtttctgggaaaaggggaatggatatggggaataggtaaaacaaaaattaacagcgactt

SEQ ID NO: 39156 - DNA, 110 bp, synthetic construct
  source 1..110: mol_type = other DNA
gaactcaggtttcatccacaaggacctggctctctgctactggatccacacacaagtgcaagcctctgaacagtcccaggttttctttgaatgttccctcaccgcacccc

SEQ ID NO: 39157 - DNA, 110 bp, synthetic construct
  source 1..110: mol_type = other DNA
ctagggtacaaacctacttgtggggatgtcagggccaagagcaggagagggaataggctttggctggatgttggggcatcgatgtaaccccagtggaaaacacagacctt

SEQ ID NO: 39158 - DNA, 110 bp, synthetic construct
  source 1..110: mol_type = other DNA
ggctttggctggatgttggggcatcgatgtaaccccagtggaaaacacagaccttcttcagctcctcaatcccgtgcagggcactatcttctgtcccctccctagaggcc

SEQ ID NO: 39159 - DNA, 110 bp, synthetic construct
  source 1..110: mol_type = other DNA
ttttgacttctaactcccgtatccttaggttaacctaagttcttcatcccatgtggtgtttcagagctcttgataaacatctgcctaagcccattttgcctcacctgacc

SEQ ID NO: 39160 - DNA, 110 bp, synthetic construct
  source 1..110: mol_type = other DNA
actggtcacgggtgtctctgaaaaacgtccacacctacacacgaaatttcacatatgatttcatcatcttattaccatctttcctgctttttagggccgaaccagcagcc

SEQ ID NO: 39161 - DNA, 110 bp, synthetic construct
  source 1..110: mol_type = other DNA
atgggaaggaagaaataaaaattcactccgttctcccctgactacaaccagacaaaaggcagagagggtagtcttcacagccctgctctcaggtccacggcagctgactc

SEQ ID NO: 39162 - DNA, 110 bp, synthetic construct
  source 1..110: mol_type = other DNA
aaggcagagagggtagtcttcacagccctgctctcaggtccacggcagctgactccagctctgtttcagaactacctcttcctgaatgtaaaatgaacaatgaatgtaga

SEQ ID NO: 39163 - DNA, 110 bp, synthetic construct
  source 1..110: mol_type = other DNA
ggtcactcccaagcggccctagaagtgtgtgtttgctagaaaccatcaccccaccgtaactgacaggggctccgtaaatagctatggcttctggaagtgggtgtccagct

SEQ ID NO: 39164 - DNA, 110 bp, synthetic construct
  source 1..110: mol_type = other DNA
gtaactgacaggggctccgtaaatagctatggcttctggaagtgggtgtccagctagtgcggggaggggaagtgggtgcgaagacctgggcagaaacggcctcaatacct

SEQ ID NO: 39165 - DNA, 110 bp, synthetic construct
  source 1..110: mol_type = other DNA
ccagagcttatcccacctacaactatcatttccaagtgtttcttgctgggctgttttcaaatatatgttttgtacacgattagagtccacatacaactccccccgctcca

SEQ ID NO: 39166 - DNA, 110 bp, synthetic construct
  source 1..110: mol_type = other DNA
ttcaaatatatgttttgtacacgattagagtccacatacaactccccccgctccaccccgcaccgtgagcctcttcccacatcgcctcgcgacttcactaccaacagttt

SEQ ID NO: 39167 - DNA, 110 bp, synthetic construct
  source 1..110: mol_type = other DNA
caaatcagcctgactgtgcctccgctgaattggttaatcaacaccttttggtggagctttgcaaaccttttttttttcccatggtggtaaatgattgattccatccatcg

SEQ ID NO: 39168 - DNA, 110 bp, synthetic construct
  source 1..110: mol_type = other DNA
gctttgcaaaccttttttttttcccatggtggtaaatgattgattccatccatcgtaatgaccagccagtgcacgtcttacccaggcttcttgggcttccctgctgggac

SEQ ID NO: 39169 - DNA, 110 bp, synthetic construct
  source 1..110: mol_type = other DNA
gccccaggggatttgtgagctgtccttagcagaatatgtatcaacaaggagaacgaggtgcaaagctaggcaccagggttgctacagataggcatgccttctgcgaagca

SEQ ID NO: 39170 - DNA, 110 bp, synthetic construct
  source 1..110: mol_type = other DNA
aggtgcaaagctaggcaccagggttgctacagataggcatgccttctgcgaagcagtgatgattttctagatgttttgcatagtcagctgatgccaggcttcctcaatgc

SEQ ID NO: 39171 - DNA, 110 bp, synthetic construct
  source 1..110: mol_type = other DNA
ggcatgtggaagttcccaggccagggatcaaatccaataacccaataacccaataacccaataacccaagctactgcagtgacagtgagggatccttaacccactgtgcc

SEQ ID NO: 39172 - DNA, 110 bp, synthetic construct
  source 1..110: mol_type = other DNA
acccaataacccaagctactgcagtgacagtgagggatccttaacccactgtgccacaagggaaatcctgaagtactatgtttttaattcctagaaagtctacctctcct

SEQ ID NO: 39173 - DNA, 110 bp, synthetic construct
  source 1..110: mol_type = other DNA
taagttttatcccctggaaaaggtgcactttctccttctaaggtccttcaaggatgtaactgagtctatcaaaagctgccacaggcacggccttgaggtgccgccggctt

SEQ ID NO: 39174 - DNA, 110 bp, synthetic construct
  source 1..110: mol_type = other DNA
gtgagacagtggtggcttggctgggtgtgggggtgcctgggagagctcggggagcggggccaccccagtccctgaggaccgttgttgccgcgcaggactccaggacagtg

SEQ ID NO: 39175 - DNA, 110 bp, synthetic construct
  source 1..110: mol_type = other DNA
ggggccaccccagtccctgaggaccgttgttgccgcgcaggactccaggacagtgagcactttattgtttgttgcagtgaatcgggcaccttcctgggcctgggcacggt

SEQ ID NO: 39176 - DNA, 110 bp, synthetic construct
  source 1..110: mol_type = other DNA
ttgacaggcaggggttcagtaacagctttatttctgttgcttacaaaagcattcgtaaatagttagaaatgtgtaagtgtgaagaaatcacattataccagccacattac

SEQ ID NO: 39177 - DNA, 110 bp, synthetic construct
  source 1..110: mol_type = other DNA
ccctctctctgcttccgagctcattcacgggggggggggggggggaggagacagagcttctcccttggtttcactgcacctgcatttggatgactcttaggtccaaccct

SEQ ID NO: 39178 - DNA, 110 bp, synthetic construct
  source 1..110: mol_type = other DNA
gcttctcccttggtttcactgcacctgcatttggatgactcttaggtccaaccctgatgtcacctgttctacagtgtggccctttctctgtctgtaggacatctccatac

SEQ ID NO: 39179 - DNA, 110 bp, synthetic construct
  source 1..110: mol_type = other DNA
gaggggatgagtgaggctgaaatggaacccagtgtccactcacaaaattgtgatcctggcaaggggctgtacctgcttggaggaagaaccttcggggacagaggccagag

SEQ ID NO: 39180 - DNA, 110 bp, synthetic construct
  source 1..110: mol_type = other DNA
ctggcaaggggctgtacctgcttggaggaagaaccttcggggacagaggccagagaggaacggtacagcagggcacctggtcagagagccggaaacagccggacccacac

SEQ ID NO: 39181 - DNA, 110 bp, synthetic construct
  source 1..110: mol_type = other DNA
gagccctcaagtatttgttgaactaactgaacacacgttagggccaccctgatctatgccagaagcagtgcaaagacaataagcttttggggtgctgtgaaaccagctcc

SEQ ID NO: 39182 - DNA, 110 bp, synthetic construct
  source 1..110: mol_type = other DNA
atgccagaagcagtgcaaagacaataagcttttggggtgctgtgaaaccagctccttagacaccccgtccctctagcccgggaggctagcagcgggttttacttggtggc

SEQ ID NO: 39183 - DNA, 110 bp, synthetic construct
  source 1..110: mol_type = other DNA
aaaagatgcaacttgatctctctttctctataggctgatcgcacgggtgcgcttttcctgggggttattattctgttataaagccggatgcttaaagcgaattttcttgg

SEQ ID NO: 39184 - DNA, 110 bp, synthetic construct
  source 1..110: mol_type = other DNA
tcctgggggttattattctgttataaagccggatgcttaaagcgaattttcttggaaggtgcaaagtaggtcagctgcacttttctcggggtgcgcggcctcggcctgag

SEQ ID NO: 39185 - DNA, 110 bp, synthetic construct
  source 1..110: mol_type = other DNA
cttttttaaataaatgacaatttaaaagtacacatctatgctaaagagtcacccttaatatcagctagcaattatcaaagaagacctgtaaaacagaatgctgggttttg

SEQ ID NO: 39186 - DNA, 110 bp, synthetic construct
  source 1..110: mol_type = other DNA
taatatcagctagcaattatcaaagaagacctgtaaaacagaatgctgggttttgactgttgcttcccatgtcaagacgctgcagcctgacatgaaagatgcttagacag

SEQ ID NO: 39187 - DNA, 110 bp, synthetic construct
  source 1..110: mol_type = other DNA
aaaaccatcagcacagccaagacagcgaatatacccatgaccccaaatcgttcccataccccttcttaatgccccttctgacgctgtcgctgtcaatctactgcctgtcc

SEQ ID NO: 39188 - DNA, 110 bp, synthetic construct
  source 1..110: mol_type = other DNA
ataccccttcttaatgccccttctgacgctgtcgctgtcaatctactgcctgtccctccagattactttactctttccagagcttggtaggaacagaatcctacattgct

SEQ ID NO: 39189 - DNA, 110 bp, synthetic construct
  source 1..110: mol_type = other DNA
tcctggcctttcttccacgagacccaggcctgcttatctggttcctaggatgcccgtttgtaagcagacagtccagagacgaaggggtcctaccctgcctcagcagctca

SEQ ID NO: 39190 - DNA, 110 bp, synthetic construct
  source 1..110: mol_type = other DNA
ccatggggataagcatgcatggccctctggctgcccccttctggctgcttccacgagcctcgctggcccttgagcttgggtctctggaacctcagtgcagagcagggcct

SEQ ID NO: 39191 - DNA, 110 bp, synthetic construct
  source 1..110: mol_type = other DNA
tttgctgaataaataaatggctccatcacttagtagctttatgccttttggtgtgtcaagtaatctctctgagcctcagtttccccatcccggtaattatggctacacct

SEQ ID NO: 39192 - DNA, 110 bp, synthetic construct
  source 1..110: mol_type = other DNA
attttgtagctagccctacataagtagccttgaaaaatctgaccccattcctaccgaatcatctacccattcacagtgtagctttgtaccagtctggcctcgtaagtctt

SEQ ID NO: 39193 - DNA, 110 bp, synthetic construct
  source 1..110: mol_type = other DNA
gaatcatctacccattcacagtgtagctttgtaccagtctggcctcgtaagtcttcctgttggctactttcatgtaaagcctgcagagatctgccttgtttgttgctttg

SEQ ID NO: 39194 - DNA, 110 bp, synthetic construct
  source 1..110: mol_type = other DNA
caggtatcaggaggggactggactgcgtgcttcggtgccctcctcaccctcgcagtctgtggttctggttttggttctggtctgcagctgggtcttactctccctgctct

SEQ ID NO: 39195 - DNA, 110 bp, synthetic construct
  source 1..110: mol_type = other DNA
tctgtggttctggttttggttctggtctgcagctgggtcttactctccctgctctgtctctgtcttggaactttcacagtccaataaaatctaccaccctccaaaaaatt

SEQ ID NO: 39196 - DNA, 110 bp, synthetic construct
  source 1..110: mol_type = other DNA
actagtcaggttcgttattgctgagccacaatgggaactccctggttccagtttgaacttttctctcctctggtggatgggccatgggccagttctatccttctggacct

SEQ ID NO: 39197 - DNA, 110 bp, synthetic construct; identical to SEQ ID NO: 39196
  source 1..110: mol_type = other DNA

SEQ ID NO: 39198 - DNA, 110 bp, synthetic construct
  source 1..110: mol_type = other DNA
tacctttcacgaggtcttgacatctactgggataaataccttgaccttgttcctcctctttaggattgtcttggctgtttttccttttttctttttttttttcttttctt

SEQ ID NO: 39199 - DNA, 110 bp, synthetic construct
  source 1..110: mol_type = other DNA
ctctttaggattgtcttggctgtttttccttttttctttttttttttcttttctttctgggccacatatggaagttcccaggccagcctcacctatgacctggaccacag

SEQ ID NO: 39200 - DNA, 110 bp, synthetic construct
  source 1..110: mol_type = other DNA
aggaaggtagggaggtagggaggaagctggggcttgaataaccgcttgcacacatgggagatgcagaaggaggggccaggaagggttgctgaggggggtcttggccattc

SEQ ID NO: 39201 - DNA, 110 bp, synthetic construct
  source 1..110: mol_type = other DNA
agaaaggacaaagaggggagcccagctttaatctcgcagctgccctgcagaatcggggcgtctgcggactctctgtgtcccacagctctctttcctcactttctccacct

SEQ ID NO: 39202 - DNA, 110 bp, synthetic construct
  source 1..110: mol_type = other DNA
ctcccggggaccttccaagggcagagggcagctctctcacacgctgtcacctcaatgtgatgaagctcctggcgaaaggttttcattacattcttcacctgctcctccat

SEQ ID NO: 39203 - DNA, 110 bp, synthetic construct
  source 1..110: mol_type = other DNA
tgattctaaaatttatgtggaagtgcaaagggtcaagaatagccaagacaatcttgaagagctacaaagctggaggacttatcctaccaaatatcaagccctatcacatg

SEQ ID NO: 39204 - DNA, 110 bp, synthetic construct
  source 1..110: mol_type = other DNA
gaagagctacaaagctggaggacttatcctaccaaatatcaagccctatcacatggctgcagcaattaacatagtgtggaacttggcataagacaagctagctaagtgac

SEQ ID NO: 39205 - DNA, 110 bp, synthetic construct
  source 1..110: mol_type = other DNA
cccctggacccctcaggcctttcttacacggactgcctcgcctcctttctctgcgctaatgtgagcttgactgttggaacttaagggtgagaccctacgttcgccacttg

SEQ ID NO: 39206 - DNA, 110 bp, synthetic construct
  source 1..110: mol_type = other DNA
aattgaaacttgagtccatgtttaagaataaaggctgagtattttgcaacaagaactagcatgtttactgaaaagtcttgtgaggtttctggagttttaggagaaattca

SEQ ID NO: 39207 - DNA, 110 bp, synthetic construct
  source 1..110: mol_type = other DNA
ctagcatgtttactgaaaagtcttgtgaggtttctggagttttaggagaaattcagaattccctaacgaacatcatggagcatttccctttacaaagctgagcgaactgt

SEQ ID NO: 39208 - DNA, 110 bp, synthetic construct
  source 1..110: mol_type = other DNA
ctgcttaggaggaggacttgaggtacacgtttattctaaagccattgtgatacagtccagactactgttggattcaccagctgcaaacctttaggctactattttgcctt

SEQ ID NO: 39209 - DNA, 110 bp, synthetic construct
  source 1..110: mol_type = other DNA
tagagggattccttccttgaaatgccatttgtaaccatgtaatcatagcagtaaattctaataatattgatgatggtaatagctaacctggagacccaagtcattttact

SEQ ID NO: 39210 - DNA, 110 bp, synthetic construct
  source 1..110: mol_type = other DNA
ttctaataatattgatgatggtaatagctaacctggagacccaagtcattttactggtattcttatttacttcccacaacaatattgcaaaatacatattattgtcccca

SEQ ID NO: 39211 - DNA, 110 bp, synthetic construct
  source 1..110: mol_type = other DNA
atgaaagcgggggcgggaaccgggaggccagtgcagtgggagaaagaccagaaggaattcactggtctttggaccacaggtcctgcgctccagctgcgtgagccatgtgc

SEQ ID NO: 39212 - DNA, 110 bp, synthetic construct
  source 1..110: mol_type = other DNA
aattcactggtctttggaccacaggtcctgcgctccagctgcgtgagccatgtgcacaaaggactgtgaagtcgtaaaggcgacgagacaggctgcctgcccaccagagc

SEQ ID NO: 39213 - DNA, 110 bp, synthetic construct; identical to SEQ ID NO: 39211
  source 1..110: mol_type = other DNA

SEQ ID NO: 39214 - DNA, 110 bp, synthetic construct; identical to SEQ ID NO: 39212
  source 1..110: mol_type = other DNA

SEQ ID NO: 39215 - DNA, 110 bp, synthetic construct
  source 1..110: mol_type = other DNA
tactataatttctccagactagattccactccttaccttctaaacatgacaccggaatgtccaatggacatactgacctagaaatcctgtacgcatacgtcccaactcaa

SEQ ID NO: 39216 - DNA, 110 bp, synthetic construct
  source 1..110: mol_type = other DNA
caccagctccctccatcaggcatcctggacaacctgctctgaatcctggccccagacacttaggtatgtgtgactttgggctgataactgacttccatgagcttcagttt

SEQ ID NO: 39217 - DNA, 110 bp, synthetic construct
  source 1..110: mol_type = other DNA
ttagtcattgtgatggattttacctacattgccctgtggaacaccctacaggcgtaataaaactaccaggagaaaagagctaacagtgcactaatttgagactgctatat

SEQ ID NO: 39218 - DNA, 110 bp, synthetic construct
  source 1..110: mol_type = other DNA
tccctgagtcccagaggggctgaatgaggctgagaagagtgatgggaattgttcccatgacatttataatagttaaaaaaaaaccccaaaaaacaaaaaacagagacagc

SEQ ID NO: 39219 - DNA, 110 bp, synthetic construct
  source 1..110: mol_type = other DNA
catgacatttataatagttaaaaaaaaaccccaaaaaacaaaaaacagagacagcctaactgtgcaatagggggtgtgatagaaaataaatcataggagttcccgtcgtg

SEQ ID NO: 39220 - DNA, 110 bp, synthetic construct
  source 1..110: mol_type = other DNA
tccccggggactaggacccccgcattcccctcccctctgcttagaacccccttgtcggaagtgggcctagggatttgaggcagctctgtgagagtgctaaagacagagct

SEQ ID NO: 39221 - DNA, 110 bp, synthetic construct
  source 1..110: mol_type = other DNA
cggaagtgggcctagggatttgaggcagctctgtgagagtgctaaagacagagctttctgagggaaaggaggagatggccactgggatcctcagagaaatggggaaaata

SEQ ID NO: 39222 - DNA, 110 bp, synthetic construct
  source 1..110: mol_type = other DNA
ttgtcatgctttgctgcggagcaggcattctcactgcgcagagttttcagctttaggcgtccccctcccaagattctgaaacgggccatgtttcccaaacctgtcttagg

SEQ ID NO: 39223 - DNA, 110 bp, synthetic construct
  source 1..110: mol_type = other DNA
ggcgtccccctcccaagattctgaaacgggccatgtttcccaaacctgtcttagggtgaggctttcaaaaaccgactctgagactagaacagaagtgtgatagtctctcg

SEQ ID NO: 39224 - DNA, 110 bp, synthetic construct
  source 1..110: mol_type = other DNA
gggactgtttgtgtacaatttggatattctgctttatttttaaaaatagagaagctaaacatagacatgaggcatacgtgctgttggtaaaacataggaaatcaagtgtt

SEQ ID NO: 39225 - DNA, 110 bp, synthetic construct
  source 1..110: mol_type = other DNA
taaacatagacatgaggcatacgtgctgttggtaaaacataggaaatcaagtgtttctgtactttgagaccattactgctaatccttagaactgttagcacctgttacta

SEQ ID NO: 39226 - DNA, 110 bp, synthetic construct; identical to SEQ ID NO: 39224
  source 1..110: mol_type = other DNA

SEQ ID NO: 39227 - DNA, 110 bp, synthetic construct; identical to SEQ ID NO: 39225
  source 1..110: mol_type = other DNA

SEQ ID NO: 39228 - DNA, 110 bp, synthetic construct
  source 1..110: mol_type = other DNA
aagtatgtggtcaaatgatttttggcagcagtgcgaagacaagtagctaaggaaaggcagtcttttcaataaatgatggaaaattttgataagcatgcaagggaatgaaa

SEQ ID NO: 39229 - DNA, 110 bp, synthetic construct
  source 1..110: mol_type = other DNA
ggctctaggggagaacttatcccacactttcctccaggcttctggtgtcaccatcaattcctggctgccagctacatcactccctctcagtctctgctgtcacatggcct

SEQ ID NO: 39230 - DNA, 110 bp, synthetic construct
  source 1..110: mol_type = other DNA
ggagttgaattggagctgcagcttcaggcctataccacagccacagcagtgctggatctgtgacacagcttgtggcaaagccggatccttaacccactgagtgaagctag

SEQ ID NO: 39231 - DNA, 110 bp, synthetic construct; identical to SEQ ID NO: 39230
  source 1..110: mol_type = other DNA

SEQ ID NO: 39232 - DNA, 110 bp, synthetic construct
  source 1..110: mol_type = other DNA
gggtgtgtcttctccatcctctatctttgcgcttcccactcctgcatacattggccaaacgaaagggtctccagggaaaccatcagaggcagagtccttagatgaaagga

SEQ ID NO: 39233 - DNA, 110 bp, synthetic construct
  source 1..110: mol_type = other DNA
caaacgaaagggtctccagggaaaccatcagaggcagagtccttagatgaaaggaggctgagtatctgaatgcatgggtcagaacccctccgccaatttacagtggactc

SEQ ID NO: 39234 - DNA, 110 bp, synthetic construct
  source 1..110: mol_type = other DNA
acctgcatctccagtctgtttctgactcctcgaaaggatgtctcgctgtcctgggctgtctccacgatcccttgtccgttctctctccgagttagcttacccgatgagga

SEQ ID NO: 39235 - DNA, 110 bp, synthetic construct
  source 1..110: mol_type = other DNA
ctgtctccacgatcccttgtccgttctctctccgagttagcttacccgatgaggagctctggggcactgtgaagggggtgagatggggctgctcatatgagctatagttt

SEQ ID NO: 39236 - DNA, 110 bp, synthetic construct
  source 1..110: mol_type = other DNA
ttctttgacgtttgcccattttaatccgtgttcatttctcgctctgtgtttgtgtgatgctgtctttgcctccgttgttcctaggttacagtatagccagcatataccca

SEQ ID NO: 39237 - DNA, 110 bp, synthetic construct; identical to SEQ ID NO: 39236
  source 1..110: mol_type = other DNA

SEQ ID NO: 39238 - DNA, 110 bp, synthetic construct
  source 1..110: mol_type = other DNA
aaactctgtacttgagctaactttttttctggcatgcagcagaggggagccaactcttgagctcaggtcccgcagccccatccgacccatccttccactgcctggaaaac

SEQ ID NO: 39239 - DNA, 110 bp, synthetic construct
  source 1..110: mol_type = other DNA
cttgagctcaggtcccgcagccccatccgacccatccttccactgcctggaaaacaggctgcctgtagaactgagcctcaaacgcattgtctggggctcccgcaccctgg

SEQ ID NO: 39240 - DNA, 110 bp, synthetic construct
  source 1..110: mol_type = other DNA
gaatcaaaagattgaaattttggtcctagagtcttcccttcgtattagatagggaagttagataactgctctgagcttcagagttcccgcctgtgtaatggaaaaaaaaa

SEQ ID NO: 39241 - DNA, 110 bp, synthetic construct
  source 1..110: mol_type = other DNA
agttagataactgctctgagcttcagagttcccgcctgtgtaatggaaaaaaaaagaagaccggctctactttctgtgaagtgcaagaataaaatgaaataacgtatgtg

SEQ ID NO: 39242 - DNA, 110 bp, synthetic construct
  source 1..110: mol_type = other DNA
tcttatgtaatcctcgcgatcatctgtggaagacttctgttagccccatttttcagatggggagacggagcgttcagaggttgggttacttacctgagattatacaacta

SEQ ID NO: 39243 - DNA, 110 bp, synthetic construct
  source 1..110: mol_type = other DNA
gatggggagacggagcgttcagaggttgggttacttacctgagattatacaactaggaagggaccagattagggcagcacaaagctcctgtctgaataactgaacgcagt

SEQ ID NO: 39244 - DNA, 110 bp, synthetic construct
  source 1..110: mol_type = other DNA
tcggattcattaaccactgagccacgacgggaactccggttgttggcttttgttcccgctcttaggaggtttgtggcaagcatccttatacatgcatctttatatattta

SEQ ID NO: 39245 - DNA, 110 bp, synthetic construct; identical to SEQ ID NO: 39244
  source 1..110: mol_type = other DNA

SEQ ID NO: 39246 - DNA, 110 bp, synthetic construct
  source 1..110: mol_type = other DNA
aatagcctttggagtctgattttcaataggaggtaaaggggaaattttgcctagttcacccaggtcccactgttctcatctctgccacaactcacacgaccaccctgcac

SEQ ID NO: 39247 - DNA, 110 bp, synthetic construct
  source 1..110: mol_type = other DNA
tcacccaggtcccactgttctcatctctgccacaactcacacgaccaccctgcacaccaacctgctccttgggcagctcctgtcctcaaaaacccttgagctccagaggt

SEQ ID NO: 39248 - DNA, 110 bp, synthetic construct
  source 1..110: mol_type = other DNA
taaaatagaagttatttgtagatttgggatgtatatgattaggtttcgttgttactaagatggacactgggactaacaaatcgtggtacatcattttcaagaaatgtttg

SEQ ID NO: 39249 - DNA, 110 bp, synthetic construct
  source 1..110: mol_type = other DNA
taagatggacactgggactaacaaatcgtggtacatcattttcaagaaatgtttgtgcttttcccttgttcacggtcataagtccttcttttcttttcttttctcttttt

SEQ ID NO: 39250 - DNA, 110 bp, synthetic construct
  source 1..110: mol_type = other DNA
tcattggaggctgacatctaaattcactgtttgttttcttcggtggggtatgtctaacgcttccccccagccactggcagtcacatgacctctcctggtacctcagtttc

SEQ ID NO: 39251 - DNA, 110 bp, synthetic construct
  source 1..110: mol_type = other DNA
aacgcttccccccagccactggcagtcacatgacctctcctggtacctcagtttcacagctcagaaggacagtgactagctccttgagacacacctgcctctgcaaggtg

SEQ ID NO: 39252 - DNA, 110 bp, synthetic construct
  source 1..110: mol_type = other DNA
tttaaggggcaaacatcttccattgcatgtgcgtaactgtgactggtccaaagtcgttttactccttaggttactacctgtggtcgcagcttctatctcctcttctttcc

SEQ ID NO: 39253 - DNA, 110 bp, synthetic construct
  source 1..110: mol_type = other DNA
gttttactccttaggttactacctgtggtcgcagcttctatctcctcttctttccttcattttcccacgacccctccccactctgcgctgtgccccctgtttcatttctt

SEQ ID NO: 39254 - DNA, 110 bp, synthetic construct
  source 1..110: mol_type = other DNA
atctgcttgtgttgctgatgccctcacagagttaggcactgcctgagcccatgaccacctggcactcattttcatattcttagcacctactactccacttggccttctgc

SEQ ID NO: 39255 - DNA, 110 bp, synthetic construct
  source 1..110: mol_type = other DNA
cacctggcactcattttcatattcttagcacctactactccacttggccttctgcaaatgcacaacacctgttacctgaatgactctccagagaggtgagaaaaggtggt

SEQ ID NO: 39256 - DNA, 110 bp, synthetic construct
  source 1..110: mol_type = other DNA
ctagtgtgcccaggacagctcttcccttggtaccactaggcagttctgttctcacccctcagtagctgttgtctggtaagcttagatcatctcaccctgtgtatgtatag

SEQ ID NO: 39257 - DNA, 110 bp, synthetic construct
  source 1..110: mol_type = other DNA
ccctcagtagctgttgtctggtaagcttagatcatctcaccctgtgtatgtatagtctagccctcaactacagaccagtagggactctcacatggagtcctggtgcccag

SEQ ID NO: 39258 - DNA, 110 bp, synthetic construct
  source 1..110: mol_type = other DNA
ttcaggggaattctcctgttcttttaactgggagtggttcttgtgggtcttcattttgcttatatttttcttactctctttagcctgagccttagcgcccagcccctact

SEQ ID NO: 39259 - DNA, 110 bp, synthetic construct; identical to SEQ ID NO: 39258
  source 1..110: mol_type = other DNA

SEQ ID NO: 39260 - DNA, 110 bp, synthetic construct
  source 1..110: mol_type = other DNA
tagtaactgttagtacataaaaaccagtgatcacgagaaagatgttatctcatagctaagcagtgctgcctggacctgatcttctgggtgaaggaacagcaggaccagag

SEQ ID NO: 39261 - DNA, 110 bp, synthetic construct
  source 1..110: mol_type = other DNA
cttctctgtggtttctgaagaatgcgtggtaaagccaggatttaaatgattaccgtgtctctacaggaaccccagaaatcacaacctctataccttatactttttggtat

SEQ ID NO: 39262 - DNA, 110 bp, synthetic construct
  source 1..110: mol_type = other DNA
ggatctggcattgctgagaactgtggtgtaggttgcagatgcagggttggatcctacattgcagtggttgtgatgtaggcccgaagctgcagctcaaattcaatccctag

SEQ ID NO: 39263 - DNA, 110 bp, synthetic construct; identical to SEQ ID NO: 39262
  source 1..110: mol_type = other DNA

SEQ ID NO: 39264 - DNA, 110 bp, synthetic construct
  source 1..110: mol_type = other DNA
cctctgctcttcctcattgcccaacctcatcactgtcctccagcctctgcttgactccccctctccaactaccctttcttcataagctatcagagggtttgctatctcct

SEQ ID NO: 39265 - DNA, 110 bp, synthetic construct
  source 1..110: mol_type = other DNA
ttccttttgcttgaagttgtgaccttgcttcttcttgcattatcttagagtctataggtatgcctttcttacagcaatcctgcacccacataaaaactgcactttcaata

SEQ ID NO: 39266 - DNA, 110 bp, synthetic construct
  source 1..110: mol_type = other DNA
aggtatgcctttcttacagcaatcctgcacccacataaaaactgcactttcaataccagatgaaaaggtattttgcaaaaaagtgcaaggttttcaccctgctggcatat

SEQ ID NO: 39267 - DNA, 110 bp, synthetic construct
  source 1..110: mol_type = other DNA
tgtagtaaagaatttggtctccaaagagaagtctggcctttgtcttggctcagggaggtaacctctacattcttagaatattccatgtgacaaaagcgtctgttattcat

SEQ ID NO: 39268 - DNA, 110 bp, synthetic construct
  source 1..110: mol_type = other DNA
ctttgtgtgggtgaattgtcttgttcagagttgttgactaattcttctaaaattggtttaatttaaatcttcaatttaattggatcagtagctacttcggtatcacagta

SEQ ID NO: 39269 - DNA, 110 bp, synthetic construct
  source 1..110: mol_type = other DNA
aataggattgcagtgcaagcactatttaaaatggcctggtgtttcaaagtgcacaacttgagccaagagacctggatttaaggatttcatagctctaagttctccagaaa

SEQ ID NO: 39270 - DNA, 110 bp, synthetic construct
  source 1..110: mol_type = other DNA
acttgagccaagagacctggatttaaggatttcatagctctaagttctccagaaagtcacttaaccaccaagcctcaggttctccatgtacttgtacagttggggtcaaa

SEQ ID NO: 39271 - DNA, 110 bp, synthetic construct; identical to SEQ ID NO: 39269
  source 1..110: mol_type = other DNA

SEQ ID NO: 39272 - DNA, 110 bp, synthetic construct; identical to SEQ ID NO: 39270
  source 1..110: mol_type = other DNA

SEQ ID NO: 39273 - DNA, 110 bp, synthetic construct
  source 1..110: mol_type = other DNA
aggtcaacgaaggagttcgggagaaggaaaactcggaccgactggagtggatccagacgcacgttcagtgtgaaggtctcactgaggtggggcctgtggggctgagctgc

SEQ ID NO: 39274 - DNA, 110 bp, synthetic construct
  source 1..110: mol_type = other DNA
gacgcacgttcagtgtgaaggtctcactgaggtggggcctgtggggctgagctgcatgctgccgggcaggctctgggtggggaaccaggttcatgccttcccctggtgta

SEQ ID NO: 39275 - DNA, 110 bp, synthetic construct
  source 1..110: mol_type = other DNA
tgaccctggatctcagtgatccctaaagtaccgaaggccatcatgaagcctcctggctacttaccagcagttaccagacaccagacgcatacacgctgcactgctggctg

SEQ ID NO: 39276 - DNA, 110 bp, synthetic construct
  source 1..110: mol_type = other DNA
gcactctctctgcgaggtcaggttccttcttgtgccacagcattcgtagaggatgccaaacactttaagctctgaggggcacatcctgtctgcttctgactgcacgcctc

SEQ ID NO: 39277 - DNA, 110 bp, synthetic construct
  source 1..110: mol_type = other DNA
gaatgcaagccagagtatcagatgtcatgggtatgaggaatttgatcagataccaagggtgggaaaattctggctaaagctatttaacaggattcttgccaaaagtgggc

SEQ ID NO: 39278 - DNA, 110 bp, synthetic construct
  source 1..110: mol_type = other DNA
agggtgggaaaattctggctaaagctatttaacaggattcttgccaaaagtgggctctacaaggatagaaatggaagctgaaggtcaggcctcctggagaagatgcctga

SEQ ID NO: 39279 - DNA, 110 bp, synthetic construct
  source 1..110: mol_type = other DNA
atttttttccatatagattattacagaacattgggtagagtcacctgtgctattcagcaggtctctattgaccatcctttccgtatacaagagtgtgcatatgccagtcc

SEQ ID NO: 39280 - DNA, 110 bp, synthetic construct
  source 1..110: mol_type = other DNA
agcaggtctctattgaccatcctttccgtatacaagagtgtgcatatgccagtcccaaactcccagtccatgcctttggtaaccataaatttgttttcaaagtccatgga

SEQ ID NO: 39281 - DNA, 110 bp, synthetic construct
  source 1..110: mol_type = other DNA
aaattagaattttagcttctgttaggtgttttgattaacaaagcttggtagtaatatgcctttcattgagtgctggatttccaatattactacactgtctccttttagga

SEQ ID NO: 39282 - DNA, 110 bp, synthetic construct
  source 1..110: mol_type = other DNA
actttgctgtttgggggaaaaaaacctagcatatacgtagaagacaagagccaacattttgggagctatacatagtgcctaagtgtttacccagattctctcttgagaat

SEQ ID NO: 39283 - DNA, 110 bp, synthetic construct
  source 1..110: mol_type = other DNA
tctggccggccctcctgaaatccgcctatggttattctagtctagacgtgtctgggtccaggaggcccatcccttttgtggatctaagtctggagctgtggttcttctag

SEQ ID NO: 39284 - DNA, 110 bp, synthetic construct
  source 1..110: mol_type = other DNA
gtccaggaggcccatcccttttgtggatctaagtctggagctgtggttcttctaggctgttcgttcccccggtcacatctcaggcccctgaccctccccgcctggcctgc

SEQ ID NO: 39285 - DNA, 110 bp, synthetic construct
  source 1..110: mol_type = other DNA
cttgcaaatcactcacccgcctgcaagcagctgcctatgatttcttggtgagaatcctgggcagggtgctccagttgatgacaagtggtatcacgacctcccagagcaga

SEQ ID NO: 39286 - DNA, 110 bp, synthetic construct
  source 1..110: mol_type = other DNA
gcagctgcagcttagattcagtcgctagtctggaaacttccacatgctgtgggtgtggccataaataaaaacgaagaaagacgccgacatgtccttcattgcctttttat

SEQ ID NO: 39287 - DNA, 110 bp, synthetic construct
  source 1..110: mol_type = other DNA
tggccataaataaaaacgaagaaagacgccgacatgtccttcattgcctttttattcttactgatgggaaaagccctggcttcctcattcgggggtcccttgacattttc

SEQ ID NO: 39288 - DNA, 110 bp, synthetic construct
  source 1..110: mol_type = other DNA
aaataaatgaagagtaggtagagggtattcaccaaggcccctgcggccactgatgtgaagccagtgtgccaggtgaggcccgggagatggaaggagactgcggcttgaga

SEQ ID NO: 39289 - DNA, 110 bp, synthetic construct
  source 1..110: mol_type = other DNA
tgaagccagtgtgccaggtgaggcccgggagatggaaggagactgcggcttgagagctgtctgtgcaatggcatggacagttttaaaaagaatttatttttggcatttag

SEQ ID NO: 39290 - DNA, 110 bp, synthetic construct
  source 1..110: mol_type = other DNA
ggccacggcatcttatgtttaaccctctcaggcagggcagcccggggaggaacgtcttattgtttctctggcagaggccctggcactccccatgtctgtgttcccctctt

SEQ ID NO: 39291 - DNA, 110 bp, synthetic construct
  source 1..110: mol_type = other DNA
gtctggacgggagcagaggcggtgcatgcgtacaagagtgttggggtggaggtcacgggaggcgagtttgacccgtgggtacggggtcagattcactttatctgattcac

SEQ ID NO: 39292 - DNA, 110 bp, synthetic construct
  source 1..110: mol_type = other DNA
cgggaggcgagtttgacccgtgggtacggggtcagattcactttatctgattcacaaagccaggagtgcggctctgtgctcacctgtgcaagatgccaagcatttcagat

SEQ ID NO: 39293 - DNA, 110 bp, synthetic construct
  source 1..110: mol_type = other DNA
gccttgggtccatggggtaatgcagctttcactgcagtgcaggcccacaatggcaaaggagagtcagggtgcagatgtgttcaataaagtcaaacacgaatgcctcaagc

SEQ ID NO: 39294 - DNA, 110 bp, synthetic construct
  source 1..110: mol_type = other DNA
aaggagagtcagggtgcagatgtgttcaataaagtcaaacacgaatgcctcaagctgacttgagtcgctagaacacttgtctgaacctgtagcagcctttaaaatcctgc

SEQ ID NO: 39295 - DNA, 110 bp, synthetic construct
  source 1..110: mol_type = other DNA
cctgaccgcataagccatctctccgcaaagcccctgtaacaggactgtctgcaggcgctgaagggctgcaattgtgctgtgacggtggaacaccgaggctgaaggttaca

SEQ ID NO: 39296 - DNA, 110 bp, synthetic construct
  source 1..110: mol_type = other DNA
cgctgaagggctgcaattgtgctgtgacggtggaacaccgaggctgaaggttacaaactaacaaacgcgtgtgtagacacatggaacacgccaccctctgcgtctcacac

SEQ ID NO: 39297 - DNA, 110 bp, synthetic construct; identical to SEQ ID NO: 39295
  source 1..110: mol_type = other DNA

SEQ ID NO: 39298 - DNA, 110 bp, synthetic construct; identical to SEQ ID NO: 39296
  source 1..110: mol_type = other DNA

SEQ ID NO: 39299 - DNA, 110 bp, synthetic construct
  source 1..110: mol_type = other DNA
ctctgccacaaatattttcatcagccgtctcacgaacatggcgaggtccagggctctgtctcaggagttattgctatttccatatccccaaagccgaggctgcctgttgt

SEQ ID NO: 39300 - DNA, 110 bp, synthetic construct
  source 1..110: mol_type = other DNA
ctgtctcaggagttattgctatttccatatccccaaagccgaggctgcctgttgtgttcacaaacaaaaggcagcccctcctccagggaacaaattcattcttctcccca

SEQ ID NO: 39301 - DNA, 110 bp, synthetic construct
  source 1..110: mol_type = other DNA
aactcagtaaagaggttgttacaaatatatggggtggttttgaaaggccagagtttctccccccccccaccttttggataaagctgctggctaagtattaaaaggttttt

SEQ ID NO: 39302 - DNA, 110 bp, synthetic construct
  source 1..110: mol_type = other DNA
tctccccccccccaccttttggataaagctgctggctaagtattaaaaggttttttttttttttttcttaaaaaaatttttctttttcaaaaagcaataactggcactag

SEQ ID NO: 39303 - DNA, 110 bp, synthetic construct
  source 1..110: mol_type = other DNA
tgtgtatgtatgtctgtatatatgtgcatatgcagagatcattgctggaaaaatactggagctcccctggcgatgcagcaggttaaggatctggtgttgtcactgcttta

SEQ ID NO: 39304 - DNA, 110 bp, synthetic construct
  source 1..110: mol_type = other DNA
ggacatttaggttgtttccatgtctggaccattgtaaatagtcctgtgatgaacatgcaggtgtatgtatttattttttcagtgaaagttttgtccacatatatgcccaa

SEQ ID NO: 39305 - DNA, 110 bp, synthetic construct; identical to SEQ ID NO: 39304
  source 1..110: mol_type = other DNA

SEQ ID NO: 39306 - DNA, 110 bp, synthetic construct
  source 1..110: mol_type = other DNA
ggttcagtctttgcgctttatttcaattttcaacgacttaattagcaacaactgaacattgtccacaatagcagctttatgtttaagagtcaattaagtgccagacagtg

SEQ ID NO: 39307 - DNA, 110 bp, synthetic construct
  source 1..110: mol_type = other DNA
gctgacctcatttcctccctgcctctttctcattcacagttttccagctgcaccggtggttttgttcatctaatgcacctgcacctcattctcggcactaggtgctcctt

SEQ ID NO: 39308 - DNA, 110 bp, synthetic construct
  source 1..110: mol_type = other DNA
ctgcaagggacctacatttaatttcaacagactgtggagcaatttattccctagggcattgtcaaaataatagaataatcagccagcaattagtggaggcttatagctag

SEQ ID NO: 39309 - DNA, 110 bp, synthetic construct
  source 1..110: mol_type = other DNA
gcattgtcaaaataatagaataatcagccagcaattagtggaggcttatagctaggcatgatctcatggaggcagatgacagagagatcagcaaaagagacaaaatgatc

SEQ ID NO: 39310 - DNA, 110 bp, synthetic construct
  source 1..110: mol_type = other DNA
agatattagaataaaagatgttgccagtgttcttagctcttaggaaattacaacggtttcaggagctctgcgctgggaatgggaggcagagaccaacatgcattttgtat

SEQ ID NO: 39311 - DNA, 110 bp, synthetic construct
  source 1..110: mol_type = other DNA
gggaggctggcagggctctgggtggtttcaggggtgtgaacctctggtcccatcgcagaagccatggtgagcactcctgcatcgtcttcatcccagtggtacccctgctg

SEQ ID NO: 39312 - DNA, 110 bp, synthetic construct
  source 1..110: mol_type = other DNA
cagaagccatggtgagcactcctgcatcgtcttcatcccagtggtacccctgctgggcgcagtcttcataggggacatagcaagtgtctggatgtagcagatgctgaaga

SEQ ID NO: 39313 - DNA, 110 bp, synthetic construct
  source 1..110: mol_type = other DNA
catgcgtagagcatcacatggacggagaccagagacttgctagacccatgatccaaagagcaccctggttttcttttttgacccaaatgtacagaaaatcttcaagtgac

SEQ ID NO: 39314 - DNA, 110 bp, synthetic construct
  source 1..110: mol_type = other DNA
caggaagagaaggaaaaaggatccggtagcaggttggcatgttggatctgagggcctggtgatgccatttagttcatgctcctggtacattgttctggggactgtggctc

SEQ ID NO: 39315 - DNA, 110 bp, synthetic construct
  source 1..110: mol_type = other DNA
ctggtgatgccatttagttcatgctcctggtacattgttctggggactgtggctcaggcaggggctgccaagtaacccgacacacagaatagatggtggagcaggacgca

SEQ ID NO: 39316 - DNA, 110 bp, synthetic construct
  source 1..110: mol_type = other DNA
gatgaaagcagatgcctcttgtttagattattgttagaacgcacgagggtctgtttctcctggaaatcccttgagggagagagagcaggaggaggagctggtgccatgac

SEQ ID NO: 39317 - DNA, 110 bp, synthetic construct
  source 1..110: mol_type = other DNA
tctcctggaaatcccttgagggagagagagcaggaggaggagctggtgccatgaccgccccatccctgatctgacattttggcagtatttcttactcacccagagtttgt

SEQ ID NO: 39318 - DNA, 110 bp, synthetic construct
  source 1..110: mol_type = other DNA
acaaacaaaccagcagtgttcttgttttcccagagcttattattcaggaagaagtcaggcatttcataatttattattgcacttatattaatttctagggttgctggaac

SEQ ID NO: 39319 - DNA, 110 bp, synthetic construct
  source 1..110: mol_type = other DNA
tttgcttggagaaagtcctaagaacatcccaagtgccctttttaaagtaagctgtaaagaagaattaggtggggaggtgaacagaatccatgctctgttatatcttgcac

SEQ ID NO: 39320 - DNA, 110 bp, synthetic construct
  source 1..110: mol_type = other DNA
ctgctgccccctagaaataaatgtctactgactggagaggtgcagggtaaggagaggcagtattaggacaacagcttgtatgcaggttcttgtcctcctctggggactgt

SEQ ID NO: 39321 - DNA, 110 bp, synthetic construct
  source 1..110: mol_type = other DNA
ggcagtattaggacaacagcttgtatgcaggttcttgtcctcctctggggactgtttcccccgctccattagcgcaggtgaggcatatggaaattcccaggctaggggtc

SEQ ID NO: 39322 - DNA, 110 bp, synthetic construct; identical to SEQ ID NO: 39320
  source 1..110: mol_type = other DNA

SEQ ID NO: 39323 - DNA, 110 bp, synthetic construct; identical to SEQ ID NO: 39321
  source 1..110: mol_type = other DNA

SEQ ID NO: 39324 - DNA, 110 bp, synthetic construct
  source 1..110: mol_type = other DNA
gtacagaaaaccacaatagaagctcttcctcatattttccccttactatctctgcctcttgaacaatgctggggcttcactgtatggccatgtatgacatgctgaacctc

SEQ ID NO: 39325 - DNA, 110 bp, synthetic construct
  source 1..110: mol_type = other DNA
ctcttgaacaatgctggggcttcactgtatggccatgtatgacatgctgaacctcctgtttctagggatctctgtgtataaaacttcttccttccattgagtatctctgt

SEQ ID NO: 39326 - DNA, 110 bp, synthetic construct
  source 1..110: mol_type = other DNA
gtattgatggctgctgactgatcagaatggtgatggctgaagactgggatgactgtggcaatttttaaagataagacgacaatgaattttccatatcagctaactcttcc

SEQ ID NO: 39327 - DNA, 110 bp, synthetic construct
  source 1..110: mol_type = other DNA
tggcaatttttaaagataagacgacaatgaattttccatatcagctaactcttcctttcacaagtgatagttctgtagcatgtaatgttatttggtactattttacccaa

SEQ ID NO: 39328 - DNA, 110 bp, synthetic construct
  source 1..110: mol_type = other DNA
ccacatgctgcacatgcagccctaaaaatcacacacgcgtgaaaaagctaactttccccaaattataaaaatcaatttttttttttaatggccacacctgtggcatatgg

SEQ ID NO: 39329 - DNA, 110 bp, synthetic construct; identical to SEQ ID NO: 39328
  source 1..110: mol_type = other DNA

SEQ ID NO: 39330 - DNA, 110 bp, synthetic construct
  source 1..110: mol_type = other DNA
tggtactcttatgtttgtagaaagtattattcgcagtagccaagatatggtgacaacctaggtgcttgtcagtggatgaatgagtaaaggaaatgtcacacacacacaga

SEQ ID NO: 39331 - DNA, 110 bp, synthetic construct
  source 1..110: mol_type = other DNA
acctaggtgcttgtcagtggatgaatgagtaaaggaaatgtcacacacacacagaggagcattttactaccttaaaaaaaataaggaagttcttccacttgcgattatgt

SEQ ID NO: 39332 - DNA, 110 bp, synthetic construct
  source 1..110: mol_type = other DNA
ctaacaactattgattccaatgccagtcagatttcagtcaggcttcatagcatgtaacaatcacagggtgaggggtggtcacggagtttttaaaacagaacacagtcaaa

SEQ ID NO: 39333 - DNA, 110 bp, synthetic construct
  source 1..110: mol_type = other DNA
aacaatcacagggtgaggggtggtcacggagtttttaaaacagaacacagtcaaatcaagtatttgttatttggatgacattacttcattcatttcttcattcaggaatt

SEQ ID NO: 39334 - DNA, 110 bp, synthetic construct
  source 1..110: mol_type = other DNA
cactgatgcctacacagtgtctagctctgtgtcctcttcaggttaggcgtttacgaaagtgctgtattggacttaaattgaatcagtcatttcctgagttgctcttatag

SEQ ID NO: 39335 - DNA, 110 bp, synthetic construct
  source 1..110: mol_type = other DNA
tctgacatctgactcagtctactcagggggcccatgcagggcagctaagcatgcggcaattttgtactttagccataatgaagatcatggcagaatgaattccagacaca

SEQ ID NO: 39336 - DNA, 110 bp, synthetic construct
  source 1..110: mol_type = other DNA
tagttttccatgtctcttgcatgcactgtgtaggccagctggcaccatcttcctctgaagagtgaaccttgagatatgacctctgcattatggcccacatgtctctctac

SEQ ID NO: 39337 - DNA, 110 bp, synthetic construct
  source 1..110: mol_type = other DNA
atatgccacaggtatggcgctaaaaagacaaaagatgaccaaaaaaaacccaattttaacagaaggtaaaattcattgccttcattgggcaggttgaatctcagaccttt

SEQ ID NO: 39338 - DNA, 110 bp, synthetic construct; identical to SEQ ID NO: 39337
  source 1..110: mol_type = other DNA

SEQ ID NO: 39339 - DNA, 110 bp, synthetic construct
  source 1..110: mol_type = other DNA
tgtttaaatttcagttctgtcaattgctttatttattaattttttggctgcacctacaacatgtcaatgtttctgtgccaggacttgaacctgcacaacagcaatgacct

SEQ ID NO: 39340 - DNA, 110 bp, synthetic construct
  source 1..110: mol_type = other DNA
gctttatttattaattttttggctgcacctacaacatgtcaatgtttctgtgccaggacttgaacctgcacaacagcaatgacctgagccacagcagtgacaatgctaga

SEQ ID NO: 39341 - DNA, 110 bp, synthetic construct
  source 1..110: mol_type = other DNA
ggaacagcatgaagaagaggcagagggatagagataaaatgtagtctagacaagtaattggggcactataccatttgggacttatcgaatacaagtatgacttcgccgtt

SEQ ID NO: 39342 - DNA, 110 bp, synthetic construct
  source 1..110: mol_type = other DNA
aattggggcactataccatttgggacttatcgaatacaagtatgacttcgccgtttgttctatgtgtcgtgaacaaccgttagagggttatgagcaggaaatctcagtgc

SEQ ID NO: 39343 - DNA, 110 bp, synthetic construct
  source 1..110: mol_type = other DNA
gtgtttgactcagtggttaccaatagcaatggtctctgccccttacactaatgatgagacatcacagggcctgggctggtctactgaatgccaagtgtacctgagctttt

SEQ ID NO: 39344 - DNA, 110 bp, synthetic construct
  source 1..110: mol_type = other DNA
taaacgagaacgcagtcctcattaagtatgagcctttgtgggaaagaaaagaagctagagacgtccatgcagggtttgtaacagcggagaataatgctgaggttataaac

SEQ ID NO: 39345 - DNA, 110 bp, synthetic construct
  source 1..110: mol_type = other DNA
agcactcatagccaaacgagttgagaatatcccactggcacacgttttactttgcagcagctaaggggagcattctgccaatggcctggtagggggagggacctctggaa

SEQ ID NO: 39346 - DNA, 110 bp, synthetic construct
  source 1..110: mol_type = other DNA
gctccatgttacagtcagctggagtgcttaaaaactgttgatgcttggctcccatttctagagagtctcaaataaattggtataggttgtggcctgagcccattgtttgg

SEQ ID NO: 39347 - DNA, 110 bp, synthetic construct
  source 1..110: mol_type = other DNA
ttctagagagtctcaaataaattggtataggttgtggcctgagcccattgtttggaataccccaggtaattccaaaatgcagctaagttaaataactacataatcccagg

SEQ ID NO: 39348 - DNA, 110 bp, synthetic construct
  source 1..110: mol_type = other DNA
agcattcaatccaaagtttaacgatgactatcattttgttgatgtttactgaaggccaaggatacaagggtgtatatacttgtgccaacacaccctatgacaccggtatc

SEQ ID NO: 39349 - DNA, 110 bp, synthetic construct
  source 1..110: mol_type = other DNA
ccaaggatacaagggtgtatatacttgtgccaacacaccctatgacaccggtatcattagcttccttgtttcacagatgagtcaactcaactaaggagaagagaagtaat

SEQ ID NO: 39350 - DNA, 110 bp, synthetic construct
  source 1..110: mol_type = other DNA
ctgtgcttggcttctcctctgaaggagagagatatatagtccctctggtgacttgttgcaacagatttcaaactcagctggacttaaccctgggaattaaaaatattgcc

SEQ ID NO: 39351 - DNA, 110 bp, synthetic construct
  source 1..110: mol_type = other DNA
ttgcaacagatttcaaactcagctggacttaaccctgggaattaaaaatattgcctgagatcgggagcccagtgaaaagagcaactccagatactggcatgtaagcaagc

SEQ ID NO: 39352 - DNA, 110 bp, synthetic construct
  source 1..110: mol_type = other DNA
aaagaataggaatccagcacacctgacttaagatacttaacctttttctacatattgtttactgggctaataagcccctccaaaaaccacagagagccttctttgggtct

SEQ ID NO: 39353 - DNA, 110 bp, synthetic construct
  source 1..110: mol_type = other DNA
ccatactgcttttcctaaaatattctctcagtggaattccaacttttcagccacggaaacccagcctgtgattctcagttcatcattttcctccatgatcaggagatgca

SEQ ID NO: 39354 - DNA, 110 bp, synthetic construct
  source 1..110: mol_type = other DNA
gatccatctttcagggctccttgctttgcacttctattattgtttcatgaaactttaaaactttccaccttccttcattgtattcaactttaaataaattcagagtgtca

SEQ ID NO: 39355 - DNA, 110 bp, synthetic construct; identical to SEQ ID NO: 39354
  source 1..110: mol_type = other DNA

SEQ ID NO: 39356 - DNA, 110 bp, synthetic construct
  source 1..110: mol_type = other DNA
cttgtttctgtcggagattaagagagcaccacaaatcattacctgcttccgccatggctcccgagtcttggagctgtgccatttcccagtcgctgcctccacttctattc

SEQ ID NO: 39357 - DNA, 110 bp, synthetic construct
  source 1..110: mol_type = other DNA
gatgactcagagtggccagtcaaaaggactccaacccagcgtatttcccaaagcctcccaatgacttgctaggtcaccaggataaaatgcttacttttcagttttcagct

SEQ ID NO: 39358 - DNA, 110 bp, synthetic construct
  source 1..110: mol_type = other DNA
tcccaatgacttgctaggtcaccaggataaaatgcttacttttcagttttcagcttcttctttaccaataatgggcattaaatccgaaatatttttccaggatatattat

SEQ ID NO: 39359 - DNA, 110 bp, synthetic construct
  source 1..110: mol_type = other DNA
acagtgtttcccagtgcttcatacatgctcttggataagtctgcccccagtgggaattccatctccacctctatcttgggcattgtctccataaagctccactgcttttc

SEQ ID NO: 39360 - DNA, 110 bp, synthetic construct
  source 1..110: mol_type = other DNA
attccatctccacctctatcttgggcattgtctccataaagctccactgcttttcccctaaaaactgtggggttccttagggtcatgtctggggcctgtggaccccatga

SEQ ID NO: 39361 - DNA, 110 bp, synthetic construct
  source 1..110: mol_type = other DNA
acacctagcactgggaatctcggtgtctaaacacgatcctccactgaaagaaaccagaactcctttgagaaacagctgaatccagggctaaggcagaggaagtgctagat

SEQ ID NO: 39362 - DNA, 110 bp, synthetic construct
  source 1..110: mol_type = other DNA
agaactcctttgagaaacagctgaatccagggctaaggcagaggaagtgctagatgaggccagagcatctttctgggccagaaaacagcgcgatgctcaaggaacaacag

SEQ ID NO: 39363 - DNA, 110 bp, synthetic construct
  source 1..110: mol_type = other DNA
ataaggacaccacccagcagaagcagagttcagggaggcttgacggtagaagtccataagggtggttgtgaacagtctgatgggtattcctgaggcctgtgtttttcttt

SEQ ID NO: 39364 - DNA, 110 bp, synthetic construct
  source 1..110: mol_type = other DNA
ataagggtggttgtgaacagtctgatgggtattcctgaggcctgtgtttttctttcagacagagcttcaaagagaaaaaaaaagggtgggtaatacatcaataagcacac

SEQ ID NO: 39365 - DNA, 110 bp, synthetic construct
  source 1..110: mol_type = other DNA
tgagcaccacactctcttacagtgatccctcccacagtccatcttcaacctcacggagcttttcacacgagcacctcgtactctctatggtctcactcccatcattactt

SEQ ID NO: 39366 - DNA, 110 bp, synthetic construct
  source 1..110: mol_type = other DNA
ccggattctcagcatctcatccaccagttgaggtggggaaagcagaggctgacatgccagaggtccaacgacctaccttcccggccagcaccaagcactgagggaatcag

SEQ ID NO: 39367 - DNA, 110 bp, synthetic construct
  source 1..110: mol_type = other DNA
gaccagtttcaaagaataactgacaagatcttcccaacgccccaaaaagttccttgtagactcccatcacctcacctactctcagccaccttgacattcctgcccaagct

SEQ ID NO: 39368 - DNA, 110 bp, synthetic construct
  source 1..110: mol_type = other DNA
gtagactcccatcacctcacctactctcagccaccttgacattcctgcccaagctgggtactgagtgggaggggaaccaggacatagttcctgatctaggggaggttcca

SEQ ID NO: 39369 - DNA, 110 bp, synthetic construct
  source 1..110: mol_type = other DNA
taaccactgcgccacgacgggaactccaagattaatttttaaagttcctataattctttgtgtttttttttgtctttttaggtccacacccacaacatatgcaagttccc

SEQ ID NO: 39370 - DNA, 110 bp, synthetic construct; identical to SEQ ID NO: 39369
  source 1..110: mol_type = other DNA

SEQ ID NO: 39371 - DNA, 110 bp, synthetic construct
  source 1..110: mol_type = other DNA
caagtttgaaaacacgtaaattaaaggcacattaacaaaataaagtccaccaatgttaagaacagagccaaaataccataaaggggagggaaaaaagcaaatgttttgaa

SEQ ID NO: 39372 - DNA, 110 bp, synthetic construct
  source 1..110: mol_type = other DNA
ttaagaacagagccaaaataccataaaggggagggaaaaaagcaaatgttttgaagtgtgaacagaaattgtgtcagtcagaaaatgcatttatgtattcattattcagt

SEQ ID NO: 39373 - DNA, 110 bp, synthetic construct
  source 1..110: mol_type = other DNA
agggcaaggtcacactggataaaagcatgtgagaacggaaatactgctgtgacgatctttggataacaccacataacacagctttcactctggcacaataactcacatca

SEQ ID NO: 39374 - DNA, 110 bp, synthetic construct
  source 1..110: mol_type = other DNA
ggctccagttaatagtgcacattagtgagtactagctaatacgtttctgcaggatgagtggtaacctgacggaacaagactggaggatctgttacgcaagaagtctgaag

SEQ ID NO: 39375 - DNA, 110 bp, synthetic construct
  source 1..110: mol_type = other DNA
attacacgattatatgttaaatgccacttccttaaccactatgcaacactgctgctgacacaggtgtagcttaggacatgcatgggattcaggggctcccctgggcacag

SEQ ID NO: 39376 - DNA, 110 bp, synthetic construct
  source 1..110: mol_type = other DNA
tgacacaggtgtagcttaggacatgcatgggattcaggggctcccctgggcacagtgggaccaggatagcaagacccgcttcttacttgatgggctagtgagaaggcagt

SEQ ID NO: 39377 - DNA, 110 bp, synthetic construct
  source 1..110: mol_type = other DNA
tgctcttcaaacttctattattttgtaggcaacaaatacatggcttcaggaagcatctaggaatcttccttatgcccagaatttacaagatcatctcagtggcctccaag

SEQ ID NO: 39378 - DNA, 110 bp, synthetic construct
  source 1..110: mol_type = other DNA
tctaggaatcttccttatgcccagaatttacaagatcatctcagtggcctccaagagttgtacctccagaaaatgcaactgccacacatccacattccagaaaagctctt

SEQ ID NO: 39379 - DNA, 110 bp, synthetic construct
  source 1..110: mol_type = other DNA
agcaagaccactaagcccttgtcacacatgccagctgttatgcagttatgtacgcttggcaaagactatctctgaacgcatgcttctgggctccagagagaaatattttt

SEQ ID NO: 39380 - DNA, 110 bp, synthetic construct
  source 1..110: mol_type = other DNA
atgcacagaacatcaaatagctggacatgaaagggctgaggaggatgcttgctagagaggcacttagcctgaaaaacctgaaaccatccacttgactgagggccgctaac

SEQ ID NO: 39381 - DNA, 110 bp, synthetic construct
  source 1..110: mol_type = other DNA
ctagaattattagaaaacaaatccaatttcctcttggacttaggtgtccatttgttgagcccagcctgtactagtcaccatactcaatgctaaatgtgcattacctcctt

SEQ ID NO: 39382 - DNA, 110 bp, synthetic construct
  source 1..110: mol_type = other DNA
tgagcccagcctgtactagtcaccatactcaatgctaaatgtgcattacctcctttaatcctcatcataagcctatgaggaacctactctctgatgcgcattttgcagat

SEQ ID NO: 39383 - DNA, 110 bp, synthetic construct
  source 1..110: mol_type = other DNA
aaccttcccaactcagtcagacaatagaaatgtgctttaccataggccaggatatagtgatctggagctgattcagcccagctcaagctaaacctaggtcacaggtcttt

SEQ ID NO: 39384 - DNA, 110 bp, synthetic construct
  source 1..110: mol_type = other DNA
aatgcaggttttggggtcccaccccagaccttctgaaccagaaactctgtgggtggggcattctgtgtattaagaaaccctccaggggattttgatatgcacagcacaac

SEQ ID NO: 39385 - DNA, 110 bp, synthetic construct
  source 1..110: mol_type = other DNA
gggcattctgtgtattaagaaaccctccaggggattttgatatgcacagcacaactgtggctgttgaaattagtggcttagagtgaatgtaggtgaagttctttggattt

SEQ ID NO: 39386 - DNA, 110 bp, synthetic construct
  source 1..110: mol_type = other DNA
gtgaatagtgctgcaatgaacatgcgggattagttttccttttcttaaaaaaagctttcagtgctgtcaattgatattaacagcattttctattggtttatttttacatt

SEQ ID NO: 39387 - DNA, 110 bp, synthetic construct; identical to SEQ ID NO: 39386
  source 1..110: mol_type = other DNA

SEQ ID NO: 39388 - DNA, 110 bp, synthetic construct
  source 1..110: mol_type = other DNA
aactgtgtgagggagaaaatgaaagggccctggcactggcttggcatagcaggcgccaaataagtgtttgttaattacatgacatttccaccttgaggccaccttggggt

SEQ ID NO: 39389 - DNA, 110 bp, synthetic construct
  source 1..110: mol_type = other DNA
gccctgggacttggggtcagaagaaaggaggagagggcacctgggagagagatctgcacccagagagggggttcagtagctctctaagaaggaaacttggggtgacgaag

SEQ ID NO: 39390 - DNA, 110 bp, synthetic construct
  source 1..110: mol_type = other DNA
tgtttcagatttacttggctccgaagaaacccttaggtgtttaaacaagtgatgtggaaaaggcagcttttccatttcctgctgctgttatgcaaatatcagcatggtgc

SEQ ID NO: 39391 - DNA, 110 bp, synthetic construct
  source 1..110: mol_type = other DNA
ccgagccctgtcccagctgctcccgcaagtcccctccagaagcaaagccaaagccattaacaaaacagcctgcctggagaggtggggcttttcatgtgaaacgtggagca

SEQ ID NO: 39392 - DNA, 110 bp, synthetic construct
  source 1..110: mol_type = other DNA
attaacaaaacagcctgcctggagaggtggggcttttcatgtgaaacgtggagcatttagccaatatcacaggggggaccacccctccccatcccctgcctgacctctga

SEQ ID NO: 39393 - DNA, 110 bp, synthetic construct
  source 1..110: mol_type = other DNA
cagggtccagagaaaggctatttgtcacaggactcacagccctgtgagctctgtagggaaagacaaatggcccatttgggttggagactttcagggatggtcaatgtcta

SEQ ID NO: 39394 - DNA, 110 bp, synthetic construct
  source 1..110: mol_type = other DNA
gggaaagacaaatggcccatttgggttggagactttcagggatggtcaatgtctaagggggtctgatcccttctctgggggtggttaaggtatttcctgggatagcagac

SEQ ID NO: 39395 - DNA, 110 bp, synthetic construct
  source 1..110: mol_type = other DNA
ctgcgtgccagacccagctgcccgttgctgttcatcctttaattacccggtgggagctaaagggcatgtctggcccaggaaccgctgcttcctccaaagcaggttgtctg

SEQ ID NO: 39396 - DNA, 110 bp, synthetic construct
  source 1..110: mol_type = other DNA
gctaaagggcatgtctggcccaggaaccgctgcttcctccaaagcaggttgtctgaaggagttacctgcctctgccagccggggcagagggggaggtggccagctggcag

SEQ ID NO: 39397 - DNA, 110 bp, synthetic construct
  source 1..110: mol_type = other DNA
aagaggctgtgttggacttggctgggaaacatcatttttcttgactcaagaaaagtgtgtcagagaggctaaaagtagaagatggttctcacccaagagcgctttgttcc

SEQ ID NO: 39398 - DNA, 110 bp, synthetic construct
  source 1..110: mol_type = other DNA
tgtgtcagagaggctaaaagtagaagatggttctcacccaagagcgctttgttccccagaggccgggccccacagcaatataaagaagctgtatctcgcatccacacatc

SEQ ID NO: 39399 - DNA, 110 bp, synthetic construct
  source 1..110: mol_type = other DNA
tgtggccctaaaaagcaaaataaaaaggggggagggttacaaatggggcctggcacacggtaagtacctggaaactctcagccgtcattcagtccttcccaagaagggag

SEQ ID NO: 39400 - DNA, 110 bp, synthetic construct
  source 1..110: mol_type = other DNA
cacggtaagtacctggaaactctcagccgtcattcagtccttcccaagaagggaggggtcgtccagcctctgtttgtcccacgccttccagcaacatgtgtgcacacaag

SEQ ID NO: 39401 - DNA, 110 bp, synthetic construct
  source 1..110: mol_type = other DNA
gcagagagcagccccgataacccagctgcctccctgccacagagataaaggagccactcgaactaaaggatgtgggccatcttctctctctctcttttttcagggccgca

SEQ ID NO: 39402 - DNA, 110 bp, synthetic construct
  source 1..110: mol_type = other DNA
tgctggatttataacccactcaccacagcaggaactcccaggtcttctttttttatctcttttgttttattgagctctctaagtaacaaacttttgaactgaatgattat

SEQ ID NO: 39403 - DNA, 110 bp, synthetic construct
  source 1..110: mol_type = other DNA
gggggcagataggatttctgagctgggtctccagggtgctcctggttttcaggcgctttcaagacatgggcatctggcttctccttcgctcgtgaaggtcgtgtcttctg

SEQ ID NO: 39404 - DNA, 110 bp, synthetic construct
  source 1..110: mol_type = other DNA
tgcttcctgtttcatccattttggtcacaaaggaccacttggacagggcgtgcaggaggcgctgctgggccagggctgccccagcaagccctgaggctattcctgggcac

SEQ ID NO: 39405 - DNA, 110 bp, synthetic construct
  source 1..110: mol_type = other DNA
gccagctccctaccggcttaagtcctggctttgccagttgctggcagggtggctatttcaaatgcttctcctctctaagctctggtgtcgccatctataaaatggaaatt

SEQ ID NO: 39406 - DNA, 110 bp, synthetic construct
  source 1..110: mol_type = other DNA
tttcaaatgcttctcctctctaagctctggtgtcgccatctataaaatggaaatttaacctgtcaaatgtgccaacagtttgatggactttcagcattcattatccgctc

SEQ ID NO: 39407 - DNA, 110 bp, synthetic construct
  source 1..110: mol_type = other DNA
ccacacagccacgtggacacctccaggcgccttactcatgtcctttccaagctgccgcagcaggtctctgcatttttgcttccaggtttcctctgaagctacagaaaacc

SEQ ID NO: 39408 - DNA, 110 bp, synthetic construct
  source 1..110: mol_type = other DNA
cgcagcaggtctctgcatttttgcttccaggtttcctctgaagctacagaaaaccaggcaccacccagaagtggagggtgcttaatggtctcaggccacaccctcaacac

SEQ ID NO: 39409 - DNA, 110 bp, synthetic construct
  source 1..110: mol_type = other DNA
gtgccccccccaacccctgcctccagggaccactcctgaccatctggagaggcacgcatcattagggtggagtaaggcctgggaaggatggctggtcagagagcctggat

SEQ ID NO: 39410 - DNA, 110 bp, synthetic construct
  source 1..110: mol_type = other DNA
ctacgtggagacctatggggtcattgagaagctttcgtctagattccaggaaaccttttgtggtaagtctgcccttccaactgggaaggaggttagagtcggatattgtg

SEQ ID NO: 39411 - DNA, 110 bp, synthetic construct
  source 1..110: mol_type = other DNA
ttttgtggtaagtctgcccttccaactgggaaggaggttagagtcggatattgtgtatccaaagaaaaaatgagatttcttcttcttcttcttcttcttccttcttcttc

SEQ ID NO: 39412 - DNA, 110 bp, synthetic construct; identical to SEQ ID NO: 39410
  source 1..110: mol_type = other DNA

SEQ ID NO: 39413 - DNA, 110 bp, synthetic construct; identical to SEQ ID NO: 39411
  source 1..110: mol_type = other DNA

SEQ ID NO: 39414 - DNA, 110 bp, synthetic construct
  source 1..110: mol_type = other DNA
ggatatggatcccccccgaaggatgcagagactgtcaaggcgtgtggggggaggggcagaaaattttaaaggaatcaatttccgaatccttcactctcttaatctgatct

SEQ ID NO: 39415 - DNA, 110 bp, synthetic construct
  source 1..110: mol_type = other DNA
gcagaaaattttaaaggaatcaatttccgaatccttcactctcttaatctgatctgcctgaaatgcaacttgggatcagctaccattctcttttcccatctctcacttca

SEQ ID NO: 39416 - DNA, 110 bp, synthetic construct
  source 1..110: mol_type = other DNA
ggtgcggggtctccgctaggtgggagtagcctgggttgtctgatctcaccactcaagggtacctcgggcattcgtttagtttcccgaagggcggtgaagggagtatcctg

SEQ ID NO: 39417 - DNA, 110 bp, synthetic construct
  source 1..110: mol_type = other DNA
agggtacctcgggcattcgtttagtttcccgaagggcggtgaagggagtatcctggcccgcggcccctcgcgttcctctgggacacccaccggggagtcagagcacgggg

SEQ ID NO: 39418 - DNA, 110 bp, synthetic construct
  source 1..110: mol_type = other DNA
accaacctctaatgtgggatggcaaagcccctgagccatctcctggtggcagaacagctttctccttggcctgtccccatgctgcccactcgggttaatgtttccttacc

SEQ ID NO: 39419 - DNA, 110 bp, synthetic construct
  source 1..110: mol_type = other DNA
agctttctccttggcctgtccccatgctgcccactcgggttaatgtttccttacccgagttgtagcagaatggcattgacctgggtcaagagtggacaaatagtagactt

SEQ ID NO: 39420 - DNA, 110 bp, synthetic construct
  source 1..110: mol_type = other DNA
agagaagataatggatgtcagtaaaaatgttgcacataaatccagaatcctgccatgtgcagtatgtcacagtgttacctggtcttgtgtagtgagtgtgagcgtgtgca

SEQ ID NO: 39421 - DNA, 110 bp, synthetic construct
  source 1..110: mol_type = other DNA
tgtgcagtatgtcacagtgttacctggtcttgtgtagtgagtgtgagcgtgtgcacctgtggcttctgggaaggctccaaggccaaggtctgtctctctctttagtcttc

SEQ ID NO: 39422 - DNA, 110 bp, synthetic construct
  source 1..110: mol_type = other DNA
gaactgtgacctacaccacagctgcaaccatgctggatccttaacccactgcaccaggccggggagcgaaccggcgccctcaaagagataatctggatcattaaccccct

SEQ ID NO: 39423 - DNA, 110 bp, synthetic construct
  source 1..110: mol_type = other DNA
aggccggggagcgaaccggcgccctcaaagagataatctggatcattaaccccctgtgccacagtggggactccctatcttctaatctttttcaagtgcatccctttctt

SEQ ID NO: 39424 - DNA, 110 bp, synthetic construct
  source 1..110: mol_type = other DNA
ggaccttgtcttttggaattctgcattttttccttattcacagcagacccgacatctctagaacttggtttttcttggaaggattgcctgtgagaatgggcttttgtttg

SEQ ID NO: 39425 - DNA, 110 bp, synthetic construct
  source 1..110: mol_type = other DNA
ctctagaacttggtttttcttggaaggattgcctgtgagaatgggcttttgtttggatttctttctccctggaggggcaggtgggggagctgggagccagcaggttaagg

SEQ ID NO: 39426 - DNA, 110 bp, synthetic construct
  source 1..110: mol_type = other DNA
agaaaagaagataatttaaaaatgatcttgcccccagctttagaaaagcttgtgattctttttccccatgtagaaggcatgttgagagaagacctggtctcctgggagtt

SEQ ID NO: 39427 - DNA, 110 bp, synthetic construct
  source 1..110: mol_type = other DNA
atctatgctcgtctgtaagattaggccaatgaagtaagtttatacaggcaagtgtctgcatgggagctgggaccctagagatggtccagtccaaacctctcttctgagag

SEQ ID NO: 39428 - DNA, 110 bp, synthetic construct
  source 1..110: mol_type = other DNA
ctgcatgggagctgggaccctagagatggtccagtccaaacctctcttctgagagcggggaaaagtgaggttcagagaactaaacatttccttgtgcgggtgtggaggaa

SEQ ID NO: 39429 - DNA, 110 bp, synthetic construct
  source 1..110: mol_type = other DNA
ctagccagctccctaaaatgtgccctattctagtctacactctctcttctgttttagtccattctgctgagagggccatggaagggctgatcccactgatgcctggaatt

SEQ ID NO: 39430 - DNA, 110 bp, synthetic construct
  source 1..110: mol_type = other DNA
agtccattctgctgagagggccatggaagggctgatcccactgatgcctggaattgctctttcctttgacacggtgcccttctagcccatagtaaccaagttttctttta

SEQ ID NO: 39431 - DNA, 110 bp, synthetic construct
  source 1..110: mol_type = other DNA
aaagaggctgagcccactctggagttcatgattctgtatgtccagagtggggcccaagagtttgcatttctagcaaggtctcaggtggtactgatgctactggtctgggg

SEQ ID NO: 39432 - DNA, 110 bp, synthetic construct
  source 1..110: mol_type = other DNA
aagagtttgcatttctagcaaggtctcaggtggtactgatgctactggtctggggaccacactttgagaccctctgatgtagaagtggattggaggaggtgaaaactgga

SEQ ID NO: 39433 - DNA, 110 bp, synthetic construct
  source 1..110: mol_type = other DNA
acattctctgacatctaccttacaaatgtttttgggcattcatttgatcagttaatcgatcttggctccagctctttgggggtattgtatttttgttaagcctgccatgg

SEQ ID NO: 39434 - DNA, 110 bp, synthetic construct
  source 1..110: mol_type = other DNA
taccacaacacctgggcttatttccaccgcccgtatcatgctgtaattaccggtgccccccccattctagattgtgtctcactgcatccggaatgtctagtgcaattcct

SEQ ID NO: 39435 - DNA, 110 bp, synthetic construct
  source 1..110: mol_type = other DNA
gggggagagggagggtgaggaagggagacaagctgggcaaaacttcggagcattagtgacaggtccggggcgttcaccagactgttgtagctgtgtgtggatatgtgaat

SEQ ID NO: 39436 - DNA, 110 bp, synthetic construct
  source 1..110: mol_type = other DNA
aggcaggcaagactcaaaaatagtcaccctcgttgctatgttttcccaacattgctgtaacatattgaaaagaatgctattaatgaagccaatttgaataaaataaattg

SEQ ID NO: 39437 - DNA, 110 bp, synthetic construct
  source 1..110: mol_type = other DNA
accctcgttgctatgttttcccaacattgctgtaacatattgaaaagaatgctattaatgaagccaatttgaataaaataaattgagaggtattgttacttttcacttct

SEQ ID NO: 39438 - DNA, 110 bp, synthetic construct
  source 1..110: mol_type = other DNA
ggctaagacaaggttcatggtcttgcagagtggcagagctgtgaccagggagttactaagggatgtgctaggtgtgaggttagaggctcagagaaggcttctttgggaag

SEQ ID NO: 39439 - DNA, 110 bp, synthetic construct
  source 1..110: mol_type = other DNA
ctgcctcacactcctatttatagtataagatttgtgttctgattctatccaagttgttgaagactcaaaaatccttttctctgtaataaaagcctggtggatctcaccat

SEQ ID NO: 39440 - DNA, 110 bp, synthetic construct
  source 1..110: mol_type = other DNA
gttgaagactcaaaaatccttttctctgtaataaaagcctggtggatctcaccatggaagccttgactcttgagggtatgctctgcacttctagagtgtattttagaaat

SEQ ID NO: 39441 - DNA, 110 bp, synthetic construct
  source 1..110: mol_type = other DNA
aaatgaaaatagtagtaatgtgaatggcaagtgctttcaaaaacaaagcacattggtgcaggaggaagcctgaagctggctccgtagctctggcccagcagtagtgttta

SEQ ID NO: 39442 - DNA, 110 bp, synthetic construct
  source 1..110: mol_type = other DNA
ggatgggctgggggtggggggcaggaggaagctgctgggaccatccgaaggtctgtgggggactttatgctaaaagtttccaggagccctggataattctgtgtacaggc

SEQ ID NO: 39443 - DNA, 110 bp, synthetic construct
  source 1..110: mol_type = other DNA
gtgatttgtgagaagtcagccctttgcatgattttaacatgcagtcgctaactgtggatgcctttggattcaaaaacaacatttcctatgccaaaagacccagaaacaat

SEQ ID NO: 39444 - DNA, 110 bp, synthetic construct
  source 1..110: mol_type = other DNA
tccccacaatgtactggctaaacaaccaccaccatttctttgctcatgattcatcgatgctgtcatgacatgggagttggcagagacatctctttctggttctcctccat

SEQ ID NO: 39445 - DNA, 110 bp, synthetic construct
  source 1..110: mol_type = other DNA
tgctgatgtgctttccataggacgaaagctttccctctatggaatcaccagattcggtctgagttttcaaacactgaactcaaacaactccaggctgactttgtgaaagt

SEQ ID NO: 39446 - DNA, 110 bp, synthetic construct
  source 1..110: mol_type = other DNA
ccctcagagcagtatttgatttcagaagcaaaggtgctcttgcagctgctaagtacacagggagtttcttaacattgtttcttttagctattttgcttcataaggagatt

SEQ ID NO: 39447 - DNA, 110 bp, synthetic construct
  source 1..110: mol_type = other DNA
tggtttggaatcccgagaaatgaagtaagttcaagtttatatgctttgaaaaaaacattcaagaagttgcattaaatgcttctgtcattccccagatcaaagtaagctat

SEQ ID NO: 39448 - DNA, 110 bp, synthetic construct
  source 1..110: mol_type = other DNA
cattcaagaagttgcattaaatgcttctgtcattccccagatcaaagtaagctattgccatttctcaagtgaagacactccatcctgcaatgagggtcctgattctgccc

SEQ ID NO: 39449 - DNA, 110 bp, synthetic construct
  source 1..110: mol_type = other DNA
ggagcaaacttcaaggaggcattgactttcaggggtgggtcttgcccttatagaatcccaaggatgtgtgcctttttaaactgtgtcctagatgcttcgcttatctcatc

SEQ ID NO: 39450 - DNA, 110 bp, synthetic construct
  source 1..110: mol_type = other DNA
cccaagactggactccccagatctgtgtcccaagaatcccagccaattctgttctgatataccagtgccttatatggagtgaccccttggaagaaagagagaagtctgct

SEQ ID NO: 39451 - DNA, 110 bp, synthetic construct
  source 1..110: mol_type = other DNA
aattgattaaatacacacactaagttcactaaatatgcactatatgatctgccctgagccaaatactgaaagggagtaaaagtgcaaaagaaataatttttactccaggt

SEQ ID NO: 39452 - DNA, 110 bp, synthetic construct
  source 1..110: mol_type = other DNA
gagccaaatactgaaagggagtaaaagtgcaaaagaaataatttttactccaggtgcttaaaattgagctgggtacaaatggcatacatataacaaagtaaagagcagca

SEQ ID NO: 39453 - DNA, 110 bp, synthetic construct
  source 1..110: mol_type = other DNA
aatccctgaggatactaaatagatgagtagagggactattaacaaatcacagcttttagagacagcagccaataaaaagaaacggtgttagaaatagtctgagtctccat

SEQ ID NO: 39454 - DNA, 110 bp, synthetic construct
  source 1..110: mol_type = other DNA
ttagagacagcagccaataaaaagaaacggtgttagaaatagtctgagtctccattccctcccttatttctgaaataacatgaattgtaacaccaaagacattctctaca

SEQ ID NO: 39455 - DNA, 110 bp, synthetic construct
  source 1..110: mol_type = other DNA
caagcgtcagtttgattaagatgatagtatattattcaggtcatattgctcagttgtttaacattgtcagtgattttctttctactgctatcccactattgaggaggcag

SEQ ID NO: 39456 - DNA, 110 bp, synthetic construct
  source 1..110: mol_type = other DNA
tattcggtttggccccatcagggttggcccagggagacccttttcaacagaggtatagctctggccctgagaaacctgtgatttctacagatttgccctctcacacccag

SEQ ID NO: 39457 - DNA, 110 bp, synthetic construct
  source 1..110: mol_type = other DNA
gggagagttatgagaggtaagataaaagtggttatgaggacatgacattctaaaaggtgaagcaaagcacactttcaccaagatgaaagtgggaataaaaagctggtgtt

SEQ ID NO: 39458 - DNA, 110 bp, synthetic construct
  source 1..110: mol_type = other DNA
ggtgaagcaaagcacactttcaccaagatgaaagtgggaataaaaagctggtgttggggctggaaagggaggttctcagatctgaggctggtgacttcagacaaatcaac

SEQ ID NO: 39459 - DNA, 110 bp, synthetic construct
  source 1..110: mol_type = other DNA
tggtgtttttcaggtcttctagaaccttcctgatattctgtctacttttttgcgcaatgaggtggaacttcacatctcccagtcctgtgaggtcatttctttagcttaca

SEQ ID NO: 39460 - DNA, 110 bp, synthetic construct
  source 1..110: mol_type = other DNA
agttgtctcactccacgttcacaggtaaagcagcaacctctgctttcataatcccaatatatctgtgcctaaagctatccccttaggtacaagataggcatttataccta

SEQ ID NO: 39461 - DNA, 110 bp, synthetic construct
  source 1..110: mol_type = other DNA
gtattgttaagttgtacaaactgtatctgtgacaggctttccagtttccagaacatcaccttcatctgtcctttccacactcttaaagaaacacaactagagtgttttct

SEQ ID NO: 39462 - DNA, 110 bp, synthetic construct
  source 1..110: mol_type = other DNA
ctgaagaaacctaaaatgattgagccatttattattaaaggcagaagtgcaatgtccagctcaaagagagtcatggtttcctatatctgtctggatcagacacttttatg

SEQ ID NO: 39463 - DNA, 110 bp, synthetic construct
  source 1..110: mol_type = other DNA
ccagctcaaagagagtcatggtttcctatatctgtctggatcagacacttttatgcattctgtcatcttctagaagagcaattgttgccaaaacttgacctctgtctgct

SEQ ID NO: 39464 - DNA, 110 bp, synthetic construct; identical to SEQ ID NO: 39462
  source 1..110: mol_type = other DNA

SEQ ID NO: 39465 - DNA, 110 bp, synthetic construct; identical to SEQ ID NO: 39463
  source 1..110: mol_type = other DNA

SEQ ID NO: 39466 - DNA, 110 bp, synthetic construct
  source 1..110: mol_type = other DNA
tcagatattaacatggattataattacatggagctcttgttaaatgtacagattcctggacctccattttggagatcctaaacgagtagttttggaacttgaacttttac

SEQ ID NO: 39467 - DNA, 110 bp, synthetic construct
  source 1..110: mol_type = other DNA
ctggacctccattttggagatcctaaacgagtagttttggaacttgaacttttacaaccatgaccaggtatgtcaatgatcctcatggggaagcaacatcagactgggga

SEQ ID NO: 39468 - DNA, 110 bp, synthetic construct
  source 1..110: mol_type = other DNA
agaaaaagaaaaaaaaaacaaacaaacagcaaaaatgagtgtaattcactcctcaccaaatgaccttgagcaagttcaggctcgtggagctaaagtataaaatgctcccc

SEQ ID NO: 39469 - DNA, 110 bp, synthetic construct
  source 1..110: mol_type = other DNA
ccaaatgaccttgagcaagttcaggctcgtggagctaaagtataaaatgctccccttccatctggggtggcagagggctacggtccagccctgaaacagacagctctggc

SEQ ID NO: 39470 - DNA, 110 bp, synthetic construct
  source 1..110: mol_type = other DNA
gtaatcaccaaaatctgactgggttcatatataatccactagtgtatttcaactaaggaattgattaagtatggtccatccacacaatgaaatactactcagcagtaaaa

SEQ ID NO: 39471 - DNA, 110 bp, synthetic construct
  source 1..110: mol_type = other DNA
aggaattgattaagtatggtccatccacacaatgaaatactactcagcagtaaaaatgagcaaactagttatacacagaacaacatgtatgggatcaaacccaccatctc

SEQ ID NO: 39472 - DNA, 110 bp, synthetic construct
  source 1..110: mol_type = other DNA
tctgacaggggtccagggcccatggaagaacctctgcaaaacgcccttctgtagcagcaaaacagcttcctcaggaggattcacattaaatcatcgcatcaagtctctgg

SEQ ID NO: 39473 - DNA, 110 bp, synthetic construct
  source 1..110: mol_type = other DNA
agcaaaacagcttcctcaggaggattcacattaaatcatcgcatcaagtctctggatctgcggaagacactgggctcacatcattgaagtcaggtcgctcccctcagaga

SEQ ID NO: 39474 - DNA, 110 bp, synthetic construct
  source 1..110: mol_type = other DNA
aattctcttcaaggtcattgcaaccttgttttatggtaaataccaatctctgctggcagttagctttacatggaattttccacctgcttcgaatagtgtttcccaaggat

SEQ ID NO: 39475 - DNA, 110 bp, synthetic construct
  source 1..110: mol_type = other DNA
ttgaagaataatagcgttaatgaaacataatgtatgtaataaatggcttccctttcccttcttctctttctcttccttcaacgcttactgaaaagcataaaatccattga

SEQ ID NO: 39476 - DNA, 110 bp, synthetic construct
  source 1..110: mol_type = other DNA
gcttccctttcccttcttctctttctcttccttcaacgcttactgaaaagcataaaatccattgattctactcaaggaaatttacatattctagaacttttttttttttt

SEQ ID NO: 39477 - DNA, 110 bp, synthetic construct
  source 1..110: mol_type = other DNA
actggcctatctcagtatcctaggagcacttcaaacccagtgttttcaaacaaaatgaatgtattatttatccttccttcttaccaaatttgctcagtctgctgatactg

SEQ ID NO: 39478 - DNA, 110 bp, synthetic construct
  source 1..110: mol_type = other DNA
tgaatgtattatttatccttccttcttaccaaatttgctcagtctgctgatactggtgtttagggttaagagtgaaggttgtttctgaaaattaaaggcaataaaattta

SEQ ID NO: 39479 - DNA, 110 bp, synthetic construct
  source 1..110: mol_type = other DNA
cagagatccttttggctgaactgccggcagtgtctgatatccagggtctgaaagctcatttcatacattttgtccagttctctagttgtttcactcagaagaataaatct

SEQ ID NO: 39480 - DNA, 110 bp, synthetic construct
  source 1..110: mol_type = other DNA
ctgctctgctgctagaatgagccggtacttcagcaaacctgtacccctttctcctctctcctgaaagctctctgatgtcctcaccaccacaggctcccactaccttagga

SEQ ID NO: 39481 - DNA, 110 bp, synthetic construct
  source 1..110: mol_type = other DNA
tcagccattggctgtgtgaccttagacacgttattactctctgcgtgcagctgcttcatctgcaacatggagacaggaaaggcaccaagtacaaaaggctactgcaggaa

SEQ ID NO: 39482 - DNA, 110 bp, synthetic construct
  source 1..110: mol_type = other DNA
tcatctgcaacatggagacaggaaaggcaccaagtacaaaaggctactgcaggaattaagtgaattgatacacagaacatacgcagaacaatgcctggcatagagtaagt

SEQ ID NO: 39483 - DNA, 110 bp, synthetic construct
  source 1..110: mol_type = other DNA
ctcacaaacaaaagggaatgctgtagattctgccaaatctagacctgacacaatagataaagtcagacaaaccaaaacaataccactgcagcacgaattacaccttccca

SEQ ID NO: 39484 - DNA, 110 bp, synthetic construct
  source 1..110: mol_type = other DNA
cttttctaattagctcaactttacttctagttctcagtccaatcctcgagctatttctgaacttcctttatctctgaaaaagtggagttctacttttttggaccttaggt

SEQ ID NO: 39485 - DNA, 110 bp, synthetic construct
  source 1..110: mol_type = other DNA
tctgaacttcctttatctctgaaaaagtggagttctacttttttggaccttaggtcattttttggttttctagctgaaatgactctcctgaggctgtctagatcctgttt

SEQ ID NO: 39486 - DNA, 110 bp, synthetic construct
  source 1..110: mol_type = other DNA
gagtaacttcttctcccctgaataaaggaaatcattgagggaacaatattcaaggtgattaaaagcaaggtggtggaactggcctgagaaggttaggggttatttcttcc

SEQ ID NO: 39487 - DNA, 110 bp, synthetic construct
  source 1..110: mol_type = other DNA
ctgcatcataaagggctcaggtcgtgagcatcatgattctgccacagcattctcagcactagctctttcctcaagctctcagcacttccttccccaccacggagagctaa

SEQ ID NO: 39488 - DNA, 110 bp, synthetic construct
  source 1..110: mol_type = other DNA
ttctatgccccccaaatttgtctttacaagagattctggctgaaacaacctatatcagaggttgaaatgcagggagctaggtaggcaatgaactatgtctttgcccagaa

SEQ ID NO: 39489 - DNA, 110 bp, synthetic construct
  source 1..110: mol_type = other DNA
tcctcagataaggtcctggcaggaaaatgagcttatatttagtcaatgactcttcaacctcatatgatttcctgccattaaaaatagtctttctctccactggaaagaat

SEQ ID NO: 39490 - DNA, 110 bp, synthetic construct
  source 1..110: mol_type = other DNA
gtgctcctgccagacttggctctctccaaaggcccacctgataaaatacataagtatgacattatacatagctgatgatgtacacacgtctcattttaaaaaaagaaaag

SEQ ID NO: 39491 - DNA, 110 bp, synthetic construct
  source 1..110: mol_type = other DNA
aaaagcaacagggactaactgtcaaatatataaaacataaaatggttcagtaactctagaattcccagcttgaatctttttcgtcgaagaaagtacactgtgtctcaggc

SEQ ID NO: 39492 - DNA, 110 bp, synthetic construct
  source 1..110: mol_type = other DNA
ctagaattcccagcttgaatctttttcgtcgaagaaagtacactgtgtctcaggccaagaaaacactgtaattaccattgttgatggttgattataagcagtgggtgaca

SEQ ID NO: 39493 - DNA, 110 bp, synthetic construct
  source 1..110: mol_type = other DNA
ctaagagaattagccagctgatccaggaggaagtgaggccagagagactataatgggtgcaacgtggaccaaagccatgaggaccctgagaacttgagtttttctttttt

SEQ ID NO: 39494 - DNA, 110 bp, synthetic construct
  source 1..110: mol_type = other DNA
tagtctacaaatcaacttggccaaaacagaagtcatcattcacgaaagctaccaccaatttttaactattatgttgctgataccaacaacatacagaaagtcaaccaact

SEQ ID NO: 39495 - DNA, 110 bp, synthetic construct
  source 1..110: mol_type = other DNA
accatctggtgctttggtttgtggacttaaccactcgctatacagcactgcccctcatcctaagctccagcaaccgcctcgctgatcgtgttcttcaccacacctgcact

SEQ ID NO: 39496 - DNA, 110 bp, synthetic construct
  source 1..110: mol_type = other DNA
caaggatttgaccgctggagtcgagatgctaattcagaggcccagatatttccacctacaggcagaccacgctgggtcttgccatgttgccaaatctcactgccacttgt

SEQ ID NO: 39497 - DNA, 110 bp, synthetic construct
  source 1..110: mol_type = other DNA
acattgctgtggctgtggcataggcccacctgggaacctccatgtgccatgggtgctgccctaaaaagagagaaaaaaaaaaattgaagcagctatgtcaggcagatgct

SEQ ID NO: 39498 - DNA, 110 bp, synthetic construct; identical to SEQ ID NO: 39497
  source 1..110: mol_type = other DNA

SEQ ID NO: 39499 - DNA, 110 bp, synthetic construct
  source 1..110: mol_type = other DNA
ctttcactgtcagcctaatttttcttagtatgataatccctaacacctgtgcatagggttctatcgtagacttttcatttaatcaataacacacatgattctttaacact

SEQ ID NO: 39500 - DNA, 110 bp, synthetic construct
  source 1..110: mol_type = other DNA
aaatattaaaagctttcaagaagtgggaagttaagtatttcacctaaaagttcaagatcaacactttacagcagcgtcactgaagaaagacaacaatgaaacaacatctt

SEQ ID NO: 39501 - DNA, 110 bp, synthetic construct; identical to SEQ ID NO: 39500
  source 1..110: mol_type = other DNA

SEQ ID NO: 39502 - DNA, 110 bp, synthetic construct; identical to SEQ ID NO: 39500
  source 1..110: mol_type = other DNA

SEQ ID NO: 39503 - DNA, 110 bp, synthetic construct; identical to SEQ ID NO: 39500
  source 1..110: mol_type = other DNA

SEQ ID NO: 39504 - DNA, 110 bp, synthetic construct
  source 1..110: mol_type = other DNA
agttttgtttattactgatatttatccatttatttgttgcaaggccagtttttaaaacctgtgtcttcttctttcttcaatgtgttacctattttgccagaatctgtggt

SEQ ID NO: 39505 - DNA, 110 bp, synthetic construct; identical to SEQ ID NO: 39504
  source 1..110: mol_type = other DNA

SEQ ID NO: 39506 - DNA, 110 bp, synthetic construct
  source 1..110: mol_type = other DNA
catcacggaagctatattttgcttttctgatgcctcaagttttcttctttctaactgtccagcccagcaggagaccccaaagcgtctctttctgcctgtgcatgaagctg

SEQ ID NO: 39507 - DNA, 110 bp, synthetic construct
  source 1..110: mol_type = other DNA
tgtccagcccagcaggagaccccaaagcgtctctttctgcctgtgcatgaagctgcttccatcttcattaaactaagtgtgaaagtgggaaactgttccctccttctctc

SEQ ID NO: 39508 - DNA, 110 bp, synthetic construct
  source 1..110: mol_type = other DNA
tatcttagggcccttgtatttggccaggactcctgacaactccttactcctaacgagtcctgctcaagcacctgctgtcttcccaaggacacatgcccttaacccactcc

SEQ ID NO: 39509 - DNA, 110 bp, synthetic construct
  source 1..110: mol_type = other DNA
aagccccttccatgacacattattttgcttggagtttatagggttggtgtctccgtgcttcattccataccatttattccaggcaaagctaagtgggggctgttttttaa

SEQ ID NO: 39510 - DNA, 110 bp, synthetic construct
  source 1..110: mol_type = other DNA
taagtcaaaaagtctggaagaagggcattccagtcagaaggagtatctctttcaaagcatggagtgttgaaagagccaggcacatttagagaatgtgtcctgtgcaaagt

SEQ ID NO: 39511 - DNA, 110 bp, synthetic construct
  source 1..110: mol_type = other DNA
agcatggagtgttgaaagagccaggcacatttagagaatgtgtcctgtgcaaagtatagaatttgaagtggattggggaagacttgagaaaccaaggaagggctttcctt

SEQ ID NO: 39512 - DNA, 110 bp, synthetic construct
  source 1..110: mol_type = other DNA
tgttgtactctggacactgatggggcaggaggataattaacctctgattcagtatcagctctcttccaagtatgtaccatttttgtctttcctgtaggtccagcgtcatc

SEQ ID NO: 39513 - DNA, 110 bp, synthetic construct
  source 1..110: mol_type = other DNA
tggttccacaaggcacaatgctcccatatttgcgaattcagtgtttgcagtgtctttgcagagcatagctaccgtgaataatgataatcagctgaacctacacaacatct

SEQ ID NO: 39514 - DNA, 110 bp, synthetic construct
  source 1..110: mol_type = other DNA
gtgtctgaacgtgatttctggcaggggcgaaggggagcaattggcttccaagttctaggattcttggccaggaaccctcctcgtttcactcccaaactctctgattatta

SEQ ID NO: 39515 - DNA, 110 bp, synthetic construct
  source 1..110: mol_type = other DNA
taggattcttggccaggaaccctcctcgtttcactcccaaactctctgattattaggaagttctcctggaaaccaagctggagcccacctctccaggcctgcatcaggga

SEQ ID NO: 39516 - DNA, 110 bp, synthetic construct
  source 1..110: mol_type = other DNA
tagtcaaagttcaacaagaggaagagtttgttaggagagaaaccaatgaggagatggaacttgggaggaaaagtttggtttgcacaattgggaagaaaggggggctccca

SEQ ID NO: 39517 - DNA, 110 bp, synthetic construct
  source 1..110: mol_type = other DNA
ggaacttgggaggaaaagtttggtttgcacaattgggaagaaaggggggctcccagaatccacagataactgaacatcagcctattttaagatggggcagatggaagatt

SEQ ID NO: 39518 - DNA, 110 bp, synthetic construct
  source 1..110: mol_type = other DNA
ggccctggagcactggagatacaggcattaataagaggccacccactcccatgtggagctccatctccagaggcacagcatccaagtaaacgaatgattatagcatcaag

SEQ ID NO: 39519 - DNA, 110 bp, synthetic construct
  source 1..110: mol_type = other DNA
ggtgcccaggcccctgcaggaaatggggacaagcccaggtcaccaagctcctgagagccagtgggtctggcacttacccatttagtcatgacacctaagcagagaagctt

SEQ ID NO: 39520 - DNA, 110 bp, synthetic construct
  source 1..110: mol_type = other DNA
gggcagccctccagggtagaggagagaacaccgctttaagtgtggggtgaagcaatgctgggccagggtgacccggcgtggcaagtctgtcatgtagacgtgtgccctac

SEQ ID NO: 39521 - DNA, 110 bp, synthetic construct
  source 1..110: mol_type = other DNA
tgctgggccagggtgacccggcgtggcaagtctgtcatgtagacgtgtgccctacatggtacaccatcatttctgtctctgtatatgacattttttcagggcacctgtca

SEQ ID NO: 39522 - DNA, 110 bp, synthetic construct
  source 1..110: mol_type = other DNA
tgtggctcagcattaacaaaccgactagtacccatgagaatgcagattcactctctggcccactcactgggttaagaatccctcattgcagtgagctgtggtgtaggtca

SEQ ID NO: 39523 - DNA, 110 bp, synthetic construct; identical to SEQ ID NO: 39522
  source 1..110: mol_type = other DNA

SEQ ID NO: 39524 - DNA, 110 bp, synthetic construct
  source 1..110: mol_type = other DNA
atgggcggtccccggggtgtctctcagagtggaccagctgacttccttccacctctgagctgggctggcagtgatgggtttgtctgactccatggggaggcctgctgtgt

SEQ ID NO: 39525 - DNA, 110 bp, synthetic construct
  source 1..110: mol_type = other DNA
tgagctgggctggcagtgatgggtttgtctgactccatggggaggcctgctgtgtgtccatctagctctggacaggcagcctgggctgcctgactacagcatccttgtcc

SEQ ID NO: 39526 - DNA, 110 bp, synthetic construct; identical to SEQ ID NO: 39524
  source 1..110: mol_type = other DNA

SEQ ID NO: 39527 - DNA, 110 bp, synthetic construct; identical to SEQ ID NO: 39525
  source 1..110: mol_type = other DNA

SEQ ID NO: 39528 - DNA, 110 bp, synthetic construct
  source 1..110: mol_type = other DNA
cagatcacttaacctctccgaggcttagttctccatccataaatctgggagttgtgtcttgggtccttctaagatgtcagacaagcaggtatctgacaggccatagacca

SEQ ID NO: 39529 - DNA, 110 bp, synthetic construct
  source 1..110: mol_type = other DNA
gtcttgggtccttctaagatgtcagacaagcaggtatctgacaggccatagaccagccacacagacagtttggtatcagggtgacacctgccgggctggccaggaggaat

SEQ ID NO: 39530 - DNA, 110 bp, synthetic construct
  source 1..110: mol_type = other DNA
ttcagtctgggtctaaagttctgaggagcttagaagcgtgatgcccaaaagcagaaggtgaaggtcccagctcagagagcacgtggctcatctttatgttctgtttgcgt

SEQ ID NO: 39531 - DNA, 110 bp, synthetic construct
  source 1..110: mol_type = other DNA
aggtgaaggtcccagctcagagagcacgtggctcatctttatgttctgtttgcgtcctcggggaacgggtgatgcccatctacttcttcactcagtccatcgattccagt

SEQ ID NO: 39532 - DNA, 110 bp, synthetic construct
  source 1..110: mol_type = other DNA
actcatgtgagctgtcagcctttggaggtaggaacaggaaggcagagggggctgctgttaacagagtggcctccctaagtcagctatctctctctggccctcactggccc

SEQ ID NO: 39533 - DNA, 110 bp, synthetic construct
  source 1..110: mol_type = other DNA
tgttaacagagtggcctccctaagtcagctatctctctctggccctcactggccctcctggagggagcctgaggtacgcaaagcattattaccccatttcacagaggaga

SEQ ID NO: 39534 - DNA, 110 bp, synthetic construct
  source 1..110: mol_type = other DNA
ctaggggtggagacctagagggaattcaggtgagagaaatggcagccaagtcacctcttcaccaggaatcacatgctttcggtcactcacttatagggaacacctcctgt

SEQ ID NO: 39535 - DNA, 110 bp, synthetic construct
  source 1..110: mol_type = other DNA
tcttcaccaggaatcacatgctttcggtcactcacttatagggaacacctcctgtgcacttggccttcttctgggccccgaggacacagaagagtaaggcactctcccag

SEQ ID NO: 39536 - DNA, 110 bp, synthetic construct
  source 1..110: mol_type = other DNA
gaaccccaaggagtctagcctcagaggctgaagtcttaactgctcagcagcacttgcctcttgctgagaaaaaataaacatgagtgaagctggaaatgccaggggaaaca

SEQ ID NO: 39537 - DNA, 110 bp, synthetic construct
  source 1..110: mol_type = other DNA
ggtctgatgacactaccttgacactttcaaaggtgagagaaggctaatagctgacaagatcattctccccccaggcccctaattgccacagctccccacacccccgaagt

SEQ ID NO: 39538 - DNA, 110 bp, synthetic construct
  source 1..110: mol_type = other DNA
aagatcattctccccccaggcccctaattgccacagctccccacacccccgaagtagagacacttgtccttattttatagaccaggaatccaagggatttatggtcacac

SEQ ID NO: 39539 - DNA, 110 bp, synthetic construct
  source 1..110: mol_type = other DNA
gagaggtctgtgaggaaggacactgaggattcctacgctgtagagcggacagagctgaagctgagggctacctcagtactaatgtgctggttagcaggcaacgttttctg

SEQ ID NO: 39540 - DNA, 110 bp, synthetic construct
  source 1..110: mol_type = other DNA
tgaagctgagggctacctcagtactaatgtgctggttagcaggcaacgttttctgggcattcaagcgcctctagtctgcgctggctggagcggagacctaacacaagaca

SEQ ID NO: 39541 - DNA, 110 bp, synthetic construct
  source 1..110: mol_type = other DNA
tcacttaaacgagttttatatagaaactaaatgctctgaaatacccaagttaaatatgttcacacactcatacacggcctatgtacacacacctcatttctttctacctt

SEQ ID NO: 39542 - DNA, 110 bp, synthetic construct
  source 1..110: mol_type = other DNA
aatgagtttccgagggactgtaaagcagaaaaagagatctcactaactgtgtcggtctcattataagcaagccgggctgggagaggatttatggctgtgtgctgactggc

SEQ ID NO: 39543 - DNA, 110 bp, synthetic construct
  source 1..110: mol_type = other DNA
gccaagcctcacaccgtggttgatactgatgccctgggagagctaaacacggtgctacaaatggattctgggagttaggagcgctttattaaacagctcttcattggccc

SEQ ID NO: 39544 - DNA, 110 bp, synthetic construct
  source 1..110: mol_type = other DNA
tacaaatggattctgggagttaggagcgctttattaaacagctcttcattggccctgcacattcgtcactgctgagcacacagtttgcgtttgtacatagcgatgggatg

SEQ ID NO: 39545 - DNA, 110 bp, synthetic construct
  source 1..110: mol_type = other DNA
gattgtcgtcattcgttatgtcattagagccaccctggggacagtttggtgatatgatgtttccctatccttgtccaaagattgaaagtgaagagtatgaggaagccttg

SEQ ID NO: 39546 - DNA, 110 bp, synthetic construct
  source 1..110: mol_type = other DNA
gatgtttccctatccttgtccaaagattgaaagtgaagagtatgaggaagccttgtctctggctcagacctatggcctggatactgacctggtgtatcagaggcagtgga

SEQ ID NO: 39547 - DNA, 110 bp, synthetic construct
  source 1..110: mol_type = other DNA
aaacggtcgaggttctgggctcttccttcccatccaacttgtctgtttctcgccgtgttatctttctgcgacacaaatttggtcaggttgtgatctgtggaaagtctctg

SEQ ID NO: 39548 - DNA, 110 bp, synthetic construct
  source 1..110: mol_type = other DNA
taaccactgagccacgatgggaactctgcatctcattttggagtagctgcattgcagctgtgcagttgccctgcaaggctgatggctgttgggttgaacagcacaggttt

SEQ ID NO: 39549 - DNA, 110 bp, synthetic construct
  source 1..110: mol_type = other DNA
gcattaaaattccttgggtgtgctcttcctgaataactgaagtgttttattgagggctgtgccaactgcacccctctcagctggagagcggttctaatgagcattgcctt

SEQ ID NO: 39550 - DNA, 110 bp, synthetic construct
  source 1..110: mol_type = other DNA
cgcccaccccccatcatgcactctccgggaatccagctgccctgttgagcagccccacatggcgggagaccaaggctgctgataaccaaccgtggcagtgaacatggacc

SEQ ID NO: 39551 - DNA, 110 bp, synthetic construct
  source 1..110: mol_type = other DNA
tctccttcctgtctttcagagggacactaagcacggatatggggcagggttggactccagacagcttgctctgctgacctttgctctccccacgtcacttcccgtgattg

SEQ ID NO: 39552 - DNA, 110 bp, synthetic construct
  source 1..110: mol_type = other DNA
gtttagcagtattaagtgtcttcacaccgttgtgcaaacaatctccagaactttttcatcttgcaaaactgaaattatacacccgttaaacaactccagctctccccacc

SEQ ID NO: 39553 - DNA, 110 bp, synthetic construct
  source 1..110: mol_type = other DNA
tcatcttgcaaaactgaaattatacacccgttaaacaactccagctctccccaccctgtacccccagaccctggcaactaccattctacttatgctgtagcatatttcag

SEQ ID NO: 39554 - DNA, 110 bp, synthetic construct
  source 1..110: mol_type = other DNA
tttgccaagggtgcataattgatcatgctgggcttctgaaaccatctcgggaaagtttttcaaaatatatgcaaattgacttaccaccagctacgtcattcagtgatgga

SEQ ID NO: 39555 - DNA, 110 bp, synthetic construct
  source 1..110: mol_type = other DNA
tttttcaaaatatatgcaaattgacttaccaccagctacgtcattcagtgatggaaaccactggaagtgtggatctatgggaagcactggaagtgtactttacttggcca

SEQ ID NO: 39556 - DNA, 110 bp, synthetic construct
  source 1..110: mol_type = other DNA
tcttctttggaccttcatgcactgcccacaacaactgggagtcccagggagacgtagactatgtctgcatttattagtgagctgccctgacccttgaagctggcatggag

SEQ ID NO: 39557 - DNA, 110 bp, synthetic construct
  source 1..110: mol_type = other DNA
gctgcctacttctttgattccttgaacctaccatccagagactcagctctgcctttcttcagctctgtctattggcatccagttctggaacaccgttggggaagaccatg

SEQ ID NO: 39558 - DNA, 110 bp, synthetic construct
  source 1..110: mol_type = other DNA
tcttcagctctgtctattggcatccagttctggaacaccgttggggaagaccatgacagggattcccaatagcattgagatatgccctctgctcaggggacatggggtgg

SEQ ID NO: 39559 - DNA, 110 bp, synthetic construct
  source 1..110: mol_type = other DNA
gttcccatagcaaccacagtgtttgtgtgtgtctgtgtgtatttaatgtatgcatttgaagagaaaaatcagctcatctttgcgtgcaggtctagaatgtgaaactggaa

SEQ ID NO: 39560 - DNA, 110 bp, synthetic construct
  source 1..110: mol_type = other DNA
ttgaagagaaaaatcagctcatctttgcgtgcaggtctagaatgtgaaactggaaaggaagggaatccgaggtcccgacagtagcccgacgctgggtttactgctttcct

SEQ ID NO: 39561 - DNA, 110 bp, synthetic construct; identical to SEQ ID NO: 39559
  source 1..110: mol_type = other DNA

SEQ ID NO: 39562 - DNA, 110 bp, synthetic construct; identical to SEQ ID NO: 39560
  source 1..110: mol_type = other DNA

SEQ ID NO: 39563 - DNA, 110 bp, synthetic construct
  source 1..110: mol_type = other DNA
ttttttttttttttcttttggtagaacactgtcattatgttgaatagacctttatttcacctgaagcagagtctttgccccagactgcttcttataggtagagaacctgg

SEQ ID NO: 39564 - DNA, 110 bp, synthetic construct
  source 1..110: mol_type = other DNA
ttcacctgaagcagagtctttgccccagactgcttcttataggtagagaacctggcttaggtacgaagatgctctaatatccaattcactgaaaaaacccaactacattt

SEQ ID NO: 39565 - DNA, 110 bp, synthetic construct
  source 1..110: mol_type = other DNA
atacgtttagaaaagaaatccttcaacttctctgaactacctacagaaaactgaggcgaagattggcacatttccctaaaaggtcccactactgctgaggtcactgtctt

SEQ ID NO: 39566 - DNA, 110 bp, synthetic construct
  source 1..110: mol_type = other DNA
gcgaagattggcacatttccctaaaaggtcccactactgctgaggtcactgtctttaggtaagaaaggaagcctgaccttcacagaaggtcatttttctggtcagaagga

SEQ ID NO: 39567 - DNA, 110 bp, synthetic construct
  source 1..110: mol_type = other DNA
caagacactgtatttagagggccttggttaattctcttactcatctcttcattcatctacccattcattgagagccttcttgatatgtgctgtgttttactgggattgtt

SEQ ID NO: 39568 - DNA, 110 bp, synthetic construct
  source 1..110: mol_type = other DNA
tctacccattcattgagagccttcttgatatgtgctgtgttttactgggattgttctttgtcgttgcttcaagctgaggcttccctgcctgtcttctttttgcccagctt

SEQ ID NO: 39569 - DNA, 110 bp, synthetic construct
  source 1..110: mol_type = other DNA
aacaaagtcattgactcacgcatgaggaatgcctaccaattctgagttcattttctttaaaaatgctttgattgggcatctcctggatttggcgtggcatgccaagtaat

SEQ ID NO: 39570 - DNA, 110 bp, synthetic construct
  source 1..110: mol_type = other DNA
tttaaaaatgctttgattgggcatctcctggatttggcgtggcatgccaagtaattacatcactcactgattaattgctttgtctcacaatggccctgggaggaagtatc

SEQ ID NO: 39571 - DNA, 110 bp, synthetic construct
  source 1..110: mol_type = other DNA
ctacccatctgcaacccctcaactctcctgagccatcgtgtagagacaaagctatcaagaaatgttttgggtggctttctattcagaaaactgctacggctcagtgcaaa

SEQ ID NO: 39572 - DNA, 110 bp, synthetic construct
  source 1..110: mol_type = other DNA
ctaatgtgtaataaattatactcttgatcattgtgtttcttaaaatacatgaaatttctgttcattattaattaccaagtagaggatcacttcaggtagggtggaggttc

SEQ ID NO: 39573 - DNA, 110 bp, synthetic construct
  source 1..110: mol_type = other DNA
gaattctgacactcgataacgcgtgatgacattatgagggaacaacagtgatgtgagttttggggaaaaccttttaagtctccgctgagtaaaaagctgacttaatagaa

SEQ ID NO: 39574 - DNA, 110 bp, synthetic construct
  source 1..110: mol_type = other DNA
agttttggggaaaaccttttaagtctccgctgagtaaaaagctgacttaatagaaaaagtaaatgcaaaacatgtttaaatacagagaaagtcacctcccttctactcaa

SEQ ID NO: 39575 - DNA, 110 bp, synthetic construct
  source 1..110: mol_type = other DNA
aaatatttaggttttgcaagccacttatggtctctgtctcatatcttttttgttgttatccctcaccccactcccacccataactcttgaaaaatattaaaaattctagc

SEQ ID NO: 39576 - DNA, 110 bp, synthetic construct
  source 1..110: mol_type = other DNA
ttatccctcaccccactcccacccataactcttgaaaaatattaaaaattctagcttatgggccatgcaaaaataagagtggacaggtttggtccatgggcaacagactg

SEQ ID NO: 39577 - DNA, 110 bp, synthetic construct
  source 1..110: mol_type = other DNA
aatgaattcctttgctcccaaagatcttgttttattataaagtaaattttccacgctcaccttttatagttatgttccatagcgttaatcataatcacaaccacaaagaa

SEQ ID NO: 39578 - DNA, 110 bp, synthetic construct
  source 1..110: mol_type = other DNA
ttattaaagactatgcaaacactcatcatattaagtttaaacattatcctacagagaagcaggaaaaagaattctgatccaaattgcctacatagtaaggccagctcaaa

SEQ ID NO: 39579 - DNA, 110 bp, synthetic construct; identical to SEQ ID NO: 39578
  source 1..110: mol_type = other DNA

SEQ ID NO: 39580 - DNA, 110 bp, synthetic construct
  source 1..110: mol_type = other DNA
tgaatggcatcattatgatcaattgtaagttgattaggtttcttatgcttatttccttcttggaacttctgtggcgttgttctcattaactgtgcaatcggttgctaggt

SEQ ID NO: 39581 - DNA, 110 bp, synthetic construct
  source 1..110: mol_type = other DNA
agccagaagtgggattgctggatcatatggtaattctgctttgggatttttgaggaacctccctaatattttccatagctgccgcctcattttgcatcacgcccacagtg

SEQ ID NO: 39582 - DNA, 110 bp, synthetic construct
  source 1..110: mol_type = other DNA
aacctccctaatattttccatagctgccgcctcattttgcatcacgcccacagtgtataaggattccaatttttccacatccttgctaacacttttttttaataacagat

SEQ ID NO: 39583 - DNA, 110 bp, synthetic construct
  source 1..110: mol_type = other DNA
tgtttgggggcagcacaactgtggcatggagaacttaattgataaatctgtgtgctctgctgactccttcatggactggtcattccacctttccctttctcctcagtcca

SEQ ID NO: 39584 - DNA, 110 bp, synthetic construct
  source 1..110: mol_type = other DNA
tctgctgactccttcatggactggtcattccacctttccctttctcctcagtccactctattccctgagacataacaatatgaaatcaggccagtgaataactctatatg

SEQ ID NO: 39585 - DNA, 110 bp, synthetic construct
  source 1..110: mol_type = other DNA
tctgaaacacttgtgtaggtctaaaatgatctcaaaatgaagagtttaaaaaagaaccataaatgaggctaacactggacagagctttggtcttgcagtccagacacaat

SEQ ID NO: 39586 - DNA, 110 bp, synthetic construct
  source 1..110: mol_type = other DNA
cgcacactgttctttcaaacatcagtttacagcactcaggagcaggttgtaatttaagatgtgatcatttaatactataaaataataacatatagtacactacacaaaca

SEQ ID NO: 39587 - DNA, 110 bp, synthetic construct
  source 1..110: mol_type = other DNA
caaacatcagtttacagcactcaggagcaggttgtaatttaagatgtgatcatttaatactataaaataataacatatagtacactacacaaacatatctgtgggaactt

SEQ ID NO: 39588 - DNA, 110 bp, synthetic construct
  source 1..110: mol_type = other DNA
aggactggtcagagacggcatgagaaacagcctaagagaacaagcaacctggttccaacaacaaggaattcaaatcttccgatcttctgcctcttccctaatctcatggc

SEQ ID NO: 39589 - DNA, 110 bp, synthetic construct
  source 1..110: mol_type = other DNA
caacaacaaggaattcaaatcttccgatcttctgcctcttccctaatctcatggctagctcccatcctcatagccctcatctttatttctcttctcctaacagccggatc

SEQ ID NO: 39590 - DNA, 110 bp, synthetic construct
  source 1..110: mol_type = other DNA
gggctcaggttcagtccctgtccaggaaacttctgtatgccatgggcatggccaaaaatattgtaaaacataatttagaaaaataaggtacatgctaaggttttaaaggc

SEQ ID NO: 39591 - DNA, 110 bp, synthetic construct
  source 1..110: mol_type = other DNA
aaatattgtaaaacataatttagaaaaataaggtacatgctaaggttttaaaggcttttggtgaggcacaccacgttaccgtgttctgtatattttcttgagcgccacac

SEQ ID NO: 39592 - DNA, 110 bp, synthetic construct
  source 1..110: mol_type = other DNA
ttctaaaattaatgtacaaagaagggacaaaaaggagatgggaggaaggagggggatgcagtgtaggcaagaccatgcctctgggtggatgactcatgcacgggagggaa

SEQ ID NO: 39593 - DNA, 110 bp, synthetic construct
  source 1..110: mol_type = other DNA
atgcagtgtaggcaagaccatgcctctgggtggatgactcatgcacgggagggaattacaactacagagattctccccaaggactgagagagctgagctccacactgggc

SEQ ID NO: 39594 - DNA, 110 bp, synthetic construct
  source 1..110: mol_type = other DNA
acagttttgatgggtcaggagtacaggtgtggtttagctgggtcctcagctcaggtctcatacaggtagaaacaaaatgtcacctgggcttcagttctcatttggagttt

SEQ ID NO: 39595 - DNA, 110 bp, synthetic construct
  source 1..110: mol_type = other DNA
ttcagaagtggtagtgacctctccaacctcccaactctactctctgttttaattagctggagaagagttcatttaagaacttggtttgaatctagcagattacttactgg

SEQ ID NO: 39596 - DNA, 110 bp, synthetic construct
  source 1..110: mol_type = other DNA
gctggagaagagttcatttaagaacttggtttgaatctagcagattacttactggcttaagggtcatgggtgatttccaccaattctgagtttctgcttccctctttgtt

SEQ ID NO: 39597 - DNA, 110 bp, synthetic construct
  source 1..110: mol_type = other DNA
ggatgtcactttatcactgctagcggtgatagatggaccttcagatttccccactggcccccactgtcaccaatgtcaatggcgactcagtgcagtttcattccttgggt

SEQ ID NO: 39598 - DNA, 110 bp, synthetic construct
  source 1..110: mol_type = other DNA
ggcccccactgtcaccaatgtcaatggcgactcagtgcagtttcattccttgggtcctgcaatccctagctattcttttccccacttttcaatgtcatatatttgtttta

SEQ ID NO: 39599 - DNA, 110 bp, synthetic construct; identical to SEQ ID NO: 39597
  source 1..110: mol_type = other DNA

SEQ ID NO: 39600 - DNA, 110 bp, synthetic construct; identical to SEQ ID NO: 39598
  source 1..110: mol_type = other DNA

SEQ ID NO: 39601 - DNA, 110 bp, synthetic construct
  source 1..110: mol_type = other DNA
tctaccaccaggtgacagaatcaccctctgccgcaccagccactcatgtctcaagtggtcaaaagtgtctcaagactttgctaaacatcacacagagcaggggcaaaatc

SEQ ID NO: 39602 - DNA, 110 bp, synthetic construct
  source 1..110: mol_type = other DNA
tggtcaaaagtgtctcaagactttgctaaacatcacacagagcaggggcaaaatcctgtatttaagaaccattggctgagaagtgtagtcaacaaggcagggcagtccca

SEQ ID NO: 39603 - DNA, 110 bp, synthetic construct
  source 1..110: mol_type = other DNA
attcaaatgttttattgttttatgttgtttgagacatgaggctctttatgtctagggagtgatataacagacaaggagagttgatggcaagaaaaaagaaacatcatgaa

SEQ ID NO: 39604 - DNA, 110 bp, synthetic construct
  source 1..110: mol_type = other DNA
gtcagatatcccaacctctctcaattgcaggtacctcagagggttaggatatagtcaggaaagtttgtccctttgtggtcaccaactcttgggaggaagataattttcct

SEQ ID NO: 39605 - DNA, 110 bp, synthetic construct
  source 1..110: mol_type = other DNA
caggaaagtttgtccctttgtggtcaccaactcttgggaggaagataattttcctctgccctcctaaattcttatggctgctcaaaaaattaaaatgatgtaagattaat

SEQ ID NO: 39606 - DNA, 110 bp, synthetic construct
  source 1..110: mol_type = other DNA
ccattaaaatctatattttgactttaaaagaatgctaacagtagaaaactgtttcagatgaaatacattctagggagttcccactgtggctcagtgtgttatgaacatga

SEQ ID NO: 39607 - DNA, 110 bp, synthetic construct
  source 1..110: mol_type = other DNA
aaaagaatgctaacagtagaaaactgtttcagatgaaatacattctagggagttcccactgtggctcagtgtgttatgaacatgactagtatccatgaagatgtgggttc

SEQ ID NO: 39608 - DNA, 110 bp, synthetic construct
  source 1..110: mol_type = other DNA
ccatgaaatatatggcttctaatatattctgaattttaatcttgattgatttcaatgtcgggaagaaataaataaatacatggatatgtatctaaaggcgccgtgttctc

SEQ ID NO: 39609 - DNA, 110 bp, synthetic construct
  source 1..110: mol_type = other DNA
tgtcgggaagaaataaataaatacatggatatgtatctaaaggcgccgtgttctcagtgttgagttgctggtaagtttcctgttgatgaggtcagcatcacactgaggtg

SEQ ID NO: 39610 - DNA, 110 bp, synthetic construct
  source 1..110: mol_type = other DNA
ggatgagagtggaggaccaaaaattcaccccaatggtagccctgattgcacgcacctgcagtacaagctggcgacttatcactggaatggggaagatatgttgctgaaca

SEQ ID NO: 39611 - DNA, 110 bp, synthetic construct
  source 1..110: mol_type = other DNA
gttacatagcaagggggaagtaaggtttcttcttagctgattttgaaataagagtatccttgggctcattccaatctcaaaggtcttaaaagtaaaaaagtgagacaaga

SEQ ID NO: 39612 - DNA, 110 bp, synthetic construct
  source 1..110: mol_type = other DNA
ggacctggggctagccaggactgcttatagcctgtagctggtaggagtgtagcccagtaatggagccccttcagaatctacagtcagtttgtgtttggcaggtttacttc

SEQ ID NO: 39613 - DNA, 110 bp, synthetic construct
  source 1..110: mol_type = other DNA
gaaaggctgttctatttctctgttttaatcaaactcaatcatctgttttaatcaaactcacctgccctttacccttctaactcttctttatgtccattaggtctctttcc

SEQ ID NO: 39614 - DNA, 110 bp, synthetic construct
  source 1..110: mol_type = other DNA
actcacctgccctttacccttctaactcttctttatgtccattaggtctctttccattttggtctttacctaaagacaccaacgttggtctagcgcagatcatcgtttaa

SEQ ID NO: 39615 - DNA, 110 bp, synthetic construct
  source 1..110: mol_type = other DNA
gcctgttaagtatagaggatgccctggtgaaccagtcaaatctccattcaaaattgagacactcattctcccagtttccaggaacatggactggctgacctttctcagct

SEQ ID NO: 39616 - DNA, 110 bp, synthetic construct
  source 1..110: mol_type = other DNA
tttgttgaagttctattgatctagggcatttttcactgtgcctcgcagtgtgttcattcattcactcggcaaatatgctaagaacaagttctatactagtaaaaagatga

SEQ ID NO: 39617 - DNA, 110 bp, synthetic construct
  source 1..110: mol_type = other DNA
attcattcactcggcaaatatgctaagaacaagttctatactagtaaaaagatgagttcagaatatgcctctagcatggaaggactgatattacaagattccacaattgt

SEQ ID NO: 39618 - DNA, 110 bp, synthetic construct; identical to SEQ ID NO: 39616
  source 1..110: mol_type = other DNA

SEQ ID NO: 39619 - DNA, 110 bp, synthetic construct; identical to SEQ ID NO: 39617
  source 1..110: mol_type = other DNA

SEQ ID NO: 39620 - DNA, 110 bp, synthetic construct
  source 1..110: mol_type = other DNA
acgagatagcactgaagggccatggaagcccagcttctcttctgactgctggagtgcacacactgagcatgagcaggaaggaccaaatgccatcccagttctgattacag

SEQ ID NO: 39621 - DNA, 110 bp, synthetic construct
  source 1..110: mol_type = other DNA
aatcaaatagcctgggcaaacatgggcttcagtttgtgagttctcattctttgaagactcatagtgctataccactatgccatctgttatctgatgtataacttagttcc

SEQ ID NO: 39622 - DNA, 110 bp, synthetic construct
  source 1..110: mol_type = other DNA
gactcatagtgctataccactatgccatctgttatctgatgtataacttagttcctgcatatacgttgtccaaagttacagtttttatgatggatggataaatactacac

SEQ ID NO: 39623 - DNA, 110 bp, synthetic construct
  source 1..110: mol_type = other DNA
aaggcctctgtatctttccagttatctcaagcactgaatatgcatcggtgtaacgtaagtgcttaattatcgctggagccagacaagcaggccaaatctttactttctgc

SEQ ID NO: 39624 - DNA, 110 bp, synthetic construct
  source 1..110: mol_type = other DNA
gcacaccctctcggaaaaagcctcagtttgagctcccgcctatggttctgcacagatgacatttgggaccccagtgacgtggggccagcgggaaaaagtcagctggcatc

SEQ ID NO: 39625 - DNA, 110 bp, synthetic construct
  source 1..110: mol_type = other DNA
aacatgactcatgactgttaatcttaaattaactgtgatcaccgagctgaagtcgtgctggtcagcttttcccgtttaaatctgccgtttttcaggagttccctggttgt

SEQ ID NO: 39626 - DNA, 110 bp, synthetic construct
  source 1..110: mol_type = other DNA
tgctggtcagcttttcccgtttaaatctgccgtttttcaggagttccctggttgtcactgctgtggcaccggtgggatcccgggcccaagactttctgcatgctatgagt

SEQ ID NO: 39627 - DNA, 110 bp, synthetic construct
  source 1..110: mol_type = other DNA
gaattaatcagtacttgtgatctgcacacagaagagtgtaattctgactttgagataggaataatcagctttcaaaaacctaagttcaccacttacaagctttttttaaa

SEQ ID NO: 39628 - DNA, 110 bp, synthetic construct
  source 1..110: mol_type = other DNA
aagaaaaaacgatccatatcgtcctcaatgtgaccacttctgggggaaaggtcgtccaaaattgccatgtcacgatttttctacagtagagcttttgaaatgccatataa

SEQ ID NO: 39629 - DNA, 110 bp, synthetic construct
  source 1..110: mol_type = other DNA
ccaaaattgccatgtcacgatttttctacagtagagcttttgaaatgccatataaactgctttgaacagagtagtaacacagaaaaaaaagtctttagcaatttatcaca

SEQ ID NO: 39630 - DNA, 110 bp, synthetic construct
  source 1..110: mol_type = other DNA
gcctggcaccatttcagcatcttttgctgactgttctgacctggggaggatgtgaccacagagcttctcgaggatgctggtgcctcctcctccgtgtcctgactctgtgc

SEQ ID NO: 39631 - DNA, 110 bp, synthetic construct
  source 1..110: mol_type = other DNA
cttgtgtaaggtcacacagatggtgagcagtgtattgaggctctctcctttgtctgtctaaatgtttttgtttttggtagagagtcatgcatattcattgcaaaagcaaa

SEQ ID NO: 39632 - DNA, 110 bp, synthetic construct
  source 1..110: mol_type = other DNA
tgaggctctctcctttgtctgtctaaatgtttttgtttttggtagagagtcatgcatattcattgcaaaagcaaaacattccttgcttctatatactgaatccttcaatt

SEQ ID NO: 39633 - DNA, 110 bp, synthetic construct
  source 1..110: mol_type = other DNA
tgccatgagatgcaatatagtcacagactacaagattgcactacagacactgtgggagccattattctgcctatgacactatgtatgtatagtttgccaaggcataaatg

SEQ ID NO: 39634 - DNA, 110 bp, synthetic construct
  source 1..110: mol_type = other DNA
gagccattattctgcctatgacactatgtatgtatagtttgccaaggcataaatgtctgatgataagccagtcaatcaatttggttttttatgtatgtatagagatcaat

SEQ ID NO: 39635 - DNA, 110 bp, synthetic construct
  source 1..110: mol_type = other DNA
gggctacaaattgtgccaaggcccagagggcttcaactgctcagatcctggacgatgtctgtggctggtggtgattatagaaagccttgaggtccctctcacttggtgcc

SEQ ID NO: 39636 - DNA, 110 bp, synthetic construct
  source 1..110: mol_type = other DNA
ggagtctttctttctagattaatgagtaaaataaaatattatgaacaggaaggagcctactccaggggaaaaaataattagacgtaaacagagttaacataacctaaaag

SEQ ID NO: 39637 - DNA, 110 bp, synthetic construct
  source 1..110: mol_type = other DNA
cctactccaggggaaaaaataattagacgtaaacagagttaacataacctaaaagcgatgtccagagttttcttccacaatttcgaggcaggatcttttgcacttaactt

SEQ ID NO: 39638 - DNA, 110 bp, synthetic construct
  source 1..110: mol_type = other DNA
gcctcctgtttacactgggctaaacatccccaggccatttctctaagcatctctgtagatttcatactgtcaccggtgaacactgccaaagtaatataaaaggatctaac

SEQ ID NO: 39639 - DNA, 110 bp, synthetic construct
  source 1..110: mol_type = other DNA
taagttatgcatccatctggacaaggcagtctttaggtctctgccagttttaacattctgggattctggaatatatagcaacacgtctttttatctgctcacccatattc

SEQ ID NO: 39640 - DNA, 110 bp, synthetic construct
  source 1..110: mol_type = other DNA
ttctgggattctggaatatatagcaacacgtctttttatctgctcacccatattctattataatccataatgtacgtgcccttctctcccccttcagtcctgatctgtaa

SEQ ID NO: 39641 - DNA, 110 bp, synthetic construct
  source 1..110: mol_type = other DNA
tttatcccaatggttaatttttgctggtcttcagaaccatgcgccgacctcttgactttgaggaagtcttcctgggatctttgcattcagctaaatgcccttctttcgtg

SEQ ID NO: 39642 - DNA, 110 bp, synthetic construct
  source 1..110: mol_type = other DNA
ctttgaggaagtcttcctgggatctttgcattcagctaaatgcccttctttcgtgctccttaataggaagtcattatgtatatttttggcatccaccgtattctattgga

SEQ ID NO: 39643 - DNA, 110 bp, synthetic construct
  source 1..110: mol_type = other DNA
agtgctaataaaacaggagcctgtggaatctgcagctcagtgaatggagctgatggaaaaaactatccagctctctgggcaggtggctatgttctttctcaacaaactcc

SEQ ID NO: 39644 - DNA, 110 bp, synthetic construct
  source 1..110: mol_type = other DNA
gaaaaaactatccagctctctgggcaggtggctatgttctttctcaacaaactccatctcgcaatgtgctaccgtttccctctgcttcatggaactaagaaaatgaaaaa

SEQ ID NO: 39645 - DNA, 110 bp, synthetic construct
  source 1..110: mol_type = other DNA
ttggtcattgagaagatatcctgaacttttttttttttttttttgctttagttttgtcacctgctgtcccacgatatatgataaagacaggtgagcttttgaacttgtta

SEQ ID NO: 39646 - DNA, 110 bp, synthetic construct
  source 1..110: mol_type = other DNA
gtcacctgctgtcccacgatatatgataaagacaggtgagcttttgaacttgttaagcccttatttgactaaggtcaagtttgaatcttgatcactggaggtcaaacagt

SEQ ID NO: 39647 - DNA, 110 bp, synthetic construct
  source 1..110: mol_type = other DNA
agtgcagaggaagtttctgggagtctgagctccagcttccaccctaaaatgcggaagaagaggaactggtgcttgcgcccccttgtcacagactattttgcttagtgagc

SEQ ID NO: 39648 - DNA, 110 bp, synthetic construct
  source 1..110: mol_type = other DNA
cggtattgattttgtcttctgtctagaggtcatttatgagtttcaatactgtgtgcccactgatagagctggagatgagaaacagttttatttccaaactagcaagtcct

SEQ ID NO: 39649 - DNA, 110 bp, synthetic construct
  source 1..110: mol_type = other DNA
tggattctggctgatggactcttgagcagaagctgtattttctgctttcagacatgggccattaaaatctctcttgatgggggttagtaggtgaaaactgtgacatttag

SEQ ID NO: 39650 - DNA, 110 bp, synthetic construct
  source 1..110: mol_type = other DNA
aggccaaatagtggacggggtccatcttctacagaacaggtctctagttcttcaaagaacattcatggctcagtccttcaacatgtatgacatttcagctctctgtcaaa

SEQ ID NO: 39651 - DNA, 110 bp, synthetic construct
  source 1..110: mol_type = other DNA
agaacattcatggctcagtccttcaacatgtatgacatttcagctctctgtcaaatcacccatatcaagagatttgaaaaattaagtacatgccactttcactgggtcac

SEQ ID NO: 39652 - DNA, 110 bp, synthetic construct
  source 1..110: mol_type = other DNA
agtggacagttgtaatccctggataatgttcttctgaggagtgatgtggggccagtttctttccccatggctactgttcattccacctcccagtgagttcctatagctgc

SEQ ID NO: 39653 - DNA, 110 bp, synthetic construct
  source 1..110: mol_type = other DNA
tttctttccccatggctactgttcattccacctcccagtgagttcctatagctgctgatcctacattgtgtttggtccatgttgcacccaaaaaaaattgtttataatat

SEQ ID NO: 39654 - DNA, 110 bp, synthetic construct
  source 1..110: mol_type = other DNA
gctggcagctgcagatctgatttgacccctggctcaggaactttcatatttagcaggtgcagccctaaaaaaaaaaaaatttttttaaagaccttaggtatcaggtaatt

SEQ ID NO: 39655 - DNA, 110 bp, synthetic construct; identical to SEQ ID NO: 39654
  source 1..110: mol_type = other DNA

SEQ ID NO: 39656 - DNA, 110 bp, synthetic construct
  source 1..110: mol_type = other DNA
ctgaacctcagtcttcctcctaaggataccctgcataagagtcacttgaatgtgaaaatcatctgtcagcaaaagatggttggtaagaattttgtttttgttttgttttg

SEQ ID NO: 39657 - DNA, 110 bp, synthetic construct
  source 1..110: mol_type = other DNA
aaatcatctgtcagcaaaagatggttggtaagaattttgtttttgttttgttttgcttttgtttttgaatacaagtgagtcagaaaggcaagtaataaactgtcaaatcc

SEQ ID NO: 39658 - DNA, 110 bp, synthetic construct
  source 1..110: mol_type = other DNA
tccgccttcatttctctggttctttaaaaaccaggcttttcccaagtaaatgcaagcatgttgcctactgtccatttttcctgctctgtctatgtttattttttcctcag

SEQ ID NO: 39659 - DNA, 110 bp, synthetic construct
  source 1..110: mol_type = other DNA
gcatgttgcctactgtccatttttcctgctctgtctatgtttattttttcctcagaactgaaatggttcagaaaaaaaaaaaaatgcctgctacgttctagtctaaagca

SEQ ID NO: 39660 - DNA, 110 bp, synthetic construct
  source 1..110: mol_type = other DNA
ggctcaagtgattgtaggacatggggagtatggccaatatattacaataactgtaaaaggaaagcaacctctaaaagttgcaaaaaaaattataaaatgttttgaaatac

SEQ ID NO: 39661 - DNA, 110 bp, synthetic construct
  source 1..110: mol_type = other DNA
taaatgttaaatgatacatagagatttgacctagaaatgggcaaggttggagagctggagacggcagaagggcccttgaaaagcctgaaagttatagaaaataaccttgg

SEQ ID NO: 39662 - DNA, 110 bp, synthetic construct
  source 1..110: mol_type = other DNA
tggagacggcagaagggcccttgaaaagcctgaaagttatagaaaataaccttggataaattatgaagaatattttttttttgtctcatgccccacactcttctatgaat

SEQ ID NO: 39663 - DNA, 110 bp, synthetic construct
  source 1..110: mol_type = other DNA
aggaggtactttactgataagctgggcactctcctagtcaacagacgcatcccaggcgatccctatacaaccgtgaacaaaggtgcccattcctgttaccccgactgtta

SEQ ID NO: 39664 - DNA, 110 bp, synthetic construct
  source 1..110: mol_type = other DNA
gcgatccctatacaaccgtgaacaaaggtgcccattcctgttaccccgactgttagtgactacggccacgtgggaagggtggcagagtagagaggagagggaaaggagaa

SEQ ID NO: 39665 - DNA, 110 bp, synthetic construct
  source 1..110: mol_type = other DNA
tggtaaggtggtttcccagaacagagagacgccaaatcagggctataaaggaaagaagttctagccagagccagcatcaatcataaagcctgaaggataagacaagactt

SEQ ID NO: 39666 - DNA, 110 bp, synthetic construct
  source 1..110: mol_type = other DNA
aagttctagccagagccagcatcaatcataaagcctgaaggataagacaagacttaacatgagaaatggatcatgaggatacatctcaaggaggtcaagatatgggggga

SEQ ID NO: 39667 - DNA, 110 bp, synthetic construct
  source 1..110: mol_type = other DNA
ggcctcactcggtgcaccaaggatccagcattgccacaagctgcagtgtagttaaagatttgcacagatccactgttgccttggctgtggtataggcctgcagctgcagc

SEQ ID NO: 39668 - DNA, 110 bp, synthetic construct
  source 1..110: mol_type = other DNA
cagcattgccacaagctgcagtgtagttaaagatttgcacagatccactgttgccttggctgtggtataggcctgcagctgcagctccaattttgacccccagccccgga

SEQ ID NO: 39669 - DNA, 110 bp, synthetic construct
  source 1..110: mol_type = other DNA
gcgctaataaatccctgtgtaagccacccagtcatggtattttgctatggcagcctgagctgactaagacagttgtagtacagaggacattatttgtcatggatcctgtt

SEQ ID NO: 39670 - DNA, 110 bp, synthetic construct
  source 1..110: mol_type = other DNA
tgagctgactaagacagttgtagtacagaggacattatttgtcatggatcctgttcatagcatcttggaaagtactgactggatcaacccatcgcttgaccacccttgac

SEQ ID NO: 39671 - DNA, 110 bp, synthetic construct
  source 1..110: mol_type = other DNA
tttacaggcatagttggaagagtttcgacaaatatctcacaggtgagccattacccagattacgtagttgacattaaggctcgctcttggtgttgcacatgctatgggtt

SEQ ID NO: 39672 - DNA, 110 bp, synthetic construct
  source 1..110: mol_type = other DNA
cagattacgtagttgacattaaggctcgctcttggtgttgcacatgctatgggtttggacaaatgtataatgatgtgtatcccatacaatgtataatgcatctaatgtat

SEQ ID NO: 39673 - DNA, 110 bp, synthetic construct
  source 1..110: mol_type = other DNA
gataacatatgttccaggagaaggtgttgctgcgattttgaggacctgctccacgcaaagctcacaaaaccacctcctgatgctgagcacacagccaacctgaggaagcc

SEQ ID NO: 39674 - DNA, 110 bp, synthetic construct
  source 1..110: mol_type = other DNA
gggaaattcaagctacagagctggtttcccctgcacgtgtgtgtggaaacagcgtagcctagtggttccggggagggaaagcggtgatgggcaagcaggtaagaccgcag

SEQ ID NO: 39675 - DNA, 110 bp, synthetic construct
  source 1..110: mol_type = other DNA
ttttttctccttttttggccgcccctcagcatacgtggttcccagatcagggatcagatccgagctgcagctagttcaacctatgcagcagctgcggcagcactggatcc

SEQ ID NO: 39676 - DNA, 110 bp, synthetic construct
  source 1..110: mol_type = other DNA
agatccgagctgcagctagttcaacctatgcagcagctgcggcagcactggatcctttaacccgtggcactgggctggggatcgaactcacgacctagagctgcagagat

SEQ ID NO: 39677 - DNA, 110 bp, synthetic construct
  source 1..110: mol_type = other DNA
ggaaaggtttcgtgaggaccgtggaatcagagctggaaatgaggctgaaaaacgtcaagaggcaaaaatcagaggcaaaggcaggcccggcagaaaccatcacacgcgca

SEQ ID NO: 39678 - DNA, 110 bp, synthetic construct
  source 1..110: mol_type = other DNA
ctctgctctaacagcctgttgctagctttttctggaaagacccagcactcagcaccagcaaaaaaaaatctaagctgttgcatgcatcccaaacctgctcagtgggttga

SEQ ID NO: 39679 - DNA, 110 bp, synthetic construct
  source 1..110: mol_type = other DNA
cagcaaaaaaaaatctaagctgttgcatgcatcccaaacctgctcagtgggttgagcgacgttaggaccactggcgcggagaagcatctcacactgagcctgtccagtca

SEQ ID NO: 39680 - DNA, 110 bp, synthetic construct
  source 1..110: mol_type = other DNA
ggcagctgcagctccaattggaccccagcctgggggtccaaacaataaaaaaatttaaaaatagctttcctataacatctgtcaatgcgatatttgtctggctccataag

SEQ ID NO: 39681 - DNA, 110 bp, synthetic construct; identical to SEQ ID NO: 39680
  source 1..110: mol_type = other DNA

SEQ ID NO: 39682 - DNA, 110 bp, synthetic construct
  source 1..110: mol_type = other DNA
tgaagcctaactaccccagccttctgccacatcatttgatattttattttattgtatcatttttggccacctctcgacacatggagttcccgagccagggatgagatccc

SEQ ID NO: 39683 - DNA, 110 bp, synthetic construct
  source 1..110: mol_type = other DNA
gccacatcatttgatattttattttattgtatcatttttggccacctctcgacacatggagttcccgagccagggatgagatcccagccacagctacggcaatgccagat

SEQ ID NO: 39684 - DNA, 110 bp, synthetic construct
  source 1..110: mol_type = other DNA
gatcagcagagcaaggctcaaaccggacactgagtgacctcaaggccctcgtgctccccggccaccccaagttccatcaccacatcagtctctccctcctgccccatgtg

SEQ ID NO: 39685 - DNA, 110 bp, synthetic construct
  source 1..110: mol_type = other DNA
ccccggccaccccaagttccatcaccacatcagtctctccctcctgccccatgtgcccttgattcatcaggaaccgcagtctctgggtccccagctcagtggtcatttgc

SEQ ID NO: 39686 - DNA, 110 bp, synthetic construct
  source 1..110: mol_type = other DNA
ggcactggtcccagcccctgaaatgctttgtttcactggcttctgattcagtacgtctctgctccttcagagtacactggctgagcgccagctgtacgttacagatgctg

SEQ ID NO: 39687 - DNA, 110 bp, synthetic construct
  source 1..110: mol_type = other DNA
ctggggcctccgtgcgccggcggtggttcgaaagatcaaggccgaagctgccctgggctgagcttgatcaggatacaggaccatggggcgtggtagttaaagggtccagt

SEQ ID NO: 39688 - DNA, 110 bp, synthetic construct
  source 1..110: mol_type = other DNA
ggctgagcttgatcaggatacaggaccatggggcgtggtagttaaagggtccagtctggagccaggaagacctgggtttgaatccagtcctgttcctttacctgcgcacc

SEQ ID NO: 39689 - DNA, 110 bp, synthetic construct
  source 1..110: mol_type = other DNA
ctccatcctcccagacaccactgggattttttttttttttttttttggcagcaatttaagagctaattcgcataccacagcactcacccccttaacgggtacaatgtgaa

SEQ ID NO: 39690 - DNA, 110 bp, synthetic construct
  source 1..110: mol_type = other DNA
ttaagagctaattcgcataccacagcactcacccccttaacgggtacaatgtgaagggtttctttggtttttgtgttccggatattcacactgtgctgcagccatcacac

SEQ ID NO: 39691 - DNA, 110 bp, synthetic construct
  source 1..110: mol_type = other DNA
atgctggctttttctttgtgatcacaacggctggaagagatgaccttccaaaagcaaaaagtctctatccgtcctggagaccatgagaagcaccgtttacgaataactag

SEQ ID NO: 39692 - DNA, 110 bp, synthetic construct
  source 1..110: mol_type = other DNA
aaaaagtctctatccgtcctggagaccatgagaagcaccgtttacgaataactaggccttggcttttataaaatgtttccctgagagcttttcaaagcactttacttgca

SEQ ID NO: 39693 - DNA, 110 bp, synthetic construct
  source 1..110: mol_type = other DNA
ggggttggctgaatgcccacacctgtccacctgtctccgtggattacaacatatgacagtctacacgtggccaggctagctaacagaatctgtgccttattttctagaaa

SEQ ID NO: 39694 - DNA, 110 bp, synthetic construct
  source 1..110: mol_type = other DNA
acagtctacacgtggccaggctagctaacagaatctgtgccttattttctagaaaatgaaaatcacagtacggaagttcacagccagtcccgccactcgaatgtaaactc

SEQ ID NO: 39695 - DNA, 110 bp, synthetic construct
  source 1..110: mol_type = other DNA
ccaccctccctccctttgatgcgccctcattggaggtcactgaggcgtagagcaatagctcatctttcccacagcgccttttggacgggctttcatggggatttgccctt

SEQ ID NO: 39696 - DNA, 110 bp, synthetic construct
  source 1..110: mol_type = other DNA
tagctcatctttcccacagcgccttttggacgggctttcatggggatttgcccttgtgggtgtattgaacggcaggcttacttttttgttgtttcctttctgaagcaggc

SEQ ID NO: 39697 - DNA, 110 bp, synthetic construct
  source 1..110: mol_type = other DNA
cacggcccaggagtgtggccgttctcagggcaggtcaagttccgtcagcctgctaggccatctgtgccctagtgtcacccttcgcgctgctgtagggacttggctccctc

SEQ ID NO: 39698 - DNA, 110 bp, synthetic construct
  source 1..110: mol_type = other DNA
ggccatctgtgccctagtgtcacccttcgcgctgctgtagggacttggctccctcgctgggaagaaggttctcgccccccgcccttcctcttaccccgcagagccctctc

SEQ ID NO: 39699 - DNA, 110 bp, synthetic construct
  source 1..110: mol_type = other DNA
gtctgcaaagacactgacactctgctttagtgaccgcagcaaggccaccctggaggcaaagggcagaagctggtcatccacggagcagggcggcctccaaggacacagcc

SEQ ID NO: 39700 - DNA, 110 bp, synthetic construct
  source 1..110: mol_type = other DNA
gcaaagggcagaagctggtcatccacggagcagggcggcctccaaggacacagccaagttcatgttctttggggagtggcatcaaggacatgcctgtgacggctaattca

SEQ ID NO: 39701 - DNA, 110 bp, synthetic construct
  source 1..110: mol_type = other DNA
acccaccaggggtacgcgacaaagaggggagtctgaaacccacagctgaggttcttctgttttcacttgcgtgtgaatattaacagttgcaaattagtgcattctaattt

SEQ ID NO: 39702 - DNA, 110 bp, synthetic construct
  source 1..110: mol_type = other DNA
ctgataactgagtatatcatgttgttttagagcttttgtctctgcctggaatattccctctcctctgctttgtcagtttacaaaaagccaaacaaaacaaacttcttttt

SEQ ID NO: 39703 - DNA, 110 bp, synthetic construct
  source 1..110: mol_type = other DNA
ttgcgctgctctttccaaatacacctcacagtatttctcagtcgttaatggtgtgatggtttcgttattcatttccactgctgcaatggaagctccacgaagacaggaat

SEQ ID NO: 39704 - DNA, 110 bp, synthetic construct
  source 1..110: mol_type = other DNA
gggggtgtctgccactatttggggaagaaaagcattttcacttcctgaagctcgataacctttcagagcctgtgaaggcggcaggtgggaggggctggggccagggaagg

SEQ ID NO: 39705 - DNA, 110 bp, synthetic construct
  source 1..110: mol_type = other DNA
gcagtttgaggactgggggctgcaatctggagttcctgggtatgaagggatgcgtaaaagtcaaaaatagctaaaagccacccaggcccaggcttgtacatcagctcccc

SEQ ID NO: 39706 - DNA, 110 bp, synthetic construct
  source 1..110: mol_type = other DNA
gcctcccagctgctatatgccaataaaaagcccttaagctgattataaggataccaatttaaatgtccgggtaccatttccatgaggggagaaatgtcttcattgattct

SEQ ID NO: 39707 - DNA, 110 bp, synthetic construct
  source 1..110: mol_type = other DNA
aatttaaatgtccgggtaccatttccatgaggggagaaatgtcttcattgattctgaggcctcacgtcccctctgggggcacatccaccttgtgactctctctggcagag

SEQ ID NO: 39708 - DNA, 110 bp, synthetic construct
  source 1..110: mol_type = other DNA
caaggagtgttttctaaataaggcaacctcttaagctatagccaatcacacggcttcctcgctttgctgccttctcttttctgcaagagtctcttgccagctcccatcag

SEQ ID NO: 39709 - DNA, 110 bp, synthetic construct
  source 1..110: mol_type = other DNA
aaaaactaaaaatagagctgccatgtgcttcagcaatcccactcttgggcgtctatctgcacagacctataattcaaaaaggcacatgcacccctatgttcatagcagca

SEQ ID NO: 39710 - DNA, 110 bp, synthetic construct; identical to SEQ ID NO: 39709
  source 1..110: mol_type = other DNA

SEQ ID NO: 39711 - DNA, 110 bp, synthetic construct
  source 1..110: mol_type = other DNA
cttcctccggtaagttcttttcttaggaacgctttttcctaagacttacctacctccaccggccaaggttgggtcacagcccgcatttaaacaatcactagcgagggggg

SEQ ID NO: 39712 - DNA, 110 bp, synthetic construct
  source 1..110: mol_type = other DNA
ccaccggccaaggttgggtcacagcccgcatttaaacaatcactagcgaggggggtagcattatcaccacagctcatcaagcttaaccgcccaggacaccctgggaggcg

SEQ ID NO: 39713 - DNA, 110 bp, synthetic construct
  source 1..110: mol_type = other DNA
ccttaaaaagccgaaaagaaagaaagaaaaaaagaaactaacccaagcgaactgcaagcgaaaggaatccagaaagaaagaagttggtggtaggattgtttcagcagcag

SEQ ID NO: 39714 - DNA, 110 bp, synthetic construct
  source 1..110: mol_type = other DNA
aagcgaaaggaatccagaaagaaagaagttggtggtaggattgtttcagcagcagcttggagcagagtggtggttcccacactcccccaaggggaagtgggacaggtggc

SEQ ID NO: 39715 - DNA, 110 bp, synthetic construct
  source 1..110: mol_type = other DNA
gccaagttcaggtttaggaaaatgaacatttccattgataatttaaacaagcaaataaaagcctttcaaatgttcccaggagggaaagaacatgagtttatatatagtaa

SEQ ID NO: 39716 - DNA, 110 bp, synthetic construct
  source 1..110: mol_type = other DNA
tcctgagatgggcaaggtctggcgataggtcctataaatgtttggctgatgaatggaagacaaagggagaaaaaaagagggaaggaaacaaagggaaatttccgggttgg

SEQ ID NO: 39717 - DNA, 110 bp, synthetic construct
  source 1..110: mol_type = other DNA
atccgagccacatctttgacctacgccacagctcattttcgacctacccactagcaaggccaaggatcgaacctgcatcctcgtggatactggtcgggttcttaacctgc

SEQ ID NO: 39718 - DNA, 110 bp, synthetic construct
  source 1..110: mol_type = other DNA
aaggccaaggatcgaacctgcatcctcgtggatactggtcgggttcttaacctgctgaactgcattgggaactccaagctcaggtatttttttatcaggtggcctcatac

SEQ ID NO: 39719 - DNA, 110 bp, synthetic construct
  source 1..110: mol_type = other DNA
tcaggagggtatattttcgtcttttcctgtgttagaaaagtgaatgtaggagaccagccggtactttcctttcttcagcaaggatgccgcgggcattgtgccaggagcca

SEQ ID NO: 39720 - DNA, 110 bp, synthetic construct
  source 1..110: mol_type = other DNA
agccggtactttcctttcttcagcaaggatgccgcgggcattgtgccaggagccaggcaccccctgctgggagtttgccgctggggtggggctgggctggggaggtgatg

SEQ ID NO: 39721 - DNA, 110 bp, synthetic construct
  source 1..110: mol_type = other DNA
cagagcttccctgtcattctgagtttaaagatttcattatgtctgtggttttccttgtaaagcacttctttttaaaaatgattctatttacacgaagtttttggaatcta

SEQ ID NO: 39722 - DNA, 110 bp, synthetic construct
  source 1..110: mol_type = other DNA
tgtaaagcacttctttttaaaaatgattctatttacacgaagtttttggaatctatcctaagacgtcactaaaaaaaggagactacaatatatatgctactcccccccca

SEQ ID NO: 39723 - DNA, 110 bp, synthetic construct
  source 1..110: mol_type = other DNA
acccactgagccacaacaggaaactcctatgagctggtgtaagttcaagctacagaaagaccatctaagttgaagaaacgaaaactgccttgggaagactgcgagccaag

SEQ ID NO: 39724 - DNA, 110 bp, synthetic construct; identical to SEQ ID NO: 39723
  source 1..110: mol_type = other DNA

SEQ ID NO: 39725 - DNA, 110 bp, synthetic construct; identical to SEQ ID NO: 39723
  source 1..110: mol_type = other DNA

SEQ ID NO: 39726 - DNA, 110 bp, synthetic construct; identical to SEQ ID NO: 39723
  source 1..110: mol_type = other DNA

SEQ ID NO: 39727 - DNA, 110 bp, synthetic construct
  source 1..110: mol_type = other DNA
tgtgagcagccccgtgcgccccaagatctttggtccccttcctattcagctaatgagagagaacctgactccagccccctgtgtgttctggaagagccagggccacatgc

SEQ ID NO: 39728 - DNA, 110 bp, synthetic construct
  source 1..110: mol_type = other DNA
agggaactaaagtcctgctgatgctggtggtacctgtgaggaaggggttgaggtagtgactctgtccctaaaaggccgccttccccgagacctggttcagcttggatgct

SEQ ID NO: 39729 - DNA, 110 bp, synthetic construct
  source 1..110: mol_type = other DNA
agtcgagggtccttggcaaggtccctctcgtgaaaaccgacaacacagctgagtgtcagaaggtgcccgaagcactgtgtctggtcatcatcttatcatgctgccctgct

SEQ ID NO: 39730 - DNA, 110 bp, synthetic construct
  source 1..110: mol_type = other DNA
agggacaagggcttttctggcactttgacaaattagtgctgagaagccgaaaatttatggctaaaccaacaggtgcgatgaaagtgagcggggttattatttcacatatt

SEQ ID NO: 39731 - DNA, 110 bp, synthetic construct
  source 1..110: mol_type = other DNA
tatggctaaaccaacaggtgcgatgaaagtgagcggggttattatttcacatatttagcgggttccttctaaagtttatgaattctcccaacaggggtattaaaattgta

SEQ ID NO: 39732 - DNA, 110 bp, synthetic construct
  source 1..110: mol_type = other DNA
aggcacattttttacctaacatgaaaccactgtgatccaagccagccaccagctgccagctggtgaggaagctccccccggacgccctgcatctgggcctcatctggtac

SEQ ID NO: 39733 - DNA, 110 bp, synthetic construct
  source 1..110: mol_type = other DNA
gcggagggcagaagccccttcctttcccacccccagttctacgggggggccatgactccccatttaggctgaactccttcaaatcagctgggaggcggtagaagccagca

SEQ ID NO: 39734 - DNA, 110 bp, synthetic construct
  source 1..110: mol_type = other DNA
ctccccatttaggctgaactccttcaaatcagctgggaggcggtagaagccagcatgacctttgctgtagactgtgtcctttaggctcagaaggtgccttggagagcaca

SEQ ID NO: 39735 - DNA, 110 bp, synthetic construct
  source 1..110: mol_type = other DNA
gggggtgagaggagagctaagagaaaccctgattttgctgcatgtggagctttgaaaattaagcctgagactcttgggagcacagagcgggacacggcatcaacatagag

SEQ ID NO: 39736 - DNA, 110 bp, synthetic construct
  source 1..110: mol_type = other DNA
ttccctctcagaagttgcacatctacaagagtccctcccaggaccttcagacgcctcagaatccatccccctcacattcgcactaccttgacaaagaggctaattaccaa

SEQ ID NO: 39737 - DNA, 110 bp, synthetic construct
  source 1..110: mol_type = other DNA
tcagaatccatccccctcacattcgcactaccttgacaaagaggctaattaccaaacagggtggaatttgaacagctaccttcctatctctcgttccaagcttcaggcat

SEQ ID NO: 39738 - DNA, 110 bp, synthetic construct
  source 1..110: mol_type = other DNA
aatttgagtgcactttggcttagaggttgagtaatttgcccatggtcgtacagcgagctgttaacaccagcaggattcaaactcagcactgctgaatctgacgcatgctc

SEQ ID NO: 39739 - DNA, 110 bp, synthetic construct
  source 1..110: mol_type = other DNA
agctgttaacaccagcaggattcaaactcagcactgctgaatctgacgcatgctctttctactctgccacagcggatccacatcagaatgagaattcagagtcaaatggt

SEQ ID NO: 39740 - DNA, 110 bp, synthetic construct
  source 1..110: mol_type = other DNA
ggcaaaaggtttgttttctaactcatccctccagtcatcctcccactctcaagaagagctttcccatctgcctcgattcatttggatgttggtttcatttttaggaaacg

SEQ ID NO: 39741 - DNA, 110 bp, synthetic construct
  source 1..110: mol_type = other DNA
aattgggctggactcggcagaactggcttgatccgtctccatccctgagtccttgtgcaacctcaggccagccttcacccttttctggcttccatttccccatctagaaa

SEQ ID NO: 39742 - DNA, 110 bp, synthetic construct
  source 1..110: mol_type = other DNA
gctctcttccctccttttaagtctatttcctctcctctcaatgtctgtgcaattgttgtcatgtgtttaaaaccctgcaggccagtattatcattgctgaacatagtctg

SEQ ID NO: 39743 - DNA, 110 bp, synthetic construct
  source 1..110: mol_type = other DNA
ctaaattacccgatttggcctggaatacagctttgaggagtatttgaggttcttacccaagtgtttatccaaagagttgtttaattactgcaatttgaacaaaagactta

SEQ ID NO: 39744 - DNA, 110 bp, synthetic construct
  source 1..110: mol_type = other DNA
actctaacacagctgtttcacttttattctcatgttcagtagtggagaaataagtagcatgaatcctaggaatcgcaaagaaaacctcacttttagattaattctcagca

SEQ ID NO: 39745 - DNA, 110 bp, synthetic construct
  source 1..110: mol_type = other DNA
agcatgaatcctaggaatcgcaaagaaaacctcacttttagattaattctcagcagcattcacagatcgtaagggatttttctatttttatcatgtgtttttatttgcaa

SEQ ID NO: 39746 - DNA, 110 bp, synthetic construct
  source 1..110: mol_type = other DNA
gttttttaaaattgggtttcatttttgctcttattgattcagaaacgttcttgtgtgataatccatttggtttaaacagtgcgtgttccttcctcctgtctgttgtcctt

SEQ ID NO: 39747 - DNA, 110 bp, synthetic construct
  source 1..110: mol_type = other DNA
tgataatccatttggtttaaacagtgcgtgttccttcctcctgtctgttgtcctttttgagacagaaaccttccacttggatcaaatctgtcattttgttgtgcgtatgt

SEQ ID NO: 39748 - DNA, 110 bp, synthetic construct
  source 1..110: mol_type = other DNA
aacatctgagaatagaaaaagctggaaggtctttttgtttttttctcgtttcgaggataaagatcaaggagaaagtgaggacattttgaaacacatttcacatttagaaa

SEQ ID NO: 39749 - DNA, 110 bp, synthetic construct; identical to SEQ ID NO: 39748
  source 1..110: mol_type = other DNA

SEQ ID NO: 39750 - DNA, 110 bp, synthetic construct
  source 1..110: mol_type = other DNA
gaaagttttgtgaacagtgagattcaggagtaaatacaactatttgctcttctttggccggaaaagtctcacatcctaatttctgcaaatttgttttctcctcaactttg

SEQ ID NO: 39751 - DNA, 110 bp, synthetic construct
  source 1..110: mol_type = other DNA
ggccggaaaagtctcacatcctaatttctgcaaatttgttttctcctcaactttgctgcaaggagcaatatttatccattagcttcctcatttctggctcattatggact

SEQ ID NO: 39752 - DNA, 110 bp, synthetic construct
  source 1..110: mol_type = other DNA
gaaacttaaaaagaaccagagagcccgtgtcagttctcaacacactgtccaccgcactttatgggatacaactgtcgcttgctgcagagaaaaggtctgtgtaacaacta

SEQ ID NO: 39753 - DNA, 110 bp, synthetic construct
  source 1..110: mol_type = other DNA
ttatttgttttaatatgccacttccatattcaaatctttcccaccgtcccccccaacacttgccagcccccaactcctttagctccgtcactggttactagctgctgctg

SEQ ID NO: 39754 - DNA, 110 bp, synthetic construct
  source 1..110: mol_type = other DNA
aaggaaacaactttcaaatgtaggtctcacataaatccaagctcacagataccatcatcttcaggtgtgcactggatttgcttaaagtgagatagacctgtaatgatttt

SEQ ID NO: 39755 - DNA, 110 bp, synthetic construct
  source 1..110: mol_type = other DNA
gatcaattaacttggaatctcggaggcgtgacccaggcaagctcccgggtgattctaatccgctaggatttagaatcactgaacctggccggtcttaccttcttcattcc

SEQ ID NO: 39756 - DNA, 110 bp, synthetic construct
  source 1..110: mol_type = other DNA
ctcttccactcaggatttgaattccgctgagaaagagacgcgggacccagactaaaggagaggagacgtggcctcgttttgcggcaagtggaatgctgtctgtctcctgg

SEQ ID NO: 39757 - DNA, 110 bp, synthetic construct
  source 1..110: mol_type = other DNA
tggagacaacattgggtccttaacccactgagctgcagtgggaactccagtgctattcgactttttaacttttctatgtatgttattttaagaaaaatacaaatgaagtg

SEQ ID NO: 39758 - DNA, 110 bp, synthetic construct; identical to SEQ ID NO: 39757
  source 1..110: mol_type = other DNA

SEQ ID NO: 39759 - DNA, 110 bp, synthetic construct
  source 1..110: mol_type = other DNA
acgggaaggatttgtttctaaagggttaggtttctttttttaaggcccaagacatataaattaatggagaaataggtatgctgttccaagaaggctgttggcatagactc

SEQ ID NO: 39760 - DNA, 110 bp, synthetic construct
  source 1..110: mol_type = other DNA
ataaattaatggagaaataggtatgctgttccaagaaggctgttggcatagactcaggatgagcacgtaggagcatgaaataatttataaagccgctttgttaggaatgt

SEQ ID NO: 39761 - DNA, 110 bp, synthetic construct
  source 1..110: mol_type = other DNA
attatcgtgtagtgatttgctggagggtaattcacactgtgcgacaccaggagacagtgtgaccgattgtgaattttggggtggcagtgtctgaaacctttaaaagttct

SEQ ID NO: 39762 - DNA, 110 bp, synthetic construct
  source 1..110: mol_type = other DNA
catttaggtcccgtgctggtgaggaagcgcctcggagtccgccctttacggttcgttagtgtgacggccccttgtcttttgccgagttgccctcctgtgtttattatcga

SEQ ID NO: 39763 - DNA, 110 bp, synthetic construct
  source 1..110: mol_type = other DNA
cccccttcctttcccttcggaccctcctgtcctgtgttactaagggctgtgcccttctctcctgagcttaggcttgaggttataggctctcttgaggttgttcttggctc

SEQ ID NO: 39764 - DNA, 110 bp, synthetic construct
  source 1..110: mol_type = other DNA
tgaggaaacgttcaagccgggtgatctccaagttccttgccaccagtaaaagggaagctaggtgtgactgagttgtcggggggatagtgtaccgaacatgcagattgata

SEQ ID NO: 39765 - DNA, 110 bp, synthetic construct
  source 1..110: mol_type = other DNA
agctaggtgtgactgagttgtcggggggatagtgtaccgaacatgcagattgataaagaactgccacgtccgttctagcatagaatttgggagataaaagactcattgac

SEQ ID NO: 39766 - DNA, 110 bp, synthetic construct
  source 1..110: mol_type = other DNA
aaggaaaacagccaaccacgccgattttaacctggctgcatctgttttatttatttgggggaaacttatcctttattctgcagttttaagcttggggaatcttgagcttc

SEQ ID NO: 39767 - DNA, 110 bp, synthetic construct
  source 1..110: mol_type = other DNA
tgggggaaacttatcctttattctgcagttttaagcttggggaatcttgagcttctttcctttcctttttcgatgtggtgccaatgcctggctctttttaaaggccatcg

SEQ ID NO: 39768 - DNA, 110 bp, synthetic construct
  source 1..110: mol_type = other DNA
taaacatacatgatcacaccaccaaatacgcctaatttaagactgtgagggtagcgtaagattttctatggaacagaggaggagtggaaacagctccaccaatggcagtt

SEQ ID NO: 39769 - DNA, 110 bp, synthetic construct
  source 1..110: mol_type = other DNA
gtaagattttctatggaacagaggaggagtggaaacagctccaccaatggcagttaataagcacaaactttaagcctcccattttacggagatggaaacggaggctgtag

SEQ ID NO: 39770 - DNA, 110 bp, synthetic construct
  source 1..110: mol_type = other DNA
aaaggttttgttttcaaggtaattggggggcagtaaaagtaccggatgtattccttctgccatctttactttaccccaggatctcttgcaagtcttgaattttatttcag

SEQ ID NO: 39771 - DNA, 110 bp, synthetic construct
  source 1..110: mol_type = other DNA
tctgccatctttactttaccccaggatctcttgcaagtcttgaattttatttcagagagatcttagaatgaaaccagcaatactgagctaaaaagacaaaaaaatttctg

SEQ ID NO: 39772 - DNA, 110 bp, synthetic construct
  source 1..110: mol_type = other DNA
tgtctggaagctgggctaataatatctacccccacagggttttcatggggctggtgtgcggtagcgtatgcggaacatgctaccccagcccgaaggttcttcgccggagc

SEQ ID NO: 39773 - DNA, 110 bp, synthetic construct
  source 1..110: mol_type = other DNA
gtgcggtagcgtatgcggaacatgctaccccagcccgaaggttcttcgccggagcttggagggtgggaggcaggatgaggggagagcctggagactaggaggtggtaaga

SEQ ID NO: 39774 - DNA, 110 bp, synthetic construct
  source 1..110: mol_type = other DNA
tgcagcgacacacctgatgtgacagcccttccatagggattatcaccacctgacggttaccctggtaacgagcgaggtgccaagaccagccccacttcccgcaggaggcc

SEQ ID NO: 39775 - DNA, 110 bp, synthetic construct
  source 1..110: mol_type = other DNA
cacagtgggaactcccattgggagtttttatggctattctccgtgcagatgtgccctcttaggataagctgtgcgggatgcgttccactgccaaaggaacccatccgtgt

SEQ ID NO: 39776 - DNA, 110 bp, synthetic construct
  source 1..110: mol_type = other DNA
cagatggaccataactacagtcaagctaattaatgtagcttcttcccatagctgccatgtttcgtggtgaaatccactctcttagcagcattactaactgcagacgaggt

SEQ ID NO: 39777 - DNA, 110 bp, synthetic construct
  source 1..110: mol_type = other DNA
catgtttcgtggtgaaatccactctcttagcagcattactaactgcagacgaggtctctagacacattcatcctgcagaaaggcagcgttgttctctttgatactatctc

SEQ ID NO: 39778 - DNA, 110 bp, synthetic construct
  source 1..110: mol_type = other DNA
ccacgggagccggcagagcgtctgcacctgccagctactcagcgcacctttggaagtcagctggaatttggggtcactcttcaggatcatggatcaaccacggagccggt

SEQ ID NO: 39779 - DNA, 110 bp, synthetic construct
  source 1..110: mol_type = other DNA
gtcagctggaatttggggtcactcttcaggatcatggatcaaccacggagccggttattgctgctgtgagaacagctgctgctgctgctgtgtccctagagtgagtttcg

SEQ ID NO: 39780 - DNA, 110 bp, synthetic construct
  source 1..110: mol_type = other DNA
atcttaccctggttctttctgcgttttcaggtctagcaaaattactggctgccaattactcttttattaaaggacacactgaggcttattttaaaagcatttctcctcaa

SEQ ID NO: 39781 - DNA, 110 bp, synthetic construct
  source 1..110: mol_type = other DNA
ttactcttttattaaaggacacactgaggcttattttaaaagcatttctcctcaacaatagaggctccgggatggtcagacctaaacaaggaacccgcccgctctgaagg

SEQ ID NO: 39782 - DNA, 110 bp, synthetic construct
  source 1..110: mol_type = other DNA
gagggtcctggggtgagtgaaggctgggtggttgagtggttctggatcccccactcacagaacccactgctcctaggttcctggttcctcctaagcgactggttggtggt

SEQ ID NO: 39783 - DNA, 110 bp, synthetic construct
  source 1..110: mol_type = other DNA
cacagaacccactgctcctaggttcctggttcctcctaagcgactggttggtggtggttggttggtggttggtggtggggccatgaaaggcaagagaaggcctgattccg

SEQ ID NO: 39784 - DNA, 110 bp, synthetic construct
  source 1..110: mol_type = other DNA
gccttcggcccccttgtctgtctgtctgctttgtttttccctaagcgcactcaaatgtctccgaggtacctggctcatggagcgggatctcaagggctttcgttctcact

SEQ ID NO: 39785 - DNA, 110 bp, synthetic construct
  source 1..110: mol_type = other DNA
tgtctccgaggtacctggctcatggagcgggatctcaagggctttcgttctcactgggcagaaacttgagctgatctgctttaagcctaggttcctgggacctgctgtgc

SEQ ID NO: 39786 - DNA, 110 bp, synthetic construct
  source 1..110: mol_type = other DNA
gcttcagggagttctggaagccaggccccagacttgcagagtcctggtgcctcgccagggcagctggaggacactcggcccatccctgcgtcaggcgtccccacttgggc

SEQ ID NO: 39787 - DNA, 110 bp, synthetic construct
  source 1..110: mol_type = other DNA
aacagggccctcgaatgcaaaaaaaaaaaaaaaaaagaatttagacaatgagcttatatgcttcacaaaaattccctcgaaatggaccataaacctcaaggttaagtgtg

SEQ ID NO: 39788 - DNA, 110 bp, synthetic construct
  source 1..110: mol_type = other DNA
tgtcccaggttcctaacctactctgggaaggcttacagaaggaagtccttcagattgaaggacaacttgagggacaggagcaataacttcaataaaagagtgaggagatg

SEQ ID NO: 39789 - DNA, 110 bp, synthetic construct
  source 1..110: mol_type = other DNA
tgaaggacaacttgagggacaggagcaataacttcaataaaagagtgaggagatgggaggctgtttcaggctatgggaactgtctgcccaagctcagatgcatgagatat

SEQ ID NO: 39790 - DNA, 110 bp, synthetic construct
  source 1..110: mol_type = other DNA
gttggtgatgtttctcttttctgtcactattttctctcttccttttatctctccattcttgtactaataccaccgtgttttctctttacttagttttaaaatgggttttg

SEQ ID NO: 39791 - DNA, 110 bp, synthetic construct
  source 1..110: mol_type = other DNA
ttcttgtactaataccaccgtgttttctctttacttagttttaaaatgggttttgctctttagttaaggaacagccttcattaaactttcaccctttcgtggttagaaat

SEQ ID NO: 39792 - DNA, 110 bp, synthetic construct
  source 1..110: mol_type = other DNA
aatgctggtgttctaatctaggccatctcttttcctgactaccacatgcgtgcttgttgggcaggcacattagctccatgaactactagatgccagtcgctccaggtctt

SEQ ID NO: 39793 - DNA, 110 bp, synthetic construct
  source 1..110: mol_type = other DNA
ccctaacccattttgaaaaatagctggtttcttacagcaacattgatttcaagggttcccaggccatagctggagagtacttcatctttgttgggcattgggaacttgtt

SEQ ID NO: 39794 - DNA, 110 bp, synthetic construct
  source 1..110: mol_type = other DNA
ttcccaggccatagctggagagtacttcatctttgttgggcattgggaacttgttcagttattttgcctggtcactcacaccctatcacaccactcgctattgggtccaa

SEQ ID NO: 39795 - DNA, 110 bp, synthetic construct
  source 1..110: mol_type = other DNA
acaacctaggacgtcggaaattataaccagcgagttgtcggcctgccatttcagtacaaatgtatgctgtggcctttgagagacatttcaaatccttaacagagtccaac

SEQ ID NO: 39796 - DNA, 110 bp, synthetic construct
  source 1..110: mol_type = other DNA
acaaatgtatgctgtggcctttgagagacatttcaaatccttaacagagtccaacactttggtttgggtttggttttttcccctatcattttccagtttggtaactagta

SEQ ID NO: 39797 - DNA, 110 bp, synthetic construct
  source 1..110: mol_type = other DNA
atcatcaaaattcctgagttagacctagaaatctgttatgttaatgcgccttgatctaaatgtgactaggacttggcactctctttgttatactgaaaatcctggctata

SEQ ID NO: 39798 - DNA, 110 bp, synthetic construct
  source 1..110: mol_type = other DNA
ctaaatgtgactaggacttggcactctctttgttatactgaaaatcctggctatagagctgcttggcagaggtataccgttcttcccattcctagagcaggagaagtcct

SEQ ID NO: 39799 - DNA, 110 bp, synthetic construct
  source 1..110: mol_type = other DNA
accatttcacatgccgactagcaatgtcccatgttttgtttcattggttgtaacaacacttattttttttaaaagatttgtaaaatttcacacacacccccattacattt

SEQ ID NO: 39800 - DNA, 110 bp, synthetic construct
  source 1..110: mol_type = other DNA
ctcaaaccccctagagacattcatttagctataacatcaggaagagcccttgcatatacatttttggcagtgtcagggggattgtcatgcagatagtctgtgggctttgc

SEQ ID NO: 39801 - DNA, 110 bp, synthetic construct
  source 1..110: mol_type = other DNA
cctccagaggctgggacgtagtggagagggtagagagcagaacaggttaagtgtgtgttccctgtggactgatgcagagctccgagtgcctgattttctggcatctctgg

SEQ ID NO: 39802 - DNA, 110 bp, synthetic construct
  source 1..110: mol_type = other DNA
cctgtcagctgctgacactgtgtagctacacattgaaattctggtgagaggaattgaatcagacttaatgtaattaaactgaccattttctttcaaggctatagatggga

SEQ ID NO: 39803 - DNA, 110 bp, synthetic construct
  source 1..110: mol_type = other DNA
cactctaggggacttaggaaacagctcggtcccagcccagatcttgagcactcgagcctgtctgccttgccaacctgacgggattgctaaggctgcggagagaatccact

SEQ ID NO: 39804 - DNA, 110 bp, synthetic construct
  source 1..110: mol_type = other DNA
cctcatcctttgcaaggtgtcctacagaatttgtcaaacaataatacagatatttctggtcctcctaagaataatcttctttggaagattaattgtttctaatccttttc

SEQ ID NO: 39805 - DNA, 110 bp, synthetic construct
  source 1..110: mol_type = other DNA
ctggtcctcctaagaataatcttctttggaagattaattgtttctaatccttttctgagaatgttgtgtaaactctttccatgagaggtggtagtattctccatagagct

SEQ ID NO: 39806 - DNA, 110 bp, synthetic construct
  source 1..110: mol_type = other DNA
tgaatttgaatgagttaaagtactaagaagagcagctggtacataatgtgtgtggtgatgcaggtgttggtattattggacaggcagaactgcattgtcatttgcacaaa

SEQ ID NO: 39807 - DNA, 110 bp, synthetic construct
  source 1..110: mol_type = other DNA
cttcacagacagacagacagacagtgcttcctggacagaatggatggccaaagaagaagatgagcgctccagaccagccctgtgacgtgaaactcagcaacaaattcccc

SEQ ID NO: 39808 - DNA, 110 bp, synthetic construct
  source 1..110: mol_type = other DNA
ctgatgggaatggtcagtaattctccaccaagtaaaggaacaaatcggaataagagttggggggcaggcatgaggcttagatgagaggcaagtgtttccttccttcctac

SEQ ID NO: 39809 - DNA, 110 bp, synthetic construct
  source 1..110: mol_type = other DNA
gttggggggcaggcatgaggcttagatgagaggcaagtgtttccttccttcctacccttcacagtgagccacaaatgcaggaaatatcctggaatactgtgatcctctaa

SEQ ID NO: 39810 - DNA, 110 bp, synthetic construct
  source 1..110: mol_type = other DNA
gaaacgtgggaactgcgactccttgttaccaagagatacgcagaatgaatagaaacagaatagtaatgggtttgtcgcccctagaacttggggaagaagactggatcctg

SEQ ID NO: 39811 - DNA, 110 bp, synthetic construct
  source 1..110: mol_type = other DNA
atccgagcggctgataatagaagtcacttggaaagtgtggggttattttttctaaaacaaatacattcccatattcaatttttcattcaaattcagcagaatgaagatgg

SEQ ID NO: 39812 - DNA, 110 bp, synthetic construct
  source 1..110: mol_type = other DNA
aacaaatacattcccatattcaatttttcattcaaattcagcagaatgaagatggggttatggaatctatttttggaaagttctccagatgatcctgctgccaaatttag

SEQ ID NO: 39813 - DNA, 110 bp, synthetic construct
  source 1..110: mol_type = other DNA
ccgtgccaagtactagattcaaccagctgagctgctgagaaaagagtttcatatcctgctggcactatgcctgagagccgaagcagaaatgatcttgaacttagtgtcat

SEQ ID NO: 39814 - DNA, 110 bp, synthetic construct
  source 1..110: mol_type = other DNA
cctacacaaaaccagagccctcagccttggacattcacctcccagccttgcttcttaactccggattctccaaagagctcgtctggggaaccccttggcttcaggggttg

SEQ ID NO: 39815 - DNA, 110 bp, synthetic construct
  source 1..110: mol_type = other DNA
taactccggattctccaaagagctcgtctggggaaccccttggcttcaggggttggtctttgacttcatatttatctgaaatgcctcaatccaggtatgaagcagcaggg

SEQ ID NO: 39816 - DNA, 110 bp, synthetic construct
  source 1..110: mol_type = other DNA
tggctttaaaaacctttccctgaaagcctcaatggagttcagaccttttaagtactagctgcctggatgccttgttgaccctgcaataaatgccacactttccttcacca

SEQ ID NO: 39817 - DNA, 110 bp, synthetic construct
  source 1..110: mol_type = other DNA
gcatgtaagtgcccccagggaccacctcccctggaccagccatctctcagtcccgagactctgctattcctgatcctaacacactcttggtgtatggacaaacagcaata

SEQ ID NO: 39818 - DNA, 110 bp, synthetic construct
  source 1..110: mol_type = other DNA
agactctgctattcctgatcctaacacactcttggtgtatggacaaacagcaataatgggacatcacgtcttcacatctgactgtgaaataacaaatttccaggagttac

SEQ ID NO: 39819 - DNA, 110 bp, synthetic construct
  source 1..110: mol_type = other DNA
gcgtaatctggttcagtgaatgtgtggcgccacctattggtggaccctcagacattcacttgcctttatcacaagaggatgtttcacaaaaattgttttgtgaggacctt

SEQ ID NO: 39820 - DNA, 110 bp, synthetic construct
  source 1..110: mol_type = other DNA
ctaagttaactgaattgaacaaaaacattcggaaagacaagaggggtcagcagtgtcttacctggccctgaatccccagtcctggaaggtaatttccacctgaagtgtat

SEQ ID NO: 39821 - DNA, 110 bp, synthetic construct
  source 1..110: mol_type = other DNA
ctggtaaccttcccatcatctcttgctttagaatccaccttggccaaaagctgcatacatgtacctgggaggcccctggatttggtcaggtgtgagagatatcaagataa

SEQ ID NO: 39822 - DNA, 110 bp, synthetic construct; identical to SEQ ID NO: 39821
  source 1..110: mol_type = other DNA

SEQ ID NO: 39823 - DNA, 110 bp, synthetic construct
  source 1..110: mol_type = other DNA
taagggttatttggggcaatgcagacaatatacaagagccaatagattatgtcgactgaaaaaaaatgcactacctaaaagttgaaaattacgttttatttggtggattt

SEQ ID NO: 39824 - DNA, 110 bp, synthetic construct
  source 1..110: mol_type = other DNA
gcaatgcttcaagtcaaacggtacgtgacgacgatgtttcctacattttttgacaaatgataggaggtgtgggaaatacctcatttgattcttggccatttgcatggaag

SEQ ID NO: 39825 - DNA, 110 bp, synthetic construct
  source 1..110: mol_type = other DNA
aatgataggaggtgtgggaaatacctcatttgattcttggccatttgcatggaaggatcggattcttgcttcttattatggtacggagctgtgtcctgatagttctcaac

SEQ ID NO: 39826 - DNA, 110 bp, synthetic construct
  source 1..110: mol_type = other DNA
aaccaatattgtgcattgcattccatctctgtctctttcagcctgcttagagaaaagccttaacaagttcatccatgtgaccaaagccagtagttcttcctgagcttgtg

SEQ ID NO: 39827 - DNA, 110 bp, synthetic construct
  source 1..110: mol_type = other DNA
agccttaacaagttcatccatgtgaccaaagccagtagttcttcctgagcttgtgatactttgtggctaatacgccacataaaccatggataaccacagacaagaagcca

SEQ ID NO: 39828 - DNA, 110 bp, synthetic construct
  source 1..110: mol_type = other DNA
cacttgtctagaccggccatctgatgtaggcacttgttttgaaggataattaccatagagcatttagcttgtatagacaagtaagcagagctgctgcagcatgattatcc

SEQ ID NO: 39829 - DNA, 110 bp, synthetic construct
  source 1..110: mol_type = other DNA
tgtaggactggatatactctggcaggagcatgccaggggcagtcctgatcaaccacagtctgagtcccagcagcaggcaggcagtgcccaatcagctgcccggtgagctc

SEQ ID NO: 39830 - DNA, 110 bp, synthetic construct
  source 1..110: mol_type = other DNA
cagtctgagtcccagcagcaggcaggcagtgcccaatcagctgcccggtgagctctcttgacacacaagcaaatggcacacacttgggaagtggaccttcccccccgccc

SEQ ID NO: 39831 - DNA, 110 bp, synthetic construct
  source 1..110: mol_type = other DNA
agcaaagactgtcccctcttagggagtgactagcgggtggtcttggagttttgtagtggaacttagggccacagatgaagatgggggtagatgcaagcttttgttcttca

SEQ ID NO: 39832 - DNA, 110 bp, synthetic construct
  source 1..110: mol_type = other DNA
ctccctttgaggtctaagtcctgggccagtgcaacaagagttcctcttccgtggttttccacccactccttggctgtgtcctactggtccccagctgtccttcccggatc

SEQ ID NO: 39833 - DNA, 110 bp, synthetic construct
  source 1..110: mol_type = other DNA
atggggtacttcccacctcataaatcctcagcctctccttctatacaagcttggtgctgctctcccgaagggatgcccatgtaagccattcagagggctgagttatctcg

SEQ ID NO: 39834 - DNA, 110 bp, synthetic construct
  source 1..110: mol_type = other DNA
gctgctctcccgaagggatgcccatgtaagccattcagagggctgagttatctcgggctctttagtgcaggtggtcccccccacctgaagtgagcctcctatttagtcag

SEQ ID NO: 39835 - DNA, 110 bp, synthetic construct
  source 1..110: mol_type = other DNA
cttattttatacctaatagtttatacctcttatgcccttactccttattgcccctttcctcttccttctctccagtgattatattaaaaccttgagtaataaccagtctt

SEQ ID NO: 39836 - DNA, 110 bp, synthetic construct
  source 1..110: mol_type = other DNA
ccttactccttattgcccctttcctcttccttctctccagtgattatattaaaaccttgagtaataaccagtctttataggaggtttactattttttaaatattcatatc

SEQ ID NO: 39837 - DNA, 110 bp, synthetic construct
  source 1..110: mol_type = other DNA
aagagtccctggctacacagctgagggcagagagtgcaaagcagagtatgacaaatttcaggagggaagagcggtcacccttcctgagcggctttggcaaagctaagagt

SEQ ID NO: 39838 - DNA, 110 bp, synthetic construct
  source 1..110: mol_type = other DNA
cagatactaagtgctttcctcagttgatcccctaaacaaagctctgaggtatgtatgctaagtactcgcattttttaaatgaggatgttgagttatataaaaatgacatt

SEQ ID NO: 39839 - DNA, 110 bp, synthetic construct
  source 1..110: mol_type = other DNA
tgctaagtactcgcattttttaaatgaggatgttgagttatataaaaatgacattgtttgacccaggcgctgggctgaatgtcagtgtcttcccccagttcttatactga

SEQ ID NO: 39840 - DNA, 110 bp, synthetic construct
  source 1..110: mol_type = other DNA
tagtcctctttttaggcataaaagtttatagcccaccaggggcaggggctcccctccgtggtccacctccccccatcggaaccctgcttctaaatgccacttcctcacac

SEQ ID NO: 39841 - DNA, 110 bp, synthetic construct
  source 1..110: mol_type = other DNA
ctcagagcagggaggcaacttgctcaagttcacttagtccatgaggagcagggtgggaaatggagctcagtctgaggacactgtcctgtgagccatcatgccacaaaaca

SEQ ID NO: 39842 - DNA, 110 bp, synthetic construct
  source 1..110: mol_type = other DNA
cattgtccccatttactgtttttgcaaaactcatggaagtggaacaactttcccgaatctacggagctgtgagcctgggatccgaaccttgatggggtcgatgctggact

SEQ ID NO: 39843 - DNA, 110 bp, synthetic construct
  source 1..110: mol_type = other DNA
aatctacggagctgtgagcctgggatccgaaccttgatggggtcgatgctggactaactctgccggctggacacctatctgcagggacacctaattccaaaatggaatgg

SEQ ID NO: 39844 - DNA, 110 bp, synthetic construct
  source 1..110: mol_type = other DNA
aagtgcacggcctggatgccttgtgcaattaaatataattgcaagagccagtgtgcttcctgcccgatgctctcattgccggttcctgttgacggaggccccagctaccc

SEQ ID NO: 39845 - DNA, 110 bp, synthetic construct
  source 1..110: mol_type = other DNA
cttcctgcccgatgctctcattgccggttcctgttgacggaggccccagctaccctccctcgccctcatctcttcgccagatgcttttgtgtggatgtcacggagctgac

SEQ ID NO: 39846 - DNA, 110 bp, synthetic construct
  source 1..110: mol_type = other DNA
tgtaagaacttttcggccacaacctacctctggttcagagggacggattccccagcttaaggaagcaggagagacccatgaaccgcacacagctgaagtgtgtgagctcc

SEQ ID NO: 39847 - DNA, 110 bp, synthetic construct
  source 1..110: mol_type = other DNA
cttaaggaagcaggagagacccatgaaccgcacacagctgaagtgtgtgagctccagccgtccgatgggctgatgtgaggagccagggggactgaggttagtgacacagc

SEQ ID NO: 39848 - DNA, 110 bp, synthetic construct
  source 1..110: mol_type = other DNA
aaaacaggggctcatcaacaggtgatgcagtaaattatggcatgcctcgatgattattttgtcagagtctgaagagaagtaatgacacggcaggcaagcgccttgatctc

SEQ ID NO: 39849 - DNA, 110 bp, synthetic construct
  source 1..110: mol_type = other DNA
attttgtcagagtctgaagagaagtaatgacacggcaggcaagcgccttgatctcagaaaaacacggttctctttttcatccacatggcagctgagagagtcctatggca

SEQ ID NO: 39850 - DNA, 110 bp, synthetic construct
  source 1..110: mol_type = other DNA
taaagtccaaaacgttgaatgctggagaactgttagttgagccatggatgagttagtgagtccatgtccatgtttctttgctgtcttacctgtggaagaaaagctgtgat

SEQ ID NO: 39851 - DNA, 110 bp, synthetic construct
  source 1..110: mol_type = other DNA
cctgctccacctgctcccgtggattccctgcatccctttcctctgctgaatgcttcctttcacatcacagggcgcccacaccccagctgattgtaggagcggctgccagg

SEQ ID NO: 39852 - DNA, 110 bp, synthetic construct
  source 1..110: mol_type = other DNA
cctttcacatcacagggcgcccacaccccagctgattgtaggagcggctgccaggcttaggatttagttcagctccaccagtgcttagcaggccacaccctgtgctggga

SEQ ID NO: 39853 - DNA, 110 bp, synthetic construct
  source 1..110: mol_type = other DNA
aaggaggcctgaagaaatatttccatgagattagactaagatattagcaactatcttgccaaaagtcgaaagacaagatcatcgcctgcatattttaatattaagtgctt

SEQ ID NO: 39854 - DNA, 110 bp, synthetic construct
  source 1..110: mol_type = other DNA
ttgccaaaagtcgaaagacaagatcatcgcctgcatattttaatattaagtgcttatgttgatgatgtagtgtgcatattttaataattatcatacacgtgatttattgg

SEQ ID NO: 39855 - DNA, 110 bp, synthetic construct
  source 1..110: mol_type = other DNA
tcaagtcccgacacgtgggttcaagtcccgacacgtgggttcaagtcccagtctgggttccagctgggttcgagtcataagcattgtcagtattaatctgtcttgatctc

SEQ ID NO: 39856 - DNA, 110 bp, synthetic construct
  source 1..110: mol_type = other DNA
ggttccagctgggttcgagtcataagcattgtcagtattaatctgtcttgatctcatgcttgtcaaggagatcagatgctgggggaccaaaaggactttgctaaaaccct

SEQ ID NO: 39857 - DNA, 110 bp, synthetic construct
  source 1..110: mol_type = other DNA
acatttaaagcttatctgggtattttattcttcaaaggctgttcctgaattgggtcaggtacctttaatttgtgaaattaaaaacactgatcacgtcttattcttctttg

SEQ ID NO: 39858 - DNA, 110 bp, synthetic construct
  source 1..110: mol_type = other DNA
caggtacctttaatttgtgaaattaaaaacactgatcacgtcttattcttctttgtttcctcataaccgaaacacagagccaggctgagggcatacaccccacaagtttt

SEQ ID NO: 39859 - DNA, 110 bp, synthetic construct
  source 1..110: mol_type = other DNA
acattcagtccatggaacagattgtagaaaagcaatgctggatggagctgggcagtggcttcatgtccctccaggttggcctcccaccccgtcacaccacgccttcccca

SEQ ID NO: 39860 - DNA, 110 bp, synthetic construct
  source 1..110: mol_type = other DNA
tagttgtaaacagaggtgccataatacaagttgtagaaggacttaaaggcgacacaaccagaggcagcagcggatggaaagagagacaatcaaggggacacaaaagaggg

SEQ ID NO: 39861 - DNA, 110 bp, synthetic construct
  source 1..110: mol_type = other DNA
tcatttttaatattccttctgggaaatttttgaagacctgaattgtgattcatattggggtagaaacagggcatccaggacttaagtttctggaaatggtgagggagata

SEQ ID NO: 39862 - DNA, 110 bp, synthetic construct
  source 1..110: mol_type = other DNA
cgccctcatcctcagccgtgagagggggcacaggctgctcgggcctcttcaggctggggccgtcatgtttttgaagcttacacggcaggggccgggatgcaggcactcct

SEQ ID NO: 39863 - DNA, 110 bp, synthetic construct
  source 1..110: mol_type = other DNA
ggggccgtcatgtttttgaagcttacacggcaggggccgggatgcaggcactcctccaagtgtgacagctgggaggaggacctcaagtagtatcagggcaggtgccaggg

SEQ ID NO: 39864 - DNA, 110 bp, synthetic construct
  source 1..110: mol_type = other DNA
catacaaacaagttaaattaacattgctaatttcctcctaggagtcagacatagagtccccaagacaggcattttgctagctcgtccttttgtggccagaccatgcttga

SEQ ID NO: 39865 - DNA, 110 bp, synthetic construct
  source 1..110: mol_type = other DNA
gtccccaagacaggcattttgctagctcgtccttttgtggccagaccatgcttgaaaactgtttgggagtttctgttgtgtctcaggagattaagaaccagactattatc

SEQ ID NO: 39866 - DNA, 110 bp, synthetic construct
  source 1..110: mol_type = other DNA
gctcgtgttccagtggttcacatgagggagaaaggaaagctgttactttgagcgtagggtgaacctcaagtaaagtcgatattcagatgcggccaagatatgaaagggtg

SEQ ID NO: 39867 - DNA, 110 bp, synthetic construct
  source 1..110: mol_type = other DNA
gggatggaaggagaaaggaggtttcctaagacgttcagaagtgaacgagcaaaagtaagggggacaaacggtgagcagagaagccggggctggggagctgtgccatgagt

SEQ ID NO: 39868 - DNA, 110 bp, synthetic construct
  source 1..110: mol_type = other DNA
taagggggacaaacggtgagcagagaagccggggctggggagctgtgccatgagttcgaatatttcaagtgggatgaaaaacattggggaattattttgcttaatgttgt

SEQ ID NO: 39869 - DNA, 110 bp, synthetic construct
  source 1..110: mol_type = other DNA
cctctggtcccttctcttgagtcttgtatttatcttgggtctgtgtcatgtaagaattctgagctccagtttcctcatttaaaaaaaggggggggcagttgaggggttcc

SEQ ID NO: 39870 - DNA, 110 bp, synthetic construct
  source 1..110: mol_type = other DNA
gcagagctcgagccattgccatcttttttgaaatgtgccatttttaatcccggtaaaacacctcacatctgtgagaagtttagcatgcttatagactagtttgcaaatgt

SEQ ID NO: 39871 - DNA, 110 bp, synthetic construct
  source 1..110: mol_type = other DNA
aaacacctcacatctgtgagaagtttagcatgcttatagactagtttgcaaatgtagatgagttttatacaggtgcataaaagtattcaatagacacagaccagcagatt

SEQ ID NO: 39872 - DNA, 110 bp, synthetic construct
  source 1..110: mol_type = other DNA
tgctctcttccatgcataaaggggcaaggagctgcaagcatggtcacagccagtgactcaatgatggagagcctgtgcacctgctcagcacttaaaattatgtttctatg

SEQ ID NO: 39873 - DNA, 110 bp, synthetic construct
  source 1..110: mol_type = other DNA
catgtgggattttctcagtgcccctggcctccaccaccggatgccagcccgccgtctcatctcccaagtatgacaaaggcgaggtctccagagggcaacgtcacgggggg

SEQ ID NO: 39874 - DNA, 110 bp, synthetic construct
  source 1..110: mol_type = other DNA
tcccttctcagagcagttgctgcaaagccccatctacctggctgcacatcactgcactgtctgttccatgcaggcagctgccatgtacctggctaatggtaggtagagcg

SEQ ID NO: 39875 - DNA, 110 bp, synthetic construct
  source 1..110: mol_type = other DNA
tactctccctccctccccaactcttccatctcagatgtgcacaccagccaccagccaaaccggaacctggagagacaggcagaaatctttctctaccctccacattccac

SEQ ID NO: 39876 - DNA, 110 bp, synthetic construct
  source 1..110: mol_type = other DNA
acaggctctgggaacgggggtggttttaatgaaatacaccctgggctctgcaatctttcagtgcactagatcggaggatgtgtattataaccccgctctgtcactgtttc

SEQ ID NO: 39877 - DNA, 110 bp, synthetic construct
  source 1..110: mol_type = other DNA
aagccttctggccccggacttttgcttattgagaattttaaatttactgattcaattttagtagtggtaattgatctgttcatattttcttcctggttcagtcttgggag

SEQ ID NO: 39878 - DNA, 110 bp, synthetic construct
  source 1..110: mol_type = other DNA
tccttatagggactggggaagcatcagctctgaaagtatttcgacccccagacgaggtcattttggcaaagcaggaacttacaccaaagttacccactccaccacaaatc

SEQ ID NO: 39879 - DNA, 110 bp, synthetic construct
  source 1..110: mol_type = other DNA
tgagaatgagatacaggtcaaaagactgagctggagggaaacaccactgagtcaatctcatctggttagaaggatgccctgtgatggagttttaaccgcttggggtaaac

SEQ ID NO: 39880 - DNA, 110 bp, synthetic construct
  source 1..110: mol_type = other DNA
tctcatctggttagaaggatgccctgtgatggagttttaaccgcttggggtaaacgactatcaagaggctacttttctaactttaagctgaccgtctctctcatccatgt

SEQ ID NO: 39881 - DNA, 110 bp, synthetic construct
  source 1..110: mol_type = other DNA
tatgtgcttctcattggcctctggaattcagagcgaaagagtgttgcttctcacactgaagttcaccttgttctcatttattcaccctgccttcttcctggtcttcccag

SEQ ID NO: 39882 - DNA, 110 bp, synthetic construct
  source 1..110: mol_type = other DNA
gtcttatgaagacagcttggatgtgatattctcaaaccacttacctttgaatgagatacatggaagctggttggcagaagcagtaactcaagcaacaaccagagttgagc

SEQ ID NO: 39883 - DNA, 110 bp, synthetic construct
  source 1..110: mol_type = other DNA
atacatggaagctggttggcagaagcagtaactcaagcaacaaccagagttgagctctggtttttcaggcggatgctgtgcctttttaattttacttggattaatgtatc

SEQ ID NO: 39884 - DNA, 110 bp, synthetic construct
  source 1..110: mol_type = other DNA
ttggaatccactcaattttctgagcttcagaatccttacttgccatgtaagaggaggaagtctaccctgcagcatggctgaaaggacagcacctaatatgtgaggagcac

SEQ ID NO: 39885 - DNA, 110 bp, synthetic construct
  source 1..110: mol_type = other DNA
gaggaagggcattcacagtggaacttaggcatcatgctttttgaaataacaataaagatcttccctgtaagccagagcaacgagggtattgaagggatatagctctccag

SEQ ID NO: 39886 - DNA, 110 bp, synthetic construct
  source 1..110: mol_type = other DNA
agatcttccctgtaagccagagcaacgagggtattgaagggatatagctctccagctacatttaccaaatgtgttctcatccctcttccttgtcaagaatgcattcgttc

SEQ ID NO: 39887 - DNA, 110 bp, synthetic construct
  source 1..110: mol_type = other DNA
ttaaaaatgagcacgtagaacttgatcgagtgatttttccatctctatcaatatgctaacatttctcatctttcagtagttgttttggtgggagtgtcttaacatttgtg

SEQ ID NO: 39888 - DNA, 110 bp, synthetic construct
  source 1..110: mol_type = other DNA
cctgaccaccccatccacacggagcgcggttccgtcctggatcttccaaaacacgcagcttaaacacggtgcctgaactcccgacacttacaacctggagaggagggaga

SEQ ID NO: 39889 - DNA, 110 bp, synthetic construct
  source 1..110: mol_type = other DNA
cagcttaaacacggtgcctgaactcccgacacttacaacctggagaggagggagagtaaacaagcaccggcgacaggacccaggacgaatttttactttttcttgcctcc

SEQ ID NO: 39890 - DNA, 110 bp, synthetic construct
  source 1..110: mol_type = other DNA
cacaatgggaactcccaggtatttattttaaaagataataaagagactacagaagagaataggagagtgatttgcacgctttccagaaacaagggaattagagtgcctcc

SEQ ID NO: 39891 - DNA, 110 bp, synthetic construct
  source 1..110: mol_type = other DNA
atctctgagcagaccagctaagaagaaaaggtaggctggctcttggggaacccacatgaaatatgatcattaacccttcgccagtgttctgggtttggggcatgaaaata

SEQ ID NO: 39892 - DNA, 110 bp, synthetic construct
  source 1..110: mol_type = other DNA
cttctagaaaacggcgcagggcttacagacaacctaaggacatcctcccatgccctgcaactcatctccacattacttacgacacctaatacaacgcaactcccgtgtaa

SEQ ID NO: 39893 - DNA, 110 bp, synthetic construct
  source 1..110: mol_type = other DNA
atcacacttcccgcaacttagctctgagtcctcttcgggaatcacttggttcaggacaagccaggttcagagactaaagcttcatcactcatgacacaggcaccaaaacc

SEQ ID NO: 39894 - DNA, 110 bp, synthetic construct
  source 1..110: mol_type = other DNA
acaagccaggttcagagactaaagcttcatcactcatgacacaggcaccaaaaccacttggttgacggaaacggacctcaggcttgagtctctcgcaagccaaagatgag

SEQ ID NO: 39895 - DNA, 110 bp, synthetic construct
  source 1..110: mol_type = other DNA
gtcaccgagaatccacactggcccggacctgggcaggaacggagtcagagcgcctccacgcagctctgggcacagggatctgcagtttggagccgctgagcgacgggccc

SEQ ID NO: 39896 - DNA, 110 bp, synthetic construct
  source 1..110: mol_type = other DNA
agctttccagctaggccctgacttccgggctctgcagtgtcccgtcttagcacgagtcctgccaggttggtttggctcgagtcccccatcttcccatctaattgtgttcc

SEQ ID NO: 39897 - DNA, 110 bp, synthetic construct
  source 1..110: mol_type = other DNA
agtgctgaacgtggcacaacaggagtgagtggctttttctgatttcatagtgttcaggttttgtaatgaagctgattgtgtagcatacaaatacatatgatttatcaaaa

SEQ ID NO: 39898 - DNA, 110 bp, synthetic construct
  source 1..110: mol_type = other DNA
tgagtggctttttctgatttcatagtgttcaggttttgtaatgaagctgattgtgtagcatacaaatacatatgatttatcaaaactcctgacaacatcccatataaatt

SEQ ID NO: 39899 - DNA, 110 bp, synthetic construct
  source 1..110: mol_type = other DNA
ggttatggcctctctcgccgggaggatctcaccaggagtcggagacggaaactgcatactctgtgttaaactctaaaagcagcgcagggaagttcaagtcaaagataacg

SEQ ID NO: 39900 - DNA, 110 bp, synthetic construct
  source 1..110: mol_type = other DNA
gcgaggttcgtaggatccggtggtggggacaatgtctgtagggatattggaactcaggggagagccagggaggatttttatccgaagctgtcgtgctgtgtttttccttc

SEQ ID NO: 39901 - DNA, 110 bp, synthetic construct
  source 1..110: mol_type = other DNA
aggggagagccagggaggatttttatccgaagctgtcgtgctgtgtttttccttcttaaattacagctttgaagatttcattgtaccgtctgtcagctcggaatcatagg

SEQ ID NO: 39902 - DNA, 110 bp, synthetic construct
  source 1..110: mol_type = other DNA
cctgatggacaaaaggggcttcggaaggtgggctcgaggcttcatggcaagtctcccaaggtgcttgttgccagagccgtgatgtggccggggttccgcccgcgccctct

SEQ ID NO: 39903 - DNA, 110 bp, synthetic construct
  source 1..110: mol_type = other DNA
ggcaagtctcccaaggtgcttgttgccagagccgtgatgtggccggggttccgcccgcgccctctgtggatgaagcggggccacgcggcgcccagccagctgtgatgcca

SEQ ID NO: 39904 - DNA, 110 bp, synthetic construct
  source 1..110: mol_type = other DNA
catctggtgccatgttagagctcagcgatggggctcgcctgaggggactcacctgagggctcaccccagcgtttaatgcctgtggcatccttttgcagtggtgtcataag

SEQ ID NO: 39905 - DNA, 110 bp, synthetic construct
  source 1..110: mol_type = other DNA
agggctcaccccagcgtttaatgcctgtggcatccttttgcagtggtgtcataagatggcacgagagaagaagtctttgagggaaggtatttaacggtctaaggaagcat

SEQ ID NO: 39906 - DNA, 110 bp, synthetic construct
  source 1..110: mol_type = other DNA
cctgtctcagcttcacaaggcagctcctgggctccggtcctgggccagagagacggagtaacttgcctgcaggcacacagctagaaaacaggagactaggccaaagcaga

SEQ ID NO: 39907 - DNA, 110 bp, synthetic construct
  source 1..110: mol_type = other DNA
agaatcgccgggctgggatgagggacaggagtggggatgcggcagggttgtgcgtttccaatcctatcgagagggcttcagcgggagtgagggctgagggctgaggttgg

SEQ ID NO: 39908 - DNA, 110 bp, synthetic construct
  source 1..110: mol_type = other DNA
ttccaatcctatcgagagggcttcagcgggagtgagggctgagggctgaggttgggaagaagctctgctggtgcggtgcctctgccctaggcctgagggttctggcagcc

SEQ ID NO: 39909 - DNA, 110 bp, synthetic construct; identical to SEQ ID NO: 39907
  source 1..110: mol_type = other DNA

SEQ ID NO: 39910 - DNA, 110 bp, synthetic construct; identical to SEQ ID NO: 39908
  source 1..110: mol_type = other DNA

SEQ ID NO: 39911 - DNA, 110 bp, synthetic construct
  source 1..110: mol_type = other DNA
ggttcggtctaggccatgggtgtccaagaaggagcacggtggaggccttggagccactgtcaccagctgagtggccttttcaaaatagcttaagacctgtgagcctcagc

SEQ ID NO: 39912 - DNA, 110 bp, synthetic construct
  source 1..110: mol_type = other DNA
caagtacgtgtccctgtgcctccttttgcacctccataaaaatgaattgaaaaatcagcctcactagcttattctgcaaagtagagataaggcctggacaggcgctaagt

SEQ ID NO: 39913 - DNA, 110 bp, synthetic construct
  source 1..110: mol_type = other DNA
gtaatggaatgaatctttatgccccccccgggggtctgggaggtgaacagactccctcccctgggtttggaggacagatatgaagccacaggagatcattttcaagcctt

SEQ ID NO: 39914 - DNA, 110 bp, synthetic construct
  source 1..110: mol_type = other DNA
gatagctgttcctagacacctagaatgtaattgttttggttctgacaacttctcaccctgtttcattggaacaactggcagtttagcagtgcttctgggtccagagagct

SEQ ID NO: 39915 - DNA, 110 bp, synthetic construct
  source 1..110: mol_type = other DNA
ccctgtttcattggaacaactggcagtttagcagtgcttctgggtccagagagctaaagacccaggaaaaaaatcataaagatagtgggtccatttggaggaattagaaa

SEQ ID NO: 39916 - DNA, 110 bp, synthetic construct; identical to SEQ ID NO: 39914
  source 1..110: mol_type = other DNA

SEQ ID NO: 39917 - DNA, 110 bp, synthetic construct; identical to SEQ ID NO: 39915
  source 1..110: mol_type = other DNA

SEQ ID NO: 39918 - DNA, 110 bp, synthetic construct
  source 1..110: mol_type = other DNA
atacagagcatggagaaacgatagcaaacttgctctaaaaggtgtaatctcataactagcctccaagacaggggccaagatgactcttaaggtctctccctgagtatccc

SEQ ID NO: 39919 - DNA, 110 bp, synthetic construct
  source 1..110: mol_type = other DNA
acctgcagtcggggcccttccctgattgatgaacttcagagcaggaatgccaagatgcatatgaaattgtaagctcatccgatgctattatttttaattgaaacaatcta

SEQ ID NO: 39920 - DNA, 110 bp, synthetic construct
  source 1..110: mol_type = other DNA
tgcatatgaaattgtaagctcatccgatgctattatttttaattgaaacaatctagaaaacagccgtgtgtatgagttgcattctcattccttcctctgtggttaattcc

SEQ ID NO: 39921 - DNA, 110 bp, synthetic construct
  source 1..110: mol_type = other DNA
tcctctcctctgggtcagggtcctgcaaacccctaaaagcccacagtgggaaatgtgcatttccttttcagtgtagagaaccagtgaaacacttgctgtgatactggtcc

SEQ ID NO: 39922 - DNA, 110 bp, synthetic construct
  source 1..110: mol_type = other DNA
gggagtaaccgagcaggggcttgaacagccagctgcctgacaccagcgtcatcaacagaagggacaaatgacatcgacagaaaataagattgtatgaggttgaccccaga

SEQ ID NO: 39923 - DNA, 110 bp, synthetic construct
  source 1..110: mol_type = other DNA
ccagacagtgtgtcattgtggctcaggcagaaaaactgcaggaggctttgggaagcagttctgacttctaaccagcttcatgagtaacgtgtgatgtattagtgatttct

SEQ ID NO: 39924 - DNA, 110 bp, synthetic construct
  source 1..110: mol_type = other DNA
cagttctgacttctaaccagcttcatgagtaacgtgtgatgtattagtgatttctttggatacagtgcaaaacctaaacagtaaaaattacacagatttaataaaattga

SEQ ID NO: 39925 - DNA, 110 bp, synthetic construct
  source 1..110: mol_type = other DNA
gtcctcctgtcacggatgaggaagctggggcgcgggaaggacaagtaaatcacgccggacggcacatgcggaaaggagccgccctcggcccagcccagacaattcgggct

SEQ ID NO: 39926 - DNA, 110 bp, synthetic construct
  source 1..110: mol_type = other DNA
gacttctcccgtgcatgagaaaaatcacactggcgatctcccagcttatctacgtcttttgtctatagaatcagcctagacggttcttacacatgccggtttgtaagttg

SEQ ID NO: 39927 - DNA, 110 bp, synthetic construct
  source 1..110: mol_type = other DNA
acggctcagcccatcctatggtgctgttgtaacttatgcagcactttttattagaaatgcttcagttgttttaaatgttccacatgatgcgtcaagagcggtcggtatct

SEQ ID NO: 39928 - DNA, 110 bp, synthetic construct
  source 1..110: mol_type = other DNA
aatgcttcagttgttttaaatgttccacatgatgcgtcaagagcggtcggtatctctgcggagagtgtgtatggccttgggctctttccttggggcggccggtcacgagg

SEQ ID NO: 39929 - DNA, 110 bp, synthetic construct
  source 1..110: mol_type = other DNA
cccaccacacgacacggcctcacccccctcggggaaggggagatgggcggatgggtgaatgacagagaagataaggagagaacaggtggcgtgcgtgtcaggtgctagaa

SEQ ID NO: 39930 - DNA, 110 bp, synthetic construct
  source 1..110: mol_type = other DNA
tgaatgacagagaagataaggagagaacaggtggcgtgcgtgtcaggtgctagaaaaggccagaatgcgtccctgagccttctctgcgcaagctcccgaggggccgaagt

SEQ ID NO: 39931 - DNA, 110 bp, synthetic construct
  source 1..110: mol_type = other DNA
ctgaccatcacccggttatttctgagggtgcttaaggccattgccttggtgaccactcttggtggcagcttggggctccgtgaggcagaagagctgaagcaccaagcatc

SEQ ID NO: 39932 - DNA, 110 bp, synthetic construct
  source 1..110: mol_type = other DNA
ctcttggtggcagcttggggctccgtgaggcagaagagctgaagcaccaagcatctcgcaccccgttttccaccagccagaccctgaagaccctgtggccgcagtggacc

SEQ ID NO: 39933 - DNA, 110 bp, synthetic construct
  source 1..110: mol_type = other DNA
ctcactcaccgctgccctcatagactcgtgctccttgattgatggcacgttagactttgggttttctgagctagtttttcacgcgtgttttttttctgttgcaaggtggt

SEQ ID NO: 39934 - DNA, 110 bp, synthetic construct
  source 1..110: mol_type = other DNA
tttgggttttctgagctagtttttcacgcgtgttttttttctgttgcaaggtggtggctggacctctcaccgccatctgatggccctgggcagagatttcccgcagctga

SEQ ID NO: 39935 - DNA, 110 bp, synthetic construct
  source 1..110: mol_type = other DNA
tgcttccgtaattcccgccccttcactcagaacgggtgtggatgagcatctgtgaggaccaaacaagagcctgtaggtgtggcgctgaacagtttcaagtcgttctaaag

SEQ ID NO: 39936 - DNA, 110 bp, synthetic construct
  source 1..110: mol_type = other DNA
ggaccaaacaagagcctgtaggtgtggcgctgaacagtttcaagtcgttctaaagcttcatctgtctgacacttacttccccaaagggcaagagcacgtgattttacctt

SEQ ID NO: 39937 - DNA, 110 bp, synthetic construct
  source 1..110: mol_type = other DNA
ccagccagcaccgcccccagcttgtaagccaccacctgcaccgtgttgcccggccccagctctgccggctccaggagctgcatcgccagtgtgtccaaggccacatcctg

SEQ ID NO: 39938 - DNA, 110 bp, synthetic construct
  source 1..110: mol_type = other DNA
ccagctctgccggctccaggagctgcatcgccagtgtgtccaaggccacatcctgtacagctgcagccaagttcagtagcagaagtagccctgccacagtaagaggcagc

SEQ ID NO: 39939 - DNA, 110 bp, synthetic construct
  source 1..110: mol_type = other DNA
gcggagacataggaacccttgctctcctgggacatggtggagttctgatcatctttacaaggtctagctcatggctctctggctcagtgagctccatgggccaccaggct

SEQ ID NO: 39940 - DNA, 110 bp, synthetic construct
  source 1..110: mol_type = other DNA
gcgtctgaaagacccaccctccccaggtacgacaacatggccgagctgtttgcagtcgtgaagacgatgcaggccctggagaaggcgtacatcaaggactgcgtcacccc

SEQ ID NO: 39941 - DNA, 110 bp, synthetic construct
  source 1..110: mol_type = other DNA
gaccccgtgccgtggggccacagacgggcccagcaagaagtcggtcgtgtgggagaataagcacatcacatggttcggtgagcgctgggccggggtgcggggtgcgtgtg

SEQ ID NO: 39942 - DNA, 110 bp, synthetic construct
  source 1..110: mol_type = other DNA
aataagcacatcacatggttcggtgagcgctgggccggggtgcggggtgcgtgtgccggcgtggggcagagcgtcggctcacacagtgtccccccacacccagccaccct

SEQ ID NO: 39943 - DNA, 110 bp, synthetic construct
  source 1..110: mol_type = other DNA
agaaaaatttttaaaaaataaaaaataaattaaaggcgttctcgctgtggctcagcaaaaatgaagctgactactacacatgaggatgcaggttcaacccctggcctcac

SEQ ID NO: 39944 - DNA, 110 bp, synthetic construct; identical to SEQ ID NO: 39943
  source 1..110: mol_type = other DNA

SEQ ID NO: 39945 - DNA, 110 bp, synthetic construct
  source 1..110: mol_type = other DNA
caccctggatgggcagcgacatttctgctctacacaggccgggtggccagaagcctctcctgtcgccctgctggttgggccgagtgagtgggagccctgactgcccacct

SEQ ID NO: 39946 - DNA, 110 bp, synthetic construct
  source 1..110: mol_type = other DNA
gcttctcccagtgggttggggatctgctgttcccgtgagctctggtgtggggtcaaggacacagctcagctcctgagcggctgcagctgcgcgcaggccggcagctgtgg

SEQ ID NO: 39947 - DNA, 110 bp, synthetic construct; identical to SEQ ID NO: 39946
  source 1..110: mol_type = other DNA

SEQ ID NO: 39948 - DNA, 110 bp, synthetic construct
  source 1..110: mol_type = other DNA
aggcactcacacacgcataccacacattgacaacccccccacacccaccccttttctcacactcacgacacactctcaaggcacatgtgttacacactctagtcacttac

SEQ ID NO: 39949 - DNA, 110 bp, synthetic construct
  source 1..110: mol_type = other DNA
ctcacactcacgacacactctcaaggcacatgtgttacacactctagtcacttacccagttgtatcacatgtccatgcatctaccacacaacccacacatgcacgttgta

SEQ ID NO: 39950 - DNA, 110 bp, synthetic construct
  source 1..110: mol_type = other DNA
ccgccctgtttccaagcctgcatcctaaggcctactcacctcacagtcccaggtttcctctggggcagggaagcttgtgctcactcctttcctctctggcaggagtccca

SEQ ID NO: 39951 - DNA, 110 bp, synthetic construct
  source 1..110: mol_type = other DNA
cgcagcggcctgaaggttcgctgcttcttgtccgggaagagaaggatgtctggcagccgggcagaagcagagataggggatgcgggctggcagagcaccggggctgtccc

SEQ ID NO: 39952 - DNA, 110 bp, synthetic construct
  source 1..110: mol_type = other DNA
atgtctggcagccgggcagaagcagagataggggatgcgggctggcagagcaccggggctgtccctcactgctgggccccctgtgcaattcccccgtggggccccaaccc

SEQ ID NO: 39953 - DNA, 110 bp, synthetic construct
  source 1..110: mol_type = other DNA
gccctcctaccccaccactgccctccacccttcccacaccaggctgtttcaggcctcttagtcagcctggagagctcctacttgctcctcaaaatcctttgtaagtgccc

SEQ ID NO: 39954 - DNA, 110 bp, synthetic construct
  source 1..110: mol_type = other DNA
tcttagtcagcctggagagctcctacttgctcctcaaaatcctttgtaagtgcccctcccaggcagcgctgtacctcccttttgtaattccagcctggcgcttgtgcaca

SEQ ID NO: 39955 - DNA, 110 bp, synthetic construct
  source 1..110: mol_type = other DNA
cgagacatcgcccatccctctgtggcagcagggactgcacgctcagacactcgcgagtcacacgcctcctaagtgggtgtgcacagagctcggtctgttcaccacgtgaa

SEQ ID NO: 39956 - DNA, 110 bp, synthetic construct
  source 1..110: mol_type = other DNA
agtcacacgcctcctaagtgggtgtgcacagagctcggtctgttcaccacgtgaacctgtgggatgaaccagggggtcagcagctccctcgcgctggacgtggatgggca

SEQ ID NO: 39957 - DNA, 110 bp, synthetic construct
  source 1..110: mol_type = other DNA
aggaatcaggacggggacaaacatgcattcatccctctttggggggctcttagtcaccagagctggagtcaggagatctcggcttcctggcgtggtcttctgggttattg

SEQ ID NO: 39958 - DNA, 110 bp, synthetic construct; identical to SEQ ID NO: 39957
  source 1..110: mol_type = other DNA

SEQ ID NO: 39959 - DNA, 110 bp, synthetic construct
  source 1..110: mol_type = other DNA
agtccatggcttccacttgtgggtcattagtccggtgttgctcagagacaccatgggatactgaggcagcccgatatggaatgtcatgtagcaactcaaagaccaagcat

SEQ ID NO: 39960 - DNA, 110 bp, synthetic construct
  source 1..110: mol_type = other DNA
ggatactgaggcagcccgatatggaatgtcatgtagcaactcaaagaccaagcatgtgggcagcaccggtgttgaaagtgtgtgcagagggactcatggttctgcctgcc

SEQ ID NO: 39961 - DNA, 110 bp, synthetic construct
  source 1..110: mol_type = other DNA
taaaggctttgccgcacacacggcgttgaaagggcttgtctccagtgtgaacgtgctgggtttggtcacgtcggagctgtgccggaacggcttcccgcccgagctcaggg

SEQ ID NO: 39962 - DNA, 110 bp, synthetic construct
  source 1..110: mol_type = other DNA
tcaagtgctttgagcttgtccaaggcgtccagatcctatcatttctcagaacgcttctcttatacctcagggcttaactctctgtcttggatgcagttaagttggaaatc

SEQ ID NO: 39963 - DNA, 110 bp, synthetic construct
  source 1..110: mol_type = other DNA
tctcttatacctcagggcttaactctctgtcttggatgcagttaagttggaaatcaataacaaaaaaaagataaatacaatctttcccatgcacaaacgaaaaagaaata

SEQ ID NO: 39964 - DNA, 110 bp, synthetic construct
  source 1..110: mol_type = other DNA
ccgcaactacaggcggtccttcgccggtggtctcttcgtcttggcctcgggcacgtcttttggctcaacccccccaagaagtgaaccccgttttcaggtaacagctgctt

SEQ ID NO: 39965 - DNA, 110 bp, synthetic construct
  source 1..110: mol_type = other DNA
attctccagttgtttgacggcagggcagtaaacccagtttccgtgacttccccatgagccaatgcggaagcccacgcctactccggttttgacccatgtgcatttatgct

SEQ ID NO: 39966 - DNA, 110 bp, synthetic construct
  source 1..110: mol_type = other DNA
actcgaacccatcgcctcttgaaaggcctttcctccagacacatgcctacccctgagctgggggcaggagccgagagcgcctgggccttggaggtggcgctctcccccca

SEQ ID NO: 39967 - DNA, 110 bp, synthetic construct
  source 1..110: mol_type = other DNA
cttccagatgcagttttggcgtctcctcctcccaggagccttccctgattgcacccatcctccgcagctcctcccacccacccccggggctccccgtgagcctcctgtcc

SEQ ID NO: 39968 - DNA, 110 bp, synthetic construct
  source 1..110: mol_type = other DNA
agatcaggaagcaaggctggaatgttgcagacctgcccaaggccagacagggggaagtgtgggagcttgaactcaaacccccacggtctgattctagaaacacgttccta

SEQ ID NO: 39969 - DNA, 110 bp, synthetic construct
  source 1..110: mol_type = other DNA
agtgtgggagcttgaactcaaacccccacggtctgattctagaaacacgttcctaaccagtacccaaccctgctgttgtccttagcatgtctgccctgcaccaggtgctg

SEQ ID NO: 39970 - DNA, 110 bp, synthetic construct
  source 1..110: mol_type = other DNA
gcaccggcttggatgggatgcttaccttgctaagctgggcatcctcagccttaaaagggagccggggaaagtgaccggtgggttagtggcagggattgcatggacttggg

SEQ ID NO: 39971 - DNA, 110 bp, synthetic construct
  source 1..110: mol_type = other DNA
agggagccggggaaagtgaccggtgggttagtggcagggattgcatggacttgggtgtgccctctccatggcatctagccaggggcaaaggactggcatcctcgggagat

SEQ ID NO: 39972 - DNA, 110 bp, synthetic construct
  source 1..110: mol_type = other DNA
cctcctccgagggcaccccaagtcctcctccgagggcacacagacaacgatcccatctgctccggggacaccccatgaaaacatgaaaatcacagcttatggagacgccg

SEQ ID NO: 39973 - DNA, 110 bp, synthetic construct
  source 1..110: mol_type = other DNA
tctgctccggggacaccccatgaaaacatgaaaatcacagcttatggagacgccgacccagggaatcagggctgggggtggggatggggggggcgatctgaaaactgagg

SEQ ID NO: 39974 - DNA, 110 bp, synthetic construct
  source 1..110: mol_type = other DNA
gcccttccctttctcttcctgacgaactcctactcatccctcaacacccattttgccatgaaagagctgcaggtggaaggagaagacagatggacaccaccaggctctaa

SEQ ID NO: 39975 - DNA, 110 bp, synthetic construct
  source 1..110: mol_type = other DNA
ccatgaaagagctgcaggtggaaggagaagacagatggacaccaccaggctctaaaaagagcagaccaccccagggccccatggtcacccctccccctttatgaagcacc

SEQ ID NO: 39976 - DNA, 110 bp, synthetic construct
  source 1..110: mol_type = other DNA
ctcactgtctctggtacccagtgagcctctgccctccaggacctgcccattcaccgccttgcccaccttctcgtggcccctcgcctgtcttcatctccctcctgccagca

SEQ ID NO: 39977 - DNA, 110 bp, synthetic construct
  source 1..110: mol_type = other DNA
gccttgcccaccttctcgtggcccctcgcctgtcttcatctccctcctgccagcatagattccatcttcccgggtttaaggaactccctggacacacgccaagcccctgg

SEQ ID NO: 39978 - DNA, 110 bp, synthetic construct
  source 1..110: mol_type = other DNA
ctggggtgctaggcctgggcctgactgggcacgtgccgcccccaccctcagcatagcccacacccatcccacacgccaacatttctgttgaaggagggggaacgagctgc

SEQ ID NO: 39979 - DNA, 110 bp, synthetic construct
  source 1..110: mol_type = other DNA
cagccttggcccgtgtcgcatcgtgaaggcagagcagagcttggactgggtcatctccaaggaggcttgcagttcttaacggcttgggcctctctctgccctcaactttg

SEQ ID NO: 39980 - DNA, 110 bp, synthetic construct
  source 1..110: mol_type = other DNA
agccatggggctccagggaccacagtggtggctccacaagccgctcagcagccccctgcaaatttctactctgcttgaaccacccggcgggaattgtgtggttggcggcc

SEQ ID NO: 39981 - DNA, 110 bp, synthetic construct
  source 1..110: mol_type = other DNA
gcagagcattctaacaaatccttcctcgtgaaagagcccgtcttcaaagaacagaaggaagacaacacttccacaaccacagaaactgcggctctgaggaaagcgctggt

SEQ ID NO: 39982 - DNA, 110 bp, synthetic construct
  source 1..110: mol_type = other DNA
caaaaaatgagagcacagtttacaaagatggaccagcaagcagaaggaagctggaggaacacagtaaaaatgtaagtctcagtgctgagaggagacgctgcttccgggca

SEQ ID NO: 39983 - DNA, 110 bp, synthetic construct
  source 1..110: mol_type = other DNA
cgaaggagggaacaaaaggatgaggaagaggcagtgatccagagagaaaatgccgagaactttctggagtcagtgaatgacatgggtccctcacggaggattaacagaaa

SEQ ID NO: 39984 - DNA, 110 bp, synthetic construct
  source 1..110: mol_type = other DNA
agaactttctggagtcagtgaatgacatgggtccctcacggaggattaacagaaattctcaaacggggttggtaagactaagcacacgcttagggcagactatagtaaaa

SEQ ID NO: 39985 - DNA, 110 bp, synthetic construct
  source 1..110: mol_type = other DNA
ttacaaaattaccctctgaaatgcacacggtcgtcctgactctgggcaggtcatggtttgcatgaatgctggtggcttgttctgagcgcagcactcacggctttgcacct

SEQ ID NO: 39986 - DNA, 110 bp, synthetic construct
  source 1..110: mol_type = other DNA
cacgtggactttgtttggctcatgttggtgcggtttctggtctgagtgcggttagaagagctctttggaaaaagtaaagtaactctcagaggtcacaatggaccgcgtta

SEQ ID NO: 39987 - DNA, 110 bp, synthetic construct
  source 1..110: mol_type = other DNA
cggccgtgttctccacttgtctcggaaacgagcccgttgttcagggccccgagttttgttggggggctgcctctaattgatgcgcttgtctcacttttcttaagggccgt

SEQ ID NO: 39988 - DNA, 110 bp, synthetic construct
  source 1..110: mol_type = other DNA
ttgttggggggctgcctctaattgatgcgcttgtctcacttttcttaagggccgttttggggaccggttgctgtgcgtgtgctccgcagcggccgggacctcctcctgtg

SEQ ID NO: 39989 - DNA, 110 bp, synthetic construct
  source 1..110: mol_type = other DNA
agtcgctttacaaaacagtgcatagtggaagttatggacagggcacggcagtgacctgcaggagtggccccggcccgagtgatggggaagtaccgagaatcacggcacag

SEQ ID NO: 39990 - DNA, 110 bp, synthetic construct
  source 1..110: mol_type = other DNA
ctgcaggagtggccccggcccgagtgatggggaagtaccgagaatcacggcacaggcaggctagggaagtagcttcagtgccaagcgtagactgtgcgccgaggcaggag

SEQ ID NO: 39991 - DNA, 110 bp, synthetic construct
  source 1..110: mol_type = other DNA
tggcaagattttgttccttcttatggttaggtaactccattgtatgtatgtgctacatctttatccattcagctgccagtccacggttgagttgctttcagatctccctg

SEQ ID NO: 39992 - DNA, 110 bp, synthetic construct
  source 1..110: mol_type = other DNA
catctttatccattcagctgccagtccacggttgagttgctttcagatctccctgttgtaaataatgttgcagtcaacatagggggtgtgtatatcttttctaattagtg

SEQ ID NO: 39993 - DNA, 110 bp, synthetic construct
  source 1..110: mol_type = other DNA
attctggtctgttggtcagtatgtctgtctttatgccagtgccacactgttttgattacaacagctttgttgtatgttttgaaatgaagatgtgtgaggcttccaacttt

SEQ ID NO: 39994 - DNA, 110 bp, synthetic construct
  source 1..110: mol_type = other DNA
ctgctgacgctctgcaggaaggcggggtttggatgggccggtgcagctctgtctgtccctttgagacgcttattcgtaacaaacatgggtttgagtgtctaggggagagg

SEQ ID NO: 39995 - DNA, 110 bp, synthetic construct
  source 1..110: mol_type = other DNA
aattccagaaatcatgtcattttaccctacttaccaaagtaggtatgtctgaaaaacaggggcctgttctttcatgaggctttcaacttgacccatgagccagtttggca

SEQ ID NO: 39996 - DNA, 110 bp, synthetic construct; identical to SEQ ID NO: 39995
  source 1..110: mol_type = other DNA

SEQ ID NO: 39997 - DNA, 110 bp, synthetic construct
  source 1..110: mol_type = other DNA
gtggccttggatgagctgctggggtccctggcctgggccgccctgtgtgtggcgtggagcaccctgcagagagaggaacatcgggctgccagcgctgtgctacccactag

SEQ ID NO: 39998 - DNA, 110 bp, synthetic construct
  source 1..110: mol_type = other DNA
ggagcaccctgcagagagaggaacatcgggctgccagcgctgtgctacccactagggttcttggcctccccaagcaatagaaactgacaagaggccagacagaaaattca

SEQ ID NO: 39999 - DNA, 110 bp, synthetic construct
  source 1..110: mol_type = other DNA
accagaaaggcccatgttggacgcatgaaaacgcagtaaacctggcagtggagtggtctctgcagctggagcaaagtcctcggtgcgccggcaggtccctgcgtcattcc

SEQ ID NO: 40000 - DNA, 110 bp, synthetic construct
  source 1..110: mol_type = other DNA
ctcccgaaagaaagaaaatcttgcgagtgtcctgctagggcctcggtctgttaccacagcaaagagcattcatgacaagacgtcctcactttcggtgaaaagcttgatga

SEQ ID NO: 40001 - DNA, 110 bp, synthetic construct
  source 1..110: mol_type = other DNA
acagcaaagagcattcatgacaagacgtcctcactttcggtgaaaagcttgatgaaaagttttgtaaactagctgagccacttttgtcttcccatctgtcgggttcattt

SEQ ID NO: 40002 - DNA, 110 bp, synthetic construct
  source 1..110: mol_type = other DNA
gtgcagcctggagtaactcacagtcgcagcaggcattatagtgtctttaaaaacagtagcattatgaatcaattttagtgccaagagagagctgtataatggccccttaa

SEQ ID NO: 40003 - DNA, 110 bp, synthetic construct
  source 1..110: mol_type = other DNA
gtagcattatgaatcaattttagtgccaagagagagctgtataatggccccttaaaacttgtaaattacaggcagcagcatcaataaaacagtgacagccaaaccggtga

SEQ ID NO: 40004 - DNA, 110 bp, synthetic construct; identical to SEQ ID NO: 40002
  source 1..110: mol_type = other DNA

SEQ ID NO: 40005 - DNA, 110 bp, synthetic construct; identical to SEQ ID NO: 40003
  source 1..110: mol_type = other DNA

SEQ ID NO: 40006 - DNA, 110 bp, synthetic construct
  source 1..110: mol_type = other DNA
agatggaagggtgtcgtggagcctgtgtagctgctctaaactgctaaccgcgaaaggcggctgaagggacttgagtcaggtcgccacgtgtgtggcctcagcggctgttt

SEQ ID NO: 40007 - DNA, 110 bp, synthetic construct
  source 1..110: mol_type = other DNA
ggcggctgaagggacttgagtcaggtcgccacgtgtgtggcctcagcggctgtttcagaacctgtttcatttttcttaggaaatagcaatgggatggctgggccatgtgc

SEQ ID NO: 40008 - DNA, 110 bp, synthetic construct
  source 1..110: mol_type = other DNA
ttagacccagagaacactccgaagtcagccctactgtgcgcagaggttaaatcgctcccccggggctgcacgttaatgagacgaagagagcgaggtgaattatggtcttg

SEQ ID NO: 40009 - DNA, 110 bp, synthetic construct
  source 1..110: mol_type = other DNA
tcccccggggctgcacgttaatgagacgaagagagcgaggtgaattatggtcttggcacctaaacccgtgcttcctgcctcgcgtgctcagaactggggttccagaggcc

SEQ ID NO: 40010 - DNA, 110 bp, synthetic construct
  source 1..110: mol_type = other DNA
ctgcgctggctgctgggtcctgtctgtctcggactcctgctctccgcggcctcgtttccctgtttgcagacacgcagaataatgcctgcctgctccccatggcagtgccc

SEQ ID NO: 40011 - DNA, 110 bp, synthetic construct
  source 1..110: mol_type = other DNA
gggcttcactgaactcagaaaccatagaaagaggtgggtgggcccagaacagcctccacatcccggattaggaactggagcttcagagcttccgctcagaggccggctgg

SEQ ID NO: 40012 - DNA, 110 bp, synthetic construct
  source 1..110: mol_type = other DNA
catgtagaccctcccacatcagagacaggtgcacagacacacacacacaccgcccctcctaaaccccttcgatgcctgcagcggaagcctcatctcccaagctggagacc

SEQ ID NO: 40013 - DNA, 110 bp, synthetic construct
  source 1..110: mol_type = other DNA
cctcctggactttcgctctgtctcctcaactcacagtccccggggtcccctgaggtccccactccctgtatcatgacccagaaacctctcaaggcagttaagcttcggta

SEQ ID NO: 40014 - DNA, 110 bp, synthetic construct
  source 1..110: mol_type = other DNA
tccccactccctgtatcatgacccagaaacctctcaaggcagttaagcttcggtaccatagctcactccatctctcaggggtcgctgggctttgttgcctagtgaccagt

SEQ ID NO: 40015 - DNA, 110 bp, synthetic construct
  source 1..110: mol_type = other DNA
tgcagggctgggtgtggttcaggaagtggtgcttgagctgggttttgaaaacgcctggagttgctggccaggcggaaagtatgaggggcacggtgtgtggcctccacggg

SEQ ID NO: 40016 - DNA, 110 bp, synthetic construct
  source 1..110: mol_type = other DNA
atgtgccagtaggaaaaggatagattttccttaaatagttccaagaaagcaagtgagtggccacagggaaaaagaggtattgtccctactacacaccatatataaaaatc

SEQ ID NO: 40017 - DNA, 110 bp, synthetic construct
  source 1..110: mol_type = other DNA
agtggccacagggaaaaagaggtattgtccctactacacaccatatataaaaatctattctaggttgagacctaaatgtgaaaggcaaaatataaaatatttggaagata

SEQ ID NO: 40018 - DNA, 110 bp, synthetic construct
  source 1..110: mol_type = other DNA
aactctgggctgagaagcaccccagtgaggaggagtgccgtgtgatcgattcgttatgtctgccgtgggtacagaattgacagtgtttgcatgcttgctgtgtacttgcc

SEQ ID NO: 40019 - DNA, 110 bp, synthetic construct
  source 1..110: mol_type = other DNA
atgtctgccgtgggtacagaattgacagtgtttgcatgcttgctgtgtacttgcccggcctgggctagcgaaagacagacctctggaggtggaaggcttttccaacaata

SEQ ID NO: 40020 - DNA, 110 bp, synthetic construct
  source 1..110: mol_type = other DNA
tgagttcaatcctggctcaagccagggcctgccttcccaccctctgtgctgtctgacttccatggggacctggggcgggcttcctggaggcagcgatactggagctgagc

SEQ ID NO: 40021 - DNA, 110 bp, synthetic construct
  source 1..110: mol_type = other DNA
acttccatggggacctggggcgggcttcctggaggcagcgatactggagctgagccccagaggatggagaccagctaggatggggatgacggttcctcggaggacagggc

SEQ ID NO: 40022 - DNA, 110 bp, synthetic construct
  source 1..110: mol_type = other DNA
gtgccataatcttagagcccatttctgggaattctcgtttatcacaactaaaaaaatttgtggggggcagttcctgtcatggctcagtggttaaagaatctgactaggaa

SEQ ID NO: 40023 - DNA, 110 bp, synthetic construct; identical to SEQ ID NO: 40022
  source 1..110: mol_type = other DNA

SEQ ID NO: 40024 - DNA, 110 bp, synthetic construct
  source 1..110: mol_type = other DNA
agcctaagcagacggagtatcatggtaggaacatctcagcctgagagctgagtccgtggctcagcccaggcgacggtcttagggaggctcacttaggccatccaggaaaa

SEQ ID NO: 40025 - DNA, 110 bp, synthetic construct
  source 1..110: mol_type = other DNA
agttcttttatgccaccacttcccttttttggggggtggggagctcgaagggacgtaaacttctaaggccacacgtaagtgaattcttcttgccttcatgtgtaacagcc

SEQ ID NO: 40026 - DNA, 110 bp, synthetic construct
  source 1..110: mol_type = other DNA
actgtttctcatgaacatagaggccaagtccttaacaaatactagcaagttgacccaacaatatagctacttgtcaccaataacaatacatctggaaccttggcatctct

SEQ ID NO: 40027 - DNA, 110 bp, synthetic construct
  source 1..110: mol_type = other DNA
cctcacctttaagatttttagattggtttctaatctggcgtcattaccaaggcatagaaagaattttagggttaaaagcttcagaaaagaatgaataaataaggcctgtg

SEQ ID NO: 40028 - DNA, 110 bp, synthetic construct
  source 1..110: mol_type = other DNA
agaaagaattttagggttaaaagcttcagaaaagaatgaataaataaggcctgtggttagtttggagcctcctccccaactggaaagcccctcccatcttctctctgtgc

SEQ ID NO: 40029 - DNA, 110 bp, synthetic construct; identical to SEQ ID NO: 40027
  source 1..110: mol_type = other DNA

SEQ ID NO: 40030 - DNA, 110 bp, synthetic construct; identical to SEQ ID NO: 40028
  source 1..110: mol_type = other DNA

SEQ ID NO: 40031 - DNA, 110 bp, synthetic construct
  source 1..110: mol_type = other DNA
atgaacaatgaagagtgtatgcccttcaggagtttgcagatgaaggagcacacagactcagacaccaacgcctagagcgtcgtgtgataagtgctttttgtggagatgca

SEQ ID NO: 40032 - DNA, 110 bp, synthetic construct
  source 1..110: mol_type = other DNA
actcagacaccaacgcctagagcgtcgtgtgataagtgctttttgtggagatgcagagaagagggctcctaccagagcttcctttgaacactgaattgaatccaggaggc

SEQ ID NO: 40033 - DNA, 110 bp, synthetic construct
  source 1..110: mol_type = other DNA
ttcatctgcccggttgatgcaaattgattgttaaaggctgcctgcagctgtgtgttttgaaagatttgagcggttagtcccggccagcaggggagaactgtgatctatta

SEQ ID NO: 40034 - DNA, 110 bp, synthetic construct
  source 1..110: mol_type = other DNA
caagacatgtttcacctctcaccatcttcccgtcactaagtaccgttaccctgtcacggaagattagattcaccaggcagaaaaggttccttccgaaaatctctcaggct

SEQ ID NO: 40035 - DNA, 110 bp, synthetic construct
  source 1..110: mol_type = other DNA
ggagtgatacagtatgtatcctcttcagattggctatttaacttagttagcaagatgcactggaggttcttccaggtctttctgtagcttgatagctcattctgtcttaa

SEQ ID NO: 40036 - DNA, 110 bp, synthetic construct
  source 1..110: mol_type = other DNA
tgcactggaggttcttccaggtctttctgtagcttgatagctcattctgtcttaatgctgactagtattccactatctggatatctgggttgctgatatccactgctaaa

SEQ ID NO: 40037 - DNA, 110 bp, synthetic construct
  source 1..110: mol_type = other DNA
ccagggctccttcgcctcatctgatgaagcaggggtgttttcaagcaggggttgtaaataccattatacggatgggccagatgctgctggaggagggggagacagccgag

SEQ ID NO: 40038 - DNA, 110 bp, synthetic construct
  source 1..110: mol_type = other DNA
aaataccattatacggatgggccagatgctgctggaggagggggagacagccgaggggggtggggacgctagctgtgacaaaccatgggttccttctcctccttctgtgg

SEQ ID NO: 40039 - DNA, 110 bp, synthetic construct
  source 1..110: mol_type = other DNA
ccccaggaacacaggattgctgcgggctcacccccaagctcttggagctcagcagactccccaggagcactggggatgtgtgttctgtctatactgggtaagggcagaca

SEQ ID NO: 40040 - DNA, 110 bp, synthetic construct
  source 1..110: mol_type = other DNA
ttcaaaaatgtcaaaaaacgcaagttcccaaacatgacatgaccgtgtctgagcttcccgtcccaggagggaatcaagcagaatctcgaaggtcatctcctgtgagtcct

SEQ ID NO: 40041 - DNA, 110 bp, synthetic construct
  source 1..110: mol_type = other DNA
tcccgtcccaggagggaatcaagcagaatctcgaaggtcatctcctgtgagtcctgcagaggaaactggccccttcaggagggccaggccatccttgatctaacgcgcgg

SEQ ID NO: 40042 - DNA, 110 bp, synthetic construct
  source 1..110: mol_type = other DNA
ccaccagcatgggagtgaccctgcttgctgaactcagatggagcttttcagagatgggtcaagctgactctcggctaggaacgcacatctccgccgagtatctcggtcct

SEQ ID NO: 40043 - DNA, 110 bp, synthetic construct
  source 1..110: mol_type = other DNA
gggtcaagctgactctcggctaggaacgcacatctccgccgagtatctcggtcctcgatgggacctctgaagaaagcagagtcagcaaagggaccccattgtgtggaggg

SEQ ID NO: 40044 - DNA, 110 bp, synthetic construct
  source 1..110: mol_type = other DNA
ttagaaccacttgcacaagcaatcctttcatctgataatggcccctcacgtggctgtgttaccgcgtcctggtgggacaggagcggctgtttggtttataggcttccctg

SEQ ID NO: 40045 - DNA, 110 bp, synthetic construct
  source 1..110: mol_type = other DNA
gtgttaccgcgtcctggtgggacaggagcggctgtttggtttataggcttccctgttctcctcaggcagacaggcagccttggaaatattggttttgctcagcatcctgg

SEQ ID NO: 40046 - DNA, 110 bp, synthetic construct
  source 1..110: mol_type = other DNA
caacacccgatcctttaactcactggaccaagctagggatcgaaccccagcctcggtagtgacctgagccactgcagagacattgccggacccttaacctgctgctccac

SEQ ID NO: 40047 - DNA, 110 bp, synthetic construct
  source 1..110: mol_type = other DNA
cccccaccgtgagacattttctagagatgagaatattgttgtttggtgaatggagccagtgtgctcttgtgagctagtgggaaacagagattctagaaggaatgagcttg

SEQ ID NO: 40048 - DNA, 110 bp, synthetic construct
  source 1..110: mol_type = other DNA
ccagtgtgctcttgtgagctagtgggaaacagagattctagaaggaatgagcttgcatctgctgaaaacctcctctgtgtgggcagcgggaagcactccgcaagaacagt

SEQ ID NO: 40049 - DNA, 110 bp, synthetic construct
  source 1..110: mol_type = other DNA
atgaccagtctctgcctggctttgcatctaagaagtgcagacaacagccagccctaaaggaataccattcttcatttgtctcagagaacttgagaggacatccggtgtct

SEQ ID NO: 40050 - DNA, 110 bp, synthetic construct
  source 1..110: mol_type = other DNA
aaaggaataccattcttcatttgtctcagagaacttgagaggacatccggtgtctcacccagaatgtaactggttaaatcaaagccccgttccttccctcggggggggct

SEQ ID NO: 40051 - DNA, 110 bp, synthetic construct
  source 1..110: mol_type = other DNA
gctcgggcttgatccctggcccaggaacgtccacatgccacaggcatggccaataaataaataaatacatgtaaatgttgaggaaaatccacaaatgctcttctccctct

SEQ ID NO: 40052 - DNA, 110 bp, synthetic construct; identical to SEQ ID NO: 40051
  source 1..110: mol_type = other DNA

SEQ ID NO: 40053 - DNA, 110 bp, synthetic construct
  source 1..110: mol_type = other DNA
cgccccagtatcctctgtcacaccccctgctctgtcctgcgatagcccaggtgccggggacagaatcgattcaaaaatacgggctaagttatgaatgaaagagtgaatga

SEQ ID NO: 40054 - DNA, 110 bp, synthetic construct
  source 1..110: mol_type = other DNA
ggggacagaatcgattcaaaaatacgggctaagttatgaatgaaagagtgaatgactgcagagaaaatagcccggggctctgcttgagagctctgtggatactggcttgt

SEQ ID NO: 40055 - DNA, 110 bp, synthetic construct
  source 1..110: mol_type = other DNA
ggttgcctgagtctctgggaggctccatgatccaagtttacagggaaactgcgcggaccatgatggattcttgggctggtccggaatcaccgaatcaggatctctggggg

SEQ ID NO: 40056 - DNA, 110 bp, synthetic construct
  source 1..110: mol_type = other DNA
gatcttacgtttaagacatttttttttttccattttgagcttgattttcaagtgtgctgtatgcgacgggttcagttttacgtatctgcatgtggttattcagtttctcc

SEQ ID NO: 40057 - DNA, 110 bp, synthetic construct
  source 1..110: mol_type = other DNA
gctgtatgcgacgggttcagttttacgtatctgcatgtggttattcagtttctccacaccgttattacttttacttttagctgcacctgcagcatgtggaagttcccggc

SEQ ID NO: 40058 - DNA, 110 bp, synthetic construct
  source 1..110: mol_type = other DNA
atgattctctgataaacactcatcctggctgttctcatcgaatccaaaggcctcagttattctctgtaggttcttgatgctgcaatctcgcttgatgtgtttctgcaaac

SEQ ID NO: 40059 - DNA, 110 bp, synthetic construct
  source 1..110: mol_type = other DNA
gttattctctgtaggttcttgatgctgcaatctcgcttgatgtgtttctgcaaacccatgtatcccactgcatttctccaggagcacgttcaaaacacctcacacaggag

SEQ ID NO: 40060 - DNA, 110 bp, synthetic construct
  source 1..110: mol_type = other DNA
ctgttgttgttgttgttataattgcttctcaaagagtttctcacctaatgggcctttctttacatcttctctcttttggtcatgtctgtggcatgtggaagttcccaggc

SEQ ID NO: 40061 - DNA, 110 bp, synthetic construct
  source 1..110: mol_type = other DNA
ttataattgcttctcaaagagtttctcacctaatgggcctttctttacatcttctctcttttggtcatgtctgtggcatgtggaagttcccaggccagggattgaattca

SEQ ID NO: 40062 - DNA, 110 bp, synthetic construct
  source 1..110: mol_type = other DNA
taattagttcggagatgcttagctgcccaaccgctgaggcagcgtcctaagatgacagtagacaataaatcccatatagccgccttggggagagcttggaaagtcgtttc

SEQ ID NO: 40063 - DNA, 110 bp, synthetic construct
  source 1..110: mol_type = other DNA
cagtagacaataaatcccatatagccgccttggggagagcttggaaagtcgtttccaaaaggaaccgtatcgttgagtcaccctgataccctttcttaagcctgctgtga

SEQ ID NO: 40064 - DNA, 110 bp, synthetic construct
  source 1..110: mol_type = other DNA
gccctcccagagagacgccccctcttgctttgtgaggatgctgcattggaaccacacgggcacagaactcagactactgatcgaggatttgccctgatcaaggagctcct

SEQ ID NO: 40065 - DNA, 110 bp, synthetic construct
  source 1..110: mol_type = other DNA
acgggcacagaactcagactactgatcgaggatttgccctgatcaaggagctcctggctcccagcacatttatgtttgtgaatagtttttctcatcccaggatgcacact

SEQ ID NO: 40066 - DNA, 110 bp, synthetic construct
  source 1..110: mol_type = other DNA
gagacacgtagggatggaggaggcaaaggagaacagtgtaaacaaagaagaagctgcttagcagtcgccatgcgaggcagccgagagcattacagagatcagatccagtc

SEQ ID NO: 40067 - DNA, 110 bp, synthetic construct
  source 1..110: mol_type = other DNA
gcttagcagtcgccatgcgaggcagccgagagcattacagagatcagatccagtcgcatcgagaggtctgctcatagcgacacttggggaaattcgtttggagttgctcc

SEQ ID NO: 40068 - DNA, 110 bp, synthetic construct
  source 1..110: mol_type = other DNA
cctatgtggcagagggcctttgttcctgatctgctcacagatgcattttcatcgggtgcctacggacaacagggcagtcatgcggtgaaaagaaatattttcatctgagc

SEQ ID NO: 40069 - DNA, 110 bp, synthetic construct
  source 1..110: mol_type = other DNA
gtgcctacggacaacagggcagtcatgcggtgaaaagaaatattttcatctgagctggctgaggttggtagacaggtggaatagtcactgctgtaagctggagaaagcct

SEQ ID NO: 40070 - DNA, 110 bp, synthetic construct
  source 1..110: mol_type = other DNA
cctatagatgtcgcatctggtccatgcacactgtctcttttgcctcagcaaattctgaatgtctgagcttcccccaatgcatgaacctctatcctgctgcctgcggtggc

SEQ ID NO: 40071 - DNA, 110 bp, synthetic construct
  source 1..110: mol_type = other DNA
tgaatgtctgagcttcccccaatgcatgaacctctatcctgctgcctgcggtggccttaactttttgaagagtgaaacaagccctggtctgctggtccccgaactgtggg

SEQ ID NO: 40072 - DNA, 110 bp, synthetic construct
  source 1..110: mol_type = other DNA
aatataatgttagctttatttccctgtggtattttgatttggcaggtgggcttctggaatgaaatgctttcacaaatacttcttgaggccctgtgatggcgataaggccg

SEQ ID NO: 40073 - DNA, 110 bp, synthetic construct
  source 1..110: mol_type = other DNA
ggaatgaaatgctttcacaaatacttcttgaggccctgtgatggcgataaggccgtctgaggctactggttatcaagtcccctttgccatcagagacttggactccccct

SEQ ID NO: 40074 - DNA, 110 bp, synthetic construct; identical to SEQ ID NO: 40072
  source 1..110: mol_type = other DNA

SEQ ID NO: 40075 - DNA, 110 bp, synthetic construct; identical to SEQ ID NO: 40073
  source 1..110: mol_type = other DNA

SEQ ID NO: 40076 - DNA, 110 bp, synthetic construct
  source 1..110: mol_type = other DNA
ccaacaacctcgctgtcccggctgggccctcggacgtgtcccccctttgcacgctgcttctgttgtctctcctcccgtgcctgtaaggtggcttgcactcccctcttctg

SEQ ID NO: 40077 - DNA, 110 bp, synthetic construct
  source 1..110: mol_type = other DNA
gcttctgttgtctctcctcccgtgcctgtaaggtggcttgcactcccctcttctgtgtccctgtaatacaaatacctgcgctttgtcagatggtcattctttgccagcta

SEQ ID NO: 40078 - DNA, 110 bp, synthetic construct
  source 1..110: mol_type = other DNA
tcctggccttggcgatgctgatggccttgtccgtggtctgtggttatgccgaacgcacgacctgacagtcattcacttgctggtttctcttccccattagaccaggggtc

SEQ ID NO: 40079 - DNA, 110 bp, synthetic construct
  source 1..110: mol_type = other DNA
atcgttttcagcagacctgggttcaaaatcctgatcctccactaacttgctgcagattgttgagaaagttagttacctgtttgttttttctcttaagctcacctcgtctc

SEQ ID NO: 40080 - DNA, 110 bp, synthetic construct
  source 1..110: mol_type = other DNA
attgttgagaaagttagttacctgtttgttttttctcttaagctcacctcgtctcaggttccttaaactaggcaggataattgctgggaggaccgaatgagcacatccac

SEQ ID NO: 40081 - DNA, 110 bp, synthetic construct
  source 1..110: mol_type = other DNA
ccacgaggagcctgcccctctgaggagcattgccttttcgtgtttccagggctcgtgatcaaagcgtgtccctccctggtcgttggaaaggccgtgtggcccgcggtgaa

SEQ ID NO: 40082 - DNA, 110 bp, synthetic construct
  source 1..110: mol_type = other DNA
tgatcaaagcgtgtccctccctggtcgttggaaaggccgtgtggcccgcggtgaaggagccacagggtgaatccgtgaccatcgtctttcccagcagccagatgccattt

SEQ ID NO: 40083 - DNA, 110 bp, synthetic construct
  source 1..110: mol_type = other DNA
tcggaaagggtacctcattccctccaagacacagttcatcctcttgctgacctctaggagccctgaccttggccccttgctgacttcgctgctgcctggtttcctttgta

SEQ ID NO: 40084 - DNA, 110 bp, synthetic construct
  source 1..110: mol_type = other DNA
aggagccctgaccttggccccttgctgacttcgctgctgcctggtttcctttgtatgcgttagagacaccctctgagcctggagttctgcttatcacggctgcttctcca

SEQ ID NO: 40085 - DNA, 110 bp, synthetic construct
  source 1..110: mol_type = other DNA
gggacctagaagatttagcctactgagggccatttcactgtgatcaagtggcccgctgggtcttgggaggctctgggaagctgcagctgggaggccatccctccacgctg

SEQ ID NO: 40086 - DNA, 110 bp, synthetic construct
  source 1..110: mol_type = other DNA
gtttgggacacatcaccgaagctcctagttccctatatctgctctcaaaggacttttcattaaagttatattggcatatgatcaactatttaaagtgtaggacttgaggt

SEQ ID NO: 40087 - DNA, 110 bp, synthetic construct
  source 1..110: mol_type = other DNA
ttcattaaagttatattggcatatgatcaactatttaaagtgtaggacttgaggtgtttggcctgtgtggacacctagaaaagcatcaccacgagcaaaaaaagtgacgg

SEQ ID NO: 40088 - DNA, 110 bp, synthetic construct
  source 1..110: mol_type = other DNA
catgctcttcctcgaaggtgggcagcacgacccaacggctctacgagattaaatgccttgagaacaagaagcttatgtttgattctctgtagttctactgacagcagcca

SEQ ID NO: 40089 - DNA, 110 bp, synthetic construct
  source 1..110: mol_type = other DNA
ctcgtggatgtattcattcagccattcgggtatttaagaggtatccactgagtgctgctggatgtatgaagatcagtcagacagggttcttgccgcagagggactaggag

SEQ ID NO: 40090 - DNA, 110 bp, synthetic construct
  source 1..110: mol_type = other DNA
tgctggatgtatgaagatcagtcagacagggttcttgccgcagagggactaggagaggcaaagtctacacagactctcctcctcctcctaatcgcatgctctttctgggc

SEQ ID NO: 40091 - DNA, 110 bp, synthetic construct
  source 1..110: mol_type = other DNA
tcattccatgcatgcttgagaatagcgtgtgatcccagatgcttcacacaggttctatgtgcccatgaaattaggcttctttcgtgtatgactcaaatctcatacattgt

SEQ ID NO: 40092 - DNA, 110 bp, synthetic construct
  source 1..110: mol_type = other DNA
tatgtgcccatgaaattaggcttctttcgtgtatgactcaaatctcatacattgtcattaacttttttttacttgatatagtagctatttgagagatgcatgctgaactt

SEQ ID NO: 40093 - DNA, 110 bp, synthetic construct
  source 1..110: mol_type = other DNA
tagtgttgtgatagaaaatgacccctgcacacctgtttttccctggtagctcttgcagggctgggttatacttgtctttactcgttcaggtgtggcctctgtaaatatgg

SEQ ID NO: 40094 - DNA, 110 bp, synthetic construct
  source 1..110: mol_type = other DNA
cacagccccgacaaaactgggttgtttttgttttttgtttttgttttttgctttttaggtctgcatatggaagttcccaggcgaggggtcaaataggaactgcagctgcc

SEQ ID NO: 40095 - DNA, 110 bp, synthetic construct
  source 1..110: mol_type = other DNA
actgggttgtttttgttttttgtttttgttttttgctttttaggtctgcatatggaagttcccaggcgaggggtcaaataggaactgcagctgccgacctacaccacaac

SEQ ID NO: 40096 - DNA, 110 bp, synthetic construct
  source 1..110: mol_type = other DNA
ctttcctgtcctcttcctttccttcctgtcttcctccctccctttctacctttctggccagttcctgtccttcctcgtggcagcttttatgatgacctgtcatctgcatt

SEQ ID NO: 40097 - DNA, 110 bp, synthetic construct
  source 1..110: mol_type = other DNA
ggccagttcctgtccttcctcgtggcagcttttatgatgacctgtcatctgcattcagtaatgttttgggcaaggttctagcatagatatccatatggaaaggaagccca

SEQ ID NO: 40098 - DNA, 110 bp, synthetic construct
  source 1..110: mol_type = other DNA
agaggccactagagaggcgcctggccactcaacttagatccaggccatgggagtgagaacatgctagatgatcctgccccagccaagctctcccaacgccaaccgggaaa

SEQ ID NO: 40099 - DNA, 110 bp, synthetic construct
  source 1..110: mol_type = other DNA
agaacatgctagatgatcctgccccagccaagctctcccaacgccaaccgggaaaactgctcacacgccccatagaaacacaatgatgtaatagttttaattactattat

SEQ ID NO: 40100 - DNA, 110 bp, synthetic construct
  source 1..110: mol_type = other DNA
tgattttagataaaccccttgacttcaggattctgtaggcaatgtttctgctacattagctgagttcccaataggaggtatgtggattgaagccagagctggagaagggg

SEQ ID NO: 40101 - DNA, 110 bp, synthetic construct
  source 1..110: mol_type = other DNA
gttgcaggggatgtaatggctagacccacgtttctaacaaattaattgtgaataagacaactagaggtgcgttaatgaccagcgtagcaaactggaggtgctggaccaaa

SEQ ID NO: 40102 - DNA, 110 bp, synthetic construct
  source 1..110: mol_type = other DNA
gacaactagaggtgcgttaatgaccagcgtagcaaactggaggtgctggaccaaatacatacaaaagcacagccatcgaaatcaggaaaacgaggcggagggagtgcgat

SEQ ID NO: 40103 - DNA, 110 bp, synthetic construct
  source 1..110: mol_type = other DNA
cctattcattctgtatgacccattacgtgtatggaatctaagctccttgaagacagagctcttcacggagagctgtgccgtttgcgtttctgtttctgattcctaccgtc

SEQ ID NO: 40104 - DNA, 110 bp, synthetic construct
  source 1..110: mol_type = other DNA
gagctcttcacggagagctgtgccgtttgcgtttctgtttctgattcctaccgtcatgtctggcacataaagcagcttctcagaataccttcattggcgtaatggctatt

SEQ ID NO: 40105 - DNA, 110 bp, synthetic construct
  source 1..110: mol_type = other DNA
aaagaacttctctcccaaacactataacattatttggttgaaagctgtgcctggagtgtaaataaatgcttggaggagacaagtatctgcagaacttaaaggaagaatag

SEQ ID NO: 40106 - DNA, 110 bp, synthetic construct
  source 1..110: mol_type = other DNA
gtgtaaataaatgcttggaggagacaagtatctgcagaacttaaaggaagaatagcagcatcgttaagttgaaagagtcccagccttccattcagggaccacttctttgc

SEQ ID NO: 40107 - DNA, 110 bp, synthetic construct
  source 1..110: mol_type = other DNA
gtcttaatcttgatgccaccgttttcaagaattgggatcatcacgcattttaggagttagagttaagacactgtccttacccttgaggccaggtagctgtatgactacag

SEQ ID NO: 40108 - DNA, 110 bp, synthetic construct
  source 1..110: mol_type = other DNA
gttagagttaagacactgtccttacccttgaggccaggtagctgtatgactacaggtgaattactttatctttttaaacatcagttttctcctaataagatgggactgaa

SEQ ID NO: 40109 - DNA, 110 bp, synthetic construct
  source 1..110: mol_type = other DNA
gagccattcaacatcctgtttttggctttgcaggactccaggtagagtccagttcaaccaatgccaactttccacctacagaactgagatttcgtgaatggatgtagctt

SEQ ID NO: 40110 - DNA, 110 bp, synthetic construct
  source 1..110: mol_type = other DNA
aaccaatgccaactttccacctacagaactgagatttcgtgaatggatgtagctttacgctgctaagctggtggtaatttgctacccaccaagagaaaactaatatacgg

SEQ ID NO: 40111 - DNA, 110 bp, synthetic construct
  source 1..110: mol_type = other DNA
catggaagaatctcaaatgcataactccaagagaaggaaaccaatatttacatactctatcattcctttaaatgtggaattgtggaaaaggaaaaaaaaaatcacagggg

SEQ ID NO: 40112 - DNA, 110 bp, synthetic construct
  source 1..110: mol_type = other DNA
tctatcattcctttaaatgtggaattgtggaaaaggaaaaaaaaaatcacaggggtagaaaagcaattagcagtgccagggctggaaggtgaatggagagaggacatagg

SEQ ID NO: 40113 - DNA, 110 bp, synthetic construct
  source 1..110: mol_type = other DNA
cctctggacagcccacccagcatcttcaacagagggacaaatgcgcagaatcctgcaaatcatactgggaacatcctgagctgggaatctgaagcccattgtcttggcct

SEQ ID NO: 40114 - DNA, 110 bp, synthetic construct
  source 1..110: mol_type = other DNA
aactccagggactttattattaaatagcaatgagatagcagtagaagccaggactatccttggtaaattggaacttacggtcgccaaaccctctggtataagaaatgaga

SEQ ID NO: 40115 - DNA, 110 bp, synthetic construct
  source 1..110: mol_type = other DNA
atccttggtaaattggaacttacggtcgccaaaccctctggtataagaaatgagacattttcctaaatgcaaaccatttccttgataaaataactgcaaaattacttatt

SEQ ID NO: 40116 - DNA, 110 bp, synthetic construct
  source 1..110: mol_type = other DNA
gcactgtagctgtcagagtctgctacagagctagaaaatggaacaaagggccatgatttgaattggtcaccccatccccacccccagtctcctgaaagttgagggaggaa

SEQ ID NO: 40117 - DNA, 110 bp, synthetic construct
  source 1..110: mol_type = other DNA
attttgatttcacatgcatatagaaagtctaaattacagatgtgtgtgtgtgcgtgtgtgactatatttaattaggaacacttgtaagcatttacaaatgtatgttggga

SEQ ID NO: 40118 - DNA, 110 bp, synthetic construct
  source 1..110: mol_type = other DNA
gtgtgtgcgtgtgtgactatatttaattaggaacacttgtaagcatttacaaatgtatgttgggaaggatgtattaattcacttctatataactatcaaccagaactaga

SEQ ID NO: 40119 - DNA, 110 bp, synthetic construct
  source 1..110: mol_type = other DNA
cccccaatataatttcttggatcttccaacttcacaaatgttcttgttacttatggcagcaacacagtggacaggcacacagttgtgggaagaggatgcagctccataca

SEQ ID NO: 40120 - DNA, 110 bp, synthetic construct
  source 1..110: mol_type = other DNA
gcagcaacacagtggacaggcacacagttgtgggaagaggatgcagctccatacaaactgctcgagcccgtgccaatggcccctgctcagactcactaaatgattcatca

SEQ ID NO: 40121 - DNA, 110 bp, synthetic construct
  source 1..110: mol_type = other DNA
agcagctcctcaaacttgccccatggtggcttatgtcccttagggtagcattttgagtcatgggacaccacctaagtccaaggagacagcaaagtctcaagctattttgt

SEQ ID NO: 40122 - DNA, 110 bp, synthetic construct
  source 1..110: mol_type = other DNA
agtcatgggacaccacctaagtccaaggagacagcaaagtctcaagctattttgtgcctgaaaaaggagaagtgaaaatatttggtaaacagctcattcactaccacgaa

SEQ ID NO: 40123 - DNA, 110 bp, synthetic construct
  source 1..110: mol_type = other DNA
aattgtatatctcaggacagttctcccaaggcaacgaattctttccaatccaattttatgccctgatcccttgaccaagcacctccaggttccagtccatataaactgta

SEQ ID NO: 40124 - DNA, 110 bp, synthetic construct
  source 1..110: mol_type = other DNA
ttatgccctgatcccttgaccaagcacctccaggttccagtccatataaactgtatcctccccattcaagatgggtggaccaaagtgggtcttagcaagtggactggccc

SEQ ID NO: 40125 - DNA, 110 bp, synthetic construct
  source 1..110: mol_type = other DNA
atggtcttcagaacaaggcggaaacacctaggatgggagagactgctagatctggagagcagctagactgataatgaaggaacaatgtgctttattaaaactgcctcctt

SEQ ID NO: 40126 - DNA, 110 bp, synthetic construct
  source 1..110: mol_type = other DNA
ggagagactgctagatctggagagcagctagactgataatgaaggaacaatgtgctttattaaaactgcctccttggagttcctgtcgtggcgcagtggctaacgaatcc

SEQ ID NO: 40127 - DNA, 110 bp, synthetic construct
  source 1..110: mol_type = other DNA
ggcttcccatcccaacgcctgggcccgcctggagaacagggattcagtccacttacatttctgtttccggtgcttcacacagcgtgagcggaggctgtactaaagcactg

SEQ ID NO: 40128 - DNA, 110 bp, synthetic construct
  source 1..110: mol_type = other DNA
catttctgtttccggtgcttcacacagcgtgagcggaggctgtactaaagcactgctggtggaagcgcatcacagaggagtggtttttttatctggatgctgttcccact

SEQ ID NO: 40129 - DNA, 110 bp, synthetic construct
  source 1..110: mol_type = other DNA
ccccagtatactagtcataagcacaaagagtaaatggggatgcattaatttttaatgttgttttaatcagcttcattaaaatgcaattaatatgccgtaagattcccaat

SEQ ID NO: 40130 - DNA, 110 bp, synthetic construct
  source 1..110: mol_type = other DNA
tgttgttttaatcagcttcattaaaatgcaattaatatgccgtaagattcccaattttagtgcacacttttacgagtttttacaaatgtatgtaatagtttagccaccac

SEQ ID NO: 40131 - DNA, 110 bp, synthetic construct
  source 1..110: mol_type = other DNA
tcagtcatgctcccttggagagaccccaactagtctggctcagttttaaatgtaggatgctgccagtcttcgcttacgccactaccattcctaagttcagtattacacgg

SEQ ID NO: 40132 - DNA, 110 bp, synthetic construct
  source 1..110: mol_type = other DNA
aaaaggcaagaaaaagaaaaagaaaaagaaagggaagaatggggcacagcagaccaccagctgcagaaaatgcacggtctgtctcggcgaatgctataaagctccctcct

SEQ ID NO: 40133 - DNA, 110 bp, synthetic construct
  source 1..110: mol_type = other DNA
accagctgcagaaaatgcacggtctgtctcggcgaatgctataaagctccctccttcaggcgtggggaattatgtgactgggccttaactgtgcttcctgagtgtccttc

SEQ ID NO: 40134 - DNA, 110 bp, synthetic construct
  source 1..110: mol_type = other DNA
ccattcttatgctacgtgggacaatattactgatttccctataatccttgagtggttactcatcggcctcaagatactgaacatacaaggtcctccatcacccatcttct

SEQ ID NO: 40135 - DNA, 110 bp, synthetic construct
  source 1..110: mol_type = other DNA
ttactcatcggcctcaagatactgaacatacaaggtcctccatcacccatcttctcatagctccccagcattttcatttttattctcatcctggttaaaaggaagtgctt

SEQ ID NO: 40136 - DNA, 110 bp, synthetic construct
  source 1..110: mol_type = other DNA
tttatctctaaactccaaaataggcctctgtaacgtctcatggccgtttgtatccgctatatcctaggtacagaattctaaatttagctctgcctccaaggccactgtcc

SEQ ID NO: 40137 - DNA, 110 bp, synthetic construct
  source 1..110: mol_type = other DNA
atctgacctaccagttactagcttcatgatcctgggcaatttgtttattttttaaatatgttgtgaagtccaagcttgtactgcttaccacacggcaggccaataaattg

SEQ ID NO: 40138 - DNA, 110 bp, synthetic construct
  source 1..110: mol_type = other DNA
atatgttgtgaagtccaagcttgtactgcttaccacacggcaggccaataaattgagaggtgggtttttggggcaaggaagagtaactttattcagaaaaccagcatatg

SEQ ID NO: 40139 - DNA, 110 bp, synthetic construct
  source 1..110: mol_type = other DNA
tgaggccccaggatgaaacctcccttcccagaatcttgatcttggacttcccagcctccagaagtaagcgaaataaatttttatggttcaagccacccaatctttgggac

SEQ ID NO: 40140 - DNA, 110 bp, synthetic construct
  source 1..110: mol_type = other DNA
ctccagaagtaagcgaaataaatttttatggttcaagccacccaatctttgggactttgctatagcaactcaagctgtaggttttttgattcatacatagagtgaccatg

SEQ ID NO: 40141 - DNA, 110 bp, synthetic construct
  source 1..110: mol_type = other DNA
gaggaggggaagccagacctccaggaaaggatgagtctaagtggacacagccaaaaaaatatatggaccacggccatggtccgtaatgaaacactaaggggaatgctgag

SEQ ID NO: 40142 - DNA, 110 bp, synthetic construct
  source 1..110: mol_type = other DNA
aaaatatatggaccacggccatggtccgtaatgaaacactaaggggaatgctgagattgcagttgctcagggaacattatgtgaaatgtaagagaatggggcagagactc

SEQ ID NO: 40143 - DNA, 110 bp, synthetic construct
  source 1..110: mol_type = other DNA
tgcagtgggcacgaaggccatagttgatgtctgtgacttccgtctttctcctcttcagtccacattcccactgccttcagccaggagctcgtcttgctaatgctcttcac

SEQ ID NO: 40144 - DNA, 110 bp, synthetic construct
  source 1..110: mol_type = other DNA
gaagatcaattagtcaataccaaagacctctgctggtcaaaccactggtaatcaccatgtcgtgtgagccctttggcccattatggtagctgtttccactcttctcttgc

SEQ ID NO: 40145 - DNA, 110 bp, synthetic construct
  source 1..110: mol_type = other DNA
catgtcgtgtgagccctttggcccattatggtagctgtttccactcttctcttgctcttagaggatgccattttgcccctgaagaatattatcatctccattgagttcag

SEQ ID NO: 40146 - DNA, 110 bp, synthetic construct
  source 1..110: mol_type = other DNA
agaaaaggcagcttaaagagacacccttccatctctttggccctagcttcctttacaattagatataaagtgtgttctgcactatgtccctctcgttcttacctgccgtc

SEQ ID NO: 40147 - DNA, 110 bp, synthetic construct
  source 1..110: mol_type = other DNA
caattagatataaagtgtgttctgcactatgtccctctcgttcttacctgccgtcgtctctcagactttttacacagatgactgagatcgtaacgtgggatcgtggaacc

SEQ ID NO: 40148 - DNA, 110 bp, synthetic construct
  source 1..110: mol_type = other DNA
aggctcaagggtccatctctcacgctgtgtataaaagcaatactgaagagcaaaagaaaaagaaatagtcaagcctaacctagaccccacagcataacctaatgaccctc

SEQ ID NO: 40149 - DNA, 110 bp, synthetic construct
  source 1..110: mol_type = other DNA
gaaaaagaaatagtcaagcctaacctagaccccacagcataacctaatgaccctcctaaaacccctactcccagtcactgtcctcggacgagcctggtttgtggctcact

SEQ ID NO: 40150 - DNA, 110 bp, synthetic construct
  source 1..110: mol_type = other DNA
agacttcgtaaagcctgtccaatgggacgtcagaactgacacggaccagtgcctgctgtgggttcccattcttccactttctagctgagaatgtctttgcataggaggag

SEQ ID NO: 40151 - DNA, 110 bp, synthetic construct
  source 1..110: mol_type = other DNA
ctgtgggttcccattcttccactttctagctgagaatgtctttgcataggaggaggatggggaaacagacaactccctttttatttgtaaattactgaaccatgagacga

SEQ ID NO: 40152 - DNA, 110 bp, synthetic construct
  source 1..110: mol_type = other DNA
cactggccgctcagcgctggacactggaatccacagccccagtgccctctgccttgccaagaatgaacgtgtctctgcagacatttctgtcagttcctttctgcactcat

SEQ ID NO: 40153 - DNA, 110 bp, synthetic construct
  source 1..110: mol_type = other DNA
gccaagaatgaacgtgtctctgcagacatttctgtcagttcctttctgcactcatcttccggcctgtcacgcacaggcagcaagtcaccatggggttatgagctgctaag

SEQ ID NO: 40154 - DNA, 110 bp, synthetic construct
  source 1..110: mol_type = other DNA
cctagcctgggaacctccatatgccactggagcagccctctaaatacaaaaaaatactcagtgtttgtgaatcagcccgcctcgcacaagcccccatcgcaacccctatt

SEQ ID NO: 40155 - DNA, 110 bp, synthetic construct; identical to SEQ ID NO: 40154
  source 1..110: mol_type = other DNA

SEQ ID NO: 40156 - DNA, 110 bp, synthetic construct
  source 1..110: mol_type = other DNA
ctcttacctttcctggcatctccttcagccaccagggctggctgactatttctcagatgctatgagcacacttcccctgaggagctcagcacctgcttctctttcaaatg

SEQ ID NO: 40157 - DNA, 110 bp, synthetic construct
  source 1..110: mol_type = other DNA
gatgctatgagcacacttcccctgaggagctcagcacctgcttctctttcaaatgttagcttttcaacgaggctgttcaagaatccattccttacaactgcaaccctgct

SEQ ID NO: 40158 - DNA, 110 bp, synthetic construct
  source 1..110: mol_type = other DNA
ttcccagtgatcttgtctcttgacccatttagatcactagccggaaccttgaaacaaaagtagactcttcgctttgaaaagagccggaagaaggaggaagcggaacactt

SEQ ID NO: 40159 - DNA, 110 bp, synthetic construct
  source 1..110: mol_type = other DNA
aaaagtagactcttcgctttgaaaagagccggaagaaggaggaagcggaacacttgggaatcacattcattccaaagccggtgtgagcagcagagggtggaggatggagg

SEQ ID NO: 40160 - DNA, 110 bp, synthetic construct
  source 1..110: mol_type = other DNA
aacaggagacaattctgcccacagacatcataaaacaaaataacagaaataatagctaacatttattggagcaacaagaggcatgcactggaaaatcgctagcatatcct

SEQ ID NO: 40161 - DNA, 110 bp, synthetic construct
  source 1..110: mol_type = other DNA
ctaacatttattggagcaacaagaggcatgcactggaaaatcgctagcatatcctatctattttgcatctgttacgtgttttaatccttacaaaaactccatgaggtctg

SEQ ID NO: 40162 - DNA, 110 bp, synthetic construct
  source 1..110: mol_type = other DNA
taaagataaaagatacttccagaaacctaggcagtctaaggcgagagagataagccccctcctgttataaagccacatatatactgaaaaattataacaaactgttggat

SEQ ID NO: 40163 - DNA, 110 bp, synthetic construct
  source 1..110: mol_type = other DNA
cccctcctgttataaagccacatatatactgaaaaattataacaaactgttggatgcagacgtgaactcagaagaaagaaaggacactactaggtttcagcactaaagga

SEQ ID NO: 40164 - DNA, 110 bp, synthetic construct
  source 1..110: mol_type = other DNA
gaattttggttctggcttccatgtggtcctctgaatgaataaaatgaaatatgcagcatatgagctcagagcacaaggccattttatatctttccccccttttcatgagc

SEQ ID NO: 40165 - DNA, 110 bp, synthetic construct
  source 1..110: mol_type = other DNA
ttattcgtggtaacattgactgacaagggaaatgacattaataataaacaacctggagttcccgccgtggcacagtggttaatgaaccccacgaggatccacgaggacgc

SEQ ID NO: 40166 - DNA, 110 bp, synthetic construct
  source 1..110: mol_type = other DNA
ttgactgacaagggaaatgacattaataataaacaacctggagttcccgccgtggcacagtggttaatgaaccccacgaggatccacgaggacgcaggttccatccctgg

SEQ ID NO: 40167 - DNA, 110 bp, synthetic construct
  source 1..110: mol_type = other DNA
ccatcaatggctgggaaactgagacaagctcgtgggcatgccctcaacaccacgtgtcttgccacacccgtggtccaggagtctgacccgaaccttggcccgtactctga

SEQ ID NO: 40168 - DNA, 110 bp, synthetic construct
  source 1..110: mol_type = other DNA
ctttcttcttgattctagaagttctaccgctgtgtccacagccctgccacccggaaggatgaatgcatggggctgcattcaaggggcatcagcctccaggaggcacaggg

SEQ ID NO: 40169 - DNA, 110 bp, synthetic construct; identical to SEQ ID NO: 40168
  source 1..110: mol_type = other DNA

SEQ ID NO: 40170 - DNA, 110 bp, synthetic construct
  source 1..110: mol_type = other DNA
gagtgcgggcggggttagttgtgcattcaagctaactgatccaatccccatcctgggtctgctcagatgccagccccagccataggtggctgaggtctccatgccctctg

SEQ ID NO: 40171 - DNA, 110 bp, synthetic construct
  source 1..110: mol_type = other DNA
ggtctgctcagatgccagccccagccataggtggctgaggtctccatgccctctggacctctttgaacatctggtcagttttattcctgaccgtgggccacctctagtcc

SEQ ID NO: 40172 - DNA, 110 bp, synthetic construct
  source 1..110: mol_type = other DNA
caaagaccaaaaaacaggcacctttccctgagtcatgaaaagccatccttatgggtagctgggtgcccaaggtggggagaagagtcctgcattcatttgacaattatggc

SEQ ID NO: 40173 - DNA, 110 bp, synthetic construct
  source 1..110: mol_type = other DNA
tagctgggtgcccaaggtggggagaagagtcctgcattcatttgacaattatggcttgcaggttgaaaacctaggctctgtggtcaccctgcctgggtccaaatcctggc

SEQ ID NO: 40174 - DNA, 110 bp, synthetic construct
  source 1..110: mol_type = other DNA
atcccacctgcgggacgctgagcttcagaccctcacctgaaaagcgaagaggggtaaagcctggtttggccaaaggctttgctcaggttgctgctacttataagcaaacg

SEQ ID NO: 40175 - DNA, 110 bp, synthetic construct
  source 1..110: mol_type = other DNA
gaggtctcaggacacatgcgtgcaaagaattaagtggcacaggcagcaaaggatgagggtgactttgtgtcactgattcaggcgacaaggctacaggccaaaggagctca

SEQ ID NO: 40176 - DNA, 110 bp, synthetic construct
  source 1..110: mol_type = other DNA
agggtgactttgtgtcactgattcaggcgacaaggctacaggccaaaggagctcaaattcttctgcacgtagaaccacctggcttatgtcctcaagaccgaccatacttg

SEQ ID NO: 40177 - DNA, 110 bp, synthetic construct
  source 1..110: mol_type = other DNA
ttggcgcttccgtaatctctatggaatgactcccaccacgtctttagacgacgtgagattggggataaattacgatagagagatggggcgccagggctgcagtagctgta

SEQ ID NO: 40178 - DNA, 110 bp, synthetic construct
  source 1..110: mol_type = other DNA
agattggggataaattacgatagagagatggggcgccagggctgcagtagctgtagtctccattcttcagtttctttactgtcaagaagcaaagacacttcaaagagacc

SEQ ID NO: 40179 - DNA, 110 bp, synthetic construct
  source 1..110: mol_type = other DNA
cctgggcccttagtaaatataaagagacgccacttcagtccctagctgcttacattcttaccgggagggaacaagcctctcatacatttgaatttatggttaattcaaag

SEQ ID NO: 40180 - DNA, 110 bp, synthetic construct
  source 1..110: mol_type = other DNA
cacatgtgctgtccctctgccgtcacctgttctgtcttccacctgaagacttctggccggattatcactccctcctctgcttccctgatgacataacttgcacacacggt

SEQ ID NO: 40181 - DNA, 110 bp, synthetic construct
  source 1..110: mol_type = other DNA
tctgtctctggtgccaagcacttatttagcacttaacaatgtttgctgagctcaggtgggctagtcacaaacgaaagcgaggtgagggacgcgagtcgtgaccctggatg

SEQ ID NO: 40182 - DNA, 110 bp, synthetic construct
  source 1..110: mol_type = other DNA
gtgggctagtcacaaacgaaagcgaggtgagggacgcgagtcgtgaccctggatgctatgtccagagcacaggccatcaaagcagcttcacttacgtaatctccgtaggt

SEQ ID NO: 40183 - DNA, 110 bp, synthetic construct
  source 1..110: mol_type = other DNA
taactcctttcaggatgcctggcacgtggtcagggcacgtggccacagatgcgtgagtcaccactaagtgatgagcatgagccgctggtactgacagctccaccttttct

SEQ ID NO: 40184 - DNA, 110 bp, synthetic construct
  source 1..110: mol_type = other DNA
agtcaccactaagtgatgagcatgagccgctggtactgacagctccaccttttctatagtattctcaccgcttcctctctcatcctgacactgttccaggaaggttaagc

SEQ ID NO: 40185 - DNA, 110 bp, synthetic construct
  source 1..110: mol_type = other DNA
aatgaatgtaaaatgaagttgcttagaggaaaattcaaaaatagccctaagtgaatgcttagttgagttactctgtcacctgcttttgcttatggcactcccagaagagc

SEQ ID NO: 40186 - DNA, 110 bp, synthetic construct
  source 1..110: mol_type = other DNA
tgcttagttgagttactctgtcacctgcttttgcttatggcactcccagaagagcacattaacctacagcctccagacaagcacaactgtctagctttttgacacctgca

SEQ ID NO: 40187 - DNA, 110 bp, synthetic construct
  source 1..110: mol_type = other DNA
ctcttttaagactgttagaagaattaaatgaaataatgtacagaaagcacctaacccagaaaagcttcttgataaacggtaattggattcgccgtgtggctcgcagcata

SEQ ID NO: 40188 - DNA, 110 bp, synthetic construct
  source 1..110: mol_type = other DNA
ccagaaaagcttcttgataaacggtaattggattcgccgtgtggctcgcagcataactacttgcattgcttcttgataaatggtaactatttttaacaacttcaatcagg

SEQ ID NO: 40189 - DNA, 110 bp, synthetic construct
  source 1..110: mol_type = other DNA
gaaacgaagtttatgacagggaccgtgagtgaggactccctattgtcagaaagaagaaaatcggaatggaagccactgctccatgattctgcccaagaactgtttgagcc

SEQ ID NO: 40190 - DNA, 110 bp, synthetic construct
  source 1..110: mol_type = other DNA
gaaaatcggaatggaagccactgctccatgattctgcccaagaactgtttgagcctggctcaaatacagggctgcctagcatagtggttaaggctataatctaaaaagtt

SEQ ID NO: 40191 - DNA, 110 bp, synthetic construct
  source 1..110: mol_type = other DNA
gttacagaccttcatcaaatccttcaacacagtagagtgagagaaattgggtcagcagacgctacctccatcacgcttgctaacctagaccagaccggccagctgagaaa

SEQ ID NO: 40192 - DNA, 110 bp, synthetic construct
  source 1..110: mol_type = other DNA
cagacgctacctccatcacgcttgctaacctagaccagaccggccagctgagaaacaaccaggaccgtgtcatccttctagtgaataaaggcagggcctcaggggagtga

SEQ ID NO: 40193 - DNA, 110 bp, synthetic construct
  source 1..110: mol_type = other DNA
cagaacacagcacggcaattaggactggaggtcagcagaaggtcctcagccaggctaggggtcagggcatccatgacagagaccttgaatctaaggttactctaactcca

SEQ ID NO: 40194 - DNA, 110 bp, synthetic construct
  source 1..110: mol_type = other DNA
taggggtcagggcatccatgacagagaccttgaatctaaggttactctaactccaccttggaggcttaagtcactgagtgtctgagtaggactaaatccctgggagatgc

SEQ ID NO: 40195 - DNA, 110 bp, synthetic construct
  source 1..110: mol_type = other DNA
cgtggctgggccctttcacctctctgccctctgctcacctctgccatgagaagggactcagaatagtgattaccagcgcaaactctgtgttcacgccagatcagcttctt

SEQ ID NO: 40196 - DNA, 110 bp, synthetic construct
  source 1..110: mol_type = other DNA
actcagaatagtgattaccagcgcaaactctgtgttcacgccagatcagcttcttagtagcaaggagacctctagaagtttcccaagctcagttttctcatctacaaaat

SEQ ID NO: 40197 - DNA, 110 bp, synthetic construct
  source 1..110: mol_type = other DNA
agcctgcctctccagcttcactctgagccatcgttcccttgccccttctattctactctccctagaacatgctgtgttcttcacaggctcatagtctttcatgttgatgt

SEQ ID NO: 40198 - DNA, 110 bp, synthetic construct
  source 1..110: mol_type = other DNA
agaaatggatcactcaagaatattttgggaaatctatgtacaagctgtggggaagaggccatcgaactctcattctgactatattatgtccctggaggtgccacccgcca

SEQ ID NO: 40199 - DNA, 110 bp, synthetic construct
  source 1..110: mol_type = other DNA
atttttcatgtgttgaatcttgtaatttgaaccgaacgattgatttccccaactggtggtggaggtccttggtgggcagaccagacaaatcagggagcctgttggatgca

SEQ ID NO: 40200 - DNA, 110 bp, synthetic construct
  source 1..110: mol_type = other DNA
gtggtggaggtccttggtgggcagaccagacaaatcagggagcctgttggatgcaaagtcaccaaagggcattgggcttactcttttattcccaaagcttctgttctaat

SEQ ID NO: 40201 - DNA, 110 bp, synthetic construct
  source 1..110: mol_type = other DNA
cggaaaacaagggcagatgaaggacaaaccatgtcttccttcgtccttgatagaaaaatgtgtgcaccttgctgggcttggtggcagatgagctggcactgagagtgatc

SEQ ID NO: 40202 - DNA, 110 bp, synthetic construct
  source 1..110: mol_type = other DNA
aaatgtgtgcaccttgctgggcttggtggcagatgagctggcactgagagtgatctggattaactcgctaaatgtggccattcaacacgcggtagtgactcaagaagtgg

SEQ ID NO: 40203 - DNA, 110 bp, synthetic construct
  source 1..110: mol_type = other DNA
cagaccccaagccacgtattttttccagaatctagttgaggacaaacaccctttcttttcccactactgacagatccaggtctcacttggccagaatccactaggtggaa

SEQ ID NO: 40204 - DNA, 110 bp, synthetic construct
  source 1..110: mol_type = other DNA
ttttcccactactgacagatccaggtctcacttggccagaatccactaggtggaaaataaaaggagctgaaaataccacttctgggaggtggtcctgtcagggactagtt

SEQ ID NO: 40205 - DNA, 110 bp, synthetic construct
  source 1..110: mol_type = other DNA
agaattctctaggtgtgggcagggcttgttaacagctctatttcactcactttaggatgacagggtagggctccagtaatttggttggtgaatgaatgatgctaatatct

SEQ ID NO: 40206 - DNA, 110 bp, synthetic construct
  source 1..110: mol_type = other DNA
ggggccagacacaaaggatggtttataccacaaaacgtggctggaccatgcaggcttcgaaggcccagaagggaaaccaccacgggaggggttggttccagggctgtggg

SEQ ID NO: 40207 - DNA, 110 bp, synthetic construct
  source 1..110: mol_type = other DNA
ttcgaaggcccagaagggaaaccaccacgggaggggttggttccagggctgtgggaagaagtcttggaaaaggaaatttttgttagagaaatgcaccttacctacactga

SEQ ID NO: 40208 - DNA, 110 bp, synthetic construct
  source 1..110: mol_type = other DNA
gccgggtactgggatataggacaaacaggacaaggcctccccccgggactcccagtctcaggacacagatgtgaggacgattttgcattaagcagatgcatgagccgggt

SEQ ID NO: 40209 - DNA, 110 bp, synthetic construct
  source 1..110: mol_type = other DNA
ggcattagcgctcttatgagaagagacaccagaaagctctccctctgcgctccgccgtgaggacccggcacaaagatagtgcctgcaaaccaagaagtgggctctcacca

SEQ ID NO: 40210 - DNA, 110 bp, synthetic construct
  source 1..110: mol_type = other DNA
gcaggcaaccacaactctgattcagccactggcctgggaacttccacatgctgcaggtacagccctagaaagaaaaaaacaaaaaaaatgtcctagaatcatacgtggca

SEQ ID NO: 40211 - DNA, 110 bp, synthetic construct; identical to SEQ ID NO: 40210
  source 1..110: mol_type = other DNA

SEQ ID NO: 40212 - DNA, 110 bp, synthetic construct
  source 1..110: mol_type = other DNA
gacacactgttaacatttgctgaactattggaatcagcagccctggactgagtcacagcttggccatcctgtctctctgtatagtttcaagtacattgtttcatctcttt

SEQ ID NO: 40213 - DNA, 110 bp, synthetic construct
  source 1..110: mol_type = other DNA
cagcttggccatcctgtctctctgtatagtttcaagtacattgtttcatctctttgagcctcaaggacttatactatatacaaagagaccaaatccaattgaatattgaa

SEQ ID NO: 40214 - DNA, 110 bp, synthetic construct
  source 1..110: mol_type = other DNA
aagagctgggctgtggctggtgcccaaggaacgcttactggatggagaacaagaggatgagtggaacagctcttctcattccatgatcagggccctgaccttcaggctac

SEQ ID NO: 40215 - DNA, 110 bp, synthetic construct
  source 1..110: mol_type = other DNA
gatgagtggaacagctcttctcattccatgatcagggccctgaccttcaggctacactacactagcagcctcgaaggctcacacatgcgccacagcggagggactggtgg

SEQ ID NO: 40216 - DNA, 110 bp, synthetic construct
  source 1..110: mol_type = other DNA
ttgcacatgtacctatagtgagggaagtaaatacagtgtgattaacttgtgtctgtgctgtgaaaaccccatgtaccgtgcaatcctgttcagtttgcccttttaggagg

SEQ ID NO: 40217 - DNA, 110 bp, synthetic construct
  source 1..110: mol_type = other DNA
aaatgtgtgtattggtctaaacttacttttcagaattacgctgtttcaggcagtctctgccacaatttccccagcctgtttcgtcataagtggacacgtgatgagtgttt

SEQ ID NO: 40218 - DNA, 110 bp, synthetic construct
  source 1..110: mol_type = other DNA
tctgccacaatttccccagcctgtttcgtcataagtggacacgtgatgagtgttttgacacattgccttttttaaaaaaaaaatctgtagtatattataaactttctaac

SEQ ID NO: 40219 - DNA, 110 bp, synthetic construct
  source 1..110: mol_type = other DNA
caacagagaaatgtccctctccccccaacagccctaggaagatagttgccattcatcctaggctttaattgtgagtacagctcggttaccaaggagaacacagccttaag

SEQ ID NO: 40220 - DNA, 110 bp, synthetic construct
  source 1..110: mol_type = other DNA
tcctaggctttaattgtgagtacagctcggttaccaaggagaacacagccttaaggagactctgaggtcagtgtcagggcccagctaaggaaacagcagaccttgagaca

SEQ ID NO: 40221 - DNA, 110 bp, synthetic construct
  source 1..110: mol_type = other DNA
aaatatattcagttatgtaaatgtattatcctatcaccaaatgctatttcatgttgatacattcagtggcacaaattcactcatgtgtgagccttgagaggctgacagcc

SEQ ID NO: 40222 - DNA, 110 bp, synthetic construct; identical to SEQ ID NO: 40221
  source 1..110: mol_type = other DNA

SEQ ID NO: 40223 - DNA, 110 bp, synthetic construct
  source 1..110: mol_type = other DNA
ctctgcatgtaggatgggcttggggcctgggctgtgcttctgctttgtgcttacctgccgagtgacattgcatcccctccttgggctcagtttacttgatttgaagtgag

SEQ ID NO: 40224 - DNA, 110 bp, synthetic construct
  source 1..110: mol_type = other DNA
tgccgagtgacattgcatcccctccttgggctcagtttacttgatttgaagtgaggacagcagcccctccctcactggattaatgtgaatattaagtgggtggtgagcaa

SEQ ID NO: 40225 - DNA, 110 bp, synthetic construct
  source 1..110: mol_type = other DNA
gcaaaaggatgctggccctgtggactggccacttgagagcttaataatttgtaaaggtgtgggcaggtgtggagggaggagtgaggagtgaccagtgctccaagggagag

SEQ ID NO: 40226 - DNA, 110 bp, synthetic construct
  source 1..110: mol_type = other DNA
tactgtcatgtgtgcggctgggtccaggcagcctggatccctgatcacagccaattccactgctccatactgtctcgttgccgtttacctgaagcttaacacatgtggct

SEQ ID NO: 40227 - DNA, 110 bp, synthetic construct
  source 1..110: mol_type = other DNA
tccactgctccatactgtctcgttgccgtttacctgaagcttaacacatgtggctctttgtggactcctgcaggtggcagttgtgtatatgtgtatccatctatatgtgt

SEQ ID NO: 40228 - DNA, 110 bp, synthetic construct
  source 1..110: mol_type = other DNA
tgtgtcaggtgctttgtacatgtacctatgggcacatgagtgccgtcgcagcggcatttaactccttacatatcccagggtgtgtcgttgacccagtcattactctctgt

SEQ ID NO: 40229 - DNA, 110 bp, synthetic construct
  source 1..110: mol_type = other DNA
atttaactccttacatatcccagggtgtgtcgttgacccagtcattactctctgtgtcggaccactgtggcatcggcgcttctcgctgcaagtttggacccgcaagtgac

SEQ ID NO: 40230 - DNA, 110 bp, synthetic construct
  source 1..110: mol_type = other DNA
tgggaaggtaccgtggtgtttcctgtggagtttgagttactggcagtgagcttggaagtgccctggaatgcagctgccggacgcccatgtcctgttctgttcaccagctg

SEQ ID NO: 40231 - DNA, 110 bp, synthetic construct
  source 1..110: mol_type = other DNA
aagtgccctggaatgcagctgccggacgcccatgtcctgttctgttcaccagctggccctcctggggcgggggcagggaacctgatttgttgcatctgccaatttctgtg

SEQ ID NO: 40232 - DNA, 110 bp, synthetic construct
  source 1..110: mol_type = other DNA
aggcagtcctgtgtcaccaggtttggattcagaacagtggggccggagccctggttttgagacccagaggcccaaggtgtgtctcttccatttttgccagtgtagggcct

SEQ ID NO: 40233 - DNA, 110 bp, synthetic construct
  source 1..110: mol_type = other DNA
tttgagacccagaggcccaaggtgtgtctcttccatttttgccagtgtagggcctcatctataaaatggggataatgccatcacaggatgtctcctcgcagggtggttgg

SEQ ID NO: 40234 - DNA, 110 bp, synthetic construct
  source 1..110: mol_type = other DNA
cttgcgcagagcccaccccagacgggcctcgtccattttcttctctggattaagcccccttctgacacagcccttcctgctgacagggaatggtgcgggcacagggccag

SEQ ID NO: 40235 - DNA, 110 bp, synthetic construct
  source 1..110: mol_type = other DNA
ccccttctgacacagcccttcctgctgacagggaatggtgcgggcacagggccagaggaagggcctggaagctggggagccattttcagaggtagcctggcgccttggca

SEQ ID NO: 40236 - DNA, 110 bp, synthetic construct
  source 1..110: mol_type = other DNA
acggctcagcttttactgtctcgtctctgctttgtacagtgagcctctggaggtccagggttgcttgtgcagcctggccttcagtcagtgacttacaggtgtccccgctt

SEQ ID NO: 40237 - DNA, 110 bp, synthetic construct
  source 1..110: mol_type = other DNA
ccagcaaagcgtgttcacgctggattggttcctaaagggacattaattccaggccggcagtattcagtttattaggggacaaattttcaaacaggtgtgcccttttcatg

SEQ ID NO: 40238 - DNA, 110 bp, synthetic construct
  source 1..110: mol_type = other DNA
ggcagtattcagtttattaggggacaaattttcaaacaggtgtgcccttttcatgaccctgggggaatcccagatatgaactcccatgggtggggcaggatgtatagaca

SEQ ID NO: 40239 - DNA, 110 bp, synthetic construct
  source 1..110: mol_type = other DNA
ggaaacagcatctccctgtggcgtgggtgaaatgagataatgcatatgagatgcaaagcccatgcctggcaagcagctactctgcttatgggttgcattccaatctgggc

SEQ ID NO: 40240 - DNA, 110 bp, synthetic construct
  source 1..110: mol_type = other DNA
gtgtttaactaatgcattagtttggcccattttggataaagtgaccacataaaatggggtggagagaagactaaaatatgccgtataaaagcagaggagttccctggagt

SEQ ID NO: 40241 - DNA, 110 bp, synthetic construct
  source 1..110: mol_type = other DNA
gagacttgattaggaggaggacacaagggcgtgtgtggtagaccagctggccctctccactccataaaccatcctgaaaaagagcatggccctgctcagaggtacgaggt

SEQ ID NO: 40242 - DNA, 110 bp, synthetic construct
  source 1..110: mol_type = other DNA
cttgccaccatcgttttgatgtgactgggtttgagcaagaatgaagcactaccttttccaataagacagctccccactgctcgaaaccccatgataacagctgattcttt

SEQ ID NO: 40243 - DNA, 110 bp, synthetic construct
  source 1..110: mol_type = other DNA
ttccaataagacagctccccactgctcgaaaccccatgataacagctgattctttaacggtacgcccaatgacccaagcttgtctgatagaaccgtttataaggattttg

SEQ ID NO: 40244 - DNA, 110 bp, synthetic construct
  source 1..110: mol_type = other DNA
atcatcttcaacagtcatccattgttcccttactttttgtcaaccggtacagccaagaatggtagaggagctctctctatgcactttcgtgttgatgtcggcatagcttt

SEQ ID NO: 40245 - DNA, 110 bp, synthetic construct
  source 1..110: mol_type = other DNA
agaatggtagaggagctctctctatgcactttcgtgttgatgtcggcatagctttcaactccttccccgcaacttaagagacattactgtctccatttgcttcttcttgt

SEQ ID NO: 40246 - DNA, 110 bp, synthetic construct
  source 1..110: mol_type = other DNA
agctcaggctcctttcatggctcttcactgcctcctccctacacagcactttcctgcaaataaattgagcaaataaacacaacgcttgtcatttcagaaatcaaggtcct

SEQ ID NO: 40247 - DNA, 110 bp, synthetic construct
  source 1..110: mol_type = other DNA
gcaaataaattgagcaaataaacacaacgcttgtcatttcagaaatcaaggtccttgcagattgaagcatccatacccttaagcaggtggatatccaggtggcattgcta

SEQ ID NO: 40248 - DNA, 110 bp, synthetic construct
  source 1..110: mol_type = other DNA
tataatgatgcggaatcagctggacactgtcccaacacatccagcaacagtcttgtttgaagttatctggggggttttaaaagcctgggtagtgagttcccattgtggct

SEQ ID NO: 40249 - DNA, 110 bp, synthetic construct
  source 1..110: mol_type = other DNA
atgggaattcctttcaagcgatgggtgaaaaagccacatggctttggctggtggtgggttgtcctcatgctgttttgcctcatgtctgcctcactcgccttaaagagcat

SEQ ID NO: 40250 - DNA, 110 bp, synthetic construct
  source 1..110: mol_type = other DNA
gggttgtcctcatgctgttttgcctcatgtctgcctcactcgccttaaagagcatgtgctgtctaaaagtatttaatgacgcttgtctattcttgttaaggacctgaaag

SEQ ID NO: 40251 - DNA, 110 bp, synthetic construct
  source 1..110: mol_type = other DNA
cttccctacagctcttttgcaacgaaccaccggccactcttcaaatgtcagccagaccatgttgtctctgctcaaccccctgcgacggccgtcccaggcatccgacagca

SEQ ID NO: 40252 - DNA, 110 bp, synthetic construct
  source 1..110: mol_type = other DNA
accatgttgtctctgctcaaccccctgcgacggccgtcccaggcatccgacagcaaaccatggcctgcctcgctcctcatctccacggccagcgaggcggaggcttctcc

SEQ ID NO: 40253 - DNA, 110 bp, synthetic construct
  source 1..110: mol_type = other DNA
tatttcattgcatttctagaagaagctggagcatcatcctttgcatgaagttcacgtattagagtcccccttcaagcttaactgaagctcaggcatgagtaagtccatgt

SEQ ID NO: 40254 - DNA, 110 bp, synthetic construct
  source 1..110: mol_type = other DNA
catttgaatggagatccttgtgttgctacctgattttgaagtagtgatatcaccgtcaaggtcaaagcttttctagactacaatcatctgcctccctccccaatctgagg

SEQ ID NO: 40255 - DNA, 110 bp, synthetic construct
  source 1..110: mol_type = other DNA
tcaaggtcaaagcttttctagactacaatcatctgcctccctccccaatctgagggctccactcagaaaatcctccttggtccttcattctgttctttaatgggccctac

SEQ ID NO: 40256 - DNA, 110 bp, synthetic construct
  source 1..110: mol_type = other DNA
ccctcccagacaaaatctgagaccctgattgcaccagcagcgcccctattcttctaagcaccctggaaaattcatgcagaagaatagaagggggcctctcctggctgctt

SEQ ID NO: 40257 - DNA, 110 bp, synthetic construct
  source 1..110: mol_type = other DNA
aagcaccctggaaaattcatgcagaagaatagaagggggcctctcctggctgcttgtctccttttggtcatgtctggcatttccttatcttgtttggagagagggaagcc

SEQ ID NO: 40258 - DNA, 110 bp, synthetic construct
  source 1..110: mol_type = other DNA
cacctgttacctggacatccccccacccggtggagcagcataaaatgaaccgctgtgctcagactgaatccagatctccttgcctccaagacccgtttccctggtacacg

SEQ ID NO: 40259 - DNA, 110 bp, synthetic construct
  source 1..110: mol_type = other DNA
ctccttgccttctaggctgtgagctccctggacaacgacaggggtcttactcatttctgcgtggctgacactcatcttaggaaactcgaaacggatgagcacgtgagtaa

SEQ ID NO: 40260 - DNA, 110 bp, synthetic construct
  source 1..110: mol_type = other DNA
ttagatttcaactcaccgtacctcactaacctctcaaaccatcccttgcctaaagcttctgatacctggtttactgatggcagcgccttctctcaggatggaaagagggt

SEQ ID NO: 40261 - DNA, 110 bp, synthetic construct
  source 1..110: mol_type = other DNA
cttctgatacctggtttactgatggcagcgccttctctcaggatggaaagagggtggcaggatatgcagtagtttctcttaaggagggcattgaatctaacccccttcca

SEQ ID NO: 40262 - DNA, 110 bp, synthetic construct
  source 1..110: mol_type = other DNA
ctattgtgaacagtgagtgcagtgagaattggggtgcaagtatgtctttgaattgtagttttgtccggatctatgcctaggagtggggtttctggatcatatggtagttc

SEQ ID NO: 40263 - DNA, 110 bp, synthetic construct; identical to SEQ ID NO: 40262
  source 1..110: mol_type = other DNA

SEQ ID NO: 40264 - DNA, 110 bp, synthetic construct
  source 1..110: mol_type = other DNA
caaggggccagtgtagaaatgcccactgtgggctccctgtctctaaaactctgggagagcccaagcttgaagagaaggcctcaaaccctggacccgaaaggcagggtctt

SEQ ID NO: 40265 - DNA, 110 bp, synthetic construct
  source 1..110: mol_type = other DNA
agagcccaagcttgaagagaaggcctcaaaccctggacccgaaaggcagggtcttggcaggcagaccctgcgatgtccggaccccatgtcactcccaacagtgcaggacc

SEQ ID NO: 40266 - DNA, 110 bp, synthetic construct
  source 1..110: mol_type = other DNA
caaaactgggggtggggacagtttggatttgaacccaggcatgcctggctcaaatttgtttttattccaattaacatgggtcctgatccactagcatgttctttactgaa

SEQ ID NO: 40267 - DNA, 110 bp, synthetic construct
  source 1..110: mol_type = other DNA
ttgtttttattccaattaacatgggtcctgatccactagcatgttctttactgaaccagagtatctggatagcaactgttcattgaccagagggctccagagcagttcag

SEQ ID NO: 40268 - DNA, 110 bp, synthetic construct
  source 1..110: mol_type = other DNA
gcctgtacttgtgggccagtgggaagtttggtgaccctgctcagtgcagagagagtgaaacccactgtgctctctgaataacggcccctccccgaagctgaccccggaac

SEQ ID NO: 40269 - DNA, 110 bp, synthetic construct
  source 1..110: mol_type = other DNA
tgaaacccactgtgctctctgaataacggcccctccccgaagctgaccccggaacctgggaacaggttaccttacctggcgagagggattttgcaaatgtgattaagtta

SEQ ID NO: 40270 - DNA, 110 bp, synthetic construct; identical to SEQ ID NO: 40268
  source 1..110: mol_type = other DNA

SEQ ID NO: 40271 - DNA, 110 bp, synthetic construct; identical to SEQ ID NO: 40269
  source 1..110: mol_type = other DNA

SEQ ID NO: 40272 - DNA, 110 bp, synthetic construct
  source 1..110: mol_type = other DNA
ggtgggtatggtccaggctgggtccagtccttggagagcttccctggattgcatctgcgggctgccctggatgagtttttagggtacacaggccccatcgtttggctccg

SEQ ID NO: 40273 - DNA, 110 bp, synthetic construct
  source 1..110: mol_type = other DNA
tgcgggctgccctggatgagtttttagggtacacaggccccatcgtttggctccgtgaggaaggacatgccctctgccgggcccagactctgatgctactgccacgaacc

SEQ ID NO: 40274 - DNA, 110 bp, synthetic construct
  source 1..110: mol_type = other DNA
gcctcctcccgctggaatataagctccactggagcactcgttttctatgtcaccattggagttaccgtgcctggcacatggttagcctcaaagtaagtgggcaaaaaaaa

SEQ ID NO: 40275 - DNA, 110 bp, synthetic construct
  source 1..110: mol_type = other DNA
aatgtgactttatttggaaatacggtctttgccgatgtcaggagttaggttcagatgaggtcagctggatcagggtgggcccccaagcccatatgactgatggcctcgta

SEQ ID NO: 40276 - DNA, 110 bp, synthetic construct
  source 1..110: mol_type = other DNA
tgaggtcagctggatcagggtgggcccccaagcccatatgactgatggcctcgtaagaagaggcgcgttacggagccagagacacagggaagaaggccatgtgaccgcag

SEQ ID NO: 40277 - DNA, 110 bp, synthetic construct
  source 1..110: mol_type = other DNA
gacaataccatctgccttgtgcagctggcatggcaataaaagggcccggatattgactgagtgcacatcaggcagctggaaggttcaaggacactgttcctgcccctgca

SEQ ID NO: 40278 - DNA, 110 bp, synthetic construct
  source 1..110: mol_type = other DNA
actgagtgcacatcaggcagctggaaggttcaaggacactgttcctgcccctgcagagattaacgtttatctggggagtcaaaggggagggcctgcacccaccgtaggct

SEQ ID NO: 40279 - DNA, 110 bp, synthetic construct
  source 1..110: mol_type = other DNA
tgaaaaaaacttttcctgcctctctctctcttttttctttcttccctctgtccccacctccagcccaggcttggccagccccgggctctgacagctcttaaagggaaagt

SEQ ID NO: 40280 - DNA, 110 bp, synthetic construct
  source 1..110: mol_type = other DNA
acctccagcccaggcttggccagccccgggctctgacagctcttaaagggaaagttacaaggctaagatttcacaccgggggtaaattctcacagaaggagctggggtca

SEQ ID NO: 40281 - DNA, 110 bp, synthetic construct
  source 1..110: mol_type = other DNA
aaaggcgcgaggatcgaggccggagggactggggcccacatctttaagaatgggggacatcggcggtttctaccaagccagttgcgagctgcatctctttggggaccaca

SEQ ID NO: 40282 - DNA, 110 bp, synthetic construct
  source 1..110: mol_type = other DNA
gacatcggcggtttctaccaagccagttgcgagctgcatctctttggggaccacagctgcagaggggagggaagagaggctgagacagaaatcacagggtcgctgcgatc

SEQ ID NO: 40283 - DNA, 110 bp, synthetic construct; identical to SEQ ID NO: 40281
  source 1..110: mol_type = other DNA

SEQ ID NO: 40284 - DNA, 110 bp, synthetic construct; identical to SEQ ID NO: 40282
  source 1..110: mol_type = other DNA

SEQ ID NO: 40285 - DNA, 110 bp, synthetic construct
  source 1..110: mol_type = other DNA
tggttggtttgctttgctcctttattttgtctgtgagtctttcatatccaatcatggagtatttgtcttcctcctctttcttcctttcctgcgccaacatttccactgtc

SEQ ID NO: 40286 - DNA, 110 bp, synthetic construct
  source 1..110: mol_type = other DNA
actgagccatgacgggaactctgtgagcgtgttttccagactgccaagtgctgaagggaggccagaggaagatgctattgccattattacctttcagctgggaaacgttc

SEQ ID NO: 40287 - DNA, 110 bp, synthetic construct; identical to SEQ ID NO: 40286
  source 1..110: mol_type = other DNA

SEQ ID NO: 40288 - DNA, 110 bp, synthetic construct
  source 1..110: mol_type = other DNA
ggcgagttacccgttcagaaatcttgacctaggaatgcacggcctgtttccaagcacgtacccccacaccccaggttcaccgtgagacctatacttagatctcgaaattc

SEQ ID NO: 40289 - DNA, 110 bp, synthetic construct
  source 1..110: mol_type = other DNA
acgtacccccacaccccaggttcaccgtgagacctatacttagatctcgaaattcgggggcttatccgacacgacagaggggaccacacggtgtctccctatgacatcca

SEQ ID NO: 40290 - DNA, 110 bp, synthetic construct
  source 1..110: mol_type = other DNA
gtccttaatccagagacacgaccctctcaaccttcgcccagccaccctgcgagtctcagtctcccccctgaaaaatgggctgggggttcctctctgcagtcggtgaggat

SEQ ID NO: 40291 - DNA, 110 bp, synthetic construct
  source 1..110: mol_type = other DNA
tccgtctatctaggagttaaccaattttatcgttctgttcaaagaatccgttttttcattcatatcgatgtttccttcatcacttaggtactttatttgcctcatctaac

SEQ ID NO: 40292 - DNA, 110 bp, synthetic construct
  source 1..110: mol_type = other DNA
tcattcatatcgatgtttccttcatcacttaggtactttatttgcctcatctaactctcaaaaccaggttctaagctagttattattcccattttatagataagaacacc

SEQ ID NO: 40293 - DNA, 110 bp, synthetic construct
  source 1..110: mol_type = other DNA
atacagtggtggccacaaataccacggcgtggcccgcattgactgagggctttctaggtgccgaacgtgattctcagtgctttacgtagatcaatcaacacgtttaattc

SEQ ID NO: 40294 - DNA, 110 bp, synthetic construct
  source 1..110: mol_type = other DNA
cagagaaacaagcccagattctagagaccaacctgaagataaggttagaaatttttaaaacttaaagaggtacttttacattaggaattaagattcaggagctgaagtta

SEQ ID NO: 40295 - DNA, 110 bp, synthetic construct
  source 1..110: mol_type = other DNA
taaaacttaaagaggtacttttacattaggaattaagattcaggagctgaagttaactcagtattcatcttcccaaccatatacggtacatgcttagtgagaccagtcaa

SEQ ID NO: 40296 - DNA, 110 bp, synthetic construct
  source 1..110: mol_type = other DNA
gaccatgagtacgtgaaggatttctgcaagcttgcaggtgagcttatttattgcttctagtatttgaaagttacttcatcacgtgtaccaagttacatcagcatttccca

SEQ ID NO: 40297 - DNA, 110 bp, synthetic construct
  source 1..110: mol_type = other DNA
tctagtatttgaaagttacttcatcacgtgtaccaagttacatcagcatttcccaaagtgtattcactggcatcttgcccatcagaaagcagcctgtggaccagcagcag

SEQ ID NO: 40298 - DNA, 110 bp, synthetic construct
  source 1..110: mol_type = other DNA
agatgatgaggtcctgaggacagaaccctcctgatagggggatttttgcccttgcaaaagaagccctggagacctagctcagccctcccatgtgtgaggttactctcagt

SEQ ID NO: 40299 - DNA, 110 bp, synthetic construct
  source 1..110: mol_type = other DNA
aaaagaagccctggagacctagctcagccctcccatgtgtgaggttactctcagtggtgaacagatattcagggctctgtattagccggcatctgctctggggcaccact

SEQ ID NO: 40300 - DNA, 110 bp, synthetic construct
  source 1..110: mol_type = other DNA
gcgtccctgacctgcatgtattggtttgaaccttggggaacttccaggtgaaatctgaaaccagcgccatacatggagggcaaggagagaccacagaaagaggcacccgc

SEQ ID NO: 40301 - DNA, 110 bp, synthetic construct
  source 1..110: mol_type = other DNA
tgaaaccagcgccatacatggagggcaaggagagaccacagaaagaggcacccgctcgggattggcaggtgcaggtttacaaagcaatggaactttcttgcaaagctact

SEQ ID NO: 40302 - DNA, 110 bp, synthetic construct
  source 1..110: mol_type = other DNA
ctgctcttcaggatcctttttttttgcggggggggatgcctgtggcatgtgaaagttcccaggccagggatcgaacccgtgaacagcagcaacccaacacacttcagtga

SEQ ID NO: 40303 - DNA, 110 bp, synthetic construct
  source 1..110: mol_type = other DNA
ttcccaggccagggatcgaacccgtgaacagcagcaacccaacacacttcagtgacaacaccagatctttaacccagtgcgctaccagggaactgctctggatccttttt

SEQ ID NO: 40304 - DNA, 110 bp, synthetic construct
  source 1..110: mol_type = other DNA
ctctgcattagcacagccctgtgggcactttttgcccctttatttctccaagggtcggatgcttgcctctccaaggctttacgctacttgaaacttgggacaatctcctc

SEQ ID NO: 40305 - DNA, 110 bp, synthetic construct
  source 1..110: mol_type = other DNA
cggatgcttgcctctccaaggctttacgctacttgaaacttgggacaatctcctctttgcctgcgtgctccggggatagtacttgctgatatttgaatctcctcaaaatt

SEQ ID NO: 40306 - DNA, 110 bp, synthetic construct
  source 1..110: mol_type = other DNA
ccacaacaagaactcctaagcccctgttgagacccactactcagacggaaaatgttcttttccatacagttctgctcatggacggtacacctggtcccccgagagctctg

SEQ ID NO: 40307 - DNA, 110 bp, synthetic construct
  source 1..110: mol_type = other DNA
tcttttccatacagttctgctcatggacggtacacctggtcccccgagagctctgatgtagatggtcagtgaaattcatgttatgtcctttctgcttatgcagtttccat

SEQ ID NO: 40308 - DNA, 110 bp, synthetic construct
  source 1..110: mol_type = other DNA
agagccagggctggaatttgggtcgggggtataaattccatacattaagctgccctcacctgctggatgacaggtgaaggatgtccttttgttgatctcaacttactcat

SEQ ID NO: 40309 - DNA, 110 bp, synthetic construct
  source 1..110: mol_type = other DNA
tcacctgctggatgacaggtgaaggatgtccttttgttgatctcaacttactcatttccaggaaggcttgtcacttgccagggagccctaacagagtggtctgaagttca

SEQ ID NO: 40310 - DNA, 110 bp, synthetic construct
  source 1..110: mol_type = other DNA
tggtctctttcccttctgattcctggcttctgcaagtgtctgcctcctggaagggagtgggtttgaagtggctcagagttgctgagacacagactgtggcagctgcaaag

SEQ ID NO: 40311 - DNA, 110 bp, synthetic construct
  source 1..110: mol_type = other DNA
agtgggtttgaagtggctcagagttgctgagacacagactgtggcagctgcaaaggcccctggcggaccccctagttcattcagcatcttgactgtacccgggaggaaac

SEQ ID NO: 40312 - DNA, 110 bp, synthetic construct
  source 1..110: mol_type = other DNA
tctggagtaacgcatgtgatgctgcagtattggcagtggcaaaggttctgttacctgggcatgggtaacaggtgaggtttagagaaagttcctgctcaaggacacggagt

SEQ ID NO: 40313 - DNA, 110 bp, synthetic construct
  source 1..110: mol_type = other DNA
tgggcatgggtaacaggtgaggtttagagaaagttcctgctcaaggacacggagttggaagtggaggagccaggacgtgcatctaggaagcttagctgccaagcccgtgc

SEQ ID NO: 40314 - DNA, 110 bp, synthetic construct
  source 1..110: mol_type = other DNA
tgccctcggaattgcaccgttcaggcaagttcccttcctcggcttcttgtatcttctcggctccctgcacttgcctgcagacagaaatttcacagctggagaaactgagc

SEQ ID NO: 40315 - DNA, 110 bp, synthetic construct; identical to SEQ ID NO: 40314
  source 1..110: mol_type = other DNA

SEQ ID NO: 40316 - DNA, 110 bp, synthetic construct
  source 1..110: mol_type = other DNA
ccccaaacccctgcgaaggaagcctgctgaacccttcccatctccgtccctaggggagtgtttcccctgtgatggccccatcccccaggatgcactgcgtcgttgcttcc

SEQ ID NO: 40317 - DNA, 110 bp, synthetic construct
  source 1..110: mol_type = other DNA
ctgccttctcaagtccccgaaaggcccctgggacccctctcagcaggtaccctgttttaaaacctgccgcttaccaacagcctgtgagcacggccgtgtgcctgccttct

SEQ ID NO: 40318 - DNA, 110 bp, synthetic construct
  source 1..110: mol_type = other DNA
tttaaaacctgccgcttaccaacagcctgtgagcacggccgtgtgcctgccttctgcggccccgcaaagactggggcagaaatcgcctttccttccaggaaggaaaacca

SEQ ID NO: 40319 - DNA, 110 bp, synthetic construct
  source 1..110: mol_type = other DNA
atagacaatccattcattccttccttttccatcgcaattgtttactctgtaaaagctgctttggccccgcacagtggactgtgtgcagagagtcaaagataaagtctttc

SEQ ID NO: 40320 - DNA, 110 bp, synthetic construct
  source 1..110: mol_type = other DNA
ctgctttggccccgcacagtggactgtgtgcagagagtcaaagataaagtctttccacctctcagagcctcctctgaaaaatggaaatgaataaaaatgcctggctagtg

SEQ ID NO: 40321 - DNA, 110 bp, synthetic construct
  source 1..110: mol_type = other DNA
ggcttagaatctggatacaaggggaaatgctggatctgtctaccattgcaggtctagccatgaaggggagcgataaagggaaataaaccattatcgagcacttgctgtgt

SEQ ID NO: 40322 - DNA, 110 bp, synthetic construct
  source 1..110: mol_type = other DNA
attaggcaggggccagggaatcgtggggccaccacagaactctacctgccatcaccggcctccacagagatgatgcgaataagtcttggcatgctgcctggcacggagaa

SEQ ID NO: 40323 - DNA, 110 bp, synthetic construct
  source 1..110: mol_type = other DNA
cggcctccacagagatgatgcgaataagtcttggcatgctgcctggcacggagaaggttctcactgagcggttattttgctgttttcattatcagcattaatctcagcct

SEQ ID NO: 40324 - DNA, 110 bp, synthetic construct
  source 1..110: mol_type = other DNA
taggggaaggcctgctttaaaggctggatgccagtgatgagaacgaaacatccaaacacagaaggagatcagccagactttgcacgggagggcagcacgcatgggagccg

SEQ ID NO: 40325 - DNA, 110 bp, synthetic construct
  source 1..110: mol_type = other DNA
caaaaggagagaaaaaacatctagaataatcagggcttgtgtcatgctgtgggaaaaacagcatgtggcccagctcttactttgggtctctgacttcggctctcaaaaga

SEQ ID NO: 40326 - DNA, 110 bp, synthetic construct
  source 1..110: mol_type = other DNA
gtctttggagcagatgggaaatacctaatttccaagaggggactcatgggcccttttaaagggcagatgggaatgagatcagcggagaaggcaagaaagggctggaggac

SEQ ID NO: 40327 - DNA, 110 bp, synthetic construct
  source 1..110: mol_type = other DNA
ttaaagggcagatgggaatgagatcagcggagaaggcaagaaagggctggaggacctgagagcaagcaccagggcgtgcagtgcaggagggacttggacctgggcaaggg

SEQ ID NO: 40328 - DNA, 110 bp, synthetic construct
  source 1..110: mol_type = other DNA
taggaagagatagatgcagcttatctcagagtatcttccactggcctccaaagtccctgggccagatcttcagttctaagaagctctattcttgccaacctctgcccttg

SEQ ID NO: 40329 - DNA, 110 bp, synthetic construct
  source 1..110: mol_type = other DNA
aaaccctgcatcccaacactctagagatgccactgatcctcttgtgccccagcaggagctcccaggttttctgatttcagagtgggaggcagattctccctcctgtatgg

SEQ ID NO: 40330 - DNA, 110 bp, synthetic construct
  source 1..110: mol_type = other DNA
aatcaggcttggaagctatacattcaggaacagtgctcaaaccacaatgcatggctgatcgagcagaacccattaacgtcatgcctgggcatagatgcaagatgctagcc

SEQ ID NO: 40331 - DNA, 110 bp, synthetic construct
  source 1..110: mol_type = other DNA
tgatcgagcagaacccattaacgtcatgcctgggcatagatgcaagatgctagcctctgaaggcttgaaaccctactatgggactcccagatctctctggaaaaataaac

SEQ ID NO: 40332 - DNA, 110 bp, synthetic construct
  source 1..110: mol_type = other DNA
tgttgcaagaaatgacagggaactctgaaattggaatccataggaaggttttgagcagagtggggatttaacaacttcatatttaaaaaggagcttgccggggagttccc

SEQ ID NO: 40333 - DNA, 110 bp, synthetic construct
  source 1..110: mol_type = other DNA
tgaaattggaatccataggaaggttttgagcagagtggggatttaacaacttcatatttaaaaaggagcttgccggggagttcccactgtggctcagcaggttaagagcc

SEQ ID NO: 40334 - DNA, 110 bp, synthetic construct
  source 1..110: mol_type = other DNA
cctcccactggtccatgtggagatggaagaagacaatgaatgatgttcatgacctttgacgagctacctccagcctcattagagatggaccaagggacgtgtccaccaac

SEQ ID NO: 40335 - DNA, 110 bp, synthetic construct
  source 1..110: mol_type = other DNA
acaccgggccgtgatcacactgcatgccctgcacttcctcgggtgcacctgactctctctaacacaggctttatgtctcacctgaagaacccttctaacccctttgcatt

SEQ ID NO: 40336 - DNA, 110 bp, synthetic construct
  source 1..110: mol_type = other DNA
aaaactggaagatggttttgaaacttacctttttcacagcaaggaaagaaaagcttggccttcattggagagtgattcaaatccaggttcaacttagagtgaatgtctca

SEQ ID NO: 40337 - DNA, 110 bp, synthetic construct
  source 1..110: mol_type = other DNA
tggccttcattggagagtgattcaaatccaggttcaacttagagtgaatgtctcacctaataaggtcacttgactatcaagacaacactcacccgaagcatcatattccc

SEQ ID NO: 40338 - DNA, 110 bp, synthetic construct
  source 1..110: mol_type = other DNA
aaggcaaaaaaaaaaaaaaaaaaaaaaggccactgtcaggattaaaagtgatagtacaaatttgctgatcacagaggctgcctgagatcgcacacttcctagttgttttc

SEQ ID NO: 40339 - DNA, 110 bp, synthetic construct
  source 1..110: mol_type = other DNA
attctcgtgttaatgcatcctgacagttctgcagtggttagaatgggctcgtgttagtgtcggcaacccatacatggctacatccatggaatttagttctttacgagttc

SEQ ID NO: 40340 - DNA, 110 bp, synthetic construct
  source 1..110: mol_type = other DNA
agtgtcggcaacccatacatggctacatccatggaatttagttctttacgagttcaaaggccaaaattatgtatattcatatttctatgatttattccacaaaaacgtca

SEQ ID NO: 40341 - DNA, 110 bp, synthetic construct
  source 1..110: mol_type = other DNA
taagtatccaacattgtcgctgtagcagcttgctacgggctggttcaatccctggcccaggaagttccacctgctgcagctgtggccaaaaaataaaaaataaataaatg

SEQ ID NO: 40342 - DNA, 110 bp, synthetic construct
  source 1..110: mol_type = other DNA
cccaggaagttccacctgctgcagctgtggccaaaaaataaaaaataaataaatgtagcaccttaactacttaacaaataattatgatttaattcctgacattgagaaat

SEQ ID NO: 40343 - DNA, 110 bp, synthetic construct
  source 1..110: mol_type = other DNA
tctcctcactcaaggcttgtaatttcctgaaagcccagacctcctcaaaagtgccacccatcacccaggcaaatcaaggctgccgatgtcagcgaggatggcagctgtta

SEQ ID NO: 40344 - DNA, 110 bp, synthetic construct
  source 1..110: mol_type = other DNA
acccatcacccaggcaaatcaaggctgccgatgtcagcgaggatggcagctgttaagactgtgagcttgctggcctctgcggagctttttgagcaccatcttttatagca

SEQ ID NO: 40345 - DNA, 110 bp, synthetic construct
  source 1..110: mol_type = other DNA
cggcagccgcttgtctcagtggggaactcgcaccggccacgatgggagcttgcacgcatttccagagaccattcatggctagcggtaggatgtcccatcattgtctacag

SEQ ID NO: 40346 - DNA, 110 bp, synthetic construct
  source 1..110: mol_type = other DNA
gcatttccagagaccattcatggctagcggtaggatgtcccatcattgtctacagcctgagatttcccccaaaggtgtagctgagtgacccctgagacaagggcactctt

SEQ ID NO: 40347 - DNA, 110 bp, synthetic construct
  source 1..110: mol_type = other DNA
agccaatgctcatttgcccattctgaaaatctatcctacatccataagtcaagaagtagttttgattttcatgtcttattactgaagaaataagctatggctaccataaa

SEQ ID NO: 40348 - DNA, 110 bp, synthetic construct
  source 1..110: mol_type = other DNA
gtagttttgattttcatgtcttattactgaagaaataagctatggctaccataaatagtgattcctttgatagatctggctatagagtaaattgtaacctagaaaggact

SEQ ID NO: 40349 - DNA, 110 bp, synthetic construct
  source 1..110: mol_type = other DNA
accggaaactgcagtggcaatttggcttatagccattttgatttcattgttctgctgttcaaatgtctactcttttggcacaaccagctgacatctctctgggtggttag

SEQ ID NO: 40350 - DNA, 110 bp, synthetic construct
  source 1..110: mol_type = other DNA
ggaatcaaacctgagtcctcatgaataccagtcggattcatttctgctgcgccacgacaggaactccctggtgagaatattaatattgaacaatatcatctcaattttct

SEQ ID NO: 40351 - DNA, 110 bp, synthetic construct; identical to SEQ ID NO: 40350
  source 1..110: mol_type = other DNA

SEQ ID NO: 40352 - DNA, 110 bp, synthetic construct
  source 1..110: mol_type = other DNA
gcttttgctggatcttaccaagtcagacttcctgtgttcaaatccctgccctcacactctgagagctgtttaacctcagtcaagttacttagcctctctgaacttcagct

SEQ ID NO: 40353 - DNA, 110 bp, synthetic construct
  source 1..110: mol_type = other DNA
atggctgacttgccaacatctagttcggttgcagtgttctagctcctcagcataatcaagtctttctaaaggattcgatttcactttcctgtcaacagcatctgttactc

SEQ ID NO: 40354 - DNA, 110 bp, synthetic construct
  source 1..110: mol_type = other DNA
ttggactctggtctcgccaggagagcctctcacccacaaagccatagacctaatccctcctggggcttcagctctagaaggcgtctcacaggtcattcagtctcaaccat

SEQ ID NO: 40355 - DNA, 110 bp, synthetic construct
  source 1..110: mol_type = other DNA
cctcctggggcttcagctctagaaggcgtctcacaggtcattcagtctcaaccatcgacccaaggaaacctagagggaaagtcattggcccctggtcacagatagagatg

SEQ ID NO: 40356 - DNA, 110 bp, synthetic construct
  source 1..110: mol_type = other DNA
tgacaaggtcactttggtggtggagacggctgtgtggaacatagctggaaggaagtcaggctgaggcagggaccccagactgaagcgtgatggtggcctgacctgagaag

SEQ ID NO: 40357 - DNA, 110 bp, synthetic construct
  source 1..110: mol_type = other DNA
agccaaaatcaaaataggcctccctctgtttgacactgcacccatggatgcaagaactaagtagaagtcctttagccaccattagcttgttcctttgttaataccccttt

SEQ ID NO: 40358 - DNA, 110 bp, synthetic construct
  source 1..110: mol_type = other DNA
aatccattgtccaaattacccgctaattacctagcatctatactactcaagctctttggtcatccctgtcgtaaaggtgtctatggatcaagaaaagggaaaccatcatt

SEQ ID NO: 40359 - DNA, 110 bp, synthetic construct
  source 1..110: mol_type = other DNA
ttggtcatccctgtcgtaaaggtgtctatggatcaagaaaagggaaaccatcatttagttagatttgccctctaatgaatatttgatagattatgcccatcaaacatggt

SEQ ID NO: 40360 - DNA, 110 bp, synthetic construct; identical to SEQ ID NO: 40358
  source 1..110: mol_type = other DNA

SEQ ID NO: 40361 - DNA, 110 bp, synthetic construct; identical to SEQ ID NO: 40359
  source 1..110: mol_type = other DNA

SEQ ID NO: 40362 - DNA, 110 bp, synthetic construct
  source 1..110: mol_type = other DNA
ggacacggggaggggtcactggtactaggttttcactgtttctaggccctgagttcagcaggcaaagccaggaagtacatacgtatcgatcctaagtgccctatagtgat

SEQ ID NO: 40363 - DNA, 110 bp, synthetic construct
  source 1..110: mol_type = other DNA
cagcaggcaaagccaggaagtacatacgtatcgatcctaagtgccctatagtgatgtttttcaatttccataagactatatgggcttttgacttaaccttgtcaatctca

SEQ ID NO: 40364 - DNA, 110 bp, synthetic construct
  source 1..110: mol_type = other DNA
gtggaaataaaaccttgagtgggcagaaaccaagtgggaggaggtttcaggtgaactggatacagtcagctggtcaaatgctacccatgggccaagcaggctgaggactg

SEQ ID NO: 40365 - DNA, 110 bp, synthetic construct
  source 1..110: mol_type = other DNA
ctggatacagtcagctggtcaaatgctacccatgggccaagcaggctgaggactggccagtggacaggcaatgaatggggggttaggtcataggtgacctggacaagagc

SEQ ID NO: 40366 - DNA, 110 bp, synthetic construct
  source 1..110: mol_type = other DNA
cctgcctcctcatagatactagtcagattcatttccactaagccacaatgggaactctgcagatgataaatgttaagacagcagtgtgtgctgaaagggcagagcctggg

SEQ ID NO: 40367 - DNA, 110 bp, synthetic construct; identical to SEQ ID NO: 40366
  source 1..110: mol_type = other DNA

SEQ ID NO: 40368 - DNA, 110 bp, synthetic construct
  source 1..110: mol_type = other DNA
aaaaaaatttgcatatactgtattatccatataaaattctagcatagggagttcctgttgcggctcagcaaaaacaaacctgattagtatccatgaggatgtgggtttga

SEQ ID NO: 40369 - DNA, 110 bp, synthetic construct; identical to SEQ ID NO: 40368
  source 1..110: mol_type = other DNA

SEQ ID NO: 40370 - DNA, 110 bp, synthetic construct
  source 1..110: mol_type = other DNA
aaaaaaaaacaaacaaacaaacaaacaaacaaaaaaacaggaatatgcctggggttttctgttccttttgcccctcccttcccttgatctggagatggtgacccctagag

SEQ ID NO: 40371 - DNA, 110 bp, synthetic construct
  source 1..110: mol_type = other DNA
ggaatctgccctagtatttgtccttgacttccaagtaccaccactgtgggataagtgactctcttgcctttgtcctgaaccagtcggaagcttctgtccccagaggagcg

SEQ ID NO: 40372 - DNA, 110 bp, synthetic construct
  source 1..110: mol_type = other DNA
tgactctcttgcctttgtcctgaaccagtcggaagcttctgtccccagaggagcgttatctttaccctgttcttcaaagacctttaacggtttctacatcgtgatgttgg

SEQ ID NO: 40373 - DNA, 110 bp, synthetic construct
  source 1..110: mol_type = other DNA
cctcactctcggaaggaatggggggcgcagggcagtggggttgggagagctgacagcatgttctgaccctgaaccacacgaggccagactcgcctaattaactgtactaa

SEQ ID NO: 40374 - DNA, 110 bp, synthetic construct
  source 1..110: mol_type = other DNA
tgtccctctgccttcctgcttagattattctttctcggagaaggtctctccccaggcccagatttaacctagctcaaacgccgcctcctccatgaagttttccaggatcc

SEQ ID NO: 40375 - DNA, 110 bp, synthetic construct
  source 1..110: mol_type = other DNA
gcccagatttaacctagctcaaacgccgcctcctccatgaagttttccaggatccactccaacaagggctgactcatggacatgtgatctgtgcagtcccacaggcccct

SEQ ID NO: 40376 - DNA, 110 bp, synthetic construct
  source 1..110: mol_type = other DNA
gactgcagtgcaattcttttttatttctattttttgactgcagtgttcagaggtttgatgtgggctctcagttcccagaccagggaatgaacccaggctacagccatgaa

SEQ ID NO: 40377 - DNA, 110 bp, synthetic construct
  source 1..110: mol_type = other DNA
cttttttatttctattttttgactgcagtgttcagaggtttgatgtgggctctcagttcccagaccagggaatgaacccaggctacagccatgaaggcaccaaatcctaa

SEQ ID NO: 40378 - DNA, 110 bp, synthetic construct
  source 1..110: mol_type = other DNA
ttcctgtagttcttcagttcggtccttctacccttgccttctccctgaggctgcttttttgagatggactgcattggttttgagcttcttttatttatttttttttgctt

SEQ ID NO: 40379 - DNA, 110 bp, synthetic construct
  source 1..110: mol_type = other DNA
atgtgacccagacatgaggtgacaggggcctgttatcatcctccaggataaataagactctacctgcttcgtttcatagtttgactcttacgggattacccagaaccata

SEQ ID NO: 40380 - DNA, 110 bp, synthetic construct
  source 1..110: mol_type = other DNA
aaaattttttgaaaaggttgattgatattagtctgcctctgttagggatatacacctgctgggttcaaacttggcaaggattatctcaaggcatagaggggccatagggt

SEQ ID NO: 40381 - DNA, 110 bp, synthetic construct
  source 1..110: mol_type = other DNA
ctgctgggttcaaacttggcaaggattatctcaaggcatagaggggccatagggttcctgaatgtgggagcattttctggctggagttggttcctctttacagtcataga

SEQ ID NO: 40382 - DNA, 110 bp, synthetic construct
  source 1..110: mol_type = other DNA
tttcacaccaggtgagtgagtgcggctctctttcaccattgtcaccccaaagtgttagctttactgcctgtgccgttttgttgagttaacaaaggcttattcttactttt

SEQ ID NO: 40383 - DNA, 110 bp, synthetic construct
  source 1..110: mol_type = other DNA
aagccttaaatctggggtgtggccctggaggaggaagtggattgagccaccactgaagtattgagagaagtcctattggcaaaatacccagcttattggctcttgtcttt

SEQ ID NO: 40384 - DNA, 110 bp, synthetic construct
  source 1..110: mol_type = other DNA
taccttaatggcccaatttggaagtaaactatagctaccatttgtggagtgccgactctgttcccgatgcctgttgtcacttaatcatctcaacggtcctgccccaaaga

SEQ ID NO: 40385 - DNA, 110 bp, synthetic construct
  source 1..110: mol_type = other DNA
aggccgttggttgatgtttgtctgcatttcaggattggatctgggctggggacatcagttcaggaattgtcagttggtagaaagtatttataacttaaagattaggtgag

SEQ ID NO: 40386 - DNA, 110 bp, synthetic construct
  source 1..110: mol_type = other DNA
cagttcaggaattgtcagttggtagaaagtatttataacttaaagattaggtgagagagcatcagtattaagaagaataaaaacctgaaaactgggagttcccgctgtgg

SEQ ID NO: 40387 - DNA, 110 bp, synthetic construct
  source 1..110: mol_type = other DNA
gcctgggaacttccatatgctgcaggtatggcccttaaaaaataaaaataccggaaaaaagtagttgttgctgttagtgtcacttcctcagatgtcgttggtgggactga

SEQ ID NO: 40388 - DNA, 110 bp, synthetic construct; identical to SEQ ID NO: 40387
  source 1..110: mol_type = other DNA

SEQ ID NO: 40389 - DNA, 110 bp, synthetic construct
  source 1..110: mol_type = other DNA
tagactgggcgtcgtgtagcccctctctccgcacgtcctgtgagcacctgtgtgaatcctgcagtccacactcgctctgacgcggactttctgtttcgcgcaggctccgg

SEQ ID NO: 40390 - DNA, 110 bp, synthetic construct
  source 1..110: mol_type = other DNA
atcctgcagtccacactcgctctgacgcggactttctgtttcgcgcaggctccggccttggtctgataaactggcagaccatctgcccaaaagcagcacagggcctggca

SEQ ID NO: 40391 - DNA, 110 bp, synthetic construct
  source 1..110: mol_type = other DNA
ccctggcctgggaacttgcacaagctgcggcatggccgccccccaaaaaactcgtataaacctctcttccctgtgtgtgtatgcacgtgggtgtgtgggcgtgtgtgtct

SEQ ID NO: 40392 - DNA, 110 bp, synthetic construct
  source 1..110: mol_type = other DNA
gagggcaccttgagtgtgtgtggttgcattccatatattccatatgtctggctagtcattcctgcttgattgtgaccaactccggagagagttttgggggttccagctcc

SEQ ID NO: 40393 - DNA, 110 bp, synthetic construct
  source 1..110: mol_type = other DNA
tcattcctgcttgattgtgaccaactccggagagagttttgggggttccagctccttgtgagagacccagagggctggaaggcacagcctctcttggcctagtgaggcct

SEQ ID NO: 40394 - DNA, 110 bp, synthetic construct
  source 1..110: mol_type = other DNA
tctctttgcacctaaattctttgttgttgttcttcctgtgagcgattcaggtttatttcactttaattaaggaagtctggaggtcccattgtggctctgtggaaatgaat

SEQ ID NO: 40395 - DNA, 110 bp, synthetic construct
  source 1..110: mol_type = other DNA
gttgttcttcctgtgagcgattcaggtttatttcactttaattaaggaagtctggaggtcccattgtggctctgtggaaatgaatctgactcgcatccatgaggatgcag

SEQ ID NO: 40396 - DNA, 110 bp, synthetic construct
  source 1..110: mol_type = other DNA
tcacattttctttatccattcattccaggatacgtttttaagttttttaaaaaaatgctatatgcagaaaaagtgtttgtggtatgctccctcccacgtgcgggaggaaa

SEQ ID NO: 40397 - DNA, 110 bp, synthetic construct
  source 1..110: mol_type = other DNA
ccccccaaatcgtcattaagtatggtaattagggtaaaagtctgaggcctagggctcttgctcttagtgtataccttgaaaaagccacctactctctccaaataatatgc

SEQ ID NO: 40398 - DNA, 110 bp, synthetic construct
  source 1..110: mol_type = other DNA
atggttttattcaagtggcactgggttttctcctgtagtttatccaggtggccggccaagccacttgttttatttctgggtgactgcagtgagcctcacggaaggaagtt

SEQ ID NO: 40399 - DNA, 110 bp, synthetic construct
  source 1..110: mol_type = other DNA
ccaagccacttgttttatttctgggtgactgcagtgagcctcacggaaggaagtttttctttgtcagagaaagcaaaactgtttactcattccatttgtagtagcactga

SEQ ID NO: 40400 - DNA, 110 bp, synthetic construct
  source 1..110: mol_type = other DNA
tgcttcttctcccttaacagccagagtggaatcacatatcgctcccctgctcaacatcctccactggcttttgttgccctcaaattaatctccaaattctgcactctggc

SEQ ID NO: 40401 - DNA, 110 bp, synthetic construct
  source 1..110: mol_type = other DNA
atcctccactggcttttgttgccctcaaattaatctccaaattctgcactctggcctgtctctaggatctggtctctaaggccccggccagtacttttctcctttgctcc

SEQ ID NO: 40402 - DNA, 110 bp, synthetic construct
  source 1..110: mol_type = other DNA
ggaactgctggggttgcaggggagaggaagctccaaaggcaggggactggggacgcttgggcacagcaaggacaacattctgcaaaatgtgttgcacttgagagatttcc

SEQ ID NO: 40403 - DNA, 110 bp, synthetic construct
  source 1..110: mol_type = other DNA
ctccgttctcctgcctgccctcccccatttctcccttcctcccagcttgctccctgctgggtttacggggaatgggctgggagaaatggattgaaggccgagggcgtcaa

SEQ ID NO: 40404 - DNA, 110 bp, synthetic construct
  source 1..110: mol_type = other DNA
aacttggaagacaggtgggctggaaagtggtggcaaatccacactgtggatgactttgaataccaggcaaagccacatggaagtgagggaaataacagttttcagagttg

SEQ ID NO: 40405 - DNA, 110 bp, synthetic construct
  source 1..110: mol_type = other DNA
attcctcaccatacttatgactactgtatttcttttcactcctgaaggtcaattttccctctactcctatgactccacaagattagttaaaaaaacccccaaaactgcag

SEQ ID NO: 40406 - DNA, 110 bp, synthetic construct
  source 1..110: mol_type = other DNA
tccctctactcctatgactccacaagattagttaaaaaaacccccaaaactgcagttagttgcatgtgtacttggggttgccttcataaacatatggtagatgaccagaa

SEQ ID NO: 40407 - DNA, 110 bp, synthetic construct
  source 1..110: mol_type = other DNA
tggactcagataattttaaccatggtcttggccttcactgcactggcgccatagacattgtggggtggagaagggttatgcttgccctttgtttcaatgtgtgagcgcct

SEQ ID NO: 40408 - DNA, 110 bp, synthetic construct
  source 1..110: mol_type = other DNA
cattgtggggtggagaagggttatgcttgccctttgtttcaatgtgtgagcgcctgggttctggtcaccttattgctttgaggtcagtctccccactttggcatctgtgc

SEQ ID NO: 40409 - DNA, 110 bp, synthetic construct
  source 1..110: mol_type = other DNA
aagctcaccctctgcccctgctcagatgagctcatctcaaggacatgacttgtacccatcatctgtgtacgtaccaaatacatagacttttgggggaaaagattggcagt

SEQ ID NO: 40410 - DNA, 110 bp, synthetic construct
  source 1..110: mol_type = other DNA
tagaaaggggaaaaggagcataggtttctgcaaaaagccttgagctgctgcacgataatatctatcatctggtgtctgctcaaggtgaccattggcatggaaaaaggaag

SEQ ID NO: 40411 - DNA, 110 bp, synthetic construct
  source 1..110: mol_type = other DNA
ggaatgtgtctctcctaaatttgtatgttgaagcctcagttctcaatgtcattatatttgaagatagggcttttagaaggtaatgagggctaaacgatgccgaaaggaag

SEQ ID NO: 40412 - DNA, 110 bp, synthetic construct
  source 1..110: mol_type = other DNA
ctgcaccacagcaggaattccaatttcagggatcttaatatccctaattacagtcctgggaatataggttgagatgctaaaataacagagaaatccactgttcactatta

SEQ ID NO: 40413 - DNA, 110 bp, synthetic construct
  source 1..110: mol_type = other DNA
aggaagaagacattcccttaagaattaatggaaagagctgtagcctgagagtcgagagacatcggtacaaacctcgcttttctcagttatcaggatgccactccaggaaa

SEQ ID NO: 40414 - DNA, 110 bp, synthetic construct
  source 1..110: mol_type = other DNA
aaaaattaacatagcaagtaaacttaagaaaaattgagaagactcactaatagttaaagaaatttaaatgaactcagccgtagcatacatccgtgatattgtcctgggga

SEQ ID NO: 40415 - DNA, 110 bp, synthetic construct
  source 1..110: mol_type = other DNA
aaagaaatttaaatgaactcagccgtagcatacatccgtgatattgtcctggggaccacatagataacgcagttaagagatgctaatgggaaggtctttggatccgcaga

SEQ ID NO: 40416 - DNA, 110 bp, synthetic construct
  source 1..110: mol_type = other DNA
ggaatatttcctaggcatgcatcccacagacagccatggcccttgactgaactattggtgctatgggggaagaacagctgaaacgggagccagaagggccagatctagtc

SEQ ID NO: 40417 - DNA, 110 bp, synthetic construct
  source 1..110: mol_type = other DNA
tctccacgtgtcttttcatgagacaacccctggtctccccaactggaatttagcctccccccgtctcccaaacaagccctaacttcctgcagaaggactgcacagcttga

SEQ ID NO: 40418 - DNA, 110 bp, synthetic construct
  source 1..110: mol_type = other DNA
tccccccgtctcccaaacaagccctaacttcctgcagaaggactgcacagcttgatcccttgcagagaagccataagcacatcattgacactgttgcgtgagactgacaa

SEQ ID NO: 40419 - DNA, 110 bp, synthetic construct
  source 1..110: mol_type = other DNA
acagttttcttccagtaggtcacagctggggaagagaagcaaaaaaatccccagtgtttgcttgaaactcagcaagaaacaaatatttattaggcatcgacaattccttc

SEQ ID NO: 40420 - DNA, 110 bp, synthetic construct
  source 1..110: mol_type = other DNA
agctccttgtcatatcttgacactcagaacaaacctttcgaaaaccatatgacaagaaattaaggccctcagttccacaggcctcgaagaactgagatctgccaacaacc

SEQ ID NO: 40421 - DNA, 110 bp, synthetic construct
  source 1..110: mol_type = other DNA
aggacttatattgcagtttttgtcccctcaactgtgagcctgtatcattactagctttcacatttacaagaactaaccttttctactgtcttttggatgtgttcctagat

SEQ ID NO: 40422 - DNA, 110 bp, synthetic construct
  source 1..110: mol_type = other DNA
cagtatagtttggaactgtacacaaaatgaagctttcttctcttttcctgctgagtttaactcaccagcccagtcacggatacagtggtgaaacatacagggtattcaca

SEQ ID NO: 40423 - DNA, 110 bp, synthetic construct
  source 1..110: mol_type = other DNA
atggagtgttttggggaaggggatgaggaaagaaggatagagaaggggaaggagctgtacgggaagtagtttcagctgacatataaacttaacctagtattttgggaaga

SEQ ID NO: 40424 - DNA, 110 bp, synthetic construct
  source 1..110: mol_type = other DNA
tgtacgggaagtagtttcagctgacatataaacttaacctagtattttgggaagaccaaaagcctaaattgccccacagactctgtcttggaccctcaagtcaggccttg

SEQ ID NO: 40425 - DNA, 110 bp, synthetic construct
  source 1..110: mol_type = other DNA
ctccctagacggcctagaggtgagttgccagccccagatctgaaattcatgtaaaatgggtcagggatgttttagcacatgatccaagtagactgaaaacatataatgaa

SEQ ID NO: 40426 - DNA, 110 bp, synthetic construct
  source 1..110: mol_type = other DNA
atgggtcagggatgttttagcacatgatccaagtagactgaaaacatataatgaaaacccagttgggcaatttgactttcaggacaacaagaaatcttcagggacaagat

SEQ ID NO: 40427 - DNA, 110 bp, synthetic construct
  source 1..110: mol_type = other DNA
gccttaatatagaaggcaaggactagcccacaggcatggccactgcctttttgtccaacttctttttttccccattgtaataatggccaatatctctacaacagctttag

SEQ ID NO: 40428 - DNA, 110 bp, synthetic construct
  source 1..110: mol_type = other DNA
caacttctttttttccccattgtaataatggccaatatctctacaacagctttaggggtgtccatgaattctctgtactctcttgggagcccccattcttcaaagacagc

SEQ ID NO: 40429 - DNA, 110 bp, synthetic construct
  source 1..110: mol_type = other DNA
ctccacctggtcttcctagtcactaattccttgaagggaatcctaatcatggaagaccccgcaaaggatgccagctccagaatccttgggcattaacctcacagtaccca

SEQ ID NO: 40430 - DNA, 110 bp, synthetic construct
  source 1..110: mol_type = other DNA
accccgcaaaggatgccagctccagaatccttgggcattaacctcacagtacccacagcctttcttctttgacacatgtgttccagggaagtttcattctctaggaaact

SEQ ID NO: 40431 - DNA, 110 bp, synthetic construct
  source 1..110: mol_type = other DNA
ctctcttcaggatcagcttttaatttcgttcccttcctctggacttttgggatgcaagcctaaagctattttttggtgtcatactcaccctgtggctccaggctattttg

SEQ ID NO: 40432 - DNA, 110 bp, synthetic construct
  source 1..110: mol_type = other DNA
aagcctaaagctattttttggtgtcatactcaccctgtggctccaggctattttggagacagagcctcaaatattctagttctggaatctggagaactaacttgtgtctc

SEQ ID NO: 40433 - DNA, 110 bp, synthetic construct
  source 1..110: mol_type = other DNA
tctgtctttggtcaggagtgccaggctacaccaccctttggtaagcaatgtgtcaccgccacaacttgggaggccaaaggctggatgaaatcccttgaggcacagaacaa

SEQ ID NO: 40434 - DNA, 110 bp, synthetic construct
  source 1..110: mol_type = other DNA
ccgccacaacttgggaggccaaaggctggatgaaatcccttgaggcacagaacaattctttttatgttcatctcaaggaactcatgccctccttcctttaaaaaatctac

SEQ ID NO: 40435 - DNA, 110 bp, synthetic construct
  source 1..110: mol_type = other DNA
aaatcgtggtcagactcagacacaaagtgtcttatgttcatctttcttcctttcttgttcttagcctgtctgtctcttcattcagcaactcctatcaggtcctctacctt

SEQ ID NO: 40436 - DNA, 110 bp, synthetic construct
  source 1..110: mol_type = other DNA
ttttaactcatatttggcaaaatgcctttactgcaactgttagtgacaataaaagagctcagaacctactgccaattcttccctatgtgatggcttccaggaaaataaaa

SEQ ID NO: 40437 - DNA, 110 bp, synthetic construct
  source 1..110: mol_type = other DNA
atcagggctgaaattcaagtgatacagcatgggcattgattcgtcatgacacttagaacaggttacctatcagtcgtagctcaaagaaagatgtagatttgggaatttta

SEQ ID NO: 40438 - DNA, 110 bp, synthetic construct
  source 1..110: mol_type = other DNA
gaacaggttacctatcagtcgtagctcaaagaaagatgtagatttgggaattttacttttgctttagttcaatactgagctgccaagtgaatggtgaaaagaatgtgcaa

SEQ ID NO: 40439 - DNA, 110 bp, synthetic construct
  source 1..110: mol_type = other DNA
atggcagtggctcaggttgctgcagaggcgcaggtttgctcactggtccaacaaaatgggttaaagagtctggtgctgctgcagctgcataggttgcagctgttgctggg

SEQ ID NO: 40440 - DNA, 110 bp, synthetic construct
  source 1..110: mol_type = other DNA
ataactgagttaactcatttttttctcctagaattgttcctggaaacatagctaagcacataataagagctcagtacacacatggtggagcatggaatgccagaccatag

SEQ ID NO: 40441 - DNA, 110 bp, synthetic construct
  source 1..110: mol_type = other DNA
gcacataataagagctcagtacacacatggtggagcatggaatgccagaccatagttcataattaggccatgctgtgttatagaaaaagcaatgaaaaagaggaagaagg

SEQ ID NO: 40442 - DNA, 110 bp, synthetic construct
  source 1..110: mol_type = other DNA
atacttcaatgaagttatttttaaaactgtaaaaaaaaaaaaaaaatcttccaccaagtagagtagccttttgcacattgccaagtgagctgaatggtggaacatttagt

SEQ ID NO: 40443 - DNA, 110 bp, synthetic construct
  source 1..110: mol_type = other DNA
aagtagagtagccttttgcacattgccaagtgagctgaatggtggaacatttagtgtgtgggttggacagtgagaaagaaaagagttagaattctggttctgccgcttat

SEQ ID NO: 40444 - DNA, 110 bp, synthetic construct
  source 1..110: mol_type = other DNA
tgctcttgcatgccttggcttatgttaaagaaacaggcatgggttttacaagagctgataagtgctacgatagacatgtgaacagagaaagatggggacatgaagaaggg

SEQ ID NO: 40445 - DNA, 110 bp, synthetic construct
  source 1..110: mol_type = other DNA
tgataagtgctacgatagacatgtgaacagagaaagatggggacatgaagaagggaactatttggctgtacaggagataatcagatttggcctgccttaactttgcttta

SEQ ID NO: 40446 - DNA, 110 bp, synthetic construct
  source 1..110: mol_type = other DNA
aaagatccgagacagaaacacatctgtcagtcccgggacaatcacagcatggtgcaagtttcagaaacttctggaagtgagctgatcctgaaattcacagtgcattcatt

SEQ ID NO: 40447 - DNA, 110 bp, synthetic construct
  source 1..110: mol_type = other DNA
agggtgagaggagggttagcaattgcaggaagatgctctagcaacagcgagcagaggaaaccagctgggcagcccagcctctcagctcaggcccacactgcctggccagc

SEQ ID NO: 40448 - DNA, 110 bp, synthetic construct
  source 1..110: mol_type = other DNA
ggaatggaccggattaacttgccaaatcccttctggcccaaatcagcccaaatgaatacatttcccaccacataaaattcaattggaaactacaaataggctgtgggatg

SEQ ID NO: 40449 - DNA, 110 bp, synthetic construct
  source 1..110: mol_type = other DNA
atacatttcccaccacataaaattcaattggaaactacaaataggctgtgggatgtttgcaaactctgcaaaatgttctctgacatcctcgtggctccccttaggtattc

SEQ ID NO: 40450 - DNA, 110 bp, synthetic construct
  source 1..110: mol_type = other DNA
atttccaggagcagtgtgagcgccgggaagaacagaggtccaagtagccaatccagtgtcccacgtccatgaccacttcctacggagctaggatgagaacacatcagtgc

SEQ ID NO: 40451 - DNA, 110 bp, synthetic construct
  source 1..110: mol_type = other DNA
gtgtcccacgtccatgaccacttcctacggagctaggatgagaacacatcagtgctaaaaagggacctaagcaagaattccattctccctcaactccccagctctccttc

SEQ ID NO: 40452 - DNA, 110 bp, synthetic construct
  source 1..110: mol_type = other DNA
gctagtagaacagagattgtgtggcccacaaaccaaaaatgttcactctcaacttctttacagaaaaagtggtgtggctcctgtattagggtatatgtggtattttcatc

SEQ ID NO: 40453 - DNA, 110 bp, synthetic construct
  source 1..110: mol_type = other DNA
gatagaagcaagttcagctttggtttctaaaagccaaaagtgcccaaaacggaagcagagggactaaatcgggaacagttacggtggccccgaggggagatggtgatgcc

SEQ ID NO: 40454 - DNA, 110 bp, synthetic construct
  source 1..110: mol_type = other DNA
cagagggactaaatcgggaacagttacggtggccccgaggggagatggtgatgcccaaatgaagggagactaaggatggagaagggaacttgccctgaggggttgagact

SEQ ID NO: 40455 - DNA, 110 bp, synthetic construct
  source 1..110: mol_type = other DNA
tggcttcagaaaagacaactgataagaagaagtaaaagttagggcaacatcagcataaacttctataaaatgtattagaaacaaaccagaaaatatctataaagccatat

SEQ ID NO: 40456 - DNA, 110 bp, synthetic construct
  source 1..110: mol_type = other DNA
ctgagggctaattgaagacacaatccgtatgcagaaggcactcagtaaagactgctggatgactgatggaccagtcaatgagtagtagggctgagcaccgtggaagcact

SEQ ID NO: 40457 - DNA, 110 bp, synthetic construct
  source 1..110: mol_type = other DNA
tggatgactgatggaccagtcaatgagtagtagggctgagcaccgtggaagcactctgagttaattagctgtcatctccctgtttaccttcaagagggattctcagatgg

SEQ ID NO: 40458 - DNA, 110 bp, synthetic construct
  source 1..110: mol_type = other DNA
ttattctatttattttattttatcttattttattttattttccttttgtggccgtcccatggcatatggagtctctgggccagagatcagatccaagccacagctgtgaa

SEQ ID NO: 40459 - DNA, 110 bp, synthetic construct; identical to SEQ ID NO: 40458
  source 1..110: mol_type = other DNA

SEQ ID NO: 40460 - DNA, 110 bp, synthetic construct
  source 1..110: mol_type = other DNA
acctcgggcaagtcacgaagcctctctgagcttggattttcatctgcaaaacagaaatggtgataacacagacgcctgtgcacaattccaaaatctaagaaactctcaag

SEQ ID NO: 40461 - DNA, 110 bp, synthetic construct
  source 1..110: mol_type = other DNA
aatggtgataacacagacgcctgtgcacaattccaaaatctaagaaactctcaagatcaacttttacagctatttttgaaacatgacttgaactaacatgaagctactta

SEQ ID NO: 40462 - DNA, 110 bp, synthetic construct
  source 1..110: mol_type = other DNA
acatgcaggccggccccacaaggaactctctggcctagaacgtccatactgctgaggctgagaaacctgctctacatcctacgtatcttttcagcttctttttcctcttg

SEQ ID NO: 40463 - DNA, 110 bp, synthetic construct
  source 1..110: mol_type = other DNA
ggctgagaaacctgctctacatcctacgtatcttttcagcttctttttcctcttgatttcatacagggagagcttctctgtcacccagtacaataaaagagtgcttattc

SEQ ID NO: 40464 - DNA, 110 bp, synthetic construct
  source 1..110: mol_type = other DNA
agcgctcacagaataagacaaaatagcccttttcacccaaagccacaggtctcgtggctcttactgagctataagcggttcctgagaaagtggggtgctgaggagtgggg

SEQ ID NO: 40465 - DNA, 110 bp, synthetic construct
  source 1..110: mol_type = other DNA
ttcagcatttggggggacacacataacaggaggagagctgcaggtcatatgacgcaggtattcatccccagcaaggctggccgactgcaaggaacacacaaccaggcaaa

SEQ ID NO: 40466 - DNA, 110 bp, synthetic construct
  source 1..110: mol_type = other DNA
tgttggccagacttaatggcaatcatatgcgcactcatccatttctccatctagagcatgagctgcaacttatatgagaactgagaccatgtggtaagcatttttgtctc

SEQ ID NO: 40467 - DNA, 110 bp, synthetic construct
  source 1..110: mol_type = other DNA
aacttgcaatgagggttgcaatagtaatctccaaatttctcaggaatatctagagccgctaaagagcaccatccatcattacccagttttcagaagctactactttgcaa

SEQ ID NO: 40468 - DNA, 110 bp, synthetic construct
  source 1..110: mol_type = other DNA
ccgctaaagagcaccatccatcattacccagttttcagaagctactactttgcaaagaattttgcggttaacctgttgccttctcccaacaggtctgtaagagaattcag

SEQ ID NO: 40469 - DNA, 110 bp, synthetic construct
  source 1..110: mol_type = other DNA
caactcccattttacagataagagacttgaggtacagagaggctcagtaatttgctgaagctcttctagctcatgaggagggaagttgggattgaccccgggtcttcctc

SEQ ID NO: 40470 - DNA, 110 bp, synthetic construct
  source 1..110: mol_type = other DNA
tgaagctcttctagctcatgaggagggaagttgggattgaccccgggtcttcctctgcaagttcatgcacttgggtgtcacgctgtaggaatgatggggacccctacagt

SEQ ID NO: 40471 - DNA, 110 bp, synthetic construct
  source 1..110: mol_type = other DNA
tgtcaacactctaatatgcgtagtatagcataatggttacgaacaaggacctaggaattgtatagacttgaattcaaatttctgttctaccacggctagctgtgtgacct

SEQ ID NO: 40472 - DNA, 110 bp, synthetic construct
  source 1..110: mol_type = other DNA
aattgtatagacttgaattcaaatttctgttctaccacggctagctgtgtgaccttgggcaagtcatttgatgcctctgtgtcttgttttccatatctttatctactgat

SEQ ID NO: 40473 - DNA, 110 bp, synthetic construct
  source 1..110: mol_type = other DNA
aattaatgcaaaaaagtccacggtgaacaaaataacaaattttaaacatagacatattccatgctgagcccagttgatgcctaggccagagggaaaatgtgtgttcctgg

SEQ ID NO: 40474 - DNA, 110 bp, synthetic construct
  source 1..110: mol_type = other DNA
ggatcttaacccactaccactgtgtcagaccagggatcaaacttgagccttaggagccacccgagctgctgcagaaacaatgctggttcccacagtgggaactcctcatt

SEQ ID NO: 40475 - DNA, 110 bp, synthetic construct
  source 1..110: mol_type = other DNA
gtgaggggttagaaagtccctggggagagcaggggactagacaagggaacaggctaatgtgatgctgggtgtatttcttccttgccacaggttgctctgcagcttgtctt

SEQ ID NO: 40476 - DNA, 110 bp, synthetic construct
  source 1..110: mol_type = other DNA
aatgtgatgctgggtgtatttcttccttgccacaggttgctctgcagcttgtctttgaatctgttcagagtaaaagctcttgaaggaacgagatagacagagataagatt

SEQ ID NO: 40477 - DNA, 110 bp, synthetic construct
  source 1..110: mol_type = other DNA
tcattcgttcatttattgaacacatttatggacagagtattaactgtcaggctgtttcgtggacggggattcagctgtgtgcgtatcagagaagatccctcttcttatgg

SEQ ID NO: 40478 - DNA, 110 bp, synthetic construct
  source 1..110: mol_type = other DNA
ttcgtggacggggattcagctgtgtgcgtatcagagaagatccctcttcttatggaatttttgttatgatgggggacacatacatacctataaataaataaattttttta

SEQ ID NO: 40479 - DNA, 110 bp, synthetic construct
  source 1..110: mol_type = other DNA
ttccatattcaagttcctgtactctttcccttttttaagctgatgccaatgactaggggcaccttggaaatcctctgttgactatgatggagccaggaaatgaaaggaat

SEQ ID NO: 40480 - DNA, 110 bp, synthetic construct
  source 1..110: mol_type = other DNA
tgaatgaggtcagagcattgggaggagaagagctaagacaggaaagtccagatggaattttgatgctggccgaaatccatcatatggctaaagcgcatcttcctacattc

SEQ ID NO: 40481 - DNA, 110 bp, synthetic construct
  source 1..110: mol_type = other DNA
atgaattgagacctcatttctccaagatgcatgctttagaaagctagttctcgtggtctcccacttggtctctgcatgacttctgcaggcaacatgaaatgcaggacatc

SEQ ID NO: 40482 - DNA, 110 bp, synthetic construct
  source 1..110: mol_type = other DNA
tgtttgataggcagtttggtttgggaacagttatttacagaacaaaagcaggagggaggtggtttaaatatggtgcatggtaaataagcttgagaagtacctaatttttg

SEQ ID NO: 40483 - DNA, 110 bp, synthetic construct
  source 1..110: mol_type = other DNA
gaggtggtttaaatatggtgcatggtaaataagcttgagaagtacctaatttttgtggacttaagtataataagctttcaactaagcctgaagcattttaattccctgag

SEQ ID NO: 40484 - DNA, 110 bp, synthetic construct
  source 1..110: mol_type = other DNA
ctcttgtgtgagttctttcatccacctcctcggaatgcttccttggctatgatttatgatttatttcctaacctttgcagcaatgctgaaagtgagatgaagaaacagag

SEQ ID NO: 40485 - DNA, 110 bp, synthetic construct
  source 1..110: mol_type = other DNA
atgatttatttcctaacctttgcagcaatgctgaaagtgagatgaagaaacagagtcagatggagctctggttgaggttcagcagtaatgaacccaactaggatccatga

SEQ ID NO: 40486 - DNA, 110 bp, synthetic construct
  source 1..110: mol_type = other DNA
ttctgactgggagtgaatgagctggcctgtcgccacataagcgtgcctctaaattgaagtcactattactgtttttcttattaccaggtgctattaggtcctcaggacga

SEQ ID NO: 40487 - DNA, 110 bp, synthetic construct
  source 1..110: mol_type = other DNA
tttcctcctctggaaattctttttgaattttgaacttttgaacttttaggcaagtattaaatgtgtatcatcctatcacagcgtctggagcatcatagacactcagtaat

SEQ ID NO: 40488 - DNA, 110 bp, synthetic construct
  source 1..110: mol_type = other DNA
attaaatgtgtatcatcctatcacagcgtctggagcatcatagacactcagtaatctttagcttcctcatttcttcctctaagttctaaactacaaaaaaaaaaaaaatg

SEQ ID NO: 40489 - DNA, 110 bp, synthetic construct
  source 1..110: mol_type = other DNA
aataaggaaagaaactctgagtttctccaagccgggtgtttctggctcagagttgctattatgttccagctaagatgctgggtgaggttgttgtcatctgaaggcttgtc

SEQ ID NO: 40490 - DNA, 110 bp, synthetic construct
  source 1..110: mol_type = other DNA
caagttctgcccactttcaaagcctagtttccttatcaataagatagatatgctggagctcactttgagaattgttgggaggatgaaagcttcaggcactgagtggtcag

SEQ ID NO: 40491 - DNA, 110 bp, synthetic construct
  source 1..110: mol_type = other DNA
agggttttatagatttattagcaaccttagttgtttattccactttccttaagttcctaaaattaaatcacctagctcattgccaattcacctactttgcaggttttcca

SEQ ID NO: 40492 - DNA, 110 bp, synthetic construct; identical to SEQ ID NO: 40491
  source 1..110: mol_type = other DNA

SEQ ID NO: 40493 - DNA, 110 bp, synthetic construct
  source 1..110: mol_type = other DNA
aatactagaatctcctgcccatggctgactgtcctagctccactatctctgagtgtcatcaagcttcccccggaagaaggcagaggcaacagctacatcactgggttgcc

SEQ ID NO: 40494 - DNA, 110 bp, synthetic construct
  source 1..110: mol_type = other DNA
actttctaaccatgaattaaatgcctcttccgtgttctctcctatcactgaaaacttcccccatccccactgaatcacttttaaccctggggtatttatatattaaaaaa

SEQ ID NO: 40495 - DNA, 110 bp, synthetic construct
  source 1..110: mol_type = other DNA
ttcccccatccccactgaatcacttttaaccctggggtatttatatattaaaaaaattatatagatagatagatagatacacacacacacacacacacacacacgaagtc

SEQ ID NO: 40496 - DNA, 110 bp, synthetic construct
  source 1..110: mol_type = other DNA
atgatgatgcacaagcaaaaagtgtgtagacaaatatccggtcaccctgggatacagagattttccttttgactccagctcaatgctctggtatggaaagaaggttctcc

SEQ ID NO: 40497 - DNA, 110 bp, synthetic construct
  source 1..110: mol_type = other DNA
agtaatattctttttatccttaaatatccagattctcagtcaccaaatgctagaccaacaattgtttttgcttcccattttatagataagcctaaaatgaagaaagtcag

SEQ ID NO: 40498 - DNA, 110 bp, synthetic construct; identical to SEQ ID NO: 40497
  source 1..110: mol_type = other DNA

SEQ ID NO: 40499 - DNA, 110 bp, synthetic construct
  source 1..110: mol_type = other DNA
atgatcatgatttatcagagagcaattataatggccatgactaaatttaaccagtgattgtgcaaaagtttgatagtcttgtatagcccaaaagttatctagctttatag

SEQ ID NO: 40500 - DNA, 110 bp, synthetic construct
  source 1..110: mol_type = other DNA
gattgtgcaaaagtttgatagtcttgtatagcccaaaagttatctagctttatagacaaaaatgcaagaaataggatacctgaacagcaaacatgaagaaacaaaggact

SEQ ID NO: 40501 - DNA, 110 bp, synthetic construct; identical to SEQ ID NO: 40499
  source 1..110: mol_type = other DNA

SEQ ID NO: 40502 - DNA, 110 bp, synthetic construct; identical to SEQ ID NO: 40500
  source 1..110: mol_type = other DNA

SEQ ID NO: 40503 - DNA, 110 bp, synthetic construct
  source 1..110: mol_type = other DNA
ctgcatcagctctcaagggaaacatacagctcaagagacagaatggtggaacatgggagaactgtgcatcttgaactctcctgttgactggtgaatggctttgtgtaagt

SEQ ID NO: 40504 - DNA, 110 bp, synthetic construct
  source 1..110: mol_type = other DNA
ttaactgctgaacagaaaatcagtttatagagaaagcactggactaagcaaccgaaggtctgtatttctgtccagcttttcaataaataatcatttgcagtcacagtttc

SEQ ID NO: 40505 - DNA, 110 bp, synthetic construct
  source 1..110: mol_type = other DNA
tcctgtttcctaactaatttactaattcagttttacctcctatacttgagacctgtcacaattctgtttaagaactttcagcggctcttctccactacatagcatatcaa

SEQ ID NO: 40506 - DNA, 110 bp, synthetic construct
  source 1..110: mol_type = other DNA
tcacaattctgtttaagaactttcagcggctcttctccactacatagcatatcaattctaaatgcctaggctggcatcaaaggcttccagttaagaccgcatatgtcctg

SEQ ID NO: 40507 - DNA, 110 bp, synthetic construct
  source 1..110: mol_type = other DNA
gggtcaagccgagcatgtatacacattttaacatgtacctacgtctacgacgagggttctattattatttttttgaaggagaaatggaggctcagaatgttaaactcttt

SEQ ID NO: 40508 - DNA, 110 bp, synthetic construct
  source 1..110: mol_type = other DNA
aggccataatttttaaaagcttaaaccttcatcataacatgaaatgatttaattccaagggcattagctatgttccgttttcccaggacccccacacaggtcctatcgct

SEQ ID NO: 40509 - DNA, 110 bp, synthetic construct
  source 1..110: mol_type = other DNA
caagggcattagctatgttccgttttcccaggacccccacacaggtcctatcgctttgactgttaaagctgaacaaccctcagccctggtctgggactttggagaaacat

SEQ ID NO: 40510 - DNA, 110 bp, synthetic construct; identical to SEQ ID NO: 40508
  source 1..110: mol_type = other DNA

SEQ ID NO: 40511 - DNA, 110 bp, synthetic construct; identical to SEQ ID NO: 40509
  source 1..110: mol_type = other DNA

SEQ ID NO: 40512 - DNA, 110 bp, synthetic construct
  source 1..110: mol_type = other DNA
ttagagaaatggaacaaggtactcagaggtacctagcagcaggaggcagaacctagtcacatgatagcgaaatagatgtaaattttagaaaacccaccactgagtgtatt

SEQ ID NO: 40513 - DNA, 110 bp, synthetic construct
  source 1..110: mol_type = other DNA
gtcacatgatagcgaaatagatgtaaattttagaaaacccaccactgagtgtattaagtaacagagtctaataactaagtctttctaagttcagtacccagttctgtttg

SEQ ID NO: 40514 - DNA, 110 bp, synthetic construct
  source 1..110: mol_type = other DNA
cctaaagaggttaatttaaattcagttgattaggaaccttaattacatctgcaaagtctcttcacttctgccatgtagctcaacacagtcctgggcatgaatcccattac

SEQ ID NO: 40515 - DNA, 110 bp, synthetic construct
  source 1..110: mol_type = other DNA
aaatggtcagaaccaaaaagcctttcttgaaaatactaatgtaagctacttcctcttagaaaggggcagaatttaaaagactatatcacaaaaattatcttgagcttgaa

SEQ ID NO: 40516 - DNA, 110 bp, synthetic construct
  source 1..110: mol_type = other DNA
cttgaaaatactaatgtaagctacttcctcttagaaaggggcagaatttaaaagactatatcacaaaaattatcttgagcttgaacatgtaaggtaacactatatggatg

SEQ ID NO: 40517 - DNA, 110 bp, synthetic construct; identical to SEQ ID NO: 40515
  source 1..110: mol_type = other DNA

SEQ ID NO: 40518 - DNA, 110 bp, synthetic construct; identical to SEQ ID NO: 40516
  source 1..110: mol_type = other DNA

SEQ ID NO: 40519 - DNA, 110 bp, synthetic construct
  source 1..110: mol_type = other DNA
caagtgtgaatattcaaacttagaccttaattagaatagctctaatactctttggtcttgatttctgattatgctccagaattgttttaaactattccttgaggataaga

SEQ ID NO: 40520 - DNA, 110 bp, synthetic construct; identical to SEQ ID NO: 40519
  source 1..110: mol_type = other DNA

SEQ ID NO: 40521 - DNA, 110 bp, synthetic construct
  source 1..110: mol_type = other DNA
gaattgagagtttactatgcatcctccatgagtactagactttaggaacatacataagcaagctggttttcctttgtcttcaataaccccctctccaggctgtatcaccc

SEQ ID NO: 40522 - DNA, 110 bp, synthetic construct
  source 1..110: mol_type = other DNA
tagttatacacccacttctcttttttttctgttcagagttaaaaaaaaaaataatgaatcagggcatgccaactatcattttctagttaaaagaagcaactgtgaacatg

SEQ ID NO: 40523 - DNA, 110 bp, synthetic construct
  source 1..110: mol_type = other DNA
gaatcagggcatgccaactatcattttctagttaaaagaagcaactgtgaacatgagtttttcccattaactcaaaaaaataagagtttccaggcagtgtagccaatgtt

SEQ ID NO: 40524 - DNA, 110 bp, synthetic construct
  source 1..110: mol_type = other DNA
atgtgataagagtaagcttagttttgtaagaaactgacaacttgtctttgtagtattttgcattcccagcagcaatggaagatagctcctgttgcttcaaattctcacca

SEQ ID NO: 40525 - DNA, 110 bp, synthetic construct
  source 1..110: mol_type = other DNA
tattgggcttaagctaagctaatttcaattatttatttttgtcacatgcctgagtactaattgatagatatacatttttcagtggccacacctgtggcatatggaagttc

SEQ ID NO: 40526 - DNA, 110 bp, synthetic construct; identical to SEQ ID NO: 40525
  source 1..110: mol_type = other DNA

SEQ ID NO: 40527 - DNA, 110 bp, synthetic construct
  source 1..110: mol_type = other DNA
atcttgaagttctctgatgaaatttccctttccttcccaaactctagatgtcagtgtgtccccaggtccactctgggctttttctcactgtacactcattctctttttaa

SEQ ID NO: 40528 - DNA, 110 bp, synthetic construct
  source 1..110: mol_type = other DNA
gaaaaagaggaaggggtccaggcttcagagtttggcagacttgggttgaagtcttgtcttcatctattactagctgtgtgacattggacaccttgcttaacctctctgaa

SEQ ID NO: 40529 - DNA, 110 bp, synthetic construct
  source 1..110: mol_type = other DNA
tctaagataacactatcaccattacaccaggtgatggcattggtcactcttagacatgttttaaaacacagctaggtaatcatttcctcatgctgtcttctcataaaatt

SEQ ID NO: 40530 - DNA, 110 bp, synthetic construct
  source 1..110: mol_type = other DNA
atgttttaaaacacagctaggtaatcatttcctcatgctgtcttctcataaaattctaggcagctttaactgctcccactcctgaatgcagtattttagccttcttcagt

SEQ ID NO: 40531 - DNA, 110 bp, synthetic construct
  source 1..110: mol_type = other DNA
cacccaatacacagcaaggtttatctccagctttccaaccttgtctgtcattcagtcttccgctgctgtagtctgggtgtccatgggagtgtcccagaaaggcccaaact

SEQ ID NO: 40532 - DNA, 110 bp, synthetic construct
  source 1..110: mol_type = other DNA
tcttccgctgctgtagtctgggtgtccatgggagtgtcccagaaaggcccaaactctcatgggacactaagttctcatttgtctgcacaaccatgggctagtttgtattc

SEQ ID NO: 40533 - DNA, 110 bp, synthetic construct
  source 1..110: mol_type = other DNA
accaaatgcttgcttgtttgctaaccaactgctggctcaccttgttggtgggaagcagcaaccagaccgacagatcttccagtctcttccagatctcttcctttatcatc

SEQ ID NO: 40534 - DNA, 110 bp, synthetic construct
  source 1..110: mol_type = other DNA
cagcaaccagaccgacagatcttccagtctcttccagatctcttcctttatcatctccaggttctgagccaagtgtgtgtgcagctacctggggaaaggcaccagcttct

SEQ ID NO: 40535 - DNA, 110 bp, synthetic construct
  source 1..110: mol_type = other DNA
ttgtggtctattctctttgaaatgattattccaacacatcatgcaccacgttcggaaaaacattaggcagttttgaaaacatgatgaggtcagacatctgctcttgccat

SEQ ID NO: 40536 - DNA, 110 bp, synthetic construct
  source 1..110: mol_type = other DNA
tctgctcgtttggaactgaatgggaaacatggataggctctgctgggttcggtagccatggctccggctggtttcactggacagtcatcttctgagggctgacagctaaa

SEQ ID NO: 40537 - DNA, 110 bp, synthetic construct
  source 1..110: mol_type = other DNA
ccatggctccggctggtttcactggacagtcatcttctgagggctgacagctaaaacagtgacctcagtcagcagatggcagagttgctgtatgatcatagacaggtccc

SEQ ID NO: 40538 - DNA, 110 bp, synthetic construct
  source 1..110: mol_type = other DNA
tcacataaatattgtttgctatggtgatgacatgccacaatggcctttctaacagtgggcattgtgtagtacaatgagttggccagttaagaaggtcagctcttaccaca

SEQ ID NO: 40539 - DNA, 110 bp, synthetic construct
  source 1..110: mol_type = other DNA
tgggcattgtgtagtacaatgagttggccagttaagaaggtcagctcttaccacaaacagtcctcaaggaaatactatacaaacttctgtgaaggttcttctagaagaga

SEQ ID NO: 40540 - DNA, 110 bp, synthetic construct
  source 1..110: mol_type = other DNA
agtgaccctcctcctgcttctttgggtgctggcagagagctttctctcctcagtggctgaagggcccagtctgagaacaatataccctgtggggagacccagcaggcagg

SEQ ID NO: 40541 - DNA, 110 bp, synthetic construct
  source 1..110: mol_type = other DNA
gctgaagggcccagtctgagaacaatataccctgtggggagacccagcaggcaggtgggagagtgggagcaaaattttttccaggactttttcagaattccaccaggctg

SEQ ID NO: 40542 - DNA, 110 bp, synthetic construct
  source 1..110: mol_type = other DNA
cctatgaactatgttgaggtcgcatttagctacattgtgaaaccaaggtctgccacgtgtaaatttggggggttttttgtgtgtgtcttttgttcttttagggccgcacc

SEQ ID NO: 40543 - DNA, 110 bp, synthetic construct
  source 1..110: mol_type = other DNA
gggaattccatcagcttctctgcttttagcagcaaaatctgtcctgaatgagcaataaagctgggatttgaacccaggcagtgtatctctggagcccagcctcttaagca

SEQ ID NO: 40544 - DNA, 110 bp, synthetic construct
  source 1..110: mol_type = other DNA
taaagctgggatttgaacccaggcagtgtatctctggagcccagcctcttaagcagagttctgtgtattggagccataatattgaataaagtcaagaatccaagatggga

SEQ ID NO: 40545 - DNA, 110 bp, synthetic construct
  source 1..110: mol_type = other DNA
tccatgggttttaggacctggctttggccgtcaggcagcaaaacctctattgcattctattgcttacaagagtcactaagaccagctcaggtttaagctacagggcaaca

SEQ ID NO: 40546 - DNA, 110 bp, synthetic construct
  source 1..110: mol_type = other DNA
atctctaagccaacgtaagacccattacctttataccaccaccagtttgagcccattccttcaactctatgctcgtattagccaagctattttatctctctgcatcacaa

SEQ ID NO: 40547 - DNA, 110 bp, synthetic construct
  source 1..110: mol_type = other DNA
ttccttcaactctatgctcgtattagccaagctattttatctctctgcatcacaatttcttaatctgctgtaaagtaacagcagttctgtggtcagactctcataagaaa

SEQ ID NO: 40548 - DNA, 110 bp, synthetic construct
  source 1..110: mol_type = other DNA
tgaattcctgacccatagaattgtttaccttctaagtttggggatagtttactgcacagtaagagatgaccaaaaataacattctgactgttctggaaaaatgaggagat

SEQ ID NO: 40549 - DNA, 110 bp, synthetic construct
  source 1..110: mol_type = other DNA
acagtaagagatgaccaaaaataacattctgactgttctggaaaaatgaggagatctgacaggcagggacttaccagcccttaggacagctttagatgccaagtagaaaa

SEQ ID NO: 40550 - DNA, 110 bp, synthetic construct
  source 1..110: mol_type = other DNA
ctgcgccacgaagggaattccgcaagacaggtctttaagtacgatgtggaatgacccagtcagtgttctaggaggttaacacaggagtggggaggaagtgagatggcaga

SEQ ID NO: 40551 - DNA, 110 bp, synthetic construct
  source 1..110: mol_type = other DNA
ccagtcagtgttctaggaggttaacacaggagtggggaggaagtgagatggcagaccagctggaaggctggtgagcggtctaagtgcaaagccaggagggcctggacctg

SEQ ID NO: 40552 - DNA, 110 bp, synthetic construct
  source 1..110: mol_type = other DNA
gatgcacccacagatgctctgcgctgcctcgacatctgttttcagttctcaggatctcgtctgaagttagcttaacagaaaacataccaaaggagaaaaaaaaaaatccc

SEQ ID NO: 40553 - DNA, 110 bp, synthetic construct
  source 1..110: mol_type = other DNA
aggactaatggacatgttggtcctgtgaccctggtccgctctgccagaccgcccgtgtcctgaactgggtgatggccttagctctgcctctgacgctaagtctcagccac

SEQ ID NO: 40554 - DNA, 110 bp, synthetic construct
  source 1..110: mol_type = other DNA
tgtcctgaactgggtgatggccttagctctgcctctgacgctaagtctcagccacagcctgggactcttctaaagcaagttgaacaaaggagttgtaagagtcaaggaaa

SEQ ID NO: 40555 - DNA, 110 bp, synthetic construct
  source 1..110: mol_type = other DNA
ctcctccatgctcgcttccagctcacagctggcttcccaggaaacctgtccagcaatagctacgttcttttcacttcgacaggctcagttgtttcatctataaaagggga

SEQ ID NO: 40556 - DNA, 110 bp, synthetic construct
  source 1..110: mol_type = other DNA
atagctacgttcttttcacttcgacaggctcagttgtttcatctataaaaggggagatcagattcgatgagcccaatctagtgtcagcctcaaaaactgcagtgaagctt

SEQ ID NO: 40557 - DNA, 110 bp, synthetic construct
  source 1..110: mol_type = other DNA
agttccagctctacctcatacgagctatgaaatcttgggcaacctctcagaaatttgatttcctcatctataactctacaaaagtctttgcattgtcatgagtactaaat

SEQ ID NO: 40558 - DNA, 110 bp, synthetic construct
  source 1..110: mol_type = other DNA
tttctctcatgctcaggaatcttctatcctccagtgtaatgatcccaaacgaatttcccctccttcctcttttgccgatgacgcataatgtgcgatgtactcttacattt

SEQ ID NO: 40559 - DNA, 110 bp, synthetic construct
  source 1..110: mol_type = other DNA
tcccctccttcctcttttgccgatgacgcataatgtgcgatgtactcttacatttggtcagcagatgatcatagccaataaatcacagcctctgccctggaactttctgc

SEQ ID NO: 40560 - DNA, 110 bp, synthetic construct
  source 1..110: mol_type = other DNA
ttaaaactgagttaatgtacttgatgtgtatgaaatgttttcattgcacctagaggttttaacatgtacagtgcattggatccccattctcaggtagcaggttttatttc

SEQ ID NO: 40561 - DNA, 110 bp, synthetic construct; identical to SEQ ID NO: 40560
  source 1..110: mol_type = other DNA

SEQ ID NO: 40562 - DNA, 110 bp, synthetic construct
  source 1..110: mol_type = other DNA
gataatactgtcaataattaaacacagtgctttcccttagtttaaagaataattttaggtgttcccgttgcagctcagtgttaacgaacgcaactagcatccatgaggac

SEQ ID NO: 40563 - DNA, 110 bp, synthetic construct
  source 1..110: mol_type = other DNA
ttcctcagttcaactctcctctttcatttcagagaaaataggagccaaacgaaatttcctcgacatcaagcttgcaaatctaccaagtctgcaccgccgccatctcttgc

SEQ ID NO: 40564 - DNA, 110 bp, synthetic construct
  source 1..110: mol_type = other DNA
ttcctcgacatcaagcttgcaaatctaccaagtctgcaccgccgccatctcttgcttccctcccaagaccggaggagttgtccttcgcttttacaatgagctcctattgt

SEQ ID NO: 40565 - DNA, 110 bp, synthetic construct
  source 1..110: mol_type = other DNA
caagtgatgtgttatccagcataagcatccttttctggatattctctgaccctaggcatcaacctgaccctgaaataaggtactttacttcaaagagcagctgagcttgc

SEQ ID NO: 40566 - DNA, 110 bp, synthetic construct
  source 1..110: mol_type = other DNA
gcatcaacctgaccctgaaataaggtactttacttcaaagagcagctgagcttgctaaaaggggacccagggttccaataacggcccaccccctttctgtctccctctct

SEQ ID NO: 40567 - DNA, 110 bp, synthetic construct; identical to SEQ ID NO: 40565
  source 1..110: mol_type = other DNA

SEQ ID NO: 40568 - DNA, 110 bp, synthetic construct; identical to SEQ ID NO: 40566
  source 1..110: mol_type = other DNA

SEQ ID NO: 40569 - DNA, 110 bp, synthetic construct
  source 1..110: mol_type = other DNA
aagactggattcacgtggcttctcatggagttgggttaggaattagacacttccagggccagaaaagagctgtttctcaggtgaagttggggtgtcatcaatgccagtaa

SEQ ID NO: 40570 - DNA, 110 bp, synthetic construct
  source 1..110: mol_type = other DNA
gggccagaaaagagctgtttctcaggtgaagttggggtgtcatcaatgccagtaagaaaaagaacaatcgagaggctgaccaaaacatgcaatgtttactacatagtcat

SEQ ID NO: 40571 - DNA, 110 bp, synthetic construct
  source 1..110: mol_type = other DNA
cctctctgagaccaatgaaatagtctcctagctcatgcctctattatccccctgataactcatggagcagccagatggatcttttaaaagatgtgaattaaatcatgtca

SEQ ID NO: 40572 - DNA, 110 bp, synthetic construct
  source 1..110: mol_type = other DNA
tgggtacaaatctttgtcgtcatctttgaggaatcccatggcatgaattcctgcaagtgcaattctcaggcagtgttcactttacactccaccattgtcagtgtctgtct

SEQ ID NO: 40573 - DNA, 110 bp, synthetic construct
  source 1..110: mol_type = other DNA
caaactctagagtccagaggaccagggcttccatcttgactccaccacttttgcgaatgtgagcaagctacttggcttctcctagtctccgttccttttccctgttaagt

SEQ ID NO: 40574 - DNA, 110 bp, synthetic construct
  source 1..110: mol_type = other DNA
aaacccagctcaaagctcaagggtcaagggaacagcccagactcgggggcttacgcttgaaggtctttcaaaagctttttatttgattcccctcctccttgcctagttga

SEQ ID NO: 40575 - DNA, 110 bp, synthetic construct
  source 1..110: mol_type = other DNA
tccctctggagggtagaagaaagagcatccctcaaggaggcagtgtggtgggcacctcgtggctgcagagttagagcctgtcttcagggaggtcctgcctctctccctgt

SEQ ID NO: 40576 - DNA, 110 bp, synthetic construct
  source 1..110: mol_type = other DNA
attagttatgaataatgtggagaggatcctttggccagaagtggaaaataaccaaacaacactgcagcttttccctaaacattggatgctattttgatcatcttcccccg

SEQ ID NO: 40577 - DNA, 110 bp, synthetic construct
  source 1..110: mol_type = other DNA
acaacactgcagcttttccctaaacattggatgctattttgatcatcttcccccggagaagtatgtttcaaagccatccgtgggttgtaaaatcaatttctgggtcacac

SEQ ID NO: 40578 - DNA, 110 bp, synthetic construct; identical to SEQ ID NO: 40576
  source 1..110: mol_type = other DNA

SEQ ID NO: 40579 - DNA, 110 bp, synthetic construct; identical to SEQ ID NO: 40577
  source 1..110: mol_type = other DNA

SEQ ID NO: 40580 - DNA, 110 bp, synthetic construct
  source 1..110: mol_type = other DNA
atgggccgttctcggggcctggtcacaatatgccaccacagtgggggcaaatcgccttcctttcgggctggaggcaaagcttcagttctgggaccgccaggtggggtttc

SEQ ID NO: 40581 - DNA, 110 bp, synthetic construct
  source 1..110: mol_type = other DNA
cacacgtggaagttgcagggccggggatcccactagagccactgcagcgacagtgccatgtagctatgctctaggccacaggggaagtccagtgctggatccttcttaac

SEQ ID NO: 40582 - DNA, 110 bp, synthetic construct
  source 1..110: mol_type = other DNA
ggcctaatttcaatgctgttgtgtctcagggaacagggaagcccaaggagaggaagtgagatgcaggaacagctggtaggtggagcggtcagaacacacacaatacttac

SEQ ID NO: 40583 - DNA, 110 bp, synthetic construct
  source 1..110: mol_type = other DNA
gtgagatgcaggaacagctggtaggtggagcggtcagaacacacacaatacttacttctttgtttgctttttagggccatacccacggcacatggagggtcccaggctag

SEQ ID NO: 40584 - DNA, 110 bp, synthetic construct
  source 1..110: mol_type = other DNA
ttctgactttaaactggaatccccattcgtacctagaatttattctctatgcagcaaccacagctcttgctctttctttttctttttctttctttttttttcttttcttt

SEQ ID NO: 40585 - DNA, 110 bp, synthetic construct
  source 1..110: mol_type = other DNA
ttgtagattaggccaaaagctgcattaaatggataattcacttagctctgttccttcttctgttgatttctgtctagaatttcttagttttccagtgctttcaaatagtt

SEQ ID NO: 40586 - DNA, 110 bp, synthetic construct
  source 1..110: mol_type = other DNA
tcttctgttgatttctgtctagaatttcttagttttccagtgctttcaaatagttacttatttatagtttatagttgttctgtgcaggaagattggtctgatagaaagtt

SEQ ID NO: 40587 - DNA, 110 bp, synthetic construct
  source 1..110: mol_type = other DNA
gagtacctcagactaactcagttttacgtatctttttttcagattcttttcccttataggctattataaaatattgattatagttccttgggctatgcaataagtccttg

SEQ ID NO: 40588 - DNA, 110 bp, synthetic construct; identical to SEQ ID NO: 40587
  source 1..110: mol_type = other DNA

SEQ ID NO: 40589 - DNA, 110 bp, synthetic construct
  source 1..110: mol_type = other DNA
tggcatacaaatatgacaaaaacatgaggtggaaagaaataattgaaggagaggagagactgtggaggggaagaatttgcctaaggtaaggatgtgcaagctggggatgc

SEQ ID NO: 40590 - DNA, 110 bp, synthetic construct
  source 1..110: mol_type = other DNA
gagactgtggaggggaagaatttgcctaaggtaaggatgtgcaagctggggatgctctaatcagaaaaactgcttttgcctgcctcccgcattggtttttccagaaagat

SEQ ID NO: 40591 - DNA, 110 bp, synthetic construct
  source 1..110: mol_type = other DNA
cctgaagccttcccttcttttcactctaaagcttccctgttcccagacacaggcaaacacaagtgataggggctgactccttcgctatagtgagctctaaataaatagcc

SEQ ID NO: 40592 - DNA, 110 bp, synthetic construct
  source 1..110: mol_type = other DNA
aacacaagtgataggggctgactccttcgctatagtgagctctaaataaatagcctccacttgtcctctcctgggtagtcttgttttatttccagagttctgaacactta

SEQ ID NO: 40593 - DNA, 110 bp, synthetic construct
  source 1..110: mol_type = other DNA
cctggttcttccctccaatggacttgcctgtgagcttcctatttcatcctatttggttttctgcccagctagcaggccaccacggagagcaaagaaagcgacacggagca

SEQ ID NO: 40594 - DNA, 110 bp, synthetic construct
  source 1..110: mol_type = other DNA
gttttctgcccagctagcaggccaccacggagagcaaagaaagcgacacggagcagccctatcagcctgggaagtaccttccctgcgtgagaagccggcaagtgtccgtg

SEQ ID NO: 40595 - DNA, 110 bp, synthetic construct
  source 1..110: mol_type = other DNA
gtgctctccaaggtccctgttcaccttctacaactctcccctccatttcctcctgactttgtatctgggactgagctaccagaatgctctgaggaagcgaggaggcttta

SEQ ID NO: 40596 - DNA, 110 bp, synthetic construct
  source 1..110: mol_type = other DNA
actttgtatctgggactgagctaccagaatgctctgaggaagcgaggaggctttaggaagccttcttggaacaacggttgtgtttaatttatttgaacgtctacagcctc

SEQ ID NO: 40597 - DNA, 110 bp, synthetic construct
  source 1..110: mol_type = other DNA
cattcccatttgaaggatgaagcctaggagacacagagatgttaagtaacttgccctaaatcacacagctcgtaaatattagtcttggaattctctaagtggtaaaactg

SEQ ID NO: 40598 - DNA, 110 bp, synthetic construct
  source 1..110: mol_type = other DNA
ctaaatcacacagctcgtaaatattagtcttggaattctctaagtggtaaaactgtattcccttcaaattcatacactgaaatcttagaatacgaccttatttggaaata

SEQ ID NO: 40599 - DNA, 110 bp, synthetic construct
  source 1..110: mol_type = other DNA
acagaggatgggaggtgccacacattgtctactcccaccctctggatcagaagatgaggactctagatcattctttagatgatgttatatcatagatcgtggtgtcatca

SEQ ID NO: 40600 - DNA, 110 bp, synthetic construct
  source 1..110: mol_type = other DNA
gaggactctagatcattctttagatgatgttatatcatagatcgtggtgtcatcattttgcgactctctctccaagtcagacgtgtgaggctttacctttatctccatcc

SEQ ID NO: 40601 - DNA, 110 bp, synthetic construct
  source 1..110: mol_type = other DNA
tttttcccaaattccattaaaaggtaatttacaagccaataaacccttgattcatgttcaagtattaatagaaacatcactagtcctctctaacccttatcggatcatct

SEQ ID NO: 40602 - DNA, 110 bp, synthetic construct
  source 1..110: mol_type = other DNA
gttcaagtattaatagaaacatcactagtcctctctaacccttatcggatcatctgtggcaattacataaataaagcccttcgttattcagaataggtacattgcataca

SEQ ID NO: 40603 - DNA, 110 bp, synthetic construct
  source 1..110: mol_type = other DNA
tctccatccttatgtaaatcaccatctgcagactagatttagatcggtttggatcacatgatgttaccatggctgttgttttatctaattcattggcagctcttaagatt

SEQ ID NO: 40604 - DNA, 110 bp, synthetic construct
  source 1..110: mol_type = other DNA
acatgatgttaccatggctgttgttttatctaattcattggcagctcttaagatttccagcttctcttgaacccagagctcagagaatgaatggctgggatgggagacga

SEQ ID NO: 40605 - DNA, 110 bp, synthetic construct
  source 1..110: mol_type = other DNA
caggaaagaagccagtcacaaaagaccacatactatatatgattccacgtatccgaaatgcccagaataggcatcccagggagacagcaagtagattattttaagagctg

SEQ ID NO: 40606 - DNA, 110 bp, synthetic construct
  source 1..110: mol_type = other DNA
aaatgcccagaataggcatcccagggagacagcaagtagattattttaagagctgtgctgggggtgggggtggggggcgcatggacggggacagtggaatagggaagtga

SEQ ID NO: 40607 - DNA, 110 bp, synthetic construct
  source 1..110: mol_type = other DNA
gatggacaaagcttacatcctaacactttaccagggggtccaatcccagggcagcaagagtgaggggggacaatatgagttgggaaagaacagaaagcaaatataagata

SEQ ID NO: 40608 - DNA, 110 bp, synthetic construct
  source 1..110: mol_type = other DNA
aagagtgaggggggacaatatgagttgggaaagaacagaaagcaaatataagatactctgttcctaagcaagcaagccaccacatctgaagaacatccaattggttgctg

SEQ ID NO: 40609 - DNA, 110 bp, synthetic construct
  source 1..110: mol_type = other DNA
cttgtaagaagatcctggaaccctcagcttctggccagcaatgcctcctcccttgacatactgtgtctcacggcaaaggcagaaattcggccttctaggacagtggccac

SEQ ID NO: 40610 - DNA, 110 bp, synthetic construct
  source 1..110: mol_type = other DNA
caagaggaaagggaaggaccactcactgactctggccaccaaaggatccttccagggacacacagtgcacatctctacaggttgtgttgaagttctcataagtgcctata

SEQ ID NO: 40611 - DNA, 110 bp, synthetic construct
  source 1..110: mol_type = other DNA
cgggagagaggtggggagaccccaacacttgtccttccaggactcagctcagacactgtgttgctcccaatgctgccacaacaaaccaccacaaagtcggtgtcttcaaa

SEQ ID NO: 40612 - DNA, 110 bp, synthetic construct
  source 1..110: mol_type = other DNA
gggagagtgacgtgggtgcatgagaggcaaataagtaagggccgcttgggacactgcacagatgtcatgagaagctccctgggctgataaagttggagcgtggctttgag

SEQ ID NO: 40613 - DNA, 110 bp, synthetic construct
  source 1..110: mol_type = other DNA
gcacagatgtcatgagaagctccctgggctgataaagttggagcgtggctttgagggattccagcaggcacaggtggagggagagtgagggggcaccaggcagagggaaa

SEQ ID NO: 40614 - DNA, 110 bp, synthetic construct
  source 1..110: mol_type = other DNA
gtacggggaggttggcacctccatattgctgagagtaactatgcagcttaattgtccatgtgcccaagggcagaggagaggggctgcattattacactcatctaatcaaa

SEQ ID NO: 40615 - DNA, 110 bp, synthetic construct
  source 1..110: mol_type = other DNA
accagcttgaggctggaggacaggggacagctgcacccttggagggtggtgcctggtggaccgctgctctctgtcctgcaacttaatgtaatccttctccctgcagcctg

SEQ ID NO: 40616 - DNA, 110 bp, synthetic construct
  source 1..110: mol_type = other DNA
agggacttgagcatcctcggagtctggcatctgctggggtcctggaacctattcccacaggcgctcagggatgactatccctgcagggcatccagctttcttttctccat

SEQ ID NO: 40617 - DNA, 110 bp, synthetic construct
  source 1..110: mol_type = other DNA
cacaggcgctcagggatgactatccctgcagggcatccagctttcttttctccatgtcagtgctgaggaggctgaaccaaaggatggatctggtcaagaacagagcactg

SEQ ID NO: 40618 - DNA, 110 bp, synthetic construct
  source 1..110: mol_type = other DNA
aaagttgataaatccaccttgaatctcctcaccttctaaactgcggatgaatgtcctcatcagacttaaaggcatcttccacatacgtatcaaaggggcagggaaatggc

SEQ ID NO: 40619 - DNA, 110 bp, synthetic construct
  source 1..110: mol_type = other DNA
ctcatcagacttaaaggcatcttccacatacgtatcaaaggggcagggaaatggcaggacagtgtcaaggtcataaatgaagctctgtcctccactcgacacatgaagca

SEQ ID NO: 40620 - DNA, 110 bp, synthetic construct
  source 1..110: mol_type = other DNA
ttacgacatggcttcctggctcacttcctttgcccacatatgctctcttccccaccagaagagatctgataggggtgcatgtctcacatgtactcccaccagtcattttg

SEQ ID NO: 40621 - DNA, 110 bp, synthetic construct
  source 1..110: mol_type = other DNA
aagacggcagagcagctccgtgcccttcaggcgagttttctcaacagctctgtgcttaccgatgaggaattaaataggttaagagcgcaaaccaaactcaccagaaggga

SEQ ID NO: 40622 - DNA, 110 bp, synthetic construct
  source 1..110: mol_type = other DNA
gttctcccctcctccactcatagataggacatgagcatgtgacttacaactgagaagtactcctatctgctccttttgccatgtctgtccattcaacgggcattgattga

SEQ ID NO: 40623 - DNA, 110 bp, synthetic construct
  source 1..110: mol_type = other DNA
agtactcctatctgctccttttgccatgtctgtccattcaacgggcattgattgagctgctctgggccaagccctgtctgggagctgagtttgcaagcgcaaaaaagata

SEQ ID NO: 40624 - DNA, 110 bp, synthetic construct
  source 1..110: mol_type = other DNA
agaaaacaattttctgcctacagaaactgatttctttgcatccctttaatccttggaactgggggaagttggcagaggcttatttgaatcgggggctggcgctttcagca

SEQ ID NO: 40625 - DNA, 110 bp, synthetic construct
  source 1..110: mol_type = other DNA
gaactgggggaagttggcagaggcttatttgaatcgggggctggcgctttcagcatcctttgcatcatctcaggaacagaacaccttgagtgacaaaactctcaaatcct

SEQ ID NO: 40626 - DNA, 110 bp, synthetic construct
  source 1..110: mol_type = other DNA
gactttcaccactgcagtctggggttcaatccctggtctgagaaccgagagtccacatcaagctgctacatgctgcagccaaaaataaaataactaaacattttgaaaag

SEQ ID NO: 40627 - DNA, 110 bp, synthetic construct; identical to SEQ ID NO: 40626
  source 1..110: mol_type = other DNA

SEQ ID NO: 40628 - DNA, 110 bp, synthetic construct
  source 1..110: mol_type = other DNA
taattcagagtggcccaaggctcctttatcacctgaccactgttagctctggctttggtgggttcagtaatcagcgtccttttacagccaatgtctaattatccctgaaa

SEQ ID NO: 40629 - DNA, 110 bp, synthetic construct
  source 1..110: mol_type = other DNA
ttcccttgtctttttagggccccacctgcagcaaatggaagttgttaggataggggacgattggagctgtagccgccactacaccaccgtcacaagctgcgtctgtaacc

SEQ ID NO: 40630 - DNA, 110 bp, synthetic construct
  source 1..110: mol_type = other DNA
gacgattggagctgtagccgccactacaccaccgtcacaagctgcgtctgtaacctacaccatagctcacaggaatgctggatcctttactttttatttttactttttgt

SEQ ID NO: 40631 - DNA, 110 bp, synthetic construct
  source 1..110: mol_type = other DNA
gaccaactctctcttagattccgccccctttcgcggtccaaagccttctgggaatcgtagttttctgcaggtgcaaggcgagagcgaggaactggctagggaattctgtt

SEQ ID NO: 40632 - DNA, 110 bp, synthetic construct
  source 1..110: mol_type = other DNA
cgtagttttctgcaggtgcaaggcgagagcgaggaactggctagggaattctgttctctgggggcctcgcagggttttaggctcccaaaggaggcgataaagtgattttc

SEQ ID NO: 40633 - DNA, 110 bp, synthetic construct
  source 1..110: mol_type = other DNA
agggcaggcaagttagtggggccggacatgtgacaagggaaaaagtgggaggagtgagtcaaggaagcagccagggttcagagcatctagagtcttgaaggtcatggtaa

SEQ ID NO: 40634 - DNA, 110 bp, synthetic construct
  source 1..110: mol_type = other DNA
gagtcaaggaagcagccagggttcagagcatctagagtcttgaaggtcatggtaaagattctccatcatacttagagtaaaattcagtggagcgttgagcaaaggaggga

SEQ ID NO: 40635 - DNA, 110 bp, synthetic construct
  source 1..110: mol_type = other DNA
caaagttgttcaaaactgatggtttcttcttttgtaacacatcatagactgctcgttggctttgtatttaatgccctgacatgtctgcttcttgcaccttcctctgattt

SEQ ID NO: 40636 - DNA, 110 bp, synthetic construct
  source 1..110: mol_type = other DNA
ggagggtgatgcagaaacggaggaggaactggaccaaacaaagatgctgggagagaaaagaacagagaactctgggcgcacggcaacggagtgcaaggtgtcccgggaaa

SEQ ID NO: 40637 - DNA, 110 bp, synthetic construct
  source 1..110: mol_type = other DNA
aaaagaacagagaactctgggcgcacggcaacggagtgcaaggtgtcccgggaaacctgctggtggctgcggaggggaactgtaggaagctatttcccgttacctgtgtt

SEQ ID NO: 40638 - DNA, 110 bp, synthetic construct
  source 1..110: mol_type = other DNA
tgctgcaaccctttgcgtggggacagatctgcatcctgaccctctcggcttcagacatttgctaggatgacaatggaagcaaggtcctctttcggagaaggtgctgggtt

SEQ ID NO: 40639 - DNA, 110 bp, synthetic construct
  source 1..110: mol_type = other DNA
catttgctaggatgacaatggaagcaaggtcctctttcggagaaggtgctgggttggttgcagagacctgcccctgtgaagccagcacagaaaactgggtcaggagatag

SEQ ID NO: 40640 - DNA, 110 bp, synthetic construct
  source 1..110: mol_type = other DNA
cacaggcagcacctccctctgctctctgaccggaaccttctggctgcccccagcgccctcctgtgttccagctcctctccccctcatcttgtttctgttcttattacttc

SEQ ID NO: 40641 - DNA, 110 bp, synthetic construct
  source 1..110: mol_type = other DNA
aaaggtataatcactggccccattttccagatgagtaagtaaatgaaaaaaaaaaaaggtaagtgatcttcctcccgggggacaggatggttcagtcaggagcggtcatg

SEQ ID NO: 40642 - DNA, 110 bp, synthetic construct
  source 1..110: mol_type = other DNA
aaggtaagtgatcttcctcccgggggacaggatggttcagtcaggagcggtcatgaagactcatctgaattctcctgctaacaagactgggtgcctttggacaaatcact

SEQ ID NO: 40643 - DNA, 110 bp, synthetic construct
  source 1..110: mol_type = other DNA
tatttcccacagttctggaggtgggaagtccaagctcaaggtgccagaaaggttaagtttcactggaaggcctctttccttgcagacagctgccatctcaccatatgctt

SEQ ID NO: 40644 - DNA, 110 bp, synthetic construct
  source 1..110: mol_type = other DNA
agtttcactggaaggcctctttccttgcagacagctgccatctcaccatatgcttgtattatgaccttctctttgtgtgtacctggtgataggggttagctatctcttcc

SEQ ID NO: 40645 - DNA, 110 bp, synthetic construct
  source 1..110: mol_type = other DNA
ggttggagcaaggtgggagagaggagttcctgagaaagagagagctgatgcccgttgctgtgatgagatgcttcccacatgctgctctccattttcactgctctatcctc

SEQ ID NO: 40646 - DNA, 110 bp, synthetic construct
  source 1..110: mol_type = other DNA
tctaattgtagagatatggtgggggaacaagacagaagaagtccctcttctcatgaaaatgaattagtaataaggaaactattaggtggtgctaagtgctctgccgaaag

SEQ ID NO: 40647 - DNA, 110 bp, synthetic construct
  source 1..110: mol_type = other DNA
aaaatgaattagtaataaggaaactattaggtggtgctaagtgctctgccgaaagttcagatgtgttggtacgattatgtgtttatgtgtaacttgggtgttgttttgga

SEQ ID NO: 40648 - DNA, 110 bp, synthetic construct
  source 1..110: mol_type = other DNA
taagaggcagaaaatagaacacatgttagctgatcaatggtgggggtcaagagaagaaagtctagggagggactctctaaggatctgtgtctgggtgaatagggtgccag

SEQ ID NO: 40649 - DNA, 110 bp, synthetic construct
  source 1..110: mol_type = other DNA
ccgtgtgagtgaagccatttggactctacagaccagactatccaccagctaaataccaacgagtgaccacttttgatgtcatctggagcatgggaatctcccagatgagc

SEQ ID NO: 40650 - DNA, 110 bp, synthetic construct
  source 1..110: mol_type = other DNA
ccaacgagtgaccacttttgatgtcatctggagcatgggaatctcccagatgagccctgcccaaattcctgatccacaaaatagtaaaatcattgttttcagcctctaag

SEQ ID NO: 40651 - DNA, 110 bp, synthetic construct
  source 1..110: mol_type = other DNA
atctgcctttgtcagttggtttttcccatggcagaagggtggccggtccattgagcagtgagcctcatgtgtggagctctcttggtgagctgagtcctgcacttggcacc

SEQ ID NO: 40652 - DNA, 110 bp, synthetic construct
  source 1..110: mol_type = other DNA
agaatcctggaagaactccttggcataggtgttataaaccatatgttagacacatgaaaagtatagttcaaatgggttaagtggatcacccaggtcacagctagtagtgt

SEQ ID NO: 40653 - DNA, 110 bp, synthetic construct
  source 1..110: mol_type = other DNA
gaaaagtatagttcaaatgggttaagtggatcacccaggtcacagctagtagtgttgagttgggctccagtcttgggtctgcctaatgtgtggtgaattaggtgatataa

SEQ ID NO: 40654 - DNA, 110 bp, synthetic construct
  source 1..110: mol_type = other DNA
gaatgaaaatgcactttcctggctttcagatggctgacttattatgtattttcacatgtgtgagggagaggtagttagctgtttaccctcttcttacaaggacactaatc

SEQ ID NO: 40655 - DNA, 110 bp, synthetic construct
  source 1..110: mol_type = other DNA
atgtgtgagggagaggtagttagctgtttaccctcttcttacaaggacactaatcccatttgtaaggtttccatcctcattacttaagtaacctcctaaaggctccactt

SEQ ID NO: 40656 - DNA, 110 bp, synthetic construct
  source 1..110: mol_type = other DNA
gtaagacaaattatgtcattgagcaaaatgagcatggattttagaatcaaataatactggtgttgaatgttcttagatttccacttgctaagtatgcaaccttgaatgga

SEQ ID NO: 40657 - DNA, 110 bp, synthetic construct
  source 1..110: mol_type = other DNA
atcccttaatgacctcatgaaaaattttagtgatcattcctctgcactactgctatgaagctccttgacaactccagtattttacaatggacctgttagctgaagccctg

SEQ ID NO: 40658 - DNA, 110 bp, synthetic construct
  source 1..110: mol_type = other DNA
gaaagaagggtgttaagtcttttttcttcttggtgatcactgactttcttgacatagtttctgtatttaaaagacatgttgtaaactttctgatttgcttatttgaagat

SEQ ID NO: 40659 - DNA, 110 bp, synthetic construct
  source 1..110: mol_type = other DNA
agcctgaaaaattcttttaagtgttttttgtagagaaggtctgccagtgacaaattctcactttttgttgatcttgaagctcttaatttctccccaatttttgaagaatt

SEQ ID NO: 40660 - DNA, 110 bp, synthetic construct
  source 1..110: mol_type = other DNA
agagagatgcagaatggaggtgtgatagggtcatttcatcagaacttgtcttccggacaggttttgagtttctagaggaagaggagggcttataagactcaaagcacagg

SEQ ID NO: 40661 - DNA, 110 bp, synthetic construct
  source 1..110: mol_type = other DNA
ctgtggcaaagtcactgagcttttaaggagcctgatttccacatcatcagtttttaaataagagcaaagcacccattgaactaaatgtggcacagttaacatgcattgtg

SEQ ID NO: 40662 - DNA, 110 bp, synthetic construct
  source 1..110: mol_type = other DNA
aaataagagcaaagcacccattgaactaaatgtggcacagttaacatgcattgtgatttactaatgtatagaaaaatagagtgtaattttgcctaccagaatttctaaaa

SEQ ID NO: 40663 - DNA, 110 bp, synthetic construct; identical to SEQ ID NO: 40661
  source 1..110: mol_type = other DNA

SEQ ID NO: 40664 - DNA, 110 bp, synthetic construct; identical to SEQ ID NO: 40662
  source 1..110: mol_type = other DNA

SEQ ID NO: 40665 - DNA, 110 bp, synthetic construct
  source 1..110: mol_type = other DNA
tgtgcttcaagagctcagaagagcaagggaccgtccaaactggagtagatacagctttccagaggaaatgatatttcagcaacgaacttttgcttaggcatggaatccgg

SEQ ID NO: 40666 - DNA, 110 bp, synthetic construct
  source 1..110: mol_type = other DNA
tttccagaggaaatgatatttcagcaacgaacttttgcttaggcatggaatccggactagtaggaagggtaatcaaaatgggcagagtgaagaaacataactaaagactc

SEQ ID NO: 40667 - DNA, 110 bp, synthetic construct
  source 1..110: mol_type = other DNA
tagcctttctctcctccctaaaggtcagaggggtgtgactgaaagttccaaccctctaatcacaggatcagatccaatggcagccagctctcttccttaagcttttccaa

SEQ ID NO: 40668 - DNA, 110 bp, synthetic construct
  source 1..110: mol_type = other DNA
cccctggcaaccactgatttttttttttttttaactgtctccatacttttgcattttccaggatgtcatagagttggaatcctatagcatgcagttttgggtttgtttgg

SEQ ID NO: 40669 - DNA, 110 bp, synthetic construct
  source 1..110: mol_type = other DNA
ttccaggatgtcatagagttggaatcctatagcatgcagttttgggtttgtttggtttttgtttgttttttgctttttagggctgtgcttgtggcatatagaggttcccc

SEQ ID NO: 40670 - DNA, 110 bp, synthetic construct
  source 1..110: mol_type = other DNA
catgcagagtcagaggaaaagaagagaagacaagagagagaacaaggtggtgggaggaagcttaagtccatcaatgtaatgagagagagggagcgagggacagaatttaa

SEQ ID NO: 40671 - DNA, 110 bp, synthetic construct
  source 1..110: mol_type = other DNA
tcataatattccatgtatttcagccacttaattcacaaaggccagtgcatttataaactgatgttttacttatcagattgaaggaggaatgctctggaagcttgtactaa

SEQ ID NO: 40672 - DNA, 110 bp, synthetic construct
  source 1..110: mol_type = other DNA
ttcttgatcttcttatgggctgaaacctagaacagtgtgaactggagtttggcccttgctatcagccccttcatggagtaaggcaggagcccctgcagctgcctgagcag

SEQ ID NO: 40673 - DNA, 110 bp, synthetic construct
  source 1..110: mol_type = other DNA
ttgctatcagccccttcatggagtaaggcaggagcccctgcagctgcctgagcagagctcagggtagagaccaggagtgaagctctctgtgctctgggaaaactggaaga

SEQ ID NO: 40674 - DNA, 110 bp, synthetic construct
  source 1..110: mol_type = other DNA
tgcatggcttctaaggaagagtcaaatataactacagtccttgcttttctatagtaaggttttttctcccctctctagcttctttcaggatttttcttatctttaacttt

SEQ ID NO: 40675 - DNA, 110 bp, synthetic construct
  source 1..110: mol_type = other DNA
gaacaaggaaacttgaaggctggtttaaccttaattgtgttcattacttgcagaggttctgggatggttaaaatttcatctaccaaaattttaaaaaggccatgacagtc

SEQ ID NO: 40676 - DNA, 110 bp, synthetic construct
  source 1..110: mol_type = other DNA
aaggctggtttaaccttaattgtgttcattacttgcagaggttctgggatggttaaaatttcatctaccaaaattttaaaaaggccatgacagtcattgttaaaaaataa

SEQ ID NO: 40677 - DNA, 110 bp, synthetic construct
  source 1..110: mol_type = other DNA
ggaggcaaatttattgtgaatttaaactagcagtactgtagctatcattgagcaggagaaataaatgtaagactgagtcattcataataatagagttgaccctcattcat

SEQ ID NO: 40678 - DNA, 110 bp, synthetic construct; identical to SEQ ID NO: 40677
  source 1..110: mol_type = other DNA

SEQ ID NO: 40679 - DNA, 110 bp, synthetic construct
  source 1..110: mol_type = other DNA
agtgattaatgactgccccaggtcacaggccagcactcagtggtaagaatgaaacccagaaagtttaactccagtgaataattgtccagttattatgctgtattgcttct

SEQ ID NO: 40680 - DNA, 110 bp, synthetic construct
  source 1..110: mol_type = other DNA
ataaagcttgtagttgcttaccccaaaccgaagcataggacaggctaattaggactttatgagtttaaataatacatcatttgttactcagatttttaaaaagattcttt

SEQ ID NO: 40681 - DNA, 110 bp, synthetic construct
  source 1..110: mol_type = other DNA
agcctgggaacttccacatgccacacatgcagccctaaaaaaataaataaggagcacagattctgaccacttaggggtaccatgagaactaaggtactatgctttgtaaa

SEQ ID NO: 40682 - DNA, 110 bp, synthetic construct
  source 1..110: mol_type = other DNA
cagtatcatttgttacagaatcatctcaatgcttcgtttttcctctctgcttgctaaaagtgaataatagctttcctatcttcgaatgtgtggatgatggtattatcagg

SEQ ID NO: 40683 - DNA, 110 bp, synthetic construct
  source 1..110: mol_type = other DNA
aaaagtgaataatagctttcctatcttcgaatgtgtggatgatggtattatcaggactgtgaattttcccagatctgcagaactgagatgcctaatctggagtgaagcaa

SEQ ID NO: 40684 - DNA, 110 bp, synthetic construct; identical to SEQ ID NO: 40682
  source 1..110: mol_type = other DNA

SEQ ID NO: 40685 - DNA, 110 bp, synthetic construct; identical to SEQ ID NO: 40683
  source 1..110: mol_type = other DNA

SEQ ID NO: 40686 - DNA, 110 bp, synthetic construct
  source 1..110: mol_type = other DNA
ttgagttttaaactctctagactctaaactacatgagaaaaatggcttcatttttgtctcctgctcttcctcagcaagtagagtggggacctgctctatagcacagggaa

SEQ ID NO: 40687 - DNA, 110 bp, synthetic construct
  source 1..110: mol_type = other DNA
aaactacatgagaaaaatggcttcatttttgtctcctgctcttcctcagcaagtagagtggggacctgctctatagcacagggaactctacccaatattctgtgataatc

SEQ ID NO: 40688 - DNA, 110 bp, synthetic construct
  source 1..110: mol_type = other DNA
aagcacattacaattggcctgaactagctttcaaaattgaagttgctttaatcacatagatggaattttccagtgtagaaacacaatacatgaccagtatttttatgtga

SEQ ID NO: 40689 - DNA, 110 bp, synthetic construct
  source 1..110: mol_type = other DNA
atagatggaattttccagtgtagaaacacaatacatgaccagtatttttatgtgaccattcccttgcactaagcttcttgcccttaaaatccaagaaaggatgtgaatat

SEQ ID NO: 40690 - DNA, 110 bp, synthetic construct
  source 1..110: mol_type = other DNA
catcattgttataaatgttgagctaattaagggttggttctctgtattacagtctttatagaccctttggtatgagatcagcgtagggggtggggaaagaaggaaagtat

SEQ ID NO: 40691 - DNA, 110 bp, synthetic construct
  source 1..110: mol_type = other DNA
ttatagaccctttggtatgagatcagcgtagggggtggggaaagaaggaaagtatcaatatacacccagtcatgggtagaccttggctgaaaatggcaaagattttgtac

SEQ ID NO: 40692 - DNA, 110 bp, synthetic construct
  source 1..110: mol_type = other DNA
aatatataggtgactaataacctgggcctccataacaagtagaagctagagctctgaagattttcccaggtttcctccacactccctctaggttggatcatgagatatac

SEQ ID NO: 40693 - DNA, 110 bp, synthetic construct
  source 1..110: mol_type = other DNA
gacagggctggggggatgacgtgatcacttcgctatccaagtgtgtgggagtagagtatgcgttaaacatgccaactagaacctcaagttcagctaacaattctctgtgg

SEQ ID NO: 40694 - DNA, 110 bp, synthetic construct
  source 1..110: mol_type = other DNA
gtatgcgttaaacatgccaactagaacctcaagttcagctaacaattctctgtggccccaaattgccactgtggcatccagctgtctcctcaccagggacttcaaacagt

SEQ ID NO: 40695 - DNA, 110 bp, synthetic construct
  source 1..110: mol_type = other DNA
ttcttaacccactgagccacaactggaactccttccctaaattttaaaaggattcctctatctactctttgaagaataggttttaagatggtaacttggaagcaagatca

SEQ ID NO: 40696 - DNA, 110 bp, synthetic construct
  source 1..110: mol_type = other DNA
ggaaaataatacaagtggccagccgtttgctcatgagatttagctcagcagctgccctgtctcaaagggtcacaaatctaaaccagtcttgccatctatgcatcaggctg

SEQ ID NO: 40697 - DNA, 110 bp, synthetic construct
  source 1..110: mol_type = other DNA
ctctaccccaaaatagttcacagtaaccttatcctcacagttcaaagaataccgcactagtgaactaaatcccaactaaaatacagctcaaattgttgcatcttacactt

SEQ ID NO: 40698 - DNA, 110 bp, synthetic construct
  source 1..110: mol_type = other DNA
tgcatttcaatacctgtcccactattttttttttcagcatttttaagctagcacttaatgagcaccagttatgtggcagggaactctggtaagcatgtagatgttgtttc

SEQ ID NO: 40699 - DNA, 110 bp, synthetic construct
  source 1..110: mol_type = other DNA
gtatctaccttaaaaggatctaaaacaatgggtttatctgggtagtcaatactatttacctgatctctgacactgggttgtctgtcaatttctcaatgacatgcaatggt

SEQ ID NO: 40700 - DNA, 110 bp, synthetic construct
  source 1..110: mol_type = other DNA
atttgatctcatttaatcctcacaacaaaactgcacaataagcatggttaccctctatgtgaaggctgatgttcagagatgataaagaactgcccgtgtcatatatcagt

SEQ ID NO: 40701 - DNA, 110 bp, synthetic construct
  source 1..110: mol_type = other DNA
gatctcaagcaaaaatcaagctggaccgtacaaggttagctggaacccaggaggacagaatgaaacccatatcggttcttagccacatagatattctgtgggatctgagg

SEQ ID NO: 40702 - DNA, 110 bp, synthetic construct
  source 1..110: mol_type = other DNA
cagaatgaaacccatatcggttcttagccacatagatattctgtgggatctgaggccattccttgcagttaaatatgaacagctggcttgagagttgaagaaagacgact

SEQ ID NO: 40703 - DNA, 110 bp, synthetic construct
  source 1..110: mol_type = other DNA
tgtgttggcacttctggattggcctgggaagataaccaataatttataatatcgtttcccaggaaaaagcagcttgagttccaagtcactcagaaaggaacttctgagat

SEQ ID NO: 40704 - DNA, 110 bp, synthetic construct
  source 1..110: mol_type = other DNA
atgatgtggttggagtatagacgaggggcaaatataagctaatgttgtttgcatgcaggctttgccactgtgtcttctgtagtattcagtaactaccttctgccctcaga

SEQ ID NO: 40705 - DNA, 110 bp, synthetic construct
  source 1..110: mol_type = other DNA
ttggaaatccatcaatttctccatcttttcccctgcctcctttatgttcctcatttcctctttccatctctaattttccctgctctttcttggtagagatcagctttctc

SEQ ID NO: 40706 - DNA, 110 bp, synthetic construct
  source 1..110: mol_type = other DNA
tcctctttccatctctaattttccctgctctttcttggtagagatcagctttctccgcttagaaaactaggccaccagcaacttcctaagcttgcacagccctgcttcac

SEQ ID NO: 40707 - DNA, 110 bp, synthetic construct
  source 1..110: mol_type = other DNA
agcattggacaaccccaaagggcatatgggaatgcatccccacggtcctatggggtagccagggctcttctggacttgacacacgggaggtgattgaaatcatttactga

SEQ ID NO: 40708 - DNA, 110 bp, synthetic construct
  source 1..110: mol_type = other DNA
aagccatatcattccatatattaaagctttagataatgcaaactaagagaaattgaggcaagaagagtcatacagacatatctaaatcctgtacgtttaaacatatgcac

SEQ ID NO: 40709 - DNA, 110 bp, synthetic construct
  source 1..110: mol_type = other DNA
cttggaatctggggctttattacatgtggcttatagaagtccagagccgggttcagaatttggcaggtgggagcaagcttgaaatcggggaccattgctgttggttgttg

SEQ ID NO: 40710 - DNA, 110 bp, synthetic construct
  source 1..110: mol_type = other DNA
ctgaaaacacacctattatttgattttaaagtcactttctttaaaccttgaaaattagctgtagaatttctgtgtctgtaaccctggtagtttatatagacaaatgttcc

SEQ ID NO: 40711 - DNA, 110 bp, synthetic construct
  source 1..110: mol_type = other DNA
attcacagattcttgattcattgctgtgaaagctcatccttcaactttaacatcaatagatacatttgataatgacacagttccttactaacatcagggaattatatcaa

SEQ ID NO: 40712 - DNA, 110 bp, synthetic construct
  source 1..110: mol_type = other DNA
tggcctgggagataggagagagagcttagggtgagaggtgattatcagtgatatggaacatcaaggtcctttacccttctttgcttacaaaacttgcagaattttggaat

SEQ ID NO: 40713 - DNA, 110 bp, synthetic construct
  source 1..110: mol_type = other DNA
cgggtgtacttccttgggcgacacagcagatccccgttgaccatccattccatatacaataccgtgcttatcaattgctttttctttggatgtgtatctattgtggattt

SEQ ID NO: 40714 - DNA, 110 bp, synthetic construct
  source 1..110: mol_type = other DNA
gcgctctgttctaaaacaggtctttaaagccatcccttgtccagaatgcaatcctttcctttctcatcctgtttcctactctaaatttacaaaatgtatgctaagaatta

SEQ ID NO: 40715 - DNA, 110 bp, synthetic construct
  source 1..110: mol_type = other DNA
tccttgttagcagttctcaagactgctccacccactgctacgcatctctaacacccatgcctattgcacgtggcattggtggtattttctgagctcacaaaagaccagtg

SEQ ID NO: 40716 - DNA, 110 bp, synthetic construct
  source 1..110: mol_type = other DNA
aaagaaagcaagttgtacagagttgaaaataaatctgtttttaattcccagctgaaatacaactccttacgtctgattaaagagtgagaaggtacaaaatacgtccatac

SEQ ID NO: 40717 - DNA, 110 bp, synthetic construct
  source 1..110: mol_type = other DNA
atatatttgtatttggaaaatttgtgatactgcatacctgccagatcaatgccgtccttatgcaccagtgggcaggctggaagacaaaacaaacaagataaaaccctaat

SEQ ID NO: 40718 - DNA, 110 bp, synthetic construct
  source 1..110: mol_type = other DNA
attacataaaaatatttttcagacaatttttatcctcgaatttgttcatatagtcctataagcccctttgaggagagcaaaccttgtgaatgtttaaaagcaggaatgac

SEQ ID NO: 40719 - DNA, 110 bp, synthetic construct
  source 1..110: mol_type = other DNA
ctataagcccctttgaggagagcaaaccttgtgaatgtttaaaagcaggaatgacatgtttcttatatctcagtacagtgattggcccatttctctgggagccaataaag

SEQ ID NO: 40720 - DNA, 110 bp, synthetic construct
  source 1..110: mol_type = other DNA
ttataccacataatactactattcagaattaaaaagggaggagctcctactgtggctcagcaggttacaagccctacttgtatccatgaggatgcatgtttaatccctgg

SEQ ID NO: 40721 - DNA, 110 bp, synthetic construct; identical to SEQ ID NO: 40720
  source 1..110: mol_type = other DNA

SEQ ID NO: 40722 - DNA, 110 bp, synthetic construct
  source 1..110: mol_type = other DNA
tgcagatatttgcctctgtccccaaacactgaccatggccaggctacgaagagactgcagctaaaagcatggatgaatttgactgacaccattctttcctatgcatttga

SEQ ID NO: 40723 - DNA, 110 bp, synthetic construct
  source 1..110: mol_type = other DNA
aacaatcctatttccatcttttcagtctgaagagattaatgggaaaactgcactgagtcggtattgggtcctcctattctcagattctgcgaataaaatgggtaggagga

SEQ ID NO: 40724 - DNA, 110 bp, synthetic construct
  source 1..110: mol_type = other DNA
agtcggtattgggtcctcctattctcagattctgcgaataaaatgggtaggaggatgagtacagccttcaggtggtagctatagatgctaagacctctgatgacctattt

SEQ ID NO: 40725 - DNA, 110 bp, synthetic construct
  source 1..110: mol_type = other DNA
gcctgggaacctcatatgctgcaggtgtggccctaaaaacaaacaaacaaacaaaacaaaacaaaaaaacctctcatatagactcttactcataataggggctgagtaag

SEQ ID NO: 40726 - DNA, 110 bp, synthetic construct
  source 1..110: mol_type = other DNA
acaaaacaaaaaaacctctcatatagactcttactcataataggggctgagtaagtatttgctacatttcactggatgaaattaatcagctataactcctgagtttgtcc

SEQ ID NO: 40727 - DNA, 110 bp, synthetic construct
  source 1..110: mol_type = other DNA
ccaagggaagggctggacggggggcaaggggacggctggtgaattttagccaccgtgggaccctctgcaaggtggagaggattatcccagggtggcctcaggtagcatct

SEQ ID NO: 40728 - DNA, 110 bp, synthetic construct
  source 1..110: mol_type = other DNA
tgggaccctctgcaaggtggagaggattatcccagggtggcctcaggtagcatctctcttccaagtttcatcataaatgctggtgctttccaacaacagagctgaaacag

SEQ ID NO: 40729 - DNA, 110 bp, synthetic construct
  source 1..110: mol_type = other DNA
gcatcccatcaccacaatcaattttaaaacacttccaccaccccacaaaaaacccaacactccttagccaccattccaatcttcccataacccttgatcttagctaaaca

SEQ ID NO: 40730 - DNA, 110 bp, synthetic construct
  source 1..110: mol_type = other DNA
aacactccttagccaccattccaatcttcccataacccttgatcttagctaaacactaaccaactttctgtatctacagatttgattatgtgaagcatttcatataaata

SEQ ID NO: 40731 - DNA, 110 bp, synthetic construct
  source 1..110: mol_type = other DNA
tttccaggcagactaaaacctgggccatagctgaaggagtagctaaaatgaaatggaaagaatacagaccctgatggagttattgttgtggctcagcagtaacaacccaa

SEQ ID NO: 40732 - DNA, 110 bp, synthetic construct
  source 1..110: mol_type = other DNA
ctcaaaaaccagcaagggttaggatcatgtattttcagctcacaggacagatgccgaagaagcccaaatgccaaaggctttggatgtgtgggtgtacagcagtgtgtgtg

SEQ ID NO: 40733 - DNA, 110 bp, synthetic construct
  source 1..110: mol_type = other DNA
agtgacaaagtactttcccaggctctcactccagaggagagaggagtcttcactgagcttgttaagtgccaggacggtgcccattcccctcacatccaatatatgcagcg

SEQ ID NO: 40734 - DNA, 110 bp, synthetic construct
  source 1..110: mol_type = other DNA
agcttgttaagtgccaggacggtgcccattcccctcacatccaatatatgcagcggaaaagatgttcataggaacaggatccgtaggtgggaaaagcctctgatacaaag

SEQ ID NO: 40735 - DNA, 110 bp, synthetic construct
  source 1..110: mol_type = other DNA
tgtttatttttgctattactaaattctgccatatgttttaaacaagttttggtgtaggtagctgagatgtactagttgaggtaatagaagccagtttaagaagttgagga

SEQ ID NO: 40736 - DNA, 110 bp, synthetic construct
  source 1..110: mol_type = other DNA
aacagcactgcctttcacaattggaagtcacccggttcttattgtgcactgtggctttggaagagctcattctatgaaacaagcattggcttagcactttctcagttgtc

SEQ ID NO: 40737 - DNA, 110 bp, synthetic construct
  source 1..110: mol_type = other DNA
taaggtcacatacaactagtttgctgcaaagctggaagattccccatgatcctgagattatacattgagaaagtctatgaccgacttccagtctctgtgtacgtgtgcgc

SEQ ID NO: 40738 - DNA, 110 bp, synthetic construct
  source 1..110: mol_type = other DNA
gattatacattgagaaagtctatgaccgacttccagtctctgtgtacgtgtgcgcattactggatggtgctgctacaacagaaagaagaacaaaatttgaaaaagaggag

SEQ ID NO: 40739 - DNA, 110 bp, synthetic construct
  source 1..110: mol_type = other DNA
atagacaagtacaggagctatgagatcacagaggggaggaaggcaagagagagagaattgagctgaatctgtgcagaggttcaccagatgtgcaggaaaggccattcaaa

SEQ ID NO: 40740 - DNA, 110 bp, synthetic construct
  source 1..110: mol_type = other DNA
aattgagctgaatctgtgcagaggttcaccagatgtgcaggaaaggccattcaaagcactggaagtcagatgaaggtctactaattatccctgtaactcaaaatagacac

SEQ ID NO: 40741 - DNA, 110 bp, synthetic construct
  source 1..110: mol_type = other DNA
tggattggatggtgctcaccagcactgctgagggtagtcttctttattaaaccaattcaaatgctaatctcttctagatatatcctcatagatacccccagaaatgtttt

SEQ ID NO: 40742 - DNA, 110 bp, synthetic construct
  source 1..110: mol_type = other DNA
ttcaaatgctaatctcttctagatatatcctcatagatacccccagaaatgttttgtcagctataggggcatcccttagctcaatcacattgacacaaaaaattaaccct

SEQ ID NO: 40743 - DNA, 110 bp, synthetic construct
  source 1..110: mol_type = other DNA
tgccttgatattttccttttgactttatagctttcctctgtaaaagcaggcctacatcttgaaattgaatataaagggtagaaaaatcttacgtggggttaacatctttc

SEQ ID NO: 40744 - DNA, 110 bp, synthetic construct
  source 1..110: mol_type = other DNA
gactctgctctcctggtccctgtgctatcaggctcatttgtctttcaaatttcggttgaaatatccattcccggagttcctgttatggcacattggttaacaaacctgac

SEQ ID NO: 40745 - DNA, 110 bp, synthetic construct
  source 1..110: mol_type = other DNA
gtgcttcagttctctctaatccctgtcctctgaccatgacttggccttggtttcctgagtgcatttccagtattctgagactgaagccttctgtcacaccacatctatcc

SEQ ID NO: 40746 - DNA, 110 bp, synthetic construct
  source 1..110: mol_type = other DNA
tgagtgcatttccagtattctgagactgaagccttctgtcacaccacatctatccagctgaacctaacatctgcataacgctcactaactccttctcacgagcgctgagc

SEQ ID NO: 40747 - DNA, 110 bp, synthetic construct
  source 1..110: mol_type = other DNA
gggacctcccggaagtgacttagagggactgaagcactgcacaggcattagagggtcttgagggaggaagcttgagaaataagttgccagatcacaaagagccttgagca

SEQ ID NO: 40748 - DNA, 110 bp, synthetic construct
  source 1..110: mol_type = other DNA
ttgcgatctcttggaccgtgagaagtcattcaggatggtctctgatcaggcctctgctttgatgttcccaaagcctttccaccgactgagtttggctctctgaatctgga

SEQ ID NO: 40749 - DNA, 110 bp, synthetic construct
  source 1..110: mol_type = other DNA
gctttgatgttcccaaagcctttccaccgactgagtttggctctctgaatctggagcagctgggactgattatggcatggcatctaggaaacttgtacatctgacatttg

SEQ ID NO: 40750 - DNA, 110 bp, synthetic construct
  source 1..110: mol_type = other DNA
cctgatgacagactatgtgaaacccgctcccttgagcctcctttgtctgaatttactagatttgcaggtgtttggcttcaccgtcccattaatggaaaatgacgctaatg

SEQ ID NO: 40751 - DNA, 110 bp, synthetic construct
  source 1..110: mol_type = other DNA
ctagatttgcaggtgtttggcttcaccgtcccattaatggaaaatgacgctaatggtctcccgaggcttactcaatgcagcaggatctcatgtctcagagaaaaccagaa

SEQ ID NO: 40752 - DNA, 110 bp, synthetic construct
  source 1..110: mol_type = other DNA
aacatttcttcaggtagacagctgtcttctcctgttacccctcaccccctgagctcaaagcgagatgcccctgctatgcacagcaggtgctcaaatgtatcctgagttgc

SEQ ID NO: 40753 - DNA, 110 bp, synthetic construct
  source 1..110: mol_type = other DNA
caaagcgagatgcccctgctatgcacagcaggtgctcaaatgtatcctgagttgccatgactagggggctgcccacccctaacccccagttgtccttggtggcttactgt

SEQ ID NO: 40754 - DNA, 110 bp, synthetic construct
  source 1..110: mol_type = other DNA
tgaataagtagctctgtaagagtgatgggaagttcacagctacctgcccaacacaggcagcaagaacatgactttggtcctgtcccaagtctataaagtcagtaaaccca

SEQ ID NO: 40755 - DNA, 110 bp, synthetic construct
  source 1..110: mol_type = other DNA
ctaatgcaagcataaactatactcctgtgttacagaaggaatgggatgaggggagaataagacaatgagagaatgtaaaaatgaggcgtgactgtaaactaggctgccaa

SEQ ID NO: 40756 - DNA, 110 bp, synthetic construct
  source 1..110: mol_type = other DNA
aataagacaatgagagaatgtaaaaatgaggcgtgactgtaaactaggctgccaaggagcttggccttcaggggatccaggatggcgtcttgatgttttctaacactgct

SEQ ID NO: 40757 - DNA, 110 bp, synthetic construct
  source 1..110: mol_type = other DNA
acgtcacttagcacttacacaggatgctatcccaggcagtatggctttacaccccaatttcatttttctggttttaacagctatacctgtgatatatgcaagttcctggg

SEQ ID NO: 40758 - DNA, 110 bp, synthetic construct
  source 1..110: mol_type = other DNA
aatttcatttttctggttttaacagctatacctgtgatatatgcaagttcctgggccaggggctgaataagagctgcagctgcggctcaccccacagccacaacgacacc

SEQ ID NO: 40759 - DNA, 110 bp, synthetic construct
  source 1..110: mol_type = other DNA
tgtatttccattgcaaattctgttcatgactgtctcttaggtacaaaggcacctggtaacaggaagaaattaaaatgacagaaaaagacaaatatagatcactaatatgt

SEQ ID NO: 40760 - DNA, 110 bp, synthetic construct
  source 1..110: mol_type = other DNA
aagcccaacctaaccttgcagtgtccatgtgggatagatagctgtttcagccaccctagcccaggcaaagacatgtcagtgaaaatctcaaatattctagccctggtgta

SEQ ID NO: 40761 - DNA, 110 bp, synthetic construct
  source 1..110: mol_type = other DNA
gggagggaaaatagaactgtttaggcatgaggggaacttagccatggagcacttcagtagggagtgtgtctgaacctaaatattatcctacacaaaccagactgcgtaaa

SEQ ID NO: 40762 - DNA, 110 bp, synthetic construct
  source 1..110: mol_type = other DNA
agtagggagtgtgtctgaacctaaatattatcctacacaaaccagactgcgtaaattctacagtatcagggcactagatgtgtttctgtggaaaacaggacatgcttttg

SEQ ID NO: 40763 - DNA, 110 bp, synthetic construct
  source 1..110: mol_type = other DNA
gacatagctcggatctcacgttgctgtggctgtggcatagaccggcagatgcggattggatttgacccctaccccgggaactgccatatgctgcaggtacagccctaaaa

SEQ ID NO: 40764 - DNA, 110 bp, synthetic construct
  source 1..110: mol_type = other DNA
ttggatttgacccctaccccgggaactgccatatgctgcaggtacagccctaaaaagcaaaacaaaaccaaacaaaaaaagcaacaaaacaggcttgagtgatgagtcca

SEQ ID NO: 40765 - DNA, 110 bp, synthetic construct
  source 1..110: mol_type = other DNA
acttactgaaatggcaaataagcacaccctccacaagcttagaaacagcaacaaagccaagaggctgccgatgcccctcctgatacctttgtgcttaaacctgtacaatt

SEQ ID NO: 40766 - DNA, 110 bp, synthetic construct
  source 1..110: mol_type = other DNA
aaatgagtgtaggaagaggccatcctggcattcagccgagaaaccaaataagacaacacctgagatgggaaacgaacggcacagtagctttgctttctggtgtgtattct

SEQ ID NO: 40767 - DNA, 110 bp, synthetic construct
  source 1..110: mol_type = other DNA
acacctgagatgggaaacgaacggcacagtagctttgctttctggtgtgtattctagtcacatcttcacttctacccaaggagaaatgataaatgacatgtctgctgcct

SEQ ID NO: 40768 - DNA, 110 bp, synthetic construct
  source 1..110: mol_type = other DNA
acctgtactatgtgataggcactgttgtgactatatattagctcattaatctttacatcaatcctaaaagtaccgtgatgatcccaatttataaataacaaaagaggcac

SEQ ID NO: 40769 - DNA, 110 bp, synthetic construct
  source 1..110: mol_type = other DNA
aaagcccttttcagattgtctcattaacttaagcagttcagctgtgactttttttgtttgttgagttggcattctgcctttgatggtgctttctttcctccagagggttc

SEQ ID NO: 40770 - DNA, 110 bp, synthetic construct
  source 1..110: mol_type = other DNA
ccctaagggccactgccagaggcttctgaaaagtaaacagtataaaaatgggaggaagtcagaacttgaactactggtacagcggtgagattcctggtttttcctgttgc

SEQ ID NO: 40771 - DNA, 110 bp, synthetic construct
  source 1..110: mol_type = other DNA
aagtcagaacttgaactactggtacagcggtgagattcctggtttttcctgttgcccccctggctggaacctgaactttttacaagagaaaaaccccttctttttggcca

SEQ ID NO: 40772 - DNA, 110 bp, synthetic construct
  source 1..110: mol_type = other DNA
gctggctgccctggtctgagatctccccatgctctcctagctcccagacctgcatcgggactctcatttactcgtggcttgttaaccacagcccttttcagtcctctatc

SEQ ID NO: 40773 - DNA, 110 bp, synthetic construct
  source 1..110: mol_type = other DNA
cacgacaggaactccaccaatggcttttaagatatgacaccaaagggcaatctaaataaaaaataattgataagctgtatttataaaattaagtatttcttgggagttcc

SEQ ID NO: 40774 - DNA, 110 bp, synthetic construct
  source 1..110: mol_type = other DNA
ataaaaaataattgataagctgtatttataaaattaagtatttcttgggagttcccatcgtggctcactgagttacaaacctgactaggatgggtgatgaacctgactaa

SEQ ID NO: 40775 - DNA, 110 bp, synthetic construct; identical to SEQ ID NO: 40773
  source 1..110: mol_type = other DNA

SEQ ID NO: 40776 - DNA, 110 bp, synthetic construct; identical to SEQ ID NO: 40774
  source 1..110: mol_type = other DNA

SEQ ID NO: 40777 - DNA, 110 bp, synthetic construct
  source 1..110: mol_type = other DNA
tgggttacggatctggcattgccccaagctacagtgtaggaatcagatgcagctcacatctagcatggctgtgtctgtgacgtaggctgtcagcgtcagctctgattcag

SEQ ID NO: 40778 - DNA, 110 bp, synthetic construct
  source 1..110: mol_type = other DNA
gcattgccccaagctacagtgtaggaatcagatgcagctcacatctagcatggctgtgtctgtgacgtaggctgtcagcgtcagctctgattcagctgctagcctgggaa

SEQ ID NO: 40779 - DNA, 110 bp, synthetic construct
  source 1..110: mol_type = other DNA
ctaagatgtttttttcaatctcagttctgtttcttatggactgatcagtattcagctcttcctttgacagaagctgtctcctgccttgtgagggtgtgtgttctcacagt

SEQ ID NO: 40780 - DNA, 110 bp, synthetic construct
  source 1..110: mol_type = other DNA
ctcttcctttgacagaagctgtctcctgccttgtgagggtgtgtgttctcacagtcacaacatggtggagtgtgtgtgttgatttacagattttgttgctgaaggcatgt

SEQ ID NO: 40781 - DNA, 110 bp, synthetic construct
  source 1..110: mol_type = other DNA
agtggctctgtggagctcagaagctcagagaacaagctttgccacatgctgactcttagatcccaacagagcatggcttccctcacccatctgctggcactgggttgtga

SEQ ID NO: 40782 - DNA, 110 bp, synthetic construct
  source 1..110: mol_type = other DNA
cttctaccatcaccactacctgtttctgaaattgcacctagagtccatgttgggttggaacagtacagggtatccaggtaaacataaggtactgctaagactgtgattag

SEQ ID NO: 40783 - DNA, 110 bp, synthetic construct
  source 1..110: mol_type = other DNA
tgacaagccacagataaggatttcaaaaatccagatgaggaaagtggttaggaagaaagcacaggctaaactttcatgtcacagagaaagagagaagtgcaagagtccca

SEQ ID NO: 40784 - DNA, 110 bp, synthetic construct
  source 1..110: mol_type = other DNA
gatggtttctgccatattctactggaaaaaagtagtccaatacatggcctagattcaagagagtagggaaaaaacgaccccagtgggtaggtaggaagaggagctgtgac

SEQ ID NO: 40785 - DNA, 110 bp, synthetic construct
  source 1..110: mol_type = other DNA
caagagagtagggaaaaaacgaccccagtgggtaggtaggaagaggagctgtgacaagaatttgcagccatctctcacacagcatatggaaaagtactttgatttctgtg

SEQ ID NO: 40786 - DNA, 110 bp, synthetic construct
  source 1..110: mol_type = other DNA
cctctacgccacaatgggaactccaagaggtttcatttttaactatgactaaatacaataccacttgtccagtaggaaaaggtgagcttgttgaaaagcatcattcctat

SEQ ID NO: 40787 - DNA, 110 bp, synthetic construct
  source 1..110: mol_type = other DNA
caataccacttgtccagtaggaaaaggtgagcttgttgaaaagcatcattcctatcttgtgtgaggagcaaaaagcctcattcctaggagctgacaattatatccaaatc

SEQ ID NO: 40788 - DNA, 110 bp, synthetic construct
  source 1..110: mol_type = other DNA
ttacactaggtattgttagcatccatttctaccacctctggatccagtttgccttctatcacatgcgcagaaagctaaaaaaactggcactcctcagtctgtccttgctg

SEQ ID NO: 40789 - DNA, 110 bp, synthetic construct
  source 1..110: mol_type = other DNA
ctatcacatgcgcagaaagctaaaaaaactggcactcctcagtctgtccttgctgttaaatctaggtgtggtgtcagatccgccaatgagatgtagtctcatgagattag

SEQ ID NO: 40790 - DNA, 110 bp, synthetic construct
  source 1..110: mol_type = other DNA
atacatagtagagatataaacttgactccctgcttccactttccccctactatcagctacaggggaactgttaaaaatggaagtcagatcatatcactcccctgcctaaa

SEQ ID NO: 40791 - DNA, 110 bp, synthetic construct
  source 1..110: mol_type = other DNA
gctacaggggaactgttaaaaatggaagtcagatcatatcactcccctgcctaaaatcctccaaggcttatccaccccaccgaaaataaaaccccaacacttttctgggc

SEQ ID NO: 40792 - DNA, 110 bp, synthetic construct; identical to SEQ ID NO: 40790
  source 1..110: mol_type = other DNA

SEQ ID NO: 40793 - DNA, 110 bp, synthetic construct; identical to SEQ ID NO: 40791
  source 1..110: mol_type = other DNA

SEQ ID NO: 40794 - DNA, 110 bp, synthetic construct
  source 1..110: mol_type = other DNA
ttaatcgcctctcctttgacatgagggctatgtcctactaggatctggaaaatacacgcacgtccatcaacccaaaatgtaaatggccctttccagcagagaccactcca

SEQ ID NO: 40795 - DNA, 110 bp, synthetic construct
  source 1..110: mol_type = other DNA
gggtgctgccaaccctaacatccatcttttgccaggcaaacgaagacactgagacatgaagattgctctaacctagctctcttatagcttcttctgcccaggggtttgcc

SEQ ID NO: 40796 - DNA, 110 bp, synthetic construct
  source 1..110: mol_type = other DNA
tttccagatgcaaggaatttgcagaatggtaatggagtttcgaattataatactactgagcactgatggggtttaaagtaaggctccccattcaggcctgagtttgaccc

SEQ ID NO: 40797 - DNA, 110 bp, synthetic construct
  source 1..110: mol_type = other DNA
ctcttcacttcccttaattgttgtgttctaaataagtgttgttgctcttattctcatcatcatgatttttctggagaggcttgctttctttgaaagatttaaaaaaaaaa

SEQ ID NO: 40798 - DNA, 110 bp, synthetic construct
  source 1..110: mol_type = other DNA
gtgttgttgctcttattctcatcatcatgatttttctggagaggcttgctttctttgaaagatttaaaaaaaaaaatgaagattttcaagagagtttaggtaacagtcga

SEQ ID NO: 40799 - DNA, 110 bp, synthetic construct
  source 1..110: mol_type = other DNA
ctctgcctagccagagttctgtggtctcatttgcttgctcagtgcaaaaggcctaggagcgagctgaccctgactggcaaagtcagaaggtaagagcccaggaatgacaa

SEQ ID NO: 40800 - DNA, 110 bp, synthetic construct
  source 1..110: mol_type = other DNA
aggtgctaggtggatgatgtaatttgccctgcattttcatagaatcctttgatgtagtctggttctcacctttatccagtcactatcagagcttagctcgaatgtccctg

SEQ ID NO: 40801 - DNA, 110 bp, synthetic construct
  source 1..110: mol_type = other DNA
agtctggttctcacctttatccagtcactatcagagcttagctcgaatgtccctgtactctcttgctcccagttaaactactaaaatgtgaaattagtgggtctacacta

SEQ ID NO: 40802 - DNA, 110 bp, synthetic construct
  source 1..110: mol_type = other DNA
ccgactgccagcgggtaagcccaacttcaccttgggtcgcgtgtccacctcgcgggtcacctctctcatcgccttccttgtttctctccctctccccagacctctcgggc

SEQ ID NO: 40803 - DNA, 110 bp, synthetic construct
  source 1..110: mol_type = other DNA
ataaggacaataattacagtgttccttatatatagtgtccttatgttgtcctggattagacacaccctaaagatcttcttgacaatttaatttcctctttaaagaccttc

SEQ ID NO: 40804 - DNA, 110 bp, synthetic construct
  source 1..110: mol_type = other DNA
ttagacacaccctaaagatcttcttgacaatttaatttcctctttaaagaccttctctcaaaacatgtttacattttaaaatcctggggcttagggattcaacatatgaa

SEQ ID NO: 40805 - DNA, 110 bp, synthetic construct
  source 1..110: mol_type = other DNA
acaaagacccttggctcttgacatgaagttttaaataaccttggttagatttctgaaaagtttcaggaaacttcatatcgactccgaggtctttgagataaagacactgg

SEQ ID NO: 40806 - DNA, 110 bp, synthetic construct
  source 1..110: mol_type = other DNA
tccatttgatctatgtgtctctttttgtgtcagtaccacaatttttttttttttgtctttttgtctttttagggccgctcccgcagcatttggagattcccaggctaggg

SEQ ID NO: 40807 - DNA, 110 bp, synthetic construct; identical to SEQ ID NO: 40806
  source 1..110: mol_type = other DNA

SEQ ID NO: 40808 - DNA, 110 bp, synthetic construct
  source 1..110: mol_type = other DNA
tcccggaattcagggacagagttgggcccctttgttcatatagacacaggatccaggtgatggttgaggttctgcttgaagcgctgcaaggcagacaggagctctgtgta

SEQ ID NO: 40809 - DNA, 110 bp, synthetic construct
  source 1..110: mol_type = other DNA
tgctgtggagaagctggtgggatgaggttgggtcagtgcggtgaaagctttgatgtaagaaggttgagtgcctgctggaaaagttttttctattagtaagaagctaaagt

SEQ ID NO: 40810 - DNA, 110 bp, synthetic construct
  source 1..110: mol_type = other DNA
taagaaggttgagtgcctgctggaaaagttttttctattagtaagaagctaaagtgtaagccaggtttggagaagatttattcactgtattcccactctagagaaagaca

SEQ ID NO: 40811 - DNA, 110 bp, synthetic construct
  source 1..110: mol_type = other DNA
ccaagacataataagggacaaagccaagcaaagatagggttcaaccataacctcgtctaaccctgttcccacagggagctgcggtgacaaatgacaatacagcatcatac

SEQ ID NO: 40812 - DNA, 110 bp, synthetic construct
  source 1..110: mol_type = other DNA
ctggcaaggtaaatttgggcaaggctacctgaagtctttctattgctgtaaaaatcaataggaagatggggttacctggcaaatatcatggccacaaggactctgtgatg

SEQ ID NO: 40813 - DNA, 110 bp, synthetic construct
  source 1..110: mol_type = other DNA
caataggaagatggggttacctggcaaatatcatggccacaaggactctgtgatggaagctaaagagagtgagcttccctctttttgtggctcctgcttagaccacagaa

SEQ ID NO: 40814 - DNA, 110 bp, synthetic construct
  source 1..110: mol_type = other DNA
aaacatatagactcactttatttacttcagcaatttctcgcctctcttcactagcaaaacgaggtgggcccgcccgatcatcattctttgacccatcttcttccacatat

SEQ ID NO: 40815 - DNA, 110 bp, synthetic construct
  source 1..110: mol_type = other DNA
aaaacgaggtgggcccgcccgatcatcattctttgacccatcttcttccacatatggaataagttgctgggagtgacaaacaaaagttaagtcaaaaatatgacacgcag

SEQ ID NO: 40816 - DNA, 110 bp, synthetic construct
  source 1..110: mol_type = other DNA
attgtcacattgtccttgaagcttttcaaaggtaacaagttctttctgtcctctgagttttcatagggttctcctctctctgtggattgatctactccattgttcactgc

SEQ ID NO: 40817 - DNA, 110 bp, synthetic construct
  source 1..110: mol_type = other DNA
agttttcatagggttctcctctctctgtggattgatctactccattgttcactgctatcccttttatttacctgcttgcttccctttatttaaatcttaaatgaaatgtc

SEQ ID NO: 40818 - DNA, 110 bp, synthetic construct
  source 1..110: mol_type = other DNA
cagggtagccaacaccacaatctagacctgctacagagctttctctccctctgactccctgtaaaactgtcagtctttcaagtcaccagatgaacatgttggagaattat

SEQ ID NO: 40819 - DNA, 110 bp, synthetic construct
  source 1..110: mol_type = other DNA
ttggttgaaccaactgcaggttgaaaatatccaggggaaaaaaattccagaaagttccaaaaaggaaaacttgaatttgccgtggaccagcaactatttacatagtattt

SEQ ID NO: 40820 - DNA, 110 bp, synthetic construct; identical to SEQ ID NO: 40819
  source 1..110: mol_type = other DNA

SEQ ID NO: 40821 - DNA, 110 bp, synthetic construct
  source 1..110: mol_type = other DNA
ctcatgatcttacctccctttcattctgacttgttcctttagatccaaagccaggtactcagctctcatgccttgggatgcaattctcagacccactccaccagtgacaa

SEQ ID NO: 40822 - DNA, 110 bp, synthetic construct
  source 1..110: mol_type = other DNA
gccctcttggagggtctgcccagcagacttccagctggctgcagctccagcctttatttgactacaactgtctgagggacccaagtgccatctactcagataagcccttc

SEQ ID NO: 40823 - DNA, 110 bp, synthetic construct
  source 1..110: mol_type = other DNA
actcagatcctatcttcagcttgtgattcaccctctggctattctcaaagtatctgaaatgggttgaatagtggtccccccaaagatatgcccacccggaaactaagact

SEQ ID NO: 40824 - DNA, 110 bp, synthetic construct
  source 1..110: mol_type = other DNA
actttagggcactaaggaatgaaaaataaatgagtactttattcatctgagtgagtaacccagctttgagataacagatcactaagataattatcatttttaaagcccag

SEQ ID NO: 40825 - DNA, 110 bp, synthetic construct
  source 1..110: mol_type = other DNA
taacccagctttgagataacagatcactaagataattatcatttttaaagcccagtgtgataagtaactctgagcaagtcacctcattcccagattcctgcaaaagcccc

SEQ ID NO: 40826 - DNA, 110 bp, synthetic construct
  source 1..110: mol_type = other DNA
atgattaagtgattttcccagaatacacaatttgtagtatccatctctggaattgttaactgccctttgttttagaatgacttaagcttctgttctggctctttcataat

SEQ ID NO: 40827 - DNA, 110 bp, synthetic construct
  source 1..110: mol_type = other DNA
tgtatttatacactttaatttcttgctttgcatactcatcagtgcgatgttctatggtttgtaagctttctgcataaatatatgtgaaacgtatgctatctacagatatt

SEQ ID NO: 40828 - DNA, 110 bp, synthetic construct
  source 1..110: mol_type = other DNA
tggtcagcagctccttttgaagcaaaaacacagcccatcttttctttgctaaattgagctttgaagggtaaactctgcttaatgacatctccacctgaaacagtccaggt

SEQ ID NO: 40829 - DNA, 110 bp, synthetic construct
  source 1..110: mol_type = other DNA
gagctttgaagggtaaactctgcttaatgacatctccacctgaaacagtccaggtttctatgttaaattacgttctacttaggaaacagcacaaacaatggagtttgaga

SEQ ID NO: 40830 - DNA, 110 bp, synthetic construct
  source 1..110: mol_type = other DNA
ggccaaaagcagacttgttttaacagttaataatcggtatagaaacggaattaacacttgttggaacttcaaaacgagttttttgatggcaatttttaattaaaggaaaa

SEQ ID NO: 40831 - DNA, 110 bp, synthetic construct
  source 1..110: mol_type = other DNA
acttgttggaacttcaaaacgagttttttgatggcaatttttaattaaaggaaaaataactgcacttttaagatgacaataggacatgacagtgatttgacttttgtccc

SEQ ID NO: 40832 - DNA, 110 bp, synthetic construct; identical to SEQ ID NO: 40830
  source 1..110: mol_type = other DNA

SEQ ID NO: 40833 - DNA, 110 bp, synthetic construct; identical to SEQ ID NO: 40831
  source 1..110: mol_type = other DNA

SEQ ID NO: 40834 - DNA, 110 bp, synthetic construct
  source 1..110: mol_type = other DNA
taccaggcaaggtacttaaggtttcctaaactgtattcaaagggtagttaagaattttcagaactctaagtgatagattttactgttttgtcaaatagatgtccagagaa

SEQ ID NO: 40835 - DNA, 110 bp, synthetic construct
  source 1..110: mol_type = other DNA
cctcaaggtacccacagtctagtggaagagaatgacacagataaggccaggatacctcaagatatgtagacaggagttgctgttgtggttcactgcaaatgaatttgact

SEQ ID NO: 40836 - DNA, 110 bp, synthetic construct
  source 1..110: mol_type = other DNA
gttccggattctttttctttttcttttcttttcagaaggagatgagtttgtaccctgtgcttttttctttttcttcaaacagctaagaggattcgggccacttattttct

SEQ ID NO: 40837 - DNA, 110 bp, synthetic construct
  source 1..110: mol_type = other DNA
ttccccaagaagtagatgccaagacaggattaaatgtgcaagagttttctgaggagaaacacctgtattacagaaagaggggagggagctggaaaagcttgggagagttg

SEQ ID NO: 40838 - DNA, 110 bp, synthetic construct
  source 1..110: mol_type = other DNA
ccaaacaaacaacaaacaaacaaacaaaggccacatgcaaacacagatgaaagaaaaccacacgcactccgaaagacactgaagcgaaaactcaagaatgctgttgtctg

SEQ ID NO: 40839 - DNA, 110 bp, synthetic construct
  source 1..110: mol_type = other DNA
atctgaagatgtagatgtcagctgcagttttttttttttttcaatattaatttcttaatgcaataggcatttatttagctcccacaaggagacagagactgttctatgtc

SEQ ID NO: 40840 - DNA, 110 bp, synthetic construct
  source 1..110: mol_type = other DNA
tctacattccactaaccagaacttcagttcctttctgggaagtcatgcaaaccaactgtgatacctttctttctgggtctccccagtgtggcacttgagattgtataaga

SEQ ID NO: 40841 - DNA, 110 bp, synthetic construct
  source 1..110: mol_type = other DNA
ggatgagaggttagagaaaagtaagcagccagctttctctatatgcctccctgaaattctcagacacttttgagattacattggctttcttgcatataagtgatgggaac

SEQ ID NO: 40842 - DNA, 110 bp, synthetic construct
  source 1..110: mol_type = other DNA
cagatgactagacttcttttaccatcccagcccatccttagctgttctcccgaggggtgctcccgctttaaatcatttgcgtgatactccctatcttagcctctgcttct

SEQ ID NO: 40843 - DNA, 110 bp, synthetic construct
  source 1..110: mol_type = other DNA
gcaagcattgaacagggcaagttcgatctattcatactagcacccctagcaactgtgtaaagtgagatttgaagtaataatcactaggacaaaaaggaagtactatgtag

SEQ ID NO: 40844 - DNA, 110 bp, synthetic construct
  source 1..110: mol_type = other DNA
tgtaaagtgagatttgaagtaataatcactaggacaaaaaggaagtactatgtagcttaaagagcaggtcagagtgactcttgagatccctttagttcatgtgatgctca

SEQ ID NO: 40845 - DNA, 110 bp, synthetic construct; identical to SEQ ID NO: 40843
  source 1..110: mol_type = other DNA

SEQ ID NO: 40846 - DNA, 110 bp, synthetic construct; identical to SEQ ID NO: 40844
  source 1..110: mol_type = other DNA

SEQ ID NO: 40847 - DNA, 110 bp, synthetic construct
  source 1..110: mol_type = other DNA
gaataattttccactgatggcagaattatgactctgaggacagattgccaccattaacagctatgggacttgggtgaatcatgggataacttccatttacatatttgctc

SEQ ID NO: 40848 - DNA, 110 bp, synthetic construct
  source 1..110: mol_type = other DNA
taaacagcatagttgctatattcatattcacattttatgcaaaatgtgaaacaatgcatatgtcctgtttaaataaagctcaatcaagcaccttgatcagtacagaaaaa

SEQ ID NO: 40849 - DNA, 110 bp, synthetic construct
  source 1..110: mol_type = other DNA
cacttcttcagtgaggcttgcctgatcctcgctgaaatttctagtgcctcatggcttaactcttagtatcttcttatttccttactgttcttttaatctcacgggcaaga

SEQ ID NO: 40850 - DNA, 110 bp, synthetic construct
  source 1..110: mol_type = other DNA
ttaactcttagtatcttcttatttccttactgttcttttaatctcacgggcaagattacaagctgtgttggacataagaagcaagggccctcctttttccacttcccaca

SEQ ID NO: 40851 - DNA, 110 bp, synthetic construct
  source 1..110: mol_type = other DNA
gcttttttgggaaactctgtttccacatgagaagaaactagtatttcctcaataggccttctggtgagtgcttcaaacgaacggagagtgagagagagcaaggagggagg

SEQ ID NO: 40852 - DNA, 110 bp, synthetic construct
  source 1..110: mol_type = other DNA
gccttctggtgagtgcttcaaacgaacggagagtgagagagagcaaggagggaggtctcatttctgcttacagatacactaacagtccccaaagaggtctgcaaaacccc

SEQ ID NO: 40853 - DNA, 110 bp, synthetic construct
  source 1..110: mol_type = other DNA
cctcaaaacttggtcagttaatttttcagactgtttgaccaacttcatgtttacatgagggcaatttggtcactggtattcagtctgctggggcatgactggatcattgc

SEQ ID NO: 40854 - DNA, 110 bp, synthetic construct
  source 1..110: mol_type = other DNA
tgagggcaatttggtcactggtattcagtctgctggggcatgactggatcattgcaaaagatttctctgaattttgatgttgatgtcaacttagaaattaatggttaaca

SEQ ID NO: 40855 - DNA, 110 bp, synthetic construct
  source 1..110: mol_type = other DNA
ggatactttggaatatcttaaagagaaccaagagaaaaaaatccttttttgccttggtgcatgcctagcagaggcctctaagacaatacagttggctgacttggatgaag

SEQ ID NO: 40856 - DNA, 110 bp, synthetic construct
  source 1..110: mol_type = other DNA
ggtgcatgcctagcagaggcctctaagacaatacagttggctgacttggatgaaggcaagaaaccaccggtacatccaggttatgttgatcgcacctgaaacataagaca

SEQ ID NO: 40857 - DNA, 110 bp, synthetic construct
  source 1..110: mol_type = other DNA
tctgctacttttttttttctttttaactaagtagctgtgcgaacttgagaaagctactagatttctctgagttttcatgtccttagctctaaagggaagagattagacca

SEQ ID NO: 40858 - DNA, 110 bp, synthetic construct
  source 1..110: mol_type = other DNA
agacaattttagttactcagtgcttccaccaaactctgtactccaggtttataaatatgaatttgagcgtttgatcatggagaatgcttaaaatgaacgtatcatgattc

SEQ ID NO: 40859 - DNA, 110 bp, synthetic construct
  source 1..110: mol_type = other DNA
tatgaatttgagcgtttgatcatggagaatgcttaaaatgaacgtatcatgattcagggaagggagtacttaaattatgctcaccgttgatgtgctttaaatgtgcagga

SEQ ID NO: 40860 - DNA, 110 bp, synthetic construct
  source 1..110: mol_type = other DNA
ctcctaaatccttgcagcagcacccagtaaaaaagacagaaaaggtaggaatcacctccagagagataatcttgttgaaatcaattttttttttcaaagagagataatac

SEQ ID NO: 40861 - DNA, 110 bp, synthetic construct
  source 1..110: mol_type = other DNA
atgaggcccatgtgagcacgaccacttctcactgctctgtgttttcatgggcagtgggtgttcagggacgcttgggtgacatgtgagttacagtccataatgctggagaa

SEQ ID NO: 40862 - DNA, 110 bp, synthetic construct
  source 1..110: mol_type = other DNA
tctctcctgcacaaagtcatggagttacaaattattattaactcttaaaatcagcttgtaggaaaaggagaaaactattgtagtatttaaacaaacacatgcacacagag

SEQ ID NO: 40863 - DNA, 110 bp, synthetic construct
  source 1..110: mol_type = other DNA
caacaagttgagtcgcaggaattttttgtttcccagtgcatataaaatgtgtatgtgcactatactgtagtttaagtgtgcaataacattatgcctaaaaacaaagtaca

SEQ ID NO: 40864 - DNA, 110 bp, synthetic construct; identical to SEQ ID NO: 40863
  source 1..110: mol_type = other DNA

SEQ ID NO: 40865 - DNA, 110 bp, synthetic construct
  source 1..110: mol_type = other DNA
ttctctagattagaatcctaaaagtagaattattgggtcaaggaataagcacattttaaattttcataaatactgccaaattgccctccagaaagtctattccaatttat

SEQ ID NO: 40866 - DNA, 110 bp, synthetic construct
  source 1..110: mol_type = other DNA
gtcttttggatctcagccacacttcatctttctatactttttcctgtatttctcagggctggaaacctgtaatctctacttcacaagctagtgaagatcttccagtaaga

SEQ ID NO: 40867 - DNA, 110 bp, synthetic construct
  source 1..110: mol_type = other DNA
aaataagggaaagcctgggcaaaggtgtagaagttgaatctatcaatgccttcgtgtttttgtgtggagcttcacagactccaataagtctaaatttgagtcaattctgt

SEQ ID NO: 40868 - DNA, 110 bp, synthetic construct
  source 1..110: mol_type = other DNA
gttaaagttcaattttttttggtatactgttaaattgcctcataaagagactgcgacaaattagaaatatgagtgtatgagagtgaaagtaggaagcatgagaatagtcc

SEQ ID NO: 40869 - DNA, 110 bp, synthetic construct
  source 1..110: mol_type = other DNA
gggtcctgacaaagaacctcatgagcgatggccggacctctgctgttagagcttaggagtgtgagtctgttttggttgttcttgatcagtgaggcaccagccttgggagc

SEQ ID NO: 40870 - DNA, 110 bp, synthetic construct
  source 1..110: mol_type = other DNA
cagtgtaaatggtataatctgttctttcactcttgctatctttctttctattcctggctcctacagggacaaagaaaggcttcgggagaaaggagtaaacatttggggtc

SEQ ID NO: 40871 - DNA, 110 bp, synthetic construct
  source 1..110: mol_type = other DNA
ggctcctacagggacaaagaaaggcttcgggagaaaggagtaaacatttggggtctgggatactgttacaagtgtttgaaagctaaatttctttttgattacatttgtgg

SEQ ID NO: 40872 - DNA, 110 bp, synthetic construct
  source 1..110: mol_type = other DNA
tatctttgaagtactgaatgtattcataggagtcgttaagtatatgaagatgggctttcctatgaagagaaaattctgttttatgatttgaatgcatcgagcttggttat

SEQ ID NO: 40873 - DNA, 110 bp, synthetic construct; identical to SEQ ID NO: 40872
  source 1..110: mol_type = other DNA

SEQ ID NO: 40874 - DNA, 110 bp, synthetic construct; identical to SEQ ID NO: 40872
  source 1..110: mol_type = other DNA

SEQ ID NO: 40875 - DNA, 110 bp, synthetic construct; identical to SEQ ID NO: 40872
  source 1..110: mol_type = other DNA

SEQ ID NO: 40876 - DNA, 110 bp, synthetic construct
  source 1..110: mol_type = other DNA
acagttggtattccacaccaatcaccaggatgccttgtactctgactctggacatccatagagctgttaagtactgaactctcggattttgctaatacctctaaaaaatt

SEQ ID NO: 40877 - DNA, 110 bp, synthetic construct
  source 1..110: mol_type = other DNA
ccatagagctgttaagtactgaactctcggattttgctaatacctctaaaaaattaaaaagtccatgtgactgcttgccaagaaaaatgaaaagagcagaaacaaaaaag

SEQ ID NO: 40878 - DNA, 110 bp, synthetic construct
  source 1..110: mol_type = other DNA
atacatttcactgtctttcaaaattcataattttttcgctgttcggtgtagtgtatggttttatttaaaggtactggctctgtggtgagacagatgtggtttcccatcca

SEQ ID NO: 40879 - DNA, 110 bp, synthetic construct
  source 1..110: mol_type = other DNA
tggttttatttaaaggtactggctctgtggtgagacagatgtggtttcccatccaaggaaatccttttactagttatgtgaccagatttaagtttcagttttcttgtcta

SEQ ID NO: 40880 - DNA, 110 bp, synthetic construct
  source 1..110: mol_type = other DNA
tgacacatgtagggaatatctctaataataaggttgaaataatgctaagtcatgaagctcctgacagttatcatacataggtatggcattgttccaaaagccaaggcaaa

SEQ ID NO: 40881 - DNA, 110 bp, synthetic construct
  source 1..110: mol_type = other DNA
cctcacaatacaatctaaaaaacagaaatgctattgcattgcctatgggaaaatacaagtttcttgaaaaggtattttaaagttctcaacagattctgattatcttttcc

SEQ ID NO: 40882 - DNA, 110 bp, synthetic construct
  source 1..110: mol_type = other DNA
gaaggattaacttattacaaggaccaggacaaagtatcattagtgctttttctgtaaggattttaagtatggcctttagttttagattcagagagtaatacatatttgag

SEQ ID NO: 40883 - DNA, 110 bp, synthetic construct
  source 1..110: mol_type = other DNA
ccattggagagaactttttgtcatgtggccatatatagctggaaagatgatagcagttcactagttatatccacaagaacaggaacatgtaacaaatagaattatataaa

SEQ ID NO: 40884 - DNA, 110 bp, synthetic construct
  source 1..110: mol_type = other DNA
aatgactaacacatgaaggaactgaggctcccagagtttaaatgtcctgtctgaccatacagcttgtaatcagctaagctagtgttcctctgtgtttcattaagtcccca

SEQ ID NO: 40885 - DNA, 110 bp, synthetic construct
  source 1..110: mol_type = other DNA
tggctggctgcttggcctgcgggatcctggaactgattctgactggctggtagctagagtctggttctgaggctaataagctagaggaatgaccctttatggcacttagt

SEQ ID NO: 40886 - DNA, 110 bp, synthetic construct
  source 1..110: mol_type = other DNA
agagtctggttctgaggctaataagctagaggaatgaccctttatggcacttagtgccagtgtccacatagtagaaggagctcctcaaaatgctgccccctgtggttatg

SEQ ID NO: 40887 - DNA, 110 bp, synthetic construct
  source 1..110: mol_type = other DNA
gcattgcactgagaactttaaaggcccattaatccagcacgaaaattattaatatgggagttccttctgtggtaccatttgttaagaatccaactgcagtagctcagtca

SEQ ID NO: 40888 - DNA, 110 bp, synthetic construct
  source 1..110: mol_type = other DNA
ggatatatgacagtaagtatttgtcaaaaaacagtgcagtttacatcgtaaaatgtaaaagctgatgcatgcaaaatttaacaaaaggaggtcaggaggttccaggatgg

SEQ ID NO: 40889 - DNA, 110 bp, synthetic construct
  source 1..110: mol_type = other DNA
taaaagctgatgcatgcaaaatttaacaaaaggaggtcaggaggttccaggatggattcagtgtgactagagaatttgactctatgtactgcatggtacaacttacctgc

SEQ ID NO: 40890 - DNA, 110 bp, synthetic construct
  source 1..110: mol_type = other DNA
tgggtattggtttaggtcactaagtttgtcatattttgttatgtagcaattcaaaaagaatacaagcaggatcctgagtgcctaatgaccaagctctatgatacaggtag

SEQ ID NO: 40891 - DNA, 110 bp, synthetic construct
  source 1..110: mol_type = other DNA
aagaatacaagcaggatcctgagtgcctaatgaccaagctctatgatacaggtagaaagcacaatcttcatgcctaattcaaagtgttatttgcaaaatatccatggcag

SEQ ID NO: 40892 - DNA, 110 bp, synthetic construct
  source 1..110: mol_type = other DNA
cctgaggaggaatatgatgtttatcaatgttaaatgattcttccaggtaccatcggtaatagatgccttcatttctagtactgagcttggaatctgccacagttaacatt

SEQ ID NO: 40893 - DNA, 110 bp, synthetic construct
  source 1..110: mol_type = other DNA
gctgtgaaacaggcaagaaactttgaagctcaaaaatgcagaaaaagaattcacacttaagagttttcagaactgttctacatacagtaggtcatggcctagagtcagga

SEQ ID NO: 40894 - DNA, 110 bp, synthetic construct
  source 1..110: mol_type = other DNA
cttaagagttttcagaactgttctacatacagtaggtcatggcctagagtcaggaggaagcctgtctgaagtttagtcagggtgaaagaataattgaggttgccttggtc

SEQ ID NO: 40895 - DNA, 110 bp, synthetic construct
  source 1..110: mol_type = other DNA
ccccagaccatcaccctcatcttgttttaaaaacttttccctgatgaaatcagacactatcagggtggtagggttgcccataaagctgaatactaaaactcttagaggaa

SEQ ID NO: 40896 - DNA, 110 bp, synthetic construct
  source 1..110: mol_type = other DNA
ttttttcatccatatgtctgccctcctcagtgttagtttgtcttaagctacctttccttcatgttggcaaaatggtttcattcaggaatcatgtcaacaaatacaaaaca

SEQ ID NO: 40897 - DNA, 110 bp, synthetic construct
  source 1..110: mol_type = other DNA
ctctttgctgttgtaccatctctttcctctggtttctatatacctccctggccgttctgtgcccttcctgcatgcctaaataattgcactcacatccagaattacagtga

SEQ ID NO: 40898 - DNA, 110 bp, synthetic construct
  source 1..110: mol_type = other DNA
gaatgttttaaattatttacatacaagttataataaggcctccaaacacctcctgtctgttgacctcattctccctctatgaggagctctcttcttgctttaataggaga

SEQ ID NO: 40899 - DNA, 110 bp, synthetic construct
  source 1..110: mol_type = other DNA
tctgttgacctcattctccctctatgaggagctctcttcttgctttaataggagaggcacagagaaatatcaaagtcattgacttcagctatttaactctgtctcctaat

SEQ ID NO: 40900 - DNA, 110 bp, synthetic construct
  source 1..110: mol_type = other DNA
ccaccttgctcaatcattgcctgagagagctgccagtaggaaatatatcctcaccaaaaagaatggggatccaaagttgcagcacctctgtgaatcatgcaccttacaat

SEQ ID NO: 40901 - DNA, 110 bp, synthetic construct
  source 1..110: mol_type = other DNA
tttcaatgcacttaagagcctcattctataaaacagtgtttaatgaataattgttgcttccaactccgaaacactgataatttgcagacagtgtagctcctctcacaaca

SEQ ID NO: 40902 - DNA, 110 bp, synthetic construct
  source 1..110: mol_type = other DNA
tgtaatatttctcaaactggattttacaaaagtatccaaggccatgttaccttgtctagtaagttttcaagcttctaatgttattgaaggcatagaatctgaatgtttta

SEQ ID NO: 40903 - DNA, 110 bp, synthetic construct
  source 1..110: mol_type = other DNA
catgaggaaaccaatttcagaatcccatctaaagaggctactttctattgctatttccagtagcaactgttttggcttaggctccttcttaaaagtggatcctaaaacaa

SEQ ID NO: 40904 - DNA, 110 bp, synthetic construct
  source 1..110: mol_type = other DNA
ctttctcctgcctctcatctatcccctgagtccataataatcaggagcttttgtttgggatctttagcagcaaagtccttcccttctacactgtattcatctgaccctta

SEQ ID NO: 40905 - DNA, 110 bp, synthetic construct
  source 1..110: mol_type = other DNA
ctctttcagacaatttttgttgagctttaaaacaatccatgtgagaagagagagagagaaaattaaatttgtacagaaacatccccttcccaggcaagaaattaccacaa

SEQ ID NO: 40906 - DNA, 110 bp, synthetic construct
  source 1..110: mol_type = other DNA
gaagagagatgatctggtactggaggaggtcatggagaagacgtgaccacagactgaccgctgagctggaccgggcaattcggggctccttgcctgcttccctgtccttg

SEQ ID NO: 40907 - DNA, 110 bp, synthetic construct
  source 1..110: mol_type = other DNA
tagcttttatttcactttggctaagttcccaggctattatacattggagaaacactctgaaatttctgcttatcacctttacacagttacttcaagtgctggctctatga

SEQ ID NO: 40908 - DNA, 110 bp, synthetic construct
  source 1..110: mol_type = other DNA
cagtttattctaaatatattggagtagagatgctaggtaccttatcaagacatacattcatcatgatttctccagcttcatcttacttttcaggttaaatgcctctgtca

SEQ ID NO: 40909 - DNA, 110 bp, synthetic construct
  source 1..110: mol_type = other DNA
gtgtgggtgtataagtgtgagatggtctttgcttttaccttggagggttttctattggctgcctttgaactttgcctgctcccttcaatgggggaggcaggtaggaataa

SEQ ID NO: 40910 - DNA, 110 bp, synthetic construct
  source 1..110: mol_type = other DNA
tggctgcctttgaactttgcctgctcccttcaatgggggaggcaggtaggaataacttccagcttagagtctaagctgaaaatgaatttcccatctcgtaaacatattct

SEQ ID NO: 40911 - DNA, 110 bp, synthetic construct
  source 1..110: mol_type = other DNA
tctgtttgatccctggcccaggaactccaacatgcaacgagtatagccagaaaagaaaaaaagagagaactattccttcatcgtcgttttaaatttgatattttttaaaa

SEQ ID NO: 40912 - DNA, 110 bp, synthetic construct
  source 1..110: mol_type = other DNA
aacgagtatagccagaaaagaaaaaaagagagaactattccttcatcgtcgttttaaatttgatattttttaaaatatctagaagatattgagccctcatagaaaagggg

SEQ ID NO: 40913 - DNA, 110 bp, synthetic construct
  source 1..110: mol_type = other DNA
atcctcatttggaacctgccctcgctggttccccagtctagtttgctggtcctgttttcaatagcttgccctccactggtcctctcttgtgtagtctcaccctatggaat

SEQ ID NO: 40914 - DNA, 110 bp, synthetic construct
  source 1..110: mol_type = other DNA
taataggtatgcagcaagttgtaactctgtattccttcttgtcttcctaccttcattttttctttctctcttcatttatccttcactcattcaaattttataaagcttct

SEQ ID NO: 40915 - DNA, 110 bp, synthetic construct
  source 1..110: mol_type = other DNA
aaaaatcccattttcaattgcaacaacaacaaaaatacttaatttaaccaaggaggggaagacctatacacccaaaactgtacgagttttgacattgttaaaagaaactg

SEQ ID NO: 40916 - DNA, 110 bp, synthetic construct
  source 1..110: mol_type = other DNA
gggaagacctatacacccaaaactgtacgagttttgacattgttaaaagaaactgaagaagttgttgaaaaaaataagaagacacaaagaaatggaaagatattctgcgt

SEQ ID NO: 40917 - DNA, 110 bp, synthetic construct
  source 1..110: mol_type = other DNA
tctaagtgtaaaatcctaggaatcagaaataggatggttcatatttctgtatggctgatgaagggagttcaataaatatagtaagtcaaattgcttaagactttagcagc

SEQ ID NO: 40918 - DNA, 110 bp, synthetic construct
  source 1..110: mol_type = other DNA
tgatgaagggagttcaataaatatagtaagtcaaattgcttaagactttagcagctttagcatttttccattaatttctctgatcacattaccttatagcaggacttcaa

SEQ ID NO: 40919 - DNA, 110 bp, synthetic construct
  source 1..110: mol_type = other DNA
aatggtcaggccttgagctggaggaagtagcataagggcagaaactggaaatgatttcctatttcaacagaggaagctggaagtcatcccaaatatagaaaatatgtcat

SEQ ID NO: 40920 - DNA, 110 bp, synthetic construct
  source 1..110: mol_type = other DNA
tggatttcatacaaataattttcttgaattatcttctcctttttctggttcatatccattgagttatcctttagaaaagttccccttctctccttaaaactaagtttctg

SEQ ID NO: 40921 - DNA, 110 bp, synthetic construct
  source 1..110: mol_type = other DNA
cacaaacaaaatttctggctataagccattttctacatctctgcattgtacccgagtacgcttttgtagctttctttaaatcccagttcaattattggtatgcttaatgt

SEQ ID NO: 40922 - DNA, 110 bp, synthetic construct
  source 1..110: mol_type = other DNA
tagatgatatgaagaaacacaaatttatatcagtgattgagaacatggttaatattggcatggtgttgctaaaatttggcctgtccactggtgccgaattgaaacacagg

SEQ ID NO: 40923 - DNA, 110 bp, synthetic construct
  source 1..110: mol_type = other DNA
tatatcagtgattgagaacatggttaatattggcatggtgttgctaaaatttggcctgtccactggtgccgaattgaaacacaggagacagagttttgggtaaaggagaa

SEQ ID NO: 40924 - DNA, 110 bp, synthetic construct
  source 1..110: mol_type = other DNA
ctttcattgaaaaaaattatagttagtacccagatcaaaacccttgaggctccataataaacaacttgttttgttgacaggagtcctaaccttctccactgaacatgaca

SEQ ID NO: 40925 - DNA, 110 bp, synthetic construct
  source 1..110: mol_type = other DNA
aataaacaacttgttttgttgacaggagtcctaaccttctccactgaacatgacagtaaagttgctttacgctttagagcctctcctgtgtgatgtctgtatgggtgcat

SEQ ID NO: 40926 - DNA, 110 bp, synthetic construct
  source 1..110: mol_type = other DNA
ttttgttttttaaattgaggtgtaggagctcctattgtggcacagtgggtaagaattctactttagccacttgggtcactatggaagcacaggttcaatctctggcccaa

SEQ ID NO: 40927 - DNA, 110 bp, synthetic construct
  source 1..110: mol_type = other DNA
acacacacacacacacatatatatacacatacacacacatacaccctgttctggcaaccacagatctgatatctttttatataaattggatttttgttggttttttaaat

SEQ ID NO: 40928 - DNA, 110 bp, synthetic construct; identical to SEQ ID NO: 40927
  source 1..110: mol_type = other DNA

SEQ ID NO: 40929 - DNA, 110 bp, synthetic construct
  source 1..110: mol_type = other DNA
agtggtatgtcccagacacactggaactggatcttctagtaccagtagcatgaaattttttcctctttatttaaagtattttattgcaatactggaaaataatttttaat

SEQ ID NO: 40930 - DNA, 110 bp, synthetic construct
  source 1..110: mol_type = other DNA
taatgtgctctgcaagcagctgggatttatgaaaggcaacacattccttgggggaaaaaatctagaattaaacgaacgtagaggtattatttaggttctggcttgctaga

SEQ ID NO: 40931 - DNA, 110 bp, synthetic construct
  source 1..110: mol_type = other DNA
gcagggactggccccgggggtgagagcaagagaataaccattttgggtggcctggtcatacaatatgatgaatataataataggcaggctatttagtttgatagagttta

SEQ ID NO: 40932 - DNA, 110 bp, synthetic construct
  source 1..110: mol_type = other DNA
ccacagtcctctctcactggccatttaggttgcttatatatcacaatagtgaatagtgctgcattgaacactggggaggagatagatttttgaattatggttgtctggat

SEQ ID NO: 40933 - DNA, 110 bp, synthetic construct
  source 1..110: mol_type = other DNA
tcttctccctcccctgatggggttacatttcctcctgtccaagctaacctccccagtctgggcccagggaatcctctcatttgctctgaagctgtctcacttcaaatttc

SEQ ID NO: 40934 - DNA, 110 bp, synthetic construct
  source 1..110: mol_type = other DNA
tcgatacttgtctttgaataattaatgatcttaagggaagtgaggggatgcagaagctagggaggagcagtcaagaaacaatactacagccttggggcaggatcctagtt

SEQ ID NO: 40935 - DNA, 110 bp, synthetic construct
  source 1..110: mol_type = other DNA
gctagggaggagcagtcaagaaacaatactacagccttggggcaggatcctagttcctcaagggataggcataataattcctttgagttctgcaggatcaaagccccccc

SEQ ID NO: 40936 - DNA, 110 bp, synthetic construct
  source 1..110: mol_type = other DNA
caggcaaccaagatgttgttgagataatgaatttaaaataaaatcactggactctagttgtgagatttacttcagcaaggtcagtccctaaggtgaattcatggacaatg

SEQ ID NO: 40937 - DNA, 110 bp, synthetic construct
  source 1..110: mol_type = other DNA
gggatgtctatggagtacttatctgtgacaggtaaaattttcatatgacaccacgtaaataatttaaaaataggtcactttactgaattttaactctgtgccaggtgatt

SEQ ID NO: 40938 - DNA, 110 bp, synthetic construct
  source 1..110: mol_type = other DNA
gttctattttgtcttttccatgtgtaaatcttgagtgttcttttgcattagatataaatatttgtgaatttcatgcaagtgattttatgcacatgcatttgactggctct

SEQ ID NO: 40939 - DNA, 110 bp, synthetic construct
  source 1..110: mol_type = other DNA
agaattctgggcagaaagaaaacagctgagccaaaattcagacttgtgaagttcagagaacaacaaaattttcacagcggctggagcatgagatctacacatgtgtgtga

SEQ ID NO: 40940 - DNA, 110 bp, synthetic construct
  source 1..110: mol_type = other DNA
atctcagtggggaatgaggttgctcttttgatatttctttctaatttgtaggcagtttgaatcaaagctgccctaataacatctatttcctcattaggtttaaggattaa

SEQ ID NO: 40941 - DNA, 110 bp, synthetic construct
  source 1..110: mol_type = other DNA
ctagttggatttgtttccactgcaccacgatgggaactgcagtctttgttcttttaaagctatcaaataactgaatgaaatctacccacattatggaagatagactgctt

SEQ ID NO: 40942 - DNA, 110 bp, synthetic construct; identical to SEQ ID NO: 40941
  source 1..110: mol_type = other DNA

SEQ ID NO: 40943 - DNA, 110 bp, synthetic construct
  source 1..110: mol_type = other DNA
catattactaacaaatatttttgtgaaaaatgtgtgtgtatgtgtatggaaagagactacacacagcaacaagcctgacgtggcatatgcatgaaaatgcacaaatatat

SEQ ID NO: 40944 - DNA, 110 bp, synthetic construct
  source 1..110: mol_type = other DNA
cttcaataaatggtgctaggataactgaatagctatatgcaaaagggtcaagctggactactctttcacaccgtgcacaaaaacaaatccaaaaaggatcaaagacttaa

SEQ ID NO: 40945 - DNA, 110 bp, synthetic construct
  source 1..110: mol_type = other DNA
gttcacacatatgtgagaagcagctcccctatggctctcaagggtctttcttcctcagttgaaattgaaaaggaggttagtgacatggaggtctggagtaatctccaggg

SEQ ID NO: 40946 - DNA, 110 bp, synthetic construct
  source 1..110: mol_type = other DNA
ttaaaggcctggtgataggaaggggcagttgtaatcttcaaacttcaactttgaataatattttgtgaactgaatgggcatgcgagcttcccacaaattaataaacaatt

SEQ ID NO: 40947 - DNA, 110 bp, synthetic construct
  source 1..110: mol_type = other DNA
taatattttgtgaactgaatgggcatgcgagcttcccacaaattaataaacaatttaattagaagcctacactgcagatgacagtcattgaagagtcaaatttattagaa

SEQ ID NO: 40948 - DNA, 110 bp, synthetic construct
  source 1..110: mol_type = other DNA
tgggagtttggggaacaacaaattctatcctgtttttcaggtataggaggtgcgctaaacctagtcagctctaagtcatacagcccaggaaataatgaaagtttgatcca

SEQ ID NO: 40949 - DNA, 110 bp, synthetic construct
  source 1..110: mol_type = other DNA
ccaccacatagcaaggcttttgggtggaaaaggtattcattggaaggatatatggaagggttaggaaataaaagtgagatttaaaatgaatagattagcttaaatgaagc

SEQ ID NO: 40950 - DNA, 110 bp, synthetic construct
  source 1..110: mol_type = other DNA
tgatataggtctgaggcacattctacagagttcctgggtggacccagtggaatcgagtcttagctgtccattacaaaagtcagtttaataaaaccatttaaaaatgtttt

SEQ ID NO: 40951 - DNA, 110 bp, synthetic construct
  source 1..110: mol_type = other DNA
gacagaaagtagaatgatgctttacaagggctaagggaagagaagctattgctcaatgggtagaggagtttcagttatacaagatctttttgtgcatctccctagagatg

SEQ ID NO: 40952 - DNA, 110 bp, synthetic construct
  source 1..110: mol_type = other DNA
caaactgtgcagcagcagcccttcctctcaagatcagcctgccagtcaacaccagccccctcattccctggcaacgtgctccagcaacaaagcactcttatttttgtgct

SEQ ID NO: 40953 - DNA, 110 bp, synthetic construct
  source 1..110: mol_type = other DNA
ccccctcattccctggcaacgtgctccagcaacaaagcactcttatttttgtgctggcagctgtatgtcagctctccactggcaaatttgactgtcctgagaaataaaaa

SEQ ID NO: 40954 - DNA, 110 bp, synthetic construct
  source 1..110: mol_type = other DNA
atttatgaatgagtttgagggctttgctgcccatcccggcctccagagggactactgcctcccccagtacccagaagccaccacatgccttcctcatcaaaaggagcctg

SEQ ID NO: 40955 - DNA, 110 bp, synthetic construct
  source 1..110: mol_type = other DNA
gctggcagtcaaccacactcccctcaggaggagctctgagtggagcatgaccatagtcaagccctggaactgcacaatctgcttcaccatgaacattcaggaggagccct

SEQ ID NO: 40956 - DNA, 110 bp, synthetic construct
  source 1..110: mol_type = other DNA
gttacattatctgttgctgcatagcaactaacctcgaagtttcgttagtggcttagctgggcaattcttgcatgggctcctgtatcacagttgacagatgatgattgaag

SEQ ID NO: 40957 - DNA, 110 bp, synthetic construct
  source 1..110: mol_type = other DNA
atgccagggatgatctgcttaggatggcatcttctctggtcactaagtgcttagtgagctagtcccacatcctcatccttccacctattttcctggatcactttcataac

SEQ ID NO: 40958 - DNA, 110 bp, synthetic construct
  source 1..110: mol_type = other DNA
tcacttcacgctgaagccagagctgaactatgtctttggaaaacctgatccttgaaattctctctagatactgctgagatgggttatctggtcctttaagcctagtgctc

SEQ ID NO: 40959 - DNA, 110 bp, synthetic construct
  source 1..110: mol_type = other DNA
gtccggaatgcttcaccctgtgcttgtaggtcagagactacagtagctaaagatttgatccctgcagaactggattgacaggcatcgttcttttacaaacctaaatcttg

SEQ ID NO: 40960 - DNA, 110 bp, synthetic construct
  source 1..110: mol_type = other DNA
ggaaaatgagagataagagggcaaaagatgatttgaagatactcaaagcttgacggcaaggcagatagtcaaaagcccaggtagattagcaggaaccaggtgacctacaa

SEQ ID NO: 40961 - DNA, 110 bp, synthetic construct
  source 1..110: mol_type = other DNA
tagagtgtgcgtcttagtggaggtgctttgttcgagtcactttaacaagctcccttccatcagtgcacatgtaggctcacacacacgtccttcagacaaaatacgctccc

SEQ ID NO: 40962 - DNA, 110 bp, synthetic construct
  source 1..110: mol_type = other DNA
tgccactggctgagtgatcactgacagcgaggacacaaaggccacatgatgaacgggaaatgcaaacctttcaaccggttgggcagtcacctgtaaatggtcatgaatga

SEQ ID NO: 40963 - DNA, 110 bp, synthetic construct
  source 1..110: mol_type = other DNA
cagggtggttgttcattcggtaccaaaagccaaaatgagtgccaccagcagctacattgtgtcggatggtgttgtttgggttggttacccaaaatgcagctggagtcaca

SEQ ID NO: 40964 - DNA, 110 bp, synthetic construct
  source 1..110: mol_type = other DNA
gtccttgctgcatctggagagcaaacaagaatcagctagacctaacccactgtgggaaagctaaagggaagcctctgctgagtgagcagcttctctgaaaaactgaaatt

SEQ ID NO: 40965 - DNA, 110 bp, synthetic construct
  source 1..110: mol_type = other DNA
ggttcattattgctgagccacaatggtaactctctaatttttaatgaaggtacgtaactcaacatcttataggagaaattgtaatacaggttcctcctcctcttctctaa

SEQ ID NO: 40966 - DNA, 110 bp, synthetic construct
  source 1..110: mol_type = other DNA
gatctagagctgtacgttgggtgacagttgcaaaaattggtgcaccaggtgagtatacaagcccctttcctggagatacccagtgacccggagtaaagtagagggaatgt

SEQ ID NO: 40967 - DNA, 110 bp, synthetic construct
  source 1..110: mol_type = other DNA
tgtctgcatacttcatctgtaaaagtttgtaggcaatggagaaactggaggcctgagaccagcaagagggccattatacctgcaagagctcatgagaaatggagctggta

SEQ ID NO: 40968 - DNA, 110 bp, synthetic construct
  source 1..110: mol_type = other DNA
agaccagcaagagggccattatacctgcaagagctcatgagaaatggagctggtaagacagtgggaggcaagaagagaggagagacagatcgtgttagaggacagggaga

SEQ ID NO: 40969 - DNA, 110 bp, synthetic construct
  source 1..110: mol_type = other DNA
tgccaatgtgagtgacttcttgtggaaatgggcagaactctgcacccaacttcgatgtgagatgaaccctcaaagcttgtactttctttcaagagcaaagctagagagag

SEQ ID NO: 40970 - DNA, 110 bp, synthetic construct
  source 1..110: mol_type = other DNA
tatactgcttctgatggcagtaaccaactctatcaatagcttgttctcaatgctaaggctgtaaagtcataaggatgataaaacactttttagaatactgattgtgccag

SEQ ID NO: 40971 - DNA, 110 bp, synthetic construct
  source 1..110: mol_type = other DNA
cagccagaaggggaaaaacaaacaaacgaacaaacaaaaatgacaaggtccctaagctgtaggattaatagtaatagtctgaaggctgcattctagagagaaaggaccat

SEQ ID NO: 40972 - DNA, 110 bp, synthetic construct
  source 1..110: mol_type = other DNA
ggcctcactgttcaaagttgcatatagaatatttaagtcacattcggctccatttgagctatctttcatcataccataagtttcttgagggcaggcactataccttatag

SEQ ID NO: 40973 - DNA, 110 bp, synthetic construct
  source 1..110: mol_type = other DNA
gcattaacattattacctccattttatggatgagaaactgaggcacagatatattaagtacctttctaaggtcatggagctagtaaatggccaattgaaagtggaacata

SEQ ID NO: 40974 - DNA, 110 bp, synthetic construct
  source 1..110: mol_type = other DNA
gtcgagaaattctctttacctggtccatgggtaggaaaaaggaatgaaagttataggcggaaggtttttatgaaccagttctggaaatagcaacaacattgacttttcat

SEQ ID NO: 40975 - DNA, 110 bp, synthetic construct
  source 1..110: mol_type = other DNA
ggcggaaggtttttatgaaccagttctggaaatagcaacaacattgacttttcattttattggccaaaattcagtcaaatggtcatatttaaaaacaagaaaggttgaaa

SEQ ID NO: 40976 - DNA, 110 bp, synthetic construct
  source 1..110: mol_type = other DNA
aaaaaaaaaaaaaaaaagaaggagctagctgttctgaagtccttatcttcattcctatcaggagaaaccaacttcatagaaagaagaaagtgataactttgggctgaaaa

SEQ ID NO: 40977 - DNA, 110 bp, synthetic construct
  source 1..110: mol_type = other DNA
gtttagccagctctgactgaacccctgagcaaacaaatcatcccctttcccttctgcactgcagcttggcttgagtgttgaaccagtaaaagcttttggggttgtagcac

SEQ ID NO: 40978 - DNA, 110 bp, synthetic construct
  source 1..110: mol_type = other DNA
gctgagaaagttggtgcagcacaaggcactgtttcagctcctgcctggtggcatagaccccctggcttcttaggtggagggtggcagcagcaggtgctcaactcctccag

SEQ ID NO: 40979 - DNA, 110 bp, synthetic construct
  source 1..110: mol_type = other DNA
aaaatgagagagctggaccaccttctccattgggccttcccactgtaacatcccatgactctattttatgttgaattcacacatggagctggacagatcactttatcttg

SEQ ID NO: 40980 - DNA, 110 bp, synthetic construct
  source 1..110: mol_type = other DNA
gtgcggccctagaaaagacaaaaagaccaaaaaaattaaaaaaataaataaagatcctcctaataaaacgcaattactcctgaaaatagtaatgccctaaattcttcctc

SEQ ID NO: 40981 - DNA, 110 bp, synthetic construct; identical to SEQ ID NO: 40980
  source 1..110: mol_type = other DNA

SEQ ID NO: 40982 - DNA, 110 bp, synthetic construct
  source 1..110: mol_type = other DNA
ataattaatgatgttgccatgggtacagaaggacgtgaatataggccccatgtctgccattttaaaacagggtcacattatttacaagattcagttacctctccatggct

SEQ ID NO: 40983 - DNA, 110 bp, synthetic construct
  source 1..110: mol_type = other DNA
ctcaacccgttgagccacaacagtaacttaaggaatgtaattattaaagagataatgctacagtaaatacttaatactggagttcccactgtggctcagtagtaaggaac

SEQ ID NO: 40984 - DNA, 110 bp, synthetic construct
  source 1..110: mol_type = other DNA
tttcagagcagacagaggaaagggaggactatgtaagtgtaaattggtttttcctagggtaagaccaaaactatgaacagctgagaatccgtgggatgtaaatgcccctt

SEQ ID NO: 40985 - DNA, 110 bp, synthetic construct
  source 1..110: mol_type = other DNA
tccccttctccaccatgcccaacccaaattctcttttgcatgtcacaccaatactgtatcaattgtatttgatttggccttgtgtccagtatttaataacataatacttc

SEQ ID NO: 40986 - DNA, 110 bp, synthetic construct
  source 1..110: mol_type = other DNA
ggttaagctgctcgtgccaggcagtgggtttgcttttcccctccctcccctgcttaaattgggactcgtaaagaggctgctgcctccgcggacctttctccacagggctt

SEQ ID NO: 40987 - DNA, 110 bp, synthetic construct
  source 1..110: mol_type = other DNA
aaattgggactcgtaaagaggctgctgcctccgcggacctttctccacagggcttctcctcctcgcctctcaggttcaaggcggagagatgctgattgcgccgaactgac

SEQ ID NO: 40988 - DNA, 110 bp, synthetic construct
  source 1..110: mol_type = other DNA
ttcagaagccaattaattatggatttctcaaagctagcacttcaagaagttaaagttttgtaagtctttttcctaaaaacattagtatctattgaaggactcacgacaaa

SEQ ID NO: 40989 - DNA, 110 bp, synthetic construct; identical to SEQ ID NO: 40988
  source 1..110: mol_type = other DNA

SEQ ID NO: 40990 - DNA, 110 bp, synthetic construct
  source 1..110: mol_type = other DNA
tcctacaacctatcctagtagttgtacattgaggggagaggagagagaaaaagagaagagagttttaaaatgtcccataggaaaaaaaggtcctttagagattttgaaaa

SEQ ID NO: 40991 - DNA, 110 bp, synthetic construct
  source 1..110: mol_type = other DNA
aagagagttttaaaatgtcccataggaaaaaaaggtcctttagagattttgaaaacttaatcgaatgtttctaccttggcaaagctagacccatttatctgtataatctc

SEQ ID NO: 40992 - DNA, 110 bp, synthetic construct
  source 1..110: mol_type = other DNA
cctataatgaaaggatctctgggatattgcatttcttaggtgcaggaacaatggagagcatggataagaaaagaatgttctatctgtggtactgatggctacagtgtcta

SEQ ID NO: 40993 - DNA, 110 bp, synthetic construct
  source 1..110: mol_type = other DNA
gagcatggataagaaaagaatgttctatctgtggtactgatggctacagtgtctaatggccctacctcataggaagagaaaacttaagtttgtagaaatacatgataaaa

SEQ ID NO: 40994 - DNA, 110 bp, synthetic construct
  source 1..110: mol_type = other DNA
aagctcaaagaccctggcactgtagccagagacaacattacttagctctgcctgcaagtgggccagcactagccccggggcccagcttccccaccagtgggtgaacacca

SEQ ID NO: 40995 - DNA, 110 bp, synthetic construct
  source 1..110: mol_type = other DNA
caaacgaagagattcagatcaagtcaagtttctttcctgttgtagagcctggatagaagggactacttttcaaggtgtttatcttctgtttttgaagctctcctggtgga

SEQ ID NO: 40996 - DNA, 110 bp, synthetic construct
  source 1..110: mol_type = other DNA
atcagtgtattcacctctatgattgttatatagcttaagtgaaatacaatctgtagtgcacttcaagtagtgcctagtgaatgttaactgttctggaaaagttattatca

SEQ ID NO: 40997 - DNA, 110 bp, synthetic construct
  source 1..110: mol_type = other DNA
aggtcagtggaagagggtagaacctatatccaaaccatttcattttaaaagcagaggcagtgttttgggaaagtatgtcctaaacatttatacctctcagcatttctttt

SEQ ID NO: 40998 - DNA, 110 bp, synthetic construct
  source 1..110: mol_type = other DNA
tcatgaatgaaacataggacaacctcattcatttaaataaaatcctactactgggagccatatgcatggtctgggtcaaatctgtggaagtgacattgtggaaaaaagtg

SEQ ID NO: 40999 - DNA, 110 bp, synthetic construct
  source 1..110: mol_type = other DNA
tttagcaaataaaatttctaaatacctgggcataaacctctcaacttacctcagattaacttggcctccagtatggtgaagcagagtgaagtaatcacctctaatgtatg

SEQ ID NO: 41000 - DNA, 110 bp, synthetic construct
  source 1..110: mol_type = other DNA
taaggaatgaataatgattcctttctaagactttctagatttatttgctgatattggtgtgggtaaagtctttgaactggcataacaagctcttaaaatttagttcagat

SEQ ID NO: 41001 - DNA, 110 bp, synthetic construct
  source 1..110: mol_type = other DNA
tgacacaaccgcttctccttttctgaggctagctggagatcactgcacttttccccagggaaggaaagtttttatccatgcaatgctttcaacagcatagaaatatttga

SEQ ID NO: 41002 - DNA, 110 bp, synthetic construct
  source 1..110: mol_type = other DNA
taaatacttagatttttctaagatgacaaaaacaaatgtcctgcttaggcctgagaattcccaaaggattcctgctccagaaggagcattctgggactcagacaactgct

SEQ ID NO: 41003 - DNA, 110 bp, synthetic construct
  source 1..110: mol_type = other DNA
aattcccaaaggattcctgctccagaaggagcattctgggactcagacaactgctctcctagaaacttaataggttggcaaaaaccagctaacagtgcctccaggaaata

SEQ ID NO: 41004 - DNA, 110 bp, synthetic construct
  source 1..110: mol_type = other DNA
cttcccatcagtacactgggaaatgagtcccagtggagtgacaccaaagctgagtttcatgagagcattcctctttctgattgtttgtatgccatttaaaacaatttcac

SEQ ID NO: 41005 - DNA, 110 bp, synthetic construct
  source 1..110: mol_type = other DNA
gggcaggatgcctatcccagatgtggagggcaagaagacgaggcttcagctgcttctccctcagttcactcacaggctggaggatccatgccagaggggtatatttatgg

SEQ ID NO: 41006 - DNA, 110 bp, synthetic construct
  source 1..110: mol_type = other DNA
accgcagaaactaactgagcctcttgactcactcataaactggttaccttaaccatctaccatgtttataaattgggaaattcagctcaaagattaaagtttaaacatct

SEQ ID NO: 41007 - DNA, 110 bp, synthetic construct
  source 1..110: mol_type = other DNA
tctaccatgtttataaattgggaaattcagctcaaagattaaagtttaaacatcttagggatgttaactcaaatgattaatgaaagtggcaggcaaaaattggagcaagt

SEQ ID NO: 41008 - DNA, 110 bp, synthetic construct
  source 1..110: mol_type = other DNA
caggatgactctcattaatcatacaaaagtcatattgatttttaaaatttgctctaacttatctctcatgatatctctggtcactgagccatcaaataggggttctttgt

SEQ ID NO: 41009 - DNA, 110 bp, synthetic construct
  source 1..110: mol_type = other DNA
gcacttctgagcctttatctagcttctgcttcttcaaataccaacccaactagtgcaccttcttgcctgcctaaatcctccctgttcaagaaatagttgaggcactactt

SEQ ID NO: 41010 - DNA, 110 bp, synthetic construct
  source 1..110: mol_type = other DNA
tacaaaagccctttaggaattgtttctcagttcactgtagccttgcagttttcctagacccaagccccattggcttttgaagttagaagtttggggagctcatctataga

SEQ ID NO: 41011 - DNA, 110 bp, synthetic construct
  source 1..110: mol_type = other DNA
agacccaagccccattggcttttgaagttagaagtttggggagctcatctatagaaggccttaaaacctagggtatctgatgtgaggtccaaaccctttgttcatcaggg

SEQ ID NO: 41012 - DNA, 110 bp, synthetic construct; identical to SEQ ID NO: 41010
  source 1..110: mol_type = other DNA

SEQ ID NO: 41013 - DNA, 110 bp, synthetic construct; identical to SEQ ID NO: 41011
  source 1..110: mol_type = other DNA

SEQ ID NO: 41014 - DNA, 110 bp, synthetic construct
  source 1..110: mol_type = other DNA
ttccactatgtcatgttcttaacctgctgagccacacaacgtgaactcccaacgctttttatagctattgtcaaattgcctttttttttttttttttttttttttggctt

SEQ ID NO: 41015 - DNA, 110 bp, synthetic construct
  source 1..110: mol_type = other DNA
caaatataaatggaataaatgctccaatcaaagacagagggtaactgaaaataaaaacaagacccatctatgttgcctacaaaagactcacttcagagctaagcacacac

SEQ ID NO: 41016 - DNA, 110 bp, synthetic construct; identical to SEQ ID NO: 41015
  source 1..110: mol_type = other DNA

SEQ ID NO: 41017 - DNA, 110 bp, synthetic construct
  source 1..110: mol_type = other DNA
gatcaaatgctggtttactgaaactgagtttgcatgagtgataagcaagggtctaacgtttctctcctgtattggtcctggtgtcctgtgatttatgtcattgcatgtgc

SEQ ID NO: 41018 - DNA, 110 bp, synthetic construct
  source 1..110: mol_type = other DNA
acgtttctctcctgtattggtcctggtgtcctgtgatttatgtcattgcatgtgccctgctgcattgattcctcacctaattcaccttatgacagtctgtctctcttttt

SEQ ID NO: 41019 - DNA, 110 bp, synthetic construct
  source 1..110: mol_type = other DNA
ctctatctcctgaatgaatctgagaaccatgggcctaagccattaatttgcatgaagtaagaaaacaaacttcaagatcatcatttatgtacattcttgtggcaacaata

SEQ ID NO: 41020 - DNA, 110 bp, synthetic construct
  source 1..110: mol_type = other DNA
tccactgagggagggcagggactgaacttgcgtcctcatgtatactagtcagattcctttccactaagccacaatgggcagtcctagactactttttaaagacacttctt

SEQ ID NO: 41021 - DNA, 110 bp, synthetic construct
  source 1..110: mol_type = other DNA
cctttccactaagccacaatgggcagtcctagactactttttaaagacacttctttcccagctttactgagatataattgacacataacaatgtgtaagtttaaagtgta

SEQ ID NO: 41022 - DNA, 110 bp, synthetic construct
  source 1..110: mol_type = other DNA
aaccagacttgacccactcctgtcttaatgctaaacgcgaaagcagtgaaatttaaaaggcaaactgctctgtaccgagttagtaaacattaaacaatttttacaaaaat

SEQ ID NO: 41023 - DNA, 110 bp, synthetic construct
  source 1..110: mol_type = other DNA
aaaggcaaactgctctgtaccgagttagtaaacattaaacaatttttacaaaaatgattttttggcactctgtttctgaagaaatctaaagattttgagaaagcacatgc

SEQ ID NO: 41024 - DNA, 110 bp, synthetic construct
  source 1..110: mol_type = other DNA
aaaaaacttgcagattgtcccaagttggtactgtgacacagaaagattctaaagactgggtaaaaaatccttttgcatatcggatagcttcaaattcactgatttccata

SEQ ID NO: 41025 - DNA, 110 bp, synthetic construct
  source 1..110: mol_type = other DNA
cccgcagaagacgcccgctcttccctgtgaaagtggtcaagtagtccatgctgccgcggggcaggcgccaagaggccgacggtttcctccacggtggccactcggcgcgc

SEQ ID NO: 41026 - DNA, 110 bp, synthetic construct
  source 1..110: mol_type = other DNA
gaggtctcacccaacctgacacttaactcaagggcgctcttctacaggcagatagtctgggcaatcagacactctatcaaattggaactgagatgaattctggagctcaa

SEQ ID NO: 41027 - DNA, 110 bp, synthetic construct
  source 1..110: mol_type = other DNA
tctgggcaatcagacactctatcaaattggaactgagatgaattctggagctcaaagaccatgtacttagaggcgacctaactgaagttataacaacaaaagacatatgc

SEQ ID NO: 41028 - DNA, 110 bp, synthetic construct
  source 1..110: mol_type = other DNA
ccgcatatggtttgggaagagggccatgaaagcatcttcctcacatcaagtcaagtgaaggatgtcagggtactgattagaatcactgtagctggctggccagagaaaat

SEQ ID NO: 41029 - DNA, 110 bp, synthetic construct
  source 1..110: mol_type = other DNA
tgaaggatgtcagggtactgattagaatcactgtagctggctggccagagaaaatgcaggaggctgtgcaggtgctgagctgtatttccacaaatggcagagcaaagcag

SEQ ID NO: 41030 - DNA, 110 bp, synthetic construct
  source 1..110: mol_type = other DNA
atcagagcaggtttacagttggggttatacaaaaagagcttagaagaaagacctgagccagcttatgggacagtgttctgtatccagtggctatctcaaacttgccttag

SEQ ID NO: 41031 - DNA, 110 bp, synthetic construct
  source 1..110: mol_type = other DNA
gtgcatctttacggctatctccagcccattccactcaccctgtgtttatttacgggagtctttctcctattgcaaaagagctgtactttgagagaattgtttaaagcaag

SEQ ID NO: 41032 - DNA, 110 bp, synthetic construct
  source 1..110: mol_type = other DNA
tgaagttctccatcacctcaaatacctaagtgtcccacatctccttctaaaacctctttgaaataagaaaaggccaaaggcaagcaggcaatagcctttctgtatttttt

SEQ ID NO: 41033 - DNA, 110 bp, synthetic construct
  source 1..110: mol_type = other DNA
atttgagaattacctttgaagaatgagtcacttttttgtcctgtatctttctacatacatgacgctaatagaaagaaatcaagtgcagatggaggcaggagctagaccat

SEQ ID NO: 41034 - DNA, 110 bp, synthetic construct
  source 1..110: mol_type = other DNA
tacatgacgctaatagaaagaaatcaagtgcagatggaggcaggagctagaccatggtctgtgtttcacacataaaatgttctgaagtatttgccagactctgggaccct

SEQ ID NO: 41035 - DNA, 110 bp, synthetic construct
  source 1..110: mol_type = other DNA
ttttaagagagtgaggtggttgaggattggagctcttgagccaaagatactatatttgaaacttggaagggctactcacctgcagggcaaatttgagcacaactacgtga

SEQ ID NO: 41036 - DNA, 110 bp, synthetic construct
  source 1..110: mol_type = other DNA
aatacatctgccaaatttaacccactggctagttccacaccctggcatggtataaaaccattctttcctcatgcagctgagcagctgttcatatgaagtggagcatggca

SEQ ID NO: 41037 - DNA, 110 bp, synthetic construct
  source 1..110: mol_type = other DNA
cgacaggaactccaggaaaagaacttttaattttcttcttttactggtttttcttccctctacatttctcagcttatgctagtgccacattttacataagctcttacttg

SEQ ID NO: 41038 - DNA, 110 bp, synthetic construct
  source 1..110: mol_type = other DNA
atttcaatagttattgtactagaaaccgggccagccactgtcacctggaaagagatgatatgcccctggccattcgaagctttctgttctgctgtgtccatccaccaatg

SEQ ID NO: 41039 - DNA, 110 bp, synthetic construct
  source 1..110: mol_type = other DNA
gcaaaaaaaggccaccaaaaaataaaataatttcatattacagcttagaaagtaccacgtttcaaagctatctctctcctttttgatgtattcattttttccctcgctaa

SEQ ID NO: 41040 - DNA, 110 bp, synthetic construct; identical to SEQ ID NO: 41039
  source 1..110: mol_type = other DNA

SEQ ID NO: 41041 - DNA, 110 bp, synthetic construct
  source 1..110: mol_type = other DNA
acctgccggagactggaaggagaaatagtagaggtcagggtacttgttcccctaaagatttcctccatttcccacagttctgccagtagctggttccctctatggttcac

SEQ ID NO: 41042 - DNA, 110 bp, synthetic construct
  source 1..110: mol_type = other DNA
agatttcctccatttcccacagttctgccagtagctggttccctctatggttcacctcctagaggatggccttgctcttccctcaagcctacatgtgagtctagtaacat

SEQ ID NO: 41043 - DNA, 110 bp, synthetic construct
  source 1..110: mol_type = other DNA
aactggatttagatttaggagccctgagtttgaatgccagctccatgagctgtcttaacttgctaaattatgtggcctatctgggttcaggtttcatgatctggatgctg

SEQ ID NO: 41044 - DNA, 110 bp, synthetic construct
  source 1..110: mol_type = other DNA
aactgcattaaggatggccatgtgttctattcctagacatgaaatgttggaggtagcttattcaatgaataaaaaaagaagatgtcttcctggaatccggatgtaatggg

SEQ ID NO: 41045 - DNA, 110 bp, synthetic construct
  source 1..110: mol_type = other DNA
gcttattcaatgaataaaaaaagaagatgtcttcctggaatccggatgtaatgggtagataatcttgtgagcacaaggagaaagttccatgtcagaaacagcaaatccag

SEQ ID NO: 41046 - DNA, 110 bp, synthetic construct
  source 1..110: mol_type = other DNA
cggcaaaaccaaagcagtggttatacttgaaggcacagtagctggaaggaagcgcaggggggttacactttggttgctggtaatctgttcttgacctagatgccaattaa

SEQ ID NO: 41047 - DNA, 110 bp, synthetic construct
  source 1..110: mol_type = other DNA
agacaaggtacgggggaagagcaaggaggctccaagttttcctagagtgtgccactcacccccaatctccatgggttcaccaccctcggagctctccatactccatcctt

SEQ ID NO: 41048 - DNA, 110 bp, synthetic construct
  source 1..110: mol_type = other DNA
tcacccccaatctccatgggttcaccaccctcggagctctccatactccatccttttgatttttatggagctagccttgaaactccatctctcctcccctccctggacgc

SEQ ID NO: 41049 - DNA, 110 bp, synthetic construct; identical to SEQ ID NO: 41047
  source 1..110: mol_type = other DNA

SEQ ID NO: 41050 - DNA, 110 bp, synthetic construct; identical to SEQ ID NO: 41048
  source 1..110: mol_type = other DNA

SEQ ID NO: 41051 - DNA, 110 bp, synthetic construct
  source 1..110: mol_type = other DNA
atttgtcaaaattctttgaaatttatccccaaactcccatagatgtgttaacaaaaacgcatcattagcatccagagtagctgatgagtatatatagttatatggacaat

SEQ ID NO: 41052 - DNA, 110 bp, synthetic construct
  source 1..110: mol_type = other DNA
aacgcatcattagcatccagagtagctgatgagtatatatagttatatggacaatcttaacatcaacctgtgcagagatattctattttagctgaaaaacaactactgac

SEQ ID NO: 41053 - DNA, 110 bp, synthetic construct
  source 1..110: mol_type = other DNA
actgtgtgactttgcacttgtcacctgggcattcattctatctttttcctcaaccttcaaaatgggggatgataataatagtgctaagctcatagtattatcagatggat

SEQ ID NO: 41054 - DNA, 110 bp, synthetic construct
  source 1..110: mol_type = other DNA
ttcaaaatgggggatgataataatagtgctaagctcatagtattatcagatggattaaataaactaatacatgtgagcataatatttgtacctggcatagtaagtgttac

SEQ ID NO: 41055 - DNA, 110 bp, synthetic construct
  source 1..110: mol_type = other DNA
ctctatggaagtcacaccatctcttcatgaactatagagaagatttagtatggaatcttctcagatttatgctcaaaatggtcatgcatgcaaatcaccttgtctgaagt

SEQ ID NO: 41056 - DNA, 110 bp, synthetic construct; identical to SEQ ID NO: 41055
  source 1..110: mol_type = other DNA

SEQ ID NO: 41057 - DNA, 110 bp, synthetic construct
  source 1..110: mol_type = other DNA
tttactatttgggagtcttgctataagacaatgtcatctgactgcatagtgagcttagtgacatagcacatttatgttttgatacaagttccttaacttgctataaataa

SEQ ID NO: 41058 - DNA, 110 bp, synthetic construct
  source 1..110: mol_type = other DNA
tagtgacatagcacatttatgttttgatacaagttccttaacttgctataaataagtaacagtttaccaactgacagagtccaagaccatacattgaatagcactgatgt

SEQ ID NO: 41059 - DNA, 110 bp, synthetic construct
  source 1..110: mol_type = other DNA
tttttgggtcttataaaatttacatcttgccctcatgtttcaaggcaattttcaacccaataagtaatccattgcttcttagctttttcattctcttcagatagcttatg

SEQ ID NO: 41060 - DNA, 110 bp, synthetic construct
  source 1..110: mol_type = other DNA
ctaccctcccttaaatccagtactgaattgttgtttagctttccaggtactttcttgattgtattggaaaattaagtacttgtttacttctctttctaaaaaaaaagaat

SEQ ID NO: 41061 - DNA, 110 bp, synthetic construct
  source 1..110: mol_type = other DNA
tgtgactattgttaatgttttacacaaggtgaccaggcaaactacagctttatacagcagttatttcaaggtaatttacacaagaatgcaaaagggaacggaaacgaaca

SEQ ID NO: 41062 - DNA, 110 bp, synthetic construct
  source 1..110: mol_type = other DNA
gaagagcgctccagagcaagaaccatgccctgcctattttgtaaacacaacacagagcttaaaaacctggtaccttgcaagtactgaacaactatctcctaaagccatga

SEQ ID NO: 41063 - DNA, 110 bp, synthetic construct
  source 1..110: mol_type = other DNA
taattagttgctggtatagcaaattcgagctctgcttttttctgagtattttccatccacgttggttgaattcagagatctggaacctgaagatagtgagggctcactgt

SEQ ID NO: 41064 - DNA, 110 bp, synthetic construct
  source 1..110: mol_type = other DNA
cttaccatctgctgcactgcatttccttcagaaaagtgaaaagttttcacagtacccagagctttccctgcaaacaatactctcttcccctcttccttccttcctctctc

SEQ ID NO: 41065 - DNA, 110 bp, synthetic construct
  source 1..110: mol_type = other DNA
atacagacccagaatgctctttggaattatttctctacaaagtgaattcctttcctacatgagttcctcatagctgaatacagctctcatatgaaacttataattctcct

SEQ ID NO: 41066 - DNA, 110 bp, synthetic construct
  source 1..110: mol_type = other DNA
aaattatatgtataaacattggaatttggtgctggtgggcttttaagctaatgtcagcctctgtgaagaagttaacaacctagagatcaatacacagaggccatctttgc

SEQ ID NO: 41067 - DNA, 110 bp, synthetic construct
  source 1..110: mol_type = other DNA
cttataaacagggaagaaatagccttgtgaagctgtccagcagtcaggccagatctggactttagatatggacacactctttagaggggacacctaggaactatatgctg

SEQ ID NO: 41068 - DNA, 110 bp, synthetic construct
  source 1..110: mol_type = other DNA
gaggtcacaaaatggtaccacatttgaaataacactaaatacatatctgaaacatctttttgtcaatttgttgtactagtacctggtacaatcaagacagggagctcagc

SEQ ID NO: 41069 - DNA, 110 bp, synthetic construct
  source 1..110: mol_type = other DNA
tgagttgcaggcaggagtgcaagatggctggaacaatggctgtggtgggttggagtagccagggcaagatttttaactagcggggacataacattcattatggctgaaaa

SEQ ID NO: 41070 - DNA, 110 bp, synthetic construct
  source 1..110: mol_type = other DNA
tagccagggcaagatttttaactagcggggacataacattcattatggctgaaaatcagctttgtgtctctctttaatgctcagcaccatgccttgcacatggtaacact

SEQ ID NO: 41071 - DNA, 110 bp, synthetic construct
  source 1..110: mol_type = other DNA
ttgccaactttaagtcttcaattcaacaagacctgataaaattatatagttgtgttactgtgactataagcatgatttaggccatcaacacacaatgctctctgtggcct

SEQ ID NO: 41072 - DNA, 110 bp, synthetic construct
  source 1..110: mol_type = other DNA
tcttaagagaaaaatgtaagaagaaagtggcagaatatatttaaagtgcttaagggaaaaaatgtacaagctagaatactctatccaacaaggttattcagaattgaagg

SEQ ID NO: 41073 - DNA, 110 bp, synthetic construct
  source 1..110: mol_type = other DNA
ttacctttttcctgccctcactagagggagcaatgctaaacacacccacctgacagagctcaggaaaaaagttcctcaagggaactcttcactcaaaatgtatgccaaca

SEQ ID NO: 41074 - DNA, 110 bp, synthetic construct
  source 1..110: mol_type = other DNA
tatgcaaggtaaaaaaataaaaacctcccaagacacaaagcaatcatccaaaccatactcagatatgacacagaagttagaatgatctgaaagggaattttagaataacc

SEQ ID NO: 41075 - DNA, 110 bp, synthetic construct; identical to SEQ ID NO: 41074
  source 1..110: mol_type = other DNA

SEQ ID NO: 41076 - DNA, 110 bp, synthetic construct
  source 1..110: mol_type = other DNA
ttttcacttttttaaccatttggttcaacctttggaagacagtactagcttctgttactaagagtctgctctcttactaccacaacctatggatttcacctagacagatg

SEQ ID NO: 41077 - DNA, 110 bp, synthetic construct
  source 1..110: mol_type = other DNA
ctcttctcagctcaaggcatcattactctgccccatggcaaatagaagcatggagaactcctgtctggggggtacaggccatccctaccctcaaattcctcaaatctgga

SEQ ID NO: 41078 - DNA, 110 bp, synthetic construct
  source 1..110: mol_type = other DNA
agagtggtgagtgcaagcacaaggaggatgctaatggatcacacaagaggagcaactagctctttcttatgggcacaggctgaggagtggtggtaccactaaaggaaggt

SEQ ID NO: 41079 - DNA, 110 bp, synthetic construct
  source 1..110: mol_type = other DNA
ctagctctttcttatgggcacaggctgaggagtggtggtaccactaaaggaaggtttcctggaggaggcaatatcggacctaaaactcaaaggtaagaagaagttatcaa

SEQ ID NO: 41080 - DNA, 110 bp, synthetic construct; identical to SEQ ID NO: 41078
  source 1..110: mol_type = other DNA

SEQ ID NO: 41081 - DNA, 110 bp, synthetic construct; identical to SEQ ID NO: 41079
  source 1..110: mol_type = other DNA

SEQ ID NO: 41082 - DNA, 110 bp, synthetic construct
  source 1..110: mol_type = other DNA
caatgagaccagataaatcacctacctgagccaagctcacactgctgagccacaaaatcatgagctaaataaataggtgttttaaaccattacatgggatatactgttat

SEQ ID NO: 41083 - DNA, 110 bp, synthetic construct
  source 1..110: mol_type = other DNA
agaatttctgtagcaactccagagagtagtctggcaatagaaataaacataatatatcatgacctctacgtcctgcttctgggactctacagagacagagctgcagagcc

SEQ ID NO: 41084 - DNA, 110 bp, synthetic construct
  source 1..110: mol_type = other DNA
atcatgacctctacgtcctgcttctgggactctacagagacagagctgcagagcctgagggtacataagaaggctatttattatagccctggggcatctggcaaaaactt

SEQ ID NO: 41085 - DNA, 110 bp, synthetic construct
  source 1..110: mol_type = other DNA
aagaatcatggaaaaatgcaggataaagaaagagacttcagatatacttgaatccaaactctgaattttatagaccgaaaaataaaaaaggaggccaagggatgttagct

SEQ ID NO: 41086 - DNA, 110 bp, synthetic construct
  source 1..110: mol_type = other DNA
aaactctgaattttatagaccgaaaaataaaaaaggaggccaagggatgttagctgatagatagttacacagcagaaaaactaatcatgaacctgcatctgtctaactca

SEQ ID NO: 41087 - DNA, 110 bp, synthetic construct
  source 1..110: mol_type = other DNA
taaatgtatttttgtggcacttgaagctcttcccctcacagctggaaccacttaattttcgcaattagagtttcttagaaaaatccacccttaagagaaatttaaagagt

SEQ ID NO: 41088 - DNA, 110 bp, synthetic construct
  source 1..110: mol_type = other DNA
ggtttatgttttgggaatttgagtttagtgaggaatggttagtaggcaaagaccgaagctcctttttccaacaatgtggaatcacattataaaaacagcaagtgattatg

SEQ ID NO: 41089 - DNA, 110 bp, synthetic construct
  source 1..110: mol_type = other DNA
ttttttagactttaaaaaccgtgagatctcagattgaagggcagtttattttatattactttggagtcatcctctcgcatgtgtcctttaaaatagagattgtttgaata

SEQ ID NO: 41090 - DNA, 110 bp, synthetic construct
  source 1..110: mol_type = other DNA
tgctgtcttttcagggagcaaagaagatgttggcattgggaataacaggtcctgagggccacgagctgtgccgcccggaagcggtggaggcagaagccacgctgagggcc

SEQ ID NO: 41091 - DNA, 110 bp, synthetic construct
  source 1..110: mol_type = other DNA
gggccacgagctgtgccgcccggaagcggtggaggcagaagccacgctgagggccatcaccatagccagcgctgtgaactgccctctctatgtcgtgcatgtcatgagca

SEQ ID NO: 41092 - DNA, 110 bp, synthetic construct
  source 1..110: mol_type = other DNA
aggcagtgagtaatttagggaggtgcagtgtttttaaatagcctgaacaaaaccaaacccaaaaaactcttaaagtaagctgatttaccattttttaaggttctcagagt

SEQ ID NO: 41093 - DNA, 110 bp, synthetic construct
  source 1..110: mol_type = other DNA
aaggtaactctgatcctaagccagctttgggaactactctgggtaatgaggggatgaatgtctatatctctgtctcagaccttgctagtcctcccttacttcctctaacc

SEQ ID NO: 41094 - DNA, 110 bp, synthetic construct
  source 1..110: mol_type = other DNA
ttctgccctgcccctctgaggccagcagctacccagtggagcttgataacgaggaggggaaagacagactcatggaatctgtggatggcattttcgccagcccaggctaa

SEQ ID NO: 41095 - DNA, 110 bp, synthetic construct
  source 1..110: mol_type = other DNA
cccaaggctctaagcaccttagatcatgacactgtagtccaaaatgtggcactacaataaaaacttagaatggtgcctctctacacactacaggaagtaaaaaagtctta

SEQ ID NO: 41096 - DNA, 110 bp, synthetic construct
  source 1..110: mol_type = other DNA
gatgagaattgggccttcacgatggaattagtgcccttataagaaaagacaccagagagcctgctttctttgtttcccaggagttagaggacataatgagaaggaagctg

SEQ ID NO: 41097 - DNA, 110 bp, synthetic construct
  source 1..110: mol_type = other DNA
agagcctgctttctttgtttcccaggagttagaggacataatgagaaggaagctgtcttcaagccaggaatggaaccctcaatggagaaccaaatcagctggcaccttgg

SEQ ID NO: 41098 - DNA, 110 bp, synthetic construct
  source 1..110: mol_type = other DNA
atactgcttcccctgaaatcttgtctagtgacaaatacttatccttcttccattgttgtcatatttctagctactggctactttcaaaaaatgtatttctcttttacttt

SEQ ID NO: 41099 - DNA, 110 bp, synthetic construct
  source 1..110: mol_type = other DNA
tgaattaactctatcattctatcatattatagaaaagtgtctacacatcaaacagcgtggccatcagtacagctgatgcaaattaaaaaatggttttaaatgtgttttct

SEQ ID NO: 41100 - DNA, 110 bp, synthetic construct
  source 1..110: mol_type = other DNA
taccttcccaacctgatccatgacctatagtgacctcagagccactgctggttgaacagctccagacttttcactaggtcccgtctgtggtctttgccaagtgactttcc

SEQ ID NO: 41101 - DNA, 110 bp, synthetic construct
  source 1..110: mol_type = other DNA
ctaacagaaaggacaaaagttaattactctttgtcagtccagagatggttccagaggagcgtgcataacacactttactagctagcccttaccttccattagtcccccca

SEQ ID NO: 41102 - DNA, 110 bp, synthetic construct
  source 1..110: mol_type = other DNA
gtagtaaggttctgacaactccatcttcgaaatggaatacaattctatcaacatttccatcttattactacaattctagctcgaaccaccaatatctctcacctagacta

SEQ ID NO: 41103 - DNA, 110 bp, synthetic construct
  source 1..110: mol_type = other DNA
tccatcttattactacaattctagctcgaaccaccaatatctctcacctagactacttcagtaacttctctctacattaattcttgtcccctacaaagcattctccacat

SEQ ID NO: 41104 - DNA, 110 bp, synthetic construct
  source 1..110: mol_type = other DNA
atagaaagacagactgagaaatagagaaaagttactgagatagagttcatagtatttgattccataactccaactgttcatacagtctatcatcattcttttcctgaggt

SEQ ID NO: 41105 - DNA, 110 bp, synthetic construct
  source 1..110: mol_type = other DNA
ttgattccataactccaactgttcatacagtctatcatcattcttttcctgaggttctgtcaaacaccccaatattcttataatccatccccctttttccttaagctgtt

SEQ ID NO: 41106 - DNA, 110 bp, synthetic construct
  source 1..110: mol_type = other DNA
ttttcttttcttttccttttttcttttgttttttttggctttttagggtcacacctgcggcatatgaagttctccggctagaggttgaatcggagctacagttgccagcc

SEQ ID NO: 41107 - DNA, 110 bp, synthetic construct
  source 1..110: mol_type = other DNA
tgcggcatatgaagttctccggctagaggttgaatcggagctacagttgccagccacagccacagcaataccggatgcaagccgcgtctgcgacctacaccgcagttcac

SEQ ID NO: 41108 - DNA, 110 bp, synthetic construct
  source 1..110: mol_type = other DNA
tagaactttgctcaggataaagagaccatatgtcagacaccagaaaatgtatttttaagcaagctatattcagatgtcattacagacttttgcttgtggcctaaatggga

SEQ ID NO: 41109 - DNA, 110 bp, synthetic construct
  source 1..110: mol_type = other DNA
taagcaagctatattcagatgtcattacagacttttgcttgtggcctaaatgggatagcaaggactagatttctccacctgcttgaaacaaaagatagacaaaatatata

SEQ ID NO: 41110 - DNA, 110 bp, synthetic construct
  source 1..110: mol_type = other DNA
ctcaaattatcttcctatggatgagatatagtgtatatttctactatatacctgtttacacacatttatgatctctggaaaatctctcataaatggccaaatctcactag

SEQ ID NO: 41111 - DNA, 110 bp, synthetic construct
  source 1..110: mol_type = other DNA
ttacacacatttatgatctctggaaaatctctcataaatggccaaatctcactaggagaaaagaaaggagaggaaaattagaaagagcaatgctttgttttagttctaga

SEQ ID NO: 41112 - DNA, 110 bp, synthetic construct
  source 1..110: mol_type = other DNA
agagaaaatgagtgaaatcttacataatggatattaagaccctagcttaacaatatggcactagcagccaagcatatgtcccctagcataaagtctgaagatcctgctct

SEQ ID NO: 41113 - DNA, 110 bp, synthetic construct
  source 1..110: mol_type = other DNA
tatagggtttagtgctggccacggtttcaggcatccaatgggggctgtggaccatatcccctgatgataaagagggactactgtaatgagttatagcttaaattatacat

SEQ ID NO: 41114 - DNA, 110 bp, synthetic construct
  source 1..110: mol_type = other DNA
caatgggggctgtggaccatatcccctgatgataaagagggactactgtaatgagttatagcttaaattatacatacagtcatggagttcccgtcgtggtgcagtggtta

SEQ ID NO: 41115 - DNA, 110 bp, synthetic construct
  source 1..110: mol_type = other DNA
ctggaagaaggtcatttaatttcaaacatcaataaaagctaaaagggttttaattaatgtggtttggtattactagttactagagttcaattgagcctccttttactaca

SEQ ID NO: 41116 - DNA, 110 bp, synthetic construct; identical to SEQ ID NO: 41115
  source 1..110: mol_type = other DNA

SEQ ID NO: 41117 - DNA, 110 bp, synthetic construct; identical to SEQ ID NO: 41115
  source 1..110: mol_type = other DNA

SEQ ID NO: 41118 - DNA, 110 bp, synthetic construct; identical to SEQ ID NO: 41115
  source 1..110: mol_type = other DNA

SEQ ID NO: 41119 - DNA, 110 bp, synthetic construct
  source 1..110: mol_type = other DNA
agctctgagaactattccacccactgtaagtcagggcacagttatagaagttcattgagacagaaggctgtacatcaggtgacatattattgtcagtttatataagccag

SEQ ID NO: 41120 - DNA, 110 bp, synthetic construct
  source 1..110: mol_type = other DNA
cggaaaatgagaaggaggggctggagtacctgcctcttaggaagaacactatccaacttggacactggcctctagttctgcataaaccacaaaactgacacaaaatatgc

SEQ ID NO: 41121 - DNA, 110 bp, synthetic construct
  source 1..110: mol_type = other DNA
acttggacactggcctctagttctgcataaaccacaaaactgacacaaaatatgcaacaaaatagctcctgggcgtcctgatttcaggtctatagtgcatgcataatgtt

SEQ ID NO: 41122 - DNA, 110 bp, synthetic construct
  source 1..110: mol_type = other DNA
aggtatttatggttcatctccaagaatacattcccctttgaagatctactctctctccttttattagatattagacctaccttcaagctttatagtgtcaatttacataa

SEQ ID NO: 41123 - DNA, 110 bp, synthetic construct
  source 1..110: mol_type = other DNA
agattgttaataactgtggcctggaccacaggtgacacctctgaagttgagagaaggcagccactccggtaggagacagtttccaagagaagagggggggaagggctcaa

SEQ ID NO: 41124 - DNA, 110 bp, synthetic construct
  source 1..110: mol_type = other DNA
cactgcaaaacacttcctgggtgtttgtttttgtagattattcctcagtcgtactccaggctgtaaaacacagctccacaaagttcagcaatgaatttgcttttttatta

SEQ ID NO: 41125 - DNA, 110 bp, synthetic construct
  source 1..110: mol_type = other DNA
ccaggctgtaaaacacagctccacaaagttcagcaatgaatttgcttttttattaaattctacaagaaccactgtggatacaatcaatttcaatactgagcaactgtcgg

SEQ ID NO: 41126 - DNA, 110 bp, synthetic construct
  source 1..110: mol_type = other DNA
gaatgaatgacaaggtgatattccctttacatctgggttttatggaaaacttcaagttaaaatatcaggcactaatatctttctggtagtttaacaagtaaaaaaacctt

SEQ ID NO: 41127 - DNA, 110 bp, synthetic construct
  source 1..110: mol_type = other DNA
ggatggtagaaacaggctgtagtatctgcagcagcaacccagcacctcaggtcattcctctggaacgtttttcctgctgctcgattctcctggctatttcctgagcctga

SEQ ID NO: 41128 - DNA, 110 bp, synthetic construct
  source 1..110: mol_type = other DNA
tttagacatattggatataaatctggaccttctcttttttacctgggtgacctcgctaaacttctgttttgactatactgtacttcctactatacttactacagaagtag

SEQ ID NO: 41129 - DNA, 110 bp, synthetic construct
  source 1..110: mol_type = other DNA
ttacattttaaggtgtgtcccgttgtgttttcacggttgagcccccagcttgaatgggaacctgaggagtcttaagagagaagctgatgatcaggaaaagttaatggaga

SEQ ID NO: 41130 - DNA, 110 bp, synthetic construct
  source 1..110: mol_type = other DNA
gggaacctgaggagtcttaagagagaagctgatgatcaggaaaagttaatggagacaagcctggcagaaatcctgctaaagattgcagggcaaggccctgatgatctttt

SEQ ID NO: 41131 - DNA, 110 bp, synthetic construct
  source 1..110: mol_type = other DNA
ctgaaccgggctggtcagaattcagctctgaacctgcgtgggaaaaaatgacaccctgacttatgccatatggaagacttatgtgaaaatcagcatttccttccattgtg

SEQ ID NO: 41132 - DNA, 110 bp, synthetic construct
  source 1..110: mol_type = other DNA
gtggatggaagaattaagtgaggtagggccccacggagagcttgacacaggccgaggctaacaaaggctggttattgttgcctccctctctgccgcctccaaaccttgtt

SEQ ID NO: 41133 - DNA, 110 bp, synthetic construct
  source 1..110: mol_type = other DNA
ctctcttctgctgtgtcctcaggtggtgggagggtaggggagctctccaggatttccttttaaaggcactaatcccattcatcacctcctaatattatcacactaggggt

SEQ ID NO: 41134 - DNA, 110 bp, synthetic construct
  source 1..110: mol_type = other DNA
ttgaagaagcactgaggtgaggactacagagtatgccatccctgagaagccataccttctccagctttcttcttaacatcttgcaagtccacgtaggccacagaccagca

SEQ ID NO: 41135 - DNA, 110 bp, synthetic construct
  source 1..110: mol_type = other DNA
cctaggaggccttccccctatagctcaaggggattgggtgttgtttctgcagtgccagggcacagattcaatccccagccagacacagtggattaaaggatccagtgttg

SEQ ID NO: 41136 - DNA, 110 bp, synthetic construct
  source 1..110: mol_type = other DNA
cagggcacagattcaatccccagccagacacagtggattaaaggatccagtgttgccactggcgtaggttgtccctgcaatagtagctcagattttggccctggcctgaa

SEQ ID NO: 41137 - DNA, 110 bp, synthetic construct
  source 1..110: mol_type = other DNA
aaaaaaaggcaaagaaaagcttgttccttgagagcttggctgtgtggatgggcttgctgaatggcaggctttgttttcaggcaagcagttgaggatcagccggtttgctt

SEQ ID NO: 41138 - DNA, 110 bp, synthetic construct
  source 1..110: mol_type = other DNA
gctgaatggcaggctttgttttcaggcaagcagttgaggatcagccggtttgcttgaggactccagactgcacttgttatctccttgtctccaggcaggttggtcagttt

SEQ ID NO: 41139 - DNA, 110 bp, synthetic construct
  source 1..110: mol_type = other DNA
tgagccacgacgggaactgcatcattgctttttgagtacgactttctccttctgagttcagtgtccttctaatcatacttttcggtagtcctttcagtaaagctctcttg

SEQ ID NO: 41140 - DNA, 110 bp, synthetic construct
  source 1..110: mol_type = other DNA
gttcagtgtccttctaatcatacttttcggtagtcctttcagtaaagctctcttgctggggagctctctcttatgctgaacaaagtccgtatttcacattttctctacca

SEQ ID NO: 41141 - DNA, 110 bp, synthetic construct
  source 1..110: mol_type = other DNA
atcaacagatttttattttctttctcatcaagtgggccccatttttgtagcacagaagagaaagtggtaagaacctaccatttcaagtaattggctctgctccagcataa

SEQ ID NO: 41142 - DNA, 110 bp, synthetic construct
  source 1..110: mol_type = other DNA
ttccaactaggacgttttcagcgacctcccactattttgaatattgtggtttagccctcattgttgatgtcagctgctttgtacaggtctctctcttgtaggagctcccc

SEQ ID NO: 41143 - DNA, 110 bp, synthetic construct
  source 1..110: mol_type = other DNA
cctcattgttgatgtcagctgctttgtacaggtctctctcttgtaggagctccccttttcttcctcagttcacctgctgatttctggtgttctcacagttccttattcac

SEQ ID NO: 41144 - DNA, 110 bp, synthetic construct; identical to SEQ ID NO: 41142
  source 1..110: mol_type = other DNA

SEQ ID NO: 41145 - DNA, 110 bp, synthetic construct; identical to SEQ ID NO: 41143
  source 1..110: mol_type = other DNA

SEQ ID NO: 41146 - DNA, 110 bp, synthetic construct
  source 1..110: mol_type = other DNA
tcctttttatttgtgaatataaatcctcctgttggtaaactccccagagctaagtcgctcctacttataacctatggaaagtacttcttttaattacctattcctgggtt

SEQ ID NO: 41147 - DNA, 110 bp, synthetic construct
  source 1..110: mol_type = other DNA
tggcctcactcgttgggttaaggatcccagatcccggcattgctatgagctgtatggtataggtcccagattcagcgcagatccctcgcattgccgtggctgtggctatg

SEQ ID NO: 41148 - DNA, 110 bp, synthetic construct
  source 1..110: mol_type = other DNA
caagtacattgatatacaaggatgggcagagattgaggagcaacagaaggagaagcagcagagtcttaaaatctgaggaagaaatgacttcctattttattttaattttt

SEQ ID NO: 41149 - DNA, 110 bp, synthetic construct
  source 1..110: mol_type = other DNA
tatcccagtttttggatatctgtgctatactggttggcgttttactgtaagctggtgtctggcaaagcttgggcctttgttcactggcttgggaactacctgagggactt

SEQ ID NO: 41150 - DNA, 110 bp, synthetic construct
  source 1..110: mol_type = other DNA
tgtctggcaaagcttgggcctttgttcactggcttgggaactacctgagggacttgctaaaagattcttggccccaccatcaatctcttcaattagacattgggggaggg

SEQ ID NO: 41151 - DNA, 110 bp, synthetic construct
  source 1..110: mol_type = other DNA
cttcatgtaaattaggtgcaatttattttccctttagcctcaaagctggataagtgtagccagcccccaaaaagctgttaataaaagcagacgctagacattaagacaaa

SEQ ID NO: 41152 - DNA, 110 bp, synthetic construct
  source 1..110: mol_type = other DNA
gtagccagcccccaaaaagctgttaataaaagcagacgctagacattaagacaaagtaagtctcttctaatgcttttcctgagttcagagcagcaaattgcagactcttt

SEQ ID NO: 41153 - DNA, 110 bp, synthetic construct; identical to SEQ ID NO: 41151
  source 1..110: mol_type = other DNA

SEQ ID NO: 41154 - DNA, 110 bp, synthetic construct; identical to SEQ ID NO: 41152
  source 1..110: mol_type = other DNA

SEQ ID NO: 41155 - DNA, 110 bp, synthetic construct
  source 1..110: mol_type = other DNA
gcacagtactcaggacagatgctgacagtaatgtgatctcctaggatctgctctcagggttgttgactctcctgtgctctcctgcagcccactgcttcccaggacctgga

SEQ ID NO: 41156 - DNA, 110 bp, synthetic construct
  source 1..110: mol_type = other DNA
agggttgttgactctcctgtgctctcctgcagcccactgcttcccaggacctggatgctttggctggtctgtttttgtgatcaagccctgggcttcatcagggtgttgca

SEQ ID NO: 41157 - DNA, 110 bp, synthetic construct
  source 1..110: mol_type = other DNA
ctcccaagactggttttttaatcagtgttcctcattacatactttcagctgagaatagctctttaaggtatacagcttggagaattgcatgcatagtctcctcaaggctg

SEQ ID NO: 41158 - DNA, 110 bp, synthetic construct
  source 1..110: mol_type = other DNA
catctcccagttgctcaactggctcactcgtctttcttcttcactcaaggggcgtgtcttctgagagcttttctgtgaaatcccagactgatgtaggtccttctgggctg

SEQ ID NO: 41159 - DNA, 110 bp, synthetic construct
  source 1..110: mol_type = other DNA
ttgggtttgcaaatctcttctttgaaaatcattgtctttgaaatagtgtggcttccatgcttgctgcaagagcccctggaaagggttaaaggtggcagggtgatggacta

SEQ ID NO: 41160 - DNA, 110 bp, synthetic construct
  source 1..110: mol_type = other DNA
cgctgcctagactctctccaaccagccctggttgggtcttttctgtttgtttgtttcttaagctgggggctcgcaagaggttctgttttgttccgaatcaaatttatttt

SEQ ID NO: 41161 - DNA, 110 bp, synthetic construct
  source 1..110: mol_type = other DNA
tcttaagctgggggctcgcaagaggttctgttttgttccgaatcaaatttatttttcgtatctattcagaagtgtgaaaagagtctaggaaaacaaaaatcaaaattcca

SEQ ID NO: 41162 - DNA, 110 bp, synthetic construct
  source 1..110: mol_type = other DNA
caggctgggggtcgaattggagctatagctgcaggcctacaccatagcaacacaggatctgagccacgtcttcaacacaccatagctcacggcaacgccggacccttaac

SEQ ID NO: 41163 - DNA, 110 bp, synthetic construct
  source 1..110: mol_type = other DNA
gatctgagccacgtcttcaacacaccatagctcacggcaacgccggacccttaacctgttgagcgagaccagggatagaatcctcatccgcctggagcctagtcaggttc

SEQ ID NO: 41164 - DNA, 110 bp, synthetic construct
  source 1..110: mol_type = other DNA
ctcctctttattctgaaagcgatggcccgatttcctttgaaatatttcctcattgagaagagtcttggtgggaccgtccatcagcttgtactattcacccctcaccaaga

SEQ ID NO: 41165 - DNA, 110 bp, synthetic construct
  source 1..110: mol_type = other DNA
aagtaggtgtctgggcctgggaggagatactagcatctctgtccttctggctcaaaggagcagccgtgaacaaagcagctggggccccgcctgggagcctgcagggcgga

SEQ ID NO: 41166 - DNA, 110 bp, synthetic construct
  source 1..110: mol_type = other DNA
aggagcagccgtgaacaaagcagctggggccccgcctgggagcctgcagggcggagtaatggagatgctgagctcggctgagcaggccccgcacgggtggcacaggccag

SEQ ID NO: 41167 - DNA, 110 bp, synthetic construct
  source 1..110: mol_type = other DNA
attgagagaatgctgacatcagcatttccctttggggcggtttgatgcctccatgggcagaaggcctgttgaaggtcatagtgggggaggtggagctgtggcggcagaag

SEQ ID NO: 41168 - DNA, 110 bp, synthetic construct
  source 1..110: mol_type = other DNA
ttcttcaccaataaatagggacagtcagatgtgctataaaggtctgatacgagaattaaagacacacagcaggtgctcaaaatacagctgttattattgtcattaggaga

SEQ ID NO: 41169 - DNA, 110 bp, synthetic construct
  source 1..110: mol_type = other DNA
tgttgaacttttttccaccattagctactactatttgtgggttgtggggaagagaagtatcctcccagatctttaggttctgggctctctgaatgagcagttttctgcac

SEQ ID NO: 41170 - DNA, 110 bp, synthetic construct
  source 1..110: mol_type = other DNA
ataggctgtcttttttttgggggggggcgcacctgtggtatatgggagttcccagcttaggggtcaaatcagagcgacagctgcccacctacgccacagccatggcaata

SEQ ID NO: 41171 - DNA, 110 bp, synthetic construct
  source 1..110: mol_type = other DNA
tggtatatgggagttcccagcttaggggtcaaatcagagcgacagctgcccacctacgccacagccatggcaataccagatccaagccatgtctataacctacaccacag

SEQ ID NO: 41172 - DNA, 110 bp, synthetic construct
  source 1..110: mol_type = other DNA
ctaccctcccactggcctctctggattttggtcccctctcctccccaccctagaaactgtggacctaaggatgctactttaacctggcgaagcccccaaatgataaaaat

SEQ ID NO: 41173 - DNA, 110 bp, synthetic construct
  source 1..110: mol_type = other DNA
tcttggaatcctctccatttaagtggcaaatagaagtccattaagggacaggatagaggttccatcagaggtttttatggaccaaggccacaagtggagcacatcccttc

SEQ ID NO: 41174 - DNA, 110 bp, synthetic construct
  source 1..110: mol_type = other DNA
gaggttccatcagaggtttttatggaccaaggccacaagtggagcacatcccttcggtcttatgagttagttctccttcacgtggccacacctagttgcaaaggagactg

SEQ ID NO: 41175 - DNA, 110 bp, synthetic construct
  source 1..110: mol_type = other DNA
tacagactaatccctggtcttcatctaaggctccagagacttacctacagaaactgagatttagttacagctccttaagtgagcaatcagtgtacagtttctctttcttc

SEQ ID NO: 41176 - DNA, 110 bp, synthetic construct
  source 1..110: mol_type = other DNA
agtcgggtttgttaaccactgagccatgatgggaactctattaagcaccaacaccctcctgtttaatcctaggaataacaccataagctaggtgttgttatgattggcac

SEQ ID NO: 41177 - DNA, 110 bp, synthetic construct
  source 1..110: mol_type = other DNA
tctgtggagaggcgggagggatgctgatctgatgcggatgccggtctgacggggtgaccatgggcgagaggtttaggaagcaggaggtaggctctggggaagctgatgct

SEQ ID NO: 41178 - DNA, 110 bp, synthetic construct
  source 1..110: mol_type = other DNA
gaccatgggcgagaggtttaggaagcaggaggtaggctctggggaagctgatgcttagcctcatgaaggaaggcagagctatgcagtggactccatcctacacctggaaa

SEQ ID NO: 41179 - DNA, 110 bp, synthetic construct
  source 1..110: mol_type = other DNA
caggcgcattcttgccggatctgaaggtacccttacaaacacaaaaggtaagtgtaaaaatgtagcctaggtcaattctaggatgatgtgtgtctctgttataagcgcag

SEQ ID NO: 41180 - DNA, 110 bp, synthetic construct
  source 1..110: mol_type = other DNA
aaaaatgtagcctaggtcaattctaggatgatgtgtgtctctgttataagcgcagtggtggccagctaaagggtgaacacgggggctcctgagtccttagctctactaag

SEQ ID NO: 41181 - DNA, 110 bp, synthetic construct
  source 1..110: mol_type = other DNA
tattcacgaggggaggaatctactctgggctttgattctgtcctccttgtcctgagaagccttgagaaccaaagttcaagtttgtctaaattggcaaatgtccttagttc

SEQ ID NO: 41182 - DNA, 110 bp, synthetic construct
  source 1..110: mol_type = other DNA
cctgcatgggtttctttctcctctgctgcaaacacttgctgcccagggattttttcttggaccggagtccttccctgtcttgcctgggcagctttgtccagtctcagact

SEQ ID NO: 41183 - DNA, 110 bp, synthetic construct
  source 1..110: mol_type = other DNA
caaaaatttaaagcattcctttctttaattttgtaattctttactgtggaatagctcagaatgtcacttctgtttgaaacaacagaattgataactgagcaaggaaacgt

SEQ ID NO: 41184 - DNA, 110 bp, synthetic construct
  source 1..110: mol_type = other DNA
tcagaatgtcacttctgtttgaaacaacagaattgataactgagcaaggaaacgtaatttggattataaaattcttgctttaataaaaattccttaaacagtgcacagtg

SEQ ID NO: 41185 - DNA, 110 bp, synthetic construct
  source 1..110: mol_type = other DNA
catggcatgtaacccatggagaaagtattcttaactggctaccaccccaggacacaagcaacagattaagatgcccgtttttcctgtgaaagaagcctattagcttaggg

SEQ ID NO: 41186 - DNA, 110 bp, synthetic construct
  source 1..110: mol_type = other DNA
aagcaacagattaagatgcccgtttttcctgtgaaagaagcctattagcttagggctatagctgtggcctgaaaggcatgcttctcattaaacacacacacacacacaca

SEQ ID NO: 41187 - DNA, 110 bp, synthetic construct
  source 1..110: mol_type = other DNA
agactgaagtgtttggttaaaagatctaaaagcaatataaacattgagacttttttgttgtaagagttcacagggggacagcgcatgccaattcatcacttatggaattt

SEQ ID NO: 41188 - DNA, 110 bp, synthetic construct
  source 1..110: mol_type = other DNA
tgttgtaagagttcacagggggacagcgcatgccaattcatcacttatggaattttctgttccatcactagacaccttatgatcgcaagcaactcctacacacaaacaaa

SEQ ID NO: 41189 - DNA, 110 bp, synthetic construct
  source 1..110: mol_type = other DNA
agctgagctgggatctgaattcctgctgccattgtcttagccactgtgatatccggcctccctaacactaaggccctaagtctccattcctcttctgaaaaatcagaata

SEQ ID NO: 41190 - DNA, 110 bp, synthetic construct
  source 1..110: mol_type = other DNA
agcattcatgctggagcaacctgcctgcacaggcgatatggccacccccttttgagccctagagtcatgcatagctgactttgaatcctccctctaccaccaacaagcag

SEQ ID NO: 41191 - DNA, 110 bp, synthetic construct
  source 1..110: mol_type = other DNA
cacagaaagtaactgactccatttgtttttttttaacggaccttgtgagcctggagggatgtaaaacacatttttcaggtttttcaaaaataaaatcaggagttctcctg

SEQ ID NO: 41192 - DNA, 110 bp, synthetic construct
  source 1..110: mol_type = other DNA
acggaccttgtgagcctggagggatgtaaaacacatttttcaggtttttcaaaaataaaatcaggagttctcctgtggctcagtaggttaaggatctggtgttgtcactg

SEQ ID NO: 41193 - DNA, 110 bp, synthetic construct
  source 1..110: mol_type = other DNA
cattgggaagggacatacctttatgaccagctgtcaagttttaaaatgccaaacgcacaccccataggactcgagaaggcgatccccattgagttaagtgagaagagaat

SEQ ID NO: 41194 - DNA, 110 bp, synthetic construct
  source 1..110: mol_type = other DNA
tactgcctttgctgtctgcattacagaagctcctgagagctggtccttccacacagaaccctggggaaggcgaggaagggcagtgcttatatattaggaagtagcacagg

SEQ ID NO: 41195 - DNA, 110 bp, synthetic construct
  source 1..110: mol_type = other DNA
ctgtatctgtgccattttaacatagggagtaaggagatacattaaaatatctttggtgtgtaatttacatatagctgcaaggtataatgaagtcagtagtaagagatgtg

SEQ ID NO: 41196 - DNA, 110 bp, synthetic construct
  source 1..110: mol_type = other DNA
cagccactcgacctgtggacttttgctcaagaggtaccgataaacaacttttttttttttttttttttgcttaggccatgaaaggttgggttttcggttatccgcaaaga

SEQ ID NO: 41197 - DNA, 110 bp, synthetic construct
  source 1..110: mol_type = other DNA
tttttttttttttgcttaggccatgaaaggttgggttttcggttatccgcaaagagagtcccaaggatgactgttacctataaacttgcaaggatcaaggctgactccct

SEQ ID NO: 41198 - DNA, 110 bp, synthetic construct
  source 1..110: mol_type = other DNA
gtctagccaattaccaaatagctgccatttatttagaacttaatatgcatcaatcctttacacacattatcattttccattatcattaatcctcataccacgtattattc

SEQ ID NO: 41199 - DNA, 110 bp, synthetic construct
  source 1..110: mol_type = other DNA
tcgtggttcctagtcggatttgtttccgctgtgccacgatgtgaactcccgaattcctttcttaaagagttcaacagagacctctgctctcttcatcttttttttttttt

SEQ ID NO: 41200 - DNA, 110 bp, synthetic construct; identical to SEQ ID NO: 41199
  source 1..110: mol_type = other DNA

SEQ ID NO: 41201 - DNA, 110 bp, synthetic construct
  source 1..110: mol_type = other DNA
ctcattgcaaagtaatcccttgatgctctgattttctgcatcagtttcttgtgtgtggccagcataattagcttctttgtgaggcaggggtttttaagtcaaatatgtta

SEQ ID NO: 41202 - DNA, 110 bp, synthetic construct
  source 1..110: mol_type = other DNA
tgtatgttatagactcacattgctgtggctgtggtgtagctggtgtccagctccagttggacccctagcctgcgtagcttctatatgctgcaggtgcagcccaaaagaaa

SEQ ID NO: 41203 - DNA, 110 bp, synthetic construct
  source 1..110: mol_type = other DNA
gttggacccctagcctgcgtagcttctatatgctgcaggtgcagcccaaaagaaaaaatagtaacagtatggagattcctcaaaaattaaaaatattactaccaaatgat

SEQ ID NO: 41204 - DNA, 110 bp, synthetic construct
  source 1..110: mol_type = other DNA
ccctgtgaactccaatcctgtacatctaactgcccgtccacacaggagtcaaacttatttatcagatctcaaggaatcacccctgtagtcaaatgcttgatctcaccctc

SEQ ID NO: 41205 - DNA, 110 bp, synthetic construct
  source 1..110: mol_type = other DNA
aaagaagctttagccaattctccactgtccagtggcacattaatgtggtgaagatacatcagggagctgcacacactcacctccacaaacggggcttggccattagacag

SEQ ID NO: 41206 - DNA, 110 bp, synthetic construct
  source 1..110: mol_type = other DNA
cccaccctttcttctgttgcaacatgagtatcgagacattttaaagtacatactgtgtgtcaagatcttcattactttattcaattttaacggtaattctataagttagt

SEQ ID NO: 41207 - DNA, 110 bp, synthetic construct; identical to SEQ ID NO: 41206
  source 1..110: mol_type = other DNA

SEQ ID NO: 41208 - DNA, 110 bp, synthetic construct
  source 1..110: mol_type = other DNA
tgctgaaattagggaaactcttctaccccaaacaaccacagaaacctgcctgctggatggagagcttcttaggagtggatggtgtcttatccgtctctgaattcccagga

SEQ ID NO: 41209 - DNA, 110 bp, synthetic construct
  source 1..110: mol_type = other DNA
ggatggcaaaagtctgttgttagtaggatctataatcagtttgtaggagctacagaacctgccaggacccaaatgtctatttctaagtctcacctgtgtagccctcatta

SEQ ID NO: 41210 - DNA, 110 bp, synthetic construct
  source 1..110: mol_type = other DNA
ctagcagtcgaagccttccacactatttacccaacctgtctccatcaaacatacagttaatcatcaatttcttccagttcttttgatgtatatgtggcatgtatcttatc

SEQ ID NO: 41211 - DNA, 110 bp, synthetic construct
  source 1..110: mol_type = other DNA
tccatgtacaggttcaaacagcaaactctataagatgtgagaggcctgcaacactccacacacacaaaaggggcaacaacaaaagaaagactagagaagtaagctggctt

SEQ ID NO: 41212 - DNA, 110 bp, synthetic construct
  source 1..110: mol_type = other DNA
ccacacacacaaaaggggcaacaacaaaagaaagactagagaagtaagctggcttagaggaaaggaaggaaatatcaaaagcattgtcatatcattctagccttccaatt

SEQ ID NO: 41213 - DNA, 110 bp, synthetic construct; identical to SEQ ID NO: 41211
  source 1..110: mol_type = other DNA

SEQ ID NO: 41214 - DNA, 110 bp, synthetic construct; identical to SEQ ID NO: 41212
  source 1..110: mol_type = other DNA

SEQ ID NO: 41215 - DNA, 110 bp, synthetic construct
  source 1..110: mol_type = other DNA
ggctcttttcctttttcctgctacaccaagagaactatcatgtttttttttgtttccttagcatctagcatgatatatatggcaaaagttaagtgttgaatgtgaaaaga

SEQ ID NO: 41216 - DNA, 110 bp, synthetic construct
  source 1..110: mol_type = other DNA
ataccaaggtttcatagcaatgttgtacttttgtctagtggggggaaacctgacacatctaactggctactgatcagctctaccaatgtctgtccccgggtacctcaaaa

SEQ ID NO: 41217 - DNA, 110 bp, synthetic construct
  source 1..110: mol_type = other DNA
accagcagaggtaacacataggtaaatgtaaaagctagtactatgatacttttcatttgtaactctgcttttgtttcttatacaacttaaaagacaaatgcataaactaa

SEQ ID NO: 41218 - DNA, 110 bp, synthetic construct
  source 1..110: mol_type = other DNA
ggcggtttgcgttagccccctgcaagtctgagcttggaggggcgcaggtcttcgagccaagcggatgtacacagttcagaggtggtccgccagaatatggttttggatgt

SEQ ID NO: 41219 - DNA, 110 bp, synthetic construct
  source 1..110: mol_type = other DNA
gtttttaatacaaaaaaaaaaaggaaaagaattccagactggaaatcaaggaagccagttttggcattgcgtttccttgtgacttagctccctggactcatttttcatgt

SEQ ID NO: 41220 - DNA, 110 bp, synthetic construct
  source 1..110: mol_type = other DNA
ctgccgctgtgtaaactggtaatagcatccagttacttgcattgttaaaagatctcatgcttaaaaataagaaaattaatgtaaggctcttagcacagagtgaacgttca

SEQ ID NO: 41221 - DNA, 110 bp, synthetic construct
  source 1..110: mol_type = other DNA
agattttgctaaggatggccatgcaacaaaacccctttatggaagcctcccacacttcacttcagttatgcagaagctcaaccctacttcccaagaacctgcaatttctc

SEQ ID NO: 41222 - DNA, 110 bp, synthetic construct
  source 1..110: mol_type = other DNA
gtgggtttctgaacacctccccagtgctcagcttggcgctgtgggtgacaaactcccatcaagtgacctacttggtgtcagcttttggttgcccagagacctggggcagg

SEQ ID NO: 41223 - DNA, 110 bp, synthetic construct
  source 1..110: mol_type = other DNA
tcttccatttgcctgctgactgacgcacacagtttttggcatcctccagtcctgaagactctgctgggtgtatccttcctgtccagtggtcgtttttagctggaagttgg

SEQ ID NO: 41224 - DNA, 110 bp, synthetic construct
  source 1..110: mol_type = other DNA
agactctgctgggtgtatccttcctgtccagtggtcgtttttagctggaagttgggtaaaaagatgtagcaatagccaggatagtgtctctttgtgcctctcaccccctt

SEQ ID NO: 41225 - DNA, 110 bp, synthetic construct
  source 1..110: mol_type = other DNA
tacttaaagagatttttttatttaaaaaaaaaatccttcttgatcatttaaaatgtttaaaataagaagttcttgtcatggcgcagcggaaacaaacccgactaggagcc

SEQ ID NO: 41226 - DNA, 110 bp, synthetic construct
  source 1..110: mol_type = other DNA
attgcttctacttgtcgcttctgacctatagaaagaaactgtctcagttatgccaattatactctgcatgtacattgctacaatcgataaagatttaatttttaaatata

SEQ ID NO: 41227 - DNA, 110 bp, synthetic construct
  source 1..110: mol_type = other DNA
tagaagggcactaatcccataagggcccctgccttgacctcatctgaccttaagtaactccccaaagccccacctccaaaaatcatcccacagtgggggggtagttaggg

SEQ ID NO: 41228 - DNA, 110 bp, synthetic construct
  source 1..110: mol_type = other DNA
cgttgctgctgcgccacaagaggaacgcctacagcagggatttataaccagaaagatttctacgggagctgtgaatggtattaacaccaaaaatttgattcaacagaaaa

SEQ ID NO: 41229 - DNA, 110 bp, synthetic construct
  source 1..110: mol_type = other DNA
tccagaaagcatctgatcccaaaccaaattaaagcagaaaaccaagttcagaccacttactcttgcaccgtcttccatcctcggctagaataaatccctctgagcatttg

SEQ ID NO: 41230 - DNA, 110 bp, synthetic construct
  source 1..110: mol_type = other DNA
cttactcttgcaccgtcttccatcctcggctagaataaatccctctgagcatttgcagatgtaggaattgccacgattaacacacatgtgctcacagccgtggtgggttg

SEQ ID NO: 41231 - DNA, 110 bp, synthetic construct
  source 1..110: mol_type = other DNA
gagtttgctgggcccacctcaggccacccacttgtttgcatcccttccaatgtgaagagctgctcatctgccttccatgttccaggatgctgacagcaccacagtgagga

SEQ ID NO: 41232 - DNA, 110 bp, synthetic construct
  source 1..110: mol_type = other DNA
gttggatgaaaactccaaatacactggaatgaaaacatacaactgggtatgctcaagtcttcttcacaaagctcatctgaagacctagtccctccaggctttgggtaagt

SEQ ID NO: 41233 - DNA, 110 bp, synthetic construct
  source 1..110: mol_type = other DNA
gccagggagtggtaccttccttgactgttagctctcctcccattttagggagtaatgttgagacttgagagtctcctgtgggcgtacacaggtttgttctcacaaaatca

SEQ ID NO: 41234 - DNA, 110 bp, synthetic construct
  source 1..110: mol_type = other DNA
tgttgagacttgagagtctcctgtgggcgtacacaggtttgttctcacaaaatcaactgcgcttctctcccctcaaagaatggaaaaataaaacaccaccatccatggag

SEQ ID NO: 41235 - DNA, 110 bp, synthetic construct
  source 1..110: mol_type = other DNA
ccttgtcaggcttgctgggccagagttagtaagagctggagtacagggcacgctgggtgggtgtggagggcaataatccacagggctttgccacaagaccatgaaggcgc

SEQ ID NO: 41236 - DNA, 110 bp, synthetic construct
  source 1..110: mol_type = other DNA
taagtacatagagcttctatattattaataaaaggcataaccacttaagtcacgctgcattgatagtggtttattagcaatgatgaattttctagtaactcaaagatact

SEQ ID NO: 41237 - DNA, 110 bp, synthetic construct
  source 1..110: mol_type = other DNA
ttcttctcaggggcttgaatcagcaatttcctgccttttatctccttttacagctttccctgccacaaccccaccagctacccttcaacctagcggttggggaacttctt

SEQ ID NO: 41238 - DNA, 110 bp, synthetic construct
  source 1..110: mol_type = other DNA
ggggcaggtccagaagcccccacattgcagatgaggctcccaatgttgattctggccagagcctctgtaaacgaatctggccaggaaggctcaccatttacaccagctgc

SEQ ID NO: 41239 - DNA, 110 bp, synthetic construct
  source 1..110: mol_type = other DNA
cgatgtcctttaagcccaaatctatcagaatttctagagtgggatccaagcatgaatatattttttgtcacacccatggcatatcgaagtacctacaggctaggggttga

SEQ ID NO: 41240 - DNA, 110 bp, synthetic construct
  source 1..110: mol_type = other DNA
agagtgggatccaagcatgaatatattttttgtcacacccatggcatatcgaagtacctacaggctaggggttgaatcagagctgccacagcaatgccagatccaagtca

SEQ ID NO: 41241 - DNA, 110 bp, synthetic construct
  source 1..110: mol_type = other DNA
caacctcatggttcctagttggattcatttcggctgtgccacgacgggagctcctttaaggtcgtttttaagatcacttccatttggcaagaatgcagtcatgtgggcac

SEQ ID NO: 41242 - DNA, 110 bp, synthetic construct
  source 1..110: mol_type = other DNA
ttaaggtcgtttttaagatcacttccatttggcaagaatgcagtcatgtgggcacaattaactgcaaagacgtgtgatcagaaggaagagccagcagtttcctcctgtta

SEQ ID NO: 41243 - DNA, 110 bp, synthetic construct
  source 1..110: mol_type = other DNA
tgagcaaagggcttgtggtctgagtgacttcaaaatgtggtagtgacagaagtgggggtggagtcccaacagctttgttttcacagcagaccagagaaagaagaagaggt

SEQ ID NO: 41244 - DNA, 110 bp, synthetic construct
  source 1..110: mol_type = other DNA
gcttgctgacctctcttcttacatggccaagtagtggcaggtggagagcatgaccgtgcagaatcgagaggatgtagctcgcactgtaggaggtgtggccactggcctca

SEQ ID NO: 41245 - DNA, 110 bp, synthetic construct
  source 1..110: mol_type = other DNA
ggggtgggaggagacaggcatgcctctccctacccactcccccctcagctctggttaaggagacttcttggaagtttctcatgccacttctggttacaatccattagcta

SEQ ID NO: 41246 - DNA, 110 bp, synthetic construct
  source 1..110: mol_type = other DNA
taaggagacttcttggaagtttctcatgccacttctggttacaatccattagctagaacttagttgcctagctacatcctaaagtggggtggacgatatcatttagctaa

SEQ ID NO: 41247 - DNA, 110 bp, synthetic construct
  source 1..110: mol_type = other DNA
tgggtgggattttttaccattatccagactaataatgtacagccagagctgagatctgtgagtgttcagaaggttcaatccaattcaactggacaaatacttgtgttcct

SEQ ID NO: 41248 - DNA, 110 bp, synthetic construct
  source 1..110: mol_type = other DNA
accttcttttataactctcctctggtattctaagctgtatccttaaattaagatgtcgctaagtggacatggcttgggatatgtttattgtctgaaaatgttaataaaat

SEQ ID NO: 41249 - DNA, 110 bp, synthetic construct
  source 1..110: mol_type = other DNA
ttcctgtgatgtatttgaaattggcttgtagtgatatatccaaactttatgtactatttccctctcataaatcagcttcctctgcacttagcattttttgagagcctgag

SEQ ID NO: 41250 - DNA, 110 bp, synthetic construct
  source 1..110: mol_type = other DNA
tcctctcataaactttaaatcatctctagattacttaaaatgaccaatacaatataaatactgtgtaaattgttgctgacttgcagcaaattcaagcttggctttttgga

SEQ ID NO: 41251 - DNA, 110 bp, synthetic construct
  source 1..110: mol_type = other DNA
agttgggttcgttaactgctgagccactaagtgaactcctggtcttagcaatattttttgggatatgtcttttccggcaagggaaacaaaagcaaaaataaacaaatggg

SEQ ID NO: 41252 - DNA, 110 bp, synthetic construct; identical to SEQ ID NO: 41251
  source 1..110: mol_type = other DNA

SEQ ID NO: 41253 - DNA, 110 bp, synthetic construct
  source 1..110: mol_type = other DNA
aatacaggctattttcttacaggaagtagggagccattgacgtattttaatagttagtagacagagacatacctaaggaatcagttaggcagtataatgctggacagatg

SEQ ID NO: 41254 - DNA, 110 bp, synthetic construct
  source 1..110: mol_type = other DNA
agtagacagagacatacctaaggaatcagttaggcagtataatgctggacagatggagaggagaaagagcggaacagagatattaacatggcatctctattacccaccca

SEQ ID NO: 41255 - DNA, 110 bp, synthetic construct
  source 1..110: mol_type = other DNA
gtgaagccacttcaattcctccagccacaatgccccaactcccagttgcagcctagcgaacactctagctccccatactccacaccacagccttacactggatctggaac

SEQ ID NO: 41256 - DNA, 110 bp, synthetic construct
  source 1..110: mol_type = other DNA
gcgaacactctagctccccatactccacaccacagccttacactggatctggaacaaccacagcaggtgaagggatgcaacttgggctgcacctgagtggaggtgaagat

SEQ ID NO: 41257 - DNA, 110 bp, synthetic construct; identical to SEQ ID NO: 41255
  source 1..110: mol_type = other DNA

SEQ ID NO: 41258 - DNA, 110 bp, synthetic construct; identical to SEQ ID NO: 41256
  source 1..110: mol_type = other DNA

SEQ ID NO: 41259 - DNA, 110 bp, synthetic construct
  source 1..110: mol_type = other DNA
agatgaacttcatgtatacataaagcacccaatacttaaaagctgtcgaatatatgttagctcttttctcctccccttctttgaactaagagattcctagaactcacagc

SEQ ID NO: 41260 - DNA, 110 bp, synthetic construct
  source 1..110: mol_type = other DNA
gttcccaggctggggtcgaagtggagcatagctgagacctacactgcagcgtgtggcaaaactggacccttaacctactgatcgaggccagagatctaacccgcatcctc

SEQ ID NO: 41261 - DNA, 110 bp, synthetic construct
  source 1..110: mol_type = other DNA
gcaaaactggacccttaacctactgatcgaggccagagatctaacccgcatcctcaccatgtcatatccttaacccaccgagccacaaggggaactctagcactttcttt

SEQ ID NO: 41262 - DNA, 110 bp, synthetic construct
  source 1..110: mol_type = other DNA
gaaaatatacagaagagagtagttgatttgatctgtaggggtcagagaaagctttgcagagaaggtgacaaatccagagtcttgaacaatgagtaggattcttcaagaag

SEQ ID NO: 41263 - DNA, 110 bp, synthetic construct
  source 1..110: mol_type = other DNA
tgcagtctagttaaaactaaacctaagcgcacagtgcttagtaaatttcttcctcagaaattttctaaatccatgaatgttatagtcgctagctacagctagctacgaag

SEQ ID NO: 41264 - DNA, 110 bp, synthetic construct
  source 1..110: mol_type = other DNA
agaaattttctaaatccatgaatgttatagtcgctagctacagctagctacgaagcacttgaaatgcgcctactgcaaattgagctgaactataaaattgtaaaatccta

SEQ ID NO: 41265 - DNA, 110 bp, synthetic construct
  source 1..110: mol_type = other DNA
ctgagcaagtagtgtatatgtgtgtatattgggggcctggatggagggtaagctgtgctggccaggaggaaggtgctagaatctgagtgagaggaagtgggaatccacac

SEQ ID NO: 41266 - DNA, 110 bp, synthetic construct
  source 1..110: mol_type = other DNA
tgctggccaggaggaaggtgctagaatctgagtgagaggaagtgggaatccacacaagggtgcagcctggccctggaagagtggggaagggatttatgtagatgagctgc

SEQ ID NO: 41267 - DNA, 110 bp, synthetic construct
  source 1..110: mol_type = other DNA
attatcatgaagtccaaatctctggagagttcctgaggcctgcctatgaatctatcctgagccatgttcccttctagcataacaacacatgtttctggcagaccagcaca

SEQ ID NO: 41268 - DNA, 110 bp, synthetic construct
  source 1..110: mol_type = other DNA
ctgtggttctaaatgacttatcagctaccctctgattggtgtgtgcaggtctcactgccaaaaaatagcaagcaaggaaacaaagcaaggtactccaagaccgatgttgg

SEQ ID NO: 41269 - DNA, 110 bp, synthetic construct
  source 1..110: mol_type = other DNA
atgagtgtgtgttaacagcccccctgctgtaaaagaggatcaggctacacaccctaagttagcagcttctaaggagggagcttcaaacccaattctatggatctccaaac

SEQ ID NO: 41270 - DNA, 110 bp, synthetic construct
  source 1..110: mol_type = other DNA
gatattttatccagcgataaaagtgacagttgtcttcatatttggaaagaattaagataaaattaagccaggaaacctacccttacccagtaattctgaggaaggccata

SEQ ID NO: 41271 - DNA, 110 bp, synthetic construct
  source 1..110: mol_type = other DNA
gataaaattaagccaggaaacctacccttacccagtaattctgaggaaggccataaattatttgcatctctttataccatattccaatgttctttttccccggcaaaatt

SEQ ID NO: 41272 - DNA, 110 bp, synthetic construct
  source 1..110: mol_type = other DNA
gccagagggatggcttaggtggtttgcccaagcttttggtggggcagggggcttgcctagcaccttgttcttgctctgatttctaaccagctcccataccaaacccttaa

SEQ ID NO: 41273 - DNA, 110 bp, synthetic construct
  source 1..110: mol_type = other DNA
cctagcaccttgttcttgctctgatttctaaccagctcccataccaaacccttaatcactagaccaatcagggaactccagcacctggctcttcaggagtagcagttggc

SEQ ID NO: 41274 - DNA, 110 bp, synthetic construct
  source 1..110: mol_type = other DNA
agcagctctgatccgacccctagcttgggaacttccatttgctgcaaagaaaaaaagacacccctccccaaagacaatgaccagtaggacaggaatttaagggaaagatg

SEQ ID NO: 41275 - DNA, 110 bp, synthetic construct; identical to SEQ ID NO: 41274
  source 1..110: mol_type = other DNA

SEQ ID NO: 41276 - DNA, 110 bp, synthetic construct
  source 1..110: mol_type = other DNA
tatttctgtgggtggacacgcctgtgatctccggcatcacattcccacgcaccacgctctgccgtcggcgtacttcctgaccacacgaagagaaacacaatcccatccac

SEQ ID NO: 41277 - DNA, 110 bp, synthetic construct
  source 1..110: mol_type = other DNA
cctgacctacttggggctgcccacgccctcctcttccagtgagaggaaccccccgtctccaggagagatgccacagcttgctgcctagccttctttataagaggggctca

SEQ ID NO: 41278 - DNA, 110 bp, synthetic construct
  source 1..110: mol_type = other DNA
aggatcaaacccgcatcctcatggatgccagtcagattgattctgctgagccatgataggaactcccaaaataactgtttctatttgtgattcatagcagctctttcttt

SEQ ID NO: 41279 - DNA, 110 bp, synthetic construct
  source 1..110: mol_type = other DNA
ataggaactcccaaaataactgtttctatttgtgattcatagcagctctttcttttaggtttatcggcttgaactaggttttaaacataatgaaatccaacatatggtca

SEQ ID NO: 41280 - DNA, 110 bp, synthetic construct
  source 1..110: mol_type = other DNA
gggaatgtcagaaaatcaaattgccgatgaacaactgtttcaaattatgacttggttgatttaaaaagtaaaatatcaacatcagaccttaacacttcaacttggaactt

SEQ ID NO: 41281 - DNA, 110 bp, synthetic construct
  source 1..110: mol_type = other DNA
ttgatttaaaaagtaaaatatcaacatcagaccttaacacttcaacttggaacttggacttggggcttgactgaatttataaccttaattccatagctccatcattccta

SEQ ID NO: 41282 - DNA, 110 bp, synthetic construct
  source 1..110: mol_type = other DNA
cagtcggacgggcctcggacgctctcggtgaggactcacggacagaggccacccaaatcctcagctcgtgcccggcacaaaggcgcgttcactgttgcttttgggggttg

SEQ ID NO: 41283 - DNA, 110 bp, synthetic construct
  source 1..110: mol_type = other DNA
cttgcgggcgagtgacaatgtgtctatcaaaagatgtcacaaggtccttttattcctggaagccacccggctgttcatagctcgcattaacttgctctttattgacaatg

SEQ ID NO: 41284 - DNA, 110 bp, synthetic construct
  source 1..110: mol_type = other DNA
ctggaagccacccggctgttcatagctcgcattaacttgctctttattgacaatggctctctgagtgagtttaaggtcattgagaggagtgtatattttgttgtagtaac

SEQ ID NO: 41285 - DNA, 110 bp, synthetic construct
  source 1..110: mol_type = other DNA
tttttacccagaaatcagggcaatactttggctcaatttaaatattactattcttgttcttaatcctgtcatgagggtgcctcataacattttatggaatcggtgcatca

SEQ ID NO: 41286 - DNA, 110 bp, synthetic construct
  source 1..110: mol_type = other DNA
gccatatctatgctgtgttataagccacttccaaactctggggcttcaaacaaccagtatttgtttagctcagaagtccatagtttggtgaggtaggctggggagatttt

SEQ ID NO: 41287 - DNA, 110 bp, synthetic construct
  source 1..110: mol_type = other DNA
tccatcctttgtaggacaaaatggccacaaaaattttaaattcatgtttattaggtggtcatgtagttgtgtaggaggaaagttctaattaatcaatcattaatttattc

SEQ ID NO: 41288 - DNA, 110 bp, synthetic construct
  source 1..110: mol_type = other DNA
gcctgtgaggctgggcccttctatctctggatggggtggccatcccaccattttcttagctcatgagaatgtcttgcagctgtctgagaaacacagatcattagggattt

SEQ ID NO: 41289 - DNA, 110 bp, synthetic construct
  source 1..110: mol_type = other DNA
gggatgatagaagcttaccctgctctactccccatcccaccttgcagtcagaggatagaccaagaactggcatttcatgcttttctcctttatgcttatcagctctcaga

SEQ ID NO: 41290 - DNA, 110 bp, synthetic construct
  source 1..110: mol_type = other DNA
tagaccaagaactggcatttcatgcttttctcctttatgcttatcagctctcagagtcaaagtgaaaaataaaaatggacgcagcagatgagcagctgccatgaagtcgc

SEQ ID NO: 41291 - DNA, 110 bp, synthetic construct
  source 1..110: mol_type = other DNA
gaacgaggggatgatttggctgaaaaaatcttttaggcttatatttgttcttagagctctgtatctttcactcagatttattaacaaacaaacaaaacaaccaaaaaaaa

SEQ ID NO: 41292 - DNA, 110 bp, synthetic construct; identical to SEQ ID NO: 41291
  source 1..110: mol_type = other DNA

SEQ ID NO: 41293 - DNA, 110 bp, synthetic construct
  source 1..110: mol_type = other DNA
ctggaggacgtttcttctcaatcttatctgacaaaaactctggatgttaaattcttaaataaacaataccaaattcccatgggtgggaaccgcaagtcaaataggagata

SEQ ID NO: 41294 - DNA, 110 bp, synthetic construct
  source 1..110: mol_type = other DNA
taaataaacaataccaaattcccatgggtgggaaccgcaagtcaaataggagatacctactcttggcatgaaagtatatatttaagaatcaacttatcacatttcacagc

SEQ ID NO: 41295 - DNA, 110 bp, synthetic construct
  source 1..110: mol_type = other DNA
gttgacaattcagagcaggggtggagtatttccagcccacacccaggatctggcttattgcttcatgtcatcctgttcagagaaagagctcaggccccagaacttgagtc

SEQ ID NO: 41296 - DNA, 110 bp, synthetic construct
  source 1..110: mol_type = other DNA
cttaccagagatgagtggtcctttccttttagacagatagggtaaagaaaggggtgagctaattgcaaccaagattgtattttggtaagattctatcttcctctgacttg

SEQ ID NO: 41297 - DNA, 110 bp, synthetic construct
  source 1..110: mol_type = other DNA
actaagcaacttttctccaatcaagcccagcagaaactcttcccaaggcaagaggaactaaagcttgcatgtgtgacttcaaatcttttcacaattagtgttaaaactta

SEQ ID NO: 41298 - DNA, 110 bp, synthetic construct
  source 1..110: mol_type = other DNA
tctaaccccttgtgggtgaagttgatacaggcactcatgacaggcttcctgatgggtgggactggtgtctgcccactggttgtggagctaagtcttttccttctggtggg

SEQ ID NO: 41299 - DNA, 110 bp, synthetic construct
  source 1..110: mol_type = other DNA
gtgggactggtgtctgcccactggttgtggagctaagtcttttccttctggtgggtggggccatatcactgggaggcagctgtgtggctggcagaactttaggcagcctg

SEQ ID NO: 41300 - DNA, 110 bp, synthetic construct
  source 1..110: mol_type = other DNA
ctgccaggctgtgcataatgcagtggctgctggcccactggtgagttaaggttttgtctgagggatctttttacttgtctctttccttgattttcactagtgagcctcta

SEQ ID NO: 41301 - DNA, 110 bp, synthetic construct
  source 1..110: mol_type = other DNA
gccagcgtctgttcttggtgagccctttgcatgtggatgtcccatgcgctttctctacagacctctgggctcctcagagctcccatccctcagggtagcttcctccacac

SEQ ID NO: 41302 - DNA, 110 bp, synthetic construct
  source 1..110: mol_type = other DNA
tacagacctctgggctcctcagagctcccatccctcagggtagcttcctccacactctggtcactggtcactgtgatcagtcactatgtgtgtgccgccaaagctcccca

SEQ ID NO: 41303 - DNA, 110 bp, synthetic construct
  source 1..110: mol_type = other DNA
gtgcaaaaaaataaactttgacccacaccttgctccatatacaaaaattaactttaaaaaatcataggcttaagtgtaaacacaaatcaatacaacttctaggagatagc

SEQ ID NO: 41304 - DNA, 110 bp, synthetic construct; identical to SEQ ID NO: 41303
  source 1..110: mol_type = other DNA

SEQ ID NO: 41305 - DNA, 110 bp, synthetic construct
  source 1..110: mol_type = other DNA
tcagtggcttgatggccgtgacatcttttgtttactgataaggcaggttcatctacaggcctgataagtgtttgcgaaataactgcccattcctgcctcaacccagctgt

SEQ ID NO: 41306 - DNA, 110 bp, synthetic construct
  source 1..110: mol_type = other DNA
accccttaagcgaaggagggggagatctgttaacagacatctacaaataaacaataacctgtccactttacctgtatagatacagccagtacagtcaaaaaacagggaaa

SEQ ID NO: 41307 - DNA, 110 bp, synthetic construct
  source 1..110: mol_type = other DNA
aacctgtccactttacctgtatagatacagccagtacagtcaaaaaacagggaaaagttagacctcagatagtttctcttgtaaaaggttacttttgtttgcaccatatt

SEQ ID NO: 41308 - DNA, 110 bp, synthetic construct
  source 1..110: mol_type = other DNA
cagaacaacaagatccacacatttagaacctcatggaatgtggcacatttcatcagaatggtgggtttttttaatttaaatgagaaaatttactaaattatggatttgaa

SEQ ID NO: 41309 - DNA, 110 bp, synthetic construct
  source 1..110: mol_type = other DNA
acacgggtcaataccaaacatcaaagataatcacaggcaaagctggtacatagaggcaatttcacaaagtagtgaaattctcggctggccatcccccgtgtgctcatcac

SEQ ID NO: 41310 - DNA, 110 bp, synthetic construct
  source 1..110: mol_type = other DNA
gcaatttcacaaagtagtgaaattctcggctggccatcccccgtgtgctcatcactgattctgatgtgaccaaaatagaaactgctaaccctgtgtcactccttgtgcta

SEQ ID NO: 41311 - DNA, 110 bp, synthetic construct
  source 1..110: mol_type = other DNA
ggctgtgtccaaacacatgtcagaggtgggatgacaagctctagactgtggccgggcaggctgcatggacagttggcacagagaggtcaaagagcaggtccttgacctag

SEQ ID NO: 41312 - DNA, 110 bp, synthetic construct
  source 1..110: mol_type = other DNA
aaaggttaagtgatgttaggggattactcttagttcttcttaagtgtgatgttattgtcgttttacgagacagctttactctcaggaaatacaggctcaattatgtaggg

SEQ ID NO: 41313 - DNA, 110 bp, synthetic construct
  source 1..110: mol_type = other DNA
tgtcgttttacgagacagctttactctcaggaaatacaggctcaattatgtagggagagagtggtgtgatatctgcgacttattttcaaatgatacaggaaacaaaataa

SEQ ID NO: 41314 - DNA, 110 bp, synthetic construct
  source 1..110: mol_type = other DNA
ataccattccctctgcctggagcacttaccctgcctctcccactcttcaacctctgctttaatgtcacaacctcagataaatccctgatttcagtttaaaataaccaccc

SEQ ID NO: 41315 - DNA, 110 bp, synthetic construct
  source 1..110: mol_type = other DNA
gctttaatgtcacaacctcagataaatccctgatttcagtttaaaataaccacccacctcctgatagaacctagtccttttccttttccatacttagcacaatataaagt

SEQ ID NO: 41316 - DNA, 110 bp, synthetic construct
  source 1..110: mol_type = other DNA
ctccagaagcctgagtcatctctgaggcctctctgtcataccctaaatccagtctgtcagcaaagctgatcaaatacctctggaatccaatcacttctcacttctaccaa

SEQ ID NO: 41317 - DNA, 110 bp, synthetic construct
  source 1..110: mol_type = other DNA
attttggctcatctctgttccatgtggtgtcggctgggcttggacctccctagagagctttttcactcaaaggtgtggttcctcagctgagataggctgaacatctagac

SEQ ID NO: 41318 - DNA, 110 bp, synthetic construct
  source 1..110: mol_type = other DNA
tccaatgtggtccaatgctttgccttggagtttatcaactaaaatttctcacttgattcttgtaagaagcttaattactaaaactattttataggctaatcagacagttt

SEQ ID NO: 41319 - DNA, 110 bp, synthetic construct
  source 1..110: mol_type = other DNA
aacagacaaactgaaaaaggaagacccaaaagacacataagctgtgtaagcactaaatacataactcagtacctttgctgataaaaactatattgctaaaggaccaaagc

SEQ ID NO: 41320 - DNA, 110 bp, synthetic construct
  source 1..110: mol_type = other DNA
gtacaactgcacccctctctagttgctgtcttagcctctgattccatttagagtcaggttccttgaagtccagtccttgaagttatctctttttcctcacctaatctacc

SEQ ID NO: 41321 - DNA, 110 bp, synthetic construct
  source 1..110: mol_type = other DNA
tttaaatttatttaagaagtttaacatgatgtgaatacttgaaattcttttttttttttttaatggccacacctgtgccacataggaagttcctgggctaagggttgaat

SEQ ID NO: 41322 - DNA, 110 bp, synthetic construct
  source 1..110: mol_type = other DNA
gtacagtggcagcttaggcacatccagcatagctgcagcttagttgaaatttcgtcttggatctgatccttggcctggaagctctgtatgctgtggggtggccaaaaaga

SEQ ID NO: 41323 - DNA, 110 bp, synthetic construct
  source 1..110: mol_type = other DNA
gttactgggagccatcagtgctgggtccttcagcctttataccttgtgaaatacctctttcactaacaacaacagctgagttgatggacttggcttgaggtctgttactc

SEQ ID NO: 41324 - DNA, 110 bp, synthetic construct
  source 1..110: mol_type = other DNA
gacaggaagttcttggcataatccctgcatgctgaaggaaaattaatggctcagaagttgtgtttggtgaaagagaaggacccgggcaatgacagcagaattcatagctg

SEQ ID NO: 41325 - DNA, 110 bp, synthetic construct
  source 1..110: mol_type = other DNA
agttgtgtttggtgaaagagaaggacccgggcaatgacagcagaattcatagctggaaaacacctactggtgcctgtggagatggggtgccagttttccaaaactggtga

SEQ ID NO: 41326 - DNA, 110 bp, synthetic construct
  source 1..110: mol_type = other DNA
acagatgagggaataatgagcttaattgtcctccagcctaccccctggagacccggggaggcacagtcaaacctgttcttttgcaatatgaaaggccaatcaggtggcag

SEQ ID NO: 41327 - DNA, 110 bp, synthetic construct
  source 1..110: mol_type = other DNA
caggtgggggcagagaagtctcttaccacataagctgcatgttgatagtaaaattgcggctatggctgtcatttcacttgccagttgtttttctttcagcttctgttccc

SEQ ID NO: 41328 - DNA, 110 bp, synthetic construct
  source 1..110: mol_type = other DNA
ctttgctcaaggagaggagatgggccagtgacagctggtctagggttcttatttgcaggcttcttaaactttcttggaatgaaatgctgacttagtgttagaaatgattg

SEQ ID NO: 41329 - DNA, 110 bp, synthetic construct
  source 1..110: mol_type = other DNA
acttgtttttttgctgctgtaaacagtgaataaatcaaacccacacttcctccaagcctgctctatggcacgatgacagctcagtgtaaacgcccttcagttaatttgtt

SEQ ID NO: 41330 - DNA, 110 bp, synthetic construct
  source 1..110: mol_type = other DNA
cttccttgcgtgtactgccaccagctctcctttggccggtagaaggtagcatatgccggatggggcgtgtatctcaggcgactctgaggaatgtaagggggtgagcagca

SEQ ID NO: 41331 - DNA, 110 bp, synthetic construct
  source 1..110: mol_type = other DNA
gctctggagatctatttctgtcctgctttctcaagttcatgtgctttgtggtcaccaacaaggaaaatatctcgccaccacaaaggtaatcatataaaatctacattatc

SEQ ID NO: 41332 - DNA, 110 bp, synthetic construct
  source 1..110: mol_type = other DNA
tttagaatcaccgaaacttagagttacagaggactcgcccatcatttagtgcaggggttttcaacttcagatgcacactggaatcactgggagctttgcaaaaccctgat

SEQ ID NO: 41333 - DNA, 110 bp, synthetic construct
  source 1..110: mol_type = other DNA
ggttttcaacttcagatgcacactggaatcactgggagctttgcaaaaccctgatacctgcgtcccacccgagagattctgatgtaactggtttgggaagtgacccaagc

SEQ ID NO: 41334 - DNA, 110 bp, synthetic construct
  source 1..110: mol_type = other DNA
tgtaaccaaagatagagttatcatatgaggcagcaattcaactaggcaaatgtctgaactgaagtgaaatgtacaagataaatgaaaatatgtctatacaaaacttgtac

SEQ ID NO: 41335 - DNA, 110 bp, synthetic construct
  source 1..110: mol_type = other DNA
cccagatctaacagtgggattatgttaattatattactgagtccatgttcattctgctctcttcaagcaggccaataaattgcgagattatttgttggggcaatgaataa

SEQ ID NO: 41336 - DNA, 110 bp, synthetic construct
  source 1..110: mol_type = other DNA
gctctcttcaagcaggccaataaattgcgagattatttgttggggcaatgaataataacttttaattggaaagccagcccaggttagagagaaacagcaacatcaccagg

SEQ ID NO: 41337 - DNA, 110 bp, synthetic construct
  source 1..110: mol_type = other DNA
tgttcaaatttatttcatcagtggctttaatttgcactaaacagaaaaaccaggaatcagagcaagcatcaggtgatactaattggtcgatcagtgttaattatcaggtg

SEQ ID NO: 41338 - DNA, 110 bp, synthetic construct
  source 1..110: mol_type = other DNA
atcagagcaagcatcaggtgatactaattggtcgatcagtgttaattatcaggtgagtggccaaataataaagccattcacagacaaggacaaagtgattttaaaagtat

SEQ ID NO: 41339 - DNA, 110 bp, synthetic construct
  source 1..110: mol_type = other DNA
atcaaatgatatgcaaacatgaaggccttttagggctgaatgtgaagctggcacgactatggaagcaggaggggcagcctgaaagcatcttgggttgcagccatgactgc

SEQ ID NO: 41340 - DNA, 110 bp, synthetic construct
  source 1..110: mol_type = other DNA
gtgggagcttaatggaagcaagatggagtcaagggagaagttggctatgatgtggtcacaacacatgtgcagctgaccccacctggaaccttccacgttgtcccaaatgg

SEQ ID NO: 41341 - DNA, 110 bp, synthetic construct
  source 1..110: mol_type = other DNA
tcacaacacatgtgcagctgaccccacctggaaccttccacgttgtcccaaatggagagaagggggttgggtctttgtaaactgacctcagaaagcgctagagtctggct

SEQ ID NO: 41342 - DNA, 110 bp, synthetic construct
  source 1..110: mol_type = other DNA
ctggctggtggcctgataggacgaggctttattgattttactgaggcccttgacttgtgagatcacaggcttcttaagggcaaacttaaaaggaagcattaagatggatg

SEQ ID NO: 41343 - DNA, 110 bp, synthetic construct
  source 1..110: mol_type = other DNA
agcttccagcttgacccccatccagcgtcctctagccctcacatccaaattggaaatatgcttgctcagagtaggtccttgataaacatctgctggcatgatttagtgcc

SEQ ID NO: 41344 - DNA, 110 bp, synthetic construct
  source 1..110: mol_type = other DNA
acactttagcagctaaatgaatgcccacagatgccatgacataccataaaatgtcaaaaagtgagcagtggcccaatttctggaaatccccaccccttcccctgaaattg

SEQ ID NO: 41345 - DNA, 110 bp, synthetic construct
  source 1..110: mol_type = other DNA
atgacataccataaaatgtcaaaaagtgagcagtggcccaatttctggaaatccccaccccttcccctgaaattgttgaaataatcctcccacttgttagcctatgaaat

SEQ ID NO: 41346 - DNA, 110 bp, synthetic construct
  source 1..110: mol_type = other DNA
gtatgtgtcatgcacagtgcaggtcaagcaatttgtccacaggctgaatttattggccatcattttacaaattctttaaaacgtagaatgatggagagacacagaatttt

SEQ ID NO: 41347 - DNA, 110 bp, synthetic construct
  source 1..110: mol_type = other DNA
gccatcattttacaaattctttaaaacgtagaatgatggagagacacagaattttaaggcgagagaggcgtccaagggctaaacccaccctaactgttgatccaatcgtt

SEQ ID NO: 41348 - DNA, 110 bp, synthetic construct
  source 1..110: mol_type = other DNA
tgctttgagaaaataaaataaacacagaagactcacattgtcgtataactaatcgaagttcttagagttgacatttgtagggttttttgtttggttttgtttccacccag

SEQ ID NO: 41349 - DNA, 110 bp, synthetic construct
  source 1..110: mol_type = other DNA
ttgttggctttcttcacccatcactcagggtaatggttagttactgtcagaacacagctataattgggaaagtcactctctaaacacagaagtttgagggaggtgagaat

SEQ ID NO: 41350 - DNA, 110 bp, synthetic construct
  source 1..110: mol_type = other DNA
atataagatacaggagatatagctcttctcttagaagtttataagctcatgagggacattggcaagcaggcaaataagttaattgaatagacagaaattcacagaatgct

SEQ ID NO: 41351 - DNA, 110 bp, synthetic construct
  source 1..110: mol_type = other DNA
taataggcttcattccttcagatatctcttgttagttgagtactagacttatactgaaaggcattgatcttatggatgtgcttcttttcaaatatgaattttcaaccaga

SEQ ID NO: 41352 - DNA, 110 bp, synthetic construct
  source 1..110: mol_type = other DNA
gaaaggcattgatcttatggatgtgcttcttttcaaatatgaattttcaaccagaccaatattttttagcagtgtaggcaaaagccaattgtctacttttcacacagtaa

SEQ ID NO: 41353 - DNA, 110 bp, synthetic construct
  source 1..110: mol_type = other DNA
caatactccgagcctatggctaatacgtttatatgattgattgattgatggtaaatcctaaaagctgaactctgatattaataaatagaaggtaaagtgaaacaatgtat

SEQ ID NO: 41354 - DNA, 110 bp, synthetic construct; identical to SEQ ID NO: 41353
  source 1..110: mol_type = other DNA

SEQ ID NO: 41355 - DNA, 110 bp, synthetic construct
  source 1..110: mol_type = other DNA
caaggtcaaagatcgaacccacattctcatagagattacattgggttcttaaccagctgtgctgcaacagtaattccagaatgagtgttttagaatgtgtttgtgtgttc

SEQ ID NO: 41356 - DNA, 110 bp, synthetic construct
  source 1..110: mol_type = other DNA
attcttgcagttatgtctcctatctcttgcatcatcagttttgccctctaaaaggggtcattcctagcagcataacatgatagctctcattctaaaaatagaaacatgga

SEQ ID NO: 41357 - DNA, 110 bp, synthetic construct
  source 1..110: mol_type = other DNA
ggcttttgcccagatgtctgatttgctctcgatttctcccctgagacaattttctgcagtttgatcattgactcaccaacagctttcttggcccttttcaatgcctcctc

SEQ ID NO: 41358 - DNA, 110 bp, synthetic construct
  source 1..110: mol_type = other DNA
caagtggggctgctcttgctaggccatctgtcctggcacatgcatttgtgattcgcacaaaggtgctgcataagctagtgatggcctgcccagctttctcatttttgaaa

SEQ ID NO: 41359 - DNA, 110 bp, synthetic construct
  source 1..110: mol_type = other DNA
atatttctataaacattaaaatgactgtgctgaatgtaaaactccagtaattctaattgcctttttgaaagagctggattttcagatattgcatttatctcaggtggagt

SEQ ID NO: 41360 - DNA, 110 bp, synthetic construct
  source 1..110: mol_type = other DNA
gctgctggagctgctgatgctgcctccagaatgcattcacacatctggcatgctgcacttggcatcggcgccagctttgtgttgtgcagttatagaatctctcaccagtg

SEQ ID NO: 41361 - DNA, 110 bp, synthetic construct
  source 1..110: mol_type = other DNA
caacttcactcacagcgccaggggagaccatgggaccctagcccagctaatcagcactgctgttttctggacagaggtaatggttccaggatgagtcaaaagcaaggaca

SEQ ID NO: 41362 - DNA, 110 bp, synthetic construct
  source 1..110: mol_type = other DNA
ttctctgcaaaataaattcaatttaggactagctttattttaaagtagtagttgaaccaagtgatgtgagtttggggcctaaatgagaacttaatatctggattaatatc

SEQ ID NO: 41363 - DNA, 110 bp, synthetic construct
  source 1..110: mol_type = other DNA
ttacataacattgggtcaatatccaagttgctcccttgcattttcactgcaaccgtttcttagagtatgtgcttctcctctttcctgttagattctcatcgtagggtcat

SEQ ID NO: 41364 - DNA, 110 bp, synthetic construct
  source 1..110: mol_type = other DNA
gtaggcccttctttctttaaattccatgatctctgggtgtacctgcacctgctagttcattgtttagcatatgatcacgaaaataagatgagaattaagtccatttttaa

SEQ ID NO: 41365 - DNA, 110 bp, synthetic construct
  source 1..110: mol_type = other DNA
gggattcaaacgtggaatagataaattacttttaagatctttttcactctgtttgcattctgtcatataatttactctattataaagtgtgacaaatggtgccacaaaac

SEQ ID NO: 41366 - DNA, 110 bp, synthetic construct
  source 1..110: mol_type = other DNA
gattaaaacataggcggagccagatttcctaaggaagaagttagatttggttctaaatacagctgtcagtggtatctgggtcgagtcgttaggcaagtagtctggttccc

SEQ ID NO: 41367 - DNA, 110 bp, synthetic construct
  source 1..110: mol_type = other DNA
aatacagctgtcagtggtatctgggtcgagtcgttaggcaagtagtctggttcccaggagagagtccctctctggagatagggagctctggctggcctgcctcagagagc

SEQ ID NO: 41368 - DNA, 110 bp, synthetic construct; identical to SEQ ID NO: 41366
  source 1..110: mol_type = other DNA

SEQ ID NO: 41369 - DNA, 110 bp, synthetic construct; identical to SEQ ID NO: 41367
  source 1..110: mol_type = other DNA

SEQ ID NO: 41370 - DNA, 110 bp, synthetic construct
  source 1..110: mol_type = other DNA
cattcagccagaagatatttctttagctctacctctgtttgagaatttaggagcagttatcagatctcatttatagaatgtattcgttctgaattgagagttttatgtat

SEQ ID NO: 41371 - DNA, 110 bp, synthetic construct
  source 1..110: mol_type = other DNA
caatttcctctgtggattgtaaagggcagatggagcacaaaggcttatgctaaggtgaaaaccagtctagtactgtacatcccagaggtacgtcccagtttacctctgtg

SEQ ID NO: 41372 - DNA, 110 bp, synthetic construct
  source 1..110: mol_type = other DNA
gatgttgtgagtgttattaagggttggatgtaaaatggcaccatggtcaaatacgtttggaatattccaatttaaactttttttttttctataggacttttggaagcctt

SEQ ID NO: 41373 - DNA, 110 bp, synthetic construct
  source 1..110: mol_type = other DNA
acaaatgctgagggaggtgagggggaaagagtaagcacaagcacaaatgtgggaaagaggcgctgtgtttgggaaatggtgcagatgcagagggcaggtgtctgaggagg

SEQ ID NO: 41374 - DNA, 110 bp, synthetic construct
  source 1..110: mol_type = other DNA
aaaagaggagtgagagtgtggctatgatctggggtgcagggaggtgaagaaatgaagtcttttgagttaagcctttggatccatttgtttttactctgaaacaaatcacc

SEQ ID NO: 41375 - DNA, 110 bp, synthetic construct
  source 1..110: mol_type = other DNA
tccagacagggtgccattgggtctgcttgcagtggccataacaaacatgcaattctttggacgataggcaaagttacctgcaatggctgaccagtgttctgactcaagct

SEQ ID NO: 41376 - DNA, 110 bp, synthetic construct
  source 1..110: mol_type = other DNA
gaaaaataaaaagcactaaatgcaaaagtgctaatgcttcttatgaacggtgggttatacatgtctctaagagcttccactgcgtcatggtgcatgttgagtcaagtgtt

SEQ ID NO: 41377 - DNA, 110 bp, synthetic construct
  source 1..110: mol_type = other DNA
tatacatgtctctaagagcttccactgcgtcatggtgcatgttgagtcaagtgttttaatcaactcttattaagggagagagtcccatcctagaattggggcatggctga

SEQ ID NO: 41378 - DNA, 110 bp, synthetic construct
  source 1..110: mol_type = other DNA
ggagtattttctaaagcttttcactagagctaaggtgactgcaggaggatgtgcaggaagccatcctactgccacatggagaacacctgcttgcataatgaagtagagac

SEQ ID NO: 41379 - DNA, 110 bp, synthetic construct
  source 1..110: mol_type = other DNA
gggcacagggtgcatgtatgttcaataaaatctctttacacttttataggatttttggatgaatacatagtcacataagaattacataagaatctattcttaatactgtg

SEQ ID NO: 41380 - DNA, 110 bp, synthetic construct
  source 1..110: mol_type = other DNA
taagaaatattttttcaagttctgtaatggttcagctcataaatttcaacagcaagagtggaagcattatccccaaggaggtgagaattggtttgggggaaggagaaaaa

SEQ ID NO: 41381 - DNA, 110 bp, synthetic construct
  source 1..110: mol_type = other DNA
ccttgactgggtattagatgataggattagctaattctgtcatgtatcataatgacatggtggtggtattttttaagatatacttaaggtgtagaaatacaaattttctg

SEQ ID NO: 41382 - DNA, 110 bp, synthetic construct
  source 1..110: mol_type = other DNA
aagacctttctccatcctcattagctggaacccgatgagcactgcttcatgaccctagtaacaaactgagtttcttctatcctttcccatctactgaaaaactataagta

SEQ ID NO: 41383 - DNA, 110 bp, synthetic construct
  source 1..110: mol_type = other DNA
cttaaccaagatcaccattcagaggcactgaacttaaatataattctatgtgatttccaaggctggctctcctggcgcagagtagagagacagaggtcagggtgagagag

SEQ ID NO: 41384 - DNA, 110 bp, synthetic construct; identical to SEQ ID NO: 41383
  source 1..110: mol_type = other DNA

SEQ ID NO: 41385 - DNA, 110 bp, synthetic construct
  source 1..110: mol_type = other DNA
tgaaagaactgtcggtcttaatggccacccagatagagaatgcacttcctagccgcttttgcagataattttgaccatgtgtttatgttagggctaattgaatatgaaca

SEQ ID NO: 41386 - DNA, 110 bp, synthetic construct
  source 1..110: mol_type = other DNA
gagaatacagagaattctcccccaaccagccaaacaaagggagtgactacagaaaggcatctgccccagcagctacagagagaaaccctgagagcctccccaacagaggg

SEQ ID NO: 41387 - DNA, 110 bp, synthetic construct
  source 1..110: mol_type = other DNA
ggcatctgccccagcagctacagagagaaaccctgagagcctccccaacagagggactgctggagcagctgctgtggttaccaaccgcaggaagttgtcctgagaactac

SEQ ID NO: 41388 - DNA, 110 bp, synthetic construct
  source 1..110: mol_type = other DNA
cacaaatatcactgtatcatgaaatcatcagcagataattcttaaaagaatgattctagctgtgttcagagagcatataacacacgtgtttggcagaatctggccaatgg

SEQ ID NO: 41389 - DNA, 110 bp, synthetic construct; identical to SEQ ID NO: 41388
  source 1..110: mol_type = other DNA

SEQ ID NO: 41390 - DNA, 110 bp, synthetic construct
  source 1..110: mol_type = other DNA
aaatgcatcaagcaataggagagcttatgagtaaaataagtgataattaccaatttctcatgtgttcatgtgacacaagagacaacagattcagatataggaatgtgaac

SEQ ID NO: 41391 - DNA, 110 bp, synthetic construct
  source 1..110: mol_type = other DNA
ggttgttcatgatttccttctccaccaggcccagctcccttttcaggatggcgtgattcatgttgatgggcttctccacatagtcattatgcttcctcaggttttcatca

SEQ ID NO: 41392 - DNA, 110 bp, synthetic construct
  source 1..110: mol_type = other DNA
aaagatacctctgaaaagaccaagatatcagtagtgaaaataaacaaagaatgaaattaggaactaggggggagaagttcatctcccagaaagactaggacacaaaccat

SEQ ID NO: 41393 - DNA, 110 bp, synthetic construct
  source 1..110: mol_type = other DNA
cccagcaccaattattgaacaagctgtccttctattgcatactctttcctccttagtcatagattagttggccttaggtgaatgggattgattctgggctttctatcttg

SEQ ID NO: 41394 - DNA, 110 bp, synthetic construct; identical to SEQ ID NO: 41393
  source 1..110: mol_type = other DNA

SEQ ID NO: 41395 - DNA, 110 bp, synthetic construct
  source 1..110: mol_type = other DNA
tcaagagtccctacaacctccttgaaaaggttcacgatttctctgacacattcgaacagttcagtcagagcaggaaaattttcccagctaattattaatatattgtttga

SEQ ID NO: 41396 - DNA, 110 bp, synthetic construct
  source 1..110: mol_type = other DNA
acaaagtactttatttcaaaagtcagctgcaatggctaaaaaacctgaaagtatacagagggaacaacacttcccctgattcactttgttcctaaattacagcagcaatc

SEQ ID NO: 41397 - DNA, 110 bp, synthetic construct
  source 1..110: mol_type = other DNA
ttagactcaaaaatactcaaaagattatagagagtttgtatcatttccattataaccatgatggaggccagagtagtcttaggagccttttgtcttcctgatgagtcctt

SEQ ID NO: 41398 - DNA, 110 bp, synthetic construct; identical to SEQ ID NO: 41397
  source 1..110: mol_type = other DNA

SEQ ID NO: 41399 - DNA, 110 bp, synthetic construct
  source 1..110: mol_type = other DNA
attatagcttagataatagcatatggtaattatttaagtatctttctttcccactacattatgagttgtgcaagtacagacactgtgtcattaacttttaaaagtacccc

SEQ ID NO: 41400 - DNA, 110 bp, synthetic construct
  source 1..110: mol_type = other DNA
gaagtaagagtcttaactaaagaaacaacaccccccacccctgcccctggggctgaggacgcagctatgagcgttgccctgaatgtgtcagcagctttgctcaccacata

SEQ ID NO: 41401 - DNA, 110 bp, synthetic construct
  source 1..110: mol_type = other DNA
actaaagaaacaacaccccccacccctgcccctggggctgaggacgcagctatgagcgttgccctgaatgtgtcagcagctttgctcaccacataccacccttcttgtaa

SEQ ID NO: 41402 - DNA, 110 bp, synthetic construct
  source 1..110: mol_type = other DNA
actttgtatatcatgtggttagtgtgttttgttaatcatagatagtaacaagagttcaagtgggccctgagagccttaacaagagctacataggtttgagtctgcatagg

SEQ ID NO: 41403 - DNA, 110 bp, synthetic construct
  source 1..110: mol_type = other DNA
tttactatttaacaggtcgcatatcctggagcaggaaaacttccacacatcattggaggatcagatctgatagcttatcatgctcgaaagaatacagaattagaagactg

SEQ ID NO: 41404 - DNA, 110 bp, synthetic construct
  source 1..110: mol_type = other DNA
aacttatcagacttttttttttaaggaaaaaaaaatgtttaagatgtgtgcgggggtctagagggaccttcacaacactacacacaaactttgcagtacttagaagtctc

SEQ ID NO: 41405 - DNA, 110 bp, synthetic construct
  source 1..110: mol_type = other DNA
gtctagagggaccttcacaacactacacacaaactttgcagtacttagaagtctcagtcgcagtaaccgactcgacccaggcctagccggtcccgcagtcccatgactgg

SEQ ID NO: 41406 - DNA, 110 bp, synthetic construct
  source 1..110: mol_type = other DNA
gggaactcctagaaccttaattattttagacttacattctaattcaaccacttaattagctgggtgaccttgagcacattttctaatttctctgtgcctcagattaccca

SEQ ID NO: 41407 - DNA, 110 bp, synthetic construct
  source 1..110: mol_type = other DNA
accaatgcaaaacaataagtaaaataatctcttaagctgggatgagttttttttccatcacttagagagaaaagaccttgtgttttacagggtattggatagaatcctca

SEQ ID NO: 41408 - DNA, 110 bp, synthetic construct
  source 1..110: mol_type = other DNA
acttcagaattttaattatggacattatgcaagataatgtttgtaaagcagttggtatggcctggctgcagttaataaactttagttaataatgttagctgacacctaac

SEQ ID NO: 41409 - DNA, 110 bp, synthetic construct
  source 1..110: mol_type = other DNA
taatttacttctccttctctcttcttttttggccttcccacagcatatggagttctgggccaggcatcagatctgagctgcagttgcaactggatccctaacccactgtg

SEQ ID NO: 41410 - DNA, 110 bp, synthetic construct
  source 1..110: mol_type = other DNA
tgggccaggcatcagatctgagctgcagttgcaactggatccctaacccactgtgccagggtagggattaaatcttcatcctagcactccctaatacactgctgatccct

SEQ ID NO: 41411 - DNA, 110 bp, synthetic construct
  source 1..110: mol_type = other DNA
tgggattgcttatatcatgaaagaatactttctgccatcttgatgtggtttcctctttgtctgtagttgtaggataacttttttgtagcttccagtctattttgttcatg

SEQ ID NO: 41412 - DNA, 110 bp, synthetic construct
  source 1..110: mol_type = other DNA
acccagatcccaacccctctttctccccactcatacatagtgccagacctgacatcctgcctccaaaatcacctctcaaccagctcctttagtcccttcaggggaagttg

SEQ ID NO: 41413 - DNA, 110 bp, synthetic construct
  source 1..110: mol_type = other DNA
taagtaaacacaggctgagtcttggctgagttttgaaggccttttttttgtgtgtgttgactaacaaacacattacaaatggataagactttcataattcattattgcct

SEQ ID NO: 41414 - DNA, 110 bp, synthetic construct
  source 1..110: mol_type = other DNA
aagcttgtggagagtatgaaagtctcgctacttcaggttttgaataggagagtgacatgaaggaaaaggaaaagaacagctgcagagaagagtcagcaaaagaataggca

SEQ ID NO: 41415 - DNA, 110 bp, synthetic construct
  source 1..110: mol_type = other DNA
catgaaggaaaaggaaaagaacagctgcagagaagagtcagcaaaagaataggcagactagattaataaatatttccattaatttcccctggtgttcttctctaaaactc

SEQ ID NO: 41416 - DNA, 110 bp, synthetic construct; identical to SEQ ID NO: 41414
  source 1..110: mol_type = other DNA

SEQ ID NO: 41417 - DNA, 110 bp, synthetic construct; identical to SEQ ID NO: 41415
  source 1..110: mol_type = other DNA

SEQ ID NO: 41418 - DNA, 110 bp, synthetic construct
  source 1..110: mol_type = other DNA
agtaaatgttctgcatggattgttcacttgtagatgaatttttaatgtttttgtggaagagagctcagcatactattcctctaccatcttctctatttcttctatggcca

SEQ ID NO: 41419 - DNA, 110 bp, synthetic construct
  source 1..110: mol_type = other DNA
gtctgttcagatattctgcccttttttttgtgaggatgtttggggttttttttgttgttgttattgagctgcaggtggtctttatagattttggagattaatcccttgtt

SEQ ID NO: 41420 - DNA, 110 bp, synthetic construct; identical to SEQ ID NO: 41419
  source 1..110: mol_type = other DNA

SEQ ID NO: 41421 - DNA, 110 bp, synthetic construct
  source 1..110: mol_type = other DNA
tagatttgtgagattgacactctaatgaaataattgagctagagacaaattcatgataatgtgcctttaacagatctaactcaatttaccatggggttatgttccaatac

SEQ ID NO: 41422 - DNA, 110 bp, synthetic construct
  source 1..110: mol_type = other DNA
ttgaggctcaaaatgaataccaataagctgctattttggaagaaaaaatacaataaaaacaaaaacataaactgcttcatgttggagaatgtatctgtggagactaaatc

SEQ ID NO: 41423 - DNA, 110 bp, synthetic construct
  source 1..110: mol_type = other DNA
cagctaccttggtgtggaatagtgccactggggccactagcaggagctgaagagcctgtgcttttatctacccaggataaaagcagcccttttgtgactcttttggcaca

SEQ ID NO: 41424 - DNA, 110 bp, synthetic construct
  source 1..110: mol_type = other DNA
atgctgcttaaagaagactggtggtgtggtaaggaaacaagggctgtcaggaagcagggatggctctagaaggggtgagcagctggccttctttttaagttttctgttca

SEQ ID NO: 41425 - DNA, 110 bp, synthetic construct
  source 1..110: mol_type = other DNA
ttttaaccatcatgagtagtatttagattgcttttaccatgtaataaagagtgaaatgtgtctccatttttgaacttcttgatgccagctcctgctgtgatcagggaaat

SEQ ID NO: 41426 - DNA, 110 bp, synthetic construct
  source 1..110: mol_type = other DNA
atgtgtctccatttttgaacttcttgatgccagctcctgctgtgatcagggaaatagttcaaaatccatgtggaaaacacacccactatcatagctctaaaggcctactc

SEQ ID NO: 41427 - DNA, 110 bp, synthetic construct
  source 1..110: mol_type = other DNA
tttcccttcagtcctgaccatctgccgcttcaatcccaatgctaggctcccactttgagagcttgctagcatttctaatgcccacagcttcatttctttgctgtgccact

SEQ ID NO: 41428 - DNA, 110 bp, synthetic construct
  source 1..110: mol_type = other DNA
agaactaccatgtgattcagcagttacactgctggatatatatctaaagaaaacaaaaacactaatttgaaaagatgcatgtacccaattcatagcagctttattcacaa

SEQ ID NO: 41429 - DNA, 110 bp, synthetic construct
  source 1..110: mol_type = other DNA
aaaacactaatttgaaaagatgcatgtacccaattcatagcagctttattcacaatagccaaactatggaagcaacctaagtgcccatcaagagatgaatggatgaagaa

SEQ ID NO: 41430 - DNA, 110 bp, synthetic construct
  source 1..110: mol_type = other DNA
ttctaatagtcttaacctactttcagtcattaattgatgagtatataaaaaagtagaatgctattaactctgattcttctgcttgcatcaccatataaagaaatgggtca

SEQ ID NO: 41431 - DNA, 110 bp, synthetic construct
  source 1..110: mol_type = other DNA
ttgggtagtttactataagaaactttgtagtcattgttggcaagttgtttagccgtttctttgacgggtttgatgtagggcagtgataaaggcactagcttaggtttgaa

SEQ ID NO: 41432 - DNA, 110 bp, synthetic construct
  source 1..110: mol_type = other DNA
aacactggtgtaccacaaatgggtttcaagcgtgccaagatattgatttcctcaacactcagggtgacctgaagctgatagaacctttaaactcttcaccattttcttct

SEQ ID NO: 41433 - DNA, 110 bp, synthetic construct
  source 1..110: mol_type = other DNA
tttccctctgctggtttccctggtaactaatgaggcagctttatgtaactctttctataactggcaatctctccttctccctaggagcaaagactttcaccgtgacctgc

SEQ ID NO: 41434 - DNA, 110 bp, synthetic construct
  source 1..110: mol_type = other DNA
caaggaatatctcatcattgttgttcccaaaggcttttagttgaaaaatttttgttgttgttgttcattatataggccattattaaattgccctgcctagaatttagtaa

SEQ ID NO: 41435 - DNA, 110 bp, synthetic construct
  source 1..110: mol_type = other DNA
ccacagatggttctggatatgattaatctctggggtacaactaacttattcctggaattaatgttgaacttctggagataacaaatctagcagtgtttataaaattggat

SEQ ID NO: 41436 - DNA, 110 bp, synthetic construct
  source 1..110: mol_type = other DNA
ctaatctaactcacgtcttaaatctcttcatataataatgctattgcggatatgttgtttaagagtaagagcttagatcttggcgataaattagcctaggaggattaatg

SEQ ID NO: 41437 - DNA, 110 bp, synthetic construct
  source 1..110: mol_type = other DNA
gagcatttctccaatttcacaaatacgagattggaaaaaagttacattaattattgatagaggaaacccagagatatatgagtggaagaaatttaaattttgaacatgcc

SEQ ID NO: 41438 - DNA, 110 bp, synthetic construct
  source 1..110: mol_type = other DNA
gatcaagttctacccacaatccaattacataagctcaggaagtgcaggggtggtggtcaaggcacatggaaatctgtttggccatggctactcagtctggatagtgtatt

SEQ ID NO: 41439 - DNA, 110 bp, synthetic construct
  source 1..110: mol_type = other DNA
caaatagcctgataatagatgaactgctgagcccattaagggagaatgtgattctatgatgaaagaattataagatatagctggtttttcagtagttttggaggagctta

SEQ ID NO: 41440 - DNA, 110 bp, synthetic construct
  source 1..110: mol_type = other DNA
ttttagtatgtcagtggaaatttgaaagacagaggctagactcatgggctgaagaagtcgctctcagtgagctattaaaaacaaaaataacaagataaacagaaaaacat

SEQ ID NO: 41441 - DNA, 110 bp, synthetic construct
  source 1..110: mol_type = other DNA
acagaggactccagctaaggtcaacaaaggcaacattctgtcttcttcagcttccatactataaacaagtgtccttttcagggtctatttagtacccctttttttcacat

SEQ ID NO: 41442 - DNA, 110 bp, synthetic construct
  source 1..110: mol_type = other DNA
gaaagggagggattctcccttgatgtctttgaagatttaagcttccatgttgtgagaaggtttgaaagacaatgatgcagcaaaaggacctttgggtcctcaggtgctga

SEQ ID NO: 41443 - DNA, 110 bp, synthetic construct
  source 1..110: mol_type = other DNA
ctattaataatcactttaatagtcaatgaactaaagaatccagtcaaaagacctccagtcaaaagacctaggctggttgactagatgaaaaagcaagacttacccatatg

SEQ ID NO: 41444 - DNA, 110 bp, synthetic construct
  source 1..110: mol_type = other DNA
cagtcaaaagacctaggctggttgactagatgaaaaagcaagacttacccatatgctgtttacaagaaactcacttcagagctaaagacacacccagaattaaagttagg

SEQ ID NO: 41445 - DNA, 110 bp, synthetic construct
  source 1..110: mol_type = other DNA
agctaatacatttttctcttagagaacaaatagctaacagcaattactacttgaaaagcaaggtgctataactttccaagcattattgtattaaattctcacaatttgct

SEQ ID NO: 41446 - DNA, 110 bp, synthetic construct
  source 1..110: mol_type = other DNA
gttttggccaccccagggcataaggagttcctgggccagggatcagatctgccattgtaacctctgtggcaatgcctgattctttaacctgctaggctgagccaggaatt

SEQ ID NO: 41447 - DNA, 110 bp, synthetic construct
  source 1..110: mol_type = other DNA
ttcatacaatctctttcccctctttcaatattaaatggtagttctactttgggttatcagtaagagaggaacagtttagacagaaagtttttaaggttagaaaatattcc

SEQ ID NO: 41448 - DNA, 110 bp, synthetic construct
  source 1..110: mol_type = other DNA
atcagtaagagaggaacagtttagacagaaagtttttaaggttagaaaatattccctctcctgtcactctccaaattgtaccaaaatcttgtaaaaagtgacttggaagt

SEQ ID NO: 41449 - DNA, 110 bp, synthetic construct
  source 1..110: mol_type = other DNA
aatccttaattgtgtggcttgagtttagtggctgaaatattggtcccggcactggagatattgtgggggaggggaagggatgaagcttagaaatggccgagggaattgtt

SEQ ID NO: 41450 - DNA, 110 bp, synthetic construct
  source 1..110: mol_type = other DNA
tgcaaattctttcttcccttagcttagagttctcaggaaacattgactattttctctcactggtcataaataaagatattgggagttcccattgtggctcaaagggttaa

SEQ ID NO: 41451 - DNA, 110 bp, synthetic construct
  source 1..110: mol_type = other DNA
ttgccttaactctggctttaactggtcagaacaaaaaataagtgacctcagggacctcagctctacttgagaaaccttcaaattcatcttcacgtttgttgttttggttt

SEQ ID NO: 41452 - DNA, 110 bp, synthetic construct
  source 1..110: mol_type = other DNA
atcatcaggaagttgtcctgctgtgctagcagcatctcttacctcaataaacaatttctcttcacttttctatgctagaaagttcttttttttaatctgtgtacatagac

SEQ ID NO: 41453 - DNA, 110 bp, synthetic construct
  source 1..110: mol_type = other DNA
ttctcttcacttttctatgctagaaagttcttttttttaatctgtgtacatagaccatgacactttatacattcatgtcctcattttacagatgagaaaacctagtctct

SEQ ID NO: 41454 - DNA, 110 bp, synthetic construct
  source 1..110: mol_type = other DNA
tctgaggatctcagagacaatttgaaataaagctagatttacctccacataaatgtttatcagccaattatcatgtcttccaacatccatgcaatgtacagcatagatac

SEQ ID NO: 41455 - DNA, 110 bp, synthetic construct
  source 1..110: mol_type = other DNA
atgctctttctgcattgtgggtttattgtggactttatttggttgcgggacaggagtttagacagctttatacattcaatgaacatattacttctacttaagaatgaatt

SEQ ID NO: 41456 - DNA, 110 bp, synthetic construct
  source 1..110: mol_type = other DNA
gtgcttttctgcgtgtcatgttaagtttctaagacttttataagtataagctcgtttactatataatgatataactttatttctatttcacaggtacagagactgaagca

SEQ ID NO: 41457 - DNA, 110 bp, synthetic construct
  source 1..110: mol_type = other DNA
cagtttacacagattgtgagttttcctcatgtacaaaatagggctaatatctaacttacagttgtaagttagcttcattgtagtaaccagtgttggaaagaaagaaaact

SEQ ID NO: 41458 - DNA, 110 bp, synthetic construct
  source 1..110: mol_type = other DNA
ttacagttgtaagttagcttcattgtagtaaccagtgttggaaagaaagaaaacttccttctacttagatttttctggctgatctaagaattaaattaacatgagacaga

SEQ ID NO: 41459 - DNA, 110 bp, synthetic construct; identical to SEQ ID NO: 41457
  source 1..110: mol_type = other DNA

SEQ ID NO: 41460 - DNA, 110 bp, synthetic construct; identical to SEQ ID NO: 41458
  source 1..110: mol_type = other DNA

SEQ ID NO: 41461 - DNA, 110 bp, synthetic construct
  source 1..110: mol_type = other DNA
tttatctcattatatagatttgtactcatcctactttctcactgtttaaaaatggcatttcagtgaacaattgtgagtgctcattatcccacgtgctatgaacaacatca

SEQ ID NO: 41462 - DNA, 110 bp, synthetic construct
  source 1..110: mol_type = other DNA
gtcttggcagagccagggtcataagatgctgtccagggcagcagagaagggtcatgcttgatgtccttagtgtgcagttcaatgggcgattggttgtctcccttggcaat

SEQ ID NO: 41463 - DNA, 110 bp, synthetic construct
  source 1..110: mol_type = other DNA
ttgtagttacctaaagttcagtgtacttgggatggggtaaagtttgagaaatgggtggtaagaaagagctgctttgggagttttgttgtgatgccacagaaacaaatctg

SEQ ID NO: 41464 - DNA, 110 bp, synthetic construct
  source 1..110: mol_type = other DNA
cttgggatggggtaaagtttgagaaatgggtggtaagaaagagctgctttgggagttttgttgtgatgccacagaaacaaatctgaatagtatccatgaggatgcaggtt

SEQ ID NO: 41465 - DNA, 110 bp, synthetic construct
  source 1..110: mol_type = other DNA
tatgtttctgtttagatattttattttgatgtatcttctggctcaccaattacgtattgtcaaatgctgctagaggagaggtgaggctaaatgtcaggttcacctctcca

SEQ ID NO: 41466 - DNA, 110 bp, synthetic construct
  source 1..110: mol_type = other DNA
aatcctggccctcttccctctgctggatgctaatccttgagcaagttactttacatgagacttggtgttctggtatttaaagcggggtagtaacaatacctaggtcatag

SEQ ID NO: 41467 - DNA, 110 bp, synthetic construct
  source 1..110: mol_type = other DNA
tgagacttggtgttctggtatttaaagcggggtagtaacaatacctaggtcatagagatcttataaaacacttagcacaggatttggaaaacagtaagctcaaaataaac

SEQ ID NO: 41468 - DNA, 110 bp, synthetic construct
  source 1..110: mol_type = other DNA
agtcagtatcattacaggttttctatgtatcaatcaatttatttgtaaataagaatcgttttcattcctttctgtcatggctatgacctccagtgtaattctgaatatga

SEQ ID NO: 41469 - DNA, 110 bp, synthetic construct
  source 1..110: mol_type = other DNA
aaatagggacatgattttctttttttatcagtccggcaccatccctatccttaaccccagctatatggttgtgtgatttgaggtaagtttgtggataaatggatacattc

SEQ ID NO: 41470 - DNA, 110 bp, synthetic construct
  source 1..110: mol_type = other DNA
cagtctatagtcaatatccttctcaatctgaagacttcccaggatgagcttaatcacctccaaagttttagcactacgttgatgactcccaaatttattacttttagtgc

SEQ ID NO: 41471 - DNA, 110 bp, synthetic construct
  source 1..110: mol_type = other DNA
gtgtgtgtgtgtgtgtgtgtgtgtgtgtgtgtgtgtgtctttttgggacacacccgtggcatatgagggttctaaagctagaagttgaataggagctgtagctgctggcc

SEQ ID NO: 41472 - DNA, 110 bp, synthetic construct; identical to SEQ ID NO: 41471
  source 1..110: mol_type = other DNA

SEQ ID NO: 41473 - DNA, 110 bp, synthetic construct
  source 1..110: mol_type = other DNA
ataaatgccttctcagattaatagctgaggcaaaaccaaggtggttaatgaatttcaaagcctatttgctccaaggcaatagtgattattgttcttttacagtcaaccat

SEQ ID NO: 41474 - DNA, 110 bp, synthetic construct
  source 1..110: mol_type = other DNA
ggtgttaaaaatcacccctttgacactcatcttctcctcatgacacttctcaatttcccaactatcagtagtatctgcctcagctacacacctcccaaaactctaaaatt

SEQ ID NO: 41475 - DNA, 110 bp, synthetic construct
  source 1..110: mol_type = other DNA
tcgagaagattttatgagtctatctccttatatatagaaaagcactaaaattcttcatgatgacctcagcttctcaggctagtagtaactgttggacctcaaggcccctt

SEQ ID NO: 41476 - DNA, 110 bp, synthetic construct
  source 1..110: mol_type = other DNA
ccttatatatagaaaagcactaaaattcttcatgatgacctcagcttctcaggctagtagtaactgttggacctcaaggccccttcaaggagattgaactcaaagcctct

SEQ ID NO: 41477 - DNA, 110 bp, synthetic construct
  source 1..110: mol_type = other DNA
agaagagaaaaaatgtagatatttcagcacatttttgaacttaaaatactaccaccttaaaataggcagatatagctataggtgagtgtatatgaaccccatggtaacca

SEQ ID NO: 41478 - DNA, 110 bp, synthetic construct
  source 1..110: mol_type = other DNA
cttaaaataggcagatatagctataggtgagtgtatatgaaccccatggtaaccacaagttgaaaacctacaaaaggagttcctgttgtggcagagttcccattgtgtct

SEQ ID NO: 41479 - DNA, 110 bp, synthetic construct
  source 1..110: mol_type = other DNA
ttctttaaccactgagccacgacgggaactccataaaacacttttgattaaaccccattagttagaagttagtcctgtggctgggacttaactgaagccaaagctgggga

SEQ ID NO: 41480 - DNA, 110 bp, synthetic construct
  source 1..110: mol_type = other DNA
cattagttagaagttagtcctgtggctgggacttaactgaagccaaagctggggaatgtagtcttgatcccactaaaagttgaaaaatatcttgagacttgattgaccct

SEQ ID NO: 41481 - DNA, 110 bp, synthetic construct; identical to SEQ ID NO: 41479
  source 1..110: mol_type = other DNA

SEQ ID NO: 41482 - DNA, 110 bp, synthetic construct; identical to SEQ ID NO: 41480
  source 1..110: mol_type = other DNA

SEQ ID NO: 41483 - DNA, 110 bp, synthetic construct
  source 1..110: mol_type = other DNA
ctttagttcaaggtttctgagaaggttatttccctggctggatgtggtcaaggcacaagtgaaccaaactgcccttttcaaccattctttaaccatgagaagatccagac

SEQ ID NO: 41484 - DNA, 110 bp, synthetic construct
  source 1..110: mol_type = other DNA
caagtgaaccaaactgcccttttcaaccattctttaaccatgagaagatccagacttaggttaaaatctgtactaggcatgaaaaatagaaaaacatgggctgttgataa

SEQ ID NO: 41485 - DNA, 110 bp, synthetic construct
  source 1..110: mol_type = other DNA
ctatacatccctgaaatacccctttaaaaaattttgcccccagtcagcaagggggagtttgttctttgggacatgaatccaccttctctccaggatttctgtcttcctca

SEQ ID NO: 41486 - DNA, 110 bp, synthetic construct
  source 1..110: mol_type = other DNA
agtttgttctttgggacatgaatccaccttctctccaggatttctgtcttcctcaacaaagttatctttccttttatttaatatctgtctttcagtattcaattcttgaa

SEQ ID NO: 41487 - DNA, 110 bp, synthetic construct
  source 1..110: mol_type = other DNA
gatgtaggcaagtagaattagacactttaactagaactcagggggagtgagcaggtacccacttggaaatggaagccttccctctagctgccataaaagaaaaaggacag

SEQ ID NO: 41488 - DNA, 110 bp, synthetic construct
  source 1..110: mol_type = other DNA
ggtacagggtgccctggagtatatatcatttttgccagctgaagtgctatttcgttctaaaatctggagagtctgggctgctagaccaatatgattcactgattttcaat

SEQ ID NO: 41489 - DNA, 110 bp, synthetic construct
  source 1..110: mol_type = other DNA
aactctacagacctcttttagaattctgaattatcgctcataatattttctattgtaaaatacaatatttcgttgttcaggaactaatggagaatctctcattgtgctga

SEQ ID NO: 41490 - DNA, 110 bp, synthetic construct; identical to SEQ ID NO: 41489
  source 1..110: mol_type = other DNA

SEQ ID NO: 41491 - DNA, 110 bp, synthetic construct
  source 1..110: mol_type = other DNA
gcttgtatcactgcctaatggtagaattttttctctaccagtcttcagaggattggaagcatttcagtctgttttatgttctatccttgaatagttagtgtcagggttag

SEQ ID NO: 41492 - DNA, 110 bp, synthetic construct
  source 1..110: mol_type = other DNA
gaagcatttcagtctgttttatgttctatccttgaatagttagtgtcagggttagagcaagtgatttaatgagattgctgaccatttctgacttttggccatgtagtgtt

SEQ ID NO: 41493 - DNA, 110 bp, synthetic construct
  source 1..110: mol_type = other DNA
aagggttcctcccaataagatgacaccacccaagctgaacaacttagcctgggatagagtatatctaaccattttttcaagtatggcatggagaaataagatgagggtga

SEQ ID NO: 41494 - DNA, 110 bp, synthetic construct
  source 1..110: mol_type = other DNA
caacttgggcaaccacaaatctgttctatgagtttggtactgtttatatgttagtttggattccaaatataagtgagatcatatggtaattatctttctctgaattattt

SEQ ID NO: 41495 - DNA, 110 bp, synthetic construct
  source 1..110: mol_type = other DNA
aatcaatcaatcaactggatttaaatccaaggtatatgaacttggacaagaataagaccctttcagaaaagagcctgaaggtctgagcctcaggttatgtttctactcag

SEQ ID NO: 41496 - DNA, 110 bp, synthetic construct
  source 1..110: mol_type = other DNA
gaccctttcagaaaagagcctgaaggtctgagcctcaggttatgtttctactcagtagagacaataatcctagtaccaccctatctcactgggttgtaaagatcaaaatc

SEQ ID NO: 41497 - DNA, 110 bp, synthetic construct
  source 1..110: mol_type = other DNA
cacagattcataacagagcatttctctccaactagtagatactatagccttgaccaagggtcaccattgtgcttcaggcgtatctggagacagcatgtgatcagtccaga

SEQ ID NO: 41498 - DNA, 110 bp, synthetic construct
  source 1..110: mol_type = other DNA
aagggtcaccattgtgcttcaggcgtatctggagacagcatgtgatcagtccagagtagctgaaattaatccatgttgttcaaattattttaactgataagcacaggtac

SEQ ID NO: 41499 - DNA, 110 bp, synthetic construct
  source 1..110: mol_type = other DNA
attacacactcaacattatttgagaacaatgaatatcaaatctgcaaaataactgagtaaaagggaaaaaaaataaaacctattagtttggcccaacaaataccagctcc

SEQ ID NO: 41500 - DNA, 110 bp, synthetic construct
  source 1..110: mol_type = other DNA
agtaaaagggaaaaaaaataaaacctattagtttggcccaacaaataccagctcccacttgcctccctttagctttgaagtgggcaaatactgactgagaaatattgcaa

SEQ ID NO: 41501 - DNA, 110 bp, synthetic construct
  source 1..110: mol_type = other DNA
cctcatttgaattttccatacagtcagtcaatctcatcaacaagaggatgaaacaaaggtctaaaaatttcatccaaataaagttcacctcagattacctctatttattc

SEQ ID NO: 41502 - DNA, 110 bp, synthetic construct
  source 1..110: mol_type = other DNA
ccatacagtcagtcaatctcatcaacaagaggatgaaacaaaggtctaaaaatttcatccaaataaagttcacctcagattacctctatttattcaaaagaaatttatga

SEQ ID NO: 41503 - DNA, 110 bp, synthetic construct
  source 1..110: mol_type = other DNA
tactaatgaagtgttcctgataaactggcataattgagtcaactggtataagtaacaagagaatagagataacagcattaaagtggcactaaacattgtagttgtgttta

SEQ ID NO: 41504 - DNA, 110 bp, synthetic construct
  source 1..110: mol_type = other DNA
caagagaatagagataacagcattaaagtggcactaaacattgtagttgtgtttattactcttaaggattctaacaagtagaaactgttatcaccacttccccattttag

SEQ ID NO: 41505 - DNA, 110 bp, synthetic construct
  source 1..110: mol_type = other DNA
gggaatcaagagtgtaggcaaagaatatgactttgcaattaaaatcatccaggtctgaattataacccaccacccattagctatgcaaccctagtctaagtatttaagca

SEQ ID NO: 41506 - DNA, 110 bp, synthetic construct
  source 1..110: mol_type = other DNA
tgaattataacccaccacccattagctatgcaaccctagtctaagtatttaagcactcaactttaaaatcggtattataacacctaactgaattgttaatgagtaaatga

SEQ ID NO: 41507 - DNA, 110 bp, synthetic construct
  source 1..110: mol_type = other DNA
tgttttagattccacatataggtgatatcctgtggcatattgaaatacctgggctaggggttgaattggagctccatctgccagtctacattgcagccatagcaatgtga

SEQ ID NO: 41508 - DNA, 110 bp, synthetic construct
  source 1..110: mol_type = other DNA
atataggtgatatcctgtggcatattgaaatacctgggctaggggttgaattggagctccatctgccagtctacattgcagccatagcaatgtgagatctgagccacatc

SEQ ID NO: 41509 - DNA, 110 bp, synthetic construct
  source 1..110: mol_type = other DNA
tttactaattagaactatgatggcaatggactgtatcagtttagctaagcaaactgatttcctacaagccccttcatgtatggctccaactggtattggccacaatagaa

SEQ ID NO: 41510 - DNA, 110 bp, synthetic construct
  source 1..110: mol_type = other DNA
taatatgcaaacttgaaactcaagggtaagattttggttgaaagaagtaaaatcaagagtaattagctcagagttcctgttatggctcagcgggttaaaaatttgattag

SEQ ID NO: 41511 - DNA, 110 bp, synthetic construct
  source 1..110: mol_type = other DNA
ggttgaaagaagtaaaatcaagagtaattagctcagagttcctgttatggctcagcgggttaaaaatttgattagtatccacgaggatgctggttcaatccttggccttg

SEQ ID NO: 41512 - DNA, 110 bp, synthetic construct
  source 1..110: mol_type = other DNA
ggtacagtgtttatgactacaggtgacagaaaattgaggaagatatgaaagcccgtaaacaatgacaagtaagtctgcttttgctatattgagactgccaacaaaaacat

SEQ ID NO: 41513 - DNA, 110 bp, synthetic construct
  source 1..110: mol_type = other DNA
gctgccttaatccagacagttacggcttggtgaggaagttggtctaattccagaattcagtattaagaaacacatttgtattaaaacataggccacattctgaaatatta

SEQ ID NO: 41514 - DNA, 110 bp, synthetic construct
  source 1..110: mol_type = other DNA
ttcagtattaagaaacacatttgtattaaaacataggccacattctgaaatattagctttatgtagaatagacataatatttggactttcatctgccttgctccttgggg

SEQ ID NO: 41515 - DNA, 110 bp, synthetic construct
  source 1..110: mol_type = other DNA
aatcccattgcaccacagcagaaaatcctagaccaatttttatgttcttttcacagcttggatgcttctgacaaattgtgatagtataaattcagacccaacatccacct

SEQ ID NO: 41516 - DNA, 110 bp, synthetic construct
  source 1..110: mol_type = other DNA
tggtagcttatgcagcacacatagagcataagtgcatgaggtcatggaggcaaagaaaccactggctccctccctgccttccatacattacctggagtggagtcatgtca

SEQ ID NO: 41517 - DNA, 110 bp, synthetic construct
  source 1..110: mol_type = other DNA
aaaccactggctccctccctgccttccatacattacctggagtggagtcatgtcagctcaaaaacccacctgtagccatataagggaattccttgctgtgccacaattac

SEQ ID NO: 41518 - DNA, 110 bp, synthetic construct
  source 1..110: mol_type = other DNA
actttttctatctgtgtggatgtattacaaatgagaggaaagatgggatagcttgacttcatcacaggccctttatgtacaccaaagcaaaacacatgccagaatgatta

SEQ ID NO: 41519 - DNA, 110 bp, synthetic construct
  source 1..110: mol_type = other DNA
ccttttgtcttgttgaaaccctgtactgcattttcaacacctgtcaaagtggagctaagggtaggtactcaaagcatctttacttcacaaatgctgaatggaatgaagga

SEQ ID NO: 41520 - DNA, 110 bp, synthetic construct
  source 1..110: mol_type = other DNA
taagggtaggtactcaaagcatctttacttcacaaatgctgaatggaatgaaggaacctatgagggaatgaagtggcacctcagcacagacaagtgcaaaacactgggga

SEQ ID NO: 41521 - DNA, 110 bp, synthetic construct
  source 1..110: mol_type = other DNA
aaaggagaagaacttagtctaaattaagaacttagtctaagaagatatttggtatacccatggcaatgacagctctctaagcttatgggaaattgagctggcatctcagt

SEQ ID NO: 41522 - DNA, 110 bp, synthetic construct
  source 1..110: mol_type = other DNA
agataggatctttgctatgctacaccatccaacttcctaaaggcctgcaacaacgttcatctttatttgttaatctgtccagtctcaacacagcatacaatccgtgtcac

SEQ ID NO: 41523 - DNA, 110 bp, synthetic construct
  source 1..110: mol_type = other DNA
aacccatatcttcatggacagtattttgggttcttaaccccctgagccacagcaggagctcctgaatactgtcattttcatatcattcctttctttaaaagggaagagga

SEQ ID NO: 41524 - DNA, 110 bp, synthetic construct
  source 1..110: mol_type = other DNA
gagctcctgaatactgtcattttcatatcattcctttctttaaaagggaagaggaattactgttgtggctcagcattaacgaacctgattggtatcaatgagggtgtggg

SEQ ID NO: 41525 - DNA, 110 bp, synthetic construct
  source 1..110: mol_type = other DNA
ttgatctcactcaattctaccatctgttacccgctccacttctcctttcccggctactcagcttaggatttcaggagctctctttgcaacgctcccttgcacaacacctt

SEQ ID NO: 41526 - DNA, 110 bp, synthetic construct
  source 1..110: mol_type = other DNA
tgcctgtgcatctcttaccaaagcagagaaagctgtcagccaggctgtaggctgccaggttcacagacacagcacaggagctggtccaagggaaccctgggagcaggtgg

SEQ ID NO: 41527 - DNA, 110 bp, synthetic construct
  source 1..110: mol_type = other DNA
ctgcttcactaataatgtgaggaatcgtctttttccacttttaatactcgcactctgcctcagttctttcagaagacagcacgatgacctgcatgcaacattacgaggaa

SEQ ID NO: 41528 - DNA, 110 bp, synthetic construct
  source 1..110: mol_type = other DNA
tgcctcagttctttcagaagacagcacgatgacctgcatgcaacattacgaggaagtccaaacctcggcttcggatctgctggactcccaagacagcacagggaagccca

SEQ ID NO: 41529 - DNA, 110 bp, synthetic construct
  source 1..110: mol_type = other DNA
tgggttaccaagctccgcacctcccctccccaccccacatccttcaggcttcacaaacagaatattagagctaaaaggaatctttgagctcacctaattcattggcctcc

SEQ ID NO: 41530 - DNA, 110 bp, synthetic construct
  source 1..110: mol_type = other DNA
aacagaatattagagctaaaaggaatctttgagctcacctaattcattggcctccttttacaaatgaagccctggaggcctaaaaaggcaaagtgattttccccctggag

SEQ ID NO: 41531 - DNA, 110 bp, synthetic construct
  source 1..110: mol_type = other DNA
agctaggggtccaattggagctgcagatgcagcctatgctgcagtcacagcaataccaatcagagacacgtctgtgacctacacagaagcttgtggcaatgccagattct

SEQ ID NO: 41532 - DNA, 110 bp, synthetic construct
  source 1..110: mol_type = other DNA
tggagctgcagatgcagcctatgctgcagtcacagcaataccaatcagagacacgtctgtgacctacacagaagcttgtggcaatgccagattcttaacccactgagaaa

SEQ ID NO: 41533 - DNA, 110 bp, synthetic construct; identical to SEQ ID NO: 41531
  source 1..110: mol_type = other DNA

SEQ ID NO: 41534 - DNA, 110 bp, synthetic construct; identical to SEQ ID NO: 41531
  source 1..110: mol_type = other DNA

SEQ ID NO: 41535 - DNA, 110 bp, synthetic construct
  source 1..110: mol_type = other DNA
actcaagaaaatcagccaagaagggaaaagaaaggcctgtaggtaaatctaacgctttggggacaaaaacatgaagaaatttaaagagaaacagtgtatccagggaagta

SEQ ID NO: 41536 - DNA, 110 bp, synthetic construct
  source 1..110: mol_type = other DNA
ttccaggaattttaatagatggaatgtacaggatattatgaaggccataagtaagaagacctattttggattgaagcacaaggaaagacctctttaaggaaagtacattc

SEQ ID NO: 41537 - DNA, 110 bp, synthetic construct
  source 1..110: mol_type = other DNA
ctagaacttatctttcttccatttctttgtttggatggcataccatcaagtgcattagctagtaggaactaattacttatccttcttccactgaagaagaggtgatgcca

SEQ ID NO: 41538 - DNA, 110 bp, synthetic construct
  source 1..110: mol_type = other DNA
ttgagttcatgaaagggaaagctagagcaggggttggatatagcaaaggctacatgaatgttaactgttatgatttatttaagaaagtaggttataccctgggtttgacc

SEQ ID NO: 41539 - DNA, 110 bp, synthetic construct
  source 1..110: mol_type = other DNA
cctaatcaggaaataaattacagacctatagcccagttattttatttgctgagaaataatgccaatacccgccatgtttattatatgctttataaaacatgtccccaaat

SEQ ID NO: 41540 - DNA, 110 bp, synthetic construct
  source 1..110: mol_type = other DNA
gctcccacgatgtgccatgcaatgtgctggatgcttccatgtaatcatctcatcaactctcacaacagctctgcttgtgggaaccatcatccccatatcatccaaaatga

SEQ ID NO: 41541 - DNA, 110 bp, synthetic construct
  source 1..110: mol_type = other DNA
tcagatttcaaggaaatttttaaaaaatactgcacaggaattcccctttaaagcatgaccttaagaaaattcctttgctctgtgtcttctggcttgggtaaactggggtg

SEQ ID NO: 41542 - DNA, 110 bp, synthetic construct
  source 1..110: mol_type = other DNA
aaaagaactatattcaaattacagctgatggtttatgccattgatacacatgtctgtgaactaacattcaaaatgacattttagagggttcccatcgtggcgcagtggtt

SEQ ID NO: 41543 - DNA, 110 bp, synthetic construct
  source 1..110: mol_type = other DNA
aaaaagttgtgaaaagtttttaacagctggaatatagcacatcactgaaaccatcaaattaagcaaggttcatcagatctcaaagtgatatctaatgccagaattatctt

SEQ ID NO: 41544 - DNA, 110 bp, synthetic construct
  source 1..110: mol_type = other DNA
tcctctttttatcccttttcagccaccatgcagcataacgtgttttggggccatggatcagatccaagctgcactttcgacctaagaaatgctggatcctttgcccctct

SEQ ID NO: 41545 - DNA, 110 bp, synthetic construct
  source 1..110: mol_type = other DNA
agaatgcacatttattaaaaagcaccccacgtaagcttgagcccacagaaaaaactttgaaaaatcatgctctgaacttttgctatagataaagatgctagaggtaaagt

SEQ ID NO: 41546 - DNA, 110 bp, synthetic construct
  source 1..110: mol_type = other DNA
acccctctatttctgcagttagactagaagctccttgaggacaggaatttccccctcactgtgatgctcccagcaactcaaatgcaacttggcacacagcagataagcaa

SEQ ID NO: 41547 - DNA, 110 bp, synthetic construct
  source 1..110: mol_type = other DNA
attcaagacatccagaatcagaaatgacaagctatagaagaagaaagatgtggggaaagatggaaagggaattgaaactcctaagactcagtttgggtgactatacacat

SEQ ID NO: 41548 - DNA, 110 bp, synthetic construct
  source 1..110: mol_type = other DNA
aggaaggtgagtattctctggaagctggaaaagacaaagatgcgaatttcctcaagtctccagaaggagtgtagccctgcagacccattttctttttctttttaaggcct

SEQ ID NO: 41549 - DNA, 110 bp, synthetic construct
  source 1..110: mol_type = other DNA
ttaggccgccccatggtgtatggagttctcggccaggagtcagatctgaacctcagcttcatcctaagctgcagctgcagcaacacccaatccttaacccatcctgccag

SEQ ID NO: 41550 - DNA, 110 bp, synthetic construct
  source 1..110: mol_type = other DNA
tctcctgggagtcctgaggatttctcaaggaaaagaggttgctaaataggcagacaggagaccaagagacgtctggcacactggtggctgggctggtctctgctagtaca

SEQ ID NO: 41551 - DNA, 110 bp, synthetic construct
  source 1..110: mol_type = other DNA
aggagaccaagagacgtctggcacactggtggctgggctggtctctgctagtacacttcaggtaggtctgaagtcggtgtggtcagtggcaacgaaaagagggaaaggat

SEQ ID NO: 41552 - DNA, 110 bp, synthetic construct
  source 1..110: mol_type = other DNA
gctgagaacagacccggtaccggaggaaggagaagatgttgctgccacgatcggtgccaatgagcccctatcagaggaggagcgagaagagctgagaagagaacttacaa

SEQ ID NO: 41553 - DNA, 110 bp, synthetic construct
  source 1..110: mol_type = other DNA
gccaatgagcccctatcagaggaggagcgagaagagctgagaagagaacttacaaaggtaaagaagtggaactttggaacttcaggaacttcctgcttcacacttagata

SEQ ID NO: 41554 - DNA, 110 bp, synthetic construct
  source 1..110: mol_type = other DNA
atcccaccctgttcctcccaggtagaagaagaaatccagaccctgtctcaagtgttagcagcaaaagagaagcatctagcggagatcaagcgaaaacttgggatcaattc

SEQ ID NO: 41555 - DNA, 110 bp, synthetic construct
  source 1..110: mol_type = other DNA
tcatggtactgatgagtggtggcttggcccaagcatgcgcatagatcgtgaagttaacactcttgacgatgatcattgactaacgagatggaagctgacggatatatgga

SEQ ID NO: 41556 - DNA, 110 bp, synthetic construct
  source 1..110: mol_type = other DNA
aacactcttgacgatgatcattgactaacgagatggaagctgacggatatatggacctgctgcctatatctttcagaagatggttctggaagccattaggtggatttctc

SEQ ID NO: 41557 - DNA, 110 bp, synthetic construct
  source 1..110: mol_type = other DNA
gggttcatcacttcaggtgcatcctcatcttcaaatctcttcctttcagctctccttcactttcatttcagagcaaactgtgtccctatttccttccaaggctgtcctca

SEQ ID NO: 41558 - DNA, 110 bp, synthetic construct
  source 1..110: mol_type = other DNA
ggggcagatttcagtagttcattggttggaaggcaggctgatcatgtggaaccttgctgtcagactagggaggctggctcctccaaaggccgagggaaatgaatagagct

SEQ ID NO: 41559 - DNA, 110 bp, synthetic construct
  source 1..110: mol_type = other DNA
gctgtcagactagggaggctggctcctccaaaggccgagggaaatgaatagagctttgctctgggatgatttttctgggaagaaatcacacgttggcccaggttgagagc

SEQ ID NO: 41560 - DNA, 110 bp, synthetic construct
  source 1..110: mol_type = other DNA
cacaaaggaccataggggaaacccaaaggctggttagatagggtctattttcttcttagcctatgagtcatttggggaaaaattacagagggcatagtgatctttgattt

SEQ ID NO: 41561 - DNA, 110 bp, synthetic construct
  source 1..110: mol_type = other DNA
cctatggtttaacctcatgcatctagagtgtctctctgaaagaatctccctccctatttagcttatttccttaaaataagcaacacagttggccttgtgcctgaatggtc

SEQ ID NO: 41562 - DNA, 110 bp, synthetic construct
  source 1..110: mol_type = other DNA
atttagcttatttccttaaaataagcaacacagttggccttgtgcctgaatggtcctgccaacatccattctgagagattttactagatgcctttggcatttcagaaggc

SEQ ID NO: 41563 - DNA, 110 bp, synthetic construct
  source 1..110: mol_type = other DNA
gtgctaatataagacattgttcataacgattaatcataatttgctctttattctttgagtgatttttgaagttttatagggtttggctctagtgaaatgctgtgacacct

SEQ ID NO: 41564 - DNA, 110 bp, synthetic construct
  source 1..110: mol_type = other DNA
acaaaaaaaaaaaaaaaaaaaaaaaaaaaagaaagaaatcagtcattttgtagccacagcacaagtgtgtgcattcaaacaccacatcccaaaccggtcttcaaaagagg

SEQ ID NO: 41565 - DNA, 110 bp, synthetic construct
  source 1..110: mol_type = other DNA
acagcacaagtgtgtgcattcaaacaccacatcccaaaccggtcttcaaaagaggagattcagctacactagactgacaggatttgggagctaggcaatcacatttaggg

SEQ ID NO: 41566 - DNA, 110 bp, synthetic construct
  source 1..110: mol_type = other DNA
atcttttgtagcccttttatcacctagctaatacctcaagtcaaagttttattgtgctgtatcacattccagagattttgtaaattgagatttggtaaaattgccatcac

SEQ ID NO: 41567 - DNA, 110 bp, synthetic construct
  source 1..110: mol_type = other DNA
gatacagccagctccatatccagagccaagccagttaaatgtgcccttagtccaggttcagccacaggtattggctagtgcatatatctatgctgacaagtaggaagccc

SEQ ID NO: 41568 - DNA, 110 bp, synthetic construct
  source 1..110: mol_type = other DNA
gttcagccacaggtattggctagtgcatatatctatgctgacaagtaggaagcccggaagaagtgatttttttcctcactggtgccagaaagtttagactagtgtatgtg

SEQ ID NO: 41569 - DNA, 110 bp, synthetic construct
  source 1..110: mol_type = other DNA
tggtcttagaacttgggtctgagaaagtcatccacccaggcttgggcttgattggatcaggttccaatgatgttactagagcttcatcttgctcagtaatgctgtctcat

SEQ ID NO: 41570 - DNA, 110 bp, synthetic construct
  source 1..110: mol_type = other DNA
cctccagcctctgacactcatttcatcttccactgtgtattcttcccaggctgtgattctcagcttcaaacaacaaaaaactctcaatcaatcatgtgacgttctctcag

SEQ ID NO: 41571 - DNA, 110 bp, synthetic construct
  source 1..110: mol_type = other DNA
ccaggcttgtacacactgagtccacagaatggaaggctgcaattaatgagaaaaaggtttcaatgggatttacaatgagttcatcgaggacctcctggctcaaggtggtg

SEQ ID NO: 41572 - DNA, 110 bp, synthetic construct
  source 1..110: mol_type = other DNA
gtggaagtcacatggttgaaatttcagccaatacttgaaatgtcatgctcaaacttgagactattttaacaacaacagttaatagcaaatgatgggttataatttatttt

SEQ ID NO: 41573 - DNA, 110 bp, synthetic construct
  source 1..110: mol_type = other DNA
ggctgtaaaaagaaaagaaaaggaaaaaaaagaatcaccaaggacaaatgtgatctctttgtaagagtctgtggataaggccgctatcctgaggttcatcctaacgtata

SEQ ID NO: 41574 - DNA, 110 bp, synthetic construct
  source 1..110: mol_type = other DNA
tctttgtaagagtctgtggataaggccgctatcctgaggttcatcctaacgtataactaaaaatcagttatgaactgacagaaacattaccaaaagccagttacgattgg

SEQ ID NO: 41575 - DNA, 110 bp, synthetic construct
  source 1..110: mol_type = other DNA
ctgaatccaagccacagctgccagcagctctggcaatgcctgatcccattgcaccaagtcagggatagaacccacacctccacagttacctaagcttctgcagttggatt

SEQ ID NO: 41576 - DNA, 110 bp, synthetic construct
  source 1..110: mol_type = other DNA
gaggtactgcagtagttgtctattgctccatggcaatcatcacaaatttagtatcacaaaacatttatcatgacagagctccctaatcagaagtttaaacatgaatcaac

SEQ ID NO: 41577 - DNA, 110 bp, synthetic construct
  source 1..110: mol_type = other DNA
acaaaacatttatcatgacagagctccctaatcagaagtttaaacatgaatcaactgacttctctggacatagtcttgcatggttaaaatcaaggcatcagccaggctct

SEQ ID NO: 41578 - DNA, 110 bp, synthetic construct
  source 1..110: mol_type = other DNA
cattagttcatttaattgtcacgatgacctaataagggaatagaatagatatgagtaaaaggtataggttaagcatcttgtctaaggttactcagggtcagctccatgag

SEQ ID NO: 41579 - DNA, 110 bp, synthetic construct
  source 1..110: mol_type = other DNA
taaaaggtataggttaagcatcttgtctaaggttactcagggtcagctccatgagtgtgtatgctgagtagttgcattgaaagactccctatagggcccacacttgattt

SEQ ID NO: 41580 - DNA, 110 bp, synthetic construct
  source 1..110: mol_type = other DNA
ctggaatccttttatgaagctaggaaaatctgacaaattcccaaatcctcttatgaagctaagaaaacctggccaaaatagccccagctcagttgaatataatatgaaga

SEQ ID NO: 41581 - DNA, 110 bp, synthetic construct
  source 1..110: mol_type = other DNA
atttaagttcccttaagattaagctcaggttatacttcattcataagtccagttaaaaataatccttctggaattccctctgtggctcagccctttaagaacccaacata

SEQ ID NO: 41582 - DNA, 110 bp, synthetic construct
  source 1..110: mol_type = other DNA
ttggctaatgtcttaagtcctatggcaataaaaaggagttgctattacaatgccatggctttgttaagctatctgtattggaaaaaaaattatccttttgccacaatgct

SEQ ID NO: 41583 - DNA, 110 bp, synthetic construct
  source 1..110: mol_type = other DNA
gaacggtagtattgggtataaacaagataatatggtggggttttttgtatctagctatacacaaagacattatactaataatccaaaatctaattagagagcggaaaaga

SEQ ID NO: 41584 - DNA, 110 bp, synthetic construct
  source 1..110: mol_type = other DNA
actccataaactactgccagtccccctggaaaaaaaaagactgaacatattatttttatatttttatttatatttaccacagctctataaactcctttctcaagagactc

SEQ ID NO: 41585 - DNA, 110 bp, synthetic construct
  source 1..110: mol_type = other DNA
ttatatttttatttatatttaccacagctctataaactcctttctcaagagactctagactcctttcaattgatgggcaatgggtatgagaagaactgacccagacctag

SEQ ID NO: 41586 - DNA, 110 bp, synthetic construct; identical to SEQ ID NO: 41584
  source 1..110: mol_type = other DNA

SEQ ID NO: 41587 - DNA, 110 bp, synthetic construct; identical to SEQ ID NO: 41585
  source 1..110: mol_type = other DNA

SEQ ID NO: 41588 - DNA, 110 bp, synthetic construct
  source 1..110: mol_type = other DNA
ccagggtggaaaaagattgttctagttccttcaaacctatttcgataacactacatagcactcagctacaatttaagaaatatagaaattgcagctttgttcccttcctc

SEQ ID NO: 41589 - DNA, 110 bp, synthetic construct
  source 1..110: mol_type = other DNA
tagcactcagctacaatttaagaaatatagaaattgcagctttgttcccttcctctttgctgccatcaaagctcacctttgctgaaacttccggcaccagcagtttcttc

SEQ ID NO: 41590 - DNA, 110 bp, synthetic construct
  source 1..110: mol_type = other DNA
gttatagaacagtgttaatgaaggtatttttctatttttttttcctgccacagcatgaattattagcctcaaatgtggcctgttttccacaatagaggctggggaaaaag

SEQ ID NO: 41591 - DNA, 110 bp, synthetic construct
  source 1..110: mol_type = other DNA
gaacttccacatgttgttccacatggccaataattgtctggtaagagatactagaagctagttgcatacgtgttaatatcatcaatccctatttctttactgagttgact

SEQ ID NO: 41592 - DNA, 110 bp, synthetic construct
  source 1..110: mol_type = other DNA
gcttttcaatgaacagcaaatgggaatattttagttaccaaagggcagagttgcactgtgaatttacctgtcacccagcttgaaaaagatgattgctcaatagaggtact

SEQ ID NO: 41593 - DNA, 110 bp, synthetic construct
  source 1..110: mol_type = other DNA
ctgtgaatttacctgtcacccagcttgaaaaagatgattgctcaatagaggtactctaattagtctcagaaatcattccttattttccattggcactaatgttgggaccc

SEQ ID NO: 41594 - DNA, 110 bp, synthetic construct
  source 1..110: mol_type = other DNA
ttattccaagtgttagaatttctctgtactttaataagtttaaggacttttaatgtaattgtgatattctaagtggcttcagagagagtatcagcctggttgacctgttc

SEQ ID NO: 41595 - DNA, 110 bp, synthetic construct
  source 1..110: mol_type = other DNA
gaatttctctgtactttaataagtttaaggacttttaatgtaattgtgatattctaagtggcttcagagagagtatcagcctggttgacctgttctgtgaaaataataat

SEQ ID NO: 41596 - DNA, 110 bp, synthetic construct
  source 1..110: mol_type = other DNA
agtgtccttaacttccacagcaaaggctgaacagtgtaccaaagagctgttagagtagagatcaagagctgtttgaatgctctcccaaggcagatctgaacacttttgac

SEQ ID NO: 41597 - DNA, 110 bp, synthetic construct
  source 1..110: mol_type = other DNA
tagagatcaagagctgtttgaatgctctcccaaggcagatctgaacacttttgacctggaagtggggatggaacttctagaagaatacctctgagaatatatggctatgc

SEQ ID NO: 41598 - DNA, 110 bp, synthetic construct
  source 1..110: mol_type = other DNA
attttatctcctgtcacacacttgcgtcccactagatagagtccctggtggtaaaaaatcatgtctatttttctacacagatcgttctgtttcacacatccttttcattt

SEQ ID NO: 41599 - DNA, 110 bp, synthetic construct
  source 1..110: mol_type = other DNA
aaatcatgtctatttttctacacagatcgttctgtttcacacatccttttcatttttatttttgaaacatatgcttcttctcaccttggatacttaagcatctctctttc

SEQ ID NO: 41600 - DNA, 110 bp, synthetic construct
  source 1..110: mol_type = other DNA
agggagtctttggcgtgcatggccaatgcgtctctagcaggaagaacatcttgcatgatttaaattggagccctgaaatttcatcttatatcataggacactagtttata

SEQ ID NO: 41601 - DNA, 110 bp, synthetic construct
  source 1..110: mol_type = other DNA
gaaataatagcactgtgtcatatgatttgttactacattgaagattatatcttgtaacttatgagaaggaagctttaaatgagtttccaaggtcataaccttttggtgat

SEQ ID NO: 41602 - DNA, 110 bp, synthetic construct; identical to SEQ ID NO: 41601
  source 1..110: mol_type = other DNA

SEQ ID NO: 41603 - DNA, 110 bp, synthetic construct
  source 1..110: mol_type = other DNA
caaccaccactaccaccactactgtcacctatgataactttgtgtcatcaaagaaatgtttagtgttttgtggatccatttgcggtatgactgccacaggctatctttaa

SEQ ID NO: 41604 - DNA, 110 bp, synthetic construct
  source 1..110: mol_type = other DNA
aactttgtgtcatcaaagaaatgtttagtgttttgtggatccatttgcggtatgactgccacaggctatctttaactatacttaaatttttttgctagaataataacata

SEQ ID NO: 41605 - DNA, 110 bp, synthetic construct
  source 1..110: mol_type = other DNA
agaaaagaagggacctctggactgatagaaaaccacatattttggggtgactagtatcctggaggcagacaaagagaggtgggaaaatgtgggaaggagttcccatcgtg

SEQ ID NO: 41606 - DNA, 110 bp, synthetic construct
  source 1..110: mol_type = other DNA
tctggactgatagaaaaccacatattttggggtgactagtatcctggaggcagacaaagagaggtgggaaaatgtgggaaggagttcccatcgtggcgcagtggttaacg

SEQ ID NO: 41607 - DNA, 110 bp, synthetic construct
  source 1..110: mol_type = other DNA
aatgatatttaggcttattagtcttctccagctaaacggcctagtggatacaatgctaatgaacattataggtattagtgacatgtagggaaagtgtacaattaaactct

SEQ ID NO: 41608 - DNA, 110 bp, synthetic construct
  source 1..110: mol_type = other DNA
ccacaagtcctctgaagcaacaacatgccacccagctcattttgttctcaatgctgtgtagtccattcaggctgttataacaaaaataccaagactgggtgtctggaagg

SEQ ID NO: 41609 - DNA, 110 bp, synthetic construct
  source 1..110: mol_type = other DNA
gaaacaagaacttagaatgtgttgtgtagatattctggagtcataaggaaggagaatagaaaagaaagatgatttcatatgccttgccttctgtttaaaaccattttcaa

SEQ ID NO: 41610 - DNA, 110 bp, synthetic construct
  source 1..110: mol_type = other DNA
atagaaaagaaagatgatttcatatgccttgccttctgtttaaaaccattttcaactgttttcatggggcatgatatctttatcaaacattctgaagcgtgatctttaag

SEQ ID NO: 41611 - DNA, 110 bp, synthetic construct
  source 1..110: mol_type = other DNA
atgggtcttggggaattttatttttacattcaccaatggattctaacattcagccagacttacaaatcactgagccaccaaaccctacacactgttgaaggtccaggaca

SEQ ID NO: 41612 - DNA, 110 bp, synthetic construct
  source 1..110: mol_type = other DNA
agacttacaaatcactgagccaccaaaccctacacactgttgaaggtccaggacaataaaagctccagattatgttgccttccatgaccataccttctggagaaagagct

SEQ ID NO: 41613 - DNA, 110 bp, synthetic construct
  source 1..110: mol_type = other DNA
taacctgttttattttttcttctctgttatccaaatgccatctgccgtacttaaaggagtttttgttcccaacctcacaaaagatttgaaattaaaatagcagactcaag

SEQ ID NO: 41614 - DNA, 110 bp, synthetic construct
  source 1..110: mol_type = other DNA
cagaaatttcaatccatttatcttaccaactttcactgctccttacccactttctgtcctttctttactatttatccagcttcagcttatggtaaattattatataaatt

SEQ ID NO: 41615 - DNA, 110 bp, synthetic construct
  source 1..110: mol_type = other DNA
ctggattggaaagaactgattcaagattatggggggtgcagtctgaaaatggcgaagttagctgggggctgttgcagctcaagtccaggactggtagatagaatagttca

SEQ ID NO: 41616 - DNA, 110 bp, synthetic construct
  source 1..110: mol_type = other DNA
ttggttagagcaatcaatcaaatgttagtgtcaagtattacctagaaatagacttgaaactgttcttcagttgatgcttatgtttttgttgcaacaagggcccaaaaggg

SEQ ID NO: 41617 - DNA, 110 bp, synthetic construct
  source 1..110: mol_type = other DNA
gaaactgttcttcagttgatgcttatgtttttgttgcaacaagggcccaaaagggctattgacaggtaacagtggatgtattatctcactgttctttgggagctggaaga

SEQ ID NO: 41618 - DNA, 110 bp, synthetic construct
  source 1..110: mol_type = other DNA
tcagacagacttagattcagaccctggtttcctcatttactcaattgaacgccggtcattgaagccagtctttagtcatccttatcttcatctcatcatttgtaaaatgg

SEQ ID NO: 41619 - DNA, 110 bp, synthetic construct
  source 1..110: mol_type = other DNA
tgaacgccggtcattgaagccagtctttagtcatccttatcttcatctcatcatttgtaaaatgggtaaatcaatagttaccaaatagagttataatgaggattaaaaca

SEQ ID NO: 41620 - DNA, 110 bp, synthetic construct
  source 1..110: mol_type = other DNA
ttaagtaggactctgcccttgagcaacgtggaggcagtagcttaaaaccctgtgacaaaaagacacgcagattagagaatcgacctaactcgtgataaagaggcaactaa

SEQ ID NO: 41621 - DNA, 110 bp, synthetic construct
  source 1..110: mol_type = other DNA
tatagtcagagctctgattatcctgtgaagtaagctgtacagggaagcacttggggttagaaaagtgctcacttccaagaaaccatagtgcatgtccatgggacttctgg

SEQ ID NO: 41622 - DNA, 110 bp, synthetic construct
  source 1..110: mol_type = other DNA
gctgcagctatagcatttggaaattcctggcctaggggccaaattggagctgtagctgaactgccctccaaaagtcaaaatataactatgattaaattcattgaatctag

SEQ ID NO: 41623 - DNA, 110 bp, synthetic construct
  source 1..110: mol_type = other DNA
ctgaactgccctccaaaagtcaaaatataactatgattaaattcattgaatctagaaagtaatccataaatgggttcagttgggtgggaggagaacggaggctgttatta

SEQ ID NO: 41624 - DNA, 110 bp, synthetic construct
  source 1..110: mol_type = other DNA
gtctggagtatgtggtacccacatgaagatggatgttgtgggggtcaccaatcttatgctggagctgcaagggactgtatgtatggtctaggtgtgcatgtatggtctgt

SEQ ID NO: 41625 - DNA, 110 bp, synthetic construct
  source 1..110: mol_type = other DNA
aagggtgaaattcctcttaaattatccaaatataatgcagctaagaaggcacaacctccattttttaacacacacataagcatgcaaagcacaggaactagtgactgcgc

SEQ ID NO: 41626 - DNA, 110 bp, synthetic construct
  source 1..110: mol_type = other DNA
tagagcctcttggctaaatgatagaaaatagtggaggcctgtttcctttctagcttgggcaagtgaaggccagatgctgtcatggacagagacaggagacgcaatataaa

SEQ ID NO: 41627 - DNA, 110 bp, synthetic construct
  source 1..110: mol_type = other DNA
tgggcaagtgaaggccagatgctgtcatggacagagacaggagacgcaatataaagaccacattggagaaagggatgtgctacattttaaacaccctgaacttgaaatat

SEQ ID NO: 41628 - DNA, 110 bp, synthetic construct
  source 1..110: mol_type = other DNA
tttccactgagccatgacggaaactcctaaaggagatactttgtaagcttacaatcttccagaggtgatggccattaggcttgctccccaatttcctccaactgaacaat

SEQ ID NO: 41629 - DNA, 110 bp, synthetic construct
  source 1..110: mol_type = other DNA
tggcctcactcagtaggttaagtatccggttgcccataagctgtggcattcagtcgcagaggtggctcagactcagcgttgctgtggctgtgatgtcggccaacagctac

SEQ ID NO: 41630 - DNA, 110 bp, synthetic construct
  source 1..110: mol_type = other DNA
gtgcctggagagaaggacacacactggggaaatgcagtaaatgaagcaggagaagtttgtcgaggccagattatgaagaacatttatatgacatacgaaggcatttaaac

SEQ ID NO: 41631 - DNA, 110 bp, synthetic construct
  source 1..110: mol_type = other DNA
caagttgtctctggtacctggtgatctaaagtgctagtgttagagtagggtcacatataaatggagaaatagagttctcattcaggtacagctcaaatttggtggtcatt

SEQ ID NO: 41632 - DNA, 110 bp, synthetic construct
  source 1..110: mol_type = other DNA
tataaatggagaaatagagttctcattcaggtacagctcaaatttggtggtcatttccaatttccccaatgcatcattgaaatagatatacttagcagttgtcaaaattc

SEQ ID NO: 41633 - DNA, 110 bp, synthetic construct
  source 1..110: mol_type = other DNA
taattgtttagattcctatctgtccactgacataatgaagctccagaccctgttcttgacccctagccctgggaagatgctcaataattgaatgaatgaacatataaata

SEQ ID NO: 41634 - DNA, 110 bp, synthetic construct
  source 1..110: mol_type = other DNA
ccaactcaaaatttctatgatttaatgatgtttatgtaatgaatttgattattgcatggatcaccagtttctttctaccccatggccatagacatcaactataatccaga

SEQ ID NO: 41635 - DNA, 110 bp, synthetic construct
  source 1..110: mol_type = other DNA
tctgtcagtttcttagggtaagcctccactccttctatctgcacaaggaccctagcaatgaaggcatactggccagcagtaacttcttggagtactgccccttcaaggaa

SEQ ID NO: 41636 - DNA, 110 bp, synthetic construct
  source 1..110: mol_type = other DNA
caatgaaggcatactggccagcagtaacttcttggagtactgccccttcaaggaaataagctgttacaagtaagaaggcagtacttgtaaaccctatctgatgctcctat

SEQ ID NO: 41637 - DNA, 110 bp, synthetic construct
  source 1..110: mol_type = other DNA
aaagcaatttctaagttttcagcgagattataacagtagatccatttgcttgtggaattagcatcatacctcaatgctatcaatatgcctgtgtaggttagcaaaaacat

SEQ ID NO: 41638 - DNA, 110 bp, synthetic construct
  source 1..110: mol_type = other DNA
aattagcatcatacctcaatgctatcaatatgcctgtgtaggttagcaaaaacatatcttgatggcaatgaatgttccacggctcaaaatgactatttctttgcaagcat

SEQ ID NO: 41639 - DNA, 110 bp, synthetic construct
  source 1..110: mol_type = other DNA
atctgcattcccctctctccatatcaaatggtgcttttgattgatttgaactggacaaaaccttagctattatctagcccactgatctgaacttacaaaagagaaaactg

SEQ ID NO: 41640 - DNA, 110 bp, synthetic construct
  source 1..110: mol_type = other DNA
ttttggcagaatgaactaatgaatccttaattttcaggtaaagaaacaaagattaaagggggaaaaagtcctgttttgagtatcaactgttagtcttttggcagtagatg

SEQ ID NO: 41641 - DNA, 110 bp, synthetic construct
  source 1..110: mol_type = other DNA
ccaatactaaagcaccagtgaacttggtttgttgtactatgtgtactagctggagacagagatggttctttccttagggagcagtagatttctattcatgctgaggatac

SEQ ID NO: 41642 - DNA, 110 bp, synthetic construct
  source 1..110: mol_type = other DNA
gaacagatgcttaacatcattagctattaagaaatgtaaatcaaaaccacaatgtgataccactcctcacaaactaagaaagataaaataaaggaggtgaacaataacga

SEQ ID NO: 41643 - DNA, 110 bp, synthetic construct
  source 1..110: mol_type = other DNA
aaagatgtacccttgaaagtgtaatgagttgtttggtaccatctaaactgatttcatgactgaacacagttaaggcctctctataaatgtttaagattctggcaggcaag

SEQ ID NO: 41644 - DNA, 110 bp, synthetic construct
  source 1..110: mol_type = other DNA
atgactgaacacagttaaggcctctctataaatgtttaagattctggcaggcaagtctggatatctactcattgtgaaaccaccccaaacaagccttgcaggttcacctg

SEQ ID NO: 41645 - DNA, 110 bp, synthetic construct
  source 1..110: mol_type = other DNA
atgatgataaggcactggagaatttttaccaagcagagggttgtgaaatcatcagactttattttttttaaatctttaagtttattccctcttgcattttagttaatagg

SEQ ID NO: 41646 - DNA, 110 bp, synthetic construct
  source 1..110: mol_type = other DNA
ttaccaagcagagggttgtgaaatcatcagactttattttttttaaatctttaagtttattccctcttgcattttagttaataggttggagatttcaagaggatacacat

SEQ ID NO: 41647 - DNA, 110 bp, synthetic construct
  source 1..110: mol_type = other DNA
tgcagtgtcctcccactctcttttcatatgcatcacgatgcggcagctgaccagtgagaaacgtttagggatccaaggccaggatcatgaagcagaagagtggatttggc

SEQ ID NO: 41648 - DNA, 110 bp, synthetic construct
  source 1..110: mol_type = other DNA
aatccaatacaggtcatcatcttagaaagattaaagttccctatattagcttatttgaattccaccttcttataatcatatgcctgacacttagcagagtttcaggaggc

SEQ ID NO: 41649 - DNA, 110 bp, synthetic construct
  source 1..110: mol_type = other DNA
tgaattccaccttcttataatcatatgcctgacacttagcagagtttcaggaggctggggaaacgtgaaaatcaccacttagcagcaccctgctcatgtccttagaaagg

SEQ ID NO: 41650 - DNA, 110 bp, synthetic construct
  source 1..110: mol_type = other DNA
aaactgaaagtcacttcactgacgggacaagagcctggagtttctctcaacttgccatctcaccctctagcatgcaggtacatttctaagatatttaaaatacttattag

SEQ ID NO: 41651 - DNA, 110 bp, synthetic construct
  source 1..110: mol_type = other DNA
ctttcacagagcatcataaatgttcatgttgtcctgaaccgaaggaaaaaaaatataattatatcgccacctagtggatattggtggtaaagcaagtgcaagaagtaaaa

SEQ ID NO: 41652 - DNA, 110 bp, synthetic construct
  source 1..110: mol_type = other DNA
taattatatcgccacctagtggatattggtggtaaagcaagtgcaagaagtaaaacctaaaaaaaaaaaatcccatcaaattaaaaagcagcaaaacaggtttgctttaa

SEQ ID NO: 41653 - DNA, 110 bp, synthetic construct
  source 1..110: mol_type = other DNA
ccacaacaagaacttcctatctaggttttctaaatggtttacctagctaggtagtccagttcctattcttcagcccctctcatccatctaagattacttcacttcctgtt

SEQ ID NO: 41654 - DNA, 110 bp, synthetic construct
  source 1..110: mol_type = other DNA
agactttttaggttgttcttctctcactttttcaaagagaaatcattttcattttttatcaatgaaagctaagaatgcctttctggccttcctcaggtagtgcctgtgag

SEQ ID NO: 41655 - DNA, 110 bp, synthetic construct
  source 1..110: mol_type = other DNA
tacattctcacagacactgttgggttacttgctgaatcataacaacaattcctgattcagctcttaaaagtaatgaactctcaggtcatgaaagacatggaagaaactta

SEQ ID NO: 41656 - DNA, 110 bp, synthetic construct
  source 1..110: mol_type = other DNA
ctcttctaagctccagtcacatatataaataggcatacacacatatgtgcatacatatatggcacatatatttgcatacctatttctggtacatacaagccagaaatctc

SEQ ID NO: 41657 - DNA, 110 bp, synthetic construct
  source 1..110: mol_type = other DNA
gttgcccttactatttctcacctcatgtcaccatcactactgaaaccctatgaatttacctgtggtttgctctactctgaacccatttctaaggagagaaaggtaaatag

SEQ ID NO: 41658 - DNA, 110 bp, synthetic construct
  source 1..110: mol_type = other DNA
atggaacttatacattcctggtataatggtccagctactgcagaagacatactggcagttcctcaaaaagtcagacacagaattatctatcacatgaccattaaatttca

SEQ ID NO: 41659 - DNA, 110 bp, synthetic construct
  source 1..110: mol_type = other DNA
gaaagctctggtgcccatgcttaactctatatttattatatgatcactagaaacgtttttgtaccactactctggcttaattccatttactattaagcccattcccaagg

SEQ ID NO: 41660 - DNA, 110 bp, synthetic construct
  source 1..110: mol_type = other DNA
ccctgatgatggagcaagtagagttggaagttttgggggtacagtggatggaaaacagattctcacacaatggaaaatgctgccaggagttagaaatggctcacataaca

SEQ ID NO: 41661 - DNA, 110 bp, synthetic construct
  source 1..110: mol_type = other DNA
cagattctcacacaatggaaaatgctgccaggagttagaaatggctcacataacaagagtgaaatacacagttacctcttgtctacttattacagctaatgagaatataa

SEQ ID NO: 41662 - DNA, 110 bp, synthetic construct
  source 1..110: mol_type = other DNA
cccgaacaaatatagtctcctgctcaagaccaatcagaagattaataacgccccatacaagatcaaacaacatgcagctgggacaggagaaaatgggtctccactcaggt

SEQ ID NO: 41663 - DNA, 110 bp, synthetic construct
  source 1..110: mol_type = other DNA
tacaagatcaaacaacatgcagctgggacaggagaaaatgggtctccactcaggtctgtattatggggtatgaagacaattatagtcaggccctctttttttaacccacg

SEQ ID NO: 41664 - DNA, 110 bp, synthetic construct
  source 1..110: mol_type = other DNA
gtgagaaccttagtttatgagaatatgactccacagaagcatgtacgtacctaatctgccaacctaacccaaggatgcagccgcagaagtagaacaaatggagacaaatc

SEQ ID NO: 41665 - DNA, 110 bp, synthetic construct
  source 1..110: mol_type = other DNA
ctgccaacctaacccaaggatgcagccgcagaagtagaacaaatggagacaaatctgtcaccactatagtgcacatcagttccaggtgcctcactattagaagagctcac

SEQ ID NO: 41666 - DNA, 110 bp, synthetic construct
  source 1..110: mol_type = other DNA
attttcacaccctggccccagaaggattccagaccaatgtgtggacttcgttacagctcaacctctgaatgaaatctctatcccagatctcttccaaattttatggatta

SEQ ID NO: 41667 - DNA, 110 bp, synthetic construct
  source 1..110: mol_type = other DNA
tgtatcaccaccatatcaataaagaaggtgttatgtcgtaacattttaatggcactgttattctccctgaaaagcaaatacagtgtgtgcttaagttgtcacatttaatt

SEQ ID NO: 41668 - DNA, 110 bp, synthetic construct
  source 1..110: mol_type = other DNA
tcagttcaaatggcatctctttcatgaagctatccttgtgataccaaagggaatttcttcctgtattcccattttctttgtggctttcaacatagagtaaattgctcacc

SEQ ID NO: 41669 - DNA, 110 bp, synthetic construct
  source 1..110: mol_type = other DNA
tcttcctgtattcccattttctttgtggctttcaacatagagtaaattgctcaccaagcacatgttagctgtgctgcaaaatgttgcccacatttatatgacacgtaata

SEQ ID NO: 41670 - DNA, 110 bp, synthetic construct
  source 1..110: mol_type = other DNA
gcttcatcaaaacacacttgcctggaggcaatttgcataaatgcagatctctactgggtaacctgatatgcaagagtatgaacggccaatttgattttcagaattaggtg

SEQ ID NO: 41671 - DNA, 110 bp, synthetic construct
  source 1..110: mol_type = other DNA
gggtaacctgatatgcaagagtatgaacggccaatttgattttcagaattaggtgttcatagtcaatgcagagtgccttcttatccctgccgacgccacagaaatctacg

SEQ ID NO: 41672 - DNA, 110 bp, synthetic construct
  source 1..110: mol_type = other DNA
ctgggtacatcatggcttattctggacatcaagtgagatgctccaagtgtggaaggtgacagtgttgtcatgacctgtataatacagtgatgtgtgtgctcaccctttct

SEQ ID NO: 41673 - DNA, 110 bp, synthetic construct
  source 1..110: mol_type = other DNA
gtgacagtgttgtcatgacctgtataatacagtgatgtgtgtgctcaccctttcttcagaaaaacagctgtgggtcctgcaagattctgaaatcatcaattcaaatattt

SEQ ID NO: 41674 - DNA, 110 bp, synthetic construct
  source 1..110: mol_type = other DNA
ccaaacattagagaaccacttggaatatattccttgaactgcaaaagcaacagtttcctttttaattactataatcgtgaactttattacatctgctttctcttctcaaa

SEQ ID NO: 41675 - DNA, 110 bp, synthetic construct
  source 1..110: mol_type = other DNA
gattcgtttcctctatgccacaaagggaactcccagaatacttttttcttgatatcaaaaattgtttaaaaatttctatcccagcttcttttaaaaaagcagaagtgttg

SEQ ID NO: 41676 - DNA, 110 bp, synthetic construct
  source 1..110: mol_type = other DNA
aaggtcatggatggaaacatatgtgacatgtttaaatagctgcataatattaccccaagtccctcctgggtcatctttggagaatactaggaaaccaatccaatccacta

SEQ ID NO: 41677 - DNA, 110 bp, synthetic construct
  source 1..110: mol_type = other DNA
ccccattcccctcttcaggacaaggaacctatgatgcagggtctagcattagtgttctatacactttagacccttggtcaaggttggttaagtgaatgaaagctcattat

SEQ ID NO: 41678 - DNA, 110 bp, synthetic construct
  source 1..110: mol_type = other DNA
tctatacactttagacccttggtcaaggttggttaagtgaatgaaagctcattatggaaagatgatcaaggaccactctttcctaggttccagttaataccgagaatgat

SEQ ID NO: 41679 - DNA, 110 bp, synthetic construct
  source 1..110: mol_type = other DNA
gtgacagaaattctagctaagcaaagagctgctgagaagaaaactgcatccctaaagctcttgtgcagataaacgtgacatgtgactactttctaacaaatggggtataa

SEQ ID NO: 41680 - DNA, 110 bp, synthetic construct
  source 1..110: mol_type = other DNA
ggtccctgccacgtgtcatcgctgccagaagtccaccccgctgcacctcttgcgggggtaaacacctgagaagccgggaatgggagctaagccagcgtgtgtgacacaga

SEQ ID NO: 41681 - DNA, 110 bp, synthetic construct
  source 1..110: mol_type = other DNA
tccctataggaagggcacccactttgattcctcctcaaaccctgattttatcatcagtcacctggttcttcacttaacacagtgacggtatctgttccaccaccacacca

SEQ ID NO: 41682 - DNA, 110 bp, synthetic construct
  source 1..110: mol_type = other DNA
agtcacctggttcttcacttaacacagtgacggtatctgttccaccaccacaccatggcacctggaaaagacaggttttcattaagtattggttgcctgtatgaatgact

SEQ ID NO: 41683 - DNA, 110 bp, synthetic construct
  source 1..110: mol_type = other DNA
acattgcttttgggccctggttcctcaacaatctatgtggcaacaggtaggagtggctaattaaatgacccaatggaaaaatctgcaagattactaaaaagtcttcatta

SEQ ID NO: 41684 - DNA, 110 bp, synthetic construct
  source 1..110: mol_type = other DNA
gctaattaaatgacccaatggaaaaatctgcaagattactaaaaagtcttcattaacctaaatagcataagacaaagtcatgagatattgcacaaggacaatgggaaatt

SEQ ID NO: 41685 - DNA, 110 bp, synthetic construct
  source 1..110: mol_type = other DNA
gtttggaagggccatctctcccctaatccacctaaggggtcactgggggtttcccaggatcaattaaaagaggaaaatgcttggtcctggtaatggataaatctgcacca

SEQ ID NO: 41686 - DNA, 110 bp, synthetic construct
  source 1..110: mol_type = other DNA
aggatcaattaaaagaggaaaatgcttggtcctggtaatggataaatctgcaccatccctgaaagacagtggatagtgtaaatccaccccccactccccaggcagaactc

SEQ ID NO: 41687 - DNA, 110 bp, synthetic construct
  source 1..110: mol_type = other DNA
gacttatgcagggagggaggagggctcagttgaagaattgaggtgagagcttgcattgaggcatgggcgaatttaaccaggctggagaatggggcggagtgagtaggagt

SEQ ID NO: 41688 - DNA, 110 bp, synthetic construct
  source 1..110: mol_type = other DNA
agttaataaaatgacagattttaagctttcattccgataatgtaaaagccttctactcaacacgtcagccacctacattaaaaaaaaaaaaaaaatagaacaggaggtgc

SEQ ID NO: 41689 - DNA, 110 bp, synthetic construct; identical to SEQ ID NO: 41688
  source 1..110: mol_type = other DNA

SEQ ID NO: 41690 - DNA, 110 bp, synthetic construct
  source 1..110: mol_type = other DNA
caaataagatcgatcgattgattgatttgccaggcctactgcacgtggaaatttctgggtcagatatcaacccatgccacagcagcagacctaagccgatgcagtgacag

SEQ ID NO: 41691 - DNA, 110 bp, synthetic construct
  source 1..110: mol_type = other DNA
aggtttatgtatgatgtgaggtggggttcaagatttttttttttcctttagcaatatttgttgaaaagatagtcttttcctttctgcactccagtcttgaacttcccagt

SEQ ID NO: 41692 - DNA, 110 bp, synthetic construct
  source 1..110: mol_type = other DNA
ttgacccttagagcagtagaggaagcttctgacgtagctggcttaatcctttcgctagcaagcattccagcaacaacacaggggctggggaagctggggaacaaaccaag

SEQ ID NO: 41693 - DNA, 110 bp, synthetic construct
  source 1..110: mol_type = other DNA
gtgctggggctcttcctactcggccacctgctcatctctgtggccccaaccctggctcctgccttttgatgtcccagctttcccgaacccctgacagtcccagaggatgc

SEQ ID NO: 41694 - DNA, 110 bp, synthetic construct
  source 1..110: mol_type = other DNA
ttggcataaaataggtttacaaggtatgagaacacccacattggagacctagcatgatacttgattctcttcatttgaaagataaatgtatagcagctacttacttgaac

SEQ ID NO: 41695 - DNA, 110 bp, synthetic construct
  source 1..110: mol_type = other DNA
tttacaaggtatgagaacacccacattggagacctagcatgatacttgattctcttcatttgaaagataaatgtatagcagctacttacttgaactgaatagcaatcttt

SEQ ID NO: 41696 - DNA, 110 bp, synthetic construct
  source 1..110: mol_type = other DNA
gaaagttagaaattacaaaaatggctggaaaggcttacccccaccctgcgggcatgcaaacacacactcgcacacgtgtgaccggagaccaccaaacaggcatggaaagt

SEQ ID NO: 41697 - DNA, 110 bp, synthetic construct
  source 1..110: mol_type = other DNA
agacagtaacttgataagcatgtcaaatatgaaataagttaattatttatggagctcatgccttttattttggaataaattccacagacacctcatgttttaagaagtgc

SEQ ID NO: 41698 - DNA, 110 bp, synthetic construct; identical to SEQ ID NO: 41697
  source 1..110: mol_type = other DNA

SEQ ID NO: 41699 - DNA, 110 bp, synthetic construct
  source 1..110: mol_type = other DNA
gccaagtgaaacccaggtttggggattttgtttggtagtaggactatgattagaaaccggctgttgtgagattattgctgctcgcttccatttccaaacaaccagtgagc

SEQ ID NO: 41700 - DNA, 110 bp, synthetic construct
  source 1..110: mol_type = other DNA
accggctgttgtgagattattgctgctcgcttccatttccaaacaaccagtgagctaatagacataaaatcttttcaaggcataataaagtcactggggcccatctgaaa

SEQ ID NO: 41701 - DNA, 110 bp, synthetic construct
  source 1..110: mol_type = other DNA
cagcagctagagctctaatttgacccctagactcgaacctccaaatgctgtaggttcggccttaaaaaaaaaagaaagagcccccccaaaaagttaagtgatgaaaatgt

SEQ ID NO: 41702 - DNA, 110 bp, synthetic construct
  source 1..110: mol_type = other DNA
aaccaatacattctgtaaagaaaaggtgagggttctcaacagcaaagaaggccaacctaacctgtgggtcaaggatgcttctctgagcaaaggatggttcacagaaagga

SEQ ID NO: 41703 - DNA, 110 bp, synthetic construct
  source 1..110: mol_type = other DNA
gaggatccacctttacctcagtgaagaagctgagctagtaagtgatggaactgagatttgaacccaggcagttgggtaccagtggccagcaacactgtcatgtctcatct

SEQ ID NO: 41704 - DNA, 110 bp, synthetic construct
  source 1..110: mol_type = other DNA
agaaaggagatggtgaatcgagccaccatttaatagctccctaaacaaagagatacgcattcgtagcctccttcgagtgggatgaaggaatgcagcggaacctaaaagat

SEQ ID NO: 41705 - DNA, 110 bp, synthetic construct
  source 1..110: mol_type = other DNA
acgttaactctatgccattgggagtattttctccactttaagatacagaagctgaggttcagaagcattagctttgccaaggtagacagagtggttaaggggtaggcctt

SEQ ID NO: 41706 - DNA, 110 bp, synthetic construct
  source 1..110: mol_type = other DNA
ggttcagaagcattagctttgccaaggtagacagagtggttaaggggtaggccttggatctggcccgagccaacctggcctctgagcgcttgccagcctcatagtagcag

SEQ ID NO: 41707 - DNA, 110 bp, synthetic construct
  source 1..110: mol_type = other DNA
tgcagaaacatgggactaattataaatatttttttcctagctacataacaaataatcataatctgtcagtggctcaacatatattgggtaacagcatgaaaggtatttaa

SEQ ID NO: 41708 - DNA, 110 bp, synthetic construct
  source 1..110: mol_type = other DNA
gacaccaatgcacaagttagatagtcctatatgaaaagttgccagagacagatataagtttaagatgtaaactaaaatgtgaatgtttttgaaaaatttaacttgaggaa

SEQ ID NO: 41709 - DNA, 110 bp, synthetic construct
  source 1..110: mol_type = other DNA
aatgatctgtcgctggaagtccccctcccctccacagagaggagggtctccccggctggctggagctcctggcgttttttttccccccctctctttacatccctgactct

SEQ ID NO: 41710 - DNA, 110 bp, synthetic construct
  source 1..110: mol_type = other DNA
ctggctggagctcctggcgttttttttccccccctctctttacatccctgactctggtccacggtctctagtagaaggctcaaaggagaggcggcgggaggaagctaaag

SEQ ID NO: 41711 - DNA, 110 bp, synthetic construct
  source 1..110: mol_type = other DNA
ctttgtatgatctcggaacaataatggggttggtgcctgagcatgatggacattaagctacctgccagccagagggatgggcattgagataaagttaggttgatttactt

SEQ ID NO: 41712 - DNA, 110 bp, synthetic construct
  source 1..110: mol_type = other DNA
agctacctgccagccagagggatgggcattgagataaagttaggttgatttacttaaagataggaaatatttcttgcacacttgaatgtgttcaaggagattcataccca

SEQ ID NO: 41713 - DNA, 110 bp, synthetic construct
  source 1..110: mol_type = other DNA
agcatcttcaccaaggagctaagctggagtacatacaacctgggtgatccggtgcttgtttttagaatgctcacagaagtcagagggagggtagggaaaaaatctgacat

SEQ ID NO: 41714 - DNA, 110 bp, synthetic construct
  source 1..110: mol_type = other DNA
agtgtttccacatttaaaagaggcagtatttgctttaaaggaaacagatgtagtatgagatgcaacatggattttgttaatcctatttgtaaatctccattaagatccat

SEQ ID NO: 41715 - DNA, 110 bp, synthetic construct
  source 1..110: mol_type = other DNA
tgagatgcaacatggattttgttaatcctatttgtaaatctccattaagatccatgacttgttgatttcaagagtagcaaagaacttttcaccttgacatgttgtgtcct

SEQ ID NO: 41716 - DNA, 110 bp, synthetic construct
  source 1..110: mol_type = other DNA
aaatcccataaagcaacataccaggcctcccaagtcgaatctatttgcacatctggattaaacactgacttctttcctccttcttaatatcagtatattgaccatggtct

SEQ ID NO: 41717 - DNA, 110 bp, synthetic construct
  source 1..110: mol_type = other DNA
ctagcataaccttcaaagaagcaaatttaaggccacacaaacaaaaatacattgccagcttaacctcaccatgtaaatattctaaagagtcagcctcagacaagggcttc

SEQ ID NO: 41718 - DNA, 110 bp, synthetic construct
  source 1..110: mol_type = other DNA
gtcatgagggtggagccttcatggatgggattagtgcccttataaaagagaccccagagcaatctctcacccccttccgtcacgtggggacacagagagaagctggccct

SEQ ID NO: 41719 - DNA, 110 bp, synthetic construct
  source 1..110: mol_type = other DNA
agagcaatctctcacccccttccgtcacgtggggacacagagagaagctggccctctctgaacaggaagagggtgctccccagacaccacatctgccatgtgctttgata

SEQ ID NO: 41720 - DNA, 110 bp, synthetic construct
  source 1..110: mol_type = other DNA
actcagggtcaactggcctggctctgaggcttccactttcactaaaaccccactcactttggcatgaggcaagcggattgcccagtggattggtggccctcagcctggcg

SEQ ID NO: 41721 - DNA, 110 bp, synthetic construct
  source 1..110: mol_type = other DNA
actttggcatgaggcaagcggattgcccagtggattggtggccctcagcctggcgggtcgatgtagtcgaataccatttgccaagacactggagtcttcacgaaccagag

SEQ ID NO: 41722 - DNA, 110 bp, synthetic construct
  source 1..110: mol_type = other DNA
gttataaatgaagcaactgtcacatgctgtctctggccactttaaaatatgtcacggaggcaaactagccttgccattttcatgttcatgtgaagatatgccaaatacaa

SEQ ID NO: 41723 - DNA, 110 bp, synthetic construct
  source 1..110: mol_type = other DNA
ccacccccaccttcagtatgtgagcatgcacgggtgcagacacacacacacacccagcttatctgacataaaaatttggataagcaacggttcaccaggattagcaatat

SEQ ID NO: 41724 - DNA, 110 bp, synthetic construct
  source 1..110: mol_type = other DNA
gagatgcaagattgatgactttgaagacagagaaaggaggctactgggcaaggcatgtggatgacccctaaaagctatctttgctacaaaaagcaaggaggtggattttc

SEQ ID NO: 41725 - DNA, 110 bp, synthetic construct
  source 1..110: mol_type = other DNA
tgttatattatcacagagaacctactgttatttattattgtaaagaatttgctcgggaccttataaagctgaaggtgtataaaaagaagtcatttcagaagaaataccat

SEQ ID NO: 41726 - DNA, 110 bp, synthetic construct
  source 1..110: mol_type = other DNA
taggttatcatgggccacgataaagatcttaactttaaccctgagtgaaatgggaaccactgatgggttttgagcagaggaacgtcatgatgtgacttaaagcttcaaag

SEQ ID NO: 41727 - DNA, 110 bp, synthetic construct
  source 1..110: mol_type = other DNA
accactgatgggttttgagcagaggaacgtcatgatgtgacttaaagcttcaaagacccagaggtgaccagttaggaggtataatcccagtagaagcatggatctttatt

SEQ ID NO: 41728 - DNA, 110 bp, synthetic construct
  source 1..110: mol_type = other DNA
tacatacatctgtatacatacacatctatgtacgtgtttgtttccaaagccacatctgaaatgtatgtgctcagtacttgtgtactcaatacatgcatggtgtacacctg

SEQ ID NO: 41729 - DNA, 110 bp, synthetic construct
  source 1..110: mol_type = other DNA
cgctgcagtatcctcctttttctcttttggttaaaagagaccattgtcgtcctcagccatgtgctctgtataattaagagctgacacagaagcagagttaacaacagctt

SEQ ID NO: 41730 - DNA, 110 bp, synthetic construct
  source 1..110: mol_type = other DNA
taactgtctgcagcaaccatttataatgtgtattttagaactctgcatcatgcgctcgcaagagtcagaggcccaagggggtgaatttgtcctttgccttatgtttataa

SEQ ID NO: 41731 - DNA, 110 bp, synthetic construct
  source 1..110: mol_type = other DNA
caattgttttaagactgcttattaaatgtaggaaaaatattcacggtccatttcaaggttcaaaattgacagtaacaggacagtgtggtcttaatggtaaactccatggc

SEQ ID NO: 41732 - DNA, 110 bp, synthetic construct; identical to SEQ ID NO: 41731
  source 1..110: mol_type = other DNA

SEQ ID NO: 41733 - DNA, 110 bp, synthetic construct
  source 1..110: mol_type = other DNA
tcttgagaagggaacggtaataggtagctaaaactatggttacctttattccgcttttcctccaggaaagtgttttattgaatattagatgcctgagtgaggcagacatg

SEQ ID NO: 41734 - DNA, 110 bp, synthetic construct
  source 1..110: mol_type = other DNA
tttcctccaggaaagtgttttattgaatattagatgcctgagtgaggcagacatgcgctcttgtgtagggccccaaattacccaacatttatttccaagacagttctcca

SEQ ID NO: 41735 - DNA, 110 bp, synthetic construct
  source 1..110: mol_type = other DNA
acaggagaagcagcaatttgaaaggactctgagtcagatacacctactgatcttaacgagcctccctgagaggcagaaagcagctagagctcatcctggggatatagaca

SEQ ID NO: 41736 - DNA, 110 bp, synthetic construct
  source 1..110: mol_type = other DNA
acgagcctccctgagaggcagaaagcagctagagctcatcctggggatatagacactggtatcagccattgtctggcctcagtcgcacccactaccagtctgataccagc

SEQ ID NO: 41737 - DNA, 110 bp, synthetic construct
  source 1..110: mol_type = other DNA
tcaaaggaaaattaactaataatcaggtcctatgctaaattctttagagaagcgattatactaaatcatgacttaataactccctgtgatgccaggaatcattctcattt

SEQ ID NO: 41738 - DNA, 110 bp, synthetic construct
  source 1..110: mol_type = other DNA
ggcagccagtttctaacctaagctgcctggatccatgctccaagccacaaccgctctactgcctcccatggaagtggctctcagagaccctgacatacccctgtcctctg

SEQ ID NO: 41739 - DNA, 110 bp, synthetic construct
  source 1..110: mol_type = other DNA
tttatgattaattattttagtgctatcaatttcctcatctgtaaaatggaaatcaagatgcctaagtcagaggactatacagcaaagctccagtgaggccatttttgact

SEQ ID NO: 41740 - DNA, 110 bp, synthetic construct
  source 1..110: mol_type = other DNA
atttttgcttcaaactcaaatcaataaagctaaccaaactttacagcagacttgagactattatcagttaccgaattttaagacttgagactataaagatcccttaagat

SEQ ID NO: 41741 - DNA, 110 bp, synthetic construct
  source 1..110: mol_type = other DNA
ttcttgtcttttgaacttacaggtctcatcatttttgcttctgcctggtcaaagaggaaaactgctcaggattaacctggagcgctgtccttgtatttcattccctacca

SEQ ID NO: 41742 - DNA, 110 bp, synthetic construct
  source 1..110: mol_type = other DNA
ggaaaactgctcaggattaacctggagcgctgtccttgtatttcattccctaccagagctctgggtccattctgccctgacatgtttaaattctccctggccccagcccc

SEQ ID NO: 41743 - DNA, 110 bp, synthetic construct
  source 1..110: mol_type = other DNA
actccttgtagtgggcgcttcttggtcacgcatgtatttttacattttctctggctaggccttgagtgtgcaaacattgctgacagtggtcagtttgtataaggctaacc

SEQ ID NO: 41744 - DNA, 110 bp, synthetic construct
  source 1..110: mol_type = other DNA
gacctttgggactaaaagtccttaacaatgcagactttggtgcaaatgagctgagagcaatttggatctgactgctgagccagcggcacccgtggtgacaacagggaaag

SEQ ID NO: 41745 - DNA, 110 bp, synthetic construct
  source 1..110: mol_type = other DNA
agcaatttggatctgactgctgagccagcggcacccgtggtgacaacagggaaaggaagcacaaagcttggaggagtggaaaaaaagtcagctatgtctctgaggactct

SEQ ID NO: 41746 - DNA, 110 bp, synthetic construct
  source 1..110: mol_type = other DNA
ttctagccaatcagtggtgccagaaaatcttggatttcattttataatcctccctctctcacccagttattctttcagttctaacatctctccccttgttgctgaaccat

SEQ ID NO: 41747 - DNA, 110 bp, synthetic construct
  source 1..110: mol_type = other DNA
gtgccatgaaggaggctgcagactggccctggacactggtcacacactggttaaccccggctcactgttcgcctcaagctcagcagttcctatgcttggcctggtctgta

SEQ ID NO: 41748 - DNA, 110 bp, synthetic construct
  source 1..110: mol_type = other DNA
ctggcctcgctcagttggttaaaggatccagcatttgctgtgagctgtggtgtagatgcagctcagatttggcattgttgtggctgtggtgtaggcaggcaactctaatt

SEQ ID NO: 41749 - DNA, 110 bp, synthetic construct; identical to SEQ ID NO: 41748
  source 1..110: mol_type = other DNA

SEQ ID NO: 41750 - DNA, 110 bp, synthetic construct
  source 1..110: mol_type = other DNA
atatttatcagcctgaaaagaaaccgagtgctctttagcagtcgtcacccctctccacccccccccagccctttccacggcccctgccccccaccaatctgctttctgtt

SEQ ID NO: 41751 - DNA, 110 bp, synthetic construct
  source 1..110: mol_type = other DNA
tgtttcgttcagatcttggaagcctaaggtcctccacccgcagtgacactgacaccatagctattgcatctatttctgcccctccaaatcctttccttcctaccccaagg

SEQ ID NO: 41752 - DNA, 110 bp, synthetic construct
  source 1..110: mol_type = other DNA
aaagctttgttttaaaaactattcgtcccacttgccagtgtgttaaactatgatttcctaactgtgctgtataaaccaccgtatgatttttgtaacccaaatgtaatata

SEQ ID NO: 41753 - DNA, 110 bp, synthetic construct
  source 1..110: mol_type = other DNA
cagtgtgttaaactatgatttcctaactgtgctgtataaaccaccgtatgatttttgtaacccaaatgtaatatatgttttcccattgatattctctctctctttttttt

SEQ ID NO: 41754 - DNA, 110 bp, synthetic construct
  source 1..110: mol_type = other DNA
acagtgtcttcctacttgctgaagctaatggactcttttcagtcatcatcctatttggcttcttggcagcctgcgatgcatccgaacactcctctatttttttttttttt

SEQ ID NO: 41755 - DNA, 110 bp, synthetic construct
  source 1..110: mol_type = other DNA
tctcattcctggacaattcaggacaacagtcatagggtccagctaatcaaatacgctgtgtgcacagtgaacctggaggctggggcagaatgagcactgagtcactcagg

SEQ ID NO: 41756 - DNA, 110 bp, synthetic construct
  source 1..110: mol_type = other DNA
tcctctaactgaagctgtagaggggcagaacttgagacagactgtctgcagcagccctgtgcaaggctagccaccctgccagtttagctgccccaggagaattcctacaa

SEQ ID NO: 41757 - DNA, 110 bp, synthetic construct
  source 1..110: mol_type = other DNA
cctgtgcaaggctagccaccctgccagtttagctgccccaggagaattcctacaagaacccctaggagtcctgccactcaacatagtgggcttctccccaagagccaagc

SEQ ID NO: 41758 - DNA, 110 bp, synthetic construct
  source 1..110: mol_type = other DNA
gtgacagggatgagggaagggggactcccagatgcctgccctttaatcatgacttcagtgcagctaaacattgtttatctcacagtggtccagggatagagtgatgaaga

SEQ ID NO: 41759 - DNA, 110 bp, synthetic construct
  source 1..110: mol_type = other DNA
cagtgcagctaaacattgtttatctcacagtggtccagggatagagtgatgaagaactctcctatctctccagacttgtgcctttttttttttttttttttttttttttg

SEQ ID NO: 41760 - DNA, 110 bp, synthetic construct
  source 1..110: mol_type = other DNA
gaggtcttatcatgtcacagctcatttgattgctgtggcacccagcctggagagggcagggcgtcttagtaccacttcacaaatgagaaaataaagtgtacagaggtggt

SEQ ID NO: 41761 - DNA, 110 bp, synthetic construct
  source 1..110: mol_type = other DNA
aaacttaaaacacttgcttcctctaagtgtatatcattggcctggagcttgggtgtaaagtttattgagaaagtgcccagacaacgtgcacagtcagaggctcccaggca

SEQ ID NO: 41762 - DNA, 110 bp, synthetic construct
  source 1..110: mol_type = other DNA
taaagtttattgagaaagtgcccagacaacgtgcacagtcagaggctcccaggcatgactaatcgcatgtagattcgaggaccagaacagctgcaaaagcggtgccctgg

SEQ ID NO: 41763 - DNA, 110 bp, synthetic construct
  source 1..110: mol_type = other DNA
ttcaagccaactggacagaaagtctagttcacatatgcttgtctagcaaaaccccacactaaatcaaagccctcattgccccggtacgtttaaggggtgtctgtcttcat

SEQ ID NO: 41764 - DNA, 110 bp, synthetic construct
  source 1..110: mol_type = other DNA
caaaatctcccccgagccatgaaatttaattgtccttttggtgtcttagtatatgtgaatacaacctaactgtccttagaacaagagagaaccttctggcagctgaacag

SEQ ID NO: 41765 - DNA, 110 bp, synthetic construct
  source 1..110: mol_type = other DNA
tttacttgagtcaggtttctttggggtgggacgtgtgttgctgagggtgccgggcacactggcatctactgagctcctcttcctgcacagcagaagtcctaggtggacct

SEQ ID NO: 41766 - DNA, 110 bp, synthetic construct
  source 1..110: mol_type = other DNA
acactggcatctactgagctcctcttcctgcacagcagaagtcctaggtggaccttccttaatagcatgctaagaaagttccccaaaggtgagatttttcagaaatccca

SEQ ID NO: 41767 - DNA, 110 bp, synthetic construct
  source 1..110: mol_type = other DNA
gctctatggggggaagggggtgtggagtgtgaggcattgaaggtgcacctttgttgcagagtcagagggagctcaacccttctcaatcctaatgtgcattgcaatcactc

SEQ ID NO: 41768 - DNA, 110 bp, synthetic construct
  source 1..110: mol_type = other DNA
tgtccctttaaaggccagctaactcaaatccacagccacagtatttgtttttgaactgtactgactcgcacaactgaatagctttaactcctatatacctggcactttac

SEQ ID NO: 41769 - DNA, 110 bp, synthetic construct
  source 1..110: mol_type = other DNA
gcccaacatttctgaactccaagttttacatctttccaatgttacattttagtaattttctgcatggagttcaaagctcatgtcctgcatttatgcagcccttttttcca

SEQ ID NO: 41770 - DNA, 110 bp, synthetic construct
  source 1..110: mol_type = other DNA
ctggttgttggcagaattcatttcctggtggttgcaggactgaggtgcccattatcttgctagctgtcagcctggtaccaccctcagcttctagaagccactctcaggtc

SEQ ID NO: 41771 - DNA, 110 bp, synthetic construct
  source 1..110: mol_type = other DNA
taaagctttagctacagaagagctggctttgaataaagaccctcgaggagtgggttttagaacctaaccagtcaggagagaaggtctgggggttgtaggagacgggtctg

SEQ ID NO: 41772 - DNA, 110 bp, synthetic construct
  source 1..110: mol_type = other DNA
tttagaacctaaccagtcaggagagaaggtctgggggttgtaggagacgggtctgaataaactcggcagtcttgagggaagcaccttccatgaaactggaactagaaaat

SEQ ID NO: 41773 - DNA, 110 bp, synthetic construct
  source 1..110: mol_type = other DNA
tgaagcaggtgaaggtattggataagatcatctctagtactttacagttagtagatgtctagatctagattcctttagactgtctatagaatgtgagaggccataaatgg

SEQ ID NO: 41774 - DNA, 110 bp, synthetic construct
  source 1..110: mol_type = other DNA
agcatccttttcctgacagtgaaatgggacagcacagcactgcccttcaccagcgggctttctacactctgctttttaaattctcccccttgttcacaggaatctctgaa

SEQ ID NO: 41775 - DNA, 110 bp, synthetic construct
  source 1..110: mol_type = other DNA
tgtttcctttgactttgcttctgcctaatattgactttctctcatcctctctgctttggtcctggtggccacagatcataggacatcagtagaggaccaatgagagagat

SEQ ID NO: 41776 - DNA, 110 bp, synthetic construct
  source 1..110: mol_type = other DNA
tgtttttaattgaatttctttgccttgaagcaattatagatttatatgctcttgtaagaaataagagagagagatcctgtgcaccctttatgcagtttcccttaaaggta

SEQ ID NO: 41777 - DNA, 110 bp, synthetic construct
  source 1..110: mol_type = other DNA
aagaaataagagagagagatcctgtgcaccctttatgcagtttcccttaaaggtaacatcttttaaaacaatggcacaatatcacagccaggatactgacaataatacag

SEQ ID NO: 41778 - DNA, 110 bp, synthetic construct
  source 1..110: mol_type = other DNA
cagttttatctcctgaatatatacagaaaaaaatatatgttccattcaacaatctttcacatattcaaagacatgtgtgacgttgcccttaagtcctttcctcaatttaa

SEQ ID NO: 41779 - DNA, 110 bp, synthetic construct
  source 1..110: mol_type = other DNA
gctacttaggagaatacatctgatgtactagctattttcaaggcatgaagacatagctacaaatctgtctttgaggagttaatattctagtgaaataaacaatatatact

SEQ ID NO: 41780 - DNA, 110 bp, synthetic construct
  source 1..110: mol_type = other DNA
atgaaggatgacacatcatgccttctgggacaaggactccttttcccctgggtctcacccatgtgcgcatgaggtatacatgggagtgaacttctgtttgtttttctctt

SEQ ID NO: 41781 - DNA, 110 bp, synthetic construct
  source 1..110: mol_type = other DNA
cagaacatcctcaggaaaaaaaaaaaaaaaaaaaaaaagtccctggacacagattttacacccttcacaaaaattagctcaaggtgcattatagacctaaacgtaaaatg

SEQ ID NO: 41782 - DNA, 110 bp, synthetic construct
  source 1..110: mol_type = other DNA
ttacacccttcacaaaaattagctcaaggtgcattatagacctaaacgtaaaatgcaaaaccataaaattcctggaagacaacatagaagaagaactagatggcatttcg

SEQ ID NO: 41783 - DNA, 110 bp, synthetic construct
  source 1..110: mol_type = other DNA
gctcgaattctgtgctcatcaagcaagcttctatttaaacatctacttgccatgaacatctactttgagggagagaatgtattgtgatggtgacacaggttttctggtac

SEQ ID NO: 41784 - DNA, 110 bp, synthetic construct
  source 1..110: mol_type = other DNA
gcggcagccggaacatccaggaacagcatcacacttcctgagtgcctggctgtgaaattgtagctctcattgccctacgtgtccttatacaaattcctgccactaaggat

SEQ ID NO: 41785 - DNA, 110 bp, synthetic construct
  source 1..110: mol_type = other DNA
aaaaatatcccaagattatgaagtaaagagatttagcaaatctggagtccagacatctgtatttttgcaaaagctcatgcagacatctaagccagagccactggcttaga

SEQ ID NO: 41786 - DNA, 110 bp, synthetic construct
  source 1..110: mol_type = other DNA
tctgtatttttgcaaaagctcatgcagacatctaagccagagccactggcttagaagatgtcagattcaaatgaagaatacatttgaggccaataagcattttaaagaat

SEQ ID NO: 41787 - DNA, 110 bp, synthetic construct
  source 1..110: mol_type = other DNA
acctctggggcccacataagcctctccagctccaggcccaagtggtaagagggacaggtatttgcataggctgtttttggaccttggctgtgcaggctgcgctacccatt

SEQ ID NO: 41788 - DNA, 110 bp, synthetic construct
  source 1..110: mol_type = other DNA
caatgccaactgtaaatatgtgctgacaaaaattcctctcaagaagaggatagcatatatcagacaaagctgggagcgttcattagcagcactcactaaagaaaatgtgg

SEQ ID NO: 41789 - DNA, 110 bp, synthetic construct
  source 1..110: mol_type = other DNA
tgcccttcaaaaataatgacctttgaaatgatttgtaaggtgaggctgcttacgatgaaccaatgcaaagctgcataaatgtgtaagaagctatctgcccttgaacctgt

SEQ ID NO: 41790 - DNA, 110 bp, synthetic construct
  source 1..110: mol_type = other DNA
aacaaagtggggatattatccaaaaagaaaagttatggcagctaatattcagcaaagttatagatgaaagggaaaatgatgacagtagttaaatgataggaagatgagat

SEQ ID NO: 41791 - DNA, 110 bp, synthetic construct
  source 1..110: mol_type = other DNA
ctctggagtatgcttgtatacagttatgaaatactgtcctagaatcaagcttggatgattgcttagtgagtatttatcatattgttgtttgtactttttcatatttaaaa

SEQ ID NO: 41792 - DNA, 110 bp, synthetic construct
  source 1..110: mol_type = other DNA
aactgagatccttacaggtgacgcccagtgttcttcttgagcttcccttaggggactgggggggttcaccatggccacaaaactaccttgtcaaggctgacacagagctc

SEQ ID NO: 41793 - DNA, 110 bp, synthetic construct
  source 1..110: mol_type = other DNA
ctgaactaaaatgcaaggcagttttgtgccagctaaaaaaaaagaatgaagaaaaaaatatcgcatgtaaaacagaacataagaaatagccacacaaagttcccgtcgtg

SEQ ID NO: 41794 - DNA, 110 bp, synthetic construct
  source 1..110: mol_type = other DNA
ttatctaagatgtagagaggggcaatagaaaaaaatagaacagtgtaaggagacccagaaacaatgtgagagggactgcaaggcctcattgagtgggtgatacttgaact

SEQ ID NO: 41795 - DNA, 110 bp, synthetic construct
  source 1..110: mol_type = other DNA
attgtgcttttttttcatagatactatgccttagaagtctcatattttaagtcctctttggatcgaaaattgcttgagcttttgtggaataaatactgggtgaatacgct

SEQ ID NO: 41796 - DNA, 110 bp, synthetic construct
  source 1..110: mol_type = other DNA
agaaccccccccaaagtgttatcacatgagttttacatgagttttttcttcagattctgttttctaacttgggctaaaacagagaaattttggatcatctgaattttcat

SEQ ID NO: 41797 - DNA, 110 bp, synthetic construct
  source 1..110: mol_type = other DNA
atcaacccaaaggtctctccaccggagaatggatgaactgtggtacatccatacggtgtaatactactcagcattaaaaaggaaaactaggagttcccgtcatggcttag

SEQ ID NO: 41798 - DNA, 110 bp, synthetic construct
  source 1..110: mol_type = other DNA
aactggaaagatgtcaacttttcaacattttttagcacctcattcttcaataaataaatgctgggtacactttagcataactccagctttcacaagggtggtatttcatc

SEQ ID NO: 41799 - DNA, 110 bp, synthetic construct
  source 1..110: mol_type = other DNA
ctgtccagcactctgccaggccctgggagtggaatgtcaaacaggccactgacctcttcctgactctgaaaagcttctggtctagaaggggaaacaaaagtaaactaagt

SEQ ID NO: 41800 - DNA, 110 bp, synthetic construct
  source 1..110: mol_type = other DNA
ctaaacttacctgctagtggttaaagaaagcttcccaaaaggtgatgtattcactgagatctaaagacttaataggatgtttaaaaatcaaattggcaagattcaacacc

SEQ ID NO: 41801 - DNA, 110 bp, synthetic construct
  source 1..110: mol_type = other DNA
gtccaggtgtgtctgatatactcgaaggcccttatgtaagagatgcaagagcttggagtcagtagtagatgttaccaccaaatgaagagtctggagtggtgtgaggaagg

SEQ ID NO: 41802 - DNA, 110 bp, synthetic construct
  source 1..110: mol_type = other DNA
cagattgaactgtaaggagtggagctctgggaggaaggtgctgaccttcagaggctgctgcagcccccctggcaggaagtggtgagacccagaaccagagcagtggctgg

SEQ ID NO: 41803 - DNA, 110 bp, synthetic construct
  source 1..110: mol_type = other DNA
cccaatgtctatctcccatttcctaagatattcaacaagtatctcttctgtaccagctggagactcttgaaacaagctgataaataaacatttattaagcccatactctg

SEQ ID NO: 41804 - DNA, 110 bp, synthetic construct
  source 1..110: mol_type = other DNA
tttgctttgtggattgcagtggagaaaaggcatcccacggaaatcgctgagatgcgtaaataaagacagaaaaaaagtccacaggatgtacaatgctaacaggggtctta

SEQ ID NO: 41805 - DNA, 110 bp, synthetic construct
  source 1..110: mol_type = other DNA
gttaagctgatctcaaagcctgcctccagctcagtttctccatgtggtggctacgtggccttagttgtctagagttcctgcagctctttcaggatcagcttttactcgta

SEQ ID NO: 41806 - DNA, 110 bp, synthetic construct
  source 1..110: mol_type = other DNA
agtctgccatattttaagcagcttggatctttgtcagctcacaagggcagatgcactcactcatttatcacatgcctctaacaatggaattggcaagttcagagaggctg

SEQ ID NO: 41807 - DNA, 110 bp, synthetic construct
  source 1..110: mol_type = other DNA
caataatgagtagcacctagttgtgttctggggaggacctcagagggaaggaaagtagaaccctcctatagctccaagttgcgctcaagtccaacgtgttcaaaactgtg

SEQ ID NO: 41808 - DNA, 110 bp, synthetic construct
  source 1..110: mol_type = other DNA
tagaaccctcctatagctccaagttgcgctcaagtccaacgtgttcaaaactgtgaagacaaaattgagcccctacccgtgctaccctgaacattaaccgtagccagtgc

SEQ ID NO: 41809 - DNA, 110 bp, synthetic construct
  source 1..110: mol_type = other DNA
acacatgaaccatgcagtaactgagaaaagaaaattccaggcagtggaatagtaaatacaaaggccctaatagtaggagctacttgatgtgtttgagggacactgagcag

SEQ ID NO: 41810 - DNA, 110 bp, synthetic construct
  source 1..110: mol_type = other DNA
atacaaaggccctaatagtaggagctacttgatgtgtttgagggacactgagcagggccaggatgaactacttaggatttaaatctcagttaactataaatagataaact

SEQ ID NO: 41811 - DNA, 110 bp, synthetic construct
  source 1..110: mol_type = other DNA
taatctatccataaacaatgaaaggaaaccatatttctggagtaggtagtccccccttgcatttaggttaactttgtaaagaaaagtaactgttgagatagcagctggga

SEQ ID NO: 41812 - DNA, 110 bp, synthetic construct
  source 1..110: mol_type = other DNA
catagatgtgtgtatgtaatatgctgtgttcaccagatgtcctctgactattcattaaggtgcttgccaattaccattgagctactaaatagtctagagtgaccaaacct

SEQ ID NO: 41813 - DNA, 110 bp, synthetic construct
  source 1..110: mol_type = other DNA
taggtgtacagcaaagtagctgggtcttagcatgacgaggtggtggtaggacaggaggactgcggcaggaagctggtggagagcttggtatgtggatgttattctgacca

SEQ ID NO: 41814 - DNA, 110 bp, synthetic construct
  source 1..110: mol_type = other DNA
aggactgcggcaggaagctggtggagagcttggtatgtggatgttattctgaccacagtgcggggcattggaggattttgagcagtagttggggtgtcggctcttgcttc

SEQ ID NO: 41815 - DNA, 110 bp, synthetic construct
  source 1..110: mol_type = other DNA
ccaggctagtggtccaattagagctgtagctgccggcctacatcacaagatccaagcaactcaagatccgagccaggtctccgagctacactacaaaactctcagcaaca

SEQ ID NO: 41816 - DNA, 110 bp, synthetic construct
  source 1..110: mol_type = other DNA
taactgagctgctatagataggctgatccagtaaactcccccgcctcccagtttgatcatttattagaacagctgcagaactgaggaagtcacttgacttggatttgcca

SEQ ID NO: 41817 - DNA, 110 bp, synthetic construct
  source 1..110: mol_type = other DNA
atcatttattagaacagctgcagaactgaggaagtcacttgacttggatttgccaccttttttataaaggatacaaatgaacaaacacataggacaagatctggaagtgt

SEQ ID NO: 41818 - DNA, 110 bp, synthetic construct
  source 1..110: mol_type = other DNA
tgtaaacactggtggattctggtcgagcatcgttgggaggtgccattctaaaataatcagattttgcccaagtctccaactcttgagcttgaactgcttcccacccccac

SEQ ID NO: 41819 - DNA, 110 bp, synthetic construct
  source 1..110: mol_type = other DNA
tctggggaattttttaaatagcatcaattttgatttgcctgggatggaatcaatgtgtgattctctcttgaagtggctgagctacgagcactcgagctgtggatgcaaca

SEQ ID NO: 41820 - DNA, 110 bp, synthetic construct
  source 1..110: mol_type = other DNA
taagttgatcactttgccttcctttcttccagcagagtataggtgtcatggctagagttgtagcagctgtctcctgactgtgaggtgacaaactcattctaagggtgatt

SEQ ID NO: 41821 - DNA, 110 bp, synthetic construct
  source 1..110: mol_type = other DNA
accattggttctcccttaaccctgtcacagctggacaggaggatcctgggaaacagcacatcccagacgaggaatgctgtggtgccaaggggttaacagacactttgtgt

SEQ ID NO: 41822 - DNA, 110 bp, synthetic construct
  source 1..110: mol_type = other DNA
acccagccaaggctttctcattcctgacccacaaaactgtgagcaaaataaacaagggtcttaaatccctaaggtctggcatagatacagagctgaaaaagtaggttaaa

SEQ ID NO: 41823 - DNA, 110 bp, synthetic construct
  source 1..110: mol_type = other DNA
aaataaacaagggtcttaaatccctaaggtctggcatagatacagagctgaaaaagtaggttaaagaaagactataggagttctcatcgtggctcagcggtaacaaaccc

SEQ ID NO: 41824 - DNA, 110 bp, synthetic construct
  source 1..110: mol_type = other DNA
aagtaaggctatttacataaagtagcttttgaggttcctgtaatacaaactaacacgtgtatatgttagtgctttggtaccaagaataacggaggtgtatcagtcagagt

SEQ ID NO: 41825 - DNA, 110 bp, synthetic construct
  source 1..110: mol_type = other DNA
aacattcatccggaaatgttttgaatcggtatgccaacctcaacctcctacacctacccatcatccaaaagcagctttagcactggccatgttcttatgtgagataaaga

SEQ ID NO: 41826 - DNA, 110 bp, synthetic construct
  source 1..110: mol_type = other DNA
acccatcatccaaaagcagctttagcactggccatgttcttatgtgagataaagacaaaccttttgagcaagactaatcaaaacaaaaataacaattctttgcaaataag

SEQ ID NO: 41827 - DNA, 110 bp, synthetic construct
  source 1..110: mol_type = other DNA
tttttaaaatttttacttgcctgcattgcactcctgcctgagtagtcaagagaccccagaatatttgaaataatacacaaagaaacaggaaatagttaatggttgcttct

SEQ ID NO: 41828 - DNA, 110 bp, synthetic construct
  source 1..110: mol_type = other DNA
taggcagagtatcagagcctcagcccagaaaaatactcttcgcatttaaaacccagtcaaggggagttcctgtcatggcacatcagagatgaatccgactaggaaccatg

SEQ ID NO: 41829 - DNA, 110 bp, synthetic construct
  source 1..110: mol_type = other DNA
agcctcagcccagaaaaatactcttcgcatttaaaacccagtcaaggggagttcctgtcatggcacatcagagatgaatccgactaggaaccatggggttgcaggttcga

SEQ ID NO: 41830 - DNA, 110 bp, synthetic construct
  source 1..110: mol_type = other DNA
tgccctggtaaaagcattgctttgtattagctgtaccttgaaactgtgattcctccaaaccactttatcccagaagacaagtggcttgttgtttggtaatgtttagttgt

SEQ ID NO: 41831 - DNA, 110 bp, synthetic construct
  source 1..110: mol_type = other DNA
acccacactgcttgtaataagacataatatgatggaaattgattgcatttatggatagtttggaggtagaaaaatattgaaaaccaccagcctgatgcaggagatagaca

SEQ ID NO: 41832 - DNA, 110 bp, synthetic construct
  source 1..110: mol_type = other DNA
ggagatttcttgagcaggttttcacactcagtggacaagtagaaggaactctgttgtgcaccactcagtacccgtccccccagctcctttaagttctgtccatctaaagg

SEQ ID NO: 41833 - DNA, 110 bp, synthetic construct
  source 1..110: mol_type = other DNA
gctgcatttatcttacaggcaatgaaaacacatctgcccggtgtctcgttacccggtttaatcatcaccaaccctaagtcacggcctaggatctgtctcttcactcaagt

SEQ ID NO: 41834 - DNA, 110 bp, synthetic construct
  source 1..110: mol_type = other DNA
ttaccagccctgctgagtttggcttgcagtggtcttgctgcctgagagtaggttggccagctcagcacctggcacagaccaggagcccagccaacatctgttaagtcaaa

SEQ ID NO: 41835 - DNA, 110 bp, synthetic construct
  source 1..110: mol_type = other DNA
aacttttagcccctggtacagctcccagcatagaggcaagtactcaagaaatgatggcctcttctctgccctttgccaattaactaacctcatttaagggccatccagtg

SEQ ID NO: 41836 - DNA, 110 bp, synthetic construct
  source 1..110: mol_type = other DNA
acatagagggccagggaacaacaaaataagcaccttaggccggacagagcccacgctccagatgacgggcggcttcttaattatgtgcgcaagcagcaaaagcagggctt

SEQ ID NO: 41837 - DNA, 110 bp, synthetic construct
  source 1..110: mol_type = other DNA
catatcacatggagatacaaaaaagcactctagagctacagatttatcaagtctatataacttttatcttcttttgggattgattttggactgatgaaatacgtattgtg

SEQ ID NO: 41838 - DNA, 110 bp, synthetic construct
  source 1..110: mol_type = other DNA
taattgagaatactggcgtttgatcaactcttttctggccttggcctattataggcggtaaaggttgtggtacaactgaaattccagctttccagatatgttagttgtaa

SEQ ID NO: 41839 - DNA, 110 bp, synthetic construct
  source 1..110: mol_type = other DNA
cagtatgcaatgatgtgatacctaaatctggactctgaaatgttatcattccgaagacatttcagctggcttattattttacaaaaatcaatttcataggcagcattctg

SEQ ID NO: 41840 - DNA, 110 bp, synthetic construct
  source 1..110: mol_type = other DNA
gacatttcagctggcttattattttacaaaaatcaatttcataggcagcattctgcattgacaaagaagcagaaaaaactttctctgtgtgatttggggccacaaatgag

SEQ ID NO: 41841 - DNA, 110 bp, synthetic construct; identical to SEQ ID NO: 41839
  source 1..110: mol_type = other DNA

SEQ ID NO: 41842 - DNA, 110 bp, synthetic construct; identical to SEQ ID NO: 41840
  source 1..110: mol_type = other DNA

SEQ ID NO: 41843 - DNA, 110 bp, synthetic construct
  source 1..110: mol_type = other DNA
attactttgggtaggattcaatttagttagacatggcattcagcactttttaaaaaatctggttcagcttgttaacaaggcagtttgcctcataaaatactaaggctgct

SEQ ID NO: 41844 - DNA, 110 bp, synthetic construct
  source 1..110: mol_type = other DNA
gcattcagcactttttaaaaaatctggttcagcttgttaacaaggcagtttgcctcataaaatactaaggctgctaaaataaaaagaagcagagtataaaactatttgac

SEQ ID NO: 41845 - DNA, 110 bp, synthetic construct
  source 1..110: mol_type = other DNA
ctcagtgcagtgtgatcttagcctcataacttaattatatggagtgttaaagtaggataataatatcttccatatggagcttcttgaagtttgactagactagcactgca

SEQ ID NO: 41846 - DNA, 110 bp, synthetic construct
  source 1..110: mol_type = other DNA
gataataatatcttccatatggagcttcttgaagtttgactagactagcactgcattttccaggacaaatcactgtacaagaaagtgaacatattcttctcaggtcttta

SEQ ID NO: 41847 - DNA, 110 bp, synthetic construct
  source 1..110: mol_type = other DNA
gctaagaatttggggtctaaaatcaggccatcagttctgctattgactagctgagtaatctcgagtgaactgctctatttctgtgcctcagtctcttcatctatcaaaag

SEQ ID NO: 41848 - DNA, 110 bp, synthetic construct
  source 1..110: mol_type = other DNA
taatctcgagtgaactgctctatttctgtgcctcagtctcttcatctatcaaaagatgataggaatggtacttactgtcttgagatgttgtgaggattaaatgagataat

SEQ ID NO: 41849 - DNA, 110 bp, synthetic construct
  source 1..110: mol_type = other DNA
atgggcagagatggggaagtgcctgattttcataatacaatagtgctttcaagatataattcatgctttaaacacagcctatttaaggtgcaaaagacaatggtttttag

SEQ ID NO: 41850 - DNA, 110 bp, synthetic construct
  source 1..110: mol_type = other DNA
tacataagggtaaatattgttaacagcaagaataggaatttggaattcaccagcatgtaaaattaatgctttcctttctgctagaaccatgaaagctcgagaagcctata

SEQ ID NO: 41851 - DNA, 110 bp, synthetic construct
  source 1..110: mol_type = other DNA
tgtaaaattaatgctttcctttctgctagaaccatgaaagctcgagaagcctatataaaaagtgctacagaattgtcagcagcgtgactgcaatcggcagcctcttcatt

SEQ ID NO: 41852 - DNA, 110 bp, synthetic construct
  source 1..110: mol_type = other DNA
gggcacccacataaggaaggtcaatctgtttcattcagtctaaaagtttaaatgttaatttcatccaaaagcattctcagagacacacccagagtaatgtttgaccaaat

SEQ ID NO: 41853 - DNA, 110 bp, synthetic construct
  source 1..110: mol_type = other DNA
caagcattgattgaggtcaggaactgctgtcgtgtcaattcatagtcaagcttggatttttctacaagtacatgtagcacacaacatgatgtggtgtttgaataaacatc

SEQ ID NO: 41854 - DNA, 110 bp, synthetic construct
  source 1..110: mol_type = other DNA
tataaatatcacacaacttttgcactctagactgaatgtaacactcacattctgccatagatcccatctagcttctggtacctacaacctagcatggacggacttgaaga

SEQ ID NO: 41855 - DNA, 110 bp, synthetic construct
  source 1..110: mol_type = other DNA
atgaccttccttcgtgaaagaagggacaatcccacgaggccaggtcttagtgggactgagggactgagggagtagcctgtggctcttgcttcccatcactcatgacggtc

SEQ ID NO: 41856 - DNA, 110 bp, synthetic construct
  source 1..110: mol_type = other DNA
ctgagggactgagggagtagcctgtggctcttgcttcccatcactcatgacggtcgacacggcagtccgcttcctgggcacaggtgtgctggtctcgcaggaaggtgggc

SEQ ID NO: 41857 - DNA, 110 bp, synthetic construct
  source 1..110: mol_type = other DNA
aaggctgaatcataaagattattttattaacacacagtctatttatgtgcaaaggctttcctatgatgtcagcttacagacgtggtaccttggtcaccgcagagagaagt

SEQ ID NO: 41858 - DNA, 110 bp, synthetic construct
  source 1..110: mol_type = other DNA
ctttcctatgatgtcagcttacagacgtggtaccttggtcaccgcagagagaagtgttctgcttcttttcttcggaatttatagtttgtcaggaatttcacttgggaaaa

SEQ ID NO: 41859 - DNA, 110 bp, synthetic construct
  source 1..110: mol_type = other DNA
gcctttatctaagctgaactaattctgcctaacaggttgtattccactgaatagctttttaaaagggccaagaatctgaatcgaatgtagttgcccatcagccttgaaat

SEQ ID NO: 41860 - DNA, 110 bp, synthetic construct
  source 1..110: mol_type = other DNA
tacatgtcgtctcctccatgaaattttgctcaaaggcctcctcacctcccatcgcaacccaacagaagtaatcacacatgctccatcatttcttaatcgggttgcctgtc

SEQ ID NO: 41861 - DNA, 110 bp, synthetic construct
  source 1..110: mol_type = other DNA
tggtgacaaaaatattaaatactgcaactggtgatccaagatgagatggaagacgtgtgactacagggcaccactatgtacagcagagagaacaggctttggagtaagtc

SEQ ID NO: 41862 - DNA, 110 bp, synthetic construct
  source 1..110: mol_type = other DNA
ccatacagttactgaaaaaagtggtagctaggtgaggtgatagatgtcttaattgttggtagtaatcatttcacagtgtacacctatgtcaaaccatcaccttgcacacc

SEQ ID NO: 41863 - DNA, 110 bp, synthetic construct
  source 1..110: mol_type = other DNA
acatcttaactcactgagcaaggccggggactgaacctgcatccttatggatactaatcgggtgtttacctgctgagctacaatggaaactccagactccacagccattt

SEQ ID NO: 41864 - DNA, 110 bp, synthetic construct
  source 1..110: mol_type = other DNA
aatcgggtgtttacctgctgagctacaatggaaactccagactccacagccattttttaagataaactcttgcaacattatcgtttctctttatccaacttgtgaaggat

SEQ ID NO: 41865 - DNA, 110 bp, synthetic construct
  source 1..110: mol_type = other DNA
ataaatctggtcaaacatacaaacgaacctcatactcagcggactagtaagatagtgttgtcttactggccttatctgttgaattttgcctcacctggatgctgtggagg

SEQ ID NO: 41866 - DNA, 110 bp, synthetic construct
  source 1..110: mol_type = other DNA
tgttgtcttactggccttatctgttgaattttgcctcacctggatgctgtggaggtgtcacgagttacagagatggaaacataaaccatggcagtaaaactaggactggc

SEQ ID NO: 41867 - DNA, 110 bp, synthetic construct
  source 1..110: mol_type = other DNA
ttcagaagttcgaataagcttggttttctttttactctgcaaagagttttggcgctggagactattttcctgtgtggggcacatgccttgggtttgaagagctcacgtat

SEQ ID NO: 41868 - DNA, 110 bp, synthetic construct
  source 1..110: mol_type = other DNA
tggagactattttcctgtgtggggcacatgccttgggtttgaagagctcacgtatctggtcagtggagagagtttactaacgctcacaaataccattggaattaaaatgc

SEQ ID NO: 41869 - DNA, 110 bp, synthetic construct; identical to SEQ ID NO: 41867
  source 1..110: mol_type = other DNA

SEQ ID NO: 41870 - DNA, 110 bp, synthetic construct; identical to SEQ ID NO: 41868
  source 1..110: mol_type = other DNA

SEQ ID NO: 41871 - DNA, 110 bp, synthetic construct
  source 1..110: mol_type = other DNA
tcactgcctgatctcttgctgtccttaagagaagtactgtgttgccaggtggctctcccggagctggctgtcccacaggcatgaatcccaggactgccccaaggatggag

SEQ ID NO: 41872 - DNA, 110 bp, synthetic construct
  source 1..110: mol_type = other DNA
agcagatgtgttgcctagggcctgccgtacttctctgttgtgcagcagctcacttcccctccactccctgtcctggaccacacgaccccctctgcccatggtttcggtgc

SEQ ID NO: 41873 - DNA, 110 bp, synthetic construct
  source 1..110: mol_type = other DNA
cccctccactccctgtcctggaccacacgaccccctctgcccatggtttcggtgctgttcttgcacctccttggttctgaacctctgcatctcttctctcttgactgttg

SEQ ID NO: 41874 - DNA, 110 bp, synthetic construct
  source 1..110: mol_type = other DNA
gaggatacaccttgtgcccacagtgcatttgacagggttacccctttctttctcattcaaaggacaaatgcacacaacaatatcctaatgctccaaaccagctgtcagct

SEQ ID NO: 41875 - DNA, 110 bp, synthetic construct
  source 1..110: mol_type = other DNA
ttcaaaggacaaatgcacacaacaatatcctaatgctccaaaccagctgtcagctccacttcctaaggcttgcaaaggaggggacttgaacttgagtgtccatttggatg

SEQ ID NO: 41876 - DNA, 110 bp, synthetic construct
  source 1..110: mol_type = other DNA
gaagtatcgctaccgtattggaaacagctcacatcctgaaaaattccacctacgctttctgttacagtagaccactctataatgtttcattaaccgagaaaccagtctct

SEQ ID NO: 41877 - DNA, 110 bp, synthetic construct
  source 1..110: mol_type = other DNA
ttattcaaactgaagcagctgcttcatcagtggaacgtttggcttgtgtgcaatgcatgcagctgtcaggaaaaaccttcttggtgctgcaaactgagactctaactggc

SEQ ID NO: 41878 - DNA, 110 bp, synthetic construct
  source 1..110: mol_type = other DNA
tcctttgacctctgtggcttcagtgtccccgtctgtgaagcagaatcctgaaggagctcacagcgcatttggagacagcacatagtgtttcagaggcaggatgcattcgt

SEQ ID NO: 41879 - DNA, 110 bp, synthetic construct
  source 1..110: mol_type = other DNA
gctcacagcgcatttggagacagcacatagtgtttcagaggcaggatgcattcgtgaatgcgggaagctgcgggaatagtggaccctgaatactgagcaccctgtggagg

SEQ ID NO: 41880 - DNA, 110 bp, synthetic construct
  source 1..110: mol_type = other DNA
aatcattatagtaccatccaagcagcaaggggccttagtgggtaaacctatcaatattgagaccctggaaattcatttcctgatgttttcaacaatggtgaaagcctctc

SEQ ID NO: 41881 - DNA, 110 bp, synthetic construct
  source 1..110: mol_type = other DNA
gttggccccaccatgctgtaagagtcatcaactctgagactctgtcttgcttccagctacaatcccaagtacatagcaaaagaatttaagtgaagggaaatacatgtgtc

SEQ ID NO: 41882 - DNA, 110 bp, synthetic construct
  source 1..110: mol_type = other DNA
gattttgagatctttgcggatggaagcatacttaatgaagaagcgaagtgaaacaggtctggtgagaggcgaacacgattaccgatgcagtcgtcaaacgttcgtgttcc

SEQ ID NO: 41883 - DNA, 110 bp, synthetic construct
  source 1..110: mol_type = other DNA
ggtctggtgagaggcgaacacgattaccgatgcagtcgtcaaacgttcgtgttccctgaaatcagccatgggagcttgttaaacacgcatgcgccccagtctgcccataa

SEQ ID NO: 41884 - DNA, 110 bp, synthetic construct
  source 1..110: mol_type = other DNA
cacccaagtggtgccatcaccatcggggtaatttcagtgcctgtggaattgcttggttgatgtgctatttccagggaccacctctagaccgatctctggacctcattctc

SEQ ID NO: 41885 - DNA, 110 bp, synthetic construct
  source 1..110: mol_type = other DNA
ctttctcaaaggaaataaacatattaagcagcatgtatgtcaaaaccacagaaacaagagctcttcacattcatcaaacaaaagagtctgccagaattaatctgctttgt

SEQ ID NO: 41886 - DNA, 110 bp, synthetic construct
  source 1..110: mol_type = other DNA
atgctaaacatacatcccagaattaaattataaggatgagagctcgagggagatgatgtttagtctggagaggtgtcctctgctaaagtaagggccctggttggaaataa

SEQ ID NO: 41887 - DNA, 110 bp, synthetic construct
  source 1..110: mol_type = other DNA
aatgtaatgaagaattttatccattcagtgctaaagatgtgagctgcatagaataagccaatagagggaagaagctgcaaacagagaagagggagaatcagtcgagaagc

SEQ ID NO: 41888 - DNA, 110 bp, synthetic construct
  source 1..110: mol_type = other DNA
tgaagttactgtgatttatttcagagtccttttcagggtgaagagatgagctgcggctttatctagaggctgttctagacttgtccggaatggttcagggacatctctgc

SEQ ID NO: 41889 - DNA, 110 bp, synthetic construct
  source 1..110: mol_type = other DNA
aactgcagacatatttttggcccagactttgataattgccatcaaatgacttagcaaacatccttatgtttaagacacagctgtcaggtactatgcaaaagttattcgga

SEQ ID NO: 41890 - DNA, 110 bp, synthetic construct
  source 1..110: mol_type = other DNA
tttttccctttctgcggttcttcatttcttcctgtagacacataaatatccttctcttcagcctaaaggtattttttttactgtatgttgcctggaagatctatcaatta

SEQ ID NO: 41891 - DNA, 110 bp, synthetic construct
  source 1..110: mol_type = other DNA
agacacataaatatccttctcttcagcctaaaggtattttttttactgtatgttgcctggaagatctatcaattatcttagcttttgtctacaaaaatgtctttaatacc

SEQ ID NO: 41892 - DNA, 110 bp, synthetic construct
  source 1..110: mol_type = other DNA
tctaactacccctcccctacacattcgcttctgtaaaactcactcctacatctattacttcgccagttctcactccagtccgccaagcatggatccggaagaactagccc

SEQ ID NO: 41893 - DNA, 110 bp, synthetic construct; identical to SEQ ID NO: 41892
  source 1..110: mol_type = other DNA

SEQ ID NO: 41894 - DNA, 110 bp, synthetic construct
  source 1..110: mol_type = other DNA
taattagacatgatttggtgtttgccttctagaactgtgttgggactcacgaccctcagattagagaagctgctcaccctccatcctgaaccctacataacagtctttgg

SEQ ID NO: 41895 - DNA, 110 bp, synthetic construct
  source 1..110: mol_type = other DNA
agttcaggactcaattttcctccagccagcggactctatcctgggtcaccagaggcacaagaatgccaccaaaagctgcttggtactgtacaagagaaacagcttcttct

SEQ ID NO: 41896 - DNA, 110 bp, synthetic construct
  source 1..110: mol_type = other DNA
cacaagaatgccaccaaaagctgcttggtactgtacaagagaaacagcttcttctggaacagatgttagtttgtaaggcattttattcaggataagcatttttggtggac

SEQ ID NO: 41897 - DNA, 110 bp, synthetic construct
  source 1..110: mol_type = other DNA
ttacaatgtaaatactagccaggcttacttttttctgtaggaatacaaagtcaagctgtttgatgaaagtgacagtttgtttgcttgttgaaatataactcatatgggaa

SEQ ID NO: 41898 - DNA, 110 bp, synthetic construct; identical to SEQ ID NO: 41897
  source 1..110: mol_type = other DNA

SEQ ID NO: 41899 - DNA, 110 bp, synthetic construct
  source 1..110: mol_type = other DNA
gctgaagaaataaaaagtattaaaatgtggagagttgtttaaattggtcaagtccccactggtagtttcaacatgatagtatttaggccagtgagaagctttcatagatc

SEQ ID NO: 41900 - DNA, 110 bp, synthetic construct
  source 1..110: mol_type = other DNA
catggaaccccgctggccagttctgtgacccagtccctgaaagcctgcagtttctccttgggtttctgtaatgggagccaggctcctaaaattgtggtgggacggcaggt

SEQ ID NO: 41901 - DNA, 110 bp, synthetic construct
  source 1..110: mol_type = other DNA
tggtttcgaggattgaggagtctgagcaggtagaagggtagcaaagggtacaggaagttctctttcttctgaactttatcctctgggcagaaaaggagaactagacacaa

SEQ ID NO: 41902 - DNA, 110 bp, synthetic construct
  source 1..110: mol_type = other DNA
tgacacaataaccccttgcttgttttcctccaagccatgccccttcctagttccggctcttgtgtgatggtatggcccactcctggcctcagacttgaatatcagcctca

SEQ ID NO: 41903 - DNA, 110 bp, synthetic construct
  source 1..110: mol_type = other DNA
cacagaaccattaagtaacctgcccaatagcacacagctaataaatggtagagccaggtttccaaaccaggcagtctggctctgttttacacccctaaccaacacactgt

SEQ ID NO: 41904 - DNA, 110 bp, synthetic construct
  source 1..110: mol_type = other DNA
aaacaaaaacaccaagctgattagtaatcccaaagtcatctgcagccttaatttcctcttgccacataacataacatattcacagttcctgagctcaggatggggacccc

SEQ ID NO: 41905 - DNA, 110 bp, synthetic construct
  source 1..110: mol_type = other DNA
ctcttgccacataacataacatattcacagttcctgagctcaggatggggacccctttgggaggggggcattctgcctgcctcagggggaagtaagttcagcacgtgcca

SEQ ID NO: 41906 - DNA, 110 bp, synthetic construct
  source 1..110: mol_type = other DNA
ttcactgtccaagaaagctcaccactgaacacaagtccattgccagctctcccagggagtgttcccagccggaggatggcctacctgggacggggctgggagggcaggct

SEQ ID NO: 41907 - DNA, 110 bp, synthetic construct
  source 1..110: mol_type = other DNA
gtaacttttgccctttctctcttggaaccctgtaagcactatagaagcccaatgttaaagactgcttggagacagaggtcagctctccagctgtcacaactgagcccaat

SEQ ID NO: 41908 - DNA, 110 bp, synthetic construct
  source 1..110: mol_type = other DNA
ccttttcaggcttagattgccctcttccagtttatcaacaagaaaacagccagcagttgctaagatgtcctacactaatcattatttttaatgggaggggtagctgtatg

SEQ ID NO: 41909 - DNA, 110 bp, synthetic construct
  source 1..110: mol_type = other DNA
gttgctaagatgtcctacactaatcattatttttaatgggaggggtagctgtatgaggcattaaaggggcaccccaaatattccttttaattatatcagagggaaggaat

SEQ ID NO: 41910 - DNA, 110 bp, synthetic construct
  source 1..110: mol_type = other DNA
atctgggttatacacctttggaggaactcttcctcccggactctccaacattctggtccagatttggttaattgctgctgagctccacagtggataaagaaaatagggag

SEQ ID NO: 41911 - DNA, 110 bp, synthetic construct
  source 1..110: mol_type = other DNA
acttttgaaattgtcaaaactggcattttcagctctgcagccgggtgagtgcttataacaagtattcttttgcttgtcaggaatcatgctccagtttatctgtgagcacc

SEQ ID NO: 41912 - DNA, 110 bp, synthetic construct
  source 1..110: mol_type = other DNA
aagtcagctctggctgatggaaggggaagcagcgtattgatcccacgcaaggtcggagctcaagccaccaccaccacatttttcaccttggccacatattgaatcctttc

SEQ ID NO: 41913 - DNA, 110 bp, synthetic construct
  source 1..110: mol_type = other DNA
agctcatcgcgacgcggacgcatctggtacattcatcatcttctcccgggtgtgaagggatgtttaggaggcagataatttcgccggcatacatatgtgtattatcatgc

SEQ ID NO: 41914 - DNA, 110 bp, synthetic construct
  source 1..110: mol_type = other DNA
agggatgtttaggaggcagataatttcgccggcatacatatgtgtattatcatgcagatatgacaattatttcataatagaaatggaagccgagtggttttcgcctgacc

SEQ ID NO: 41915 - DNA, 110 bp, synthetic construct
  source 1..110: mol_type = other DNA
gccagtgactttgcacccacgcctgccagaccacacctctcccagggcagcctacaggcaccagaacccattccaattcagcccactggacgcgtttctacctgggtcga

SEQ ID NO: 41916 - DNA, 110 bp, synthetic construct
  source 1..110: mol_type = other DNA
aagtatctttaaacttaaagctttaggtctgatcatgcatgtggaaaagtagatgctattgtctaaaacatctggaaactcaggtcagattgtgtttttattgtgtgttt

SEQ ID NO: 41917 - DNA, 110 bp, synthetic construct
  source 1..110: mol_type = other DNA
cacttctttagacaatttgtttttggttttctccctaaaataataagccaaagagattaaggactgagtttgggggagctaggtcatacctgtgtttctttgccaactcc

SEQ ID NO: 41918 - DNA, 110 bp, synthetic construct
  source 1..110: mol_type = other DNA
attaaggactgagtttgggggagctaggtcatacctgtgtttctttgccaactcctttaagctcagtggaattaaaagagcccaccaaacaattattatattaaacagga

SEQ ID NO: 41919 - DNA, 110 bp, synthetic construct
  source 1..110: mol_type = other DNA
tacttcagtcacaaccaatagaaaaatggaatggtgatgtgtccagctgtgaaagggaggcacgcacaccggctggaaaacaaaggcggcctggaatagagccgacatga

SEQ ID NO: 41920 - DNA, 110 bp, synthetic construct
  source 1..110: mol_type = other DNA
tctaactaaatcataacacaattatcaaaaccgagaaattaacattagtatcattttgttagctaaattgcaggctgtatttgggatttcaccagtttttttccctgatg

SEQ ID NO: 41921 - DNA, 110 bp, synthetic construct
  source 1..110: mol_type = other DNA
tggggccattgtcccatccctgcaggaacttcaagttccagacttagccggggctgcctcttagcaccattcagatacaagactcattatccagaaattctagagaataa

SEQ ID NO: 41922 - DNA, 110 bp, synthetic construct
  source 1..110: mol_type = other DNA
gcctcttagcaccattcagatacaagactcattatccagaaattctagagaataagcttcaagaacgtgcaaagatatttagaccatcagttgcataggttatatcataa

SEQ ID NO: 41923 - DNA, 110 bp, synthetic construct
  source 1..110: mol_type = other DNA
aaaatagttaagttttatggtaagtgagttacatttcaatgaagctgctagaaatgaaagtgtagtctgggcctgggtgtggatgggagaacagtgtgctggtgaatcag

SEQ ID NO: 41924 - DNA, 110 bp, synthetic construct
  source 1..110: mol_type = other DNA
ttcatgcagctaaataagcctgacatctcttttagccaaattaaatgtcttcattcatattagcatgtaacgaaaaacaaaagttatatccacaaactctggatgtttat

SEQ ID NO: 41925 - DNA, 110 bp, synthetic construct; identical to SEQ ID NO: 41924
  source 1..110: mol_type = other DNA

SEQ ID NO: 41926 - DNA, 110 bp, synthetic construct
  source 1..110: mol_type = other DNA
cagagagtgttacgaatttcttaagtgatggtccagaatgtgagacatcatccatgaacatacgaacaggcccccgtcaatcagctcgtacagctagtcagtgtacacgc

SEQ ID NO: 41927 - DNA, 110 bp, synthetic construct
  source 1..110: mol_type = other DNA
acagaaagtcatattcctgggcagggttcgtgtaggatgacgttcaagggcgtcttggtcgaaggtgatccaggatgcagagggtcactggtctacctcgatgaagtttt

SEQ ID NO: 41928 - DNA, 110 bp, synthetic construct
  source 1..110: mol_type = other DNA
cacaggccaggtcccagcctgatagaaccacctatgactatagtccttaacaaaagctctcatcatactaattgcaaagaggatgctgacgttcagggctttaatgtgaa

SEQ ID NO: 41929 - DNA, 110 bp, synthetic construct
  source 1..110: mol_type = other DNA
ttggtgaatcaactcaccagacatacaattattactgctttaatttgtaactaataactaatcccccatttactatttttgtatcaagtacagcttttgagcataagtga

SEQ ID NO: 41930 - DNA, 110 bp, synthetic construct
  source 1..110: mol_type = other DNA
ttttttttgtctttttatggctgcacccacggcatatataggtgtcgagtctgagctgcggctgctgggatggcctacgccatagccacagcagcgcctgatccgagtca

SEQ ID NO: 41931 - DNA, 110 bp, synthetic construct
  source 1..110: mol_type = other DNA
ctgcggctgctgggatggcctacgccatagccacagcagcgcctgatccgagtcacatctgctgaccacagctcatggcacagctcatataccacagctcgtggcaatgg

SEQ ID NO: 41932 - DNA, 110 bp, synthetic construct
  source 1..110: mol_type = other DNA
tgcttctgtgggagatggtgtcaggtagggggaaatgggatggtgctggcttagagctccaggcttactacatgtggaaggagctcttagctaaggaaacgtgggggaga

SEQ ID NO: 41933 - DNA, 110 bp, synthetic construct
  source 1..110: mol_type = other DNA
cagcaagacctgggctatgatcatgactttaaaatgatcagctgtgtgacaccgaccagcaacatggcctctctgagactcaatctgctcggtgatacagggagataaca

SEQ ID NO: 41934 - DNA, 110 bp, synthetic construct
  source 1..110: mol_type = other DNA
ctgtgaatgggattagtgtcctcataagggtcccatagaagcagagcagagcccgggagcttgcttctccctgctccctgccgtgtgaggacatgagagaccatcacata

SEQ ID NO: 41935 - DNA, 110 bp, synthetic construct
  source 1..110: mol_type = other DNA
ggagcttgcttctccctgctccctgccgtgtgaggacatgagagaccatcacataagagccaggaagtgggtctctgtcagacaccagatcttggacttcccagcctcca

SEQ ID NO: 41936 - DNA, 110 bp, synthetic construct
  source 1..110: mol_type = other DNA
ggtgcaggaaatggccttctttcagaggtctacatcagcattcattattttaccatgctttaaaaagatgcagtgcttttcatgtatgctatctctgcatagtctgagag

SEQ ID NO: 41937 - DNA, 110 bp, synthetic construct
  source 1..110: mol_type = other DNA
tgctttaaaaagatgcagtgcttttcatgtatgctatctctgcatagtctgagagagttgcagtaatttacagaacttgagagtttttgtattagtcttgatggaaatac

SEQ ID NO: 41938 - DNA, 110 bp, synthetic construct
  source 1..110: mol_type = other DNA
ttagaaatggctgtaccttcaaaagaaaccccgtattatatatccacatcaccgctgctagtcttcatatttttgcacatactgtttattgcttatgtgtagaagaaatg

SEQ ID NO: 41939 - DNA, 110 bp, synthetic construct
  source 1..110: mol_type = other DNA
aaaccccgtattatatatccacatcaccgctgctagtcttcatatttttgcacatactgtttattgcttatgtgtagaagaaatgaaactagttttcggagttattatta

SEQ ID NO: 41940 - DNA, 110 bp, synthetic construct
  source 1..110: mol_type = other DNA
gtaatacaatcctgattattgtattccttctcctgattatttcctaacattttccaagcttattccagggcaaacctcttccatcactttgctttacatgtatatgacag

SEQ ID NO: 41941 - DNA, 110 bp, synthetic construct
  source 1..110: mol_type = other DNA
gtaacccactgccttctaggcccagggtccagtctttctgatgcatgtcctaaaatctgctctccaccttccccgtcaactcgtgatccaagatggctgctgcagctcca

SEQ ID NO: 41942 - DNA, 110 bp, synthetic construct
  source 1..110: mol_type = other DNA
tctgctctccaccttccccgtcaactcgtgatccaagatggctgctgcagctccagctggaaaaaaaataaaattagggagttcaacatcctcttatgctgaaaactaac

SEQ ID NO: 41943 - DNA, 110 bp, synthetic construct
  source 1..110: mol_type = other DNA
actgccatcgaatttctgagatgatttctatctaaaaccacatagttttcatctaatgatactttaaaatatgagctatgttactgagaccactaagccatgtcttaact

SEQ ID NO: 41944 - DNA, 110 bp, synthetic construct
  source 1..110: mol_type = other DNA
tcaaccatgaaggacattcaatccctaagtagttgctaagtaggcacataaaacatgcggccccaccctcggttagcaatcacaaaaatagccaaataatggcgctttaa

SEQ ID NO: 41945 - DNA, 110 bp, synthetic construct
  source 1..110: mol_type = other DNA
ctgaataaaatgctccttggaaatttatatttgtaaggaaatactggctagaattctaagagggcattatgatcatcttgtccgtggtccttgctttccaggtgacaaag

SEQ ID NO: 41946 - DNA, 110 bp, synthetic construct
  source 1..110: mol_type = other DNA
ctaagagggcattatgatcatcttgtccgtggtccttgctttccaggtgacaaagctgagacgaagcggaagtgacgcacgcacttaaggtggcccagttagtgagtagg

SEQ ID NO: 41947 - DNA, 110 bp, synthetic construct; identical to SEQ ID NO: 41945
  source 1..110: mol_type = other DNA

SEQ ID NO: 41948 - DNA, 110 bp, synthetic construct; identical to SEQ ID NO: 41946
  source 1..110: mol_type = other DNA

SEQ ID NO: 41949 - DNA, 110 bp, synthetic construct
  source 1..110: mol_type = other DNA
tggaagctggtttcccaggtctaggttttcagcgtcagatttggaattagaaagtgctgcatagccaagaactcaggaacacccaaggatggttgtatttgtaatacaat

SEQ ID NO: 41950 - DNA, 110 bp, synthetic construct
  source 1..110: mol_type = other DNA
gctgcatagccaagaactcaggaacacccaaggatggttgtatttgtaatacaattacaaagcaaaacaaaaccccactcagacctgatatttctttcttcaattatgaa

SEQ ID NO: 41951 - DNA, 110 bp, synthetic construct
  source 1..110: mol_type = other DNA
ctttgcatgcctcctgttccttgctcgcctcccaaggagaagacagatgtggcagaagaggaggaaagtagaatgtatcccaattaataatgtcaaaggctggtggaata

SEQ ID NO: 41952 - DNA, 110 bp, synthetic construct
  source 1..110: mol_type = other DNA
aagaggaggaaagtagaatgtatcccaattaataatgtcaaaggctggtggaatagctacaaatctaggcacttggcacttcgtgatgcaaggtatgctactgatgggct

SEQ ID NO: 41953 - DNA, 110 bp, synthetic construct
  source 1..110: mol_type = other DNA
aattgcctgttcatagcatttgcacatgtttaagtaattgactcactttttcttttttcccaccattaagcctgattattctggtttgcctggaatatctctagcatata

SEQ ID NO: 41954 - DNA, 110 bp, synthetic construct
  source 1..110: mol_type = other DNA
gcatttgcacatgtttaagtaattgactcactttttcttttttcccaccattaagcctgattattctggtttgcctggaatatctctagcatatatttttttcttctaat

SEQ ID NO: 41955 - DNA, 110 bp, synthetic construct
  source 1..110: mol_type = other DNA
atggatgaacattaaagacatttctggtgagagctcagaaggaaatgttcatgcttctggaaaataaagggaaggcaattcttattataaaacagttgaaaacttggctg

SEQ ID NO: 41956 - DNA, 110 bp, synthetic construct
  source 1..110: mol_type = other DNA
tgtggcataggcctcagctgtagctctgtttccacccctggccttgcaggtgtaaacataaaaataaaaaattaaaaattaaagacatttttaagaagaaagtttagaaa

SEQ ID NO: 41957 - DNA, 110 bp, synthetic construct
  source 1..110: mol_type = other DNA
aaacatgaatttatctagatttcagcagcttgagtcaggagaacacacctctcttccagttataaatgaaggtggtgttactgggattcaaggcttttactgcctcggat

SEQ ID NO: 41958 - DNA, 110 bp, synthetic construct
  source 1..110: mol_type = other DNA
tcatggtcataaaaaggctgctgcagcccagccatcacacctacactccaggcgaagagctgaagaaaagcaccgtttcagtggttacaagagaaaaacaaaagcttttc

SEQ ID NO: 41959 - DNA, 110 bp, synthetic construct
  source 1..110: mol_type = other DNA
agtaaatattttggactctgcagctttgatctctgtcacatattttttataaccttttaagaacataaaaacgattctgacttagttcaagggtgttactagcatgacaa

SEQ ID NO: 41960 - DNA, 110 bp, synthetic construct
  source 1..110: mol_type = other DNA
tcttagaatttttgaaagcctatactatatattatataagccccccggatgcgatatttggcatagcaccccaaacacactacgatctgcagcaatatttatggaataaa

SEQ ID NO: 41961 - DNA, 110 bp, synthetic construct
  source 1..110: mol_type = other DNA
atttggcatagcaccccaaacacactacgatctgcagcaatatttatggaataaacaccaagtaggatcaaaaaattctgtggagagtcttttcagtttagattagatgt

SEQ ID NO: 41962 - DNA, 110 bp, synthetic construct
  source 1..110: mol_type = other DNA
gttaaataatatccggttactacctgtatcttcatggtctttagatgaattatgtgtgattgtcaatcctgacatgttcccagtgaaaagggatctaaaatacaatatat

SEQ ID NO: 41963 - DNA, 110 bp, synthetic construct
  source 1..110: mol_type = other DNA
cctcagaaataaaaccctgggagggaagactcttgggattggacccataacgtggacttcgccccagctagatctgccgccggccctccgcagtccttctttgcttcact

SEQ ID NO: 41964 - DNA, 110 bp, synthetic construct
  source 1..110: mol_type = other DNA
acttcgccccagctagatctgccgccggccctccgcagtccttctttgcttcacttcctcacgttggagagcattgtgaggccttgttgtaaagactcattaaatgatac

SEQ ID NO: 41965 - DNA, 110 bp, synthetic construct
  source 1..110: mol_type = other DNA
ccagagaaacaagtgaaatccaccacactcctcttacacaacacatttgacctttagatacgttgagagcttcatcctccaatgcttttaattctaatccttgcagagac

SEQ ID NO: 41966 - DNA, 110 bp, synthetic construct
  source 1..110: mol_type = other DNA
ttaggtagttctcaaaggtggagattctaaattactgtcaaggaaaactgcctcagattttaattctgatctgggataccaccctttaaacacaattgcagaaatacacc

SEQ ID NO: 41967 - DNA, 110 bp, synthetic construct
  source 1..110: mol_type = other DNA
gattttaattctgatctgggataccaccctttaaacacaattgcagaaatacacctcctgaaattaccaccctttgattctccctctgaacatctgcagctattcaggaa

SEQ ID NO: 41968 - DNA, 110 bp, synthetic construct
  source 1..110: mol_type = other DNA
cagcttcccctcccaaataatctgctgtcatcagcatgatgccctgggtcttcgttcttccagctatcccacagaggtgtccatgcaggcctccgcagaaccatcacata

SEQ ID NO: 41969 - DNA, 110 bp, synthetic construct
  source 1..110: mol_type = other DNA
acagtaaccccacccccaccgctcccaccgaaatggtactggtgggaatgatccgtgcaacgaagacagaggatcagcgtgaagaagtcagagaaaccaacccaggaggt

SEQ ID NO: 41970 - DNA, 110 bp, synthetic construct
  source 1..110: mol_type = other DNA
gacttatttggaggaggaattaaagagttcagccaaagggttgcttggtattttttttttttttacttgcctgccttctcttcgatacataacctcaaatgctttttaaa

SEQ ID NO: 41971 - DNA, 110 bp, synthetic construct
  source 1..110: mol_type = other DNA
aagggttgcttggtattttttttttttttacttgcctgccttctcttcgatacataacctcaaatgctttttaaaaaccaagtactcggtatactattttatagtcagtt

SEQ ID NO: 41972 - DNA, 110 bp, synthetic construct
  source 1..110: mol_type = other DNA
aattgcagaatcactgatcattaaaaaaaaaaaaaacaaaaaaaacaaaaaaacacatgcaacacatctagcgttctggatttcatggctgccactcaggggacacctcc

SEQ ID NO: 41973 - DNA, 110 bp, synthetic construct; identical to SEQ ID NO: 41972
  source 1..110: mol_type = other DNA

SEQ ID NO: 41974 - DNA, 110 bp, synthetic construct
  source 1..110: mol_type = other DNA
gcccgtctgagctaaagttcacgggttgttgagggttatgtgaggtagtgcacaatagctgtgtcctaacacaaaaagtgaaaaactgtttcttaagggctatgttccag

SEQ ID NO: 41975 - DNA, 110 bp, synthetic construct
  source 1..110: mol_type = other DNA
tagctgtgtcctaacacaaaaagtgaaaaactgtttcttaagggctatgttccagaagatgtcctaagaacttgatgtatacagtagtcttatttgatccttacgtctat

SEQ ID NO: 41976 - DNA, 110 bp, synthetic construct
  source 1..110: mol_type = other DNA
ttgacacaaagaggtcaactcataactctatctactaaggacaaagagacctcagcgggggtgaagcgcgtgttggtgtgtatgctggaaagctcagagatcgatggcag

SEQ ID NO: 41977 - DNA, 110 bp, synthetic construct
  source 1..110: mol_type = other DNA
cgggggtgaagcgcgtgttggtgtgtatgctggaaagctcagagatcgatggcagcacggccctgaagaacgtagaagcttccagagtcaacatgaacccgaaggttata

SEQ ID NO: 41978 - DNA, 110 bp, synthetic construct
  source 1..110: mol_type = other DNA
cacgacaacgggaactcctagtgttactttttgaagttagtgtcactttaaaaagttacattaactttaactttcaaagtcatagctgcttgttacttcaaatatctcat

SEQ ID NO: 41979 - DNA, 110 bp, synthetic construct; identical to SEQ ID NO: 41978
  source 1..110: mol_type = other DNA

SEQ ID NO: 41980 - DNA, 110 bp, synthetic construct; identical to SEQ ID NO: 41978
  source 1..110: mol_type = other DNA

SEQ ID NO: 41981 - DNA, 110 bp, synthetic construct; identical to SEQ ID NO: 41978
  source 1..110: mol_type = other DNA

SEQ ID NO: 41982 - DNA, 110 bp, synthetic construct
  source 1..110: mol_type = other DNA
tccagtgtgtatgtgtttgtgtataactgtgtatatatatatgtatatcaatcacatctttttaatccattcctgtgttgatggacattgtgtttgcttcatatcttggc

SEQ ID NO: 41983 - DNA, 110 bp, synthetic construct; identical to SEQ ID NO: 41982
  source 1..110: mol_type = other DNA

SEQ ID NO: 41984 - DNA, 110 bp, synthetic construct
  source 1..110: mol_type = other DNA
cctgccaacaccttaatttagtccagtgaggcatgtgtcagacttctaacctgcagaattgtaagataatataatgaaggtttgtggttttaagccactaaatttgtgat

SEQ ID NO: 41985 - DNA, 110 bp, synthetic construct
  source 1..110: mol_type = other DNA
tacaaacactgcatttcatctttctgaaatgaatctagattaaaaaaagatgacattcaaagaagatgatttattacctcagaaaaatccccctttgccatacgttttag

SEQ ID NO: 41986 - DNA, 110 bp, synthetic construct
  source 1..110: mol_type = other DNA
agggctgggcacagagcggccaccaggggaagccttcacctgcactgcaacctgccgcgccgggagcagtccttcctgcctctgcttattctcaagtatggactgagaac

SEQ ID NO: 41987 - DNA, 110 bp, synthetic construct
  source 1..110: mol_type = other DNA
tgcaacctgccgcgccgggagcagtccttcctgcctctgcttattctcaagtatggactgagaacatcctcttttttgctttcttctttttagggccgcacctgtggcat

SEQ ID NO: 41988 - DNA, 110 bp, synthetic construct
  source 1..110: mol_type = other DNA
tctggtgttcccctggccaagaagttgacctctaatcaaaagagttcaaaaagcaccaggaaaggccccagtgaggatgatcggagcccctcccacgacagcggcatcaa

SEQ ID NO: 41989 - DNA, 110 bp, synthetic construct
  source 1..110: mol_type = other DNA
ccaggaaaggccccagtgaggatgatcggagcccctcccacgacagcggcatcaacacacctgccatccagcgggaccacctgggaatcagctcctccaagtgactgcag

SEQ ID NO: 41990 - DNA, 110 bp, synthetic construct
  source 1..110: mol_type = other DNA
catgtgttttcttgtagggtttttgcgttttctatcttaggtattgtttgaaataagctggacagggccttgtaaaagtggggaaaaaatccacacctttacagatgtca

SEQ ID NO: 41991 - DNA, 110 bp, synthetic construct
  source 1..110: mol_type = other DNA
ctcagagcagacctaaacatagtgagtgagaatgtgagccctgggacagggtgggcctcacaaaaattagcaagttcagacttttgggtgagattggtttaacctctaag

SEQ ID NO: 41992 - DNA, 110 bp, synthetic construct
  source 1..110: mol_type = other DNA
cctcacaaaaattagcaagttcagacttttgggtgagattggtttaacctctaaggagctctaccctgagatgggaatggttggattgatgtgaggtggaaggaggtggg

SEQ ID NO: 41993 - DNA, 110 bp, synthetic construct
  source 1..110: mol_type = other DNA
atttcaaatcatgtttctcacatcaagaaaccatcttggtcaacctatgtgtgggatctagcaacctttcatttacaacgaatggtttgtcagcttggaacccactgacg

SEQ ID NO: 41994 - DNA, 110 bp, synthetic construct
  source 1..110: mol_type = other DNA
atctagcaacctttcatttacaacgaatggtttgtcagcttggaacccactgacgagttctctgatctttggcagttgtaagtggaattgcttctagttaccatttctaa

SEQ ID NO: 41995 - DNA, 110 bp, synthetic construct
  source 1..110: mol_type = other DNA
gagccaaaatacttacctgcagatacctagttcacaaagtgctggtcactgcacgaggctggactgtgaggccctctcatggtcctgtccgagtggccgaggagccaggg

SEQ ID NO: 41996 - DNA, 110 bp, synthetic construct
  source 1..110: mol_type = other DNA
cttggtgtgccgataatatcttcattttgtcctcactttagataagagtttagttctttgtcctttgtgctttgaagctattactccattgctttcttctctccagtatt

SEQ ID NO: 41997 - DNA, 110 bp, synthetic construct
  source 1..110: mol_type = other DNA
ctttgtcctttgtgctttgaagctattactccattgctttcttctctccagtattactgttttgaaatctgatgttcctttgaagtgctctcctatttctttccagaaga

SEQ ID NO: 41998 - DNA, 110 bp, synthetic construct
  source 1..110: mol_type = other DNA
agtcatgaaaagtatttaaaacttgagtgacatatttgtagtattatttccactatgaattttatacatgcaagctggtatactgtcttatataacagaggggtccaccg

SEQ ID NO: 41999 - DNA, 110 bp, synthetic construct
  source 1..110: mol_type = other DNA
tgaattttatacatgcaagctggtatactgtcttatataacagaggggtccaccggcctccacctcacacaggacaacgggggggacagagtgatccagccacagcctta

SEQ ID NO: 42000 - DNA, 110 bp, synthetic construct
  source 1..110: mol_type = other DNA
agctaacttacattaggtacagttagctttagggatgcaggatgtccatttgccaacaagtggtggctgagatatgagagtagatgaaatcacctggggagagtgtttag

SEQ ID NO: 42001 - DNA, 110 bp, synthetic construct
  source 1..110: mol_type = other DNA
caacatgtggaagttccctggccagggatcaaacccctgccaccgtttcggcaacaccagattcttaacctgctgtgtcacaagggagcttcccaagttagtgatttata

SEQ ID NO: 42002 - DNA, 110 bp, synthetic construct
  source 1..110: mol_type = other DNA
accagattcttaacctgctgtgtcacaagggagcttcccaagttagtgatttataagtatgcttatgtgaaggtgagtagacagaagatcatgtgtaagggaatcatgaa

SEQ ID NO: 42003 - DNA, 110 bp, synthetic construct
  source 1..110: mol_type = other DNA
aaattactggcatgttcttgctcacgtatttgtcttctttgaatctccccttaaagactgagggatacgtactgtcccctagtgtgagctctcacctgggatccaggttc

SEQ ID NO: 42004 - DNA, 110 bp, synthetic construct
  source 1..110: mol_type = other DNA
gactgagggatacgtactgtcccctagtgtgagctctcacctgggatccaggttcaaaacaatgactgaattgccattcatgtcctcacacatatgctgtgatgggatgt

SEQ ID NO: 42005 - DNA, 110 bp, synthetic construct
  source 1..110: mol_type = other DNA
tgtagaagccagattgcagctttgtacagacttggagttgtgctgctcaagtgcagtcagacactgttggttgattgagcacctacgcaacccccactcagccccacact

SEQ ID NO: 42006 - DNA, 110 bp, synthetic construct
  source 1..110: mol_type = other DNA
gactaattacatgggcagaaatacaggtatcaacctgaattaacataaatattcattttgagttaagcttcttcaactcttagtatttatccagtgcaaccacctgtcgg

SEQ ID NO: 42007 - DNA, 110 bp, synthetic construct
  source 1..110: mol_type = other DNA
ttttgagttaagcttcttcaactcttagtatttatccagtgcaaccacctgtcgggtgatgtcattttgcccctattgaaatccttcctgtgatgaaaagaacatcatcc

SEQ ID NO: 42008 - DNA, 110 bp, synthetic construct
  source 1..110: mol_type = other DNA
acggggatttctctaacatccaatttaatggcaatttttgtttttagtgactcgtcttaatcaagtcattgggagatttcagctttgtatctatatgcattttgattgct

SEQ ID NO: 42009 - DNA, 110 bp, synthetic construct
  source 1..110: mol_type = other DNA
aactgtggtgctgtcagtgtgtgtgcctgtgcgtgtgtgttcccgctttgatgatttttcttaagctactgaatggatacacgcgaggggttgagtctgcactaaaacta

SEQ ID NO: 42010 - DNA, 110 bp, synthetic construct
  source 1..110: mol_type = other DNA
ttttcttaagctactgaatggatacacgcgaggggttgagtctgcactaaaactatgatgcgacgtttcctgtctacctgtctgtgtccctgcctcttcaatctgggggt

SEQ ID NO: 42011 - DNA, 110 bp, synthetic construct
  source 1..110: mol_type = other DNA
ttcccctgcttaaagtctcagtctcctaagtgtacagactcaatctttgtttcctgggctctgacccgggcctgcccttccctgcctcctgccccagagtcccagcctct

SEQ ID NO: 42012 - DNA, 110 bp, synthetic construct
  source 1..110: mol_type = other DNA
tgcccatcccacaccctccccgttggcccccacagtcttttctctctgtcagttacttctttccatcagcttcgatcactttactcgtttcagacttggggttacacata

SEQ ID NO: 42013 - DNA, 110 bp, synthetic construct
  source 1..110: mol_type = other DNA
gccttctgaactgcctccttgctcctgtccttcctagctccagtcctgccacagaagtgactaattctactcataaaaatctaatcatgccattgtcccgctttaaatta

SEQ ID NO: 42014 - DNA, 110 bp, synthetic construct
  source 1..110: mol_type = other DNA
agccttagcaaagatacatggagcaaagggaatctcattctctgtgggtgggagcataaatcagtacccaacatttggaaacgctcgacaccactttcaagatttgaaca

SEQ ID NO: 42015 - DNA, 110 bp, synthetic construct
  source 1..110: mol_type = other DNA
ataaatcagtacccaacatttggaaacgctcgacaccactttcaagatttgaacataaacaataacctatgatctggccattcctgtcccctagctacacatccatcaaa

SEQ ID NO: 42016 - DNA, 110 bp, synthetic construct
  source 1..110: mol_type = other DNA
gagtcaggaagcaaaccacaagccgagaggagccccagcagtcatggcagcttcgccaggactggcagcttcagcagccccagactcccctacttttacctggtcgactg

SEQ ID NO: 42017 - DNA, 110 bp, synthetic construct
  source 1..110: mol_type = other DNA
acattggatcccaacctgcaccattttttaaaacaatagcaggccacccacattgaagcatgattcaccgtggcagggctcactgtgttctttaactacgaagaaacgag

SEQ ID NO: 42018 - DNA, 110 bp, synthetic construct
  source 1..110: mol_type = other DNA
gttatagataccagggaataaataaaaaggaataatcctaaaagctctcccaggctacaaaaaattttttccatgaaatatcgtttatgcataaattaccccaaagcaga

SEQ ID NO: 42019 - DNA, 110 bp, synthetic construct
  source 1..110: mol_type = other DNA
tacaaaaaattttttccatgaaatatcgtttatgcataaattaccccaaagcagaatttctccaagtgtctatcaagtattagtagctgttacttggaaatgtactgctg

SEQ ID NO: 42020 - DNA, 110 bp, synthetic construct
  source 1..110: mol_type = other DNA
ctgttgtccagaaaatgctggtttcaaaattagctaaagcttttgagaaataacgtgctaaataaatcatgtgaacaatgaatacaagtaccaattatatgtctgcaaaa

SEQ ID NO: 42021 - DNA, 110 bp, synthetic construct
  source 1..110: mol_type = other DNA
ttcattggtccagatacctaacttccctgtgtcccatttcctcattttttatggccacacccacattatatggacgttccccagagcagggactgaatccgagccacagc

SEQ ID NO: 42022 - DNA, 110 bp, synthetic construct
  source 1..110: mol_type = other DNA
ggtgatcgcagacacttactgcacctttccatgggcccatttttaggacagctactggacaagacacatgtccacagagagcactctgcagtggacagtgccacctgcca

SEQ ID NO: 42023 - DNA, 110 bp, synthetic construct
  source 1..110: mol_type = other DNA
ttcaactgccaaccacttagtttactctaaaattacttactgccaatgccagcacagcttccccacactgacccccaccccccatcccccatttggcctttttcttattg

SEQ ID NO: 42024 - DNA, 110 bp, synthetic construct
  source 1..110: mol_type = other DNA
ggtaagttacaaggccactatttctagaacagttttgctctgaccctatagctattcttactctaacctgacaagttaaacacaaccaatgaaatgagatgaaataacac

SEQ ID NO: 42025 - DNA, 110 bp, synthetic construct
  source 1..110: mol_type = other DNA
actctgtttccacactcgttttccatccgtttaaatgctaattaaactaagtggttacaagaacaaacagcttcagaaacccggactgactccttttatgtgttcagctc

SEQ ID NO: 42026 - DNA, 110 bp, synthetic construct
  source 1..110: mol_type = other DNA
tacaagaacaaacagcttcagaaacccggactgactccttttatgtgttcagctcaacttgaagagacagctgtgcctgtggactcaagggcacctgcttggcgtggaca

SEQ ID NO: 42027 - DNA, 110 bp, synthetic construct
  source 1..110: mol_type = other DNA
aattagcccctgcgacttacaataggcctccccgtctcatcaagtggacacaccgctctaacctgaactgctttttttactggaacactcaggagatgcagttttagtct

SEQ ID NO: 42028 - DNA, 110 bp, synthetic construct
  source 1..110: mol_type = other DNA
tacccaacacagcggtgctaaccagctcttccaactccaacagggaagagagaccaccatgtgtttcacagacccctttaacaataaattatataatcgtaaagaacaaa

SEQ ID NO: 42029 - DNA, 110 bp, synthetic construct
  source 1..110: mol_type = other DNA
aggagaagagtcagaactcccttacatccaaagactccttttcatctggaatttcttgggtatgtaaatattcctatttaaggtccaaaacataacttctgcatggtagc

SEQ ID NO: 42030 - DNA, 110 bp, synthetic construct
  source 1..110: mol_type = other DNA
ttgggtatgtaaatattcctatttaaggtccaaaacataacttctgcatggtagctatttccaccatggctctataatttttagtttgtgtttaatttaagagacagtat

SEQ ID NO: 42031 - DNA, 110 bp, synthetic construct
  source 1..110: mol_type = other DNA
cagtccaaacttcttaaagttcataatcagagctctcctatttatgaaaccactggaagagttggtgtctgagcaataatgctgctacatgacccagtgtgccccacttt

SEQ ID NO: 42032 - DNA, 110 bp, synthetic construct
  source 1..110: mol_type = other DNA
gatccaaaagaaagagagggcccaaagaaaactaccaccaataggaagtagctgtgtgtctctttcttagccatctggaatgctgcattcattagtgtgctttggaaata

SEQ ID NO: 42033 - DNA, 110 bp, synthetic construct
  source 1..110: mol_type = other DNA
ccagcttccactgagggtcctgtgccagcagctgattacaaagttctagctccgagtctgtgcctgctactgagagcccccagccggtgagtgtggtcttgaaaatcgct

SEQ ID NO: 42034 - DNA, 110 bp, synthetic construct
  source 1..110: mol_type = other DNA
gaaagcccagtaatttatgagcagagtgaggggcagctccagagccagagacatgagtatgtcagaaacaagaccaagcagggccctgcaacccctgggcccaaaagccg

SEQ ID NO: 42035 - DNA, 110 bp, synthetic construct
  source 1..110: mol_type = other DNA
gtgctttggtacaagagacagggaagcagcactgggcccacctgaggccccggaaaggctccctggcagaggagtcaccccttttgtcaattaacgtaaataccccagag

SEQ ID NO: 42036 - DNA, 110 bp, synthetic construct
  source 1..110: mol_type = other DNA
aaacaacgtcccagacttctccccacagagattctttttaccctggcgaaggcttgggattttgcattactcatcctagtggcccagggctgggagatatcgatttaaca

SEQ ID NO: 42037 - DNA, 110 bp, synthetic construct
  source 1..110: mol_type = other DNA
ggtccggatggaagacaggaagctgcgagccccaagtccctggtgaacaccgcggttaaagaagttgcccagcaggacccaagaggctgccaaggaaaggtgggaggctg

SEQ ID NO: 42038 - DNA, 110 bp, synthetic construct
  source 1..110: mol_type = other DNA
aggtcccttccttcctggactgatagacggggaggttagcccgacaggtgaccctccaccgccacccggatttggtccgaaacgacatttcatcattattattaatagct

SEQ ID NO: 42039 - DNA, 110 bp, synthetic construct
  source 1..110: mol_type = other DNA
ccaccgccacccggatttggtccgaaacgacatttcatcattattattaatagctgggagtgctggcgcttcctgcagaacatgataagaaccactcagaatccgaagga

SEQ ID NO: 42040 - DNA, 110 bp, synthetic construct
  source 1..110: mol_type = other DNA
tctacaaaaaaaaatgcacagttgacaccagtgaagaaagaaaagctttacagtcaagaataggaacaagggatgactgaagtgacctgtttacagcaagaacattatgc

SEQ ID NO: 42041 - DNA, 110 bp, synthetic construct
  source 1..110: mol_type = other DNA
atttgccagcttagccccttccagctgtggctccatcctaagaactgtgtggagtcgtgggagcagaaccgggcaggtgtgggtgcattgaagtggctcctccataaagt

SEQ ID NO: 42042 - DNA, 110 bp, synthetic construct
  source 1..110: mol_type = other DNA
ttggaagagccaaacccttaacgtaggtaaacattcaggtctaaaaaacgtagtgtctttttcagcagtgtgaagtgcacgcttctttcagtgggggagagggtgcatgc

SEQ ID NO: 42043 - DNA, 110 bp, synthetic construct
  source 1..110: mol_type = other DNA
ggaaactatcaccgctgggcaacagaacaaagcagtcatattttgcaaatgacttctcatgcaaatagctagaatctaacccgctggactctatgaattcacaagcaggg

SEQ ID NO: 42044 - DNA, 110 bp, synthetic construct
  source 1..110: mol_type = other DNA
ctcatgcaaatagctagaatctaacccgctggactctatgaattcacaagcagggactatcaccatgagcactcgggcacatcgggactttgccaggaacagttgtgaca

SEQ ID NO: 42045 - DNA, 110 bp, synthetic construct
  source 1..110: mol_type = other DNA
gggggcggcgggccatcggccaagtctgctcccgggtgaccgcaggcacctcgggggacgcaggccacgggccggaaggaccccatgctgagaacattaagagagaaccg

SEQ ID NO: 42046 - DNA, 110 bp, synthetic construct
  source 1..110: mol_type = other DNA
ggacgcaggccacgggccggaaggaccccatgctgagaacattaagagagaaccggcttattcccgggagctcgacgagcccacccgcggccttcccgccgggcttcagg

SEQ ID NO: 42047 - DNA, 110 bp, synthetic construct
  source 1..110: mol_type = other DNA
atcctcagatgtggcgattacgttccaaacagactaaggtcattggtatcctggaatagaatcagagatgtggttttagcttctttgtggtcataactatgaccttattg

SEQ ID NO: 42048 - DNA, 110 bp, synthetic construct
  source 1..110: mol_type = other DNA
agtataccattctgttttcagaatgatttccttcttcttcattcagcagatccttacagaggccatggtaccttccagaagctgtcctaggtgctggaaccacagcagtg

SEQ ID NO: 42049 - DNA, 110 bp, synthetic construct
  source 1..110: mol_type = other DNA
gtcaaatgaagctaggtttctgttagtgttataagaagctctgcaaagaaaataagttaattctactaaattctaaattgtgatttgtttcatccagttcctgaaattga

SEQ ID NO: 42050 - DNA, 110 bp, synthetic construct
  source 1..110: mol_type = other DNA
cacctctggttttttaaacataaaatctggagcactctgtgtctggacagcacacccaggaggacaaatgaatcatgcggaggaaagagcgctgaaacccggctctcggg

SEQ ID NO: 42051 - DNA, 110 bp, synthetic construct
  source 1..110: mol_type = other DNA
gtgaattttatctccctgtgatatctcattacattttagagaaaacgtacacagtgatatgtcttcaattagctggaggtgctgatgctgaagttttcattttttttacc

SEQ ID NO: 42052 - DNA, 110 bp, synthetic construct
  source 1..110: mol_type = other DNA
gtgagatgatggattgagggtccctaagagtaaacgcagtcttgagaaaaaaaatgcaatctgagaacagagctctggacgcgccattgttttcagatggtagaaatgag

SEQ ID NO: 42053 - DNA, 110 bp, synthetic construct
  source 1..110: mol_type = other DNA
gcaatctgagaacagagctctggacgcgccattgttttcagatggtagaaatgaggagaggttagcaaagaactcaaaaagttagtggtcagagcagtaggggcacagcc

SEQ ID NO: 42054 - DNA, 110 bp, synthetic construct; identical to SEQ ID NO: 42052
  source 1..110: mol_type = other DNA

SEQ ID NO: 42055 - DNA, 110 bp, synthetic construct; identical to SEQ ID NO: 42053
  source 1..110: mol_type = other DNA

SEQ ID NO: 42056 - DNA, 110 bp, synthetic construct
  source 1..110: mol_type = other DNA
cccatgctcagaaaaaaaaaaaagggacaaaatagcttctatgaagccaccagcgagaacagacaaagcatcacagactcagcaaaaggggaagaacggcaacaactctt

SEQ ID NO: 42057 - DNA, 110 bp, synthetic construct
  source 1..110: mol_type = other DNA
agagatgaaaataattgagacccccttttttggttactggttcaggactatccgcatcatttcttccttcctaagcctcacttcattggttggtaactctccagagtatc

SEQ ID NO: 42058 - DNA, 110 bp, synthetic construct
  source 1..110: mol_type = other DNA
gcctccacaaaaccccaaaagggtgagttcagagtttctgggctggtgaccacgtggaggtgctaggagagtggtccatggaagcttcatgctgccctcccccccactcc

SEQ ID NO: 42059 - DNA, 110 bp, synthetic construct
  source 1..110: mol_type = other DNA
ctttcctccacatgcatgatttgtcacacctggaggctggatggcttcagtgaatgttcagcaataacctgatgcccatgacagtcagggggatgggtttccctcaaata

SEQ ID NO: 42060 - DNA, 110 bp, synthetic construct
  source 1..110: mol_type = other DNA
gttcagcaataacctgatgcccatgacagtcagggggatgggtttccctcaaatagtatatttttatctgacactttgtggtcattttctatatgccaggagttatcctc

SEQ ID NO: 42061 - DNA, 110 bp, synthetic construct
  source 1..110: mol_type = other DNA
gaaccgaaacttagaggccaggagtccgggagccttttcgcttaacacacgtgctgctgtgccctagacatgcagctcattgtacccctgtgagctgcagggagccagtg

SEQ ID NO: 42062 - DNA, 110 bp, synthetic construct
  source 1..110: mol_type = other DNA
gctgtgccctagacatgcagctcattgtacccctgtgagctgcagggagccagtgccagttacaatcgcttttcatgatgaccttctgttcttagctgcttacagctcgc

SEQ ID NO: 42063 - DNA, 110 bp, synthetic construct; identical to SEQ ID NO: 42061
  source 1..110: mol_type = other DNA

SEQ ID NO: 42064 - DNA, 110 bp, synthetic construct; identical to SEQ ID NO: 42062
  source 1..110: mol_type = other DNA

SEQ ID NO: 42065 - DNA, 110 bp, synthetic construct
  source 1..110: mol_type = other DNA
ttctaccttagattattttctacgcgcgaattaattttccaaaatgcatctttttaccagggaaggaggtagcccacttttgagtcttgcctgattcctacagggtcatt

SEQ ID NO: 42066 - DNA, 110 bp, synthetic construct
  source 1..110: mol_type = other DNA
accagggaaggaggtagcccacttttgagtcttgcctgattcctacagggtcattgttgcagtgccgaggaatcaggaagacaaagctttcggtggaggccatgaagttt

SEQ ID NO: 42067 - DNA, 110 bp, synthetic construct
  source 1..110: mol_type = other DNA
tgcttttcaccattttaaccctcatgctcctggtctcgtaatccagttctcgctgagcacgtggcaggcagttagcctgagcgaagcccctttctatgcagctgagactc

SEQ ID NO: 42068 - DNA, 110 bp, synthetic construct
  source 1..110: mol_type = other DNA
agcacgtggcaggcagttagcctgagcgaagcccctttctatgcagctgagactcctggaggggacgcagggcttactgtcctgtgtaaagcaaaccactttaatcccag

SEQ ID NO: 42069 - DNA, 110 bp, synthetic construct
  source 1..110: mol_type = other DNA
tttctgaagaggtcaatgagctatttacatatttcatggcgaagctgggctgtgcatcaacgggatggatctgtcaaaccacaggcaattaaaaggagtttggctgcaac

SEQ ID NO: 42070 - DNA, 110 bp, synthetic construct
  source 1..110: mol_type = other DNA
tcttctacccttgatggagactactaatttctagatgtaggggcctctgtgcccctgtgtccttggagggacagcagacacagtgacttgtgggtgggttcagtgggcat

SEQ ID NO: 42071 - DNA, 110 bp, synthetic construct
  source 1..110: mol_type = other DNA
atggttgcggtggtggggcagtgttgtagggtatagcagtttaagtcagatccatgggagtggatgttttggctggcacagtatcagctattctcagttcattttattgg

SEQ ID NO: 42072 - DNA, 110 bp, synthetic construct
  source 1..110: mol_type = other DNA
gcccctctctgtggggtggtcagagggcagcgtcagggccgtggtgctgggtctgctcctatgtcctgtccctgtcagttctgtttagtcaaagtgcctgggagggcact

SEQ ID NO: 42073 - DNA, 110 bp, synthetic construct
  source 1..110: mol_type = other DNA
tcctcgtgggtctccgagcctctcctgaccgtcaccagccatacaccacagaccttagtgtgcaaagtctgccttcatctgcgtataagctgggccagcttccagccaaa

SEQ ID NO: 42074 - DNA, 110 bp, synthetic construct
  source 1..110: mol_type = other DNA
tagtgtgcaaagtctgccttcatctgcgtataagctgggccagcttccagccaaataaacagtgaattattgtaattattataaagatttgggtccaggtcctgaagaaa

SEQ ID NO: 42075 - DNA, 110 bp, synthetic construct
  source 1..110: mol_type = other DNA
agtggcttggttcctgaaggtttcagagggtcctgtttaaccatcatgcccacgatggtgtgggctcacagtaggccgaggtgagccgcgggaaagccagttttgcgccg

SEQ ID NO: 42076 - DNA, 110 bp, synthetic construct
  source 1..110: mol_type = other DNA
aattgttgaacgtgtcctataaatgtcagagcagctggtctcttggtgctgtgtagtgtctccgcccactgcttctctgcacgcttcatctttaagttctgatatgataa

SEQ ID NO: 42077 - DNA, 110 bp, synthetic construct
  source 1..110: mol_type = other DNA
cataatccccacattatagataagaagcacctgcaggggagcaggaggccacctgcagtgccattacctggagcctctcggcatccttcctgtcactttcattccacgtt

SEQ ID NO: 42078 - DNA, 110 bp, synthetic construct
  source 1..110: mol_type = other DNA
cagtgccattacctggagcctctcggcatccttcctgtcactttcattccacgttggaatctagggctttccacctgcttttgtttcggatgaacaattctgagggtgga

SEQ ID NO: 42079 - DNA, 110 bp, synthetic construct
  source 1..110: mol_type = other DNA
catccttggtgatattatctctggagtaagatctccatggtgacggatgatatctggacagcacagagatcatttggaagatacagaaatatcgaatcatagtgttgggt

SEQ ID NO: 42080 - DNA, 110 bp, synthetic construct
  source 1..110: mol_type = other DNA
ggacagcacagagatcatttggaagatacagaaatatcgaatcatagtgttgggtaacaggaaataatggccttgtagatcaattatcctttgggaacaaagagacacac

SEQ ID NO: 42081 - DNA, 110 bp, synthetic construct
  source 1..110: mol_type = other DNA
tcctctgactcgattcctccagacttcagcagccatgtagactctcagaagtttgctggggaagtgccttgccagctgcctctgcctctcatccagctcttgctcccttg

SEQ ID NO: 42082 - DNA, 110 bp, synthetic construct
  source 1..110: mol_type = other DNA
aatcacaatagagatcttcctgggttctggagtaaagctgtcccaactgtagcgaatccaagcatcaaattacaggcacctctgggctccctcaccagccccacagggat

SEQ ID NO: 42083 - DNA, 110 bp, synthetic construct
  source 1..110: mol_type = other DNA
cactcagtcagaagcctggctgggaccctcccgcaaaggctgaccccgcctcagcttttaccctgtttccccctaggtcagggagccaaccatctagctatgtcacaacc

SEQ ID NO: 42084 - DNA, 110 bp, synthetic construct
  source 1..110: mol_type = other DNA
atttctggttagtttgtgtgtcataagaactataaaatattttcttttttgtcaaacctcctactatatggcaccaatcacaattcaaatattacttctgtggccagtat

SEQ ID NO: 42085 - DNA, 110 bp, synthetic construct; identical to SEQ ID NO: 42084
  source 1..110: mol_type = other DNA

SEQ ID NO: 42086 - DNA, 110 bp, synthetic construct
  source 1..110: mol_type = other DNA
agtcagttaagaagccacaaattaaatcttcctgcttagtcgctagcaaactccggggcgcgggctgcctggcaggtgctgtaattttcttccggcatcacacgtgacag

SEQ ID NO: 42087 - DNA, 110 bp, synthetic construct
  source 1..110: mol_type = other DNA
gatctaatttgtggtcttctgatcctcaatactgttgcattcttgagtctcttttgtcaaccagttttttcctgatctttctgtaccttttttcccatatccacttgagg

SEQ ID NO: 42088 - DNA, 110 bp, synthetic construct
  source 1..110: mol_type = other DNA
gtcaaccagttttttcctgatctttctgtaccttttttcccatatccacttgaggaccaaccacaaatttacgtctctaggcctgaactccagacaaacatacacagcat

SEQ ID NO: 42089 - DNA, 110 bp, synthetic construct
  source 1..110: mol_type = other DNA
tgagtttccaggatggcagagttcctcaaacctgtaaggtaagatgattaacgcctgccctcgtgggctcaaataattggggatatttgcacccctgctaaaatctacgc

SEQ ID NO: 42090 - DNA, 110 bp, synthetic construct
  source 1..110: mol_type = other DNA
tgccctcgtgggctcaaataattggggatatttgcacccctgctaaaatctacgctctgtgggactgtctctgtacagacgaatgtcctcactctctgatattcagaatt

SEQ ID NO: 42091 - DNA, 110 bp, synthetic construct
  source 1..110: mol_type = other DNA
tttgttttgtatggctttggttatctatttacctactccccagacaatcataaatatcccataacctggagatcaccagtatgcatgtgacatgggaatgactaaaagat

SEQ ID NO: 42092 - DNA, 110 bp, synthetic construct
  source 1..110: mol_type = other DNA
aatctatcagatccaataacctgatctgttttgactccagcaacacactccaaatctgcccattctctgatttatgatcctattccagctccctaatggtggcctggacc

SEQ ID NO: 42093 - DNA, 110 bp, synthetic construct
  source 1..110: mol_type = other DNA
ctgcccattctctgatttatgatcctattccagctccctaatggtggcctggaccctacagtggcatcaggaccctacctgatcccagccctccaccctcccaggccagc

SEQ ID NO: 42094 - DNA, 110 bp, synthetic construct
  source 1..110: mol_type = other DNA
ggggctctggagccgctcgggggctgcacatttgagctcagggaggcacaggcaaacagagggcagaggggggctgtactggcatttttcagaaagtcagacactaagga

SEQ ID NO: 42095 - DNA, 110 bp, synthetic construct
  source 1..110: mol_type = other DNA
ctgacgagaagagaggccgctcatccaccagaggtgggtctcactttcttggtcttcgtttctaacttaacggtggcccctgagagcaatgcctgtctttaattcccaca

SEQ ID NO: 42096 - DNA, 110 bp, synthetic construct
  source 1..110: mol_type = other DNA
tcgtttctaacttaacggtggcccctgagagcaatgcctgtctttaattcccacacaaacaaaatgatgacccacacatcccggtgtgccatggtttatttttctggctt

SEQ ID NO: 42097 - DNA, 110 bp, synthetic construct
  source 1..110: mol_type = other DNA
gtaaaagctagcatttgctatggaaggagagatccaggagagcagtgaaaatcatgctgaaatgtgcatcgttacagctatactgcatgcctgaagtctaggcaagaaac

SEQ ID NO: 42098 - DNA, 110 bp, synthetic construct
  source 1..110: mol_type = other DNA
acttactggctgcctctcttcaccccctccccacctctgagggattgtcaagttatactaattaactattaaaatgtctcagatgacacctccctaagctgtttcaggtc

SEQ ID NO: 42099 - DNA, 110 bp, synthetic construct
  source 1..110: mol_type = other DNA
tactaattaactattaaaatgtctcagatgacacctccctaagctgtttcaggtccctgttctttatttgatttgtgcctggatctcagcagtagcacattagtttcctg

SEQ ID NO: 42100 - DNA, 110 bp, synthetic construct
  source 1..110: mol_type = other DNA
tactttcccagacggctgtcaccaagtaccatagactcgacaccttcaaacaaaaagaaggtatttcttcacagctcctgggccaaaagtctggagttgaagggtcttga

SEQ ID NO: 42101 - DNA, 110 bp, synthetic construct
  source 1..110: mol_type = other DNA
cacgtggaaaccttcacacccttaagcaaatcttcctggccctgtgggctttcagacagaacgccgccttgctcacttgggcgccgtgttcaacatgtttcacagaagct

SEQ ID NO: 42102 - DNA, 110 bp, synthetic construct
  source 1..110: mol_type = other DNA
acagaacgccgccttgctcacttgggcgccgtgttcaacatgtttcacagaagctgcccaataaattctcaactaatggaaggatgaagaggaggtggtgggtggagata

SEQ ID NO: 42103 - DNA, 110 bp, synthetic construct
  source 1..110: mol_type = other DNA
aaatgcctccttacaaccaccagagttttaggcctcacctatcagtttagcaaacagtcctcactgtgcaataattcagacatatgtccaaaactttcaaaaagttggaa

SEQ ID NO: 42104 - DNA, 110 bp, synthetic construct
  source 1..110: mol_type = other DNA
atcagtacaccagaaaccacggaaagcgatgcaaacaaggtaacacctcacacctcgccaaacagagccggcaggaaggaaggagacttggatcatttagggttaaaaaa

SEQ ID NO: 42105 - DNA, 110 bp, synthetic construct
  source 1..110: mol_type = other DNA
tctcatctccaaagtgggtgcctgagctgagaagctacatttgtttttttcacgaagagcaacacgatttgcagacctgtcactaattttcaaaagccaccctgagaggg

SEQ ID NO: 42106 - DNA, 110 bp, synthetic construct
  source 1..110: mol_type = other DNA
agccatttgctgtaaacatgaatcttttttgaaacaatagattgaaactaatggcaaatttccggtaaacccctgaacctccaagctgtggggaaatgcaggtaacaggg

SEQ ID NO: 42107 - DNA, 110 bp, synthetic construct
  source 1..110: mol_type = other DNA
aaatttccggtaaacccctgaacctccaagctgtggggaaatgcaggtaacagggctggcacagcaggcgccaccccctcagggggcatcgttaaattaaaataaaaaca

SEQ ID NO: 42108 - DNA, 110 bp, synthetic construct
  source 1..110: mol_type = other DNA
gggagactctgtgacctggggggggactttgtgacctgggggaatgagtcacagagctgtctcatcccacacagaggcttccatggagtggccatgaagatgctctcact

SEQ ID NO: 42109 - DNA, 110 bp, synthetic construct
  source 1..110: mol_type = other DNA
gctgtctcatcccacacagaggcttccatggagtggccatgaagatgctctcactaccgactcacggcagcttattcttcctcttttctcaaaagagcttcaccagcagg

SEQ ID NO: 42110 - DNA, 110 bp, synthetic construct
  source 1..110: mol_type = other DNA
tgccctcgccccttggctcaaggcttcttccatacccaaagccaggagtgcagtgttgagttcctatacctctttacccactcagctcatccacttttaaggacccgtgt

SEQ ID NO: 42111 - DNA, 110 bp, synthetic construct
  source 1..110: mol_type = other DNA
cccactcgtggttttagttaccaaccccagatggagaagacccaagatgagacagcccctgacatctgaacgctgagctccaagacatcatggcaactgcccccggaccc

SEQ ID NO: 42112 - DNA, 110 bp, synthetic construct
  source 1..110: mol_type = other DNA
cccctgacatctgaacgctgagctccaagacatcatggcaactgcccccggacccacagctgtcccacatgtgccccggactcaccccaaccccctccaaagctgcaatc

SEQ ID NO: 42113 - DNA, 110 bp, synthetic construct
  source 1..110: mol_type = other DNA
gactccgagggagaggagccgcccgtcgcactggtcagggagtggagacagggcagggcaggaggccaccctgggagccaacgcacagctacttcactgagtttttctct

SEQ ID NO: 42114 - DNA, 110 bp, synthetic construct
  source 1..110: mol_type = other DNA
gggcaggaggccaccctgggagccaacgcacagctacttcactgagtttttctcttccgtgtaaattttagaggctgacttttataatcacacaataaagcctgttaggt

SEQ ID NO: 42115 - DNA, 110 bp, synthetic construct
  source 1..110: mol_type = other DNA
actgcgccacgacgggaactccctgtgtccttttttgtgtggtgcttttctgtgaacaccaagggcactttggtcctcagaaataaatggcataactacactgtaaacat

SEQ ID NO: 42116 - DNA, 110 bp, synthetic construct
  source 1..110: mol_type = other DNA
acaacatttaggacaaacttgagttctatgaggacagtgacaggaaaatacccagagcctgagctccaggccccggtatgtcaccttggcgatggagagtgtctgctgct

SEQ ID NO: 42117 - DNA, 110 bp, synthetic construct
  source 1..110: mol_type = other DNA
tctttttgctcttccttaacatttttgctctggtaactgccaaatttttctacttcctacctgtgtttgcttttattagataggaacttaagaaattgccactatgccat

SEQ ID NO: 42118 - DNA, 110 bp, synthetic construct
  source 1..110: mol_type = other DNA
tggacacggcggtggtgtccatgccggtttcaggggcatccaagaggggcatcgtcaccttctcccacggacagtatttttacagcttgttctcagaaacaatcaacacc

SEQ ID NO: 42119 - DNA, 110 bp, synthetic construct
  source 1..110: mol_type = other DNA
caccttctcccacggacagtatttttacagcttgttctcagaaacaatcaacaccgaattgttgaagaacgtagatcttgctgttttggagctcttgaaatcatctgtgg

SEQ ID NO: 42120 - DNA, 110 bp, synthetic construct
  source 1..110: mol_type = other DNA
ataaataaataaaacaaggcacttccagcctctacttctaaaattgttgctatttttttcttacttcacgtgttgcagtttccccatataagtattttcatctagttgaa

SEQ ID NO: 42121 - DNA, 110 bp, synthetic construct
  source 1..110: mol_type = other DNA
tcctggaagaccatggctttgcttctcaaacaggccgaactacacctgaggacttgcgggttaatttgaggagaccctctcaggtggaaggcgccccgggatcgtgtcag

SEQ ID NO: 42122 - DNA, 110 bp, synthetic construct
  source 1..110: mol_type = other DNA
ctgtcaatacacaccaaagtcaagatgaatacaaacatctccatggatctgctttttagaactagagagaatttcaatcgcttgtgttgagaagggagaggtggggaact

SEQ ID NO: 42123 - DNA, 110 bp, synthetic construct
  source 1..110: mol_type = other DNA
atcaatggccaacaggggagctgccaggtgctgttcacaggccgaattctgctggctatgttttgtttgtttacttcatgttaaattttaaaaaatatgagctccaaata

SEQ ID NO: 42124 - DNA, 110 bp, synthetic construct
  source 1..110: mol_type = other DNA
atattcttcctcctaaataaaaaattttaaaaagagctataatttttatgccttttaattctctcagaaatacttttgcctcaagatttagcctatggatcacccctgga

SEQ ID NO: 42125 - DNA, 110 bp, synthetic construct
  source 1..110: mol_type = other DNA
cgacgggaactcctcctttctttttgactgtaaagttctgcctatttgcatgcctcttccaatataaaagagcaacctatgcagattctgaggcattcaaacaacacctg

SEQ ID NO: 42126 - DNA, 110 bp, synthetic construct
  source 1..110: mol_type = other DNA
aacacactcagcaccctggggataagagctgctcacattgaagaaagagagagctattattcaaactcccatgccaaaaaaaagtagtaacaccccacaaaataaaaaag

SEQ ID NO: 42127 - DNA, 110 bp, synthetic construct; identical to SEQ ID NO: 42126
  source 1..110: mol_type = other DNA

SEQ ID NO: 42128 - DNA, 110 bp, synthetic construct
  source 1..110: mol_type = other DNA
aattccgtaataactgcttacgttctcccctgatgtggagttttaaaacgttcatgctctcaagttcctctagaagctgagggaaatggctggccaaatgtgtttgttca

SEQ ID NO: 42129 - DNA, 110 bp, synthetic construct
  source 1..110: mol_type = other DNA
gcaccacacctgcagctcaggctccttttagaaagaagtctgcaagaaaatctttagttttcatacccaccccagaatgagacgaattagacagaccctaggctatttta

SEQ ID NO: 42130 - DNA, 110 bp, synthetic construct
  source 1..110: mol_type = other DNA
agttttcatacccaccccagaatgagacgaattagacagaccctaggctattttaagcatataaaggaaatcccttatacagccaatctcatgatttgctttctgtcctc

SEQ ID NO: 42131 - DNA, 110 bp, synthetic construct
  source 1..110: mol_type = other DNA
cagagtctctgattttattcagtatttagctacagctccatctccctccttaatgcaaagtttcttattaacactgaaaagttggggttggaatctgaatttgtttccct

SEQ ID NO: 42132 - DNA, 110 bp, synthetic construct
  source 1..110: mol_type = other DNA
actcatagcatatggaagttcccaggccaggtgttgaaatctgagctgcagctgtgacctatgctgcagctatgacaatgttagccagatcctttaacccatggtaccag

SEQ ID NO: 42133 - DNA, 110 bp, synthetic construct
  source 1..110: mol_type = other DNA
gacctatgctgcagctatgacaatgttagccagatcctttaacccatggtaccaggtgggattgaacccacacttccccagtaaactgagtcgctgtagtgagattttaa

SEQ ID NO: 42134 - DNA, 110 bp, synthetic construct
  source 1..110: mol_type = other DNA
gcctcttgcctgaaatatccagatttcaggatatctgaagggtctcctaggcgctctcacagcctggaagctgggttccaagagtaggagttccaagagaatcagatggg

SEQ ID NO: 42135 - DNA, 110 bp, synthetic construct
  source 1..110: mol_type = other DNA
acagggctccctggtgcttgaagtttatataattgcttgctctaactatttacggaggcattcattaaagtatttgcacataaaataaagaattgcatgttcaaaagcct

SEQ ID NO: 42136 - DNA, 110 bp, synthetic construct
  source 1..110: mol_type = other DNA
ttgaatgaatgaaatctgtgtggcctcctgcaaatcccagagatgtcgtggataactctattctctatagtacttttcattctgtacatgctatttttaagtccttttta

SEQ ID NO: 42137 - DNA, 110 bp, synthetic construct
  source 1..110: mol_type = other DNA
cagttacttccttcatgctaatctatttctcaggccatcctggtaacctaatcatgatctgtggttgctccatttaattgaggctttggtttagtactcagacactactt

SEQ ID NO: 42138 - DNA, 110 bp, synthetic construct
  source 1..110: mol_type = other DNA
atttataaaagatacatttatgtgggactttttagcttaagttaggaagtttgcattttaagggatcccatattgttttttcttccctggaattgcataaagtgaaagtg

SEQ ID NO: 42139 - DNA, 110 bp, synthetic construct
  source 1..110: mol_type = other DNA
atgtttcccccttaactcctcaaaacaaaaaagagcactttggaagtccagatatttttctttatcagtattacatttcagtaagccagttttagctgaattaaataatt

SEQ ID NO: 42140 - DNA, 110 bp, synthetic construct
  source 1..110: mol_type = other DNA
cagagagccaattacactgtgtggaacagagaaagctgtcccagctgagtcctaactacagtgctaactcagaattgtgaataaatgaaatagcggccactttaatgtca

SEQ ID NO: 42141 - DNA, 110 bp, synthetic construct
  source 1..110: mol_type = other DNA
tctcagggaaagcaacagaaagcttacaggcctgaatatctcttataggtcttatggtgccaaagcattgtgacagaagccaaagcaacttgggaggaatctgatgccca

SEQ ID NO: 42142 - DNA, 110 bp, synthetic construct
  source 1..110: mol_type = other DNA
acgacaggaactccctagaagaatgatttttaattaaagaaaccaaaaatcctactaaacagcaaaagctcctggtcctatttcaactagaaataagtatagcttccacc

SEQ ID NO: 42143 - DNA, 110 bp, synthetic construct
  source 1..110: mol_type = other DNA
agttagtcatggtacattatgcaatgtctccatttcttccattggtcatatagagaaaattgcccaaggccacacagccccagtgcctgtaaaagcaaattatggaatcc

SEQ ID NO: 42144 - DNA, 110 bp, synthetic construct
  source 1..110: mol_type = other DNA
tttcaggcagttggggatgtacattgtccactgtacctggttcttgctgggagcacagatgaaactgagcttgtagaaaaactggcctgaatcacaaaaacttgactccc

SEQ ID NO: 42145 - DNA, 110 bp, synthetic construct
  source 1..110: mol_type = other DNA
ctggagtcagatttaagtttaaattatgcttctgcctctaattagctgtataatattgggcaagatatttaaattctctggggttcagtgtgttcatctataaaataaaa

SEQ ID NO: 42146 - DNA, 110 bp, synthetic construct
  source 1..110: mol_type = other DNA
tacaaaatatgatgtcctttgttagtgctgtagtggcctctagtggactaatatctcatagctacatactatccagagttctatcaagtggagattaacataaaaagaat

SEQ ID NO: 42147 - DNA, 110 bp, synthetic construct
  source 1..110: mol_type = other DNA
atatcctgtttctgcagattatgatcctagatctgagaactaggatgtgtgtcgctttgatagccttagcttgaactttgtcttagaagttatttatcatttctgtggtt

SEQ ID NO: 42148 - DNA, 110 bp, synthetic construct
  source 1..110: mol_type = other DNA
atcactctattttgagttcaggaccatctttgcaaacttgagggaaatgaatttaccaaatagcttgggtccttcaaagagccatgcatgtttcatcatttatttctctt

SEQ ID NO: 42149 - DNA, 110 bp, synthetic construct
  source 1..110: mol_type = other DNA
ctcagaatctggctttgtagcctgccttcttccctcttccttctcttttatccgtgttcctcctggtttgccagcttataaatgtgttccagcttgtcttttgttctcta

SEQ ID NO: 42150 - DNA, 110 bp, synthetic construct
  source 1..110: mol_type = other DNA
ggtccaatttcttaggtaagggaaggaattaaaaactttatttagttgataccgtatcaataaataccaactccagttctgttttatgatcctctttcacactatttgcc

SEQ ID NO: 42151 - DNA, 110 bp, synthetic construct
  source 1..110: mol_type = other DNA
gggtacaggtagagaagtcaaagataattttaacattttgagtgtagtggaatagtggtgcaattaaaagaggaggattaaaatattgcattctactaatttgtcaatat

SEQ ID NO: 42152 - DNA, 110 bp, synthetic construct
  source 1..110: mol_type = other DNA
ttaaacttgaagaagaagcctgtaagacaactttgttctttgatatttaaaaatactctagaaaaattggagacagctgttcattgagtttagctagtcaaagagcatgt

SEQ ID NO: 42153 - DNA, 110 bp, synthetic construct
  source 1..110: mol_type = other DNA
tgcagacactgttggttgcctgccaaaggtttgtttccttctttctaccttaccgtcaagctctgattttggttgtgtcctttgaaaggttatgtcctttttaggcactg

SEQ ID NO: 42154 - DNA, 110 bp, synthetic construct
  source 1..110: mol_type = other DNA
acatgtcattatgtctgacaaatggttagtgctcagtgtttgctaagtggatgtcagctttctctattcatagctgaactgccttcataggtagcagaaatcggtctctt

SEQ ID NO: 42155 - DNA, 110 bp, synthetic construct
  source 1..110: mol_type = other DNA
aatcaaatatagtttctgtttctgtatctgaattttgcttgctcccatttgctttcccactctcttctcctctagctccttcactttttcttgctcactcattctatgga

SEQ ID NO: 42156 - DNA, 110 bp, synthetic construct
  source 1..110: mol_type = other DNA
taattcaattgtttgtgcaggtaatgggaaagatgccagtggggaataaagccctttcaatgtctgcagtatctatttccttttcgccctaccagaacttgcgacgttga

SEQ ID NO: 42157 - DNA, 110 bp, synthetic construct
  source 1..110: mol_type = other DNA
gacatgcattgtatcacctggagggtttgtgaaagtgaatatcgtttggccccaccccagagggtccaattcagtaggtgtggagtagggccggagaatttgtgtttcta

SEQ ID NO: 42158 - DNA, 110 bp, synthetic construct
  source 1..110: mol_type = other DNA
cttaccacatcccaatgggcattaggtagacaggttctgcagactctcaaatatgtgactggatacattgacacagtgttctcttctttgcaggtgtttgaaaatagcat

SEQ ID NO: 42159 - DNA, 110 bp, synthetic construct
  source 1..110: mol_type = other DNA
tcatctatttcatcatagtcattctcttctgtatgctctgtatagtatgttcttatatcaagaataggtgaggtatttgtgacatttatgacaactagaagctgtagaga

SEQ ID NO: 42160 - DNA, 110 bp, synthetic construct
  source 1..110: mol_type = other DNA
tatcaagaataggtgaggtatttgtgacatttatgacaactagaagctgtagagacagggactaaagaaagagaggttgtgggaagcaaaaagtctcattttcttaaatg

SEQ ID NO: 42161 - DNA, 110 bp, synthetic construct
  source 1..110: mol_type = other DNA
caagcaaggctgagctgagggtccccttgaggcctgtcatgggcaaaacagagagcaggagatgcattactgtttatatccactctaagtccttcatattcatgcttaat

SEQ ID NO: 42162 - DNA, 110 bp, synthetic construct
  source 1..110: mol_type = other DNA
cttgaggcctgtcatgggcaaaacagagagcaggagatgcattactgtttatatccactctaagtccttcatattcatgcttaattccttcagtactttcactatctcct

SEQ ID NO: 42163 - DNA, 110 bp, synthetic construct
  source 1..110: mol_type = other DNA
tcaataggtcaaggatccggcattgctgcaagctgcagattaggtcacagatggggcttggatctggggttactgtggcgtggcatatgttgacagctgcagctacaatt

SEQ ID NO: 42164 - DNA, 110 bp, synthetic construct
  source 1..110: mol_type = other DNA
tccggcattgctgcaagctgcagattaggtcacagatggggcttggatctggggttactgtggcgtggcatatgttgacagctgcagctacaatttgacccctagcctgg

SEQ ID NO: 42165 - DNA, 110 bp, synthetic construct
  source 1..110: mol_type = other DNA
tgacctgatggtgggtagtgtgcccctttctgccctgccctgttctataatcttagcctttgcagctatcacaagtggctagaaaattagatttcctcccatcttttccc

SEQ ID NO: 42166 - DNA, 110 bp, synthetic construct
  source 1..110: mol_type = other DNA
cataaagtctccactctttccacactccctgcccattgtaaccaatgcagcttaaaaaatacctgttactggtgggtgaggcctaccttcaaaaatgcatgtgtttctca

SEQ ID NO: 42167 - DNA, 110 bp, synthetic construct
  source 1..110: mol_type = other DNA
aaaatacctgttactggtgggtgaggcctaccttcaaaaatgcatgtgtttctcacaattctcaatgctggtgattccaagattaaaatgctggcaaggtaggtttaatt

SEQ ID NO: 42168 - DNA, 110 bp, synthetic construct
  source 1..110: mol_type = other DNA
cctgccttctctagagccacatgaatagctttcaaacaagctgaaaatctcataatcagccagaaggttgcttatgaaagtgtaacagcctcagctgaaacaggctggct

SEQ ID NO: 42169 - DNA, 110 bp, synthetic construct
  source 1..110: mol_type = other DNA
taattgtgccacattttgagaatctgaaacaatattacaaagatacaagattatttttaaaacttgttgaacagccactagttccactttttgagctgaagtgtaagagg

SEQ ID NO: 42170 - DNA, 110 bp, synthetic construct; identical to SEQ ID NO: 42169
  source 1..110: mol_type = other DNA

SEQ ID NO: 42171 - DNA, 110 bp, synthetic construct
  source 1..110: mol_type = other DNA
tcactcgccctaattgtccttcctccttctatagtagagcctgtgtctcaggggatcccacacacaagaaagagcctgccatttccatgacgcagcagctccagcagaag

SEQ ID NO: 42172 - DNA, 110 bp, synthetic construct
  source 1..110: mol_type = other DNA
tcccacacacaagaaagagcctgccatttccatgacgcagcagctccagcagaagcaaagcagcaactaccccagaggcacaagaagtaacaatgaaggcacgaagctac

SEQ ID NO: 42173 - DNA, 110 bp, synthetic construct
  source 1..110: mol_type = other DNA
ttcccagctgcacagtggagcttgacactgtgtaggtattcagtagacatttggggggggggtagtgaggaatgagaaagagagagttaggagtgtccagaaaccagtgc

SEQ ID NO: 42174 - DNA, 110 bp, synthetic construct
  source 1..110: mol_type = other DNA
gggggggtagtgaggaatgagaaagagagagttaggagtgtccagaaaccagtgcagtgagatgtgggagagaggggacatcccctgttccttaggactgtatacgatgc

SEQ ID NO: 42175 - DNA, 110 bp, synthetic construct
  source 1..110: mol_type = other DNA
tgaggccagggattgaacccgcaaccttatagatactacttggattcgttactgctgaaccatgacgggatcttctttttcctgtcttttgaattggaagttttgcactc

SEQ ID NO: 42176 - DNA, 110 bp, synthetic construct; identical to SEQ ID NO: 42175
  source 1..110: mol_type = other DNA

SEQ ID NO: 42177 - DNA, 110 bp, synthetic construct
  source 1..110: mol_type = other DNA
caccatgacaggaactccccacaaatggtatgtttaaacattaggatattttcccattaaaaaatctggagttccctggtagctcagtgagttaaggatctggcaatgtc

SEQ ID NO: 42178 - DNA, 110 bp, synthetic construct
  source 1..110: mol_type = other DNA
acttgggcggcatatgcaagttcccaagttaagggttgaatcatagctacagctgccggccacagtcacagtcacgtcacgtcagatccgagcctcgtctgcaacctaca

SEQ ID NO: 42179 - DNA, 110 bp, synthetic construct
  source 1..110: mol_type = other DNA
gcaagttcccaagttaagggttgaatcatagctacagctgccggccacagtcacagtcacgtcacgtcagatccgagcctcgtctgcaacctacaccatggctcacagca

SEQ ID NO: 42180 - DNA, 110 bp, synthetic construct
  source 1..110: mol_type = other DNA
aaacacgtgactccaatgcctgataatccagtaatggacatcagttaagtagcataatttgggaaggcgttttgaaagctgcgaagtgatatataaacagcgaaactact

SEQ ID NO: 42181 - DNA, 110 bp, synthetic construct
  source 1..110: mol_type = other DNA
aatttgggaaggcgttttgaaagctgcgaagtgatatataaacagcgaaactactataagccactgggtcacagaggtggaatggaagtatggttttggggagggacagg

SEQ ID NO: 42182 - DNA, 110 bp, synthetic construct; identical to SEQ ID NO: 42180
  source 1..110: mol_type = other DNA

SEQ ID NO: 42183 - DNA, 110 bp, synthetic construct; identical to SEQ ID NO: 42181
  source 1..110: mol_type = other DNA

SEQ ID NO: 42184 - DNA, 110 bp, synthetic construct
  source 1..110: mol_type = other DNA
tagggagctctgggacacaggttccattcctggccttccactgcgggttaaggattcagactagctcacatctgatccctggcccgggaacgccatatgcctcagagcag

SEQ ID NO: 42185 - DNA, 110 bp, synthetic construct
  source 1..110: mol_type = other DNA
ggtgacaataacagtagcagtagcatttattgagcattgctggccgggtgctgcccaggtggctttaggtgtatgaactcactgaactctcactgcaacctgatgagtta

SEQ ID NO: 42186 - DNA, 110 bp, synthetic construct
  source 1..110: mol_type = other DNA
caattaacttagagattgaaatgatctcatttagccatcagtcctgttctctccccatgggcaggcctcaggggtaaatatatcctaattcaggtggcggtgccattcat

SEQ ID NO: 42187 - DNA, 110 bp, synthetic construct
  source 1..110: mol_type = other DNA
accttggcaagcaagcacaaacgccaaaagaaattcatagaaagttgggcaactgtgggccataaacaatacaagtaacagctaaaagttcttcaaaggaaaccttggct

SEQ ID NO: 42188 - DNA, 110 bp, synthetic construct
  source 1..110: mol_type = other DNA
ttgcaattttagtgttgtttgctgtcattgcataatctagcctatcctggctgatacagctacagattgtctacattctaaattaaattaaattgtttgtttcaaaagta

SEQ ID NO: 42189 - DNA, 110 bp, synthetic construct
  source 1..110: mol_type = other DNA
ctcagttcctgaatcacagctcagtacctgttctgaaatgtattttgaaagagaaagaaatgtccctttgctataacagctggaattaccctattccatgaagccatcac

SEQ ID NO: 42190 - DNA, 110 bp, synthetic construct
  source 1..110: mol_type = other DNA
ttccccacctgatccttctctggctaattcatggcttcccttaaacagcacctattttcttctggtaacaagctagttgagggaaggtagcaggagcccactcaggtgta

SEQ ID NO: 42191 - DNA, 110 bp, synthetic construct
  source 1..110: mol_type = other DNA
ttgtttgcttgtttttaagtagctttattgaaatatgtattcatttcctagggctgccatgcaaatgaccacaaactgggtggcttaaaacaagagaaatgtattccctc

SEQ ID NO: 42192 - DNA, 110 bp, synthetic construct
  source 1..110: mol_type = other DNA
gccatgcaaatgaccacaaactgggtggcttaaaacaagagaaatgtattccctcacagttccagaactcagaagtttgaaatcgggatgtccagggggttgatcctttg

SEQ ID NO: 42193 - DNA, 110 bp, synthetic construct
  source 1..110: mol_type = other DNA
agccagacaatgcccttctttccaaagattttagggtctcagcttttgagggaagaaacgctaggtagctaggcagacataaatgggtcctacccccatcctagacagtg

SEQ ID NO: 42194 - DNA, 110 bp, synthetic construct
  source 1..110: mol_type = other DNA
aacatgacatgcattacatagaaagtgtcctatcatcctgcacttctgattcctggggtgctaggttggtagagactgctcccacacttgcttctctgcaacaacataaa

SEQ ID NO: 42195 - DNA, 110 bp, synthetic construct
  source 1..110: mol_type = other DNA
catctgtaccatgttttccctatactttcgttcttattttggctgatatatattttgaagtcagctttgttttaattgaagtaaataaacacacaaaagggtgctgaaaa

SEQ ID NO: 42196 - DNA, 110 bp, synthetic construct
  source 1..110: mol_type = other DNA
taaacattgtacatctgagcacgtaggcctagcatttccccgtggtgtcataagtggatgagtctgcttgaataattctccaggataaactggctgccttctgggctttt

SEQ ID NO: 42197 - DNA, 110 bp, synthetic construct
  source 1..110: mol_type = other DNA
ataactaaatagatagacatagttcacgattctagtcctggcggaaagtgtaggcaagtctctgaaaataagctttaggtgctttcgatacaaaggcagcatatttttct

SEQ ID NO: 42198 - DNA, 110 bp, synthetic construct
  source 1..110: mol_type = other DNA
ataaaattaggacacatctataacccaaatcacaatatagaggaaagtgcccagattctaggatgagtttcataaggatgcacgaaggaccaagaaagggggcccaggac

SEQ ID NO: 42199 - DNA, 110 bp, synthetic construct
  source 1..110: mol_type = other DNA
ttctaggatgagtttcataaggatgcacgaaggaccaagaaagggggcccaggacttaagcgtttagacaaggctagaagaaaagtgttctgaaaacatgggcacatcat

SEQ ID NO: 42200 - DNA, 110 bp, synthetic construct
  source 1..110: mol_type = other DNA
ataagaaaagggactctgtggcctgatgtctccccagatcctcttgctggtcagagccctgggaagggaatggactgctttgcataaggagcccagggggtctgttgagg

SEQ ID NO: 42201 - DNA, 110 bp, synthetic construct
  source 1..110: mol_type = other DNA
gccctgggaagggaatggactgctttgcataaggagcccagggggtctgttgagggagaagggactcaaaattagcaactgaaaaaaatacccactgattatctcatggt

SEQ ID NO: 42202 - DNA, 110 bp, synthetic construct
  source 1..110: mol_type = other DNA
tgaaacgaatctgccatttaatttcttctggcaattcatagctctcgctgccttattaacatcagagtgagtttgaccttagtcagccagggtctggtttccttggtgaa

SEQ ID NO: 42203 - DNA, 110 bp, synthetic construct
  source 1..110: mol_type = other DNA
ctacaatcagtctaccccaatatccaagtcactgtgtggagaccagagcacaaagcaaatgtgtcctagcctttatagctcctcaactggtttcttccagcctctgacct

SEQ ID NO: 42204 - DNA, 110 bp, synthetic construct
  source 1..110: mol_type = other DNA
cttcaaggcttcatcgttcagggaggaagggccactggatttcctcagtcaacctatcaataaacaaatatttaccaaatccttctggtgtaccagctccagcaaagaaa

SEQ ID NO: 42205 - DNA, 110 bp, synthetic construct
  source 1..110: mol_type = other DNA
atcaataaacaaatatttaccaaatccttctggtgtaccagctccagcaaagaaaacaaaggaataagcactcagcttcactgttgctcagtggcatgcagaaaaaggca

SEQ ID NO: 42206 - DNA, 110 bp, synthetic construct
  source 1..110: mol_type = other DNA
aatgctgccactgaccagccatgaggaggttgtatgcttaaagctgtttctgttggagaagagacgggtggacagtgaccacgtgtggggctgttctggctggccagtgg

SEQ ID NO: 42207 - DNA, 110 bp, synthetic construct
  source 1..110: mol_type = other DNA
gagaagagacgggtggacagtgaccacgtgtggggctgttctggctggccagtgggatgagcttctagcccgcaggtgggagcagacccagctcaccgccccaaccagag

SEQ ID NO: 42208 - DNA, 110 bp, synthetic construct
  source 1..110: mol_type = other DNA
ccccagcagccagccaacggctcccaagagtcttgtccctctggtgctacaccgcttctggggactctcctcagctgtagtgtcacctgtacagagaagcagtgttttgg

SEQ ID NO: 42209 - DNA, 110 bp, synthetic construct
  source 1..110: mol_type = other DNA
tcccatcatagtttccccaaatgcatgctttgctctctctgtctttctctctgttcgtacagctgtctttcccatcaaactgggggtgtcacccaagacctaagccaaaa

SEQ ID NO: 42210 - DNA, 110 bp, synthetic construct
  source 1..110: mol_type = other DNA
ccccaaaacaaaaaagagatcctctggttaccttgacttgcattgcccggtttgaaatgaactcaagccagctgccaaggatcaccatttcctctactaaatctactttt

SEQ ID NO: 42211 - DNA, 110 bp, synthetic construct
  source 1..110: mol_type = other DNA
ctgggcaatgttcagcctaacagctggcagtagcttaaagcgtcagccctcctgacagtggcattttcacagccaccttcacattgccacactggggagaagcagacgtg

SEQ ID NO: 42212 - DNA, 110 bp, synthetic construct
  source 1..110: mol_type = other DNA
tgtcccaggagctgcacaatcttagcacaaacggaagactgtaaggaaagaagagaacatgggataaagggaggtccagtcaatgaactggtgcgcatgccctaagcaaa

SEQ ID NO: 42213 - DNA, 110 bp, synthetic construct
  source 1..110: mol_type = other DNA
aacatgggataaagggaggtccagtcaatgaactggtgcgcatgccctaagcaaaggcctttggaaggaaaaacccaaaggctaccgtcttggatgatggattaggggaa

SEQ ID NO: 42214 - DNA, 110 bp, synthetic construct
  source 1..110: mol_type = other DNA
actcaaatctcaccctgagttttagctgagctcaggactacatttcccagcattccttgcagcttgtgattatactaagttctgaccaattagaggtgtgaagtggcagc

SEQ ID NO: 42215 - DNA, 110 bp, synthetic construct
  source 1..110: mol_type = other DNA
aagggatggtgtggaatcgattgccgaggtttctttggcgtagagtagatttcgcttggatttctgtggaagcaccttcatataatgtcacagttgttttgggtgtagag

SEQ ID NO: 42216 - DNA, 110 bp, synthetic construct
  source 1..110: mol_type = other DNA
aaggaacggaaggaggagatcgccaccatggagaccatcaacaatggcaagtctatctttgaggcccgattggacgttgacatttcctggcagtgtctggagtactatgc

SEQ ID NO: 42217 - DNA, 110 bp, synthetic construct
  source 1..110: mol_type = other DNA
gttcacatacatttttcaaatgataccttggggcgaggaggcaaaggagaaaaaaatagctgtattgctttacaaggcaaaggagggtaacagcaggctaatgccttaaa

SEQ ID NO: 42218 - DNA, 110 bp, synthetic construct
  source 1..110: mol_type = other DNA
gtctttttaggctatggatgtttgattgagggtggaggactggccctgatggaatagatagatatattggagacactcttttaggagagcctagttccaaatgggtaagg

SEQ ID NO: 42219 - DNA, 110 bp, synthetic construct
  source 1..110: mol_type = other DNA
tgtacattcttttgggaagggttggctgtcagagctaaatggaatgatattagatatctcaccatgctatttctgaaaggacagatggaaaagagcggggagaaccaggg

SEQ ID NO: 42220 - DNA, 110 bp, synthetic construct
  source 1..110: mol_type = other DNA
ttattcattctactaaatcaagaaacatttacctcgtggctatcaactgccagaccctgctctagattattagagcttggcttcttgcaatagaggctagaacagccatg

SEQ ID NO: 42221 - DNA, 110 bp, synthetic construct
  source 1..110: mol_type = other DNA
cccaggggatcagtcttaaaagatgtgaacctgagacccactgtcagtacttcatgtaactgggaaatccaaggggatttcatgcccagtagctgggttttctcatctga

SEQ ID NO: 42222 - DNA, 110 bp, synthetic construct
  source 1..110: mol_type = other DNA
gtaactgggaaatccaaggggatttcatgcccagtagctgggttttctcatctgaaaagctgaaactactgtgcctggcctttgtgcatctctcaggatgagggaaaata

SEQ ID NO: 42223 - DNA, 110 bp, synthetic construct
  source 1..110: mol_type = other DNA
tatggagtatttctcaaactcctcctctgcttagattgcaggattaagtaagtattgaatgggagctgtctggaatgaccagaaatttgtgaaaataactgcgcttttct

SEQ ID NO: 42224 - DNA, 110 bp, synthetic construct
  source 1..110: mol_type = other DNA
tgggaggctttttccatagatagtggtaaagtccactccttaccatcttcttccgattattgctcaaccatcagctactcagtgaaaattacaactccccacgctgacac

SEQ ID NO: 42225 - DNA, 110 bp, synthetic construct
  source 1..110: mol_type = other DNA
aattttgaatggtgggccaagttgagagttgctctctgtgcctaaaagagctggacatttctggaaactatgctgagttttctagggcacagccaggctgccagggtctg

SEQ ID NO: 42226 - DNA, 110 bp, synthetic construct
  source 1..110: mol_type = other DNA
catttctggaaactatgctgagttttctagggcacagccaggctgccagggtctgaacccagagcaaggtctcattagtattcagagggggaaattcaccgtgggggccg

SEQ ID NO: 42227 - DNA, 110 bp, synthetic construct
  source 1..110: mol_type = other DNA
tggatgcttcttagcacttgaacttttccaggaactagttgttatatgttaagggaggtaagaattcaatccaggtttgttcaaaatcatgctataacccggttctagta

SEQ ID NO: 42228 - DNA, 110 bp, synthetic construct
  source 1..110: mol_type = other DNA
ctactgaagacttctgaaaaatacttttcaccccctgataaatagtgagagtgccccttccttttccatactgggacattgttatgtgcggatgtgtgttgcatggagct

SEQ ID NO: 42229 - DNA, 110 bp, synthetic construct
  source 1..110: mol_type = other DNA
ccttccttttccatactgggacattgttatgtgcggatgtgtgttgcatggagcttcagcagccatcttacatcaggaggggtgacatccatgacacactaaagatgagg

SEQ ID NO: 42230 - DNA, 110 bp, synthetic construct
  source 1..110: mol_type = other DNA
agaagttaagaatgactggtctaaaatctgtcatcccagaaatgctccctaatcgggcctcatcttctgtttctagcactgatctcctattagggattgaggatccctgt

SEQ ID NO: 42231 - DNA, 110 bp, synthetic construct
  source 1..110: mol_type = other DNA
agatgatcccaatgctcagtaaaggctgagtatccctgactaagccttaagtcacatcaatgacaacgtgaaactctgaacagggtgcttgaatgttttatcatcacata

SEQ ID NO: 42232 - DNA, 110 bp, synthetic construct
  source 1..110: mol_type = other DNA
atcaatgacaacgtgaaactctgaacagggtgcttgaatgttttatcatcacatacctactcaagaagttgctgggaaaacaagagaagctttaaaaaatatcaaatatt

SEQ ID NO: 42233 - DNA, 110 bp, synthetic construct; identical to SEQ ID NO: 42231
  source 1..110: mol_type = other DNA

SEQ ID NO: 42234 - DNA, 110 bp, synthetic construct; identical to SEQ ID NO: 42232
  source 1..110: mol_type = other DNA

SEQ ID NO: 42235 - DNA, 110 bp, synthetic construct
  source 1..110: mol_type = other DNA
caaacgcctcaaagccttggctttcagactgcagcctgatgggtaccactggcgagcagaaggttacaggaagctgggctagccgatctgggtctagaggagttggcaag

SEQ ID NO: 42236 - DNA, 110 bp, synthetic construct
  source 1..110: mol_type = other DNA
ctattcctgggggctttatattcaaaggtactataagacttggtgccttttacactggtgagctacactgcatagtgtggttggttaccacaggagagtgggaattttgt

SEQ ID NO: 42237 - DNA, 110 bp, synthetic construct
  source 1..110: mol_type = other DNA
aaaaaaaaaagaatatcttcagtgatgagtttagctgacctgacttgacattcgttttgatagccaaggaacacttagggctgagcccagagacttggatgtggtcaaat

SEQ ID NO: 42238 - DNA, 110 bp, synthetic construct
  source 1..110: mol_type = other DNA
agtgattagaaaggaactgggttttagttgcagcttgtaatatgccccaaagtcgttatctcaccattcagagatcacacacgcattaggcctagcctagggtctggcac

SEQ ID NO: 42239 - DNA, 110 bp, synthetic construct
  source 1..110: mol_type = other DNA
ttttaatttcattttcacccttagttccactctctgttggccaagagccagtcataccctacacttctattacaaaaacccagtacccccagggttctccttgctcagga

SEQ ID NO: 42240 - DNA, 110 bp, synthetic construct
  source 1..110: mol_type = other DNA
tttacctgaccaccgtcctcaggcttggggagagcaccagtgagttcacggttccgtgttctctagaccagacacgctgcatacatctaatgggtctgtgccactgatcc

SEQ ID NO: 42241 - DNA, 110 bp, synthetic construct
  source 1..110: mol_type = other DNA
gtgttctctagaccagacacgctgcatacatctaatgggtctgtgccactgatcctgcccggtctattcatcctagaaagacctcctcataagtgaactggagggcttga

SEQ ID NO: 42242 - DNA, 110 bp, synthetic construct
  source 1..110: mol_type = other DNA
ctagaatatttgacagacaagaagtaaagccaccgtggcaagaaggaggagtggtacaaaattgaagtcaaaaggatgggtaaggttttaaaaaggaaagtcattggaag

SEQ ID NO: 42243 - DNA, 110 bp, synthetic construct
  source 1..110: mol_type = other DNA
gtcaaagtcactatatatctctgaagttttcatactgtttttatttaatttaattaattaatttttggccacacctgcaacatgtggaagttcccaggtcagggatcaaa

SEQ ID NO: 42244 - DNA, 110 bp, synthetic construct; identical to SEQ ID NO: 42243
  source 1..110: mol_type = other DNA

SEQ ID NO: 42245 - DNA, 110 bp, synthetic construct
  source 1..110: mol_type = other DNA
ctaaactgaggtaacaggaaaaaaaaatctgcttaatgcaaggccagctttttcgtaggataatgctaactatgggaaaaaacctaaatctctaatgttgctgtcttaac

SEQ ID NO: 42246 - DNA, 110 bp, synthetic construct
  source 1..110: mol_type = other DNA
caaaagaaggttgtaagacaggggctgttattgtcctcattttactgatggcaaaataaggtacagagatgttaaccacccagtgtcacacagctgatacagtcggagct

SEQ ID NO: 42247 - DNA, 110 bp, synthetic construct
  source 1..110: mol_type = other DNA
ataaggtacagagatgttaaccacccagtgtcacacagctgatacagtcggagctgagagttgaaaacagagagtgtttgaaggtgtaataagtggagaaacagacccat

SEQ ID NO: 42248 - DNA, 110 bp, synthetic construct
  source 1..110: mol_type = other DNA
atttggtgtttattttcctacttacaggtgagttaaagtttggaacttctgtatttcttaattatatttatttcaggcgattcgatctattactttggctgccttgaaat

SEQ ID NO: 42249 - DNA, 110 bp, synthetic construct
  source 1..110: mol_type = other DNA
tcttaattatatttatttcaggcgattcgatctattactttggctgccttgaaatctagctgttattttttttagcccttgacactatcaatgagttttgttctgccttc

SEQ ID NO: 42250 - DNA, 110 bp, synthetic construct
  source 1..110: mol_type = other DNA
ttgtttcttgaatgacttctgtgtagcgttgatggtgtttgatagcattttatccacagtagaactttcaaaattggagtcacctattccttggagctctctcctgataa

SEQ ID NO: 42251 - DNA, 110 bp, synthetic construct
  source 1..110: mol_type = other DNA
acagtagaactttcaaaattggagtcacctattccttggagctctctcctgataatgtgaagaaccaaacacactctagttagcaacaaacacgcttaataccaagtacc

SEQ ID NO: 42252 - DNA, 110 bp, synthetic construct; identical to SEQ ID NO: 42250
  source 1..110: mol_type = other DNA

SEQ ID NO: 42253 - DNA, 110 bp, synthetic construct; identical to SEQ ID NO: 42251
  source 1..110: mol_type = other DNA

SEQ ID NO: 42254 - DNA, 110 bp, synthetic construct
  source 1..110: mol_type = other DNA
tggctaaaacaagaaatcatcacatcagattctaccaagtggcgttcagacttaaaactgttgaaagtcatgtagttcttcacgaaatcccgagtggtggagtggtacat

SEQ ID NO: 42255 - DNA, 110 bp, synthetic construct
  source 1..110: mol_type = other DNA
aactgttgaaagtcatgtagttcttcacgaaatcccgagtggtggagtggtacatcaagctaattttttattttgtctgaagcactgcatagagtagcattatggtgtcc

SEQ ID NO: 42256 - DNA, 110 bp, synthetic construct
  source 1..110: mol_type = other DNA
ttttaacagtctcacctgcagagtatggaagttcttggcctaggggtcaaatcaaaattcagccacagaagcatcagatccatgctgcatcttggacctatgccacagtt

SEQ ID NO: 42257 - DNA, 110 bp, synthetic construct
  source 1..110: mol_type = other DNA
ctgcagagtatggaagttcttggcctaggggtcaaatcaaaattcagccacagaagcatcagatccatgctgcatcttggacctatgccacagtttgcagcaatgctgga

SEQ ID NO: 42258 - DNA, 110 bp, synthetic construct
  source 1..110: mol_type = other DNA
tgatagacgtggtattatgttatcatggtaggtggtggtcaaaatgtagcacattaagaaaagagtttatgttccaccatagggcacatctagtttagtgttttaaaggg

SEQ ID NO: 42259 - DNA, 110 bp, synthetic construct
  source 1..110: mol_type = other DNA
aagaaaagagtttatgttccaccatagggcacatctagtttagtgttttaaagggggaagaggaaaaactgaaaagaagggtgtataactcaaaggatctctgaactaaa

SEQ ID NO: 42260 - DNA, 110 bp, synthetic construct
  source 1..110: mol_type = other DNA
ttgctaaaaaaatattctatgggctgaacaatgagttggagctagctagccctatgaagatgtgggggcacacagcatcccaggcagaggaacccatgagtgacaagctt

SEQ ID NO: 42261 - DNA, 110 bp, synthetic construct
  source 1..110: mol_type = other DNA
atgctaatagcacccataatcccatgctaatttattttatcaaattaaagcaaatgctgctctttgaccccagggaccttccatcctttctctgggtccccacagtgagc

SEQ ID NO: 42262 - DNA, 110 bp, synthetic construct
  source 1..110: mol_type = other DNA
gctgctctttgaccccagggaccttccatcctttctctgggtccccacagtgagcttgaatccgtttagtagaagagtttgccaagaatataaattaataaaacaggatt

SEQ ID NO: 42263 - DNA, 110 bp, synthetic construct
  source 1..110: mol_type = other DNA
atgcagacatggaattatttatacaaatcacaagatgtgttaaggaaaatgttattgtaaacatcatatcatagctgagtgtattctccctgaaaatcatgctcccaaac

SEQ ID NO: 42264 - DNA, 110 bp, synthetic construct
  source 1..110: mol_type = other DNA
taaaggaagatctggtccgttcctaatcaataagaaatcttgactctcaaagctgttttgaagactgaatattatacaccttcgcttcattaagccctccactttggata

SEQ ID NO: 42265 - DNA, 110 bp, synthetic construct
  source 1..110: mol_type = other DNA
ttttgaagactgaatattatacaccttcgcttcattaagccctccactttggatagaggaagttccatgcagtgctgggtagaagtaaagtttggctggtagcctctcac

SEQ ID NO: 42266 - DNA, 110 bp, synthetic construct
  source 1..110: mol_type = other DNA
cggcctcggtccagcaccctgatctccagctctctctcacttgcctctcccatcgctccttgtttattgtttgctcctccatctctccttttccatcttccccaggctgg

SEQ ID NO: 42267 - DNA, 110 bp, synthetic construct
  source 1..110: mol_type = other DNA
gaattacttaacatatatacaagatccctcttggactgccattgacctacctttccagcttcctcttccacaagtccccttttcactagtgtaagtctgtgcagtaggca

SEQ ID NO: 42268 - DNA, 110 bp, synthetic construct
  source 1..110: mol_type = other DNA
cagcttcctcttccacaagtccccttttcactagtgtaagtctgtgcagtaggcaggagaagcattgtttttcttattttactaggtctatatagagttgtggcttgtag

SEQ ID NO: 42269 - DNA, 110 bp, synthetic construct
  source 1..110: mol_type = other DNA
gttaggcactgtgctgcatgttatatggtcacagatattcagcaaacccaccatttattgggaggatgtccccatgcccaaaagccaactagctcctgttgaggatacca

SEQ ID NO: 42270 - DNA, 110 bp, synthetic construct
  source 1..110: mol_type = other DNA
tattgggaggatgtccccatgcccaaaagccaactagctcctgttgaggataccaacaaacataattgtaatcccttacattctaagagaagagaaaagacacatgcaaa

SEQ ID NO: 42271 - DNA, 110 bp, synthetic construct
  source 1..110: mol_type = other DNA
atccatagtatttaaattcagctgaacatagacaaggggatattttccctctatgccttcccatgccccatctcttcctttaccaaatccacatttgggcaattgagcac

SEQ ID NO: 42272 - DNA, 110 bp, synthetic construct
  source 1..110: mol_type = other DNA
aggctcatgcaaaacccttatgaaggtgcacagcttctggtctctggaattttgttcctatgaccattcctccagaaggtctcgccagaacttatttatgttatcaagaa

SEQ ID NO: 42273 - DNA, 110 bp, synthetic construct
  source 1..110: mol_type = other DNA
acttgagagccaacattttgactgttagagtcacagtagcagctacctagtctaaatgtactacatacaggagcttaaaaaacagtaagatgtaatgaaaacacaagtat

SEQ ID NO: 42274 - DNA, 110 bp, synthetic construct
  source 1..110: mol_type = other DNA
gtagcagctacctagtctaaatgtactacatacaggagcttaaaaaacagtaagatgtaatgaaaacacaagtatgaactgcaaatgaaaatattcactttaaggagtat

SEQ ID NO: 42275 - DNA, 110 bp, synthetic construct
  source 1..110: mol_type = other DNA
ttacctgtacttctgaccaattagctatatatccaggttcccatgacatcttcttcgggcttgataatttgtcagaatggcttgcagaacccagagaaacaattgtgtca

SEQ ID NO: 42276 - DNA, 110 bp, synthetic construct
  source 1..110: mol_type = other DNA
taatctagactggaatggtttagaatgacagctccttgatggaaaggattgtgcgttaataatgtcattgttttcaggatcaatggtagtatttggcccatagtaggaat

SEQ ID NO: 42277 - DNA, 110 bp, synthetic construct
  source 1..110: mol_type = other DNA
agtgacaaagaggttttgaaagatctgtgctaggagactgatacagtatgagatagatcatacatcatttaatatccagaacatcatttcctctgaggagatgcctattt

SEQ ID NO: 42278 - DNA, 110 bp, synthetic construct
  source 1..110: mol_type = other DNA
ttcagttgggctgtgagaaacatcctgagtgttatttcctccataataaccctacctttcccagcaactcacatatcttcctctagcagcttgctcaaagattctcaaat

SEQ ID NO: 42279 - DNA, 110 bp, synthetic construct
  source 1..110: mol_type = other DNA
ctttcccagcaactcacatatcttcctctagcagcttgctcaaagattctcaaatggaaagtcccagggagtggtgcttactctttgcccacattgtcttggatgtgtaa

SEQ ID NO: 42280 - DNA, 110 bp, synthetic construct
  source 1..110: mol_type = other DNA
acttaccccttaccttacaccaaagacttagtctcatcttttattcctccttcttctgcaagagtcctccctatacctatactctggacctcagcacagagggagcagac

SEQ ID NO: 42281 - DNA, 110 bp, synthetic construct
  source 1..110: mol_type = other DNA
cattcacaccatctcagatgacaatttcctcccagctgttataaaccttcccccacccagccggctacccagtattgtttactataatggcctggacatcagtgagagtt

SEQ ID NO: 42282 - DNA, 110 bp, synthetic construct
  source 1..110: mol_type = other DNA
tgattttaacatctctaagaatctccacctccatttatatttgattacatccaccctgatttacgggtttccaatcacatccttataggtttaggcccacacagggttca

SEQ ID NO: 42283 - DNA, 110 bp, synthetic construct
  source 1..110: mol_type = other DNA
ctgatttacgggtttccaatcacatccttataggtttaggcccacacagggttcaaacctttccttgatctgccatctaaagctactctcagctgccctagggtttgcca

SEQ ID NO: 42284 - DNA, 110 bp, synthetic construct; identical to SEQ ID NO: 42282
  source 1..110: mol_type = other DNA

SEQ ID NO: 42285 - DNA, 110 bp, synthetic construct; identical to SEQ ID NO: 42283
  source 1..110: mol_type = other DNA

SEQ ID NO: 42286 - DNA, 110 bp, synthetic construct
  source 1..110: mol_type = other DNA
ctttctattttttatagcacttttgactcactaggaatgaacctaagcaaatgatctctatttatgcctttctacttagctccaaagtcagacattcagtctaaagaaac

SEQ ID NO: 42287 - DNA, 110 bp, synthetic construct
  source 1..110: mol_type = other DNA
ctctatttatgcctttctacttagctccaaagtcagacattcagtctaaagaaacctttggttgaagtgaaagattcatttaaaatcatgtgttctaaacattgtcttgc

SEQ ID NO: 42288 - DNA, 110 bp, synthetic construct
  source 1..110: mol_type = other DNA
taaacattaaagtaagtctcactattttgagaggatctaagtagaaacgttagcgtcttcctgagccacaaacctaggcagtgtttttgtgtagctttaccttttaagtg

SEQ ID NO: 42289 - DNA, 110 bp, synthetic construct
  source 1..110: mol_type = other DNA
ggactgagggaggagaagaatgtgggaacacaggctgccggcagacagcagacgcaggttctggtcaaggtgcagaggttccttcctctcctcccaccgcctgctctgtt

SEQ ID NO: 42290 - DNA, 110 bp, synthetic construct
  source 1..110: mol_type = other DNA
tcagcatagaatgaatctgtctcagctcttcaaaactatagccctttcctcctgaaggcaggtgcaggagctgcaaaaatgatgtagcacatttaagaggaaagccaggt

SEQ ID NO: 42291 - DNA, 110 bp, synthetic construct
  source 1..110: mol_type = other DNA
aggcaggtgcaggagctgcaaaaatgatgtagcacatttaagaggaaagccaggtatcacaattcaacgtaaaattatttaggtctaatagaaggacactagagctaaga

SEQ ID NO: 42292 - DNA, 110 bp, synthetic construct
  source 1..110: mol_type = other DNA
gtttaggtatatgttgaagatgattttccagctgaagtaaatctgtgacaagggggtaatcttccttgggatgaagtttacacaggccctaaggaaattcaagagcaaga

SEQ ID NO: 42293 - DNA, 110 bp, synthetic construct
  source 1..110: mol_type = other DNA
tagtcctttcgttaatgtactatgtttaattggaaatgatgcactgctccttacagggaggaccctctccaagtgacacaattgttcacttctattttttctacccatca

SEQ ID NO: 42294 - DNA, 110 bp, synthetic construct
  source 1..110: mol_type = other DNA
aatgactgttccatctaatcagtcagtcatcaaataagaattaacagatggtaccaagcactcagcacaagctctcaaggggtagtatccatttattctcctagttccta

SEQ ID NO: 42295 - DNA, 110 bp, synthetic construct
  source 1..110: mol_type = other DNA
aagcactcagcacaagctctcaaggggtagtatccatttattctcctagttcctattctgcttggtaattagacctagttgggagagaatctgttcacacaacaaactgg

SEQ ID NO: 42296 - DNA, 110 bp, synthetic construct
  source 1..110: mol_type = other DNA
agaaacaactggggagcagctcctgcccttagggctacagagagtgctccctaaagtggccaaaaaaagggagttactgtttgatgcctgcccctgaagctacagagctg

SEQ ID NO: 42297 - DNA, 110 bp, synthetic construct
  source 1..110: mol_type = other DNA
agatgtcaggcaaagaaaggggaaattacgtctttcctcctgccacataggaaatcatggcctgggctggatgtagccttgccagaggtatgtgggtaaaggagaattag

SEQ ID NO: 42298 - DNA, 110 bp, synthetic construct
  source 1..110: mol_type = other DNA
tatttggcagcagtagattctgaccactgactggaggctgtgatgtcctcatctggaatgtggcctcctgacatgcccagaggatagcggcatatggctgaaccaggaga

SEQ ID NO: 42299 - DNA, 110 bp, synthetic construct
  source 1..110: mol_type = other DNA
ttcttcaaggagagtctcctatacctcattcccttcgcactgaatttgcttctgctagatcctccatagcattgttataaaattatgtatttaatcattagcttcaaaat

SEQ ID NO: 42300 - DNA, 110 bp, synthetic construct
  source 1..110: mol_type = other DNA
ttgcttctgctagatcctccatagcattgttataaaattatgtatttaatcattagcttcaaaatggctcattcttggagttcccattatggctcagtgggttaaaaacc

SEQ ID NO: 42301 - DNA, 110 bp, synthetic construct
  source 1..110: mol_type = other DNA
tattttcagattattttccattacaggtaatcacaagatactgaatatcattcccactttgaatagcctcaagtgtgcacagagcaagaggctaattccctctgataagc

SEQ ID NO: 42302 - DNA, 110 bp, synthetic construct; identical to SEQ ID NO: 42301
  source 1..110: mol_type = other DNA

SEQ ID NO: 42303 - DNA, 110 bp, synthetic construct
  source 1..110: mol_type = other DNA
caccctggatggaatcatttcctagaccagctcacggcactcagggaagcactcatgtgtgctagtttattatataatagaggatacggatgaacagccagacaaagaga

SEQ ID NO: 42304 - DNA, 110 bp, synthetic construct
  source 1..110: mol_type = other DNA
ttctctgaaaagatcaacaaaattgacaaacttttagctagactgaccaggaggaaaaagagaggactcaaattactagtcagaaatgaaagagggacattattattgac

SEQ ID NO: 42305 - DNA, 110 bp, synthetic construct
  source 1..110: mol_type = other DNA
ggacaggctccatccgcgcgtccactttctcttgctgagaagaatggttaaagtcttcaatggccttttggaaaaagaagttcagctcctcaaagttcatggcctggagt

SEQ ID NO: 42306 - DNA, 110 bp, synthetic construct
  source 1..110: mol_type = other DNA
ctaaaagatctccttgcttctactcttgcctctttgcaggccattctcaatgtagcagctagaatgatctcagtaattacattgctcttatgcacaaaaccctctaatga

SEQ ID NO: 42307 - DNA, 110 bp, synthetic construct
  source 1..110: mol_type = other DNA
cagctagaatgatctcagtaattacattgctcttatgcacaaaaccctctaatgactttttaatctcatttggagtaaagtgaaaaatcatcaaatgacccacatggtcc

SEQ ID NO: 42308 - DNA, 110 bp, synthetic construct
  source 1..110: mol_type = other DNA
gacaccacagagtgcacttttggtggacagctcctgcagaggaatatcagtggctcctctccctgtgggagtgtgccagtcctgcctacctcatatggcagttcagaaag

SEQ ID NO: 42309 - DNA, 110 bp, synthetic construct
  source 1..110: mol_type = other DNA
gggatgcactggttccctctgttgttataatggagaaattacagtctctgaggccttcgagctgtgtctcagagcactgcaggacttgtctcccaaatgcagtgtgaaac

SEQ ID NO: 42310 - DNA, 110 bp, synthetic construct
  source 1..110: mol_type = other DNA
ttcgagctgtgtctcagagcactgcaggacttgtctcccaaatgcagtgtgaaacaaaggcaggaaggtttttttcctccaggttacaaaacaggtggctgagaggaaca

SEQ ID NO: 42311 - DNA, 110 bp, synthetic construct
  source 1..110: mol_type = other DNA
aaggtctcaaaagtttactgcttacatagtgagactttccatgtagagcatggcagtcttctagagctggtctgaaaatgagtggagagagcaataaaatgtgttaaaat

SEQ ID NO: 42312 - DNA, 110 bp, synthetic construct
  source 1..110: mol_type = other DNA
agaaacattaagcagaaatgtggaacagagctgtcaatacatgtaaacaaagcagagaatcctgcccaccgttaagtggcatctatggaaggatccctgcacacatgaac

SEQ ID NO: 42313 - DNA, 110 bp, synthetic construct
  source 1..110: mol_type = other DNA
gtatatgaaagaaatctactgggcataaagatgaataaagaaaacctggtctttccatgcttccccagcctgatggaggaaacagacataaatcacagatgcagcatgag

SEQ ID NO: 42314 - DNA, 110 bp, synthetic construct
  source 1..110: mol_type = other DNA
catgcttccccagcctgatggaggaaacagacataaatcacagatgcagcatgaggttgggccatctctgaggacctactcagggtttggggccacggaagaggaacatc

SEQ ID NO: 42315 - DNA, 110 bp, synthetic construct
  source 1..110: mol_type = other DNA
gtgagatgagccatgctactgccctgcaacaatcctagagatgatctattaagagttagtcagacaagggccacagctctggatcaagagcaacctttctttacttgctt

SEQ ID NO: 42316 - DNA, 110 bp, synthetic construct
  source 1..110: mol_type = other DNA
agttagaaaggaacaattttctcaccaagtaattcatagctatggactgccatacccactcagcacctgaagtcttcctggataccaccaaaaatcatctggcattcccg

SEQ ID NO: 42317 - DNA, 110 bp, synthetic construct
  source 1..110: mol_type = other DNA
aactatatgtgtactgtatatcaatacttatttattacctacattatttcaaagctccagtttgtattaagactgacactgcgagccttatatatctggataccaaacct

SEQ ID NO: 42318 - DNA, 110 bp, synthetic construct
  source 1..110: mol_type = other DNA
tccagtttgtattaagactgacactgcgagccttatatatctggataccaaaccttggagacttatttctccttcgtttcttccttagatgccgggaacttgatttcata

SEQ ID NO: 42319 - DNA, 110 bp, synthetic construct
  source 1..110: mol_type = other DNA
cacaagatgatgtccaaaaaatggtggtaccatttcctcagatctcagcacctcaggagtcaagggaggagttcctgctatggtgcagtgggttaattacctgactggaa

SEQ ID NO: 42320 - DNA, 110 bp, synthetic construct
  source 1..110: mol_type = other DNA
cctcagatctcagcacctcaggagtcaagggaggagttcctgctatggtgcagtgggttaattacctgactggaacagctccagttgctgcagaggcacaggttcaatcc

SEQ ID NO: 42321 - DNA, 110 bp, synthetic construct
  source 1..110: mol_type = other DNA
gtttctgctgttttaaggactcccaatcacgacttttcaaactcagaatggcaccagctttgcaccttccaaaagtaggctcgcacactcactggagtcaaccccatctc

SEQ ID NO: 42322 - DNA, 110 bp, synthetic construct
  source 1..110: mol_type = other DNA
agctttgcaccttccaaaagtaggctcgcacactcactggagtcaaccccatctccagtatcctcatttctctctgaaaggggggtgacccactgaagcccaagggacta

SEQ ID NO: 42323 - DNA, 110 bp, synthetic construct
  source 1..110: mol_type = other DNA
ggctggagcacaagtgaacctgaggacagcgtgaccccaggcaggggaggaccagaagagtaagtgctctcagtcctgcagtcctcccatgcaccctcaggctgggcatc

SEQ ID NO: 42324 - DNA, 110 bp, synthetic construct
  source 1..110: mol_type = other DNA
aaacctcaggccccatcttgccagagttaaaaggatgccctctgaaaagtgacattcagccatgccagctcctccattattcctctgtcatccgcccaggatggatgggg

SEQ ID NO: 42325 - DNA, 110 bp, synthetic construct
  source 1..110: mol_type = other DNA
cttctaccatccgtttcaaaaagactcacgattcccctgccatgttggaaatacccacttgcagtggctctgcacacattcactgaaatgaacaacttgacattcggctt

SEQ ID NO: 42326 - DNA, 110 bp, synthetic construct
  source 1..110: mol_type = other DNA
ctggtttcagagggccacctctcaattcctggctggtggcttccctgccaagcctccaacatggagatctaaaaacaaacgtttccccctggcagttcctgttttggctc

SEQ ID NO: 42327 - DNA, 110 bp, synthetic construct
  source 1..110: mol_type = other DNA
tgccaagcctccaacatggagatctaaaaacaaacgtttccccctggcagttcctgttttggctcagggggttaagaaactgacattgtctctctgaggatgtgggtttg

SEQ ID NO: 42328 - DNA, 110 bp, synthetic construct
  source 1..110: mol_type = other DNA
actcattccaagtagtcttgatacaagacctctttctcaagggcttcagctctcacagttaattctgtgcaatttagacaagctggcttggacttagcctcatggaacac

SEQ ID NO: 42329 - DNA, 110 bp, synthetic construct
  source 1..110: mol_type = other DNA
ttcattctctttcattcaccgctacatacccagagttagcaaagtccctggtaccgagctgacgatgaaaaatacagcagtctcagtgttaagaagtctgtccttcctac

SEQ ID NO: 42330 - DNA, 110 bp, synthetic construct
  source 1..110: mol_type = other DNA
aatacatattttctgagaataaaactggcacttctttgcatgatgaaatcacatgtgtcaacgttctacttttgggtactgcatgattacacaaattcactgtatatgac

SEQ ID NO: 42331 - DNA, 110 bp, synthetic construct; identical to SEQ ID NO: 42330
  source 1..110: mol_type = other DNA

SEQ ID NO: 42332 - DNA, 110 bp, synthetic construct
  source 1..110: mol_type = other DNA
atttcactatcttggataccaacttggcccgggtgttgtagtaggtggagaagcggcgtagatacgaggctgctgtgctctctactgtccacagctggtccacggtgtct

SEQ ID NO: 42333 - DNA, 110 bp, synthetic construct
  source 1..110: mol_type = other DNA
gcgtagatacgaggctgctgtgctctctactgtccacagctggtccacggtgtcttcttggatagacactccgaagttgttgccgtcctccacctttggaatgagcagct

SEQ ID NO: 42334 - DNA, 110 bp, synthetic construct; identical to SEQ ID NO: 42332
  source 1..110: mol_type = other DNA

SEQ ID NO: 42335 - DNA, 110 bp, synthetic construct; identical to SEQ ID NO: 42333
  source 1..110: mol_type = other DNA

SEQ ID NO: 42336 - DNA, 110 bp, synthetic construct
  source 1..110: mol_type = other DNA
ttgctcctaggaccaataatgggcttatcttcctttagcggctctgatgagaagggggtattagagctttcaccatataaggaaagaggagacatctgggaagtagaaga

SEQ ID NO: 42337 - DNA, 110 bp, synthetic construct
  source 1..110: mol_type = other DNA
catacttcaggaggagtacttctcccggccttccagggaccctcacttttttttctttgctttgccctttccctccctgcccacaccgccctcctcaaaagttctctgtt

SEQ ID NO: 42338 - DNA, 110 bp, synthetic construct
  source 1..110: mol_type = other DNA
gttttccaggtttccaaaaatctctcctttcttatctttattctcttttctcctcaagtttacatactaagctcatgggcccttggctgtcacctccactgttccactag

SEQ ID NO: 42339 - DNA, 110 bp, synthetic construct
  source 1..110: mol_type = other DNA
ccacagtttaattcgtggttatttgcggtgctctgcacacagcttggaactgccttcaccccatactgagggtagcaagtgggggagagagagtggtgccaaagtatcat

SEQ ID NO: 42340 - DNA, 110 bp, synthetic construct
  source 1..110: mol_type = other DNA
atcaagcaagacagccctgaagtattagactatgagttctggaaggtcaggaactgagtttgtcttactcaaaatatcttcaatatccagactaggctagtagaagctga

SEQ ID NO: 42341 - DNA, 110 bp, synthetic construct
  source 1..110: mol_type = other DNA
gagtttgtcttactcaaaatatcttcaatatccagactaggctagtagaagctgaaaaaatgtatggttttttttgtttgtttgtttgtttttttaatggccacacccag

SEQ ID NO: 42342 - DNA, 110 bp, synthetic construct
  source 1..110: mol_type = other DNA
agccttctgtgaaagtttgtccacagttttccctgtctttgtgctcataaaattgatttccctgagctccctgagggcagagactgggtctctcctcctgttacaagcct

SEQ ID NO: 42343 - DNA, 110 bp, synthetic construct
  source 1..110: mol_type = other DNA
ggaggggactggagctctgagtatggagacgaagaagggaaccaataggatgggggtgtggcacgggatggtgaggcagctatagctgccttgacccaaagctctaggct

SEQ ID NO: 42344 - DNA, 110 bp, synthetic construct
  source 1..110: mol_type = other DNA
gtgtggcacgggatggtgaggcagctatagctgccttgacccaaagctctaggctctccctttctggatgtttctacttccctcctccctagggatagaagtagtagagt

SEQ ID NO: 42345 - DNA, 110 bp, synthetic construct
  source 1..110: mol_type = other DNA
gatggaggtaatatctaattaggcaataaaagtagagactgtgacacggttcagtaagaatgagatttttgaagtatgtttcagttttgtatggtggctgggagacgggg

SEQ ID NO: 42346 - DNA, 110 bp, synthetic construct
  source 1..110: mol_type = other DNA
aggctcagtgttgtgttctctgcggtgcctcaggaggaggagctctggtcctccgaacctcagtggtcagatctgctcatgtctcaacatttcccctggaccgacctacc

SEQ ID NO: 42347 - DNA, 110 bp, synthetic construct
  source 1..110: mol_type = other DNA
cgaacacaaaaaagaaatatctctggcagattttccaaggtcatcagcccatgacagaggtatatatgttgtgcacacacagctgtgtgtaggtttccattgcaagacta

SEQ ID NO: 42348 - DNA, 110 bp, synthetic construct
  source 1..110: mol_type = other DNA
tcagggtatgatgaggagtagaaagcagagagagaagtctgaagcctggggctcatgggtgtggactggggggacccggggaaccagagacccagaatcctaggcatgag

SEQ ID NO: 42349 - DNA, 110 bp, synthetic construct
  source 1..110: mol_type = other DNA
gcttttctaagaaggggaagatgcaagaatccagatgcatatgaagtttctcccgaaaataactatccgagggccagttctgtccgttttcccagaacacaaaaggcgtc

SEQ ID NO: 42350 - DNA, 110 bp, synthetic construct
  source 1..110: mol_type = other DNA
ttccacattagtcacactaaccacctcactgtttctgaataccccaagcacatgcccaccgcaggtctttgctccagaggaaagctcttccctccaatattcacatggct

SEQ ID NO: 42351 - DNA, 110 bp, synthetic construct
  source 1..110: mol_type = other DNA
gatataggcatgtccaggaagttgcaggtttccttcctctctccttcaccaccaatgtgtaacgattccaaagaaacatgttggtggttggctgtgacttcttactgaga

SEQ ID NO: 42352 - DNA, 110 bp, synthetic construct
  source 1..110: mol_type = other DNA
caaaacatggcccaagtacaaaaaagagctgttagtgggaagagagggtagaattgaaaaccccaggcactggtcgagaatagatagtggccacagtgtggtcatactgg

SEQ ID NO: 42353 - DNA, 110 bp, synthetic construct
  source 1..110: mol_type = other DNA
aagtaagcccatctaaccccttgagattagaaacagaataaaccactgagccttttcactaatagatcttgtgcccatgcctcgggtaggttcagagacaaaagaactac

SEQ ID NO: 42354 - DNA, 110 bp, synthetic construct
  source 1..110: mol_type = other DNA
tcactaatagatcttgtgcccatgcctcgggtaggttcagagacaaaagaactacgtcgctggccctgcaaggcattatctatatcctgtcattcttctctctgcatcca

SEQ ID NO: 42355 - DNA, 110 bp, synthetic construct
  source 1..110: mol_type = other DNA
tgagaccctttccctttcctaagcatcactgttgctatgtgcagcctgtgaacctagtgctggtccttccactcacagactctttctgttttgcccccaggaatcaagct

SEQ ID NO: 42356 - DNA, 110 bp, synthetic construct
  source 1..110: mol_type = other DNA
agtgctggtccttccactcacagactctttctgttttgcccccaggaatcaagctccatcacagtctatgccagcgtgactcttccggagagctgacaccacagacccag

SEQ ID NO: 42357 - DNA, 110 bp, synthetic construct
  source 1..110: mol_type = other DNA
agataacattttctaatctgctccaggacatacagcagaaaccatgcccagatattgactttctctttggtaactcatcgaatggagtcacgattggcagagagattaca

SEQ ID NO: 42358 - DNA, 110 bp, synthetic construct
  source 1..110: mol_type = other DNA
agcaatgaagtcctttgtttccagtcctgtagtcctgtgccttcttcagcatctgtggaacagtggcaggcaaacttgttagcttgcgagtaggataaaatctcagctcc

SEQ ID NO: 42359 - DNA, 110 bp, synthetic construct
  source 1..110: mol_type = other DNA
ttgacacaatgctggggctgccttaactgccacagctcgggctgacctaatccagcaggtttactctgaattgcattcacatgatggcaggctgtttcacagaccttaaa

SEQ ID NO: 42360 - DNA, 110 bp, synthetic construct
  source 1..110: mol_type = other DNA
atgtggctgggcaaccaggacggctgggtccctggagcagcaggaaagaaggaaccactcacagccctgtccttaagggacagagatagttccctgggcacccaatcatc

SEQ ID NO: 42361 - DNA, 110 bp, synthetic construct
  source 1..110: mol_type = other DNA
ccttcttgctcagtggattgagcatctgccattgttacagccatggctctcagattgcagctatagcacaggtttgatcccttaccccagaatttccacatgctgcagtc

SEQ ID NO: 42362 - DNA, 110 bp, synthetic construct
  source 1..110: mol_type = other DNA
gtgggagcatcccctgtgtagactgtttgctcctgacagtttttgggaagctgcctggagctggagtttgtatggatggggagtgtgcaccctgaccatatcgatggtgt

SEQ ID NO: 42363 - DNA, 110 bp, synthetic construct
  source 1..110: mol_type = other DNA
gagtcctggtaggcttctgatcatcctgtcttcttcctaccttttttctctttccaggaaggatgcagggctgaagaatggtataccagctgtgggcctgaagcttaatg

SEQ ID NO: 42364 - DNA, 110 bp, synthetic construct
  source 1..110: mol_type = other DNA
aggaaggatgcagggctgaagaatggtataccagctgtgggcctgaagcttaatgacctcatccaacggttgcagctgtgctaccagcttaccacagttggcaagtttga

SEQ ID NO: 42365 - DNA, 110 bp, synthetic construct
  source 1..110: mol_type = other DNA
taaactcactgagtatgagttcaggtcttagtagagatatcaaggacagtgatattatttagaagttgaaatgtccattgaacctgaggtaaggtagagttaccatacca

SEQ ID NO: 42366 - DNA, 110 bp, synthetic construct
  source 1..110: mol_type = other DNA
cctgagactttctcactcacccgctctctccaagtccccccaccagaattgcctcacccacctgcaacccttcccactgtcaaaaaaaaaaaaaacaaaaaccacacaca

SEQ ID NO: 42367 - DNA, 110 bp, synthetic construct
  source 1..110: mol_type = other DNA
accctcttctcccagatcagacccatctgagaaaaatgttccagtgtgggtgaccccacttgcaggccttcactgcttagccgtggttcttagaggaggccacattcaca

SEQ ID NO: 42368 - DNA, 110 bp, synthetic construct
  source 1..110: mol_type = other DNA
agtatgtttcttgacttctctgagcctcatgctccttctctggaggagattgtaccttaatatcctaggattgctgggaagattacgggagataatagctctggaacatg

SEQ ID NO: 42369 - DNA, 110 bp, synthetic construct
  source 1..110: mol_type = other DNA
cttaatatcctaggattgctgggaagattacgggagataatagctctggaacatggggaacatttggttgtattttataatctcatgcactgcacttcttcatggcttaa

SEQ ID NO: 42370 - DNA, 110 bp, synthetic construct
  source 1..110: mol_type = other DNA
ccttggacaccctgttcgtgcccctgctggtgggtgcaggtgttgccctagtcatcggcgccaccatccttggcactatcacctgctgcttcatgaagaggctgcggaaa

SEQ ID NO: 42371 - DNA, 110 bp, synthetic construct
  source 1..110: mol_type = other DNA
cggcgccaccatccttggcactatcacctgctgcttcatgaagaggctgcggaaacggtgatcccccgttccccaggtgaggggcgagaaccccgaatccccagccccgt

SEQ ID NO: 42372 - DNA, 110 bp, synthetic construct
  source 1..110: mol_type = other DNA
cctcaagcctgacttctctgagacaagccgggcttagttttgagaccttgttccctattgctccgttttttcctctcctgcccacatagttctttgagtagatgggaaaa

SEQ ID NO: 42373 - DNA, 110 bp, synthetic construct
  source 1..110: mol_type = other DNA
aatgagagacagagcatggcaaccaaggccaaggtcctagctaaggatgctgggggtaaagtatgcatgtgtgtgtatccctagccactggctttaaaagaatagaaacc

SEQ ID NO: 42374 - DNA, 110 bp, synthetic construct
  source 1..110: mol_type = other DNA
gggccggcaaggaggctttgcccctaggatgaggtgggctacagttttagaatccaaggggagtggggatgggagaagaccctctttcccttttttgtgtagacaggcag

SEQ ID NO: 42375 - DNA, 110 bp, synthetic construct; identical to SEQ ID NO: 42374
  source 1..110: mol_type = other DNA

SEQ ID NO: 42376 - DNA, 110 bp, synthetic construct
  source 1..110: mol_type = other DNA
ctgtttgcactggtccatttctttgcctatttgcaacccctgagcagaggaaaacctcagaagctttagtgttccaaggagacgccttggggcttaaactgagaggggct

SEQ ID NO: 42377 - DNA, 110 bp, synthetic construct
  source 1..110: mol_type = other DNA
ctcagaagctttagtgttccaaggagacgccttggggcttaaactgagaggggctccagggcttctaccagaatagtccacttttatttgtttcacatattgggtttctt

SEQ ID NO: 42378 - DNA, 110 bp, synthetic construct
  source 1..110: mol_type = other DNA
ggattaaatgagatgatgcaggtaaggtgctcaggtgcatccgagggctggtatgtgttctatacgctggctcgtatcattacctcttactgaccactcatgctgttgga

SEQ ID NO: 42379 - DNA, 110 bp, synthetic construct
  source 1..110: mol_type = other DNA
tccttgtcaattagtcacatgttagacagggcctggacccagagccagagaagctctctaggcatcttagtccttgccagagccaagttctgcaattgtgagcccccagc

SEQ ID NO: 42380 - DNA, 110 bp, synthetic construct
  source 1..110: mol_type = other DNA
cggggaagacataaaagcaagctctctgtttttgaacataccaatctttaaggtttctaggacttaggttctattcctagcaatttataataatcttacaaagtaggcct

SEQ ID NO: 42381 - DNA, 110 bp, synthetic construct
  source 1..110: mol_type = other DNA
tctaggacttaggttctattcctagcaatttataataatcttacaaagtaggccttattgaaactttatgtattaggttaggctcacttgcccagtcacacagtgggtat

SEQ ID NO: 42382 - DNA, 110 bp, synthetic construct
  source 1..110: mol_type = other DNA
tttcactcataaacatacagtttgcatatatagggaaaaacaggttctgaggacacaatagaataccagagacaggcaagcaatcagaaaaaagatcacctctagaggaa

SEQ ID NO: 42383 - DNA, 110 bp, synthetic construct
  source 1..110: mol_type = other DNA
caatagaataccagagacaggcaagcaatcagaaaaaagatcacctctagaggaaaaccatggaattgcattccatgctggtgtctatgtaaactcgcataggacaatga

SEQ ID NO: 42384 - DNA, 110 bp, synthetic construct
  source 1..110: mol_type = other DNA
ggacttgtagtttgatgccatgattggataagatcttggtggtttggggagggatggtgcatttttcaaataagaggtatgtggggcagggtgaaaagactatggtacct

SEQ ID NO: 42385 - DNA, 110 bp, synthetic construct
  source 1..110: mol_type = other DNA
ccagacttgctccctacgccctggagtctagcaatgtagctaccccaggattaaataaagtgatagctctatattgaccatgctcttattcattcgagaaagctgcaccg

SEQ ID NO: 42386 - DNA, 110 bp, synthetic construct
  source 1..110: mol_type = other DNA
taaagtgatagctctatattgaccatgctcttattcattcgagaaagctgcaccgtgataacaaacattctgtttgtcttgcaatgtttttatttctccctagtggatac

SEQ ID NO: 42387 - DNA, 110 bp, synthetic construct
  source 1..110: mol_type = other DNA
aaatcctagaaactctttagctctgcatctgtactcttaattcttgctttaggtgtatctagttttgacatgcaaattgtagacacaggcgtgttcttacactcttcagt

SEQ ID NO: 42388 - DNA, 110 bp, synthetic construct
  source 1..110: mol_type = other DNA
tttctccctgacatgatgctgactccacaggttcatttatgaaatatcagctttcatgtcttcctcagactatactctgtgaaacaaattatttgtaggctctttttttt

SEQ ID NO: 42389 - DNA, 110 bp, synthetic construct
  source 1..110: mol_type = other DNA
tgctaaccactgagccacgacgggaactcctgaatatgttattctttcactttacaattctttcccttcaacagcttgcccatcaaacaatctcctaggggtgttttaaa

SEQ ID NO: 42390 - DNA, 110 bp, synthetic construct
  source 1..110: mol_type = other DNA
ggctctgtgacttgacttacataggcttccttctggaaggcatgcacacctatttgggtaggatttcacctgaagaaaagagatttcctacccaccattctccgcagagc

SEQ ID NO: 42391 - DNA, 110 bp, synthetic construct
  source 1..110: mol_type = other DNA
cctgctgactctcgctagcaatgtcattattgtgacggttattcgcctggaccatcacctccatactcccatgtactttttcgtgggcatgctttccacctctgagacct

SEQ ID NO: 42392 - DNA, 110 bp, synthetic construct
  source 1..110: mol_type = other DNA
aatacagttccttctagagagctggtttaaccaattacaagtctcaccttgcactatagcagagccactgcggctcttgttctccagatcttctagcagcccccattcat

SEQ ID NO: 42393 - DNA, 110 bp, synthetic construct
  source 1..110: mol_type = other DNA
gggaaaaattgggctctccgacaggggtgaggttaggttggcgtgagttttgttgtgcagagaaaaggaaggagtgtgtgttttcaaaaggagaagagggcttcagagaa

SEQ ID NO: 42394 - DNA, 110 bp, synthetic construct
  source 1..110: mol_type = other DNA
caagcatgaccgattaggaaataatctggaaaatgaaatgaacaaaagaaaggaaagccaaggagaacagagattattgtgggacaaataggcacaggaattagggctgt

SEQ ID NO: 42395 - DNA, 110 bp, synthetic construct
  source 1..110: mol_type = other DNA
agccaaggagaacagagattattgtgggacaaataggcacaggaattagggctgtgggaaggaggcagggatatggatgaggttaaacagagtgtcttgaacaaagtaga

SEQ ID NO: 42396 - DNA, 110 bp, synthetic construct
  source 1..110: mol_type = other DNA
tattgtgacacgggagacttgctaaatacagtgttatattccatcctttttattgaccttttccctgtctgttgcagctactgtattcatttctccagtgtcacatccac

SEQ ID NO: 42397 - DNA, 110 bp, synthetic construct
  source 1..110: mol_type = other DNA
actaggctgaaaattgttttccttccatggttaacattgcccccctggcttccagcttccagtgctgccctcaagaaggccatgcattcttatccttaatccttggatgg

SEQ ID NO: 42398 - DNA, 110 bp, synthetic construct
  source 1..110: mol_type = other DNA
cttccagtgctgccctcaagaaggccatgcattcttatccttaatccttggatggaatctaatttttctctggaagctttaagacttgctttctccttggtgatttaaaa

SEQ ID NO: 42399 - DNA, 110 bp, synthetic construct
  source 1..110: mol_type = other DNA
acacctgataaaaacatgagtgatttaataaagaattgtacactgccggggatcagtggaaagttctgttgagctcagtcatcgtattgtaaggttagcaaattctgaaa

SEQ ID NO: 42400 - DNA, 110 bp, synthetic construct
  source 1..110: mol_type = other DNA
gatagtggatgccttctggagtactgtcagccctgagatgttcaataaatggcatcagccagccggcattgtagtgattactcaccagctgatctgcaagcagagtgaca

SEQ ID NO: 42401 - DNA, 110 bp, synthetic construct
  source 1..110: mol_type = other DNA
cagccagccggcattgtagtgattactcaccagctgatctgcaagcagagtgacagcatgattggaagacggtcctaaaagacagctagtgttcatagatgatctgaggt

SEQ ID NO: 42402 - DNA, 110 bp, synthetic construct
  source 1..110: mol_type = other DNA
agaaatccttcaagtattcaagctcttaggcacttacaaagcttatgttctgaatttacctttgatcagagatcttacccttgtgctgcctattgcttgaagcctgaaag

SEQ ID NO: 42403 - DNA, 110 bp, synthetic construct
  source 1..110: mol_type = other DNA
tgtggctacaatgaaatccaacacatcttctgtgactttccacctcttctgagcctggcctgcaaggacacttccattaatgtcctggtggactttgccatcaatgcctt

SEQ ID NO: 42404 - DNA, 110 bp, synthetic construct
  source 1..110: mol_type = other DNA
gcatccacaatgaccaccagggatgtgtctgtgcaggccaagctcagcacaggcgtgaagtcacagaagatctgctggatctggttggagccacagaaaggcagggtggc

SEQ ID NO: 42405 - DNA, 110 bp, synthetic construct
  source 1..110: mol_type = other DNA
gcccaatattttgaagtgtttaccatgtttctgatattctctaataatttaaaatgtatttacacatattggcagatgcagccaagtgtctgtaggttggaatatgtgac

SEQ ID NO: 42406 - DNA, 110 bp, synthetic construct; identical to SEQ ID NO: 42405
  source 1..110: mol_type = other DNA

SEQ ID NO: 42407 - DNA, 110 bp, synthetic construct; identical to SEQ ID NO: 42405
  source 1..110: mol_type = other DNA

SEQ ID NO: 42408 - DNA, 110 bp, synthetic construct; identical to SEQ ID NO: 42405
  source 1..110: mol_type = other DNA

SEQ ID NO: 42409 - DNA, 110 bp, synthetic construct
  source 1..110: mol_type = other DNA
aattatttaggaggcagtttaatgtaggagttaaaagcatgaattctttcctggagagggtgaaaaattggcttgaattctcttcttctcctgttttagtttgtgtaact

SEQ ID NO: 42410 - DNA, 110 bp, synthetic construct
  source 1..110: mol_type = other DNA
gagggtgaaaaattggcttgaattctcttcttctcctgttttagtttgtgtaactttaaaaaattcctgaattatctttcaaggtttcattaccttggggttgtataaaa

SEQ ID NO: 42411 - DNA, 110 bp, synthetic construct
  source 1..110: mol_type = other DNA
tgactatttttttttcccctcagtgtggcttagtagaatcttaaatgaagatttggatatgttatttagcttcaacccatggatcttagtatgtctatgagattcttgga

SEQ ID NO: 42412 - DNA, 110 bp, synthetic construct
  source 1..110: mol_type = other DNA
gatatgttatttagcttcaacccatggatcttagtatgtctatgagattcttggacttttgggaaatatacttatgttcaacattttatgcattttcctccatccattag

SEQ ID NO: 42413 - DNA, 110 bp, synthetic construct
  source 1..110: mol_type = other DNA
tacacagctcattgacctaatgtgtgttgattagataatatatcaaatgcattagaacacttttacgtagattggcctcagagtcttctccagcactatgtcaacttttg

SEQ ID NO: 42414 - DNA, 110 bp, synthetic construct
  source 1..110: mol_type = other DNA
aacacttttacgtagattggcctcagagtcttctccagcactatgtcaacttttgttttaactacttgctgcctgaatcataccagctgccaaatattttcaattttgca

SEQ ID NO: 42415 - DNA, 110 bp, synthetic construct
  source 1..110: mol_type = other DNA
cccgaagatgaagctatgatcagctgaatgctttacacatctgtatgaaagttttagaaattaaataatgcccagtctcatgatattttcccaagaatatcttagttcaa

SEQ ID NO: 42416 - DNA, 110 bp, synthetic construct
  source 1..110: mol_type = other DNA
ctgtctattctgtttcttgaactagctgtctgtttttgtgccaaatcgtactatttgattagatagctttgaagagtaatttgaagtcaaggtgcacaaccccttcagtt

SEQ ID NO: 42417 - DNA, 110 bp, synthetic construct
  source 1..110: mol_type = other DNA
tgattagatagctttgaagagtaatttgaagtcaaggtgcacaaccccttcagttttgttcttcattctcaagattaattttgctactcagagtttcacacaaaattttt

SEQ ID NO: 42418 - DNA, 110 bp, synthetic construct
  source 1..110: mol_type = other DNA
caggttcttaacctgctgagccacagtgggaactcctacatatttctttaattgaagtgtgattgaaagactatattagttctaaatgcatagcatattgagctatttct

SEQ ID NO: 42419 - DNA, 110 bp, synthetic construct
  source 1..110: mol_type = other DNA
agtgtgattgaaagactatattagttctaaatgcatagcatattgagctatttctatacattacaaaagaatccccaaattatgtgtctagttaacatctgtcaccttac

SEQ ID NO: 42420 - DNA, 110 bp, synthetic construct
  source 1..110: mol_type = other DNA
tccggtcaggtcctgtcccatctggttgggtccagtcccatccagtcgagtccagttgggtccagtcatgtctggtctggtccggtccggtccggtcgtatctggtccca

SEQ ID NO: 42421 - DNA, 110 bp, synthetic construct
  source 1..110: mol_type = other DNA
ttgggtccagtcatgtctggtctggtccggtccggtccggtcgtatctggtcccatctggtcatatccttttctggtctggtcaggtccagtcatgtccaattctctaga

SEQ ID NO: 42422 - DNA, 110 bp, synthetic construct
  source 1..110: mol_type = other DNA
tccgagtcattgcgccaagtgtaggcttgcagctcccccacccaccccaggccatccgtgcgtgtccagctgctgttggcgaaggacgagatctggaggcagcggagggg

SEQ ID NO: 42423 - DNA, 110 bp, synthetic construct
  source 1..110: mol_type = other DNA
gctggagacagaaagatcagataggaagctctcatattaatccagacaagaagcgaaggaagcctgaaccgaggcaggcataatggaaatggagaggagcagcaaggctg

SEQ ID NO: 42424 - DNA, 110 bp, synthetic construct
  source 1..110: mol_type = other DNA
caagaggcagtgcgttagagggacagggcgggaggttctcggaagggaattaacggagaaggaagggcagacagaactaagagccgcaggggactccaggcgggaccctg

SEQ ID NO: 42425 - DNA, 110 bp, synthetic construct
  source 1..110: mol_type = other DNA
gagaaggaagggcagacagaactaagagccgcaggggactccaggcgggaccctggaaaaccgatcaaaggagaaggagggagggtgtcatgaggaaatgatgcttagag

SEQ ID NO: 42426 - DNA, 110 bp, synthetic construct
  source 1..110: mol_type = other DNA
catggtcaggtaaagtggcctagagaccttgagaagaaaccaggcaggagctggtaggttgggaaggagcacaaccttctcagctctggatgcacagagaggaatgtccc

SEQ ID NO: 42427 - DNA, 110 bp, synthetic construct
  source 1..110: mol_type = other DNA
tttccttgtacagcaggcttagtttcagcatcataccgtttcctgagttaggtcctcgcagctcagcacccccgctattgtcctgggacctcatgagggatgcttggcca

SEQ ID NO: 42428 - DNA, 110 bp, synthetic construct
  source 1..110: mol_type = other DNA
caactctatcagttctgccccttgagcccattggtttctggtcatctgataaagcctccactgcccaggggccttcctccctccctccacgcagcacgcttgcagccaga

SEQ ID NO: 42429 - DNA, 110 bp, synthetic construct
  source 1..110: mol_type = other DNA
ctccactgcccaggggccttcctccctccctccacgcagcacgcttgcagccagagctgaatattgctgttctggggccttcctccagcctcaaatttcaactcaccgtc

SEQ ID NO: 42430 - DNA, 110 bp, synthetic construct
  source 1..110: mol_type = other DNA
aggaatttgccaggtagtccctgtgcctgaaaatgagctgaaacaagctcagaagtgcaagactatgtccagacctgtgcaaactggcctgtccagtgtcctactccata

SEQ ID NO: 42431 - DNA, 110 bp, synthetic construct
  source 1..110: mol_type = other DNA
tagcagttttgtgggactgctccatgcagagaggtatgtccaccatttttggttcaactgctttctctgcacagacagtacagagctccagccctgccacttatattaat

SEQ ID NO: 42432 - DNA, 110 bp, synthetic construct
  source 1..110: mol_type = other DNA
ggagggctgctgctaggaacaagattcctttctcctggatatccctttgggaaaggatgaatctgaaactcgccctgtgattataaagtaaatgaggcttagttgcatgt

SEQ ID NO: 42433 - DNA, 110 bp, synthetic construct
  source 1..110: mol_type = other DNA
gatgaatctgaaactcgccctgtgattataaagtaaatgaggcttagttgcatgtttgagggagattgaactgttggtgataatagatagagtagggaactagaaaagga

SEQ ID NO: 42434 - DNA, 110 bp, synthetic construct
  source 1..110: mol_type = other DNA
ttcaccacagctcacagaaacaccagattcctgacccaccaagtaaggccagggatcagactcatgtcctcattgatagtagtcaaatttatttccattgaacctcaaca

SEQ ID NO: 42435 - DNA, 110 bp, synthetic construct; identical to SEQ ID NO: 42434
  source 1..110: mol_type = other DNA

SEQ ID NO: 42436 - DNA, 110 bp, synthetic construct
  source 1..110: mol_type = other DNA
gctttgtcccagctaacaaactggaaacaaccaaaaatattcattctgtccgtgtatattctatttctttatgagatatgtatcggtattaagatttttaaaaataaccc

SEQ ID NO: 42437 - DNA, 110 bp, synthetic construct
  source 1..110: mol_type = other DNA
taatgttatgccacaatgcatgtagtagatggattagtgacactgagcctattggtaccaaggacagctcttccatccttaagggcctcccagatatccagcaagctcac

SEQ ID NO: 42438 - DNA, 110 bp, synthetic construct
  source 1..110: mol_type = other DNA
gagcaaggatccaccaaagttaaactcttatcctcccacgggaactggagttgggagctgggatagctggccccctggatgtctccattacaaaacgaactctttcctga

SEQ ID NO: 42439 - DNA, 110 bp, synthetic construct
  source 1..110: mol_type = other DNA
cacacattataatgtttcaaggataaacatgtgtttctctgtctcacaggagcccccttactctgggcccaggggagcctccccctcccaaatgtcctgcctcggtggag

SEQ ID NO: 42440 - DNA, 110 bp, synthetic construct
  source 1..110: mol_type = other DNA
ccttactctgggcccaggggagcctccccctcccaaatgtcctgcctcggtggagcttcaacagttgtacagcaatggtgaggagtccctgggaggaatctgctcttggc

SEQ ID NO: 42441 - DNA, 110 bp, synthetic construct
  source 1..110: mol_type = other DNA
gtccgtttggagttattactatggtcctatctgggaccatgtggatttgaaagatctcttgctccttgagagctcttgcttcggaccatggaaataaaacatgaccaaaa

SEQ ID NO: 42442 - DNA, 110 bp, synthetic construct
  source 1..110: mol_type = other DNA
ctcttgctccttgagagctcttgcttcggaccatggaaataaaacatgaccaaaaggagacattaccacaatataaattgttggataaagagattatttaggaaatgtag

SEQ ID NO: 42443 - DNA, 110 bp, synthetic construct
  source 1..110: mol_type = other DNA
cgagccaaaaggagaaatccctgcctgaagaatgccatatttcatcccagctttaaaacaatataaaaataataatactagcctcatatcaacatgtgtggagcagttcc

SEQ ID NO: 42444 - DNA, 110 bp, synthetic construct
  source 1..110: mol_type = other DNA
cccagctttaaaacaatataaaaataataatactagcctcatatcaacatgtgtggagcagttcctatgtgcctagtactattctgggtacagtaaataaatatgtcata

SEQ ID NO: 42445 - DNA, 110 bp, synthetic construct
  source 1..110: mol_type = other DNA
aacgagaagagaaaggtagctgtggtggtaaactggaatgtagtagacaatggggggcactgatgatgctttagttctggctggaaaccaggggtccagtgccattgcga

SEQ ID NO: 42446 - DNA, 110 bp, synthetic construct
  source 1..110: mol_type = other DNA
ggcactgatgatgctttagttctggctggaaaccaggggtccagtgccattgcgatgggcccacgggcctctcacataccagaatggtttctttgtggtttttggttttt

SEQ ID NO: 42447 - DNA, 110 bp, synthetic construct
  source 1..110: mol_type = other DNA
cctcttcaggattagatctgttgtagatcacggctcctgctgcctcccttctctttctaagtcttcttccctcttcctcccagctgggtttaccagcccttctgggtgga

SEQ ID NO: 42448 - DNA, 110 bp, synthetic construct
  source 1..110: mol_type = other DNA
tttataggggttggtgcgttattgatacacattacgtttttgtttccttgtaagcgagcttcagaggctcaaatttaaaatgtagaaaggagttggtgaaggaatgaggg

SEQ ID NO: 42449 - DNA, 110 bp, synthetic construct
  source 1..110: mol_type = other DNA
aaacaggaaggtggaaaatgaaacactgctctaatcatttcagcaacagcagctcaacaaagcagggcaaataactgccttttgaagtaaagatttgatggtgattttcc

SEQ ID NO: 42450 - DNA, 110 bp, synthetic construct
  source 1..110: mol_type = other DNA
aacaaagcagggcaaataactgccttttgaagtaaagatttgatggtgattttcctgtcttgagacacttgagatcatcccagaaagactctagtccctctttcctcccc

SEQ ID NO: 42451 - DNA, 110 bp, synthetic construct
  source 1..110: mol_type = other DNA
tttatccctggtgtgaatctcagctctgctccctgtttgctgtgaacctgcttaccctaatttcaaagcgtggaatagagtatgaagactgaggtctcgaaggaatcctg

SEQ ID NO: 42452 - DNA, 110 bp, synthetic construct
  source 1..110: mol_type = other DNA
gctgcaggaataggataagatgtagcttaggcgcctacggccagggtctcttcctgatggagcccaaggcaggtgtaagctgaagaccagtccagcgtgatgtaagattc

SEQ ID NO: 42453 - DNA, 110 bp, synthetic construct
  source 1..110: mol_type = other DNA
gatggagcccaaggcaggtgtaagctgaagaccagtccagcgtgatgtaagattcaggctcctgagtctgcgtgtgagtgctctagggatgttagacatggcgaaagcct

SEQ ID NO: 42454 - DNA, 110 bp, synthetic construct
  source 1..110: mol_type = other DNA
tgtgacccaggccagggtcacccctggggagcttcctcctctgtgacaggaagggtctgggcagatcccttcaagtgttccccagttgtaatgttctggaatttggagtc

SEQ ID NO: 42455 - DNA, 110 bp, synthetic construct
  source 1..110: mol_type = other DNA
cccacagaccacccagccgtactgatttcctcactgttctggatgcagcaagacagaagcagacacccaggcagtgccccccaattctgcagaagctggacattaacttc

SEQ ID NO: 42456 - DNA, 110 bp, synthetic construct
  source 1..110: mol_type = other DNA
gaagcagacacccaggcagtgccccccaattctgcagaagctggacattaacttcatcctctgtttcccctgtgggaaaagccacaggctaggggtacataaatctttca

SEQ ID NO: 42457 - DNA, 110 bp, synthetic construct
  source 1..110: mol_type = other DNA
tgatggtggaggaaactgcattaccagatgctcaaaagctcgcaatagcaggacacattcaggaacaccacgcaagcagctcagtgtgaagcccagaaatgtgggcagag

SEQ ID NO: 42458 - DNA, 110 bp, synthetic construct
  source 1..110: mol_type = other DNA
cattcaggaacaccacgcaagcagctcagtgtgaagcccagaaatgtgggcagaggagtgtgtgagccctgaatcccacagggagtcactgcgtcagatcccacagacaa

SEQ ID NO: 42459 - DNA, 110 bp, synthetic construct
  source 1..110: mol_type = other DNA
ttcctcaggttctggaggctgaactgtccaagatccaggtgccagctgattcacttcttggtgagagctctcttcctggctttccctggccaccttttatgctctgccct

SEQ ID NO: 42460 - DNA, 110 bp, synthetic construct
  source 1..110: mol_type = other DNA
tgcccagtgtttttgtgagttaactcttgcagctctcccagaccagtaaagtacacatctcagaatcctcattttacaaacgataaaattaggcatggctgtaaagtcaa

SEQ ID NO: 42461 - DNA, 110 bp, synthetic construct
  source 1..110: mol_type = other DNA
tgaagggggttctcttccagaaattccacaggacatttcctgagagaaggctcgacttctagtgggaagggtagatcatgggaaggacttccctgcagttcagtgtccct

SEQ ID NO: 42462 - DNA, 110 bp, synthetic construct
  source 1..110: mol_type = other DNA
gaggacacgggttcgatccctcactcagtgggttgaggatctggtgttgctttgagctctgaggtaagtcgcagatgaagcctggatcccacgtgattgtggctgtggtg

SEQ ID NO: 42463 - DNA, 110 bp, synthetic construct
  source 1..110: mol_type = other DNA
cagtgggttgaggatctggtgttgctttgagctctgaggtaagtcgcagatgaagcctggatcccacgtgattgtggctgtggtgtagtccagcagctgtagctctgatt

SEQ ID NO: 42464 - DNA, 110 bp, synthetic construct
  source 1..110: mol_type = other DNA
gcttcgccctttaaccctgtagaagttttccaccagccagcttagactagctcgtgaatttgcactgataaggcatccatccccttgtgtttaggtcaaatcatggttca

SEQ ID NO: 42465 - DNA, 110 bp, synthetic construct
  source 1..110: mol_type = other DNA
tttatttgtcatcctctattggactgggctccataaaggccaagaccgtcctgtatttgcatatttctcctgcttagctggtccagggcctggcatgtatcagttctctg

SEQ ID NO: 42466 - DNA, 110 bp, synthetic construct
  source 1..110: mol_type = other DNA
ttgaagaaggatcagctccatccccttttgctcaaggaggcagagactacgaggggacagcacacaggagctcgagagccgtagctttggaaggtattgtggcgggggct

SEQ ID NO: 42467 - DNA, 110 bp, synthetic construct
  source 1..110: mol_type = other DNA
gacagcacacaggagctcgagagccgtagctttggaaggtattgtggcgggggctgttgagaccaacaaagccctcagcccaacagtccagcaggagctctaggttcttg

SEQ ID NO: 42468 - DNA, 110 bp, synthetic construct
  source 1..110: mol_type = other DNA
gcagccagttcagtcacagcgcagcagagctgagggggaaagttaactaattcgcccggcgtctccccagctctcctcccggccccagctctgggtgccttggcctcttg

SEQ ID NO: 42469 - DNA, 110 bp, synthetic construct
  source 1..110: mol_type = other DNA
agagaagaaaggagaaaatccagaagaacatcagctgccttggggctagaggcggggtgcaggggctggggctgacgtctttggggagcccctctggttgcagatggaaa

SEQ ID NO: 42470 - DNA, 110 bp, synthetic construct
  source 1..110: mol_type = other DNA
ccagaaaaaataacctgaaactggctgggaagggaagggagtggagtggagacagatgagcataacagaattacatgcttactatccatccccttgcaactgttcttgtg

SEQ ID NO: 42471 - DNA, 110 bp, synthetic construct
  source 1..110: mol_type = other DNA
atgagcataacagaattacatgcttactatccatccccttgcaactgttcttgtgtcctcttgatgagtcccccacctgggcaaagggatgctggaggctgtgggtctca

SEQ ID NO: 42472 - DNA, 110 bp, synthetic construct
  source 1..110: mol_type = other DNA
acaagcccctctgccgccttggccctctgcaccctcttggctccttactcctccctaagaaatcacctcagcatccctcctgcatctctcctgctgtcatgactgtccct

SEQ ID NO: 42473 - DNA, 110 bp, synthetic construct
  source 1..110: mol_type = other DNA
gaaattacccgctgttatccttcgctcctcagccccgcaaaaaaaatgcctccatatgctgccaactcaaatgtggggctgagagtggcagagcccttgtgggattggga

SEQ ID NO: 42474 - DNA, 110 bp, synthetic construct
  source 1..110: mol_type = other DNA
atgtatttgtatttattcatttgttcaacacaaattctgaagcttggttggggcaccaagctctatcctaggctcaggggacgcaaagaaccagacagacaagatccttg

SEQ ID NO: 42475 - DNA, 110 bp, synthetic construct
  source 1..110: mol_type = other DNA
ccaagctctatcctaggctcaggggacgcaaagaaccagacagacaagatccttgctcttgcaaagtttacattaaattacttaagataacatcaaatgctgcacagaca

SEQ ID NO: 42476 - DNA, 110 bp, synthetic construct
  source 1..110: mol_type = other DNA
ggtcttatctggggacagtagctgaatttgggaactagagacaggaggggaacaggagcgctaaggagctttgaagaggttttccccaagctggctgacctccctgagtc

SEQ ID NO: 42477 - DNA, 110 bp, synthetic construct
  source 1..110: mol_type = other DNA
tatgggccaagcatgtcattcctgcacctctccttctgttccagagccaggatagaacccccagagcaagctctgtggacaaggtgctccagccccttttctcaccgctg

SEQ ID NO: 42478 - DNA, 110 bp, synthetic construct
  source 1..110: mol_type = other DNA
ggagttagatgtcagaagggacctgtagcctgggaaacagaggaggctttgcacagctgagagggagggtacctggatcctcaactccaggcggggactgagtacagccc

SEQ ID NO: 42479 - DNA, 110 bp, synthetic construct
  source 1..110: mol_type = other DNA
cagggtaagggatgtgagttacctagaagggtcctcggggcctctgccgggtcctctggagtggagcttccacctcctccatcttccatgataggaatggagtagatggc

SEQ ID NO: 42480 - DNA, 110 bp, synthetic construct
  source 1..110: mol_type = other DNA
caagtggttgaataaacctcaccttgggctcttagcttctatgtaagtcccagctggcgtctccattcctaacctgggaaggtcctggatacaaatcagttttcttgcag

SEQ ID NO: 42481 - DNA, 110 bp, synthetic construct
  source 1..110: mol_type = other DNA
ccaagcgctctctctcttgggtaactcagctctacctctgccctggtgggaccctcgcgtttcaaggattctctcggccatcgcactttgctgcatccatcccattggac

SEQ ID NO: 42482 - DNA, 110 bp, synthetic construct
  source 1..110: mol_type = other DNA
cgcgtttcaaggattctctcggccatcgcactttgctgcatccatcccattggacaccacaccaaccctcactccagtgccctgactaacttttagtccttgaaccagag

SEQ ID NO: 42483 - DNA, 110 bp, synthetic construct
  source 1..110: mol_type = other DNA
ctgagagactggaatgcagggctgggcgggactggactggagatgcaaaggttcgttcagcttagctgtgtcagtgccaggaggttagatcccatgatttccccagattc

SEQ ID NO: 42484 - DNA, 110 bp, synthetic construct
  source 1..110: mol_type = other DNA
cacccttttcccatctgtattcatggcaggttaactccattgtgaagatccaggcctttttccgagccaggaaagcccgggatgactacagaacattaggtaaactgcct

SEQ ID NO: 42485 - DNA, 110 bp, synthetic construct
  source 1..110: mol_type = other DNA
ctttttccgagccaggaaagcccgggatgactacagaacattaggtaaactgcctggtttgccttctctgtctgtgcaggcgtctgtctatgtgagtctcatggctttca

SEQ ID NO: 42486 - DNA, 110 bp, synthetic construct
  source 1..110: mol_type = other DNA
ggtagcaggaaggacttcccgggataggagaccacagcttggcatcgttgttttggagggtatgattggaagcgtagataccataactggacaaatagaggtcagtttga

SEQ ID NO: 42487 - DNA, 110 bp, synthetic construct
  source 1..110: mol_type = other DNA
tcctggaggatgggagataggtctccagggatttagcctttcctctttatatccgcccaatgaaaattcatattaatatatgatttttaaaaatagccaaaatgaaggct

SEQ ID NO: 42488 - DNA, 110 bp, synthetic construct
  source 1..110: mol_type = other DNA
agaggtccgaatggtagacggagctctggcgatgcttgctcttctccagctggggcctatagaggacccgagagaggaccaaaccaaagtaggcaccaaaagtgtggata

SEQ ID NO: 42489 - DNA, 110 bp, synthetic construct
  source 1..110: mol_type = other DNA
cctatagaggacccgagagaggaccaaaccaaagtaggcaccaaaagtgtggatagtcatggagccccctgcatccttcacctggggaggcagagctgagatggaggggc

SEQ ID NO: 42490 - DNA, 110 bp, synthetic construct
  source 1..110: mol_type = other DNA
aacctgctgagccaccagggatctccattagtacttttcttttttttctttttttgtgttttctagggccacacccttggcatttggagattcccaggccaggagtctaa

SEQ ID NO: 42491 - DNA, 110 bp, synthetic construct; identical to SEQ ID NO: 42490
  source 1..110: mol_type = other DNA

SEQ ID NO: 42492 - DNA, 110 bp, synthetic construct
  source 1..110: mol_type = other DNA
tgattgggatcttagttcccagaccagggattgaactcgggccgcaacactgagagtgccaaatcctagctagcttctagaccatcagggaatttcctcatgtttgtctt

SEQ ID NO: 42493 - DNA, 110 bp, synthetic construct
  source 1..110: mol_type = other DNA
gatccaggtagcgcctgagtctcttcaccacctcggtgccctcctgcttggacacgaaggctatggagcagaggggcaaaggccaggtgggtctgagtttggtggacaag

SEQ ID NO: 42494 - DNA, 110 bp, synthetic construct
  source 1..110: mol_type = other DNA
gaaggctatggagcagaggggcaaaggccaggtgggtctgagtttggtggacaaggtggggaacaggctgggcttcatgataaccagatgggagtgggcaggagtgggca

SEQ ID NO: 42495 - DNA, 110 bp, synthetic construct; identical to SEQ ID NO: 42493
  source 1..110: mol_type = other DNA

SEQ ID NO: 42496 - DNA, 110 bp, synthetic construct; identical to SEQ ID NO: 42494
  source 1..110: mol_type = other DNA

SEQ ID NO: 42497 - DNA, 110 bp, synthetic construct
  source 1..110: mol_type = other DNA
aagaggctcagatctgaaggacaaggttatcggggcctggagaggaacaccgccgtgactgctggggcagacaggagcaagtgcaaaggcactgaggcatgaaggcacac

SEQ ID NO: 42498 - DNA, 110 bp, synthetic construct
  source 1..110: mol_type = other DNA
accagcgcacaaagtcttggatattttgattcaatcattcatctagggtaggatctggcatttttcagtaaacactacttcagtctgtcatctacagatgaaggagctga

SEQ ID NO: 42499 - DNA, 110 bp, synthetic construct
  source 1..110: mol_type = other DNA
tggcatttttcagtaaacactacttcagtctgtcatctacagatgaaggagctgaagtttagagtaggaattgcaataacagctaatgctgagcctcacgggccagacac

SEQ ID NO: 42500 - DNA, 110 bp, synthetic construct
  source 1..110: mol_type = other DNA
tgcaccacgatagtacctgggtggggtagtggggtggacagaggtaaggtcagggccagtgagcccaggctcagagctgagccctgaagtcaaaagtcagagatggggaa

SEQ ID NO: 42501 - DNA, 110 bp, synthetic construct
  source 1..110: mol_type = other DNA
ttggtggttttacatgcttggattgactgctcacttgctttttcctccaaagatgaggctgctggcattcgtggtgttgactctctttgctgtcactcaagcagaagaag

SEQ ID NO: 42502 - DNA, 110 bp, synthetic construct
  source 1..110: mol_type = other DNA
aggctgctggcattcgtggtgttgactctctttgctgtcactcaagcagaagaaggagccaggcttttggcctccaaatcactgctgaacagatatgctgtggaggggcg

SEQ ID NO: 42503 - DNA, 110 bp, synthetic construct
  source 1..110: mol_type = other DNA
gaggctttctagcatctcctgtcactagagatggaggacagttacctgcaatgtaccttgacagtaagatgaggctttgggaactccaaggcaatcctctgccctccacc

SEQ ID NO: 42504 - DNA, 110 bp, synthetic construct
  source 1..110: mol_type = other DNA
ccttgacagtaagatgaggctttgggaactccaaggcaatcctctgccctccaccttcaccagaaacagaactgagacattggtcttcctgccctgtctccacacaatcc

SEQ ID NO: 42505 - DNA, 110 bp, synthetic construct; identical to SEQ ID NO: 42503
  source 1..110: mol_type = other DNA

SEQ ID NO: 42506 - DNA, 110 bp, synthetic construct; identical to SEQ ID NO: 42504
  source 1..110: mol_type = other DNA

SEQ ID NO: 42507 - DNA, 110 bp, synthetic construct
  source 1..110: mol_type = other DNA
ttcactgtcccctctctattcccatttttggaaatgcagtcttactccctgtccctcctgttggcagtttcagagctctctgacttgggctgcagggagccagggcccag

SEQ ID NO: 42508 - DNA, 110 bp, synthetic construct
  source 1..110: mol_type = other DNA
tcctgttggcagtttcagagctctctgacttgggctgcagggagccagggcccagcttctggccacagcaatgcttcctttccattgtaccctcccctgcgcctcctgtc

SEQ ID NO: 42509 - DNA, 110 bp, synthetic construct
  source 1..110: mol_type = other DNA
catcatttatagtcatccagcttccatgaaaatcaggctgatgtcaccgggtacatttaatgtgaatcagtctttattctgcacttgtgtggtgctttaacaaattcaac

SEQ ID NO: 42510 - DNA, 110 bp, synthetic construct
  source 1..110: mol_type = other DNA
ttattctatttcctactctcttgcccattgccttagtgcaggccgttggtacacctgcattaatgcagtagctttctaactggtgtttctgattctggctccatttattc

SEQ ID NO: 42511 - DNA, 110 bp, synthetic construct
  source 1..110: mol_type = other DNA
ctgtcttatgcaaattccttacatgttttccccactgggcggtaaggccctccacccaggcttggagcaccgtggagaggactggcgtagcccttttaacttccttcagg

SEQ ID NO: 42512 - DNA, 110 bp, synthetic construct
  source 1..110: mol_type = other DNA
cactttggctcatatgcctaaaataatcactatctgtttcctgaaggaaaaatttgccaatccaacatatagtaagatcaataataactacttaatttaacttctaagga

SEQ ID NO: 42513 - DNA, 110 bp, synthetic construct
  source 1..110: mol_type = other DNA
tgcagtccaaaccattaaaaaaaagaaaaggaagaaaacctcggtggactaaaatggtggcaagaagcacatgccggtctccaaaagggctagaattggaaagatcagag

SEQ ID NO: 42514 - DNA, 110 bp, synthetic construct
  source 1..110: mol_type = other DNA
tggttcattatggctcattttagtcagtttgagcttatagcacagtagcagcttctcatccctgccctaaggcacatggcagacagctgtgttaagtgttataggaatag

SEQ ID NO: 42515 - DNA, 110 bp, synthetic construct
  source 1..110: mol_type = other DNA
cagacccaccacctcttcccttggccactcttcccaggagtccctggcatccaaattcctgggctcaccctgggttggggcgggactggtgggttagtcgtttcttcccc

SEQ ID NO: 42516 - DNA, 110 bp, synthetic construct
  source 1..110: mol_type = other DNA
gggagctggacccaggtatatgtgggctgtgttcaactaaaggtgggagactaggctgggcgagccctgcccaggagagtaggtgagagtcacgtgaagaggggcttgcc

SEQ ID NO: 42517 - DNA, 110 bp, synthetic construct
  source 1..110: mol_type = other DNA
ctgggcgagccctgcccaggagagtaggtgagagtcacgtgaagaggggcttgcctcctagctgctcctctttctgttctcaggagtgtcccagaccccagggcagagta

SEQ ID NO: 42518 - DNA, 110 bp, synthetic construct
  source 1..110: mol_type = other DNA
gttaggagcagaagaaccccggttcgggagagtggaagaccagaaaagacaggagaagggaaggagacagaaggtctggggcgaagactgccgggccatgcagcgcagga

SEQ ID NO: 42519 - DNA, 110 bp, synthetic construct
  source 1..110: mol_type = other DNA
aagggaaggagacagaaggtctggggcgaagactgccgggccatgcagcgcaggagctgtgagagcagcaggggcagttagagagggccagccaggaggggggccccaga

SEQ ID NO: 42520 - DNA, 110 bp, synthetic construct
  source 1..110: mol_type = other DNA
ttaagaccaggttggcacagcccccctgctggcacagctctgggaaatgctgccccaggatgggagaggatgcagtgcctggctacaaacctctctgtgacagcgccaca

SEQ ID NO: 42521 - DNA, 110 bp, synthetic construct
  source 1..110: mol_type = other DNA
caggatgggagaggatgcagtgcctggctacaaacctctctgtgacagcgccacagaggacagtcctgggagagatgctgggttagcccaagcatgctgcttctcctgtc

SEQ ID NO: 42522 - DNA, 110 bp, synthetic construct
  source 1..110: mol_type = other DNA
tcacacacaagcccatgcacaccctctgacacacacgggactgtgcgctcccccttcttttcctatgaagtagaaattgaggaaaagggtctagaattcagacccgggag

SEQ ID NO: 42523 - DNA, 110 bp, synthetic construct
  source 1..110: mol_type = other DNA
tcttttcctatgaagtagaaattgaggaaaagggtctagaattcagacccgggaggtgtccacacttcatccccctttttggagaggctcagaccaagagctaccaggcg

SEQ ID NO: 42524 - DNA, 110 bp, synthetic construct
  source 1..110: mol_type = other DNA
atgccatagccacagccacagccacagctagatctgagccatatcggcaacctattctacagctcacagcaaggctagataaatacacactgagcaagactagggattga

SEQ ID NO: 42525 - DNA, 110 bp, synthetic construct
  source 1..110: mol_type = other DNA
gaccatctgctaggtctgaagatattttatgcaaagagctcttgggcccctgaagtcaaggacacgggtgctgacaccttggcttctgggacccggtcctctccttgctc

SEQ ID NO: 42526 - DNA, 110 bp, synthetic construct
  source 1..110: mol_type = other DNA
ctcttctctggactccccaaagaatctactgagctcatgagcagcaagaaaaggctcccaaggtggagggcagaggccaggtctggattgtccacccgattgcatggagc

SEQ ID NO: 42527 - DNA, 110 bp, synthetic construct
  source 1..110: mol_type = other DNA
gggcggagggcgcccagcgggtctgccgggcttccccgggccaccctgtctcctcttctgtgtggttcctttctagttactcttctttcctcagaccaccttgcaggagg

SEQ ID NO: 42528 - DNA, 110 bp, synthetic construct; identical to SEQ ID NO: 42527
  source 1..110: mol_type = other DNA

SEQ ID NO: 42529 - DNA, 110 bp, synthetic construct
  source 1..110: mol_type = other DNA
gctggggaaacataggaagagacgtgttgcatggggcttgtaaaggagctgacttcagacaggaagggactgtggctggtgctactgttggcgaatcccgggagagcctg

SEQ ID NO: 42530 - DNA, 110 bp, synthetic construct
  source 1..110: mol_type = other DNA
cagacaggaagggactgtggctggtgctactgttggcgaatcccgggagagcctgccacagctgctctgatgctatcttctcgtcttctgagtttcttttcagctctctt

SEQ ID NO: 42531 - DNA, 110 bp, synthetic construct; identical to SEQ ID NO: 42529
  source 1..110: mol_type = other DNA

SEQ ID NO: 42532 - DNA, 110 bp, synthetic construct; identical to SEQ ID NO: 42530
  source 1..110: mol_type = other DNA

SEQ ID NO: 42533 - DNA, 110 bp, synthetic construct
  source 1..110: mol_type = other DNA
ctgtttcctgtatctgcattaaaattctagccatgtaaacgggtggttaaactattgccatctaggctgatctgggcttagattcttgctcgagcttagagcccttgacc

SEQ ID NO: 42534 - DNA, 110 bp, synthetic construct
  source 1..110: mol_type = other DNA
tgccatctaggctgatctgggcttagattcttgctcgagcttagagcccttgacctctggcacgttagccttaggacatccgaaaaatgaggtaattcacaaaagccctg

SEQ ID NO: 42535 - DNA, 110 bp, synthetic construct
  source 1..110: mol_type = other DNA
tccagccttagtaataaatttttaaaacatacacacaaaagttatcagcctgcaaaacaatgtttcctaggccttcccacacgtctcagtgtttcaacaacatcccatct

SEQ ID NO: 42536 - DNA, 110 bp, synthetic construct
  source 1..110: mol_type = other DNA
aacaatgtttcctaggccttcccacacgtctcagtgtttcaacaacatcccatctgttgatgtcagtctgaagaagcaggcctgtactctccaattttattaaaatcctt

SEQ ID NO: 42537 - DNA, 110 bp, synthetic construct
  source 1..110: mol_type = other DNA
tacatgtattggcaaacaatgctgccaggttataattcactcagtctctctcttcctggctgctgcagcctcctgcgttctcttggcacacagtctgtctggggcttaat

SEQ ID NO: 42538 - DNA, 110 bp, synthetic construct
  source 1..110: mol_type = other DNA
gccattttgaatttatttttgtacatgatgtgagggtgtgctctaacttcactgatgtacgtgcagtggtccagctttcccaacatcatgcactgaaaagactgtctttt

SEQ ID NO: 42539 - DNA, 110 bp, synthetic construct; identical to SEQ ID NO: 42538
  source 1..110: mol_type = other DNA

SEQ ID NO: 42540 - DNA, 110 bp, synthetic construct
  source 1..110: mol_type = other DNA
gcccaccagtgcaatgttgacagaaacagcaagagcaaaacaatgtctcaggaccagctgactgagtagtcccttctttcccaaccgatctgcaatgccacttggtggtt

SEQ ID NO: 42541 - DNA, 110 bp, synthetic construct
  source 1..110: mol_type = other DNA
gtccacatcatcgtggctcagaccaaagacaacaaatacaccctgaatcagacgagcgctgtcttcgacagcatcccggaagtggtacactattattccaacgagaagtt

SEQ ID NO: 42542 - DNA, 110 bp, synthetic construct
  source 1..110: mol_type = other DNA
tgggtttgttcctgctgagccccaacaggaactccctaaggttttttttttgtttttttttttgtcttttttgccatttctttgtcctctcccgtggcatatggaggtcc

SEQ ID NO: 42543 - DNA, 110 bp, synthetic construct; identical to SEQ ID NO: 42542
  source 1..110: mol_type = other DNA

SEQ ID NO: 42544 - DNA, 110 bp, synthetic construct
  source 1..110: mol_type = other DNA
ccgttcccctcataaataagccccaccaggcctaccatgtttggagataggaaaactcagcattacaaatatgtcagtgctccctaagttatctcgaagttaaacttgat

SEQ ID NO: 42545 - DNA, 110 bp, synthetic construct
  source 1..110: mol_type = other DNA
gtggccaccgtgactgcaaaggactggtagtcagccagctgggtaccatcatcccgagtggcctcagcaaacaccccataggggatgaagaacatgagcacggatgtata

SEQ ID NO: 42546 - DNA, 110 bp, synthetic construct
  source 1..110: mol_type = other DNA
aaccattaccagcgctgcaagaacaggagggaggtatcaggggtgagtcccttagccttcccccaaaggactgggggtaataagagaactccctaaagcagttcctgggg

SEQ ID NO: 42547 - DNA, 110 bp, synthetic construct
  source 1..110: mol_type = other DNA
ccttcccccaaaggactgggggtaataagagaactccctaaagcagttcctggggtgatagacaccagaaagagggtgttttggcagcaaagcatagcacttagagagga

SEQ ID NO: 42548 - DNA, 110 bp, synthetic construct
  source 1..110: mol_type = other DNA
ataacgtgctataaggaaaaagaggttgccatcagccataatgctatggttatttgacctggagcttcggtcaagaacacaggcaaagaaataaggcagaatatgggacc

SEQ ID NO: 42549 - DNA, 110 bp, synthetic construct
  source 1..110: mol_type = other DNA
cattaagccagaggagaaacccatatgccatcctaaggatgcaaaacaccgtggtacaggagttggcactggctaacaagcaactactgatggtgagttctggcaaaagt

SEQ ID NO: 42550 - DNA, 110 bp, synthetic construct
  source 1..110: mol_type = other DNA
tttcaaagtggagctcagcaatcagtctttttaaataagctctgaaccctggccgcactattagaatcatgggagtgcacggtgggactctttggggattttacatcagg

SEQ ID NO: 42551 - DNA, 110 bp, synthetic construct
  source 1..110: mol_type = other DNA
ggaacttggaactctgtatgagtaaagacagctagaaggaaggtcttgagggcgccacaacagcaagaaagcggaggagataggacatgaaatgaatgccaaaaagatag

SEQ ID NO: 42552 - DNA, 110 bp, synthetic construct
  source 1..110: mol_type = other DNA
cccctcaaagagatgaagtattgcaagatttgacttctcctcccctccaacctgtgctgtacaatctccatctctcctttctccatcaggcctttagttccctggcccgg

SEQ ID NO: 42553 - DNA, 110 bp, synthetic construct
  source 1..110: mol_type = other DNA
gtggccgtattccaggggagggactagccatagagcttttgtttgaagcaggtaggcaagtgggcactgcagccaactctgctgtgtcctttgcaggtttcctagacggc

SEQ ID NO: 42554 - DNA, 110 bp, synthetic construct
  source 1..110: mol_type = other DNA
gcaagtgggcactgcagccaactctgctgtgtcctttgcaggtttcctagacggcgaaatggactccaaaggtatgtgctcctcaccacactcggtccgggggctcctga

SEQ ID NO: 42555 - DNA, 110 bp, synthetic construct
  source 1..110: mol_type = other DNA
agcccagcagtaaccatatgctagtatccagaagtctacatgcaggtcaccttaatagtgctactctttcgaatgtcacacactgtctatattacatatatctacattac

SEQ ID NO: 42556 - DNA, 110 bp, synthetic construct
  source 1..110: mol_type = other DNA
tctggccatttatttccctgcttccacaggcagcaggatggaggacctgtgcctgcccgataacttggcacttggccaggagccctgatcatcatggaagcctagcatcc

SEQ ID NO: 42557 - DNA, 110 bp, synthetic construct
  source 1..110: mol_type = other DNA
cccttccccttgggagaggatccgccctctgttacctctcagctggatctctcttctcttcctggccttacctgagtacggcaggtatcctgcaacttcaagtacttctc

SEQ ID NO: 42558 - DNA, 110 bp, synthetic construct
  source 1..110: mol_type = other DNA
tgtgttctctccttcatggatgtatgacctggttttgaaagagagtcccctacgtcctatgccctgctcgccccactgctgtagtaactaaacacaacgcactcttccta

SEQ ID NO: 42559 - DNA, 110 bp, synthetic construct
  source 1..110: mol_type = other DNA
gctgcccaatgggaccatctgctcaactgttctcccagaagaagttgttacaggccactgtgagggcagccaccagcaccacgtactcctggaagtccacctccccatct

SEQ ID NO: 42560 - DNA, 110 bp, synthetic construct
  source 1..110: mol_type = other DNA
cactgtgagggcagccaccagcaccacgtactcctggaagtccacctccccatctccattctcgtcgagctccttcatcaccttgtccacagcatccgcatccttctggg

SEQ ID NO: 42561 - DNA, 110 bp, synthetic construct
  source 1..110: mol_type = other DNA
cttgggctcccccataattgctcccttcctccctggggagggtacaaatagggatggcccgtctctaggctcctccaactgaaacccaacagcagtggtgagtgccggct

SEQ ID NO: 42562 - DNA, 110 bp, synthetic construct
  source 1..110: mol_type = other DNA
ggcccgtctctaggctcctccaactgaaacccaacagcagtggtgagtgccggctgcttgggtcctgccctgggttggatgtcgggcagctcagggactctcctggcccc

SEQ ID NO: 42563 - DNA, 110 bp, synthetic construct
  source 1..110: mol_type = other DNA
cctgttgagatcttatcttccagttgcagccccagcctcctccaacccctgggctctttgccctgattccctcctccatagtggcatactccctgataccagctgattca

SEQ ID NO: 42564 - DNA, 110 bp, synthetic construct
  source 1..110: mol_type = other DNA
ctttgccctgattccctcctccatagtggcatactccctgataccagctgattcaggcacctgggccaagaagggtgaccagggtgacaactgcctggaaaatgagggcc

SEQ ID NO: 42565 - DNA, 110 bp, synthetic construct
  source 1..110: mol_type = other DNA
ttgaagttggccctgctcgtctcctttctttgctggcatgataggatctctcacccgacctttaaccactgaggagctgggaggagggaacgctgtcttcttctgccttc

SEQ ID NO: 42566 - DNA, 110 bp, synthetic construct
  source 1..110: mol_type = other DNA
cgacctttaaccactgaggagctgggaggagggaacgctgtcttcttctgccttctgtggctacaggtctggaccagggtctggagagagtcagaggcaggagtggccct

SEQ ID NO: 42567 - DNA, 110 bp, synthetic construct
  source 1..110: mol_type = other DNA
atctccacatgccatgggtatggccaaatggaagaaaagtgtgcaaatctggcaagaaaagaaaataaatcttatggcagcatggcatgagcctcaaggtgggggcaggt

SEQ ID NO: 42568 - DNA, 110 bp, synthetic construct
  source 1..110: mol_type = other DNA
gaaaagaaaataaatcttatggcagcatggcatgagcctcaaggtgggggcaggttgtaggcgtatgggggatagtaaagaaaaggtcagaaaatggcactgggaatgca

SEQ ID NO: 42569 - DNA, 110 bp, synthetic construct
  source 1..110: mol_type = other DNA
agcaagggacccacaggtatttctctgtgtgtgtgtggttcttcttgagagcgctctccgttcaaaggaaccggagtccgccggatggagcgtaaagatcagatttcctc

SEQ ID NO: 42570 - DNA, 110 bp, synthetic construct
  source 1..110: mol_type = other DNA
ttcatttataaaccagcaagaatttccactctgcctacatcacgggagtggagcgttaaataggatgcagctgtgaaagtactttgtaaattttgtcattgttattacat

SEQ ID NO: 42571 - DNA, 110 bp, synthetic construct
  source 1..110: mol_type = other DNA
acagtgatttgtttttctttaaaacattttgtttctgattcctgagcctaattgctcaccttgctctgtgtggcagatcaagctgagtgtccctcagtgtctgtggggtg

SEQ ID NO: 42572 - DNA, 110 bp, synthetic construct
  source 1..110: mol_type = other DNA
tcaccttgctctgtgtggcagatcaagctgagtgtccctcagtgtctgtggggtgtggggccaggtgtggctggtggggcctggtgcctggaatgtggcctcacactcct

SEQ ID NO: 42573 - DNA, 110 bp, synthetic construct; identical to SEQ ID NO: 42571
  source 1..110: mol_type = other DNA

SEQ ID NO: 42574 - DNA, 110 bp, synthetic construct; identical to SEQ ID NO: 42572
  source 1..110: mol_type = other DNA

SEQ ID NO: 42575 - DNA, 110 bp, synthetic construct
  source 1..110: mol_type = other DNA
gcacttcttagatggatggatgaattaatgaatgaatgagaaggcagctcccagaaatctcatctgtgtgctctgggcactttcctcatgaaggtgagagtctgttctga

SEQ ID NO: 42576 - DNA, 110 bp, synthetic construct
  source 1..110: mol_type = other DNA
cttcttggagggtttagtgagtcctccttttgtggtcttgccaccttcctgctctcttttttcttgagatggttgttccttggtttctctgggatagaatacatttgggc

SEQ ID NO: 42577 - DNA, 110 bp, synthetic construct
  source 1..110: mol_type = other DNA
tgtgggggcctcaagccagttctctgttaagcttatgggatgagaggtggtattttccaccaatttccaaaacacataggtattcactatccccactggtccatctttag

SEQ ID NO: 42578 - DNA, 110 bp, synthetic construct
  source 1..110: mol_type = other DNA
tccaccaatttccaaaacacataggtattcactatccccactggtccatctttagaaggcatatggccccgcttcttttgcatggctctcctaccctaaagctccatgtg

SEQ ID NO: 42579 - DNA, 110 bp, synthetic construct
  source 1..110: mol_type = other DNA
ttgcttccactgcaccatggcaggaactcctatatgcattcttttttctcatactatcttccatcatcagaatagaaaggcacatgtttttctgggatgtccagcctgaa

SEQ ID NO: 42580 - DNA, 110 bp, synthetic construct
  source 1..110: mol_type = other DNA
atcttccatcatcagaatagaaaggcacatgtttttctgggatgtccagcctgaagctctgtgtagaggtggaaggaatgacttttcacgaagacatggggctgctgagg

SEQ ID NO: 42581 - DNA, 110 bp, synthetic construct
  source 1..110: mol_type = other DNA
cctttcgaggccccggaagccacctccgtcaacaccatcaggatgagtctctcactgctgtccttgacctttctcacttttcccccttaaattcttttagacataaagtg

SEQ ID NO: 42582 - DNA, 110 bp, synthetic construct
  source 1..110: mol_type = other DNA
ccaatagaatgcttacagacctggaatagaatttgtatgattcatggaagtttgataataggccagagcataggccattcagtttacaaagagaatctcattttccttgc

SEQ ID NO: 42583 - DNA, 110 bp, synthetic construct
  source 1..110: mol_type = other DNA
tgattctagaccagaaaaacggcagctccaattcctccataggggcctttatgttggacaagaagaggaggagtgcaggagttcctcttgtggctcactgggttaagaac

SEQ ID NO: 42584 - DNA, 110 bp, synthetic construct
  source 1..110: mol_type = other DNA
tgccttgatggcctttccttggcccagaaactcaaccctgttcatacttttgcgcttatcagtcctggtggtgctgagtcactgcagctaattcacaagagactgatgac

SEQ ID NO: 42585 - DNA, 110 bp, synthetic construct
  source 1..110: mol_type = other DNA
aactcactccccatgcccaccacatgcgtcctagttcagctctattttaagttatcaccttccaacattttatatagcttacctatttattaggcttattttttattgcc

SEQ ID NO: 42586 - DNA, 110 bp, synthetic construct
  source 1..110: mol_type = other DNA
caccttccaacattttatatagcttacctatttattaggcttattttttattgcctacccccccccattttttcaaccccacttttatctgttctgttcttgtgtcctta

SEQ ID NO: 42587 - DNA, 110 bp, synthetic construct
  source 1..110: mol_type = other DNA
gctaaggtctgccgcgtaggaaaaacaaaaacaacaaaaataaaacaccaagatcttttcatgtctctgtcgaggtgcgtgcggttttctgagttttgtaccttgaggta

SEQ ID NO: 42588 - DNA, 110 bp, synthetic construct
  source 1..110: mol_type = other DNA
ttttcatgtctctgtcgaggtgcgtgcggttttctgagttttgtaccttgaggtacacaggaaggcaaagtctgcctgaacttttttgcttcgggatgacagcagcacgc

SEQ ID NO: 42589 - DNA, 110 bp, synthetic construct; identical to SEQ ID NO: 42587
  source 1..110: mol_type = other DNA

SEQ ID NO: 42590 - DNA, 110 bp, synthetic construct; identical to SEQ ID NO: 42588
  source 1..110: mol_type = other DNA

SEQ ID NO: 42591 - DNA, 110 bp, synthetic construct
  source 1..110: mol_type = other DNA
acctatgtctgacaaaatagtcacatttctatagctctcaagtaatctgagaatgcgggctaggctgatgtgcaatccctctccgatcagtttgatgacaggatcaagat

SEQ ID NO: 42592 - DNA, 110 bp, synthetic construct
  source 1..110: mol_type = other DNA
tcataacaattcaaaaattcagtaatgaaggctcttttccttaaatacaacgaggtgctcagctgcatttctaacattccttctattattttttttctcttcttatgttt

SEQ ID NO: 42593 - DNA, 110 bp, synthetic construct
  source 1..110: mol_type = other DNA
tttattgaatgtttagtgtgtatgataaaacacacagagtcatccaagcaagatgccttggttattacttccagcccctcatctctcacctgactgatcttccttattct

SEQ ID NO: 42594 - DNA, 110 bp, synthetic construct
  source 1..110: mol_type = other DNA
gcaacctcatggatgctagtctggctcgttacctgtggagccaccacgggaactccgaatatgagttttagaatccagatagatctggattcaaactccagctctgccac

SEQ ID NO: 42595 - DNA, 110 bp, synthetic construct
  source 1..110: mol_type = other DNA
cgaatatgagttttagaatccagatagatctggattcaaactccagctctgccacttgccaacttctttgactttaggtaagtcacttaacatctaagtctcagtttccc

SEQ ID NO: 42596 - DNA, 110 bp, synthetic construct
  source 1..110: mol_type = other DNA
tcaaggggaggaaaaatagatcccaacctcttgatgggagaagcgtgagggtcacatggtaggaagagcttgtgggagggcagatgctgtgatggccatttttggaaaat

SEQ ID NO: 42597 - DNA, 110 bp, synthetic construct
  source 1..110: mol_type = other DNA
gtaggcagcactgagcaatcatgccgccctgataagaattctcacaaagggtcgcttaaggaatctgcccccccccagcttccccctgtataaggatttcctgagcagac

SEQ ID NO: 42598 - DNA, 110 bp, synthetic construct
  source 1..110: mol_type = other DNA
ttaaggaatctgcccccccccagcttccccctgtataaggatttcctgagcagactgggacccttagaaagtgtacaaataaaacccaactctgctttgagaagcagaga

SEQ ID NO: 42599 - DNA, 110 bp, synthetic construct
  source 1..110: mol_type = other DNA
tacatggaaagggctggacacccactgctattactgttgctaggtccaggcacaggttaagatgttctgcataccaggtagcagctaacttaaatgccttggagctggca

SEQ ID NO: 42600 - DNA, 110 bp, synthetic construct
  source 1..110: mol_type = other DNA
gttaagatgttctgcataccaggtagcagctaacttaaatgccttggagctggcagatgacaattaaagagagagtgcctggagatacaaccccatctcagttccagttt

SEQ ID NO: 42601 - DNA, 110 bp, synthetic construct
  source 1..110: mol_type = other DNA
gtggtggagggaggggggccaggccagttcaccttgcaagatggctaagccgcctcctctcgcagcttgatccccgtggactctctagctgtgctgaatgttgacgtgga

SEQ ID NO: 42602 - DNA, 110 bp, synthetic construct
  source 1..110: mol_type = other DNA
ctcctaggtccccaggcaggagggaggcaactagagctttttatcttgaagggttgagcaggtggcctctctgcagctgctttctctgcccccgtagaactgatataact

SEQ ID NO: 42603 - DNA, 110 bp, synthetic construct
  source 1..110: mol_type = other DNA
ccacgggaaggggatgagatcaggagctaggtattgcacctaagtctcagatgcttattaaacatcaaatggagactttgcttaggcagttggatcacaaacctggagtt

SEQ ID NO: 42604 - DNA, 110 bp, synthetic construct
  source 1..110: mol_type = other DNA
tacatcacacaccagtttccacgaggcttccctcacacgcaggcagagtgggtgttctttcttctacctcctcctgtatcgtggccctacttccatcagagctgtacgac

SEQ ID NO: 42605 - DNA, 110 bp, synthetic construct
  source 1..110: mol_type = other DNA
gagtcagcgaggcgagaggggctatgagctcacccattacagagatggcaaaactgaggcccagagtggcgtgcaaggcagtccttcagaactggcatgtgacctctgtg

SEQ ID NO: 42606 - DNA, 110 bp, synthetic construct
  source 1..110: mol_type = other DNA
gaggcccagagtggcgtgcaaggcagtccttcagaactggcatgtgacctctgtgtaactgtagcccatcccccaccgtcatatcctaagtgccatgggtcccggggtga

SEQ ID NO: 42607 - DNA, 110 bp, synthetic construct
  source 1..110: mol_type = other DNA
actgtgactggccagttaagcctcaagctaactgaaatctatcatgtgaatgatatgcccttcacttaatatgcccactctgaagagagcacctactcccaagtcagtta

SEQ ID NO: 42608 - DNA, 110 bp, synthetic construct
  source 1..110: mol_type = other DNA
ggacaagcgcatggactccatttcctgggcgaactggcgcatagctgctaagcgctactttagagtgacatctggaacccacaagcactgctttccggatggccagcttc

SEQ ID NO: 42609 - DNA, 110 bp, synthetic construct
  source 1..110: mol_type = other DNA
ctattctagccttgtcgggaggaggaaggaaacctcaggctaaaacctttcagcagactggaaaatgtgtaggcctatccctcggagcccaggaaatttgagcagctgcc

SEQ ID NO: 42610 - DNA, 110 bp, synthetic construct
  source 1..110: mol_type = other DNA
gactggaaaatgtgtaggcctatccctcggagcccaggaaatttgagcagctgcctgccacaaagagtttcctttgcccctgggggatcctgacaaggtttgacaaagca

SEQ ID NO: 42611 - DNA, 110 bp, synthetic construct
  source 1..110: mol_type = other DNA
ggggcagaaatacattttttagagagagagctattctttaccaaataattatgattctcctgaaggaaggggtacactaccaagctgaggaaaatcaagcaaggtttcac

SEQ ID NO: 42612 - DNA, 110 bp, synthetic construct
  source 1..110: mol_type = other DNA
caatttttaagcatttttgatcagatattcttgaaatgtcagcattaatcattatggcccagaagtgaaaactaagatgttgaatcaatagcaaaatgtggtatgtccac

SEQ ID NO: 42613 - DNA, 110 bp, synthetic construct; identical to SEQ ID NO: 42612
  source 1..110: mol_type = other DNA

SEQ ID NO: 42614 - DNA, 110 bp, synthetic construct; identical to SEQ ID NO: 42612
  source 1..110: mol_type = other DNA

SEQ ID NO: 42615 - DNA, 110 bp, synthetic construct; identical to SEQ ID NO: 42612
  source 1..110: mol_type = other DNA

SEQ ID NO: 42616 - DNA, 110 bp, synthetic construct
  source 1..110: mol_type = other DNA
gtaatgtttcaaaaaacatggccagttgctctctcagatttcctagttttggtcctcttcacttttatctagaccttccttttctttttttttgtttttgttttgttttg

SEQ ID NO: 42617 - DNA, 110 bp, synthetic construct
  source 1..110: mol_type = other DNA
cacacagaggcatgctctgggtgagtaccactccctgccccctctcctgttttaggtcatccaccggctgcccatgcccaacatgaaggacgagctgcatcactcaggat

SEQ ID NO: 42618 - DNA, 110 bp, synthetic construct
  source 1..110: mol_type = other DNA
gtcatccaccggctgcccatgcccaacatgaaggacgagctgcatcactcaggatggaacacctgcagcagctgcttcggagacagcaccaagtcacgcaccaagctgat

SEQ ID NO: 42619 - DNA, 110 bp, synthetic construct
  source 1..110: mol_type = other DNA
ccagagagaaattgtatttcccctggtttccctgcttctattccttctcagagctggagccacagtgcatgagaacatgtttactgaataccatccaaagcagcaaattg

SEQ ID NO: 42620 - DNA, 110 bp, synthetic construct
  source 1..110: mol_type = other DNA
ggagccacagtgcatgagaacatgtttactgaataccatccaaagcagcaaattgagaatctatgatttggggaaaagatttgagagagacctttcagtaactggcatga

SEQ ID NO: 42621 - DNA, 110 bp, synthetic construct; identical to SEQ ID NO: 42619
  source 1..110: mol_type = other DNA

SEQ ID NO: 42622 - DNA, 110 bp, synthetic construct; identical to SEQ ID NO: 42620
  source 1..110: mol_type = other DNA

SEQ ID NO: 42623 - DNA, 110 bp, synthetic construct
  source 1..110: mol_type = other DNA
actccagggtatgagcttatccagcacagctgccacaatggggaaaagccaggcccctcacccctgtcacttctgctctgagctcctcaccctggtttatccccaactca

SEQ ID NO: 42624 - DNA, 110 bp, synthetic construct
  source 1..110: mol_type = other DNA
cctcacccctgtcacttctgctctgagctcctcaccctggtttatccccaactcacactcctggcccttttcattttcccttggcaacagtagcccaggaagcctcaccc

SEQ ID NO: 42625 - DNA, 110 bp, synthetic construct
  source 1..110: mol_type = other DNA
cactcccactgggcactagggaaggcagctgaggggtgggaggggaatggagcataaaggggcagcttttggtttatacacatggggatgaagctggaagatgacaggtg

SEQ ID NO: 42626 - DNA, 110 bp, synthetic construct
  source 1..110: mol_type = other DNA
gggtttaaatagaagaaggcataactttccagtccctgccatctagggaacccgcaccctgggaagacagtcaccgagaggcaggtccatatatccctcctgaaataacc

SEQ ID NO: 42627 - DNA, 110 bp, synthetic construct
  source 1..110: mol_type = other DNA
aaaatgagcataggaaaagaggcaggcatttgacacagctacttgtagggactaggagagagtattttccaaacttggagatcttgaatttattaaaggttccaatctgt

SEQ ID NO: 42628 - DNA, 110 bp, synthetic construct
  source 1..110: mol_type = other DNA
gttctaaagacactgagtcacaagactgacatactgaagtactactttaatacgatagggaaaattcagttttgattaagctcctataaaaaattcttaacttcaactga

SEQ ID NO: 42629 - DNA, 110 bp, synthetic construct
  source 1..110: mol_type = other DNA
gagggagggagagaaagcagtagagcagtagacatcccagcttatcctccccaaatttaaagctctgtttctgtgccccagtcctagaaccagacgcaaataagactcag

SEQ ID NO: 42630 - DNA, 110 bp, synthetic construct
  source 1..110: mol_type = other DNA
taggtcaaatactcttatggatcctcatttcatggattagaatgttagtgaagtgagcatatgtgtttcagctaagctttaaccattccgcacacatctagttagtagaa

SEQ ID NO: 42631 - DNA, 110 bp, synthetic construct
  source 1..110: mol_type = other DNA
ccagttccctttgcccaacacagtcacgtgaatatacactcaggctccagggtgaagtctctgtctccacacatctcccttacttcccacccctgactggctgggtcatc

SEQ ID NO: 42632 - DNA, 110 bp, synthetic construct
  source 1..110: mol_type = other DNA
agtctctgtctccacacatctcccttacttcccacccctgactggctgggtcatcctggctctcctgcaggcccctctgtatctgtttcagggtttgagttcagtttcta

SEQ ID NO: 42633 - DNA, 110 bp, synthetic construct
  source 1..110: mol_type = other DNA
catttctatctattaggagctgggagagttgctagactggagacttggggggttagaattcaatagtcaggaagacccagttcctgaggaaagggcaattcaggaagagt

SEQ ID NO: 42634 - DNA, 110 bp, synthetic construct
  source 1..110: mol_type = other DNA
aaaactaggaaggattgcaaatcactaagtgaagtttaaacatatgagcacctgaagaagatctacaaaaaaaattgtctgcagagtggccagccaggcgaatccaccac

SEQ ID NO: 42635 - DNA, 110 bp, synthetic construct
  source 1..110: mol_type = other DNA
cacacatacacagcaactaggtattgaacacctaaaaggaattagaatccaaagaggatgaaccttgtgccatgaaacatagtttctgtttgtaccacgttgtccatagt

SEQ ID NO: 42636 - DNA, 110 bp, synthetic construct
  source 1..110: mol_type = other DNA
agttttacctctcacttatgaatttctaagtgcagaaagagaggaaacaactaaagctgaatgtggtctataagttataccagtcaagttaattcatgactaagcgtgca

SEQ ID NO: 42637 - DNA, 110 bp, synthetic construct
  source 1..110: mol_type = other DNA
ttggacaaaatacaggatcctaataaatcagtctctgggtttggggtcttaggaagctgcattataaacagtctctaaaagcttacatgttgaaagttgagaatactgct

SEQ ID NO: 42638 - DNA, 110 bp, synthetic construct
  source 1..110: mol_type = other DNA
gtcttaggaagctgcattataaacagtctctaaaagcttacatgttgaaagttgagaatactgctttatattttattgcctataattcattcatccaataactgagttct

SEQ ID NO: 42639 - DNA, 110 bp, synthetic construct
  source 1..110: mol_type = other DNA
ctcggaggaagcggggaaaggtggttagggagaaagagaaggaaaactgagaaatctctgccctcctagagctcagtaacctcgctcctgggcactgagaagtagcagtg

SEQ ID NO: 42640 - DNA, 110 bp, synthetic construct
  source 1..110: mol_type = other DNA
ctctgccctcctagagctcagtaacctcgctcctgggcactgagaagtagcagtgctgatcttgaaccaggtggaggaaaggggttgcaggtggccagcatcctcaatct

SEQ ID NO: 42641 - DNA, 110 bp, synthetic construct
  source 1..110: mol_type = other DNA
ctctgattgtttccattttctcagtaagttaaaagcttaaagtgaggctgggagaagggaatatgggacgtttaaggatataaaagaaggtgttcaatagtcatcttgga

SEQ ID NO: 42642 - DNA, 110 bp, synthetic construct
  source 1..110: mol_type = other DNA
ttgatgtaggaaagatgggtctagcaggatagagggagatggcataaatcacgttgggatgggcatctctagaagacgggggcctggccagttcccactcataagaaaga

SEQ ID NO: 42643 - DNA, 110 bp, synthetic construct
  source 1..110: mol_type = other DNA
gggatgggcatctctagaagacgggggcctggccagttcccactcataagaaagaactcagtagagaggcaagtgaaggcaaatgctacttttgtgtcatttcttctctt

SEQ ID NO: 42644 - DNA, 110 bp, synthetic construct
  source 1..110: mol_type = other DNA
caacctaaggttctctttatggaacaagtcagtctgatcacttaatgacatatcgagaaggaaaatctgagttattctatttaaaaggatgtaagtattaccttttaagc

SEQ ID NO: 42645 - DNA, 110 bp, synthetic construct
  source 1..110: mol_type = other DNA
atgacgcacaccatcctccttggattctccatgtccatttcactcaaaacatacatctcatatttatgcgcccatctgaggagttgacttcctattaagacagcttagtt

SEQ ID NO: 42646 - DNA, 110 bp, synthetic construct
  source 1..110: mol_type = other DNA
tctcatatttatgcgcccatctgaggagttgacttcctattaagacagcttagttaggttaagagacgggacattggtttgttcttccttcccctatccgcttaacacct

SEQ ID NO: 42647 - DNA, 110 bp, synthetic construct
  source 1..110: mol_type = other DNA
gctagggagagggaaaaaagataaaaaatatgagaaagttttcagattaactccacatggttctgaaacctttgctttgcttgggaactctacaatgctaacataccttg

SEQ ID NO: 42648 - DNA, 110 bp, synthetic construct
  source 1..110: mol_type = other DNA
gtgctgaggtgaacaccacacttttccggtttcccagtctcttcttcctggacagggaaatggctcatggaagtgaccagtgtcctaggcgagatccagtagaggggggc

SEQ ID NO: 42649 - DNA, 110 bp, synthetic construct
  source 1..110: mol_type = other DNA
aattttaaatatccttgtttaaggcagctaagtgctaggagaacaaagctgaataatatataaccctgtcccttgaagaacccagtctaaacccacgattgtgaaccaag

SEQ ID NO: 42650 - DNA, 110 bp, synthetic construct
  source 1..110: mol_type = other DNA
atatataaccctgtcccttgaagaacccagtctaaacccacgattgtgaaccaagaaagaaacgatggaatgtggagaagtggctgagctgacagcttgtgcccaggaag

SEQ ID NO: 42651 - DNA, 110 bp, synthetic construct
  source 1..110: mol_type = other DNA
acccctggcatttttgtgactgaggaactactcttgacttgtctaagccttagcgtgaacgtagatataaggatggaggtgggagagttgtgtttatggagacttttgag

SEQ ID NO: 42652 - DNA, 110 bp, synthetic construct
  source 1..110: mol_type = other DNA
ttgcagcaacaccggatccttaacccactgagccacaatgggaattcctaaattttacttagtattgtcataatcccctcttcggagttgctatggatcagtgtttctca

SEQ ID NO: 42653 - DNA, 110 bp, synthetic construct
  source 1..110: mol_type = other DNA
tacttagtattgtcataatcccctcttcggagttgctatggatcagtgtttctcaaatcatgtgctcataacacctggcagttctagggcatggcactaaataacactga

SEQ ID NO: 42654 - DNA, 110 bp, synthetic construct
  source 1..110: mol_type = other DNA
aactgtgggtagttctccacaaaggcctgccaagggagaaacatcattggggtttctgttatttcttggctgaggacaggcatgtatgaagaaggggcggggggagcagg

SEQ ID NO: 42655 - DNA, 110 bp, synthetic construct
  source 1..110: mol_type = other DNA
ctgttatttcttggctgaggacaggcatgtatgaagaaggggcggggggagcaggaattgttcttctgcccagactaaggcatctaaaactttcaatcacgtggcacttt

SEQ ID NO: 42656 - DNA, 110 bp, synthetic construct
  source 1..110: mol_type = other DNA
tgaatactcagagggaaaaggaacaaaaaggggaatacatacctctcatcaaattgtaacaaagtgaaggatccagggcttttgtgaaggtaccagtgagattccagtga

SEQ ID NO: 42657 - DNA, 110 bp, synthetic construct
  source 1..110: mol_type = other DNA
gtaacaaagtgaaggatccagggcttttgtgaaggtaccagtgagattccagtgaaactgccttaagttgattctcctgtatggtgagagcccccgagtctctcctgcac

SEQ ID NO: 42658 - DNA, 110 bp, synthetic construct
  source 1..110: mol_type = other DNA
gagcactagtttaggtgattcaggacttaagaaatttcttggtttgaaaatgcattatttttatttttttttgtctttttgcattttctagggctgcacctgtggcatat

SEQ ID NO: 42659 - DNA, 110 bp, synthetic construct
  source 1..110: mol_type = other DNA
tgattcaggacttaagaaatttcttggtttgaaaatgcattatttttatttttttttgtctttttgcattttctagggctgcacctgtggcatatggaggctcccaggct

SEQ ID NO: 42660 - DNA, 110 bp, synthetic construct
  source 1..110: mol_type = other DNA
aactcaagaagaacatgggaggcctgatgcacagcaagggctctaagcctggagggacaggaacggggtcagggggaagcagcggcactgagacactggagaagaagaag

SEQ ID NO: 42661 - DNA, 110 bp, synthetic construct
  source 1..110: mol_type = other DNA
gacaggaacggggtcagggggaagcagcggcactgagacactggagaagaagaagaaaaactcattgaagagctggaagggtggcaaggaggaggcagctggggatgggc

SEQ ID NO: 42662 - DNA, 110 bp, synthetic construct
  source 1..110: mol_type = other DNA
aatcttgaaggttagaagcttctcagacaaagaagagaagctcatttcaggtggatgggatgtttctgagcagaagcatagattgataaatatcatgattatataattgc

SEQ ID NO: 42663 - DNA, 110 bp, synthetic construct
  source 1..110: mol_type = other DNA
agccttgatgtgaaatgaattgctgtctccagagaataagtatatgccagttgaatggggcccagggtcctcatctcttacagatattgaagggaagaaggccccagtag

SEQ ID NO: 42664 - DNA, 110 bp, synthetic construct
  source 1..110: mol_type = other DNA
tggggcccagggtcctcatctcttacagatattgaagggaagaaggccccagtagtttattctcacccaacccatttggctcctcgtcctccctctctcaagactcaggg

SEQ ID NO: 42665 - DNA, 110 bp, synthetic construct
  source 1..110: mol_type = other DNA
gttgttttatgctaccaagtttgtggtaatttgctgttagcagccctaggaaaggtacacagcatccttgtaacagtttgggtgtgagctctcctcaagcatgagaggaa

SEQ ID NO: 42666 - DNA, 110 bp, synthetic construct
  source 1..110: mol_type = other DNA
tacacagcatccttgtaacagtttgggtgtgagctctcctcaagcatgagaggaacttgtcattgatgcaggccacagtggagtctgggctcttcctgccctggcagagt

SEQ ID NO: 42667 - DNA, 110 bp, synthetic construct
  source 1..110: mol_type = other DNA
gcgagctggccaagcacgccgtgtccgagggcaccaaggcggtcactaagtacaccagttccaagtaagggtgctcaagggacgaaatagaacatctaccttaccccaaa

SEQ ID NO: 42668 - DNA, 110 bp, synthetic construct
  source 1..110: mol_type = other DNA
aagtgggagctggggctttatgggatcactgtccctctccactcacagtgccatagttggagagctgagtttagtttaaggaaagcagcaattacattctgcccctggtg

SEQ ID NO: 42669 - DNA, 110 bp, synthetic construct
  source 1..110: mol_type = other DNA
gttggagagctgagtttagtttaaggaaagcagcaattacattctgcccctggtgtctctggacgcagagaggttatgagaaaacttcaaatacaagggcaaagagaatg

SEQ ID NO: 42670 - DNA, 110 bp, synthetic construct
  source 1..110: mol_type = other DNA
cttgacttcaattagctaaagcctggattctgtcaactgcccaacccccttcacgaatatgcatgtaccctttgcgtaaaatttcctcaattttgctatcctgggagata

SEQ ID NO: 42671 - DNA, 110 bp, synthetic construct
  source 1..110: mol_type = other DNA
ggagtcggctggggcgactcctttactctagcgcttagctttggatctggagaccctgtgttagatgcgagacccggaagctagacctggggggaacccatggtcttcgc

SEQ ID NO: 42672 - DNA, 110 bp, synthetic construct
  source 1..110: mol_type = other DNA
gtaagcacaatgacaaaaaaaaaaaaaaaaaaaaaaagtgtttctcactacttttgagactttgtcccagtgtacagaattctgcaattctgacactctaattatatgag

SEQ ID NO: 42673 - DNA, 110 bp, synthetic construct
  source 1..110: mol_type = other DNA
ggatctggtgctggcttttacttccacagacttctcaagcccctagggcatcctaaattaggggaaaccttatcctagcggccgcggcaagagcactgcggcaccttctc

SEQ ID NO: 42674 - DNA, 110 bp, synthetic construct
  source 1..110: mol_type = other DNA
tagatgaccaactcactctctaaatctcccccatggcacaaaattgctccctgaggaggagagaaaagctgaacttctcagcgtgttatgtgttggtgtgttggagggtt

SEQ ID NO: 42675 - DNA, 110 bp, synthetic construct
  source 1..110: mol_type = other DNA
gaggagagaaaagctgaacttctcagcgtgttatgtgttggtgtgttggagggttagggcgatgctcttacttacaggacagaaggtggtaggtcctggggaagttgact

SEQ ID NO: 42676 - DNA, 110 bp, synthetic construct
  source 1..110: mol_type = other DNA
tttaatttataataagtttaaggcttgaagaaacggtaagtcacagggacctgaagctaaagaagaaagggtagggtgatttaggggtgatttcctggctatgcctcttt

SEQ ID NO: 42677 - DNA, 110 bp, synthetic construct
  source 1..110: mol_type = other DNA
ttcatttggtaatttcagcaaaggcttatgcacaattttgctgtttttcttcaaccggagttgtttgtacaatgaaggggttattttctttttctttctttctttccttt

SEQ ID NO: 42678 - DNA, 110 bp, synthetic construct; identical to SEQ ID NO: 42677
  source 1..110: mol_type = other DNA

SEQ ID NO: 42679 - DNA, 110 bp, synthetic construct
  source 1..110: mol_type = other DNA
atgtctatacagtagacaaggttattttcccttttcatgaatgtctagagctaagtaatcaatatgaagacttactctgcttggcatgaaccagatcagagccacttata

SEQ ID NO: 42680 - DNA, 110 bp, synthetic construct
  source 1..110: mol_type = other DNA
taatcaatatgaagacttactctgcttggcatgaaccagatcagagccacttataggcatgagtggtttttttgtttttcattttgttttgttttttgtttttgcatgag

SEQ ID NO: 42681 - DNA, 110 bp, synthetic construct; identical to SEQ ID NO: 42679
  source 1..110: mol_type = other DNA

SEQ ID NO: 42682 - DNA, 110 bp, synthetic construct; identical to SEQ ID NO: 42680
  source 1..110: mol_type = other DNA

SEQ ID NO: 42683 - DNA, 110 bp, synthetic construct
  source 1..110: mol_type = other DNA
tgagccctatgagaaggtggtggacagaatccagagcagtggcaagaatgtcacgctcctagtctgtggaaagaaggcctatgattatttccaggctaagaaaatcccta

SEQ ID NO: 42684 - DNA, 110 bp, synthetic construct
  source 1..110: mol_type = other DNA
ttagagatacaagatgtgatgcagagagctcagaaaacagatcattttgaggtgctttctgggcccctcttcaccagtggtcctatatcatttctgttttactatatatt

SEQ ID NO: 42685 - DNA, 110 bp, synthetic construct
  source 1..110: mol_type = other DNA
tttctgggcccctcttcaccagtggtcctatatcatttctgttttactatatattaattttattgctataccagttttacaggtgaaagagatagattatgtgtcctacc

SEQ ID NO: 42686 - DNA, 110 bp, synthetic construct
  source 1..110: mol_type = other DNA
ttgtcatactgcacctagtcgctgggtgcttaacgtaatctggagccgataagggtaaattttcacatggccttttggaaggtaagtgagcacaagttgggtattgggag

SEQ ID NO: 42687 - DNA, 110 bp, synthetic construct
  source 1..110: mol_type = other DNA
taaattttcacatggccttttggaaggtaagtgagcacaagttgggtattgggagagtagctggctgttgtatttttttcaaaaattaagcccatcaatcatccctttga

SEQ ID NO: 42688 - DNA, 110 bp, synthetic construct
  source 1..110: mol_type = other DNA
gtttgcacctgctaatcccaaactcccaccccctcccccttggcagccacaaatctgttctctatagacagtttgtttttgaagctcgaagtcccttcgtacactttccc

SEQ ID NO: 42689 - DNA, 110 bp, synthetic construct
  source 1..110: mol_type = other DNA
acatattttgtgttcccagactactgggtgagtaagggaggggagcagctacaggagcctaacagttgggcatccaagagcaacttcagcgtcttctagactttggcttg

SEQ ID NO: 42690 - DNA, 110 bp, synthetic construct
  source 1..110: mol_type = other DNA
tggcgtacgttatcattgtgtttgatagaatttattcatggcatggacagcttatttggcctctcccaacacacttactgccaagaaatggataataatctacagtgcgt

SEQ ID NO: 42691 - DNA, 110 bp, synthetic construct
  source 1..110: mol_type = other DNA
gaagacacagtttggagcccagaagggaatgctgagagggtagaggaggcttctggaaagtgtgcccttcactctgtccctggtgaggagctattgagtttctttggaca

SEQ ID NO: 42692 - DNA, 110 bp, synthetic construct
  source 1..110: mol_type = other DNA
gaaagtgtgcccttcactctgtccctggtgaggagctattgagtttctttggacatctaggcagtggggtgaccagcgctgttcttgagggtgacaaaggcagcagcatg

SEQ ID NO: 42693 - DNA, 110 bp, synthetic construct
  source 1..110: mol_type = other DNA
agtatctggaacagggtctagcatacagtagatgttcaataagtgtatgtggagcaaacgactacagtactggctccagtgcgggagcttggggcaaaaccaaggaagtt

SEQ ID NO: 42694 - DNA, 110 bp, synthetic construct
  source 1..110: mol_type = other DNA
aaacgactacagtactggctccagtgcgggagcttggggcaaaaccaaggaagtttctacaccttttcagttatgcagaggtctgggaaggtgcatcttcccttcccttt

SEQ ID NO: 42695 - DNA, 110 bp, synthetic construct
  source 1..110: mol_type = other DNA
cctgagaggtgtggtagagcaaatccatatcccctccctgtgccatattgtgtgacttactcctatctctggaacagctacttttcaggggtgtacagaaaaagcagcag

SEQ ID NO: 42696 - DNA, 110 bp, synthetic construct
  source 1..110: mol_type = other DNA
acagtcaatgacaaacgggtccatctaggactctccctcatttgttctttcagtgcttgaccactgccatggtgcagtaatgatgtgccctgagcctcttaagtgcagtt

SEQ ID NO: 42697 - DNA, 110 bp, synthetic construct
  source 1..110: mol_type = other DNA
gatcaagaagattaggaagaacaacccctgtatgttggatggttggaaaatcccaagaatattaattcagttacatctgtttgttcatttctaatggtgtcacagctaca

SEQ ID NO: 42698 - DNA, 110 bp, synthetic construct
  source 1..110: mol_type = other DNA
agaatattaattcagttacatctgtttgttcatttctaatggtgtcacagctacataaaaatgagaaaaaagaaaccgcaatgaaagagcagagagcactccagatgggt

SEQ ID NO: 42699 - DNA, 110 bp, synthetic construct
  source 1..110: mol_type = other DNA
tactagtttggatatggtagctttgtagggtagtctgaagtctgggggttgttataactccagctttgttttttttctcaagatttctttgacaatttggggtctgttgt

SEQ ID NO: 42700 - DNA, 110 bp, synthetic construct
  source 1..110: mol_type = other DNA
tgttaagcccattattgtaagccatataaatagggtgttttgtttgtttgtttgttttttagtttttggtccaagctataagctaaattgctcatttttgcccctgactc

SEQ ID NO: 42701 - DNA, 110 bp, synthetic construct
  source 1..110: mol_type = other DNA
caccaagtcactgggaaactcatttaatcacatccctaaataattagaagctccgtgccttcattaagaaccaaaaataagcgctcgcaccatgtgcaggtaaatgacag

SEQ ID NO: 42702 - DNA, 110 bp, synthetic construct
  source 1..110: mol_type = other DNA
tgccttcattaagaaccaaaaataagcgctcgcaccatgtgcaggtaaatgacagcagggacttgtgaaagttgttttctagttcagactcagaaaaatgtgtcattttt

SEQ ID NO: 42703 - DNA, 110 bp, synthetic construct
  source 1..110: mol_type = other DNA
ttacttgactttcctaattagctatggggaaatctctggagaattagaaggggctaggtatcaggaacccctcctcgatgacaggaaaccaagtgacaaaagagaggtga

SEQ ID NO: 42704 - DNA, 110 bp, synthetic construct
  source 1..110: mol_type = other DNA
gtatctgcgagtattaaaaatgaaatagctcttttctcattgttcgtgttggttaacttttgatgtataacaaccacaaactcttaagtggtataagacaatactcattt

SEQ ID NO: 42705 - DNA, 110 bp, synthetic construct
  source 1..110: mol_type = other DNA
aaactacgagtgaagtcaagtcagagtcagtgtcccgtaccgcaatgccagctgccttcattccagtccccccacaccctataagaccacacagatcagcaaggataaca

SEQ ID NO: 42706 - DNA, 110 bp, synthetic construct
  source 1..110: mol_type = other DNA
cttcattccagtccccccacaccctataagaccacacagatcagcaaggataacaaaaccacccttaaccccacgcctactacaaaactaggagtcagagagtaccacaa

SEQ ID NO: 42707 - DNA, 110 bp, synthetic construct
  source 1..110: mol_type = other DNA
ccacacacacattctcaatactcatctacctctctaggaggtaataaatgtgttaactcgattgtggttatcatttcacagtatataagtatagccaatcatcaaatgta

SEQ ID NO: 42708 - DNA, 110 bp, synthetic construct
  source 1..110: mol_type = other DNA
caatactcatctacctctctaggaggtaataaatgtgttaactcgattgtggttatcatttcacagtatataagtatagccaatcatcaaatgtagacattatcatcatt

SEQ ID NO: 42709 - DNA, 110 bp, synthetic construct
  source 1..110: mol_type = other DNA
gaaccaagcattatcgtggcatgagaatacagactaaagacctaatagtaatattgatgcaaataataccaccttacctttttgaggacttaatataagacaagcacagt

SEQ ID NO: 42710 - DNA, 110 bp, synthetic construct
  source 1..110: mol_type = other DNA
agccataatgactttgttgccatcctagaccttcctgagggagagcatcagtataagttctttgtggatggacagtgggttcatgatccatcagaggtaaggccttgatc

SEQ ID NO: 42711 - DNA, 110 bp, synthetic construct
  source 1..110: mol_type = other DNA
ggacgcgaaaagccaccgttaggcgaagatttgagccttgactccaggaaatcttgtccttttgttccaagctcagccagaaagaggagcctgggccacagagtcaagcg

SEQ ID NO: 42712 - DNA, 110 bp, synthetic construct
  source 1..110: mol_type = other DNA
tatagggttcttaacccgctgaaccacaaagagcccccttgaaaggctctttacgaatgttatatcattctttcctcctagcagtgctttttaaaaaatacaatttacaa

SEQ ID NO: 42713 - DNA, 110 bp, synthetic construct
  source 1..110: mol_type = other DNA
ggcaggaagctgggtggagctgagggcagtggtgcctggggaaggctaacccgcgagggtatggattggaaatgaaggcctagaaacagaaagttagggagaaaggagat

SEQ ID NO: 42714 - DNA, 110 bp, synthetic construct
  source 1..110: mol_type = other DNA
attccattatctcatctgtatagattttagcatcaagactactccaaaatacccattcagatgacactatgatttttctgttagtctgacaatatccatttctataaatt

SEQ ID NO: 42715 - DNA, 110 bp, synthetic construct
  source 1..110: mol_type = other DNA
gaagggccacatgagatacttttggccacctttcgaggcaccttacaaatagcttcatagtcagaatctgcaacccgcaaagctgcacagccacggcatctcctgggtcg

SEQ ID NO: 42716 - DNA, 110 bp, synthetic construct
  source 1..110: mol_type = other DNA
catagtcagaatctgcaacccgcaaagctgcacagccacggcatctcctgggtcggttaccagggccttccgaagcatgacagctatgtagctcctgaatctgatcctca

SEQ ID NO: 42717 - DNA, 110 bp, synthetic construct
  source 1..110: mol_type = other DNA
ctactttcaatacatatagagaatctattgaccaccactgctactggtaactctgccaccctggcctaagatactgtggtttctcccccaagttatttgaatagcccctt

SEQ ID NO: 42718 - DNA, 110 bp, synthetic construct
  source 1..110: mol_type = other DNA
ccaccctggcctaagatactgtggtttctcccccaagttatttgaatagccccttatctggtctctccactccaacccttgctcccctatagccaccgagccttttacaa

SEQ ID NO: 42719 - DNA, 110 bp, synthetic construct; identical to SEQ ID NO: 42717
  source 1..110: mol_type = other DNA

SEQ ID NO: 42720 - DNA, 110 bp, synthetic construct; identical to SEQ ID NO: 42718
  source 1..110: mol_type = other DNA

SEQ ID NO: 42721 - DNA, 110 bp, synthetic construct
  source 1..110: mol_type = other DNA
tagagatctggtatgtcagtctcgccatgaatttggggaccagggaccatcctcaggaagggaaacatccttacaaaaccttgcagccttattatctatctctgacatct

SEQ ID NO: 42722 - DNA, 110 bp, synthetic construct
  source 1..110: mol_type = other DNA
cagcccacaacccccctctctcatcctgtctttgaaaatacctgaaagccttctggaagttcaggtaccttaagcactagctgcctagacttcttgtttggccctgcaat

SEQ ID NO: 42723 - DNA, 110 bp, synthetic construct
  source 1..110: mol_type = other DNA
gaagttcaggtaccttaagcactagctgcctagacttcttgtttggccctgcaataaatgatgcactttccttcaccacaattcagggtgaatagattggctttactgtg

SEQ ID NO: 42724 - DNA, 110 bp, synthetic construct
  source 1..110: mol_type = other DNA
cccaggctctatcccacctgacccccaactactctctgacctcattggaagcttcttttcctcttgcacgctccactgtggccacatagcctccttactcttttctgaac

SEQ ID NO: 42725 - DNA, 110 bp, synthetic construct
  source 1..110: mol_type = other DNA
agtgaagagctaaccacctgaactgattagataaaccaaaggcctatccattcggaagtatcttcagttgagtatgccatggcctctctgttcccaccaccagcatcatt

SEQ ID NO: 42726 - DNA, 110 bp, synthetic construct
  source 1..110: mol_type = other DNA
agtagggtgctaaatgcagagttccagaaatgtccacatacccactctgccattgtaggtagtgggatcatagctgggaatacaaaaaatatacctgaactgaggttgct

SEQ ID NO: 42727 - DNA, 110 bp, synthetic construct
  source 1..110: mol_type = other DNA
agaactcagccacatcatcctgatttctgatctacagaactgtaagataaaaatgcacattgctttaaaccactatttttgtaatctgttaatatgcagtaataggaagt

SEQ ID NO: 42728 - DNA, 110 bp, synthetic construct
  source 1..110: mol_type = other DNA
acaggcaagctgcagactgacacagggtttcttagagtccccaggtcttatgacgacttaggagaatcccctacacacttgaatcagctttctttttctgctctaacaca

SEQ ID NO: 42729 - DNA, 110 bp, synthetic construct
  source 1..110: mol_type = other DNA
ttgtcacaatagccacatttgataggtcagtaactacagatggtgagtggctatagtattggactatattaacatttctgtcttgcaaaaccttccattgaacagaataa

SEQ ID NO: 42730 - DNA, 110 bp, synthetic construct
  source 1..110: mol_type = other DNA
gttccaggattggtgccttctcttatggctctggcttggcagcaagtttctattcacttcgagtgtcccaggatgcttctccaggtgagtccagtcttcctatcaggcac

SEQ ID NO: 42731 - DNA, 110 bp, synthetic construct
  source 1..110: mol_type = other DNA
acttcgagtgtcccaggatgcttctccaggtgagtccagtcttcctatcaggcacttttggcgagggtcacctgataaaagaaaccattctggagttcccactgtgacac

SEQ ID NO: 42732 - DNA, 110 bp, synthetic construct
  source 1..110: mol_type = other DNA
gcaggtgtctggacagggacgggggacaagcctctgccacggtggtcagcaggtcctggcacagctttttttcagagacagaacctcgttcatcagcaggcaatggcagg

SEQ ID NO: 42733 - DNA, 110 bp, synthetic construct
  source 1..110: mol_type = other DNA
agccctggggcaccaggcagacttctaaaaagttgatgctatcctctgagaggcccaaggatacagacatgcagacatgcatacagcataatctgccttcaaactgctca

SEQ ID NO: 42734 - DNA, 110 bp, synthetic construct
  source 1..110: mol_type = other DNA
cagtacctcagagagggcggaaggctccttctggaatcaaggcagaagccccattccttgcccaacgtgtaattgaggtcatcgtagctttggggaggtgtgtcgtctgc

SEQ ID NO: 42735 - DNA, 110 bp, synthetic construct
  source 1..110: mol_type = other DNA
cattcatgtgcatcatgcattggctgatgcaaggagcaaaacaagtagctggaattggtaatgtatggtgaatatgctaagtagcaacctatttaaggtctggattctaa

SEQ ID NO: 42736 - DNA, 110 bp, synthetic construct
  source 1..110: mol_type = other DNA
acaggcagtacattaagtctgggagtagctgccaccctcacaaacctaactgtccccacagctggcacaggaggaacagggaattgagatcacatatatcatcctgggaa

SEQ ID NO: 42737 - DNA, 110 bp, synthetic construct
  source 1..110: mol_type = other DNA
ccacagctggcacaggaggaacagggaattgagatcacatatatcatcctgggaacagggtgtctggggggataagactccgctcttcctcataccttctgctgcaacac

SEQ ID NO: 42738 - DNA, 110 bp, synthetic construct
  source 1..110: mol_type = other DNA
tattgcataattgaagagtttggacttcatcttgtagagtgtgcgaagccattacagtgtctttatcaggaggatagcgggattgcatatgtgttttaggaaaatcctat

SEQ ID NO: 42739 - DNA, 110 bp, synthetic construct
  source 1..110: mol_type = other DNA
agtgtctttatcaggaggatagcgggattgcatatgtgttttaggaaaatcctatgtttgttcctgtatgttatttttttttcttttgtcttttttgtctttctagggcc

SEQ ID NO: 42740 - DNA, 110 bp, synthetic construct
  source 1..110: mol_type = other DNA
tatttttttcccactgtacagcaaggggatcaaggagcagcctgagacttttagtcatgcagcttctaaacagatttgaatccaaggtctgtggtgccaaaggtggtaca

SEQ ID NO: 42741 - DNA, 110 bp, synthetic construct; identical to SEQ ID NO: 42740
  source 1..110: mol_type = other DNA

SEQ ID NO: 42742 - DNA, 110 bp, synthetic construct
  source 1..110: mol_type = other DNA
actgtaccccaagacccagccgtcctccgacagagcatcttggacatgactgcagttcttcttgcctgtggcataaacccagagaagagcatccttttccaacaatctca

SEQ ID NO: 42743 - DNA, 110 bp, synthetic construct
  source 1..110: mol_type = other DNA
ttaatgttccctcctcacttttacccacatacatctacagcaaaacaggctcctcatcatcattttctagaagtgtttctgaaaagcagatgacatgactgtatatgact

SEQ ID NO: 42744 - DNA, 110 bp, synthetic construct
  source 1..110: mol_type = other DNA
atcatcattttctagaagtgtttctgaaaagcagatgacatgactgtatatgactctatttagaataaagtgatcttggagttcctgacgtggctcagtggttaatgaat

SEQ ID NO: 42745 - DNA, 110 bp, synthetic construct
  source 1..110: mol_type = other DNA
gtgcagatactctggggaaagagatgttttgatcactgtgccatttgcctctcgtgacttgcaagctggctacacccagatcttgctaaccatccccgtagagtgaggta

SEQ ID NO: 42746 - DNA, 110 bp, synthetic construct
  source 1..110: mol_type = other DNA
gggagaggtgactaagagagaagtggtctcgatgcgggacttaggaagggagaggtttccagtctgttttaggagatcttgggaattgtgatttggactgagtgccactg

SEQ ID NO: 42747 - DNA, 110 bp, synthetic construct
  source 1..110: mol_type = other DNA
tgaaccccagcagagagatacttggttgagaaaggtctctcagcagcaaaatgaaaggtcagagtacatctttggtggtggctgctctgatgggcagctctttccagatg

SEQ ID NO: 42748 - DNA, 110 bp, synthetic construct
  source 1..110: mol_type = other DNA
aggtcagagtacatctttggtggtggctgctctgatgggcagctctttccagatggaagtcatgagctgaagagaagtgggagtcttcgcactgagcctcctggtcaaga

SEQ ID NO: 42749 - DNA, 110 bp, synthetic construct
  source 1..110: mol_type = other DNA
gcctttttcactaccgtctttttcaaaaaattagatttataaggtcaataataaagagaggtgttcacggagtaggttgaacgtgaatggtcctttgaagaattcatgga

SEQ ID NO: 42750 - DNA, 110 bp, synthetic construct
  source 1..110: mol_type = other DNA
gagaggtgttcacggagtaggttgaacgtgaatggtcctttgaagaattcatggaaactgtaggcactgaggaggaaggacggtgtcccagtgtggttgggaagcagcac

SEQ ID NO: 42751 - DNA, 110 bp, synthetic construct
  source 1..110: mol_type = other DNA
ggacatctggtcaccctacttggatggtataggctcagcttctcacagaacaggctgattgggctggctctagagcactgggattttagggaggtggtgatattgataga

SEQ ID NO: 42752 - DNA, 110 bp, synthetic construct
  source 1..110: mol_type = other DNA
atgatggaggataacataagaaagagaatgtatgtatgtgtatgactgggttgctctggtgtacagcagaagttggcaccacgtggtgaatcaactatattttaattaaa

SEQ ID NO: 42753 - DNA, 110 bp, synthetic construct
  source 1..110: mol_type = other DNA
ctggtgtacagcagaagttggcaccacgtggtgaatcaactatattttaattaaagaaaaatccacatgtgtatcagtgatgtgaagaagccagctcattctagttctac

SEQ ID NO: 42754 - DNA, 110 bp, synthetic construct
  source 1..110: mol_type = other DNA
cctttttcctctcctcagctctctgcttttggagaagaaagcacatgacaaaagaaacaaacgtcagggctttgtttaaaaccgtagcatccctagacagtattgtcttt

SEQ ID NO: 42755 - DNA, 110 bp, synthetic construct
  source 1..110: mol_type = other DNA
aacaaacgtcagggctttgtttaaaaccgtagcatccctagacagtattgtctttccaggggatcctatgcaggatgggactggcaccccagaacgcaggtctcaccatg

SEQ ID NO: 42756 - DNA, 110 bp, synthetic construct
  source 1..110: mol_type = other DNA
aattaggtggcagaaggatagctgtgagatcctggggtgcaaggtctaatttctagcatattctatggtcaaccaacaattctcttcgtaataacaaagtcaaaccattt

SEQ ID NO: 42757 - DNA, 110 bp, synthetic construct
  source 1..110: mol_type = other DNA
acatcattgtcccttaaagtgctggtatcacataccagaagtgctggtgttacagttcccttatagcaccccaccaccaaccctgcctgaaaatacagttctagctgcca

SEQ ID NO: 42758 - DNA, 110 bp, synthetic construct
  source 1..110: mol_type = other DNA
ttcccttatagcaccccaccaccaaccctgcctgaaaatacagttctagctgccaaacctcacaatgggggacaaagcagaaaaaaggggggcaatgctgccatgaagaa

SEQ ID NO: 42759 - DNA, 110 bp, synthetic construct
  source 1..110: mol_type = other DNA
caacaacaaaatctaacaatctgatttaaaaatgggcaatggacatcaatacacatgtctccaaaggcaatatacaaaggtcaacaagcatgtgaaaagaggcccaacat

SEQ ID NO: 42760 - DNA, 110 bp, synthetic construct
  source 1..110: mol_type = other DNA
tccctgactgagatcctgggcccaccacatgctactttagagcatgagagaagtgatgacacaatttagtgttggtgttctgcctcaccgaaggcatggcactgtcatca

SEQ ID NO: 42761 - DNA, 110 bp, synthetic construct
  source 1..110: mol_type = other DNA
actttattgacaagctaattcaaatgattattctgagatacaaagccttaatgaagtgttgaatagacatgcaggcatacacacacgtgcagcatgttccctaactacca

SEQ ID NO: 42762 - DNA, 110 bp, synthetic construct; identical to SEQ ID NO: 42761
  source 1..110: mol_type = other DNA

SEQ ID NO: 42763 - DNA, 110 bp, synthetic construct
  source 1..110: mol_type = other DNA
cctcaacatttgccttacaggtctgttttatttgcagtgaaaagctttggatttcttgtcaaaaagcaaatcagcaatttttagaatatctcattaatgtcctttaaatc

SEQ ID NO: 42764 - DNA, 110 bp, synthetic construct
  source 1..110: mol_type = other DNA
taattcaatatatataacaactgagatattactaatataatgcccattttattcatgaagctactgtacctcagagaggttaggtaacttgccaaggaaatgggttttaa

SEQ ID NO: 42765 - DNA, 110 bp, synthetic construct
  source 1..110: mol_type = other DNA
tgaagctactgtacctcagagaggttaggtaacttgccaaggaaatgggttttaaacccagatcctactccaaatccaatggtctttttcagcagattaggttttctaat

SEQ ID NO: 42766 - DNA, 110 bp, synthetic construct
  source 1..110: mol_type = other DNA
tggtgaggcaacgtgaatacaatcgaacagatgtaactcttccatcctctaacagcttaccaactacaggagatgaaatcacacagctaaatcttttgagaagaaattgc

SEQ ID NO: 42767 - DNA, 110 bp, synthetic construct
  source 1..110: mol_type = other DNA
cttaccaactacaggagatgaaatcacacagctaaatcttttgagaagaaattgcataggccagtaaaaatcttcaccatgttataaaaaggcaaaaaatgacgtacagg

SEQ ID NO: 42768 - DNA, 110 bp, synthetic construct
  source 1..110: mol_type = other DNA
aagtggtcatcttccatttggtaggggggttcacatttgtacaacaactcaggaaatgtgcatcagatactgtcatctggttaactcagagaggagctaaagcagaggat

SEQ ID NO: 42769 - DNA, 110 bp, synthetic construct
  source 1..110: mol_type = other DNA
atgtgcatcagatactgtcatctggttaactcagagaggagctaaagcagaggatccggggaagggcctgtcctagaaagccccctttagggtcctgccccatgacattt

SEQ ID NO: 42770 - DNA, 110 bp, synthetic construct
  source 1..110: mol_type = other DNA
ctaccacaagtaatatttcagtgaaatacaatgttcaaacaaagtattttcccagaacctagcagctttacttgcctaatatgttcagggctggttatttgctaccaaag

SEQ ID NO: 42771 - DNA, 110 bp, synthetic construct
  source 1..110: mol_type = other DNA
tagcgtctccatttcctcatccacacattgaaggagctgcacgggaactgcccggtcaccttttctctgtgaagccttcaggaactgatttgcataagggtcgagaagct

SEQ ID NO: 42772 - DNA, 110 bp, synthetic construct
  source 1..110: mol_type = other DNA
tcaccttttctctgtgaagccttcaggaactgatttgcataagggtcgagaagctagtgggaggctccccaggaccccaatctaacttccaaccagagcaggtgttggct

SEQ ID NO: 42773 - DNA, 110 bp, synthetic construct
  source 1..110: mol_type = other DNA
atcaaagaagaaattcatcagcaagtccaaaatgtgggcgatagctcagagtccgtgactagagatgtcgacccagggagtgtcagtagagaggtatggtggatgccgtg

SEQ ID NO: 42774 - DNA, 110 bp, synthetic construct
  source 1..110: mol_type = other DNA
tgtatctttaactaggctcctggagattctggggtggggggggtccacagggcacacagagaaatgcttatgggaaactacatagcatctgtctgctcacaaaggtcatt

SEQ ID NO: 42775 - DNA, 110 bp, synthetic construct
  source 1..110: mol_type = other DNA
acagagaaatgcttatgggaaactacatagcatctgtctgctcacaaaggtcattccgtatagccagccaggagatgttgatacctgttcaccttctcaaagagatcagg

SEQ ID NO: 42776 - DNA, 110 bp, synthetic construct
  source 1..110: mol_type = other DNA
cccctcactgacatctttggaggtgaatggtagtcgccatcctggttgaaagaacagcttaaaacaagtcctatttccacttgaggcaacatgcagattgattcctgctt

SEQ ID NO: 42777 - DNA, 110 bp, synthetic construct
  source 1..110: mol_type = other DNA
attatttgtattttagaatctttaatttctgactgagaacagtaagtaatagacacacatgctcccaggaaatgatacttacaggtgactcaacagggggtctttgaaaa

SEQ ID NO: 42778 - DNA, 110 bp, synthetic construct
  source 1..110: mol_type = other DNA
cacatgctcccaggaaatgatacttacaggtgactcaacagggggtctttgaaaagatggcacctacctgtcgtcatgtgcaaagagagacttgtggcagtccccaaagt

SEQ ID NO: 42779 - DNA, 110 bp, synthetic construct; identical to SEQ ID NO: 42777
  source 1..110: mol_type = other DNA

SEQ ID NO: 42780 - DNA, 110 bp, synthetic construct; identical to SEQ ID NO: 42778
  source 1..110: mol_type = other DNA

SEQ ID NO: 42781 - DNA, 110 bp, synthetic construct
  source 1..110: mol_type = other DNA
tccctctttccacaactttctgttccagtggcttaatcactgggttcctgcaccaattttctatgcagcaccaccgcctccaggtttttcatttaaaagtcgtaatacga

SEQ ID NO: 42782 - DNA, 110 bp, synthetic construct
  source 1..110: mol_type = other DNA
attttctatgcagcaccaccgcctccaggtttttcatttaaaagtcgtaatacgacctaattttatcagatgcactatcccaaagcccttgaaaaagcgaaactgttttc

SEQ ID NO: 42783 - DNA, 110 bp, synthetic construct
  source 1..110: mol_type = other DNA
gcttaagcaaatgggtgtgcctgtgttccaataggactttgtttatggaggccggaatttaaattttaataattttcaagtacattaaaatactatttctctttactttc

SEQ ID NO: 42784 - DNA, 110 bp, synthetic construct
  source 1..110: mol_type = other DNA
ggcttagcaggatcactaaaggttgctcactaacagttgctcacttacaattccagttgctacctaagtgcatctccctgaggtcagctatttacatcatattcagcgca

SEQ ID NO: 42785 - DNA, 110 bp, synthetic construct
  source 1..110: mol_type = other DNA
gggaggtgatgagagtgagctgatatctccaactcttcttccaagagtcctgataccatcatggggacctatccccatgctctcacctaaacccaattacctcccaatac

SEQ ID NO: 42786 - DNA, 110 bp, synthetic construct
  source 1..110: mol_type = other DNA
atgcaagctaacgcgtaggtgcaggcactgtgctagggcgtcacgagtgtgaatttgtttaacctcacagcagcttgatgacgaggtggcgatggctgtccccatgtcag

SEQ ID NO: 42787 - DNA, 110 bp, synthetic construct
  source 1..110: mol_type = other DNA
tgtttaacctcacagcagcttgatgacgaggtggcgatggctgtccccatgtcagaggaggacacaggggtgctgcccacatcacatgttagtgggaggcagtgctggga

SEQ ID NO: 42788 - DNA, 110 bp, synthetic construct
  source 1..110: mol_type = other DNA
gctttcgctccctctgaccctgccagctccatcatcatcccttattctgttcctgctcctgcagcccaggacccaggcctttacacatacaatggaaggcagcgatcaaa

SEQ ID NO: 42789 - DNA, 110 bp, synthetic construct
  source 1..110: mol_type = other DNA
attctgcctccggctccagggcgcaagcaaccacagtggaagctcagtcatcagctcctgaatgtatgaaggtacttactccccctccttcctgctctgcccaaacaaca

SEQ ID NO: 42790 - DNA, 110 bp, synthetic construct
  source 1..110: mol_type = other DNA
tcctgaatgtatgaaggtacttactccccctccttcctgctctgcccaaacaacaaaatttcctgggctaagtcaacagccagctgtcccttttcacctgcagagccatc

SEQ ID NO: 42791 - DNA, 110 bp, synthetic construct
  source 1..110: mol_type = other DNA
ggcaaccttatttcagcttagtcagccggcttcatttttgtttttaactaatcagtttcgtcagtgtctttggcctccatttattttcgttttttgaaaatgtttataga

SEQ ID NO: 42792 - DNA, 110 bp, synthetic construct
  source 1..110: mol_type = other DNA
cctggggacgtggcaatgaacaagcagcagagccttggctctcacagagcttatagcgtggagagggctcgtggagggaaaggtgctgagaccctttctgagccatccat

SEQ ID NO: 42793 - DNA, 110 bp, synthetic construct
  source 1..110: mol_type = other DNA
attttctctctcaggaactgttgttatttggatttggatttttttcttgggaactgcctttggccacttaaatcaagaaatctgtgaaaatctaaaagcaaggttctatt

SEQ ID NO: 42794 - DNA, 110 bp, synthetic construct
  source 1..110: mol_type = other DNA
gcctttggccacttaaatcaagaaatctgtgaaaatctaaaagcaaggttctattttaaaataaaacaaaaggggaatctaaaatatagcacaggagatccggttgtggc

SEQ ID NO: 42795 - DNA, 110 bp, synthetic construct
  source 1..110: mol_type = other DNA
gacttgaaccacatggtatcagtctgaccaccagaggggatggagaactaagactggccaagtttatgtgatgaacttctaacaacaacaacaacaacaaaaaccaatgg

SEQ ID NO: 42796 - DNA, 110 bp, synthetic construct
  source 1..110: mol_type = other DNA
ttcagagtgggaggatatgtgaataatacatgtgggaagctaagagtgcccatgggccagttggaggaatccacaggtgaggctttcctggcaactcatcggtgggctcc

SEQ ID NO: 42797 - DNA, 110 bp, synthetic construct
  source 1..110: mol_type = other DNA
ggtagatcaggcaagcaacaccgcagagaggatgcaaggtaggttcttccattcctgcacctccgggagatgctccactgtggtctcccgccccaaaacggagcccgacg

SEQ ID NO: 42798 - DNA, 110 bp, synthetic construct
  source 1..110: mol_type = other DNA
caaattgcagtgagtcagagcaacttcttcctcctcaacccccaccaaccccagactgatggccctaactccagtctttcctcggtgtcagtcttcaagagtttccatta

SEQ ID NO: 42799 - DNA, 110 bp, synthetic construct
  source 1..110: mol_type = other DNA
ctgatggccctaactccagtctttcctcggtgtcagtcttcaagagtttccattaattcctgtgagcatttgtacgcatcctccctgacttgctaatgaaggtggtcctc

SEQ ID NO: 42800 - DNA, 110 bp, synthetic construct
  source 1..110: mol_type = other DNA
aatgtggttactccattgggaagatgtaaggagcacatttaattcattcttgaggggcaagaaaagcttcccaagggaagtagaaccaaacagagatctgaggagtgggt

SEQ ID NO: 42801 - DNA, 110 bp, synthetic construct
  source 1..110: mol_type = other DNA
ggcaagaaaagcttcccaagggaagtagaaccaaacagagatctgaggagtgggtgggaattggtcaggtgaaggaggctgagtatggggaattagaaatgaaactttaa

SEQ ID NO: 42802 - DNA, 110 bp, synthetic construct
  source 1..110: mol_type = other DNA
tattttcctttcctgttatacatgtgccctatttctgaaacactgggattcaacagcgttttggggtcttgcttagaaagctaatcatcatttataaagagtgccattat

SEQ ID NO: 42803 - DNA, 110 bp, synthetic construct
  source 1..110: mol_type = other DNA
cacggatggtgaggtgccgaatgcagctaactgacagcagttgcaggaatggttctctcttccggttggaccatgtctccgaagcatctattatggatgccaatttaatg

SEQ ID NO: 42804 - DNA, 110 bp, synthetic construct
  source 1..110: mol_type = other DNA
gatgtgaggctccccgatggtttccccagcctacggtggtctgggcatcccaggttgaccagggagccaacttctcagaagtatccaacaccagctttgagctgaaccct

SEQ ID NO: 42805 - DNA, 110 bp, synthetic construct
  source 1..110: mol_type = other DNA
tgaccagggagccaacttctcagaagtatccaacaccagctttgagctgaaccctgagaatgtcaccatgaaggttgtgtccgtgctctacaacgtcacaatcaacacca

SEQ ID NO: 42806 - DNA, 110 bp, synthetic construct
  source 1..110: mol_type = other DNA
gtcttagggcagctggtctgctgatggatggggctgtgtcactgcccaattagttgcttggtctgaagcatcccagcactggtacttagagctgttgagtggggccaggt

SEQ ID NO: 42807 - DNA, 110 bp, synthetic construct
  source 1..110: mol_type = other DNA
gcttggtctgaagcatcccagcactggtacttagagctgttgagtggggccaggtcttagtgctaatgagctacagggagaattccacaacggtgcctgccagtaccagt

SEQ ID NO: 42808 - DNA, 110 bp, synthetic construct; identical to SEQ ID NO: 42806
  source 1..110: mol_type = other DNA

SEQ ID NO: 42809 - DNA, 110 bp, synthetic construct; identical to SEQ ID NO: 42807
  source 1..110: mol_type = other DNA

SEQ ID NO: 42810 - DNA, 110 bp, synthetic construct
  source 1..110: mol_type = other DNA
tgttttatacaggcatgggggtagccagatccttaaccactaggctactggggagctcttggtcccttactttttgatatatagcttttaaattcctccctgagctacat

SEQ ID NO: 42811 - DNA, 110 bp, synthetic construct
  source 1..110: mol_type = other DNA
ctcttggtcccttactttttgatatatagcttttaaattcctccctgagctacattatttcgatctctcccttggagaataaaagcctcctttccatctatgcacttgtc

SEQ ID NO: 42812 - DNA, 110 bp, synthetic construct
  source 1..110: mol_type = other DNA
cacccacttttccggctggtttcacacatacacaggacacagtgagttcaaagttgtatgtgttagccacacaacccagctctctatgacgttacctttccttcctggtc

SEQ ID NO: 42813 - DNA, 110 bp, synthetic construct
  source 1..110: mol_type = other DNA
aggatgcctttccaggttctttgtattcccacccagagcgctgcgttaagcaatccctcttcatccttagacttttttcatgatgacacatttctgccactccagtaatc

SEQ ID NO: 42814 - DNA, 110 bp, synthetic construct
  source 1..110: mol_type = other DNA
cctcttcatccttagacttttttcatgatgacacatttctgccactccagtaatcacctgtttctggtggaagagctaaagcacagttaagtggtaggtggggaaattct

SEQ ID NO: 42815 - DNA, 110 bp, synthetic construct
  source 1..110: mol_type = other DNA
gcaagtggcaagttggtgccacgttaagtagcccaaacagcccgtgaaagatgtgaggtgtctctgggtcccctgcaaagggcagggtggggaatgtaggtggcctcttc

SEQ ID NO: 42816 - DNA, 110 bp, synthetic construct
  source 1..110: mol_type = other DNA
aaccaaccaaggatctgctccctaatctggctcccaggacagcctgctcgtatacacacttcctcctaaagcttcggcctgctgcaaagcaaacccactcccatccccgc

SEQ ID NO: 42817 - DNA, 110 bp, synthetic construct
  source 1..110: mol_type = other DNA
tgatgctgtcagaagagctttttacagattcccgcatccctcatctcatggaggggtcacatcatgtccccagcttgctccctggctgcggaacctggggagataaggtc

SEQ ID NO: 42818 - DNA, 110 bp, synthetic construct
  source 1..110: mol_type = other DNA
gaggatggaggatgtcatgtggtagttggaagggctcgttcatgagcacaggtgagtcctcctggaatccccaaagtaaccccggagagccaacaagagcactgttaggg

SEQ ID NO: 42819 - DNA, 110 bp, synthetic construct
  source 1..110: mol_type = other DNA
agcgagtccccaaggaggtttgttcttgtgttcagtttctgtagctgttatttaatgtcagccgttttagttatagcacttcgtcctcccccccctccaaagagtcaaaa

SEQ ID NO: 42820 - DNA, 110 bp, synthetic construct
  source 1..110: mol_type = other DNA
tgtcagccgttttagttatagcacttcgtcctcccccccctccaaagagtcaaaagtgtctcgtttgttttccagtgttgcttgatgaaaattcatgggtaccgctgact

SEQ ID NO: 42821 - DNA, 110 bp, synthetic construct
  source 1..110: mol_type = other DNA
cctcaagtcaagggactggccgatgagaagacagttccactcacctaactgacgtaaagaagaggaggctggcgggaatgcaggtaggacaccagatgtggtgaggggag

SEQ ID NO: 42822 - DNA, 110 bp, synthetic construct
  source 1..110: mol_type = other DNA
agctggccacactcacggaggctagcgaattggatcaatagctgaagaggtgcggggtccaagataaaccccttcagaaggctccttggaggagtgctctcctggacctg

SEQ ID NO: 42823 - DNA, 110 bp, synthetic construct
  source 1..110: mol_type = other DNA
tttgctagaaccccagcaggacctgtgtgtttgtgatctaggaagcagtgatgcaggggacataggcaaacagggtgctatgttcctcagctgctaggcttgggcactca

SEQ ID NO: 42824 - DNA, 110 bp, synthetic construct
  source 1..110: mol_type = other DNA
ggggacataggcaaacagggtgctatgttcctcagctgctaggcttgggcactcaagcccaggacacaagaagacagtgccggctacagagtagaggaaagggacgtgag

SEQ ID NO: 42825 - DNA, 110 bp, synthetic construct
  source 1..110: mol_type = other DNA
gctcacccacaatgaggagggcaggcggcttccctgattcaaatgctaacctctccttgaaacagataagctcagaaaggacattcatttcattcattatctgggtacct

SEQ ID NO: 42826 - DNA, 110 bp, synthetic construct
  source 1..110: mol_type = other DNA
tggcgttgccgcagcagtggcttaggttgcaactgcagcttggatctggtccctggcctgggaactccatatcccatagggtcggaaaaaaaaaagaggctaggctagga

SEQ ID NO: 42827 - DNA, 110 bp, synthetic construct
  source 1..110: mol_type = other DNA
gcctgggaactccatatcccatagggtcggaaaaaaaaaagaggctaggctaggatgagaggtcagagcttaagatgatgtggcagagacaacagctctgcagagataca

SEQ ID NO: 42828 - DNA, 110 bp, synthetic construct
  source 1..110: mol_type = other DNA
tttagatctgccccagagcaacccaagattaggtctgcatcatgtcctttcaagcatgtgaagggagcccggtcagtctcttcttctccttattgaaaagctccagttct

SEQ ID NO: 42829 - DNA, 110 bp, synthetic construct
  source 1..110: mol_type = other DNA
ccgcgggtccgccgcccagaagttgagcggactttcagagcttccgcagcctgtgagctcgtccggggcgggccgccccgggcttcggaaagcgcagtctgccctcccag

SEQ ID NO: 42830 - DNA, 110 bp, synthetic construct
  source 1..110: mol_type = other DNA
gactctgacagtgtcccgccccatgtcctccctgccctccttccgcagccccagtgccctgctcgctccctgggctcattccacagcagatctgcttagcttccttgctc

SEQ ID NO: 42831 - DNA, 110 bp, synthetic construct
  source 1..110: mol_type = other DNA
gccctgctcgctccctgggctcattccacagcagatctgcttagcttccttgctcctttcctgattgctcatgcgcagtgattgagctttgactggatgagaccagtcca

SEQ ID NO: 42832 - DNA, 110 bp, synthetic construct
  source 1..110: mol_type = other DNA
cagcaaatgtcatatggatgtcagccttcgtggggctgcattctaatgggcagagatagacactaaacacgataaataaggaacgtacaatactaggggctggagaggag

SEQ ID NO: 42833 - DNA, 110 bp, synthetic construct
  source 1..110: mol_type = other DNA
atagacactaaacacgataaataaggaacgtacaatactaggggctggagaggagaattaaacaaggaaagggtagggactgtcagagcggggaggacagcctcactggt

SEQ ID NO: 42834 - DNA, 110 bp, synthetic construct
  source 1..110: mol_type = other DNA
ggggagaagtctgggatctaaaggctcttgcccctcctctttggcacatggaggcacatttggtacagctactggcctacccgttctcctcagtcacatagtatcattcc

SEQ ID NO: 42835 - DNA, 110 bp, synthetic construct
  source 1..110: mol_type = other DNA
acatttggtacagctactggcctacccgttctcctcagtcacatagtatcattccaaggattaatattcatattattattaatcatctcccaactcagaggtagatcata

SEQ ID NO: 42836 - DNA, 110 bp, synthetic construct
  source 1..110: mol_type = other DNA
agtaggatatcttttttgactgtttccattctgtcttgttgaaggttgttcagcaggtggttgtaagagaaagtgagctccagtccttcaattctgccatcttaatccca

SEQ ID NO: 42837 - DNA, 110 bp, synthetic construct; identical to SEQ ID NO: 42836
  source 1..110: mol_type = other DNA

SEQ ID NO: 42838 - DNA, 110 bp, synthetic construct
  source 1..110: mol_type = other DNA
gcgtgggactgtgggttgtgttttgctcggtagtgcacacccagcaggcagcacggggtccatcaccccagctgcactctgccggctgtttattaaaaaaccatagtcaa

SEQ ID NO: 42839 - DNA, 110 bp, synthetic construct
  source 1..110: mol_type = other DNA
acgtcagaatcacctgtaaggtgtatccaaacagatggctggttctcccttccctccccagagtttctgattcagcaggtctgaatcagaatgcatgttttttttgtttg

SEQ ID NO: 42840 - DNA, 110 bp, synthetic construct
  source 1..110: mol_type = other DNA
ccccagagtttctgattcagcaggtctgaatcagaatgcatgttttttttgtttgtttgttttttgtttttttttttttgttgttgttgtctttttgctatttcttgggc

SEQ ID NO: 42841 - DNA, 110 bp, synthetic construct
  source 1..110: mol_type = other DNA
ttggttacgctgcagtgaacgacgtgtccaaccttccagtggcttttacgatgcgccttttccacctccagctctacagctcagaaaagtctgcgccgcagctacaatct

SEQ ID NO: 42842 - DNA, 110 bp, synthetic construct
  source 1..110: mol_type = other DNA
tcagcctacttgtgtttagacctgcatagttgtaaatggcggcaattaatacccgttatctctttttgcggacaaaggggcccatgagtgggataatgcagccctggggc

SEQ ID NO: 42843 - DNA, 110 bp, synthetic construct
  source 1..110: mol_type = other DNA
agcgatctttgagaatagagctagtcctagaacccagagggctagggtggatatatagagcccaatgacactctctgagccccagagcgaggccatgcctcaagtccaag

SEQ ID NO: 42844 - DNA, 110 bp, synthetic construct
  source 1..110: mol_type = other DNA
aatgctgtggcacaagtttccagttcctttgcttcccaaagctagtgctgggattgttctgcccctgtccaggcagtaaggcatgcattgtctgcagggaatttaaaaca

SEQ ID NO: 42845 - DNA, 110 bp, synthetic construct
  source 1..110: mol_type = other DNA
tggaacagttgaagaagtgctcatattccctgttgggtggagctcagctcacctgagacaaaggggcaggaggtgagtctggaaagaccagacaaagagacattgaggtg

SEQ ID NO: 42846 - DNA, 110 bp, synthetic construct
  source 1..110: mol_type = other DNA
accacgtgatcccagtggacaccacctggagcaggggactcacggctgagcccggccctgcttcctgagctactaaagcgcaatacacaataaaacggttgctgtttaag

SEQ ID NO: 42847 - DNA, 110 bp, synthetic construct
  source 1..110: mol_type = other DNA
ttgggtgactgcccaaggtcacacagccagtttgtcctccctaattcttacaggaggtcaatgaacttttaggtgattgaaaaattaaaatacaacagttcagagctccc

SEQ ID NO: 42848 - DNA, 110 bp, synthetic construct
  source 1..110: mol_type = other DNA
ggtcaatgaacttttaggtgattgaaaaattaaaatacaacagttcagagctccctggtggctcagtgggttagggatctggcactgtcactgctgtggcctgagtcact

SEQ ID NO: 42849 - DNA, 110 bp, synthetic construct
  source 1..110: mol_type = other DNA
gtctgagacatggcacagggtggcgcatgtaaggaaggcaccacacaccccaaggacctgtgctcacctgtgtaggtcaggcggagggctgaagccccaggatggatact

SEQ ID NO: 42850 - DNA, 110 bp, synthetic construct
  source 1..110: mol_type = other DNA
acctgtgctcacctgtgtaggtcaggcggagggctgaagccccaggatggatactagctaagctaggactgagctgtaagagtctgataccttccaacccgagcatgctg

SEQ ID NO: 42851 - DNA, 110 bp, synthetic construct
  source 1..110: mol_type = other DNA
atatggaacacaatgatttcagttttctgctacttttaataggcattatgaagatgcagtagtcaatcaagaatctttttttttgtgtgtgtgtgtgttttagggccgca

SEQ ID NO: 42852 - DNA, 110 bp, synthetic construct
  source 1..110: mol_type = other DNA
atttcagttttctgctacttttaataggcattatgaagatgcagtagtcaatcaagaatctttttttttgtgtgtgtgtgtgttttagggccgcacctgcggcatatgga

SEQ ID NO: 42853 - DNA, 110 bp, synthetic construct
  source 1..110: mol_type = other DNA
agggcacaaataaacaaagccggttcaagacaccagaggaatttcattatcagctggtggtgagatgggatgggcaaaatatgggcaagcaggacctgtggtcccaaggc

SEQ ID NO: 42854 - DNA, 110 bp, synthetic construct
  source 1..110: mol_type = other DNA
ggtggtgagatgggatgggcaaaatatgggcaagcaggacctgtggtcccaaggcggggattctgcttacaaatgtcctggatggtaggctgggtcgtagggatgcatat

SEQ ID NO: 42855 - DNA, 110 bp, synthetic construct
  source 1..110: mol_type = other DNA
ctggtctcaacaactgtggtacaataaagtcttactaaggtttatggtgtagacttcatcactcacttaacggttgagagatcagaagctccagctatcatctcagggac

SEQ ID NO: 42856 - DNA, 110 bp, synthetic construct
  source 1..110: mol_type = other DNA
tcatcactcacttaacggttgagagatcagaagctccagctatcatctcagggacacctcatcaaagggcagtcttcctatgaagctcctggggagaacggacatggaga

SEQ ID NO: 42857 - DNA, 110 bp, synthetic construct
  source 1..110: mol_type = other DNA
aaaaaaaaaggaaaaaaaagtataacttttggactcattattatggtttccatcgctgctgaaattccttcctgcttcgtgtcctccttcccattacatgctttagcata

SEQ ID NO: 42858 - DNA, 110 bp, synthetic construct
  source 1..110: mol_type = other DNA
ttgtccagccaaggcccctgagcccccagccccgttaaccttgccttcggctccagcttcaagacttctttgtgttcccagcttcccctaatctcagcgcaaactgttct

SEQ ID NO: 42859 - DNA, 110 bp, synthetic construct
  source 1..110: mol_type = other DNA
tgtacagctcagaaaaatctactccatgttctgtgataacctacatgggaaaagaatctgaaaagaaggcatgggagttcccgtcgtggcgcagcagaaatgaatccaac

SEQ ID NO: 42860 - DNA, 110 bp, synthetic construct; identical to SEQ ID NO: 42859
  source 1..110: mol_type = other DNA

SEQ ID NO: 42861 - DNA, 110 bp, synthetic construct
  source 1..110: mol_type = other DNA
tctgtttctctttatccttgtcttcccctctccctccactcaactgtttccattcatgtccatgcttcctccattcagctcaaggtagcagataaggagggagccaaggc

SEQ ID NO: 42862 - DNA, 110 bp, synthetic construct
  source 1..110: mol_type = other DNA
cttggatcaaaagggtctcgggaaaggctgtgagctttgggcccagctgtgcacgcgacatcacagggctgagctgctcggtctcgttaggggagaaacaagcacatagg

SEQ ID NO: 42863 - DNA, 110 bp, synthetic construct
  source 1..110: mol_type = other DNA
cgacatcacagggctgagctgctcggtctcgttaggggagaaacaagcacatagggccctttacactcttgaaagtgaaccaacatctcgccttacatttcactgcgctg

SEQ ID NO: 42864 - DNA, 110 bp, synthetic construct
  source 1..110: mol_type = other DNA
aggggaactcaacacaaaatcgattgtcaaataaacttccctggagtcagacccggcccgggcctctctggtcttctccgtagcatctcaacgtctcggtggaggaagcg

SEQ ID NO: 42865 - DNA, 110 bp, synthetic construct
  source 1..110: mol_type = other DNA
ttccggaagaaccaagtggcccctgggctgaggtttgtgtgccgtaggtctttgtgcaagagtgccctccgcttccaccgacggccctgcagggcagatccccagctcag

SEQ ID NO: 42866 - DNA, 110 bp, synthetic construct
  source 1..110: mol_type = other DNA
gcaagagtgccctccgcttccaccgacggccctgcagggcagatccccagctcagcacggcccaacctcctctctgcccctctgtctggggcatgctcccatgggcaggc

SEQ ID NO: 42867 - DNA, 110 bp, synthetic construct
  source 1..110: mol_type = other DNA
ggcgtcattgttttgttccaacatgggtaacccttaagcttgtttacagaccagggacaagaaatcttaaatttcaaaactgaagaagggcggggtaacttgggggacag

SEQ ID NO: 42868 - DNA, 110 bp, synthetic construct
  source 1..110: mol_type = other DNA
cagcaccaagacgcaggttctatccctgatccggcaccgtgggttaaaggatccagcattgccacaggtgtggcgtagatcagctgtggcttggatccgatctctggccc

SEQ ID NO: 42869 - DNA, 110 bp, synthetic construct
  source 1..110: mol_type = other DNA
gcattgccacaggtgtggcgtagatcagctgtggcttggatccgatctctggcccagggactcatatgctgcagcgcagacaaaaaagaaaaaaaaaaggtcccctatct

SEQ ID NO: 42870 - DNA, 110 bp, synthetic construct
  source 1..110: mol_type = other DNA
tccctttgggctccatgtctgtgtgttctattctctgtagcttttcaaccagtccgggtcagctccctaaacacacatcctcggcctgcatctcaggatgggccctagtt

SEQ ID NO: 42871 - DNA, 110 bp, synthetic construct
  source 1..110: mol_type = other DNA
gggtcagctccctaaacacacatcctcggcctgcatctcaggatgggccctagttattcagcctatgatgcccttacttggtttcgccctactcatttttccagggcccg

SEQ ID NO: 42872 - DNA, 110 bp, synthetic construct
  source 1..110: mol_type = other DNA
gcttttgtgtcctttaggtagtatagcattaacctttgttagctttgttgcttcctgacatgacaagatgtgtcaagcttataccatatgttgtctgccccacacctagc

SEQ ID NO: 42873 - DNA, 110 bp, synthetic construct
  source 1..110: mol_type = other DNA
cagaaagcagcagatgctacaaatcagggtcccccgccccctgccgccgcccccacttagagaactatttttactaacacaccgtggacttcatctatgttccacctgct

SEQ ID NO: 42874 - DNA, 110 bp, synthetic construct
  source 1..110: mol_type = other DNA
cttagagaactatttttactaacacaccgtggacttcatctatgttccacctgcttcctagctgtgagcagcatagatcctgccctttaaggccaatgtgcgtcctcttc

SEQ ID NO: 42875 - DNA, 110 bp, synthetic construct
  source 1..110: mol_type = other DNA
aagccagctatctaccctctagcattctaatcaagggtagcctggctgatttcatgcagggctatgttctaaagccagtgtatgagtagtgaagtgtggccaaatttacc

SEQ ID NO: 42876 - DNA, 110 bp, synthetic construct; identical to SEQ ID NO: 42875
  source 1..110: mol_type = other DNA

SEQ ID NO: 42877 - DNA, 110 bp, synthetic construct
  source 1..110: mol_type = other DNA
actttgaaactgaccaaaacatcattgagaccttatgaaagtaaaggagatgctgagacaagtgtcaagggaaagggccgtacaaacaggcttaacctcagagggtctgc

SEQ ID NO: 42878 - DNA, 110 bp, synthetic construct
  source 1..110: mol_type = other DNA
agacaagtgtcaagggaaagggccgtacaaacaggcttaacctcagagggtctgcagaagaaactttagctttagttgactcaaggctgtttggtccaggctctggagca

SEQ ID NO: 42879 - DNA, 110 bp, synthetic construct
  source 1..110: mol_type = other DNA
aggctggctcgctttttagggggaggtctgcttttggctgaaaagcgctctgcaagagttgtaacaaaatcatctcatggggcctgtcacggtagatctgatttcatgta

SEQ ID NO: 42880 - DNA, 110 bp, synthetic construct
  source 1..110: mol_type = other DNA
gagttgtaacaaaatcatctcatggggcctgtcacggtagatctgatttcatgtaaagactgccttagctctaatggctggcctcgatttatcccctggcggcttcctgc

SEQ ID NO: 42881 - DNA, 110 bp, synthetic construct
  source 1..110: mol_type = other DNA
ggttcaaaaccatttcatttgtgatattatttcctctgctgagctttcaactttctaaactcctctgaggctggaatagctctggggctgtgagtgctcttgggggagta

SEQ ID NO: 42882 - DNA, 110 bp, synthetic construct
  source 1..110: mol_type = other DNA
taaactcctctgaggctggaatagctctggggctgtgagtgctcttgggggagtaacgcatcgctcctctgcagagcccaccactggctgcagagcctggagatgcaact

SEQ ID NO: 42883 - DNA, 110 bp, synthetic construct
  source 1..110: mol_type = other DNA
ccagatttgacctgtgggctgtagtttgctgactcctggtttaagctatcttatctaggactttctgcttgacataactgagtacactctgaaggatacaaatactagat

SEQ ID NO: 42884 - DNA, 110 bp, synthetic construct
  source 1..110: mol_type = other DNA
ggttccctcctctggggaatttctttaattcacctgatttctccaagcttcagcttctgtgtacataaaggggaaataatagtacgcacttcatgagggaacattctgac

SEQ ID NO: 42885 - DNA, 110 bp, synthetic construct
  source 1..110: mol_type = other DNA
caacaaccagttgatgctcccaggctcaaggggtggccaaacctcctacctcagtctatcctcctctgcaccccctccccaactccccagagagaacgctggtgctgagc

SEQ ID NO: 42886 - DNA, 110 bp, synthetic construct
  source 1..110: mol_type = other DNA
ctgtggttcattccaaagcttaaaagccaaagggcattctcttttatgctttcatatttcctctatcatctataaaaatatcagcctttccctatctaccatccttactc

SEQ ID NO: 42887 - DNA, 110 bp, synthetic construct
  source 1..110: mol_type = other DNA
tgaaagtagacttagattagctgcaagtgtataacacaaaatctagggcaaccgcttttaaaaaagtgaaaaaaaaaagaagtgtaactatacgttaagaaactagaaaa

SEQ ID NO: 42888 - DNA, 110 bp, synthetic construct
  source 1..110: mol_type = other DNA
tggtggatataatggatttggaggtgatggtggcaactatggtggtggtcctggttatagtagtagaggaagctacggtggcagtggaccaggatatgggaaccagggtg

SEQ ID NO: 42889 - DNA, 110 bp, synthetic construct
  source 1..110: mol_type = other DNA
tatagtagtagaggaagctacggtggcagtggaccaggatatgggaaccagggtggtggatatggtggcagtggtggaggatatgatggttacaatgaaggaagaaattt

SEQ ID NO: 42890 - DNA, 110 bp, synthetic construct; identical to SEQ ID NO: 42888
  source 1..110: mol_type = other DNA

SEQ ID NO: 42891 - DNA, 110 bp, synthetic construct; identical to SEQ ID NO: 42889
  source 1..110: mol_type = other DNA

SEQ ID NO: 42892 - DNA, 110 bp, synthetic construct
  source 1..110: mol_type = other DNA
agtcttatagcctctacaatgaaaatggacaagagaaagtagagatgagaatgaatggtttaagcaatcaaaagtgcctgccgtgatggccttaacaacagctttaatgg

SEQ ID NO: 42893 - DNA, 110 bp, synthetic construct
  source 1..110: mol_type = other DNA
tggtttaagcaatcaaaagtgcctgccgtgatggccttaacaacagctttaatggtgtggtgaaactgaaataaggttataaaggattggagttcccggttgtggctcag

SEQ ID NO: 42894 - DNA, 110 bp, synthetic construct
  source 1..110: mol_type = other DNA
gcatgggtgtatagacgcagccgatattgtgtcaataagcccagactcctgcacttctaggcaaagtttctcaggctcagggacaggagtaaacctgccatcctgtctat

SEQ ID NO: 42895 - DNA, 110 bp, synthetic construct
  source 1..110: mol_type = other DNA
tctaggcaaagtttctcaggctcagggacaggagtaaacctgccatcctgtctatgtagtatggctacagcaatgaacatggtactagaagaggtatttccaataaaatg

SEQ ID NO: 42896 - DNA, 110 bp, synthetic construct
  source 1..110: mol_type = other DNA
agtattgttgtcttaacaatcttaacgtctagtgaaagtattattttgatttcagggtgtaattgctgccatgagagatggttttggtttcatcaagtgtgtggatcgtg

SEQ ID NO: 42897 - DNA, 110 bp, synthetic construct; identical to SEQ ID NO: 42896
  source 1..110: mol_type = other DNA

SEQ ID NO: 42898 - DNA, 110 bp, synthetic construct
  source 1..110: mol_type = other DNA
cctaagacaagctttagcatgtctctgattttcacaggagctactctgaaattctcttggtaggttacagtggaagattttgaaatggtttgcaaaggtctttatcgggc

SEQ ID NO: 42899 - DNA, 110 bp, synthetic construct
  source 1..110: mol_type = other DNA
aacagatttctgattattaactctgtatcccttaactttaccgaattcattgatgagctgtagtagtttttttcggtggtgtctttaggattttctgtgtgtagcatcat

SEQ ID NO: 42900 - DNA, 110 bp, synthetic construct
  source 1..110: mol_type = other DNA
gtttggccttaaaagtagcttagaggcatcctaaaagaggcagaatgttgctttgtgaatttagtcagtaatctctcttagcctcacatattttcctattaatccaaatt

SEQ ID NO: 42901 - DNA, 110 bp, synthetic construct
  source 1..110: mol_type = other DNA
gattactatatagctttgtaatatagtctgaaagcataaaatgtgatggcgtccacctttgttcttctttctcaagattgctttgatgagttcctgtcgtgactcagtgg

SEQ ID NO: 42902 - DNA, 110 bp, synthetic construct; identical to SEQ ID NO: 42901
  source 1..110: mol_type = other DNA

SEQ ID NO: 42903 - DNA, 110 bp, synthetic construct
  source 1..110: mol_type = other DNA
aattgtttttgaaaatgtaaagctagaagtaaaagtgagtttaatgatcccagctgaaaatgtatatactataaaaatcttctaagaggaattcctggagttcctgctgt

SEQ ID NO: 42904 - DNA, 110 bp, synthetic construct
  source 1..110: mol_type = other DNA
cttctatattatctttgcagctttataattttgttctacatggtagatctgtagctcttttggggttgctttttgtgaaaaatgctagttactttaaaaggggagaataa

SEQ ID NO: 42905 - DNA, 110 bp, synthetic construct
  source 1..110: mol_type = other DNA
tcttttggggttgctttttgtgaaaaatgctagttactttaaaaggggagaataaggatctgggctcaaaatctgtatgcaaagcagctagatccattggtctcttctcc

SEQ ID NO: 42906 - DNA, 110 bp, synthetic construct
  source 1..110: mol_type = other DNA
ctcatagcaatgctggatccttaaccccctgaaagaggtgaggaattgaagctgcatcctcatggatattagttggattcttttttttttttttcaaactcaagaaattt

SEQ ID NO: 42907 - DNA, 110 bp, synthetic construct; identical to SEQ ID NO: 42906
  source 1..110: mol_type = other DNA

SEQ ID NO: 42908 - DNA, 110 bp, synthetic construct
  source 1..110: mol_type = other DNA
gtgattccacctctggtctgggtagtcatacatagttggtagtttaattcaccatcttaagtggttctgaaacaatgatactaccctccctcctaatggccttttttttt

SEQ ID NO: 42909 - DNA, 110 bp, synthetic construct
  source 1..110: mol_type = other DNA
cccaggtattgaatccaaaccacagctgctacctacaccgaagcttctccctacgccacagctgcaacaacaccaggtccttaacctgctgtgctacagtaggaactcct

SEQ ID NO: 42910 - DNA, 110 bp, synthetic construct
  source 1..110: mol_type = other DNA
gggaaactttttcacaaaaatttgtgtcggggaattcaaaactatttaaaaaacctttatcatctgacagctacttcaggtcttgcctcatttttgtttatcacctacaa

SEQ ID NO: 42911 - DNA, 110 bp, synthetic construct
  source 1..110: mol_type = other DNA
aagcaattttttttgctgtgatgatcacatgaagtgggttccctacctttgtgggaagtcttgctggaaagtgactggatcacggtggcagctgatgtatgacactgata

SEQ ID NO: 42912 - DNA, 110 bp, synthetic construct
  source 1..110: mol_type = other DNA
aagtcttgctggaaagtgactggatcacggtggcagctgatgtatgacactgataaagatggacatttcttcatagtaaggagttgctgggtgtgtctggagaagctcca

SEQ ID NO: 42913 - DNA, 110 bp, synthetic construct
  source 1..110: mol_type = other DNA
cagccaaaccacagagatcattgtcaatgtatacagaggagtggtggatcaaactgggcagattattgtcaacacacacaccgggctgtgccacagatatgggcagtagc

SEQ ID NO: 42914 - DNA, 110 bp, synthetic construct
  source 1..110: mol_type = other DNA
gggcagattattgtcaacacacacaccgggctgtgccacagatatgggcagtagctaagtgtcaaacctcaggcaacagttctggggagagggctcaatttagctgtaca

SEQ ID NO: 42915 - DNA, 110 bp, synthetic construct
  source 1..110: mol_type = other DNA
acagagaggtctcagtgtaatcttgagcaagtgaatgtctccaggccttagcttcacccttttgaaaatggggacaatgaggtccatgtcgcaggtgttgtaagaagtaa

SEQ ID NO: 42916 - DNA, 110 bp, synthetic construct
  source 1..110: mol_type = other DNA
tcctcagaggttggctgcaaagctgtcgccgagaagtgaccctaacagtggactaataaaggggccctggaggaagccgggggtgctgggagcctcccgatggtcccttg

SEQ ID NO: 42917 - DNA, 110 bp, synthetic construct
  source 1..110: mol_type = other DNA
ctcattttaaaccaatttcacatgtggcctctctccacaactcattctgtgcactccgccgggacagagcccatggggttagggctctgcacactctgttatttcccatc

SEQ ID NO: 42918 - DNA, 110 bp, synthetic construct
  source 1..110: mol_type = other DNA
accggcccttctcaagaaccatcaatggctcctgttgtccaagctcttccccttgcctcttaagaccccccccagatctggacccagcatatccattcaacctgatttcc

SEQ ID NO: 42919 - DNA, 110 bp, synthetic construct
  source 1..110: mol_type = other DNA
aagctgaatcaaaaccacacattatataaagtttagcaacaaacaaccatgtagacatgctgcaccatccatcagtttaaaaaaaaaaaaaatcgaaataggaagcaggc

SEQ ID NO: 42920 - DNA, 110 bp, synthetic construct
  source 1..110: mol_type = other DNA
gtccaatgcccagattcctagaacttgccatcccttcaagcactgtgacaaatgttttccttctgttttaggagaagcttgctcttttgatgtggccatcattgctggtc

SEQ ID NO: 42921 - DNA, 110 bp, synthetic construct
  source 1..110: mol_type = other DNA
actgacaagaaacttctgagaagactccagggtctgtctctcttctgcggttaaatgaaccttatagagttcatctgggcctcaaggaatcagaagcatcaaagggtctt

SEQ ID NO: 42922 - DNA, 110 bp, synthetic construct
  source 1..110: mol_type = other DNA
tgaaccttatagagttcatctgggcctcaaggaatcagaagcatcaaagggtctttgtgctcattggggaactaggaagagaccatccatccatggggacctgtaattct

SEQ ID NO: 42923 - DNA, 110 bp, synthetic construct; identical to SEQ ID NO: 42921
  source 1..110: mol_type = other DNA

SEQ ID NO: 42924 - DNA, 110 bp, synthetic construct; identical to SEQ ID NO: 42922
  source 1..110: mol_type = other DNA

SEQ ID NO: 42925 - DNA, 110 bp, synthetic construct
  source 1..110: mol_type = other DNA
ctctagagactcttgcagtgagctgttgcctcagatctgtcctgaggctcagtatggcatacggcaattgacaaatatgttctgggaaatgtggggtttagaaagtttca

SEQ ID NO: 42926 - DNA, 110 bp, synthetic construct
  source 1..110: mol_type = other DNA
ggacattttccagtttttgttttttttgttttttttaaggcagccgtttgtttggaaacccaacagaagtgtcatgtttagctctagggaaggagaacctgtcagaacaa

SEQ ID NO: 42927 - DNA, 110 bp, synthetic construct
  source 1..110: mol_type = other DNA
cagcacctgcacctccatgtgccttttgctgtttttcacctgtagcgtatgtaataattctcaaagtgaaaatgtttctgagaaaaatggccaaatgagaaataaattta

SEQ ID NO: 42928 - DNA, 110 bp, synthetic construct
  source 1..110: mol_type = other DNA
aagcacgtggttattgtctcggcgtttatagcagtgcctccaaaacagttaaaaatgtaaatagaccggtagaaaagtaacttctgagcaaactctgaagagcctgggaa

SEQ ID NO: 42929 - DNA, 110 bp, synthetic construct
  source 1..110: mol_type = other DNA
ccaattcatccagtctatcgttctatcgctgcagctgttaggggcttatttgtacttatttctatatttatttgatagccctgtatcttttccatttaggtttaatcatc

SEQ ID NO: 42930 - DNA, 110 bp, synthetic construct
  source 1..110: mol_type = other DNA
ttatttctatatttatttgatagccctgtatcttttccatttaggtttaatcatctttttaggtgcggggcccatgtaacctgtttcctctgtagttccactacctactg

SEQ ID NO: 42931 - DNA, 110 bp, synthetic construct
  source 1..110: mol_type = other DNA
tgaaaagtaactgccacgtgaaaacagatcaaaacaactgagaagaactaggacacacttcggttcactttgatcctccacagctatgaagcaaacaatcatgaattaag

SEQ ID NO: 42932 - DNA, 110 bp, synthetic construct
  source 1..110: mol_type = other DNA
atattccataaatgcccaccttctccccatttccactgccaccactctaagctaagccaccatcacttctcatctgaaactcagcaacagacttctaatcagtctccctg

SEQ ID NO: 42933 - DNA, 110 bp, synthetic construct
  source 1..110: mol_type = other DNA
gccaccatcacttctcatctgaaactcagcaacagacttctaatcagtctccctgcatccattctaggctccctcctgctcccaccactgacacacaagaatgaggtttt

SEQ ID NO: 42934 - DNA, 110 bp, synthetic construct
  source 1..110: mol_type = other DNA
aaatctatacctatatcaatacagctatggatatgcacccgctcactcacacatgcacacacctgtaacactttcctatgttacagaaagcatgtttaaaactgcctcaa

SEQ ID NO: 42935 - DNA, 110 bp, synthetic construct
  source 1..110: mol_type = other DNA
tgcctactttcacagggtacttttggctttatgcttgcttgtcctttccctaaagtagtctctgatctggcgtttcaacctgtggaagccacatcttggtccctagcctc

SEQ ID NO: 42936 - DNA, 110 bp, synthetic construct
  source 1..110: mol_type = other DNA
aaaccacttcgtgttacagcacaaccactaaatatcgctctataaaatgggagtgccttgttcaacggcacagtctgaagaacgacttttctgcatctctctaggcactg

SEQ ID NO: 42937 - DNA, 110 bp, synthetic construct
  source 1..110: mol_type = other DNA
cttctgtgcttggggtttaatccgctgtagctgccattttaagacttttatgttatttctgagtctgaggcttgtcagtgaaagctgatggggcaatgcagtttgggccc

SEQ ID NO: 42938 - DNA, 110 bp, synthetic construct
  source 1..110: mol_type = other DNA
tttctgagtctgaggcttgtcagtgaaagctgatggggcaatgcagtttgggcccaggacttgcagcttcagctcctggggggtccctcctcctgccaccctccttggtt

SEQ ID NO: 42939 - DNA, 110 bp, synthetic construct
  source 1..110: mol_type = other DNA
aacatcctcccctccctttgtctggagaatcgctggataaatatttgcctagtaccaggctgtgagctaggaataaaccaagaaatataaatatggatgattttggtcag

SEQ ID NO: 42940 - DNA, 110 bp, synthetic construct
  source 1..110: mol_type = other DNA
cagagggttgggattgccctacatcaatcaagactcctccaccaatcagctccaaagttcagggggaactcagagtcccgggaagcatggggcgggggggtggtatgtgt

SEQ ID NO: 42941 - DNA, 110 bp, synthetic construct
  source 1..110: mol_type = other DNA
ccagcacttttctggagcactggtttgcagcttgttttctatcttctcccaggggacagctgatgctcacctgcaggctagctctaactctttttcactgaagtcctcca

SEQ ID NO: 42942 - DNA, 110 bp, synthetic construct
  source 1..110: mol_type = other DNA
ccttaattttctcaaggaatttatgagatatctttctttcctatctcccataatctattcgcaaatgtacaaatgctttaaacctcagcagacattctctctgcattcca

SEQ ID NO: 42943 - DNA, 110 bp, synthetic construct
  source 1..110: mol_type = other DNA
atttccacatgctgaaggtgctgccaaaaaaaaagtgtgatgactttgtccttcggtgttttgaaacctgcattctttaatagtacaccataaaccccattttttcctaa

SEQ ID NO: 42944 - DNA, 110 bp, synthetic construct
  source 1..110: mol_type = other DNA
ggttgccagcctcctgaataaagcaaactttccattcctaccagcacatctcttaagtattggcttttgagtagcacatagctgaacctgagttcagtaacaaagtataa

SEQ ID NO: 42945 - DNA, 110 bp, synthetic construct
  source 1..110: mol_type = other DNA
ttatcttgacttgctagaggaaactggaatagctagcaaatgaatcacagtctacttgttacttaacaatacaggctactggggctcagaggctgtgtgacctcaaacct

SEQ ID NO: 42946 - DNA, 110 bp, synthetic construct
  source 1..110: mol_type = other DNA
acaattcactcattattctttacagattcacagctagttagatgtggggtatgaaggcagatgagagaaggatgaccccctggttctggattgggccggtgttttttctg

SEQ ID NO: 42947 - DNA, 110 bp, synthetic construct
  source 1..110: mol_type = other DNA
ggcagatgagagaaggatgaccccctggttctggattgggccggtgttttttctggaactttgtaattgaatcatcccatcgaagatacagaagccactggaggaagtga

SEQ ID NO: 42948 - DNA, 110 bp, synthetic construct; identical to SEQ ID NO: 42946
  source 1..110: mol_type = other DNA

SEQ ID NO: 42949 - DNA, 110 bp, synthetic construct; identical to SEQ ID NO: 42947
  source 1..110: mol_type = other DNA

SEQ ID NO: 42950 - DNA, 110 bp, synthetic construct
  source 1..110: mol_type = other DNA
aaggctggtcacccatcatgggtattagtacattttgtttcacattgtctgcccaagggaaatcagtttcaaggaacaaggtaggagacttttggtaggagttacttttg

SEQ ID NO: 42951 - DNA, 110 bp, synthetic construct
  source 1..110: mol_type = other DNA
tttgatccagaatcctaatggtttgctctgtgattcatcttcagaggctgccaaagccagtgtctgtggctccatacaggtggagccttcaagctccattggatgtgcca

SEQ ID NO: 42952 - DNA, 110 bp, synthetic construct
  source 1..110: mol_type = other DNA
gccagtgtctgtggctccatacaggtggagccttcaagctccattggatgtgccagttcatgtggcctgagaggtagataagtttgcacagcagtctgtacctatagcag

SEQ ID NO: 42953 - DNA, 110 bp, synthetic construct
  source 1..110: mol_type = other DNA
ctagtcaggtttgttatcactgaaccacaatgggaactccatagctttagttagttcttcagagcactcatcacaacatgaaataagatgataaatgctcactgtccccc

SEQ ID NO: 42954 - DNA, 110 bp, synthetic construct
  source 1..110: mol_type = other DNA
cctgatctaaattaagctctgctcatagaaaactttggcaacagctcacatacgaagttagaagccattgagaacttttagattgctaacagttatgactgcaatagtta

SEQ ID NO: 42955 - DNA, 110 bp, synthetic construct
  source 1..110: mol_type = other DNA
tgagaactggcagctgagaaagcattaggcattatttataaagtcctcacaggcgttggcacagcacaagtgagcaggtgaacctaccttgcggtgcctgctctcagcag

SEQ ID NO: 42956 - DNA, 110 bp, synthetic construct
  source 1..110: mol_type = other DNA
ctcttttgctcactatgtattaacagagtagaaactaacttccatgttaaaatattaaaaaagagctaggagtttctgctatagctcagtggtaacgaacccgactagta

SEQ ID NO: 42957 - DNA, 110 bp, synthetic construct
  source 1..110: mol_type = other DNA
tgtattaacagagtagaaactaacttccatgttaaaatattaaaaaagagctaggagtttctgctatagctcagtggtaacgaacccgactagtattcatgaggatgcgg

SEQ ID NO: 42958 - DNA, 110 bp, synthetic construct
  source 1..110: mol_type = other DNA
tagctgttttctggcagggaaggaaggagccctggttggttccagaagggacaactttcttctggtcaccccctagagaggttggagcacctccctacaaacatgatctt

SEQ ID NO: 42959 - DNA, 110 bp, synthetic construct
  source 1..110: mol_type = other DNA
tttcttctggtcaccccctagagaggttggagcacctccctacaaacatgatcttcagtcttttctttctccatccaatttggagctgaaaggaagaacagagcagggtt

SEQ ID NO: 42960 - DNA, 110 bp, synthetic construct; identical to SEQ ID NO: 42958
  source 1..110: mol_type = other DNA

SEQ ID NO: 42961 - DNA, 110 bp, synthetic construct; identical to SEQ ID NO: 42959
  source 1..110: mol_type = other DNA

SEQ ID NO: 42962 - DNA, 110 bp, synthetic construct
  source 1..110: mol_type = other DNA
ttcatgtgtcctccaaagtctccgacaaactggaagaaactgtgtcctaagaagttccaaggctgtgacttgagtttgtgggggcggggaggaaggtgtgtgtggaagtg

SEQ ID NO: 42963 - DNA, 110 bp, synthetic construct
  source 1..110: mol_type = other DNA
ctactgtcatgagttctctcacttacgtcttggttggaatctatctctcactctcatgtcttccaagggcacttgtctgtggcgtgtctggctcgtgggtggaatcctag

SEQ ID NO: 42964 - DNA, 110 bp, synthetic construct
  source 1..110: mol_type = other DNA
atgtcttccaagggcacttgtctgtggcgtgtctggctcgtgggtggaatcctaggccattgctcggtaccctaacactggggtcttcaaggtgactcagttgttctccc

SEQ ID NO: 42965 - DNA, 110 bp, synthetic construct
  source 1..110: mol_type = other DNA
agtcaaatcctaattttcacataggagaagtggtgaagctatgaattaaacttgtattgtaattctgcgacatacacaccgacatttggtgtgtgtattttttatttttt

SEQ ID NO: 42966 - DNA, 110 bp, synthetic construct
  source 1..110: mol_type = other DNA
cagcagagtaaaataggctggagcaaaactgaaaattaatatggtctgttccgtggaagtgtgagctctttctgattctgtttcttggttggggcagaacagaatgtctt

SEQ ID NO: 42967 - DNA, 110 bp, synthetic construct
  source 1..110: mol_type = other DNA
actataactttcttttgcacaagcattttccctacaaaacccttgcacctttaatctagggggacccagactaacgcccgccatggtctttttccggcaaggcctgtcaa

SEQ ID NO: 42968 - DNA, 110 bp, synthetic construct
  source 1..110: mol_type = other DNA
ctagggggacccagactaacgcccgccatggtctttttccggcaaggcctgtcaatgctgtatgtgtaaacccatccacctttaaacagacctggaccaccctctccagt

SEQ ID NO: 42969 - DNA, 110 bp, synthetic construct
  source 1..110: mol_type = other DNA
aaagcagcatttcacagcagcttagaggggatcaaaacagtcagagcttagcacttactctctatgaaatgagttatatctacagagcttagaacaatgcctgacgcaca

SEQ ID NO: 42970 - DNA, 110 bp, synthetic construct
  source 1..110: mol_type = other DNA
gtcccttcccaaagcgctcccggcgatttggaattgagtcctggacaataacttcattcacttttcaagttccctgcctgctcccggctgcagaagtggaagctgtgtgc

SEQ ID NO: 42971 - DNA, 110 bp, synthetic construct
  source 1..110: mol_type = other DNA
attcacttttcaagttccctgcctgctcccggctgcagaagtggaagctgtgtgccttcatggaaagccagtctccctccctctggactggatcttctaggaactgggaa

SEQ ID NO: 42972 - DNA, 110 bp, synthetic construct
  source 1..110: mol_type = other DNA
tcttcactttgttcgaccttgcttgccatcaccattgggcggatcgcctgagccggtcccggggcgaggctcatgtggggcgctggggaaggggaggaaagctttgtgag

SEQ ID NO: 42973 - DNA, 110 bp, synthetic construct
  source 1..110: mol_type = other DNA
gtcccggggcgaggctcatgtggggcgctggggaaggggaggaaagctttgtgagcaagcctccgtccatctgcaggagccatccagggccagctccaggccggatgcga

SEQ ID NO: 42974 - DNA, 110 bp, synthetic construct
  source 1..110: mol_type = other DNA
cccaggctgtatccccgcagctcagggctttcggagccggcctgcccctggccgcctgtcatctcccgaggattacgatgccatttattctaattcttgttgacatttca

SEQ ID NO: 42975 - DNA, 110 bp, synthetic construct
  source 1..110: mol_type = other DNA
gtggttactgactacagaatgtgggaagggttcccggtggcaggcccgaggtcagaggtcaggaggcccgagaggtgaggaggttgtttagaactgttatgctcccagct

SEQ ID NO: 42976 - DNA, 110 bp, synthetic construct
  source 1..110: mol_type = other DNA
aggtcaggaggcccgagaggtgaggaggttgtttagaactgttatgctcccagctctcactggaatgctgttttcttgcgtttcgtccttggctgttgataattctaatg

SEQ ID NO: 42977 - DNA, 110 bp, synthetic construct
  source 1..110: mol_type = other DNA
cttccctcttctcaaataaatttccctttgccctttttgtgtatgtgtggggaggggggttgcctgtggtgtggagaagttctgaggccagggattgaacccacagctca

SEQ ID NO: 42978 - DNA, 110 bp, synthetic construct
  source 1..110: mol_type = other DNA
ggggttgcctgtggtgtggagaagttctgaggccagggattgaacccacagctcagcagtgacgatgctgaatcctgaaccactaggccaccaggggctcctcccctttg

SEQ ID NO: 42979 - DNA, 110 bp, synthetic construct
  source 1..110: mol_type = other DNA
gggctgtagtgagtcattctgaaggtcatggtttgggaaaccgcctgacctcgtggagtcagcagttcctcctgagctgcctcccatggtcccgggaacagtgctggtag

SEQ ID NO: 42980 - DNA, 110 bp, synthetic construct
  source 1..110: mol_type = other DNA
ggccttgagactgagctcataaatggttgaccttggactcctccagttccccacctagaaataggatggttctcagcgttccacctggactgcccctgcagatggcacca

SEQ ID NO: 42981 - DNA, 110 bp, synthetic construct
  source 1..110: mol_type = other DNA
tagaaataggatggttctcagcgttccacctggactgcccctgcagatggcaccactcgcccaaggagagggacttgggggcacctagccaggcctcacaacagggcttc

SEQ ID NO: 42982 - DNA, 110 bp, synthetic construct
  source 1..110: mol_type = other DNA
ttcccagcgctgggacctctgtagacagagagaggaaatctccattccattccacagatcttcctgggcacctgccatgggaagacagggcttcagtgccaaaggacagt

SEQ ID NO: 42983 - DNA, 110 bp, synthetic construct
  source 1..110: mol_type = other DNA
agatcttcctgggcacctgccatgggaagacagggcttcagtgccaaaggacagtgagggtaaacagagcctgccctcggggaaggtattagtctcctggggctgctgta

SEQ ID NO: 42984 - DNA, 110 bp, synthetic construct
  source 1..110: mol_type = other DNA
atggttcctgagggtgttctattgctagttcatctgtgtggttccattttttattttgaaaaaaaaaaaaaagcatttcatgagtaacgcttctgcatctaacgattcca

SEQ ID NO: 42985 - DNA, 110 bp, synthetic construct
  source 1..110: mol_type = other DNA
ttgaaaaaaaaaaaaaagcatttcatgagtaacgcttctgcatctaacgattccagcatctgaaattcttgggggcaggagatatgctatgcggggtttttctgccgaca

SEQ ID NO: 42986 - DNA, 110 bp, synthetic construct
  source 1..110: mol_type = other DNA
ttccccctccagcacctccagcatctcagcccccaacaccgagcaaagccccaccctccgtttcccagtcgagagcttattagggacaccactgctcctcagagccccat

SEQ ID NO: 42987 - DNA, 110 bp, synthetic construct
  source 1..110: mol_type = other DNA
ccacagcactctgatgtttcagctctgggtgagggcccactggccatggtggccttgggtggtggcggcggggctgtatgcgcgcacccgtgtggaacgtatgtggattc

SEQ ID NO: 42988 - DNA, 110 bp, synthetic construct
  source 1..110: mol_type = other DNA
tgggtggtggcggcggggctgtatgcgcgcacccgtgtggaacgtatgtggattccacctgctgattcattgagtccagagaggagggcgccctgggtgctggatggtgg

SEQ ID NO: 42989 - DNA, 110 bp, synthetic construct
  source 1..110: mol_type = other DNA
ggggacaggtggggatgatggtgagtaaatatagaaatcatagtaagacttgagttctgttctcaagactagtactttggggaggaggatgtatatagggataaggcgat

SEQ ID NO: 42990 - DNA, 110 bp, synthetic construct
  source 1..110: mol_type = other DNA
gtgcgtctcgtcatgtgtttcatgtattcattaatagtcattcattttattcctgttactaaacattcctccttacagatcattgtgttctaatcgtgtccgtgtccttt

SEQ ID NO: 42991 - DNA, 110 bp, synthetic construct
  source 1..110: mol_type = other DNA
gtccccctgtctctcactggcctttcagggctcatcacattgagtcacttgtggttcctcgaaggtgtcgagctctctccaccacctgggctctggctccctctggctag

SEQ ID NO: 42992 - DNA, 110 bp, synthetic construct
  source 1..110: mol_type = other DNA
tctctcatgatgatgcggagcatcttttcatgtgcttattggcaatttgtgtatcttctttggagaaatgtctacccaactcagtttaaatttcattgtttctatgtcgt

SEQ ID NO: 42993 - DNA, 110 bp, synthetic construct
  source 1..110: mol_type = other DNA
tttcatgtgcttattggcaatttgtgtatcttctttggagaaatgtctacccaactcagtttaaatttcattgtttctatgtcgttgagttgtaggagttctttatatat

SEQ ID NO: 42994 - DNA, 110 bp, synthetic construct
  source 1..110: mol_type = other DNA
caagcgtttggcataaactaggtaggtgcagaatccatagtactatcattaccaaagaatcagctctgtgtggctcactgaaaaccagattctggggacgcaaggacggt

SEQ ID NO: 42995 - DNA, 110 bp, synthetic construct
  source 1..110: mol_type = other DNA
agaatcagctctgtgtggctcactgaaaaccagattctggggacgcaaggacggtacgagtgtgtctggcgaaggcccaacagtgctacctccgaacagctggtgcaggt

SEQ ID NO: 42996 - DNA, 110 bp, synthetic construct
  source 1..110: mol_type = other DNA
agaacagaagctgcagggcttccaaagttgtccacaaggcagatcactccaggtgagtgggaactttaggagacgaacggactgcgggtgggcaatacagtgacaataca

SEQ ID NO: 42997 - DNA, 110 bp, synthetic construct
  source 1..110: mol_type = other DNA
agtgggaactttaggagacgaacggactgcgggtgggcaatacagtgacaatacaacctgaccactgattcgcccctgctgctttcagccgtgtgttgtttctcctcctg

SEQ ID NO: 42998 - DNA, 110 bp, synthetic construct
  source 1..110: mol_type = other DNA
ttatcatgtgctcttgttccttctgacgcatcatattctgtacagagatgtgatagtccaggcgattctttatctccttgtacactctatgcagccgttcccggtaagta

SEQ ID NO: 42999 - DNA, 110 bp, synthetic construct
  source 1..110: mol_type = other DNA
gtccaggcgattctttatctccttgtacactctatgcagccgttcccggtaagtaacctccaaggccatagcaatgttattctgaggcaaaattaagaagtgatgaaaac

SEQ ID NO: 43000 - DNA, 110 bp, synthetic construct
  source 1..110: mol_type = other DNA
tgccacctttagcctttttctttagttctttgtgtttgttcttactctcttgcgctgattccaaatccctccagggcagaggaaccacatatcttttcatctttgtactt

SEQ ID NO: 43001 - DNA, 110 bp, synthetic construct
  source 1..110: mol_type = other DNA
gcctgtaagggctctaaatcaagcatctgtcacgtcatatgccatatacgaaaggtatatattttgttggaaatgaacttcagcagtcgttgacgttatgagcagtccca

SEQ ID NO: 43002 - DNA, 110 bp, synthetic construct
  source 1..110: mol_type = other DNA
tatatattttgttggaaatgaacttcagcagtcgttgacgttatgagcagtcccaaggaggataattagccctaccacttgcctctatgatggtgaattgattttatatg

SEQ ID NO: 43003 - DNA, 110 bp, synthetic construct
  source 1..110: mol_type = other DNA
tgcctgccccaactcttgtcccttgaccccagggtcccctggcacttcccatcttcacagagggcacttacccagctgcagcaggagggccaccccaatgaagaaaatag

SEQ ID NO: 43004 - DNA, 110 bp, synthetic construct
  source 1..110: mol_type = other DNA
cacagagggcacttacccagctgcagcaggagggccaccccaatgaagaaaatagatcttggtcagagggcagcggggtcattcgttccttgcctggcctcagacagcgc

SEQ ID NO: 43005 - DNA, 110 bp, synthetic construct
  source 1..110: mol_type = other DNA
agagccttgaggagaatcaaacgagctaagaaccccctcccccaagggtgagtgtgaggatgtccatttaggttataaggccagattcaatgccaacgccggcgcgatct

SEQ ID NO: 43006 - DNA, 110 bp, synthetic construct
  source 1..110: mol_type = other DNA
gtgcccttgtgtgggaagtcagagagaatagggaacagaaacagactgtgtaattaaatacgaaattgcataggcccagagtggaggcaacttttagaacctctggccta

SEQ ID NO: 43007 - DNA, 110 bp, synthetic construct
  source 1..110: mol_type = other DNA
aaatacgaaattgcataggcccagagtggaggcaacttttagaacctctggcctaagactagacagtttaataccagggctggattcctcactcctgctcatccatcctc

SEQ ID NO: 43008 - DNA, 110 bp, synthetic construct
  source 1..110: mol_type = other DNA
atcttagaaaacagcgtgatggtaattacacacataagagagagaaaagcctccttgtctttggatttttcttttgtcctgtgaagctgtagaacactaaactaatgttt

SEQ ID NO: 43009 - DNA, 110 bp, synthetic construct
  source 1..110: mol_type = other DNA
tgtctttggatttttcttttgtcctgtgaagctgtagaacactaaactaatgtttatatattttttccttgtttccattatttcacaactctcagaggtgtcttaggaaa

SEQ ID NO: 43010 - DNA, 110 bp, synthetic construct
  source 1..110: mol_type = other DNA
taggaagctggcagcgcagctgaaaagcacagagattccactggaatctcaccgatgaccagattgcagtccccgctgaaaggaaattctgttcacttaaaatgtttgaa

SEQ ID NO: 43011 - DNA, 110 bp, synthetic construct
  source 1..110: mol_type = other DNA
tcagatttcaagaatttggggccatcttccagctttttctcagaatgataatcgtcttcatttcagcaaacttgcaagcagtgtgagctgtgtgacagtccagcacaggt

SEQ ID NO: 43012 - DNA, 110 bp, synthetic construct
  source 1..110: mol_type = other DNA
gttgggaatggctgacatttgttttccttcccccaaaactcatgtgtaagtgctagaaatccaggaattagcagagttatttcatgagctttgaatgattcccacgaggg

SEQ ID NO: 43013 - DNA, 110 bp, synthetic construct
  source 1..110: mol_type = other DNA
gaaatccaggaattagcagagttatttcatgagctttgaatgattcccacgagggcatctattctctagtaaaacaggaaaccactcaaatgagaaaggtggggcttcaa

SEQ ID NO: 43014 - DNA, 110 bp, synthetic construct
  source 1..110: mol_type = other DNA
agattacaatgttcccatcttaccttttgcaggcacttttcctcggtcctttaggcagaattaatgattatcaatgcggccctgagacaaagctggtaatgcggatgtcg

SEQ ID NO: 43015 - DNA, 110 bp, synthetic construct
  source 1..110: mol_type = other DNA
cagaattaatgattatcaatgcggccctgagacaaagctggtaatgcggatgtcggggctatttgtgtaaaaggagaagttaagggggaataaatgtgatcacactgtga

SEQ ID NO: 43016 - DNA, 110 bp, synthetic construct
  source 1..110: mol_type = other DNA
tggatcagtagttccacagcctggctcagatggcttcgttcttcccttgtgctccaggattggggcaatgtattctccacaatgactctgggctagaaatacacctttca

SEQ ID NO: 43017 - DNA, 110 bp, synthetic construct
  source 1..110: mol_type = other DNA
aggattggggcaatgtattctccacaatgactctgggctagaaatacacctttcaagcttatttcaagcttgagattgtcccacgatgtaatgaagtgttgcctagttgc

SEQ ID NO: 43018 - DNA, 110 bp, synthetic construct
  source 1..110: mol_type = other DNA
ctatgcctctgagcctggtcagacaagccttgaccccgggaaatccaggaaaaaatgaccccatcctcctcctccccgcaccgccattgcagcccagtagtgaagctccc

SEQ ID NO: 43019 - DNA, 110 bp, synthetic construct
  source 1..110: mol_type = other DNA
tgaccccatcctcctcctccccgcaccgccattgcagcccagtagtgaagctcccccaaaggaacgacaaggcaaaaaggggagtgggagcaggatatggagggcagagt

SEQ ID NO: 43020 - DNA, 110 bp, synthetic construct
  source 1..110: mol_type = other DNA
ctgcttaagaatgctttccacctcgttccctgggtcttagggtctcttaagctagagacccaaaggcttaaccccgccccacacagtgtggctcagccctgtttctagcc

SEQ ID NO: 43021 - DNA, 110 bp, synthetic construct
  source 1..110: mol_type = other DNA
acacatggggcacctgggggtgggtgaggaggctattttaaaaggagctttcggtgggaatggccaaaaagcaggagccgtgcgcaaggtgggaggacccgggagtctga

SEQ ID NO: 43022 - DNA, 110 bp, synthetic construct
  source 1..110: mol_type = other DNA
cctgtcctctgggctgtgcctgtcacagaattctcactctgctcccattatcccagccagggccaggggctcagcaggtgccggtacccttgagttaactcctcactagt

SEQ ID NO: 43023 - DNA, 110 bp, synthetic construct
  source 1..110: mol_type = other DNA
gccagggccaggggctcagcaggtgccggtacccttgagttaactcctcactagtttccttaactaccaaatacatttccggtttcccctgcctcagagcaggcgcttca

SEQ ID NO: 43024 - DNA, 110 bp, synthetic construct
  source 1..110: mol_type = other DNA
tggtcattaggcagcaagggtagagattgatagtatttcgcttgtactcataccgccaggccacttcctgcagttctcgtcttctttgctgtatcgccaatattataact

SEQ ID NO: 43025 - DNA, 110 bp, synthetic construct
  source 1..110: mol_type = other DNA
ccaggccacttcctgcagttctcgtcttctttgctgtatcgccaatattataactggcatcagtggaaatgttaggctctcgtatcaaacataacgtaatcctcctccta

SEQ ID NO: 43026 - DNA, 110 bp, synthetic construct
  source 1..110: mol_type = other DNA
cacctgcggcatatggaagttgccaggctaggagtcgaatcagttagagcacggctgctgacctacagcacagccacagcaacacgggtccggagctgtgtctgcaacct

SEQ ID NO: 43027 - DNA, 110 bp, synthetic construct; identical to SEQ ID NO: 43026
  source 1..110: mol_type = other DNA

SEQ ID NO: 43028 - DNA, 110 bp, synthetic construct
  source 1..110: mol_type = other DNA
tctgccgctgatctcaaagaccacggtgggcatgctgctcaggctgccgcagtcgatgtcaaactggagaccagagagagggcctcttagaagggcaggggtgtgagttg

SEQ ID NO: 43029 - DNA, 110 bp, synthetic construct
  source 1..110: mol_type = other DNA
cgggcatctcccagggctgcccagcccccaagcaggactcagagactctggctccataagctgctgcctctcttctgtatcctcacccaaagggacaactgtgctctccg

SEQ ID NO: 43030 - DNA, 110 bp, synthetic construct
  source 1..110: mol_type = other DNA
ataagctgctgcctctcttctgtatcctcacccaaagggacaactgtgctctccgtaggttcgcaagccacgtcggccgacgaaacacagtgttccctgccctttcctac

SEQ ID NO: 43031 - DNA, 110 bp, synthetic construct
  source 1..110: mol_type = other DNA
ggctgaccacaagaaagcttttccccaacaagaaagctctctgctctgctccgatctgctctgcgcggcagggtatgcaggactgggtggaccatcttgtctccagaaca

SEQ ID NO: 43032 - DNA, 110 bp, synthetic construct
  source 1..110: mol_type = other DNA
tgcatgcatcatactaccttttgatgatgtgtttacatgtctgcctcccttttttcttggcgtcaaggacatttattcatttttatatctcctgtatgcggaaggtgttt

SEQ ID NO: 43033 - DNA, 110 bp, synthetic construct
  source 1..110: mol_type = other DNA
ctgatgtcatccacaggatgtccagaagctcagaacacctcccagaccagagtaaccaatgagctgcctcagacacagccttatttggtggcaagaacatgtcatgatct

SEQ ID NO: 43034 - DNA, 110 bp, synthetic construct
  source 1..110: mol_type = other DNA
ccaatgagctgcctcagacacagccttatttggtggcaagaacatgtcatgatctgaggagcaagggctggggtgtcagggagccctggctttgagtcacagcctgccac

SEQ ID NO: 43035 - DNA, 110 bp, synthetic construct
  source 1..110: mol_type = other DNA
cacaggcaccttctcctccagacagtccaggcctaaggagcagctgggagactgagctgggcttggggttggaccaagcatcaagcatgacatggggcccgtggagcccg

SEQ ID NO: 43036 - DNA, 110 bp, synthetic construct
  source 1..110: mol_type = other DNA
gctgggcttggggttggaccaagcatcaagcatgacatggggcccgtggagcccgcgtagaacagtggtcaagggagtggcaggatcgtggacccccagagccctcctgc

SEQ ID NO: 43037 - DNA, 110 bp, synthetic construct
  source 1..110: mol_type = other DNA
caccctgtaacccctgcttaaatcagttatggaaaaatatgtaggccatagataccgccttcattatcttcccagaaagagtcttaaacattgtctgctatcctcacata

SEQ ID NO: 43038 - DNA, 110 bp, synthetic construct
  source 1..110: mol_type = other DNA
ggtcttagagggggaccggctcccagcaagtgttcacaaatgtcacctcttcctgtcacctcatggcattcatagcccagccgggcagtgaggtggacagctgtgcccca

SEQ ID NO: 43039 - DNA, 110 bp, synthetic construct
  source 1..110: mol_type = other DNA
tcacctcatggcattcatagcccagccgggcagtgaggtggacagctgtgccccaggctgggacagtgcacggctcatgtcacacagctgtcagcacccagggttcccac

SEQ ID NO: 43040 - DNA, 110 bp, synthetic construct
  source 1..110: mol_type = other DNA
cggggagcccgagacttttatgggccatttcgagtccctctccccctgaccgattgatgcatcgtggtttgtagctgtggtgtggggaattgtcacagcccaacccaagt

SEQ ID NO: 43041 - DNA, 110 bp, synthetic construct
  source 1..110: mol_type = other DNA
acaaagctttatggccagctctccatcgactgagagcttgtcaaatactgtaaatttggtgtcctattcacctggacactagggcacctagaatggagccaggcccagaa

SEQ ID NO: 43042 - DNA, 110 bp, synthetic construct
  source 1..110: mol_type = other DNA
gacagatatatgcacaataatattccaggcagtaatattttcaataaagtcggaaccaacctaatttgagaaacagctaataagaaaatggctaataagtaatgtggcct

SEQ ID NO: 43043 - DNA, 110 bp, synthetic construct
  source 1..110: mol_type = other DNA
gctgtccagtcactgcccaccccctaatgacttattcagggggtcatcggacatcacccaggctctgcccagaccccggtgttccccccaccccgcactcccaacccctt

SEQ ID NO: 43044 - DNA, 110 bp, synthetic construct
  source 1..110: mol_type = other DNA
acccaggctctgcccagaccccggtgttccccccaccccgcactcccaaccccttccttgccatggctggcagtctgcgtgaggttaacctcaggcttcttcctggttgc

SEQ ID NO: 43045 - DNA, 110 bp, synthetic construct
  source 1..110: mol_type = other DNA
tagagaacaaattctaatctccagtgactttgggggttggagccagcctgcctcggtgtctgccacagtgggttaactcttgccagcttctacgtcagagggatgggtta

SEQ ID NO: 43046 - DNA, 110 bp, synthetic construct
  source 1..110: mol_type = other DNA
aaaaaaaaagtatgcggatggatctgagtgatacgtgcaaaggtagaactgctgggattgggtggctgctggggtgttggggcgtgaaatccggagaagctgatgatact

SEQ ID NO: 43047 - DNA, 110 bp, synthetic construct
  source 1..110: mol_type = other DNA
gattgggtggctgctggggtgttggggcgtgaaatccggagaagctgatgatactgaaatccttagctcggcagtgtgtgaagatggggaagcctttactggagcgaggg

SEQ ID NO: 43048 - DNA, 110 bp, synthetic construct
  source 1..110: mol_type = other DNA
agaatggggcccagaagctcaagggaagggagctctcaggccaaggacctgtgtgcgagggggatttatttgaaggggctctgcctgctctttgccctggtgccggagac

SEQ ID NO: 43049 - DNA, 110 bp, synthetic construct
  source 1..110: mol_type = other DNA
gcttgtgggattaacaaaaagttgaaagctttgcttttggctggaattacatcaattgaatgcagaccatctcaggctgataaacattctgagggcctgtgtactagaat

SEQ ID NO: 43050 - DNA, 110 bp, synthetic construct
  source 1..110: mol_type = other DNA
ttgaatgcagaccatctcaggctgataaacattctgagggcctgtgtactagaatcagattgagaagacggagaaagaactaataaatttaccactgtttaacagttttt

SEQ ID NO: 43051 - DNA, 110 bp, synthetic construct
  source 1..110: mol_type = other DNA
ggccaccagagatttctctttgctctcctctgggagaagcttcgctaccctttcgaacttacgtgtaatgttctgacttgctttggcgaagttacacacgtcatttgtgg

SEQ ID NO: 43052 - DNA, 110 bp, synthetic construct
  source 1..110: mol_type = other DNA
aattataaaataacttctttgcagaaaagcaacaaaaaattacttaaaattatttcagacttttaaaaaggcccctgaagctggccatgttctgtgctcctccttgttcc

SEQ ID NO: 43053 - DNA, 110 bp, synthetic construct
  source 1..110: mol_type = other DNA
cagacttttaaaaaggcccctgaagctggccatgttctgtgctcctccttgttcctttaagtgtacacagacagggagttcccatcatgtctcagtggaaacgaatccaa

SEQ ID NO: 43054 - DNA, 110 bp, synthetic construct
  source 1..110: mol_type = other DNA
agaatagaaacaggctcatagactttgaaaaacttgtggataggtgggagaaatggacttcggggggcgtctggggttggcatatgcacactgaggtatatggaatgatt

SEQ ID NO: 43055 - DNA, 110 bp, synthetic construct; identical to SEQ ID NO: 43054
  source 1..110: mol_type = other DNA

SEQ ID NO: 43056 - DNA, 110 bp, synthetic construct
  source 1..110: mol_type = other DNA
ctgtagttacatggaagcggaacaaacactcttttctctgcccccaaatgccatcagttatgggagctatcagggctacgtctgcccagagggcccgcctttccctttct

SEQ ID NO: 43057 - DNA, 110 bp, synthetic construct
  source 1..110: mol_type = other DNA
tcagtggtctttctctatgtgccatgctaccaacagcccaccatacattatgacattaaagtcatcttctctttttcctaaattcctgctatttccaaccaaatccttgg

SEQ ID NO: 43058 - DNA, 110 bp, synthetic construct
  source 1..110: mol_type = other DNA
ttaaagtcatcttctctttttcctaaattcctgctatttccaaccaaatccttggttattttaaaattatgccacctctaaatcatagatacttaaaagcatctccaaac

SEQ ID NO: 43059 - DNA, 110 bp, synthetic construct
  source 1..110: mol_type = other DNA
tcattgtacagaaaaaggaagatgaagctcagagattagggccgcccttccagttttcagtctctgctctttgccctccatcacacagtatctcctatttcagacttgag

SEQ ID NO: 43060 - DNA, 110 bp, synthetic construct
  source 1..110: mol_type = other DNA
ttcagtctctgctctttgccctccatcacacagtatctcctatttcagacttgagttactcgttcaaacacacagattttattagtgctagcctactgaattctgctgac

SEQ ID NO: 43061 - DNA, 110 bp, synthetic construct
  source 1..110: mol_type = other DNA
tcaaaggaagaagtcggggagttcagcatctctcatttctccaaatggcagattgaaactgttttatgtgtctcattatccctgccggctttgcatagacttgaaataag

SEQ ID NO: 43062 - DNA, 110 bp, synthetic construct
  source 1..110: mol_type = other DNA
cccttttcctctttgggggggggtgggcaagggttgcccttgtacctcagtttttgttgatgacaaaacatcttagctgtgcaaagcagctctctccccatccccctgcc

SEQ ID NO: 43063 - DNA, 110 bp, synthetic construct
  source 1..110: mol_type = other DNA
ctgctgtccctgtctctagaggcactatcccccaaattttatttgtctcttccataagctaagcaaacagattcctaattgtaggcagttctaacaagtttagcaaattg

SEQ ID NO: 43064 - DNA, 110 bp, synthetic construct
  source 1..110: mol_type = other DNA
attacaaatctcatcaataacaccttcattcgaactgaatttggcatggctattggtcctgagaactctgggaaggtgagtcatttatacatgtacaacagtcacaggtt

SEQ ID NO: 43065 - DNA, 110 bp, synthetic construct
  source 1..110: mol_type = other DNA
ttgtcatgggcactcctggtaagatacacataattacgtctgaaacaggtggtgttttggagatttagagacgggagagactgttccctccagagctgaaaggagttgga

SEQ ID NO: 43066 - DNA, 110 bp, synthetic construct
  source 1..110: mol_type = other DNA
tttggagatttagagacgggagagactgttccctccagagctgaaaggagttggatcagagaaggctttgtagatgaggtggcatttgagctgagccctgacaagccgta

SEQ ID NO: 43067 - DNA, 110 bp, synthetic construct
  source 1..110: mol_type = other DNA
ttctgaaacacccctatgcccacacccaaactctccagtttccccagctctcctgtgccttcccctcaacaggcgggagaaaagcacttgcagcagcccagaaaggtaat

SEQ ID NO: 43068 - DNA, 110 bp, synthetic construct
  source 1..110: mol_type = other DNA
cagctgtgggaacttcccaagcaggactgtgtgtgtgattcctgtaaatgagcctgatcctgggaaagtcttgacctcccacttcccctttggccaagggcttacaaaaa

SEQ ID NO: 43069 - DNA, 110 bp, synthetic construct
  source 1..110: mol_type = other DNA
gatcctgggaaagtcttgacctcccacttcccctttggccaagggcttacaaaaaactcgaagatgatgctagaatctgggtagtagtactcaaagttaacggtgccaga

SEQ ID NO: 43070 - DNA, 110 bp, synthetic construct
  source 1..110: mol_type = other DNA
ataacaagtgcaaaacatgctgaacctgtatttccagggagtgacattcccattgaccagcaggttccaaactcacacccacaaggtgtaactcttctttccgttccact

SEQ ID NO: 43071 - DNA, 110 bp, synthetic construct
  source 1..110: mol_type = other DNA
tgttgatcttacaggtagttcaaaaagggcaattttatttctaagttcttcagggaagcctcattgttgctcctaagagctgacaacactgagcattgtgcctgaatatc

SEQ ID NO: 43072 - DNA, 110 bp, synthetic construct
  source 1..110: mol_type = other DNA
ttaaccactgcgccacgacgggaactcctacagttttttttttttttttttcctacagttttttttaaacaaattttttgggttttttttgggtgcgttgaacagtagct

SEQ ID NO: 43073 - DNA, 110 bp, synthetic construct
  source 1..110: mol_type = other DNA
cagttttttttaaacaaattttttgggttttttttgggtgcgttgaacagtagctcgatgagggatctcagttcccagactagggattgaaccctgaccccaacagagaa

SEQ ID NO: 43074 - DNA, 110 bp, synthetic construct
  source 1..110: mol_type = other DNA
attttctcttatatttctaaagattttaattttgtttttgtagcttttgtttcctgaattgcctcccttcttccaccttccttttcttgtttgttttaggctctggtttt

SEQ ID NO: 43075 - DNA, 110 bp, synthetic construct
  source 1..110: mol_type = other DNA
tatggttcagagaacataattagctattgcattttagctctgttggtttttccatattgaaatgttcattcctcctgctatacaggcagtgcagtggcatctgtcgctgt

SEQ ID NO: 43076 - DNA, 110 bp, synthetic construct
  source 1..110: mol_type = other DNA
agtcactgctaggctggggccagactggatgggtggggagggaagaacgaatcgtggcttcagatggtcctgcagtcattttttgactgtatttccctttatctaatgcc

SEQ ID NO: 43077 - DNA, 110 bp, synthetic construct
  source 1..110: mol_type = other DNA
tcacaacaatccccaaagtgaagtatgggtatcttctgttacagctgagaaaatcaggactcagaaagcccaaggtcctgctgctcatatgcagcaaaaaggctttaaat

SEQ ID NO: 43078 - DNA, 110 bp, synthetic construct
  source 1..110: mol_type = other DNA
ttaatttccagaaggagccaactttccagcaaaagctcagggaggaacgcatttggcaaagggaatagtgagtgcaaggactaaagctaaagcctgtgggacaagcttcg

SEQ ID NO: 43079 - DNA, 110 bp, synthetic construct
  source 1..110: mol_type = other DNA
agtgtggctttggtgttaaagaccagcacagagctggtgaggagaccaacaatggcccctgccctcctggagcttatggtccaggtgtaggaaggatgtgtgagtacccc

SEQ ID NO: 43080 - DNA, 110 bp, synthetic construct
  source 1..110: mol_type = other DNA
ggtccataggtgagcaattaaattataaattggttacagctgtccttcagtattcatacgggattggttccaggaccacttgggatatcgaaacccagggatgctcaagt

SEQ ID NO: 43081 - DNA, 110 bp, synthetic construct
  source 1..110: mol_type = other DNA
aacccatcgacagccttggtttcgtagagttcagccccacggacaggagaccaaacgatctctactctgtcactggacaccagcaccgggttaatgtcactaggacaaca

SEQ ID NO: 43082 - DNA, 110 bp, synthetic construct
  source 1..110: mol_type = other DNA
gagggtattactagaccagtataaaggagggcaactgcagtaagggaattgagaagtgatttataatatcggactgtggaaacgaagctgggtgggcaaggaagtgagtc

SEQ ID NO: 43083 - DNA, 110 bp, synthetic construct
  source 1..110: mol_type = other DNA
gtgatttataatatcggactgtggaaacgaagctgggtgggcaaggaagtgagtcttgcaaagccttcctaccactgaggctgagaggactgcagtggagactgagagac

SEQ ID NO: 43084 - DNA, 110 bp, synthetic construct
  source 1..110: mol_type = other DNA
aggaaggtgatctgccaaataagatgcacttccaaaacccaaccgaacataccctaaatgtcttcctatatatgagatttggccaatgaatattagcaagagaattcttt

SEQ ID NO: 43085 - DNA, 110 bp, synthetic construct
  source 1..110: mol_type = other DNA
aaatgtcttcctatatatgagatttggccaatgaatattagcaagagaattctttgttatacacgtgagctgagcctaaacatgagcacatgtggagtatgttgtccaag

SEQ ID NO: 43086 - DNA, 110 bp, synthetic construct
  source 1..110: mol_type = other DNA
ggatgcacttccactgcgccacgatgggaacatccccccccaaattattattgtggcagcccaactgaaatagtgacgatgaggaatgtgtttaactagggagcatggaa

SEQ ID NO: 43087 - DNA, 110 bp, synthetic construct
  source 1..110: mol_type = other DNA
ggtctatctcttttaatgttgcttgttttcttccttgcgatctttcgtggcccatcatatttacaaatgggactgttctagatagcattcaggagtttctcattgttgta

SEQ ID NO: 43088 - DNA, 110 bp, synthetic construct
  source 1..110: mol_type = other DNA
catatttacaaatgggactgttctagatagcattcaggagtttctcattgttgtatacatagatctgtcttcctgtgggataaatctgtgcatgtgggagttcccatggt

SEQ ID NO: 43089 - DNA, 110 bp, synthetic construct; identical to SEQ ID NO: 43087
  source 1..110: mol_type = other DNA

SEQ ID NO: 43090 - DNA, 110 bp, synthetic construct; identical to SEQ ID NO: 43088
  source 1..110: mol_type = other DNA

SEQ ID NO: 43091 - DNA, 110 bp, synthetic construct
  source 1..110: mol_type = other DNA
agctgatgtgttgagaagagtttgtagaggccaagggtgcaagcagggaggacagttaatgcatttgacaggtacatgtgaaggtggcttgtaccaggatgaaggaggta

SEQ ID NO: 43092 - DNA, 110 bp, synthetic construct
  source 1..110: mol_type = other DNA
ttaatgcatttgacaggtacatgtgaaggtggcttgtaccaggatgaaggaggtaagtggtgattggattctggatgtatttcaaaatgctggcaggatacttctggatc

SEQ ID NO: 43093 - DNA, 110 bp, synthetic construct
  source 1..110: mol_type = other DNA
tagttggctgacctaaccttgacattatccctcttcagagtttctaaggcagtaaataagagctagccacctccacagtctttatcctgtactgttcaagtattagaaaa

SEQ ID NO: 43094 - DNA, 110 bp, synthetic construct
  source 1..110: mol_type = other DNA
tcccctggcaagccatcgtctagcaaggaaagaaccaggtagtacctggcaggcacaggggagaactgcctggtgttggagcactttgagggtcccagcttccgaatgac

SEQ ID NO: 43095 - DNA, 110 bp, synthetic construct
  source 1..110: mol_type = other DNA
caggggagaactgcctggtgttggagcactttgagggtcccagcttccgaatgactgttctgcaggcagagtatttaagcctgacatctctttcaccttcaaggttcttt

SEQ ID NO: 43096 - DNA, 110 bp, synthetic construct
  source 1..110: mol_type = other DNA
acttgtaaggaaataagaaaaaatctagtcaaaccgcttgagtttaaatcatgtttctgcctcttaaaattttgggcagttttaagaatctctctagcttcagtttcctc

SEQ ID NO: 43097 - DNA, 110 bp, synthetic construct
  source 1..110: mol_type = other DNA
cctacactgtagccacagcactgctgtatctgagccatgaactcagtatctgagccgcatcctgtgacctacaccatagctcaaggcagcaccggatccttaacctactg

SEQ ID NO: 43098 - DNA, 110 bp, synthetic construct; identical to SEQ ID NO: 43097
  source 1..110: mol_type = other DNA

SEQ ID NO: 43099 - DNA, 110 bp, synthetic construct
  source 1..110: mol_type = other DNA
aaagtaagcctaggttgtgccgcagtcatttgcttgtttgctcgtgggcttattcctcggccctcccctgctttgctctgtcatgtaggaagctgacacctaaggccttg

SEQ ID NO: 43100 - DNA, 110 bp, synthetic construct
  source 1..110: mol_type = other DNA
ctcggccctcccctgctttgctctgtcatgtaggaagctgacacctaaggccttgtttcaagggtccccttgtcatctggatgggtttgtcaatgggagacactggtggg

SEQ ID NO: 43101 - DNA, 110 bp, synthetic construct
  source 1..110: mol_type = other DNA
attctttcgccttgtgcatgctgctcattaggacaagattcaagctaaaaacctgaggccaactgtcttttagactcttaaacgcttaaataaaattgaaacaaaattgg

SEQ ID NO: 43102 - DNA, 110 bp, synthetic construct
  source 1..110: mol_type = other DNA
ggacgaacggcgctgctgctcctcctgctgcctcggccttcgaggcctccgggggtttggtgtgttcctgagctttttccccccagctctccttgtccgtatgactcgaa

SEQ ID NO: 43103 - DNA, 110 bp, synthetic construct
  source 1..110: mol_type = other DNA
tctgatttagagcagttcagcctctcagtgcagctacgaagagctccctaacccaagagtcggaacgctggaaaagttttccttccgagaagctatcaaaagtatctgcg

SEQ ID NO: 43104 - DNA, 110 bp, synthetic construct
  source 1..110: mol_type = other DNA
tatatatatatatatatatatacacacacatgacgattcctcccctagctcccatttcatctgctgtttttctctgtctctcacacagaggaccagagcacagcttctaa

SEQ ID NO: 43105 - DNA, 110 bp, synthetic construct
  source 1..110: mol_type = other DNA
ttcatctgctgtttttctctgtctctcacacagaggaccagagcacagcttctaagagtgctgggcaggcagcggagtctcgacaagttcctggtgtgggaggggattct

SEQ ID NO: 43106 - DNA, 110 bp, synthetic construct
  source 1..110: mol_type = other DNA
agatccatcattcattgtctcgtctttcctgcagctcaggatagcagccatcctgtttcccatttgagcagagcacggggctgaggcaaaatccgaattgtggagccgtg

SEQ ID NO: 43107 - DNA, 110 bp, synthetic construct
  source 1..110: mol_type = other DNA
gcattcagttcagtacctgagcgccaggagcacggggctcagagagcagctgcagccacgaagtcttgaacacgcagggtgggaaagaaaagttccacggtcaggcccga

SEQ ID NO: 43108 - DNA, 110 bp, synthetic construct
  source 1..110: mol_type = other DNA
catgatgggtgccccacccgcttctcatccttcagtcacatggcacttgagcacctagagagcagcatctcggcgtacagccatgatatggcattcttgattgaaatcag

SEQ ID NO: 43109 - DNA, 110 bp, synthetic construct
  source 1..110: mol_type = other DNA
tagagagcagcatctcggcgtacagccatgatatggcattcttgattgaaatcaggacttgagctaattttctagcaggtggaaagaaagtatcataggaaggaatggtg

SEQ ID NO: 43110 - DNA, 110 bp, synthetic construct
  source 1..110: mol_type = other DNA
tgcgagacatttggaatgagaaagagtgaactgttcgaggcctttgacctgtttgatgtccgtgacttcggaaaggtaattggtttttcttttttttgtttttattttta

SEQ ID NO: 43111 - DNA, 110 bp, synthetic construct
  source 1..110: mol_type = other DNA
atgtccgtgacttcggaaaggtaattggtttttcttttttttgtttttatttttattggagaccgtttcctcaaatactcttgtttcttatcttgaaataggacacgtgg

SEQ ID NO: 43112 - DNA, 110 bp, synthetic construct
  source 1..110: mol_type = other DNA
gcttagaggtgattgatttgaaagaaactggcccaggaagtcagatcctgtaggattctgtgtgaccaccgggttgtcacctgatccctctaatcctcagtttcctcgtc

SEQ ID NO: 43113 - DNA, 110 bp, synthetic construct
  source 1..110: mol_type = other DNA
gctacatcctacacattttgataagttgtagtttcatttttatgtagttaaaatatattcagcttcacttgagatgatgtctttgactcttgggttacttagaaatgtgt

SEQ ID NO: 43114 - DNA, 110 bp, synthetic construct; identical to SEQ ID NO: 43113
  source 1..110: mol_type = other DNA

SEQ ID NO: 43115 - DNA, 110 bp, synthetic construct
  source 1..110: mol_type = other DNA
aacttttggtaaaatatttattgctcgttgatgaaaaactattatgtcaattatgataagttgtgcttaatgagtacatctctcttctctcctgatagtatttcatggca

SEQ ID NO: 43116 - DNA, 110 bp, synthetic construct
  source 1..110: mol_type = other DNA
ccattcttcaggaagcatccagcatgatcttgcctacttaaaacctttgcttggctatttcttgcgctctgcatagtatcaaacttcttaccgggacctcacaagtccct

SEQ ID NO: 43117 - DNA, 110 bp, synthetic construct
  source 1..110: mol_type = other DNA
tatttcttgcgctctgcatagtatcaaacttcttaccgggacctcacaagtccctgcatggcttttcctgcccatcttgccaaccacctctcacacccgatagcttttgt

SEQ ID NO: 43118 - DNA, 110 bp, synthetic construct
  source 1..110: mol_type = other DNA
ttagtcgtcatcatcaccttcctcctagtccttgtcttcaagatccaccatctatacatctacccaaacccggttgttagccttgacttactccctctccttcatcttca

SEQ ID NO: 43119 - DNA, 110 bp, synthetic construct
  source 1..110: mol_type = other DNA
ttcatgttacaaaaaggggactggaccagagcagagcttacaacactgggaggctttgcaaaatgtcaaccattccacttccagagattagtatgcagttagtctgggag

SEQ ID NO: 43120 - DNA, 110 bp, synthetic construct
  source 1..110: mol_type = other DNA
gcaggagtcccaggatgaagggctccttcgggccatctcagcagctgcttcccggggacaggcaaactgacaatcatttaagccaaggatgacgttcacctgaaaagcat

SEQ ID NO: 43121 - DNA, 110 bp, synthetic construct
  source 1..110: mol_type = other DNA
tgtcagggtctgggacactatcagcagcctgtttgcttacatccttttaatccagttcctgggcagagtaggcatagactccgtgtctatgtcaacaaagctggtgatat

SEQ ID NO: 43122 - DNA, 110 bp, synthetic construct
  source 1..110: mol_type = other DNA
ttcctgggcagagtaggcatagactccgtgtctatgtcaacaaagctggtgatattaaaacagccaacactctatagcactaacaagtgctgggaaccagaggaaatgct

SEQ ID NO: 43123 - DNA, 110 bp, synthetic construct
  source 1..110: mol_type = other DNA
agttaatttctatgcctatggaaaacgtaagtgcattttaccaccactatgtgtccagggtttggccaaatggcaagacaggagacttcaccaataagaatttcaggagc

SEQ ID NO: 43124 - DNA, 110 bp, synthetic construct
  source 1..110: mol_type = other DNA
cagggtttggccaaatggcaagacaggagacttcaccaataagaatttcaggagcatccagtatctccaaagtatatcactgttctaaaagtaaaaaattttcttgcttt

SEQ ID NO: 43125 - DNA, 110 bp, synthetic construct
  source 1..110: mol_type = other DNA
cctctgcttgtgtttgtcttcatgaacactcctattaataagtactgaggcttgtttccatctcactgaaagcaaactgatcctctagctgggctgtgatccaagactag

SEQ ID NO: 43126 - DNA, 110 bp, synthetic construct
  source 1..110: mol_type = other DNA
aaaattcatgagagtcaagaataggatatggtcccattcttaaattgagaatactttagctcctgaagtcagaaagacctgagtttaagactcactttgtcatatagtca

SEQ ID NO: 43127 - DNA, 110 bp, synthetic construct
  source 1..110: mol_type = other DNA
tggagcctttgctgagattatgggagcaagaactccttctccttacagtattgccacactggtagcctgtagccgggaacagcttcatggccgtcttgaccacaacatgg

SEQ ID NO: 43128 - DNA, 110 bp, synthetic construct
  source 1..110: mol_type = other DNA
gacatcccctcacagaaaacagatgcagaaacgacataatctacgccaggtgaactcatgaacattctcaattctgagaagatgcaccctcaatttggaagtgaaaatgc

SEQ ID NO: 43129 - DNA, 110 bp, synthetic construct
  source 1..110: mol_type = other DNA
tcatgaacattctcaattctgagaagatgcaccctcaatttggaagtgaaaatgctcaccatgtcagctatatcgtctaagaatgaaaagctttcaattcagaaagtttc

SEQ ID NO: 43130 - DNA, 110 bp, synthetic construct
  source 1..110: mol_type = other DNA
ctttgtaatggcagctaaaaatcccagactttactaaacaagaagtagcttcaccacctgctactcccctcctagcactagaaaatactgtattatagattcaaaccctt

SEQ ID NO: 43131 - DNA, 110 bp, synthetic construct
  source 1..110: mol_type = other DNA
ccaaataaataggaagagtgaaaaaataagccaacaagtatttgactggaaggtaaatgttatttctgccccttaaaaatgggcattaaaatatttgatttcatgtgata

SEQ ID NO: 43132 - DNA, 110 bp, synthetic construct
  source 1..110: mol_type = other DNA
tgggcatcttcccatctaagctattttccaaggatagggactagtataggaaacgctagatatatttggctctccttgggaactcatcacatactgcctgtttcagactg

SEQ ID NO: 43133 - DNA, 110 bp, synthetic construct
  source 1..110: mol_type = other DNA
ctgggagatagagactgtatctcacttcggatgacgaggcgtgttatttaactttagagcacagtttggtcaggtatgcttgcagcccgttaaaaaagtttggggtttcc

SEQ ID NO: 43134 - DNA, 110 bp, synthetic construct
  source 1..110: mol_type = other DNA
agagcacagtttggtcaggtatgcttgcagcccgttaaaaaagtttggggtttcctaagcttgggtttctttgtggtgcaaacccattgtagcatctacctggacctcta

SEQ ID NO: 43135 - DNA, 110 bp, synthetic construct
  source 1..110: mol_type = other DNA
taatactgctgaaacacttatcagactttcacctctccttttattttcctggagtattttaaagcaaaacacatatagcatatcatttcactcataaatacttcattaca

SEQ ID NO: 43136 - DNA, 110 bp, synthetic construct
  source 1..110: mol_type = other DNA
aaatgaagacaaaaggtggtgatttttacatttaaacaagttggaacatcaaacgtaaaaagtctatgtttcttgatgtgtatagtgtcttttagatccatggtgtattg

SEQ ID NO: 43137 - DNA, 110 bp, synthetic construct
  source 1..110: mol_type = other DNA
agatgtaagaccaaaaattaaaattatatgctgccttggcatctggtaaagccaggagggacttgaatgtcctaacccaaattcccctccgttttaaaggtagctgaggt

SEQ ID NO: 43138 - DNA, 110 bp, synthetic construct
  source 1..110: mol_type = other DNA
gagggacttgaatgtcctaacccaaattcccctccgttttaaaggtagctgaggtttgttttaatcacgtatggtaagacacatgacacagacacggctgtcatgaagga

SEQ ID NO: 43139 - DNA, 110 bp, synthetic construct
  source 1..110: mol_type = other DNA
ctatgtatttatctctgggtgcaataagaaagacagagatccctgcttttctggagctttcatttatatttttgggacatcatgccaataaataaaccagataatatcag

SEQ ID NO: 43140 - DNA, 110 bp, synthetic construct
  source 1..110: mol_type = other DNA
gctttcatttatatttttgggacatcatgccaataaataaaccagataatatcagttcgttataagggcgaacaccagtatttgattataattttagcaaagaagacgta

SEQ ID NO: 43141 - DNA, 110 bp, synthetic construct
  source 1..110: mol_type = other DNA
caagcagaattctccttgagctcagacaggagagcaacttcttcctcaaacctgtgtccctccagctccaaagatgtgtatacccgttttgttccaggcggaagcatctt

SEQ ID NO: 43142 - DNA, 110 bp, synthetic construct
  source 1..110: mol_type = other DNA
ttaagtttgtttaaagctcaggatgcttccaatatttaaagggttcaaggtgatagttaaaagtcattaaaagtggttcaaagttctaaggcaaagttttcacacagcca

SEQ ID NO: 43143 - DNA, 110 bp, synthetic construct
  source 1..110: mol_type = other DNA
gcacctaagcagcaacccaggtactgcaaagacagtgtcaaatccttaacctattgtgcaacagctgtaactcctatttttagttttttgaggaacctccacactatttt

SEQ ID NO: 43144 - DNA, 110 bp, synthetic construct
  source 1..110: mol_type = other DNA
gctaatgaaattccctgcagaacaagggcatttggcagaaagggctgcaaggaagaacatcatctgtacttaaaattccttattaagtgagcatttaaggcttcgttgta

SEQ ID NO: 43145 - DNA, 110 bp, synthetic construct
  source 1..110: mol_type = other DNA
accagtacattggttatatgtttgttgacttgcttggattctccattataatgtaggcttcttgaaggcagcaagggatggagctttattctgggttgtatccttagtac

SEQ ID NO: 43146 - DNA, 110 bp, synthetic construct
  source 1..110: mol_type = other DNA
ttaggagttgaacagacgtggttttaatttcagctccactgtatactagttgtatgaacttggggataccatctaaacactgtgtacctcaatttccatatttgtaaaat

SEQ ID NO: 43147 - DNA, 110 bp, synthetic construct
  source 1..110: mol_type = other DNA
accactaagtaatcatccaaatatgtatgtcatcaaataaattattttccttttggagaataactgactgctgtgttgcatgagccaatttattatctctgttctggaat

SEQ ID NO: 43148 - DNA, 110 bp, synthetic construct; identical to SEQ ID NO: 43147
  source 1..110: mol_type = other DNA

SEQ ID NO: 43149 - DNA, 110 bp, synthetic construct
  source 1..110: mol_type = other DNA
ccagcttatctactcaatacccccagttagatttctatttgatattagacttcgcagtttaaaattcaacttagggactttcccctgaaacctgtttctcttaatgtctt

SEQ ID NO: 43150 - DNA, 110 bp, synthetic construct
  source 1..110: mol_type = other DNA
tttacatgactggtgtgctagaaaatttttagtaagtctcttttctggaagagagagctccctaagattttacaggacataacccagtatttatgacatcttgcccaagg

SEQ ID NO: 43151 - DNA, 110 bp, synthetic construct
  source 1..110: mol_type = other DNA
agctccctaagattttacaggacataacccagtatttatgacatcttgcccaaggattgaaacagagctcatctgggccctgaccccgattctaactcactaaacttaag

SEQ ID NO: 43152 - DNA, 110 bp, synthetic construct
  source 1..110: mol_type = other DNA
gatgcagatattttaagtcaaagtcagcattgtcacttttactctaaaaccagctgctaatgagatagatagctaccccactctatttggaggtttgtacaaaatatata

SEQ ID NO: 43153 - DNA, 110 bp, synthetic construct
  source 1..110: mol_type = other DNA
ccagtttccttctcccatcccttatgacattgctaacattcaattcacttacctacacactaatcactcaataaattattaaggttattgctttaaagggttatctttta

SEQ ID NO: 43154 - DNA, 110 bp, synthetic construct; identical to SEQ ID NO: 43153
  source 1..110: mol_type = other DNA

SEQ ID NO: 43155 - DNA, 110 bp, synthetic construct
  source 1..110: mol_type = other DNA
aataaatgctaatcctacaaatgccagatgctgctccttcaaagggacaattgtccagaatcatttcagcccttagggtgacagtcctcttgttcccatgagcactttcc

SEQ ID NO: 43156 - DNA, 110 bp, synthetic construct
  source 1..110: mol_type = other DNA
tctaactcccgttcttaattcccaaatttactaatttctacggataccatgctacaccagaaatttaaaagaaataaaattagttcatgtcaaggtcatttttctataac

SEQ ID NO: 43157 - DNA, 110 bp, synthetic construct
  source 1..110: mol_type = other DNA
atcacatgggcccaccaatgcccttttccatctgccatgagactggcgtgatactcctttggtttttattcaaaaatttaaaaagccccatgtcgcagtcacagctgagt

SEQ ID NO: 43158 - DNA, 110 bp, synthetic construct
  source 1..110: mol_type = other DNA
cctttggtttttattcaaaaatttaaaaagccccatgtcgcagtcacagctgagtatgagccagcaacgtgctctaagcaacactttgttgggcatttctcttctattat

SEQ ID NO: 43159 - DNA, 110 bp, synthetic construct
  source 1..110: mol_type = other DNA
cctcattatggtttgagaggttatgattcaagctatatggcattctgctaaatctagaaaagaattccaaaatatggacaataaacagggaagacacaaatatgccataa

SEQ ID NO: 43160 - DNA, 110 bp, synthetic construct
  source 1..110: mol_type = other DNA
agaaaagaattccaaaatatggacaataaacagggaagacacaaatatgccataagaaaaacagcctataagagtttctgaactaagactcagttgcccattttcacata

SEQ ID NO: 43161 - DNA, 110 bp, synthetic construct
  source 1..110: mol_type = other DNA
tcctagcaccatgtattgaagagacttgtcttttctccatcatatacttttgcgtccttggttgcaggttaatttaccataagttcatgagtttattgctgggatttcta

SEQ ID NO: 43162 - DNA, 110 bp, synthetic construct
  source 1..110: mol_type = other DNA
agccagattaatataaaacctcatactaaagcctgttacctcctttcctcttatctgctgcatcatagctggcttccaactaacttaataaataaaaggccaagataaaa

SEQ ID NO: 43163 - DNA, 110 bp, synthetic construct
  source 1..110: mol_type = other DNA
ttttctattgcatcctcttgatcaaaacagtcacaggatatgtcctgactcaagggtaaggacatggttcactggaagctaacaaagtaaaagattttacagtctgcctt

SEQ ID NO: 43164 - DNA, 110 bp, synthetic construct
  source 1..110: mol_type = other DNA
agggagccaccgtcccaatacatagatacgttccctggccagaaagttcaccgagcctatttgtctcaagattttatttcccagacatgatcagtgaaatcattagccaa

SEQ ID NO: 43165 - DNA, 110 bp, synthetic construct
  source 1..110: mol_type = other DNA
gaggggagaacatctatgcaaagagatatttataccctgccctaggcagaaagaggtaaggatatctgctcaattgcctttagctcaaaataatccttatgccaaaatag

SEQ ID NO: 43166 - DNA, 110 bp, synthetic construct
  source 1..110: mol_type = other DNA
agaggcaatttcaggggtgagagcagcagcttcctagattgcagccttgacagagtgttttttaaggtgacagggaaagctttctgattatatacatgctgaattttagc

SEQ ID NO: 43167 - DNA, 110 bp, synthetic construct
  source 1..110: mol_type = other DNA
tgttttttaaggtgacagggaaagctttctgattatatacatgctgaattttagctaatgtagtaactacctttcattttggttattcttgtagcttttttctgggagtc

SEQ ID NO: 43168 - DNA, 110 bp, synthetic construct
  source 1..110: mol_type = other DNA
ctctccttctagacaactgggccacttttctgtctcataaatactgtttttcaccccacctcaggaaagctgcacgagacacattttcagtctagaatccttccccttct

SEQ ID NO: 43169 - DNA, 110 bp, synthetic construct
  source 1..110: mol_type = other DNA
ttccaaagtcaatagtctgcatcatattttcttgtttgtatatttatatcagttgtggtcatttttccagctacctgggtgacagaccaaacttggtgtccattccctga

SEQ ID NO: 43170 - DNA, 110 bp, synthetic construct
  source 1..110: mol_type = other DNA
tggtcatttttccagctacctgggtgacagaccaaacttggtgtccattccctgatttctttggagagcacagtacctatgtcagttggaacaatatatttttattcttt

SEQ ID NO: 43171 - DNA, 110 bp, synthetic construct
  source 1..110: mol_type = other DNA
ttatatgctaggccctttgtgctaagcagaatatgtggcatttaactaccatcgagagctcacattgtctctggggagaaagctaaaaacgactagaattaatgccataa

SEQ ID NO: 43172 - DNA, 110 bp, synthetic construct
  source 1..110: mol_type = other DNA
ccagaataaacattgtattttaaaactttatggaactaatttatagtgtaggacagggacaaacttgatctcatggcagcaaaattttatgtttccatttcagcaatact

SEQ ID NO: 43173 - DNA, 110 bp, synthetic construct; identical to SEQ ID NO: 43172
  source 1..110: mol_type = other DNA

SEQ ID NO: 43174 - DNA, 110 bp, synthetic construct
  source 1..110: mol_type = other DNA
cactcatttcctaactaaaatagaagcaattgtaccacagctatccagtcatattgtctccaaagtccacaattactggtgtcattatttacataatactcacttttctc

SEQ ID NO: 43175 - DNA, 110 bp, synthetic construct
  source 1..110: mol_type = other DNA
ggctagtatttgttcacatactcacattaggctaagggaagattttaatctaggtggccatgtatccagtcaaaattttaggtctctattttctatttcctcaagtttga

SEQ ID NO: 43176 - DNA, 110 bp, synthetic construct
  source 1..110: mol_type = other DNA
tctaagaaaggatctgctaagtctagcttgggtcttccaggacacctagttaagacagtcacagatgctgtatacaatagataagagtcatttcccccggagttaatcag

SEQ ID NO: 43177 - DNA, 110 bp, synthetic construct
  source 1..110: mol_type = other DNA
agctccagaagaatcttttgataaaattcagcattgatttatgagaaaatctttccagaaagtggccatagagggaacatacttcaacataataaaggctatatacgaca

SEQ ID NO: 43178 - DNA, 110 bp, synthetic construct; identical to SEQ ID NO: 43177
  source 1..110: mol_type = other DNA

SEQ ID NO: 43179 - DNA, 110 bp, synthetic construct
  source 1..110: mol_type = other DNA
ttaagaagtatttctttaatcatcaatcaggaaagtgaccttgatgctcaaagatggttccttaattgcttaatttcagaaagcagatgagttaacccaaccatactatc

SEQ ID NO: 43180 - DNA, 110 bp, synthetic construct
  source 1..110: mol_type = other DNA
cctgctttccagtcacaacctcaggcaaaatcttccaggcctttctctgcctctgacaccagacaaagcgttttgtgtacttaattccttatcgccaaccctgagctccc

SEQ ID NO: 43181 - DNA, 110 bp, synthetic construct
  source 1..110: mol_type = other DNA
tccagaacctcacctcagagccttcttcactagccccttctcaggccatacctgagactcttgcccatttaccagaaaataaaacaaagggcttctaaaagataaataaa

SEQ ID NO: 43182 - DNA, 110 bp, synthetic construct
  source 1..110: mol_type = other DNA
ggttgggactattgtgaatgtgcaagaaagagtggagctggtaggtaagaaggcacctgttggggccatacctgtcccttggcacagtgacagaagtgagactgtgccag

SEQ ID NO: 43183 - DNA, 110 bp, synthetic construct
  source 1..110: mol_type = other DNA
cctgttggggccatacctgtcccttggcacagtgacagaagtgagactgtgccagttcctgtgggtggggtcaagcggatggatgagaatggagagcacggcagaatggt

SEQ ID NO: 43184 - DNA, 110 bp, synthetic construct
  source 1..110: mol_type = other DNA
aggcaagcacattagatttttcattatggtggttattgatttacaaatatagtgcaagatttacagagtcagatagattcctatattgatccctggaaattttccaaaat

SEQ ID NO: 43185 - DNA, 110 bp, synthetic construct
  source 1..110: mol_type = other DNA
gcttccctatatccacttttatagttccgtaaaataaaataaaaatacggacagataagaaattaactcattttcccctttcaattcttgagtcagctttttatcccatt

SEQ ID NO: 43186 - DNA, 110 bp, synthetic construct
  source 1..110: mol_type = other DNA
aatcatgctcattgcctacagacgtggttagaaattttatatttaaatttgaagctgaatttggtgttcattataatctgcatgagactgctggataagaagggtgcaca

SEQ ID NO: 43187 - DNA, 110 bp, synthetic construct
  source 1..110: mol_type = other DNA
ggccagattccttgggggtaaccacacaattttgaagctggcagctgtcctggggccaaaagccctttcttgtcctagagcctagtgcctaacataaggttgggtccaat

SEQ ID NO: 43188 - DNA, 110 bp, synthetic construct
  source 1..110: mol_type = other DNA
acttgaactgtggtaactctataatgatctcagtctgtcatcaacaagatggggcaagaggaatgggacagctcagattattactccaaacagaaaataaataaacgtag

SEQ ID NO: 43189 - DNA, 110 bp, synthetic construct
  source 1..110: mol_type = other DNA
aataacagctcttccaagagatccaagcagcctggtcaaggaattattgacggaacaataagaatacgcacattattgttataatacacaccagtgaaacagaactgctg

SEQ ID NO: 43190 - DNA, 110 bp, synthetic construct; identical to SEQ ID NO: 43189
  source 1..110: mol_type = other DNA

SEQ ID NO: 43191 - DNA, 110 bp, synthetic construct
  source 1..110: mol_type = other DNA
gttaatcagaacagctccagcaagcacactgctgctctgggcttatcctactagctgctcactattcctttgactacatgccgttctttattaccaagagacgatttagc

SEQ ID NO: 43192 - DNA, 110 bp, synthetic construct
  source 1..110: mol_type = other DNA
tgctcactattcctttgactacatgccgttctttattaccaagagacgatttagcattttatgatgttttcatgctagagcttggcagtttaattttcctacatttatga

SEQ ID NO: 43193 - DNA, 110 bp, synthetic construct
  source 1..110: mol_type = other DNA
ctgctatggtgtggatttgattcttgaccccggaccttcctcaagctgcaggaaatgccaaaaaatatatgtattttaaaaaatatagaaaatagtttgtgtcatgctct

SEQ ID NO: 43194 - DNA, 110 bp, synthetic construct
  source 1..110: mol_type = other DNA
tgccaaaaaatatatgtattttaaaaaatatagaaaatagtttgtgtcatgctctggagtcctacatgtcacttccactcatatcctactcatatccatcctaaactaca

SEQ ID NO: 43195 - DNA, 110 bp, synthetic construct; identical to SEQ ID NO: 43193
  source 1..110: mol_type = other DNA

SEQ ID NO: 43196 - DNA, 110 bp, synthetic construct; identical to SEQ ID NO: 43194
  source 1..110: mol_type = other DNA

SEQ ID NO: 43197 - DNA, 110 bp, synthetic construct
  source 1..110: mol_type = other DNA
cacctgacaaaaagtgatctggcagtaaatgttttgaatcaataagctctcctgcacatttacttaaagaagctgcatattccgataaataagaatttaaattattttga

SEQ ID NO: 43198 - DNA, 110 bp, synthetic construct; identical to SEQ ID NO: 43197
  source 1..110: mol_type = other DNA

SEQ ID NO: 43199 - DNA, 110 bp, synthetic construct
  source 1..110: mol_type = other DNA
accaggttactctttgcaactttttcaccttcacttgcagacaacttgaattcttcccttatttctttataaaaaattatttgtggtataggatttatgcagctacttaa

SEQ ID NO: 43200 - DNA, 110 bp, synthetic construct
  source 1..110: mol_type = other DNA
tgcagacaacttgaattcttcccttatttctttataaaaaattatttgtggtataggatttatgcagctacttaatcagttttgctgttctcaactgtgttacgggaata

SEQ ID NO: 43201 - DNA, 110 bp, synthetic construct
  source 1..110: mol_type = other DNA
gaacacctaatttagtgacagcagacacctctgttccagtgagcctgacctttaccccttgagctccaaaagtgtgtttctagatacctgcttaatatctctttccttga

SEQ ID NO: 43202 - DNA, 110 bp, synthetic construct
  source 1..110: mol_type = other DNA
cccttgagctccaaaagtgtgtttctagatacctgcttaatatctctttccttgaatgtgccacactacttcaaaagcaaatgtctaaaatagaatgtatttttgctctt

SEQ ID NO: 43203 - DNA, 110 bp, synthetic construct; identical to SEQ ID NO: 43201
  source 1..110: mol_type = other DNA

SEQ ID NO: 43204 - DNA, 110 bp, synthetic construct; identical to SEQ ID NO: 43202
  source 1..110: mol_type = other DNA

SEQ ID NO: 43205 - DNA, 110 bp, synthetic construct
  source 1..110: mol_type = other DNA
aaatgactttgttattttagccccagttgagctcctactttaataaggccacatgagtcatatccattatgtcatgtggaaaggaaaaacaaatcagctgatctcagaat

SEQ ID NO: 43206 - DNA, 110 bp, synthetic construct
  source 1..110: mol_type = other DNA
ctagcttaatttcaaaacatacaaaattgctttacagctctgtctccagtcatcttgtttgttgaggtccccaaatatacctttatacactgcgtgcccctaaataaata

SEQ ID NO: 43207 - DNA, 110 bp, synthetic construct
  source 1..110: mol_type = other DNA
ccaactcccttctagaaatacattctgatggcatttcatcagagtcttctttaatctcctctgcaatgctcaaatttggtttggggaagatttttccaaatcctttattg

SEQ ID NO: 43208 - DNA, 110 bp, synthetic construct
  source 1..110: mol_type = other DNA
ctcctctgcaatgctcaaatttggtttggggaagatttttccaaatcctttattggatgcatcaactccagaagcaggtaaatctaagaatgaacattgatactattatc

SEQ ID NO: 43209 - DNA, 110 bp, synthetic construct
  source 1..110: mol_type = other DNA
attaactctactccaccaagagtgaatttaagaggcatatttcttctgcttcaaatttgtcccatataataaagagcctgttgcagctggcttagacccactccaagagt

SEQ ID NO: 43210 - DNA, 110 bp, synthetic construct
  source 1..110: mol_type = other DNA
tttgtcccatataataaagagcctgttgcagctggcttagacccactccaagagtcctacctaaaaggtagtgactgcaggagaaagagataataaggagaagcatcatg

SEQ ID NO: 43211 - DNA, 110 bp, synthetic construct
  source 1..110: mol_type = other DNA
cctagaaattttgcatgattccatggagctgttgtggcgaggagaccccaaaatgactgaatttctcaccagctaggtgggtagaagcacaaacagattagatttcatgc

SEQ ID NO: 43212 - DNA, 110 bp, synthetic construct
  source 1..110: mol_type = other DNA
actgaatttctcaccagctaggtgggtagaagcacaaacagattagatttcatgcaaaacaatgatagaatatgaaagtttctaagccctagtgttgtgatgtgagatct

SEQ ID NO: 43213 - DNA, 110 bp, synthetic construct
  source 1..110: mol_type = other DNA
tagtagccacctgggtgacttgcccaaaatccattggccaaaagaatagagctcgggattggatgcttgtgaaggttgtgtgttgttttaagagacaacattttctgtat

SEQ ID NO: 43214 - DNA, 110 bp, synthetic construct
  source 1..110: mol_type = other DNA
tggaagaaggtgaatgttgcatgcaaagaacttattaatatggagcctctggtttgtaagctaaaattctctcctcagctaatacagtggtttgctgtatgaactgataa

SEQ ID NO: 43215 - DNA, 110 bp, synthetic construct
  source 1..110: mol_type = other DNA
atttggtgtttgtaccagaaagattcccaacttgaggattaagaagtgatttgaaaattatccagtggagtgagtacaggcaactctttaaaaagccgattttgcagtag

SEQ ID NO: 43216 - DNA, 110 bp, synthetic construct; identical to SEQ ID NO: 43215
  source 1..110: mol_type = other DNA

SEQ ID NO: 43217 - DNA, 110 bp, synthetic construct
  source 1..110: mol_type = other DNA
ctgccacattccttatacaacccctttatccatcagggtttagaggctcattcatcctggcccttttatttcatgattttggttttgttaaaggctctcttaatccttag

SEQ ID NO: 43218 - DNA, 110 bp, synthetic construct
  source 1..110: mol_type = other DNA
aggtagcaagagggagaattaagatacaaactcaagtctatttccaaaatgcacactcttccatacagcctacggtggcagtggacatcctatgtcttatgtatcatttg

SEQ ID NO: 43219 - DNA, 110 bp, synthetic construct
  source 1..110: mol_type = other DNA
ctcttccatacagcctacggtggcagtggacatcctatgtcttatgtatcatttggatttgcagtcactcagttttacagcccttgtaaatacttcaggtgatttggtat

SEQ ID NO: 43220 - DNA, 110 bp, synthetic construct
  source 1..110: mol_type = other DNA
accaatataatatagtgcatgagctcatgaaagaccatacagcttcatcttgttatctggaacatgccttcttggagcactgagtcatcatgtaagatgacctactaccc

SEQ ID NO: 43221 - DNA, 110 bp, synthetic construct
  source 1..110: mol_type = other DNA
aatttataaagcgaactcaatggtttctgccaaaaaaggtgaaggattcacccatcattgaagcccctgtgatctttactgacgggactagtaaagggaaggctggatat

SEQ ID NO: 43222 - DNA, 110 bp, synthetic construct
  source 1..110: mol_type = other DNA
ctcaatggtttctgccaaaaaaggtgaaggattcacccatcattgaagcccctgtgatctttactgacgggactagtaaagggaaggctggatatgtggctaatcaatct

SEQ ID NO: 43223 - DNA, 110 bp, synthetic construct
  source 1..110: mol_type = other DNA
gaacgtagatgtaggtttacatattatatgcatatactaagttaatcaccataggtatattctgagctattacatttgaatgctaatatgaatgcatggaaagcatgaac

SEQ ID NO: 43224 - DNA, 110 bp, synthetic construct
  source 1..110: mol_type = other DNA
cacaagatatggggaaagaacaaggaacttctacgcactatccaggtgtgtcactctcccaggtcctccacatgttcaccaatctggaaaccctcaaatcttgtccttcc

SEQ ID NO: 43225 - DNA, 110 bp, synthetic construct
  source 1..110: mol_type = other DNA
ctcccaggtcctccacatgttcaccaatctggaaaccctcaaatcttgtccttccaagttcttatgaagccttcgttacatagacatcattgattaaatttttggccatt

SEQ ID NO: 43226 - DNA, 110 bp, synthetic construct
  source 1..110: mol_type = other DNA
aaggtttctttagtttcagtttgtttattgaggcctcagtatttaaaacattgattctgaatctgtatcccttcatttctagggatttgtgacagtattaagggagattt

SEQ ID NO: 43227 - DNA, 110 bp, synthetic construct
  source 1..110: mol_type = other DNA
gtgaataaagacagagaagcacattgtgttttacaatcagaacctttggttgttccagatggagcattcattcaattagcaggcatacccttttacagtcaatctcaggg

SEQ ID NO: 43228 - DNA, 110 bp, synthetic construct
  source 1..110: mol_type = other DNA
cagatggagcattcattcaattagcaggcatacccttttacagtcaatctcaggggatctcttcagcagaatttttttcaaagtggaattccactttggaagaaagcatt

SEQ ID NO: 43229 - DNA, 110 bp, synthetic construct
  source 1..110: mol_type = other DNA
cactgatctatatttttgtttttgtgctagtaccttactgtttcagtgactatagctttgtagtatagtgtgacgtcttggagcctgattcctccagttccagcctataa

SEQ ID NO: 43230 - DNA, 110 bp, synthetic construct; identical to SEQ ID NO: 43229
  source 1..110: mol_type = other DNA

SEQ ID NO: 43231 - DNA, 110 bp, synthetic construct
  source 1..110: mol_type = other DNA
ttcacactaaaatacacatgcaaagcctcttggcaaacagatatttaccagttcaagatatttaaaaaattgtcaggcacttacttatcactaacctaacttatcagaga

SEQ ID NO: 43232 - DNA, 110 bp, synthetic construct
  source 1..110: mol_type = other DNA
agatatttaaaaaattgtcaggcacttacttatcactaacctaacttatcagagacttcagtggacacaggtggcaaaggaccttgacttatataattacttcaaaagtt

SEQ ID NO: 43233 - DNA, 110 bp, synthetic construct
  source 1..110: mol_type = other DNA
tactgggtgtgtgcaaagagatacaggcttattctgtgtagctaaggctcatgcagtcatatctcagcatgtcacatacccctgggcttaaaatgctaatgtcgcacaag

SEQ ID NO: 43234 - DNA, 110 bp, synthetic construct
  source 1..110: mol_type = other DNA
attctcgattacactgatggaatggaggaaatatttggttccctcaattccttgaaacaagacatcgagcatatgaagtttccaatgggtacgcagaccaacccagcccg

SEQ ID NO: 43235 - DNA, 110 bp, synthetic construct
  source 1..110: mol_type = other DNA
atatgtaaagacctaaacagagaaatgttgaaatctggttgcgttgagctatactgaacatcagtttcagaacaaaagttttgcagttattgtctatcctagcaacgggg

SEQ ID NO: 43236 - DNA, 110 bp, synthetic construct
  source 1..110: mol_type = other DNA
acactcaagttgatgacattagtattctgccattttcttcttcttgagtgttgtgggacagtttctaacatttcttcagtgtccaattatctcatactatcacaccatat

SEQ ID NO: 43237 - DNA, 110 bp, synthetic construct
  source 1..110: mol_type = other DNA
gagtgttgtgggacagtttctaacatttcttcagtgtccaattatctcatactatcacaccatattatgctacaatagatattttttacaaaatactgttttcagtctat

SEQ ID NO: 43238 - DNA, 110 bp, synthetic construct
  source 1..110: mol_type = other DNA
aaagtagtataatggtttgaaaatacctacagtgacaagcacagattcctttattatgttacctgagttatcaacttactgcttatgatattccccttaaatagtctcac

SEQ ID NO: 43239 - DNA, 110 bp, synthetic construct; identical to SEQ ID NO: 43238
  source 1..110: mol_type = other DNA

SEQ ID NO: 43240 - DNA, 110 bp, synthetic construct
  source 1..110: mol_type = other DNA
actgagtaattcaccatggctgaaaccttcaccttaaacaccagcttcagctaaaaacaaagaggatgctgggggtagtggtttggcactttggagggaaggacagcaat

SEQ ID NO: 43241 - DNA, 110 bp, synthetic construct
  source 1..110: mol_type = other DNA
gcatgggattatagcttcctctgtaccttttgcttttgttgtgctttgcatcgtgtaattgtatacaatttttaaaacataccctcaattacaatgagatttcaggagat

SEQ ID NO: 43242 - DNA, 110 bp, synthetic construct
  source 1..110: mol_type = other DNA
ttgttgtgctttgcatcgtgtaattgtatacaatttttaaaacataccctcaattacaatgagatttcaggagatgtgttcaaaagtttagatttacactagacaactgt

SEQ ID NO: 43243 - DNA, 110 bp, synthetic construct; identical to SEQ ID NO: 43241
  source 1..110: mol_type = other DNA

SEQ ID NO: 43244 - DNA, 110 bp, synthetic construct; identical to SEQ ID NO: 43242
  source 1..110: mol_type = other DNA

SEQ ID NO: 43245 - DNA, 110 bp, synthetic construct
  source 1..110: mol_type = other DNA
aggtagttctttttgctgcttttgcaaatttaaatgaaatcactccttttcatcgaaggggattttggcttcatcccacccccatcaccacagcctcccacttcccctac

SEQ ID NO: 43246 - DNA, 110 bp, synthetic construct
  source 1..110: mol_type = other DNA
aatcaggtgtgagccaaatgctcaagactgagccaaatgaactcaagactgagttcattcacatggcccatgattcaactaatcataacaacaaaataaaatcctaaaaa

SEQ ID NO: 43247 - DNA, 110 bp, synthetic construct
  source 1..110: mol_type = other DNA
cattcacatggcccatgattcaactaatcataacaacaaaataaaatcctaaaaaaacctctagacactgaagtttgggtgaagtacctgcttagtgactcatcaatgtg

SEQ ID NO: 43248 - DNA, 110 bp, synthetic construct
  source 1..110: mol_type = other DNA
catcttactgagagaaaatgtatgccttggtaaggatgttcttatggaattcagaggtatttttgttgttgttttgttgttttttgctttttagggtgacacctgcagca

SEQ ID NO: 43249 - DNA, 110 bp, synthetic construct
  source 1..110: mol_type = other DNA
aaaatcaagtttggtcaaagataatagagaaaacaagactactatctatgaccaggacatgaatagttgaaaatgaattctcacattattgtgtccagtgtagaacccaa

SEQ ID NO: 43250 - DNA, 110 bp, synthetic construct
  source 1..110: mol_type = other DNA
gacatgaatagttgaaaatgaattctcacattattgtgtccagtgtagaacccaacagcatcaccctccatattcaaatttcacaaatgatcagtatggctaaaatcaag

SEQ ID NO: 43251 - DNA, 110 bp, synthetic construct
  source 1..110: mol_type = other DNA
actaaaaatagaactaccatataatgcagcaatcccacttgtggacatatatctggagaaaaccataacttgaaaagaatacatgcacgcacctcagtgtttattgcagc

SEQ ID NO: 43252 - DNA, 110 bp, synthetic construct; identical to SEQ ID NO: 43251
  source 1..110: mol_type = other DNA

SEQ ID NO: 43253 - DNA, 110 bp, synthetic construct
  source 1..110: mol_type = other DNA
tgattcctgaaatgtaaatactattagtgcaaccacaagcttctcatgcataaaatggacattgagcaaaatatgacttcctcgaaattaaaaatgcatttttaaagaca

SEQ ID NO: 43254 - DNA, 110 bp, synthetic construct; identical to SEQ ID NO: 43253
  source 1..110: mol_type = other DNA

SEQ ID NO: 43255 - DNA, 110 bp, synthetic construct
  source 1..110: mol_type = other DNA
tatttcaataggctagttataaatgacagtgaatatatgcatatataatagctacagactgtgtgtgttggacagaaaatacacattgatagtcttcactgccaactttc

SEQ ID NO: 43256 - DNA, 110 bp, synthetic construct
  source 1..110: mol_type = other DNA
agacctccctcactgacttgttgacaggtgtaacaaaagcctatttttatgtaattctgcatctagaaacaccacttccttcaccctagtcctagtactttctcagagct

SEQ ID NO: 43257 - DNA, 110 bp, synthetic construct
  source 1..110: mol_type = other DNA
tctgcatctagaaacaccacttccttcaccctagtcctagtactttctcagagctctgactcccttattttcactatcattctcagatgacacaaccctcttccctgact

SEQ ID NO: 43258 - DNA, 110 bp, synthetic construct
  source 1..110: mol_type = other DNA
cttcagggaacagaagactgtctaacatgaaaacacaaggttgaggaataacagtctggactagattccctttataagcattgtggggctgtcagggtcagcagcactct

SEQ ID NO: 43259 - DNA, 110 bp, synthetic construct
  source 1..110: mol_type = other DNA
ctggactagattccctttataagcattgtggggctgtcagggtcagcagcactcttcgtggatactaagaacactgctgtcttcgtactactgaaatggcagcctgtcac

SEQ ID NO: 43260 - DNA, 110 bp, synthetic construct
  source 1..110: mol_type = other DNA
aagattctgtctttttctttctattggaatatgtttctgtaactttgcctaattttctatattgtttctatgtattggtaaaccagctatttctccaagtctggaaggag

SEQ ID NO: 43261 - DNA, 110 bp, synthetic construct
  source 1..110: mol_type = other DNA
tctatattgtttctatgtattggtaaaccagctatttctccaagtctggaaggagtggccttacttagtatatgccctctggggttcaaaagcacagtctcacctggtca

SEQ ID NO: 43262 - DNA, 110 bp, synthetic construct
  source 1..110: mol_type = other DNA
agccaggctgttcctgcacatgctaagctatgtcgactctgcccactcccatcacatttacttttatgtgtcacgtggtcatacaagtcagagggcacaggattcagtcc

SEQ ID NO: 43263 - DNA, 110 bp, synthetic construct
  source 1..110: mol_type = other DNA
tgctttttagggccacaactattggacgttcccaggatagggtccaaccagagctgcagctgctggcttatgccacagccatggcaatgccaagggatctgagccatgtc

SEQ ID NO: 43264 - DNA, 110 bp, synthetic construct; identical to SEQ ID NO: 43263
  source 1..110: mol_type = other DNA

SEQ ID NO: 43265 - DNA, 110 bp, synthetic construct
  source 1..110: mol_type = other DNA
gatcttaatcagctcacatagtgtagaagctggcaggtaagggagaacagattcaggccaagcagcggagccttcttcagggtctaaattttcagaaaaacaaaacccct

SEQ ID NO: 43266 - DNA, 110 bp, synthetic construct
  source 1..110: mol_type = other DNA
aatattttctatagccaggtgaggtagtcagaaatataaagatacagaatgaactgtcccaccaaatttgtcgattttaggatcacttatcagtcattggtccattgagt

SEQ ID NO: 43267 - DNA, 110 bp, synthetic construct
  source 1..110: mol_type = other DNA
gtcccaccaaatttgtcgattttaggatcacttatcagtcattggtccattgagtagagaatgatgaatgtggtactaagtccatgggttacatgctataggggtcaact

SEQ ID NO: 43268 - DNA, 110 bp, synthetic construct
  source 1..110: mol_type = other DNA
aattaaaatgtcagaatacagtttcagaagctcagtataaaaaacaggcaacagtgcatagcaaaacaaaacaaaacaaaacaagcaatttcactgggcaaccaaatcca

SEQ ID NO: 43269 - DNA, 110 bp, synthetic construct
  source 1..110: mol_type = other DNA
tcaaaataatctatggttttaaaagacaaaagaggttactcttgaagcagtgactgccagggaatgcaaatgggctcaaaaactttctatgactttgcatctcattcaga

SEQ ID NO: 43270 - DNA, 110 bp, synthetic construct
  source 1..110: mol_type = other DNA
gccagggaatgcaaatgggctcaaaaactttctatgactttgcatctcattcagaactcattgaatcacaagagcttatatgatttgtacctaaatccccccatcgtctc

SEQ ID NO: 43271 - DNA, 110 bp, synthetic construct
  source 1..110: mol_type = other DNA
aatccaagaagaagaaagatgaagaatgggatctgttggaaggatctcaagggtatactgggaaaaagcaggcttgtcaatcggcaattaaaatttcaaggcagtcagtg

SEQ ID NO: 43272 - DNA, 110 bp, synthetic construct
  source 1..110: mol_type = other DNA
tactgggaaaaagcaggcttgtcaatcggcaattaaaatttcaaggcagtcagtgcatttaggcagtgggtgcccaagaagatgtggctggcatttcctaaaagaccaag

SEQ ID NO: 43273 - DNA, 110 bp, synthetic construct
  source 1..110: mol_type = other DNA
caacagagacaccgacttactatttggggggctgttattgggtagaaagtcaaatcaaaatcccatccaactctagaagtgtctggttctattagttcctgtttcattgg

SEQ ID NO: 43274 - DNA, 110 bp, synthetic construct
  source 1..110: mol_type = other DNA
caaaatcccatccaactctagaagtgtctggttctattagttcctgtttcattggcagtgaagccctaagaacaccccttgtggaatgaaaacactacataatatagaag

SEQ ID NO: 43275 - DNA, 110 bp, synthetic construct
  source 1..110: mol_type = other DNA
aggaaagtacagagtttattgcaggccaccaagcaaagagaatggggagaaagcctcaagtcctctccagcttcgtgtctgagttaggctagaagtgatcatcatctgtg

SEQ ID NO: 43276 - DNA, 110 bp, synthetic construct
  source 1..110: mol_type = other DNA
atctgttgtcttccaatatgaaaaaattactgcgttaccactgaagtcctaacgccacagaatagctgctgtaaaaactttcgatgcccttttacaaacatgaaagcact

SEQ ID NO: 43277 - DNA, 110 bp, synthetic construct
  source 1..110: mol_type = other DNA
cacagaatagctgctgtaaaaactttcgatgcccttttacaaacatgaaagcactaatgaattgcaaagatcaaaatcagtgttcctcattttggtgcctaaaaaacgag

SEQ ID NO: 43278 - DNA, 110 bp, synthetic construct
  source 1..110: mol_type = other DNA
caaaataacagtggcttaaataaagttgaagttttttgtctcacaaactgggcgcatctggtaggagtgtctcttgtgggcacccaggctccttctgatagagttttttc

SEQ ID NO: 43279 - DNA, 110 bp, synthetic construct
  source 1..110: mol_type = other DNA
taatccattgtgatggatggtaaagaaaaaaaaatgattcatgacacttgttaaagggccgcaaggcagactttatttaaggggggccatcgtgattgttgaagggaccc

SEQ ID NO: 43280 - DNA, 110 bp, synthetic construct
  source 1..110: mol_type = other DNA
gggccgcaaggcagactttatttaaggggggccatcgtgattgttgaagggacccctgtgacggggtttcgcagtgcgagagagagattgggctcaactccaaaaacaac

SEQ ID NO: 43281 - DNA, 110 bp, synthetic construct
  source 1..110: mol_type = other DNA
cccactgatccacaatgggaactccccagggcatactcttttgtacctcttgggtttttgaatagtgtgcatggatcacctacacttttttttaacagttaatttttgtc

SEQ ID NO: 43282 - DNA, 110 bp, synthetic construct
  source 1..110: mol_type = other DNA
ttttgaatagtgtgcatggatcacctacacttttttttaacagttaatttttgtcgtggagcttgttctgcttggagcagggggcatctcaccttgcccccgcttcccct

SEQ ID NO: 43283 - DNA, 110 bp, synthetic construct
  source 1..110: mol_type = other DNA
gggtatctcaccgtgcagcacacagacgtccacttaaccctcccgtttttactgtagtgttccaaggccagtcatcctattcgccctctctacccacagcttctgcccca

SEQ ID NO: 43284 - DNA, 110 bp, synthetic construct
  source 1..110: mol_type = other DNA
agtgttccaaggccagtcatcctattcgccctctctacccacagcttctgccccagtggcaaagagacagtcaggctgactgcgcagggctaggaaagctcatggtaggg

SEQ ID NO: 43285 - DNA, 110 bp, synthetic construct
  source 1..110: mol_type = other DNA
tttcacggggtgtcatgaacatgtttccctgacttacctggatgttccagcatgttcaggtctggccagaatttttttcatacttctttgccagctagagaacatttgga

SEQ ID NO: 43286 - DNA, 110 bp, synthetic construct
  source 1..110: mol_type = other DNA
tcaggtctggccagaatttttttcatacttctttgccagctagagaacatttggatggttcgggaccttccctctggctaatggtcagcagtcttccaaaatgtctttac

SEQ ID NO: 43287 - DNA, 110 bp, synthetic construct
  source 1..110: mol_type = other DNA
tgcatgctcttaaaatagaatctgcgtaactaaagtttctggttaatcacacttttattgccgtttaagataatcggtacagcgacaaccgcaatgttatgggaaccaga

SEQ ID NO: 43288 - DNA, 110 bp, synthetic construct
  source 1..110: mol_type = other DNA
tattgccgtttaagataatcggtacagcgacaaccgcaatgttatgggaaccagagatggttgacatgtgcatcccactacataaccagcagtctttcttcactgtctac

SEQ ID NO: 43289 - DNA, 110 bp, synthetic construct
  source 1..110: mol_type = other DNA
gtgggtattcttgggtgacttaacctctgggtgtccattttctcagctttgaagtggtgattttaagaattcagtaaagtagagttccagtccaacatagcaacagagac

SEQ ID NO: 43290 - DNA, 110 bp, synthetic construct
  source 1..110: mol_type = other DNA
tgcaacagaggatctacacttatatacatggttttactgttgatgaaggctttaattcagtaaacatttctggcatgcctgatgtggtgcaaaatgggatcggcggtgtc

SEQ ID NO: 43291 - DNA, 110 bp, synthetic construct; identical to SEQ ID NO: 43290
  source 1..110: mol_type = other DNA

SEQ ID NO: 43292 - DNA, 110 bp, synthetic construct
  source 1..110: mol_type = other DNA
aaggcatgtttatgtttgataatcctgtcaacgatttttcggtaatcatccagagcataccactccctgcatttcataaagacagaaaaagacatcataagaaatcacct

SEQ ID NO: 43293 - DNA, 110 bp, synthetic construct
  source 1..110: mol_type = other DNA
cataccactccctgcatttcataaagacagaaaaagacatcataagaaatcacctagctattaatgggtaaataatggtctagttaacatttattgaatacctgctatgt

SEQ ID NO: 43294 - DNA, 110 bp, synthetic construct
  source 1..110: mol_type = other DNA
aaattttttaagtttatctactttttccttctttttgactatggctgtaccaagttgtaaagcttctccatttgtaaatgttttgcagtattcattcttcatctctttgc

SEQ ID NO: 43295 - DNA, 110 bp, synthetic construct
  source 1..110: mol_type = other DNA
agatggagatgctacgtctgttttccataccagaagatagctcagaatcccaaagcaccgatgcactctgaactagacattttccacagttagatgttaatttcagtcat

SEQ ID NO: 43296 - DNA, 110 bp, synthetic construct
  source 1..110: mol_type = other DNA
caccgatgcactctgaactagacattttccacagttagatgttaatttcagtcatatatgcgtatacacatatttgtacaacaactcaaacaggtcttttggtttaccta

SEQ ID NO: 43297 - DNA, 110 bp, synthetic construct
  source 1..110: mol_type = other DNA
tcttgtcaataacctagatgaaaggtaaattagaatatttaagagaaaggaaaatacagagtgagggataaaataataataccaccttcttacagtaatttctgggctcc

SEQ ID NO: 43298 - DNA, 110 bp, synthetic construct
  source 1..110: mol_type = other DNA
agatgaaaggtaaattagaatatttaagagaaaggaaaatacagagtgagggataaaataataataccaccttcttacagtaatttctgggctccccaaagcattacttt

SEQ ID NO: 43299 - DNA, 110 bp, synthetic construct
  source 1..110: mol_type = other DNA
gcactacaccgcagtgtctcctcaggactgagtcctctggatcagagaccacgtcatatccttttatttccagggcccagcacagtgccccgtggaatatattaaagctc

SEQ ID NO: 43300 - DNA, 110 bp, synthetic construct
  source 1..110: mol_type = other DNA
tattgtttgcaaatattttctcctcatccacagtctgtcttttcattttgcttatggttccctttgctatgtaaaagcttgtcagtttgattaggctccatttgtttatt

SEQ ID NO: 43301 - DNA, 110 bp, synthetic construct; identical to SEQ ID NO: 43300
  source 1..110: mol_type = other DNA

SEQ ID NO: 43302 - DNA, 110 bp, synthetic construct
  source 1..110: mol_type = other DNA
cacacaccagggtttggaaacggtgaccattactctctggtcctgattggagcgtcattcttcaacagcaaataccttgacctctttcagaggcaacctgccgccgtcca

SEQ ID NO: 43303 - DNA, 110 bp, synthetic construct
  source 1..110: mol_type = other DNA
gaaaataaaatggaataatttggtggaaattagctttaggggccttctttggctggaggttcagggaaagctggagggggcatttgagatgtggcttgaagggtcagatg

SEQ ID NO: 43304 - DNA, 110 bp, synthetic construct
  source 1..110: mol_type = other DNA
gaggttcagggaaagctggagggggcatttgagatgtggcttgaagggtcagatgcaaccatcatgtaagatctataagaagagagctttgggagttcccactgggactc

SEQ ID NO: 43305 - DNA, 110 bp, synthetic construct
  source 1..110: mol_type = other DNA
ccactgcctgttgtcatcgtcaccacaaatcctatatgcgaaaggccaaaattacctgcttttcttaagcaacatcttctaccaattactctgtcatggaccccactgtc

SEQ ID NO: 43306 - DNA, 110 bp, synthetic construct
  source 1..110: mol_type = other DNA
gttttctgcaggtgggagccctttacttcacagtgtctggtacagaacaaagcaccaaaaagttcaggaaggcacacgctctgcatgtatgaatgagaacacattacaca

SEQ ID NO: 43307 - DNA, 110 bp, synthetic construct
  source 1..110: mol_type = other DNA
caaaaagttcaggaaggcacacgctctgcatgtatgaatgagaacacattacacatatagttttacctttttacaccatgaagatgctgcaacaaatattctggcatatc

SEQ ID NO: 43308 - DNA, 110 bp, synthetic construct
  source 1..110: mol_type = other DNA
acttcttttctgtttattccagcctggttaatcccttcacacacataaataccggaatcttccatttttgtagatgtcaaggtgagagttgtattctcagaaagaggctc

SEQ ID NO: 43309 - DNA, 110 bp, synthetic construct
  source 1..110: mol_type = other DNA
tagatgagagggaaagtgatcacaagctaattaaatggagtttatctcccaaagggctgtcgccaattctttccctccttctccacgcatacaacgcctttgccgaaagg

SEQ ID NO: 43310 - DNA, 110 bp, synthetic construct
  source 1..110: mol_type = other DNA
aattagccaactttgctgcatttttcaaaccactctgatctctggatgttggatttagggaacaactatgcaggttgttacgatggcccaagtagcagctcggactaaaa

SEQ ID NO: 43311 - DNA, 110 bp, synthetic construct
  source 1..110: mol_type = other DNA
tagggaacaactatgcaggttgttacgatggcccaagtagcagctcggactaaaatggtgagggtggatttggggagaaattggcaggttctatgtttatgctggcgata

SEQ ID NO: 43312 - DNA, 110 bp, synthetic construct
  source 1..110: mol_type = other DNA
aataagtgcagcataataaatcactgatggtgataatgctcctgattagaaaatatgacagttcgttgatagctcaaaggtaaagccaaagtcctcaagaaaccatacct

SEQ ID NO: 43313 - DNA, 110 bp, synthetic construct
  source 1..110: mol_type = other DNA
tgctggcataaaatgtcccttaagagaaggcttaaggtggtgtttggaatggttagagaaaggcatattaaataaacgttgccggcaggatggttagaaacagtcacgga

SEQ ID NO: 43314 - DNA, 110 bp, synthetic construct
  source 1..110: mol_type = other DNA
gagaaaggcatattaaataaacgttgccggcaggatggttagaaacagtcacggaaggagaacagaaatgtgcagccgccagagaccctcgctcccaccgcgacccagcc

SEQ ID NO: 43315 - DNA, 110 bp, synthetic construct
  source 1..110: mol_type = other DNA
ttttgaaataaggaaagtaggcctcgggggcgtgaagcggataacctaaaggagagagagaagctgtgagccggagggacgcatttcatcttaggaaccccaacaccctt

SEQ ID NO: 43316 - DNA, 110 bp, synthetic construct
  source 1..110: mol_type = other DNA
gagagaagctgtgagccggagggacgcatttcatcttaggaaccccaacacccttcgcagggaagatccttcatctcaacagagatcgggagcaaagcgatttcatgagt

SEQ ID NO: 43317 - DNA, 110 bp, synthetic construct
  source 1..110: mol_type = other DNA
gagaaatggttcctactcttccaattttctaaatcccattaccctggacttttaaaattagatgacttcaaactgttaacgtttagttgtgtctaagaaatagggctggg

SEQ ID NO: 43318 - DNA, 110 bp, synthetic construct
  source 1..110: mol_type = other DNA
aaaataaagaccactaggaagcaaagtcgtttaagtcccaccttggtcactcaatgtccctggattaatgtcttagcctctctgggactccacatcctcatcttccaaat

SEQ ID NO: 43319 - DNA, 110 bp, synthetic construct
  source 1..110: mol_type = other DNA
gtccctggattaatgtcttagcctctctgggactccacatcctcatcttccaaatgaaactgctgaattacatggcttctaaagttctttccagctagtatagtgtagtg

SEQ ID NO: 43320 - DNA, 110 bp, synthetic construct
  source 1..110: mol_type = other DNA
ctaaagtagcagagctgataaaacagtcaacacagctgtcaggatacaacacattgaacacctgaatggctagggcaccattctgtaggatgtgtgctcttctcaggatc

SEQ ID NO: 43321 - DNA, 110 bp, synthetic construct
  source 1..110: mol_type = other DNA
gctgctctgcgctgatttaccctgcccgctgctacgaggtctcccggttgctacgcacgaccgaggagatggggaaatgttttaaaagataaagagacaactctggccca

SEQ ID NO: 43322 - DNA, 110 bp, synthetic construct
  source 1..110: mol_type = other DNA
aatattataaagattatatcaaagctaatccatgtctcagtacagttgtatagctgtcttctataaagtcagttttaagagtgttgccaataggggttctcttgtggatc

SEQ ID NO: 43323 - DNA, 110 bp, synthetic construct
  source 1..110: mol_type = other DNA
gtcttctataaagtcagttttaagagtgttgccaataggggttctcttgtggatccagcattgttactgcagcagattgggaccattccctggcctggaaacttccatat

SEQ ID NO: 43324 - DNA, 110 bp, synthetic construct
  source 1..110: mol_type = other DNA
agaaagttaatatgcctagttacatgctgacatgttatgtgtgttccaggtaaccaagtaaactgctcgactactttaccaacctctgtaaatgctgatggataatataa

SEQ ID NO: 43325 - DNA, 110 bp, synthetic construct
  source 1..110: mol_type = other DNA
aagtaaactgctcgactactttaccaacctctgtaaatgctgatggataatataatccgtgatgccctgttgaagaggattactttgggaatttggtgaattctctaatg

SEQ ID NO: 43326 - DNA, 110 bp, synthetic construct
  source 1..110: mol_type = other DNA
actgtgccaggctggggatcaaacctgtgctgcagagatgtcactgatctcattgtgccacaatgggaactccgccatcttattttttagtatttaaaaagtaaaactgg

SEQ ID NO: 43327 - DNA, 110 bp, synthetic construct
  source 1..110: mol_type = other DNA
tgtgctgcagagatgtcactgatctcattgtgccacaatgggaactccgccatcttattttttagtatttaaaaagtaaaactggtaatttaaaaatttaagatggaata

SEQ ID NO: 43328 - DNA, 110 bp, synthetic construct
  source 1..110: mol_type = other DNA
gaagctcctgctgaggtgcaatggattaagaatccaactgcagtggctcagcttgctgctgagttatgggctgaatccctagcccagcacaatgggttaaaggatctggt

SEQ ID NO: 43329 - DNA, 110 bp, synthetic construct
  source 1..110: mol_type = other DNA
ctgctgagttatgggctgaatccctagcccagcacaatgggttaaaggatctggtgaggctgccatactctaccaggttttcaacgttatttttttactttttagggccg

SEQ ID NO: 43330 - DNA, 110 bp, synthetic construct
  source 1..110: mol_type = other DNA
gaaaattgctctgccaagtggtggacaagctgcagggagacaagtatggaaacagaccagatggaggctagtgtcatgcttagaccaggctcctaggaggggagagggtg

SEQ ID NO: 43331 - DNA, 110 bp, synthetic construct
  source 1..110: mol_type = other DNA
aagcaactcctgtcatcaagattactagggagagccattggtacagacctaattttttaccaagcatcgacacagaaaataacgctgtcgtaagaattttcaactgatat

SEQ ID NO: 43332 - DNA, 110 bp, synthetic construct; identical to SEQ ID NO: 43331
  source 1..110: mol_type = other DNA

SEQ ID NO: 43333 - DNA, 110 bp, synthetic construct
  source 1..110: mol_type = other DNA
tccgtatcctcatggatactagtaggattcatttctgctgcacctaaataggaactcccctgattcaattttttgaatctccgttcagttgtgactaaggcagagctcct

SEQ ID NO: 43334 - DNA, 110 bp, synthetic construct
  source 1..110: mol_type = other DNA
tcccctgattcaattttttgaatctccgttcagttgtgactaaggcagagctcctcaaattatcctattagaagaccaattcttttcccctcaaatccttttggattgag

SEQ ID NO: 43335 - DNA, 110 bp, synthetic construct
  source 1..110: mol_type = other DNA
gacttgaattaatgaagaaccaaggcacagaaccattctcaaaatgcaatattacggtacctcatctaacatcactcaggaatgaagcattctacttaaatactttttag

SEQ ID NO: 43336 - DNA, 110 bp, synthetic construct
  source 1..110: mol_type = other DNA
cacagaaccattctcaaaatgcaatattacggtacctcatctaacatcactcaggaatgaagcattctacttaaatactttttagtcaaataaagtctaaagctgttatt

SEQ ID NO: 43337 - DNA, 110 bp, synthetic construct
  source 1..110: mol_type = other DNA
acaagtcacttaccacaaccattgctatggtaaaattaggcctgagctggtagtcgcaccaagggcttgaagctccatagctatctttgtacacgccgcgtttgtgcacc

SEQ ID NO: 43338 - DNA, 110 bp, synthetic construct
  source 1..110: mol_type = other DNA
gcaccaagggcttgaagctccatagctatctttgtacacgccgcgtttgtgcaccagattgggatgcttttcattgacatctgaagggtcttccgacacataaaagaact

SEQ ID NO: 43339 - DNA, 110 bp, synthetic construct
  source 1..110: mol_type = other DNA
ggtttataaactgactctgtatatggcttctacacaaacatgcccaaacactcaagctttgctgggtgtaccttgacatctgtttccatgctgtatccagaagagtggtg

SEQ ID NO: 43340 - DNA, 110 bp, synthetic construct
  source 1..110: mol_type = other DNA
gctttgctgggtgtaccttgacatctgtttccatgctgtatccagaagagtggtgtatgcaccaattaatatggcatcaaaataacatgggatgaggtaacgtgggatct

SEQ ID NO: 43341 - DNA, 110 bp, synthetic construct; identical to SEQ ID NO: 43339
  source 1..110: mol_type = other DNA

SEQ ID NO: 43342 - DNA, 110 bp, synthetic construct; identical to SEQ ID NO: 43340
  source 1..110: mol_type = other DNA

SEQ ID NO: 43343 - DNA, 110 bp, synthetic construct
  source 1..110: mol_type = other DNA
ctgtgctagaagacaatggaaaaaacccaaactttattttctttcaactgcaaaccgccatcctagagcataatgaagcaaacggataaagacaaatacattctatgaga

SEQ ID NO: 43344 - DNA, 110 bp, synthetic construct
  source 1..110: mol_type = other DNA
cgccatcctagagcataatgaagcaaacggataaagacaaatacattctatgagatcaaagcagaacaaaacgttttaaactgtgtatcactatcataaatgcaaggcac

SEQ ID NO: 43345 - DNA, 110 bp, synthetic construct
  source 1..110: mol_type = other DNA
tctaactctaagagtgtgcatgatttagggtacactcccggtctcagtatctttgtctctaaaaatggattatataagatatagtagctaccagactgtcatcaaatacc

SEQ ID NO: 43346 - DNA, 110 bp, synthetic construct
  source 1..110: mol_type = other DNA
ttttcattgcagcattgtgacttacaggttagaataaggggagtgcaagacactgtacatttaaggtgtggttatgacaatcgcatgtagtctatactagcagaggttac

SEQ ID NO: 43347 - DNA, 110 bp, synthetic construct
  source 1..110: mol_type = other DNA
tacatttaaggtgtggttatgacaatcgcatgtagtctatactagcagaggttacgttttcatttgaaaaaaaaatctgaagcagcagctttcttttgttgttgccaaat

SEQ ID NO: 43348 - DNA, 110 bp, synthetic construct
  source 1..110: mol_type = other DNA
gaggcacccattcatggcagaaatactcaacagaagagaattctcatcctggtgaaggaatctaggaaaagccaacagctaatatcacacttaacggtaaatgagtgaac

SEQ ID NO: 43349 - DNA, 110 bp, synthetic construct
  source 1..110: mol_type = other DNA
aggaatctaggaaaagccaacagctaatatcacacttaacggtaaatgagtgaacactttccccttaagatcagaaacaaggcaagagttggagttcccttgtggtgcag

SEQ ID NO: 43350 - DNA, 110 bp, synthetic construct
  source 1..110: mol_type = other DNA
taactgttccttacccaattccttcgtttctaggaggcgcacagggagcccactcgctgagcgtttaatcagcctctgctctagctgctcacaactatctctgcgtgtgt

SEQ ID NO: 43351 - DNA, 110 bp, synthetic construct
  source 1..110: mol_type = other DNA
attgttgacaagaaattagattttcctaaagtcactttgataaggtattagaatgagagttgagagttcttccttcccaaggcgatatcactgcagcttttattcctatc

SEQ ID NO: 43352 - DNA, 110 bp, synthetic construct
  source 1..110: mol_type = other DNA
agagttgagagttcttccttcccaaggcgatatcactgcagcttttattcctatctcttgtcaatagcccttggttttctccaccaaaccaatggagtgcagacacattt

SEQ ID NO: 43353 - DNA, 110 bp, synthetic construct
  source 1..110: mol_type = other DNA
tagcagctttcctcaacttattcttacagcctgctttcgtacagtgaaacttgctccactccccaccatctgcattgtgtacaggaaccaaactcccagctgccactgcg

SEQ ID NO: 43354 - DNA, 110 bp, synthetic construct
  source 1..110: mol_type = other DNA
ccactccccaccatctgcattgtgtacaggaaccaaactcccagctgccactgcgctttacccagagtctggaaggctctctgtttcactttgctgtctggttcttatct

SEQ ID NO: 43355 - DNA, 110 bp, synthetic construct
  source 1..110: mol_type = other DNA
tgtttgagggttctgctgggatcttcctagtcgtttctccacagcctctctgaatttgctcacgccatctcctgaggtctgtactaagccacacacttaggaaggcgaag

SEQ ID NO: 43356 - DNA, 110 bp, synthetic construct
  source 1..110: mol_type = other DNA
ttgctcacgccatctcctgaggtctgtactaagccacacacttaggaaggcgaaggtcagctctacttcttttcaagatcagttactgtgtgatacgccccctcctaccc

SEQ ID NO: 43357 - DNA, 110 bp, synthetic construct
  source 1..110: mol_type = other DNA
ccatgagtggttgtccaagtcagtactgtccaggggctcctggactgcaggtcaagagaagctgcagcaggttcatgggccactgcaaggtcctcggctgggactgaagt

SEQ ID NO: 43358 - DNA, 110 bp, synthetic construct
  source 1..110: mol_type = other DNA
taattatgttaagtgccacgaagaaaaagtatattgtttctcagagcactgcagagaaggacctattctagacaggtgtgtatgctgggagaggaaggagggctgggaga

SEQ ID NO: 43359 - DNA, 110 bp, synthetic construct
  source 1..110: mol_type = other DNA
gaaggacctattctagacaggtgtgtatgctgggagaggaaggagggctgggagagtgtgtcctggcacaccttacacgcaaggacacttgaagaacaaaaagaaattgg

SEQ ID NO: 43360 - DNA, 110 bp, synthetic construct
  source 1..110: mol_type = other DNA
acagaattttccttgctggtctttagagtgagtgccacaaaatcttgattggggactagcttgaatattaaatgagggagtctgcttaaaggaggctgaatatatttgat

SEQ ID NO: 43361 - DNA, 110 bp, synthetic construct
  source 1..110: mol_type = other DNA
agaaatagggtctctggtagcaagtttccagatgatggacttaccaaggtgaatccatgagcttctgccaatgacttggctgggcactgaatagccctgtcactgtctgg

SEQ ID NO: 43362 - DNA, 110 bp, synthetic construct
  source 1..110: mol_type = other DNA
catgagcttctgccaatgacttggctgggcactgaatagccctgtcactgtctggggatcttcaaactcaagaaccagccccatgagacttagagggccttgttttctgt

SEQ ID NO: 43363 - DNA, 110 bp, synthetic construct
  source 1..110: mol_type = other DNA
catattcataggagataggcacccttgacattttaattttacagaggagggaattgaggcctggagaagttaggtaaggtctgaagttggacacacagagctggacctga

SEQ ID NO: 43364 - DNA, 110 bp, synthetic construct
  source 1..110: mol_type = other DNA
gaggcctggagaagttaggtaaggtctgaagttggacacacagagctggacctgagaggccaatccagggagacttactccaaggcctatttcgatagaaggcgatgctt

SEQ ID NO: 43365 - DNA, 110 bp, synthetic construct
  source 1..110: mol_type = other DNA
aaacaccatggttgacacacattctggaccatctttccttttctgaatgcagatccccgattagccatgctgagctgccgtgtcctcttcctacataaaagatgcaattc

SEQ ID NO: 43366 - DNA, 110 bp, synthetic construct
  source 1..110: mol_type = other DNA
tttttcaaagagaaaacagctttagagaattcagtaaatcaaatgtaagctggtgctatgagcacagccagtgtctccctcagttacacaccatgggcctctctgtgggt

SEQ ID NO: 43367 - DNA, 110 bp, synthetic construct
  source 1..110: mol_type = other DNA
ctatgagcacagccagtgtctccctcagttacacaccatgggcctctctgtgggtttccgaagcctcaggaggctctcagctcttgtgactaggaacaggttggaagtga

SEQ ID NO: 43368 - DNA, 110 bp, synthetic construct
  source 1..110: mol_type = other DNA
gcagtatgatgagtcctttcaatgatcaaacatgccataattactgctacattatttttctcctaaacaatttaagataatttgcagagacaattcccctttatttctaa

SEQ ID NO: 43369 - DNA, 110 bp, synthetic construct
  source 1..110: mol_type = other DNA
atcttgaggtactgattgccaggggcgtggtggtctccattgacccccaccctcgacggctccgagctggacctcatttctatggatctgggtggtgactgtccaggctc

SEQ ID NO: 43370 - DNA, 110 bp, synthetic construct
  source 1..110: mol_type = other DNA
agcaactttcaaatatacaatccagtattattgcctatagtccctatattgtacgttacatcccaggatttatttgtcttatcaatgaacatctgtaatatttgaccccc

SEQ ID NO: 43371 - DNA, 110 bp, synthetic construct
  source 1..110: mol_type = other DNA
ttacatcccaggatttatttgtcttatcaatgaacatctgtaatatttgaccccctttacccatttttcccactgttcattacccacctctgttaaccaccaatctgttc

SEQ ID NO: 43372 - DNA, 110 bp, synthetic construct
  source 1..110: mol_type = other DNA
cctttaaatattgatggtatcacactagcagtctactaatgtaacttcagttggcactcgacagaggcaaggggagccatagattcagtcgcaggtaagagactttggac

SEQ ID NO: 43373 - DNA, 110 bp, synthetic construct
  source 1..110: mol_type = other DNA
actcgacagaggcaaggggagccatagattcagtcgcaggtaagagactttggacatctttttcttctatctgttactcgttcttctagccctgcacttgagcttgccaa

SEQ ID NO: 43374 - DNA, 110 bp, synthetic construct
  source 1..110: mol_type = other DNA
acttaattgtgatttcccagctctttgggggtactgcagccaattccaacattgagagggtggattcaccccaacacacacacacacacatccctgcacacgcaccaccc

SEQ ID NO: 43375 - DNA, 110 bp, synthetic construct
  source 1..110: mol_type = other DNA
aattctcattaaaaccaacattgatgatctaattcccacgattatccaggctctgatctgcctcacttgggaatgatgcctagctggactgcttgaaaatgactggggtg

SEQ ID NO: 43376 - DNA, 110 bp, synthetic construct
  source 1..110: mol_type = other DNA
atctgcctcacttgggaatgatgcctagctggactgcttgaaaatgactggggtgtcagaaatcacaaggaggtatcttgaaatttgcttttttactttacaagtgccaa

SEQ ID NO: 43377 - DNA, 110 bp, synthetic construct
  source 1..110: mol_type = other DNA
ctcaaaactatgtcctctcttgagagaggatagcaaggggttttacaggcttagcttgaaaaaacagggctgctggtaaggactagggtacctgcattcttcttcctccg

SEQ ID NO: 43378 - DNA, 110 bp, synthetic construct
  source 1..110: mol_type = other DNA
caggcttagcttgaaaaaacagggctgctggtaaggactagggtacctgcattcttcttcctccgtagatcatttcaaagtcatcaaggctgcaatcagggggtctggtg

SEQ ID NO: 43379 - DNA, 110 bp, synthetic construct
  source 1..110: mol_type = other DNA
aggaactccctcaaatcttttttgataaacagccactgtgttttattgtgaacacaaatcaaaaccttcccatgctttcccattgcatttagggaaaaattcagctcctt

SEQ ID NO: 43380 - DNA, 110 bp, synthetic construct
  source 1..110: mol_type = other DNA
aaatcaaaaccttcccatgctttcccattgcatttagggaaaaattcagctccttctcataaactaccgtgttctttatgtttcagccccacggataccactctttctca

SEQ ID NO: 43381 - DNA, 110 bp, synthetic construct
  source 1..110: mol_type = other DNA
accgagtgaaaaaccagacataggaaatcagcagatggatgttaactgtgcctgagatgcatggcccaaaggggatgctgatcgcctgtgtctctccacttatcctaagc

SEQ ID NO: 43382 - DNA, 110 bp, synthetic construct
  source 1..110: mol_type = other DNA
gatgcatggcccaaaggggatgctgatcgcctgtgtctctccacttatcctaagctcagatattgaaggaatctattccaggagacgattgggatttgtagggcaggcat

SEQ ID NO: 43383 - DNA, 110 bp, synthetic construct
  source 1..110: mol_type = other DNA
ttgctgttcgccatctctcttcatttgttgtctttgttactggtgtatttacaggtaccttccaaaagctccatctagtgcagtatccgtatatactctgtatgatgtga

SEQ ID NO: 43384 - DNA, 110 bp, synthetic construct
  source 1..110: mol_type = other DNA
taccttccaaaagctccatctagtgcagtatccgtatatactctgtatgatgtgactgtcctgtaagagccttctctacgtcagaggccagttcccagccagagaataag

SEQ ID NO: 43385 - DNA, 110 bp, synthetic construct
  source 1..110: mol_type = other DNA
aggtgtgcaggtccctatcaagtgctttgggtcccaagagctttcccttaagacggtagaaaaggaggaatgtggcgggactccagaatgtaacctgtgcctggaggagt

SEQ ID NO: 43386 - DNA, 110 bp, synthetic construct
  source 1..110: mol_type = other DNA
ttgttccgccccctctctcttgccccctacttgttctgggttctaaggcagaaagctgccattcagatttgcagaggtaagcatatgcaaatagtgcatgcacaagcagt

SEQ ID NO: 43387 - DNA, 110 bp, synthetic construct
  source 1..110: mol_type = other DNA
ctctgctgttaactctcattatttcttgtcttaaatgtatctctcttagcaaagcttacccacttcctgtctgctagggcactgtcagctcaggctgccgtaacagaggc

SEQ ID NO: 43388 - DNA, 110 bp, synthetic construct
  source 1..110: mol_type = other DNA
taatggccttccaaagatgcccattggtctacagggttcatatctccagatcctgtgagtttgtttctttacatgacaaacagaggagtgtacatgtatttaatttaagg

SEQ ID NO: 43389 - DNA, 110 bp, synthetic construct
  source 1..110: mol_type = other DNA
tgagtttgtttctttacatgacaaacagaggagtgtacatgtatttaatttaaggatcttgaaatagggagattatgctggatgctctgaatgggcctgatatactcaca

SEQ ID NO: 43390 - DNA, 110 bp, synthetic construct
  source 1..110: mol_type = other DNA
attcagtcttaaatatatgttcccaaaatgaaatggaaataaaaatgttgggaacaggttgcacattagcaggggagtgagttgctgtgctgtggtttctcctcagctcc

SEQ ID NO: 43391 - DNA, 110 bp, synthetic construct
  source 1..110: mol_type = other DNA
acatatcactgcttacctgttcataatagcaaatgttctcctcggccatatctataaacgctgacttgatatcattctgcatgttttgtctccatctttcccagtctgct

SEQ ID NO: 43392 - DNA, 110 bp, synthetic construct
  source 1..110: mol_type = other DNA
atcgagttctagattcctttctactgagatagctttaggcacttcaccagaaatgcttacttagaaatgcgtctggctgcaacctgtcgttcccttcccacctagaacgc

SEQ ID NO: 43393 - DNA, 110 bp, synthetic construct
  source 1..110: mol_type = other DNA
gaccgtcaacacagggacctaagagaaaagaacaagcctacaaacataatccacatcagctatttagaaaagccaactgagttttgctttatatatacatactgagttct

SEQ ID NO: 43394 - DNA, 110 bp, synthetic construct
  source 1..110: mol_type = other DNA
gcctacaaacataatccacatcagctatttagaaaagccaactgagttttgctttatatatacatactgagttcttatgctctacatatgaaactaatattatgtgtcaa

SEQ ID NO: 43395 - DNA, 110 bp, synthetic construct
  source 1..110: mol_type = other DNA
gtaaatgcatgagccttagccatagtgcaaatttcccacctctgcccatggcagctgtgattaccagggacataggttaccaagtttcctggccttggtgacagtggcag

SEQ ID NO: 43396 - DNA, 110 bp, synthetic construct
  source 1..110: mol_type = other DNA
tgtgattaccagggacataggttaccaagtttcctggccttggtgacagtggcagcttcctaggtttctgaagcctagtgatgaagctcagagccagagtgacctttcct

SEQ ID NO: 43397 - DNA, 110 bp, synthetic construct
  source 1..110: mol_type = other DNA
ggaataagtaaatgtagtcatgaaatgagctgagtttgattttgctgctgctacggttatcttcaatttaccacagcctttacattactataacaatgtctaatactgag

SEQ ID NO: 43398 - DNA, 110 bp, synthetic construct
  source 1..110: mol_type = other DNA
gaccttgggaattagaatcatgcatggctcaggaatcgaggcagataggacaaaggtctgaaggaacaaacattgtcgaccaaaggtcaaagctggcagacagggatgtc

SEQ ID NO: 43399 - DNA, 110 bp, synthetic construct
  source 1..110: mol_type = other DNA
gtctgaaggaacaaacattgtcgaccaaaggtcaaagctggcagacagggatgtccatgaagggctttgagagaaaggtgaggaaaaatgcaggtgagcccactttctat

SEQ ID NO: 43400 - DNA, 110 bp, synthetic construct
  source 1..110: mol_type = other DNA
ggacagattacagggtaggaaagaactttacagagagcttccagagacctgcagagggtctgcattgattcctcaaatgaatactgaccagcaaaagtgaataaagaaac

SEQ ID NO: 43401 - DNA, 110 bp, synthetic construct
  source 1..110: mol_type = other DNA
cataattctacataggttgttatgaggattaaatgatatactaatatttgtgaagtacatggcaagcttttgacaaacaacaggtgtgaagaaaatgctaacctatagga

SEQ ID NO: 43402 - DNA, 110 bp, synthetic construct
  source 1..110: mol_type = other DNA
ggattaaatgatatactaatatttgtgaagtacatggcaagcttttgacaaacaacaggtgtgaagaaaatgctaacctataggagttcccactgtggctcagtggtaat

SEQ ID NO: 43403 - DNA, 110 bp, synthetic construct
  source 1..110: mol_type = other DNA
tcctccaataatccagtgaacatgaggtataaaaaagttgccttaggataaaacaacctaccatgcataataaattaactacccattcagatctcttaaaatttattatg

SEQ ID NO: 43404 - DNA, 110 bp, synthetic construct; identical to SEQ ID NO: 43403
  source 1..110: mol_type = other DNA

SEQ ID NO: 43405 - DNA, 110 bp, synthetic construct
  source 1..110: mol_type = other DNA
aagaaatcctgacttgattctccttttgaccatgggtcattgtcccaagctttctgcacggcttccagctctatgtctttcagcctaatacctgctaattaagatgtgag

SEQ ID NO: 43406 - DNA, 110 bp, synthetic construct
  source 1..110: mol_type = other DNA
ttttgcctgtcttttacttattcatcaagactcaactaactaaagggcaacgtcattcaggagatcctggatctgaacttctgagaattttactcccagttctcccaagg

SEQ ID NO: 43407 - DNA, 110 bp, synthetic construct
  source 1..110: mol_type = other DNA
gatagagtaatgaataaaagagacaaaaatcacatccctcatacaatttatatcttagtgaaggtacgtcagaacctaagtcacatttatactaaattctgccgcttaat

SEQ ID NO: 43408 - DNA, 110 bp, synthetic construct
  source 1..110: mol_type = other DNA
tagtgaaggtacgtcagaacctaagtcacatttatactaaattctgccgcttaatcgaaagaggccacaaggaaaaataaaatgaggggaaagggggatagaaaatgtgg

SEQ ID NO: 43409 - DNA, 110 bp, synthetic construct
  source 1..110: mol_type = other DNA
atgtaaggcttctttcttctactagctcctcgttttttgcttctgcgttcaatttaggcattggttccttaacacccagtcttttctctcttcctgttcctcactatgag

SEQ ID NO: 43410 - DNA, 110 bp, synthetic construct
  source 1..110: mol_type = other DNA
aggcattggttccttaacacccagtcttttctctcttcctgttcctcactatgaggctaacttccgtaggcaggaggcatgcgcattcctattctacttgtcaagggggg

SEQ ID NO: 43411 - DNA, 110 bp, synthetic construct
  source 1..110: mol_type = other DNA
ccgtctctggatgggaaacgagaatcatctgaatgtgcttgataaccctcttccaacccacagcaaggatgaccgcatttgtcgagcttagcatggaaggtaacctttgc

SEQ ID NO: 43412 - DNA, 110 bp, synthetic construct
  source 1..110: mol_type = other DNA
acccacagcaaggatgaccgcatttgtcgagcttagcatggaaggtaacctttgctaatgaacaacccacctttcccttccattacagaccaccaagtacatctgtctaa

SEQ ID NO: 43413 - DNA, 110 bp, synthetic construct
  source 1..110: mol_type = other DNA
aaaaacatcaaactccctgccacaccgaggttgtgatatatgctgctcctaccatttcaaaacactactccaccccagtgcctgcattcctttcacgcacacaccttctg

SEQ ID NO: 43414 - DNA, 110 bp, synthetic construct
  source 1..110: mol_type = other DNA
tggggactcactgtgaaaggccagaaatcttttagcttaggcagaagagtgcatggtcctaattcaacgggttaagggaagccattcaaaaatccgagataggggacgaa

SEQ ID NO: 43415 - DNA, 110 bp, synthetic construct
  source 1..110: mol_type = other DNA
cacatttcaaacctcagtgcaagaagatgatgcccaaggtaagagagtggtcttgctgagctgattgtcagaattatacttccgggctattgaaatgactagaatttgca

SEQ ID NO: 43416 - DNA, 110 bp, synthetic construct
  source 1..110: mol_type = other DNA
ctgagctgattgtcagaattatacttccgggctattgaaatgactagaatttgcagaacagggtatcagagaggcagaagctttgtaaagggagcctaagaagtctgatt

SEQ ID NO: 43417 - DNA, 110 bp, synthetic construct
  source 1..110: mol_type = other DNA
ggcaagacatgtgaacgcaagcaccaggacagctttgccctcaagaccacaactggtacctcttttctatgctgtctttactactggaattaaggcacttttaagatgtc

SEQ ID NO: 43418 - DNA, 110 bp, synthetic construct
  source 1..110: mol_type = other DNA
gatggaaaggccttgctcaccctgagacagaggaaggggctccaagtcaaactagaaggtagacggtgagagcaaactggcagcctgggtcagtgatacagaactctgct

SEQ ID NO: 43419 - DNA, 110 bp, synthetic construct
  source 1..110: mol_type = other DNA
aaggtagacggtgagagcaaactggcagcctgggtcagtgatacagaactctgctggcaaggcaaaggagaagccgggaaagacagtctataaatctgaaactatcttca

SEQ ID NO: 43420 - DNA, 110 bp, synthetic construct
  source 1..110: mol_type = other DNA
cttgcccaagaggcattctgatttcaggaagtcaaaagggtacctggcattaaacaacctccagtcaatcctggtgggattagctgggctgagtttctatatactgcaca

SEQ ID NO: 43421 - DNA, 110 bp, synthetic construct
  source 1..110: mol_type = other DNA
aacctccagtcaatcctggtgggattagctgggctgagtttctatatactgcacatgctatggatctactttgatcacagtaaggggaaaaaaaaatgatagtttttttt

SEQ ID NO: 43422 - DNA, 110 bp, synthetic construct
  source 1..110: mol_type = other DNA
cttcatttgctctatttgtggaaatacccgatgagattcagcaacaatccacagtgctgaaaatttacacacacgccacctatagctggaactaaaagttaagaaaaaaa

SEQ ID NO: 43423 - DNA, 110 bp, synthetic construct
  source 1..110: mol_type = other DNA
gctctaagttctgtccttgtgactgtgcatatatctgcacttgtcattcctgaaagcagttagggcatgaagattagacccaattcttctcatataaccttacagccaat

SEQ ID NO: 43424 - DNA, 110 bp, synthetic construct
  source 1..110: mol_type = other DNA
gcagttagggcatgaagattagacccaattcttctcatataaccttacagccaattcattcttagcatgtgaagttacacgatggatgtgtttggttggggtcactctgt

SEQ ID NO: 43425 - DNA, 110 bp, synthetic construct
  source 1..110: mol_type = other DNA
tcctgtcagctgtactctttcaggtggctcactttatttcagcccttctacatttctaatgagagataattcattttcatcatttctcctctattcctccatgccctaaa

SEQ ID NO: 43426 - DNA, 110 bp, synthetic construct
  source 1..110: mol_type = other DNA
ctaatgagagataattcattttcatcatttctcctctattcctccatgccctaaaagcttggatggggtgtgtgggaggggtgcatttttagtttttaaggtatttccct

SEQ ID NO: 43427 - DNA, 110 bp, synthetic construct
  source 1..110: mol_type = other DNA
gcatacaggtagagtgccctagacaatgcaggagatacaatggaaggaaaattagtcacttaaaaaccaagtgcagcagagtcatacaggcccaacttggaccaccggtt

SEQ ID NO: 43428 - DNA, 110 bp, synthetic construct
  source 1..110: mol_type = other DNA
tcacttaaaaaccaagtgcagcagagtcatacaggcccaacttggaccaccggttaatgctgagctattaacatgagagaaaaataaacctgaatcttccttaagccata

SEQ ID NO: 43429 - DNA, 110 bp, synthetic construct
  source 1..110: mol_type = other DNA
gtttagggagttccctctaccatgtggacactgatgctggcaagccccattttagaatcctcccccttgcttattagcttccggacccagtcctgcttccacccaccagc

SEQ ID NO: 43430 - DNA, 110 bp, synthetic construct
  source 1..110: mol_type = other DNA
accttcgttataacagttgctttgaaatttttgctaaatcttacacctggaccctctgtcctgaagtttctgttatctgctttttttcttgtgtgcatcacataatccta

SEQ ID NO: 43431 - DNA, 110 bp, synthetic construct
  source 1..110: mol_type = other DNA
tcacttccctgtcacctaatacaatccttctttgtggccagtctttgccatgcagtcttgaacccactctttcatcagtattccagctcaggagtcattttagacccctc

SEQ ID NO: 43432 - DNA, 110 bp, synthetic construct
  source 1..110: mol_type = other DNA
ttcaggatatatccctacctctcctttgccaaatatgtgaacatccataggttgtttattgaaggatggtgattgccagagatatgtccgtccttttgcctacgcttttt

SEQ ID NO: 43433 - DNA, 110 bp, synthetic construct
  source 1..110: mol_type = other DNA
agttctctaggccccttctttctgcatgagggtgtgctttgatccaaaataatgaagtctctaagtaacattaatagctccatcatttacgcaaaaggaagctgttttaa

SEQ ID NO: 43434 - DNA, 110 bp, synthetic construct
  source 1..110: mol_type = other DNA
gaaaatagcctccttaccggtcacactgctttttatcttgcttctacatagtcctaccagaatcagctttattatagaaattgtatcatttcatccccctgttccaggct

SEQ ID NO: 43435 - DNA, 110 bp, synthetic construct
  source 1..110: mol_type = other DNA
accagaatcagctttattatagaaattgtatcatttcatccccctgttccaggctccagtggtttctgctttatttaaaatgaaagtcttccacagcccatgaagccgcc

SEQ ID NO: 43436 - DNA, 110 bp, synthetic construct
  source 1..110: mol_type = other DNA
gggattgttagaattttaaagctacctctaataacttttaggacatgaaaatcagaccaaaagaatggtagtaatggtgccttatgtttaagatttctcctttggacaaa

SEQ ID NO: 43437 - DNA, 110 bp, synthetic construct
  source 1..110: mol_type = other DNA
caagaatatagacagtcacgattcttggttgttaagagtgccagttgggtaaggcatatgttattatggtggcatgagtcagagcagcttaagacttgatggtgttgaga

SEQ ID NO: 43438 - DNA, 110 bp, synthetic construct
  source 1..110: mol_type = other DNA
tagaagagcctgagaaggaacagtaaaaataggaaaaataagaaaaaaatgagatagctcccaaactcattttcaggaagctggaggtggttaactgtttcagtgctgga

SEQ ID NO: 43439 - DNA, 110 bp, synthetic construct
  source 1..110: mol_type = other DNA
agtcagaaaatacctcacatgacaggtaaagtacagtaaacagaatagttaacattttcaaacgtgacctgtgttgagaaatcatggtgaaagcctttcagtacatggat

SEQ ID NO: 43440 - DNA, 110 bp, synthetic construct; identical to SEQ ID NO: 43439
  source 1..110: mol_type = other DNA

SEQ ID NO: 43441 - DNA, 110 bp, synthetic construct
  source 1..110: mol_type = other DNA
gaaattgggttcaggttgctcaaaatctagcatccatgaattttctatcaagagtttgtgaatttcacattttgcgaaaggtcatgtttaatatcattcccatcccgcat

SEQ ID NO: 43442 - DNA, 110 bp, synthetic construct
  source 1..110: mol_type = other DNA
ttgtgaatttcacattttgcgaaaggtcatgtttaatatcattcccatcccgcattttcacacaaagacttttcaataaagtcaccccacttttagttatctccaaatcc

SEQ ID NO: 43443 - DNA, 110 bp, synthetic construct
  source 1..110: mol_type = other DNA
ctgagaatgtgcatataattagatgtgtcaaaagagctgtttctaagagaatgcttaggattaacctttttgtttttctaaaccatgagtagataaaaacagagccaaga

SEQ ID NO: 43444 - DNA, 110 bp, synthetic construct
  source 1..110: mol_type = other DNA
cctttggttccttcttggttcattccttggttgaagcagcaatgattcattaatcacccaaacaatcactcaaagaaaaaaggagacaaagaaacaaatccatgaggtaa

SEQ ID NO: 43445 - DNA, 110 bp, synthetic construct
  source 1..110: mol_type = other DNA
agcatgtagcagttattcagtgcatggaaattattgttatcattagttctaacatagacagctagatagatgagggatagtttgaaaatgtgatatattagtatccaaaa

SEQ ID NO: 43446 - DNA, 110 bp, synthetic construct
  source 1..110: mol_type = other DNA
ttccttattactgaccctaccatctgtcccagtttccacgtgccaccctcacataggaacaggtttcagccaggccacattcagtgagcagccagcatccaccagtaggg

SEQ ID NO: 43447 - DNA, 110 bp, synthetic construct
  source 1..110: mol_type = other DNA
agtttctggcttaaaaaagaaagagaaatctaacgcttaaaagaaagagcatctggacagaaggttaagaacaggggcgaaatagaagggggaagaaaggtgtttctgca

SEQ ID NO: 43448 - DNA, 110 bp, synthetic construct
  source 1..110: mol_type = other DNA
atgctgttacagccactcgaacaagaaattttgagaacctgaactggtaaggcagcaacaggggagttagggaagaaggaatagattgaagacatatttagcaatggagc

SEQ ID NO: 43449 - DNA, 110 bp, synthetic construct
  source 1..110: mol_type = other DNA
caacaggggagttagggaagaaggaatagattgaagacatatttagcaatggagctgagaacaccatgtatttcttaacaactagtagataccagcctctgtgtaaagta

SEQ ID NO: 43450 - DNA, 110 bp, synthetic construct
  source 1..110: mol_type = other DNA
acaatattttctcaaaagcctgtagttattgaggagccacgatcattctgacttaaagcttatgctctttaccagatactacaacctggggcccaaacaaagaggttgtg

SEQ ID NO: 43451 - DNA, 110 bp, synthetic construct
  source 1..110: mol_type = other DNA
tgttccccaatgtccacgtacaatgctggagtactgaacatctttctctggataacagaaatccaacaacaaacagccaagacgcatagagtcaaggcaattaagtgtaa

SEQ ID NO: 43452 - DNA, 110 bp, synthetic construct
  source 1..110: mol_type = other DNA
cagaaatccaacaacaaacagccaagacgcatagagtcaaggcaattaagtgtaattatgttccagttcattgcaggccagttttgacagttttatcttgaaaattcaaa

SEQ ID NO: 43453 - DNA, 110 bp, synthetic construct
  source 1..110: mol_type = other DNA
ataaagatgaaggctggagttgttaggaatcacagctaccacagtataattagcaacccattccaggtcccatttccaggtggaaggagaaaccaacgagacagaaaaag

SEQ ID NO: 43454 - DNA, 110 bp, synthetic construct
  source 1..110: mol_type = other DNA
ttatcaggcagagtggacagttcccaacaaggttagccccttcttcgccaccattggcagcggctactgctttccgtctccccagctcgggggctccctaacaaggggaa

SEQ ID NO: 43455 - DNA, 110 bp, synthetic construct
  source 1..110: mol_type = other DNA
cagatattatcattttaatgcactgagcttgcagttttcaaaaaggaagcagactataagtaaatatcacagtaatataaacaacatgatgtagcaactgagagttatgg

SEQ ID NO: 43456 - DNA, 110 bp, synthetic construct
  source 1..110: mol_type = other DNA
ccaccttctttctccaactgctaaatattgagacacagcaggaaaccaatgacccctaacctcctatttccagcttcaaagcccagacttaacacatccagccgcctgtt

SEQ ID NO: 43457 - DNA, 110 bp, synthetic construct
  source 1..110: mol_type = other DNA
gcgttaagtcatcattgctaataacaatgcctccccctcagcagcaatttgtttatgacgacgttgagctcactggaccaaccgtaagtcaaaggatgaggatggcaaag

SEQ ID NO: 43458 - DNA, 110 bp, synthetic construct
  source 1..110: mol_type = other DNA
tgacgacgttgagctcactggaccaaccgtaagtcaaaggatgaggatggcaaagctgactttcttctccaaccagcctgttccgccgctttcttcacccaccacctcac

SEQ ID NO: 43459 - DNA, 110 bp, synthetic construct
  source 1..110: mol_type = other DNA
atagagataatgggtctcatattccagataagggtatcatgttttggccaagcaaacttccttgttccctgctgttctgattttaggaagctagacagttaacaaaagtg

SEQ ID NO: 43460 - DNA, 110 bp, synthetic construct
  source 1..110: mol_type = other DNA
acttccttgttccctgctgttctgattttaggaagctagacagttaacaaaagtgacctctgcctccattctccactatactgcatggataggctatggccactgcacag

SEQ ID NO: 43461 - DNA, 110 bp, synthetic construct
  source 1..110: mol_type = other DNA
attcccatatcgtttaagggccgactgtgcctccaaggacccttccctcacagataacggttgaacatatatatacgtataatagcgccagtagtttctccaggaaactt

SEQ ID NO: 43462 - DNA, 110 bp, synthetic construct
  source 1..110: mol_type = other DNA
cttcttatgtggttagaaaggtaacatctggacccagaagtagcagacaaccacattctagcatgtgagctagcaaggggagaggactggtctgtagaaggaataaaaga

SEQ ID NO: 43463 - DNA, 110 bp, synthetic construct
  source 1..110: mol_type = other DNA
ttcacatattttggtcctgcagtataatctttaagaaatagttattttgcagaattcccgttgtggccctttgggttaagaacccgactagtatcagtgcggatgcaggt

SEQ ID NO: 43464 - DNA, 110 bp, synthetic construct
  source 1..110: mol_type = other DNA
aacttgtctttggcagtcctacccactgcctcgttcccggccacctctgtatccaacaccaagttcaaacctgggcctgcccgttgccatcgggcctctgtgtcacagag

SEQ ID NO: 43465 - DNA, 110 bp, synthetic construct
  source 1..110: mol_type = other DNA
acaccaagttcaaacctgggcctgcccgttgccatcgggcctctgtgtcacagagcccgtctgcagcctggggttgcagtacgttgcccatctatctcctctccaccaaa

SEQ ID NO: 43466 - DNA, 110 bp, synthetic construct
  source 1..110: mol_type = other DNA
tcgttcttaacaggcagagtacactgcttcacccagcatagcccctggaaactatgatgtttggcaataacatgaaaactgatttatgttcattcattaatggaaagaat

SEQ ID NO: 43467 - DNA, 110 bp, synthetic construct
  source 1..110: mol_type = other DNA
atgctgaacttctccaagagtcctttcaagactgagactaggttggaacttctggggagctttgggaccctgttggtccctaaggcactacttgaagttccccattggct

SEQ ID NO: 43468 - DNA, 110 bp, synthetic construct
  source 1..110: mol_type = other DNA
ggagctttgggaccctgttggtccctaaggcactacttgaagttccccattggctcatcctctccaagactctttcttaaaatgggctccttgatgacctggggccagaa

SEQ ID NO: 43469 - DNA, 110 bp, synthetic construct
  source 1..110: mol_type = other DNA
aatgtctgtttatctccatgattcatctcttaccaatctcacttgctcactggttcccacaatgacctttctggtctttgaaatgccaagcttagtatattaaggccttt

SEQ ID NO: 43470 - DNA, 110 bp, synthetic construct
  source 1..110: mol_type = other DNA
cccacaatgacctttctggtctttgaaatgccaagcttagtatattaaggcctttgaactcacttgtcggtgtacctggaatgttctccccaaggttcctcacatggctg

SEQ ID NO: 43471 - DNA, 110 bp, synthetic construct
  source 1..110: mol_type = other DNA
tgacacggcacctgaaaacaacctgctcccgatgtgggtttattctaacattttagtactgcttcgttttggccatgcccatggcatgggcacgtggacattccccggcc

SEQ ID NO: 43472 - DNA, 110 bp, synthetic construct
  source 1..110: mol_type = other DNA
ctgtggcccatggcctcttccatctcctccttggagatagccttccttctttatttattgcaggctcttctttgcaaatatttttcctattaaaagcagtcttcttcata

SEQ ID NO: 43473 - DNA, 110 bp, synthetic construct
  source 1..110: mol_type = other DNA
gtagcagctgaaaagttcagtgagctcagcgtcacagtcacgtgtccccagcccggcacaaaggtgcagtaaaaagggatgctctgtttagagagcgggcgcgaatgaag

SEQ ID NO: 43474 - DNA, 110 bp, synthetic construct
  source 1..110: mol_type = other DNA
atgtccattgcctagcataagatagactcaaattgtagttattaatgactaggttggagagtgtgaggaagacagctgtacgcaaagggccatgagcgatgtggaaaacg

SEQ ID NO: 43475 - DNA, 110 bp, synthetic construct
  source 1..110: mol_type = other DNA
ggagagtgtgaggaagacagctgtacgcaaagggccatgagcgatgtggaaaacgggtgcccatgcatttcaatgaaaagtcccaactcttccccacacagggcctttac

SEQ ID NO: 43476 - DNA, 110 bp, synthetic construct
  source 1..110: mol_type = other DNA
atggggaccatgggccctaacaccagagaggccaccgcacaaaggccagagtcacaggtgccacccaagcacatcttctatcttacagctcgtccaaagatccgaatcag

SEQ ID NO: 43477 - DNA, 110 bp, synthetic construct
  source 1..110: mol_type = other DNA
gctctcttaggagatgcttgtctatcacattctactccagaaaactccttccactcctttaagatccagtggaaatgcccctttccctgggggcacattcccgacctctg

SEQ ID NO: 43478 - DNA, 110 bp, synthetic construct
  source 1..110: mol_type = other DNA
gataagatgatatggtcgtatctccgtttagcgcagggtgtactttctgagaatgaacaaactaatgaatgattaagtaatatgagctgtctttgtggcgtcgtctctgt

SEQ ID NO: 43479 - DNA, 110 bp, synthetic construct
  source 1..110: mol_type = other DNA
aacaaactaatgaatgattaagtaatatgagctgtctttgtggcgtcgtctctgtggaactggataccaagcatcatacactaaaccagctgtggaattctctttaattt

SEQ ID NO: 43480 - DNA, 110 bp, synthetic construct
  source 1..110: mol_type = other DNA
cgagcgcgaggatggagcgcccctcccaatgacaccggaaagggggtgggaaggcgagcctagctgagtgtaactgcccgcttttattattttcactggaaaccagtgtc

SEQ ID NO: 43481 - DNA, 110 bp, synthetic construct
  source 1..110: mol_type = other DNA
acatagttacaatggctactcctaagctactccatggccagtatggtaactgatcatcttccactgctccacattcttccttacccggcttccatgtcctacaccggcat

SEQ ID NO: 43482 - DNA, 110 bp, synthetic construct
  source 1..110: mol_type = other DNA
agctattcctgctgccggtgattgcagccgtatttcacagagaacatatggccgtgtttacagccatcaggcagcatttcacagagctacgacaccatgtgtccaccaac

SEQ ID NO: 43483 - DNA, 110 bp, synthetic construct
  source 1..110: mol_type = other DNA
tggatgtcaagaggaagatggaagaaaggcaggttggatggggggagtaaagagtggggtgggtttagaggtccaagagaggtgcggctgcggctgcaggccgcaggaag

SEQ ID NO: 43484 - DNA, 110 bp, synthetic construct
  source 1..110: mol_type = other DNA
ggggtgggtttagaggtccaagagaggtgcggctgcggctgcaggccgcaggaagagctctgtttccccagagggtagcagggctgggcttacgtgaataaggtcaacag

SEQ ID NO: 43485 - DNA, 110 bp, synthetic construct
  source 1..110: mol_type = other DNA
atcattcagctagaatgaaggcttattacgaccgtggctacagctccatttcttttacagcacgaagaaaccagctgatttcaatctccaccacctcgatcagatatcca

SEQ ID NO: 43486 - DNA, 110 bp, synthetic construct
  source 1..110: mol_type = other DNA
tacagcacgaagaaaccagctgatttcaatctccaccacctcgatcagatatccaaagaagtgacaaaggaggctgaaatcattctggctctctgtgaagcatgtgtgcc

SEQ ID NO: 43487 - DNA, 110 bp, synthetic construct
  source 1..110: mol_type = other DNA
taagaagtactgacttagggaagttatttaaaatgcagattcccatgcattacttccaaagattctaattctgcaggtctagggaagagctaagaaatctacacttcaca

SEQ ID NO: 43488 - DNA, 110 bp, synthetic construct
  source 1..110: mol_type = other DNA
ccaaagattctaattctgcaggtctagggaagagctaagaaatctacacttcacagagttcccgtcatggctacttctgccaagcacattgggtaattctttttatttca

SEQ ID NO: 43489 - DNA, 110 bp, synthetic construct
  source 1..110: mol_type = other DNA
ggtccagtctgcagagatgaacgcaggtgtctcccacactggagaaagggctcagggggtaaaagaaagtgaccgaagatctgaccggtgacagcccgaaaacccagcag

SEQ ID NO: 43490 - DNA, 110 bp, synthetic construct
  source 1..110: mol_type = other DNA
cagcgggtttctaggatgcctctgggccctgctcccctccaccttcttctgcttctcctcctccgatgtaagaccaaccagctctaccacctccctgtgtcactactgag

SEQ ID NO: 43491 - DNA, 110 bp, synthetic construct
  source 1..110: mol_type = other DNA
agatacagacgtagttgtcgctaatgagagctagtgcccagcatcctgtccatggcagaggaacttggatacggctccccaggaaatctctaacctgataacatatgtca

SEQ ID NO: 43492 - DNA, 110 bp, synthetic construct
  source 1..110: mol_type = other DNA
cacctgtcccaggactcagtcctgcccatggcatttgcactcaccaggtcctctgcaggctggtttcgtcccctagaatcacacagctcattcttttacttccttcaggt

SEQ ID NO: 43493 - DNA, 110 bp, synthetic construct
  source 1..110: mol_type = other DNA
caggctggtttcgtcccctagaatcacacagctcattcttttacttccttcaggtctctgcataaaaatcacctttgtccctgaccattatcattgcaagtccctccacc

SEQ ID NO: 43494 - DNA, 110 bp, synthetic construct
  source 1..110: mol_type = other DNA
ttttaattagaagaaatcaaggaaaggaacagacctaccgttactgaatgcgaaatacatccactgccttaactgttccatcgggagtccacagacccccacaccgggaa

SEQ ID NO: 43495 - DNA, 110 bp, synthetic construct
  source 1..110: mol_type = other DNA
tacatccactgccttaactgttccatcgggagtccacagacccccacaccgggaagagctggaccacctgcgcttgctgcctcagccactgcaagtacacattctgccag

SEQ ID NO: 43496 - DNA, 110 bp, synthetic construct
  source 1..110: mol_type = other DNA
attttgctaaagcgcagactccatagcttacttagatggggtgcacagaagatgagtttttagagggattgactgtctgaaaatatccttattctattctcatccttgat

SEQ ID NO: 43497 - DNA, 110 bp, synthetic construct
  source 1..110: mol_type = other DNA
tttgatggactgggaatgaaaacgaagattgagaatttgcctggcgagtggtgccctctgccattcaaaccattcagaatacggagagatcagggacctcaaagagtcgt

SEQ ID NO: 43498 - DNA, 110 bp, synthetic construct
  source 1..110: mol_type = other DNA
ctctgccattcaaaccattcagaatacggagagatcagggacctcaaagagtcgtccaagtcagagagagtcttggagtcagaggaatagtttaatagttcatgcccaac

SEQ ID NO: 43499 - DNA, 110 bp, synthetic construct
  source 1..110: mol_type = other DNA
gttttgatttgcatttccctgattattagtaatgttgagcatcttctcaagtacctcttggccgtctatgtgttttctttggaaaatggtctattcaggtcctctgccca

SEQ ID NO: 43500 - DNA, 110 bp, synthetic construct; identical to SEQ ID NO: 43499
  source 1..110: mol_type = other DNA

SEQ ID NO: 43501 - DNA, 110 bp, synthetic construct
  source 1..110: mol_type = other DNA
gagaagttgggttggagggctgtaggaaagatggagtcagagaagctgttataacctagtgatgacggcatagagcttttcagtggggtggaaaaaagagaacaggggga

SEQ ID NO: 43502 - DNA, 110 bp, synthetic construct
  source 1..110: mol_type = other DNA
ctagtgatgacggcatagagcttttcagtggggtggaaaaaagagaacagggggaaaaaaagttgcataactgctccttggctaacttttgcacccactgaattaatcgc

SEQ ID NO: 43503 - DNA, 110 bp, synthetic construct
  source 1..110: mol_type = other DNA
actttggtggggctggaggttacagcgacagacttctctctctgtccctgttagtgggagtaatctaacctggcctcagcttcttacctttgcatccagccaaaggcagc

SEQ ID NO: 43504 - DNA, 110 bp, synthetic construct
  source 1..110: mol_type = other DNA
tcaggaaaattacagttcttggagaagacattgaaaatgagctctctgatgacgtacgagcattgtgtcagggcttctaaggcctcctccccttttcacgtctgagaaga

SEQ ID NO: 43505 - DNA, 110 bp, synthetic construct
  source 1..110: mol_type = other DNA
cggcaaaggcgggtttacctcttagctgctaaacacaacataccaagaacatgctacactcagttaaaggaagaggaatttatttccagggttatcctggatttccttgt

SEQ ID NO: 43506 - DNA, 110 bp, synthetic construct
  source 1..110: mol_type = other DNA
gtaaatttcatggccagatggcaaaattagattataaaatagtaattagtagctggaaacctgaatggtcagaactgaccattgtggccattagccttaatagtgcacag

SEQ ID NO: 43507 - DNA, 110 bp, synthetic construct
  source 1..110: mol_type = other DNA
gaaacctgaatggtcagaactgaccattgtggccattagccttaatagtgcacagagtctcaaccgtaaattatttgcttgctgtttgcctcatgactgtttcatctgtt

SEQ ID NO: 43508 - DNA, 110 bp, synthetic construct
  source 1..110: mol_type = other DNA
ctaatatcactatcctctgactgtaagataaagacatttcttaatgtctagtcgaatgacccagaagcagctcttcttcgtaaaggactctggaaatctagtatattata

SEQ ID NO: 43509 - DNA, 110 bp, synthetic construct
  source 1..110: mol_type = other DNA
atgacccagaagcagctcttcttcgtaaaggactctggaaatctagtatattatactcatggcctgggaagataatgggagagagtttgactttagtagacagctagatt

SEQ ID NO: 43510 - DNA, 110 bp, synthetic construct
  source 1..110: mol_type = other DNA
aaatcatttcctctcaatgacactttacagaagaaagctctgtctctactcagattgtcttagtctcagccttggctagatatttcctggactgttattctgtaatcttt

SEQ ID NO: 43511 - DNA, 110 bp, synthetic construct; identical to SEQ ID NO: 43510
  source 1..110: mol_type = other DNA

SEQ ID NO: 43512 - DNA, 110 bp, synthetic construct
  source 1..110: mol_type = other DNA
gtcattcatccattccacatacaatagtatatgtatctacaaactcctgctctacaaagtactattttaatgcccacattataacctacaagttgttatattttacagtc

SEQ ID NO: 43513 - DNA, 110 bp, synthetic construct
  source 1..110: mol_type = other DNA
tctacaaactcctgctctacaaagtactattttaatgcccacattataacctacaagttgttatattttacagtcaatttagtcaacataaatataccactactgaagga

SEQ ID NO: 43514 - DNA, 110 bp, synthetic construct
  source 1..110: mol_type = other DNA
tatgctgcgggcaaggccctaaattataaataaataaatagataaatagacaggtgagatagagtgacaggtgagataacatccctaccaaccaatcaccagcactgggg

SEQ ID NO: 43515 - DNA, 110 bp, synthetic construct
  source 1..110: mol_type = other DNA
gttgaagcagttcttcttttttctcctacctgatccttcaagagctctgagacactttgtaaacattcttgtttctcatgacaatgtgtgtatttgcacaggttcattgg

SEQ ID NO: 43516 - DNA, 110 bp, synthetic construct
  source 1..110: mol_type = other DNA
gtgtgtgagaccacacgtaaccagaggcccagagggagagtgcgcgtcacaggtgacggcgtgagcagcacgatacggtcatcacctctgttctgccaccctcagcaatg

SEQ ID NO: 43517 - DNA, 110 bp, synthetic construct
  source 1..110: mol_type = other DNA
acggcgtgagcagcacgatacggtcatcacctctgttctgccaccctcagcaatgactttctcttctcgctggtggcacctgggtacagcatctccaagcagcacatcta

SEQ ID NO: 43518 - DNA, 110 bp, synthetic construct
  source 1..110: mol_type = other DNA
atgttctgagggaagcccagctctctttttcagactatattatgataagcaggatagttaacaaagccccggagcaaaactgtacctctgccattcatctccttgacttt

SEQ ID NO: 43519 - DNA, 110 bp, synthetic construct
  source 1..110: mol_type = other DNA
gtgaatgaagtatcttggagaaggtagtagtttaatttttcacctgattgttcggaaagttggccatttaggcagctgtatatgtgtgtattctttccagtacctcatag

SEQ ID NO: 43520 - DNA, 110 bp, synthetic construct
  source 1..110: mol_type = other DNA
gcctttgttttactcgttaccatgtgggaaatcgaagctccaagatgagcaaggtagaaattgatctcacacaaccccaccactccggaaccagcagagaaaactggagc

SEQ ID NO: 43521 - DNA, 110 bp, synthetic construct
  source 1..110: mol_type = other DNA
tacgtaaattctatcttgatttcctgggaactgttagtggacttcgccggtgacatttacataatgggtgaactggtttgaggtggagcttcacttgagggtcattggca

SEQ ID NO: 43522 - DNA, 110 bp, synthetic construct
  source 1..110: mol_type = other DNA
tttacataatgggtgaactggtttgaggtggagcttcacttgagggtcattggcagtcataacttcaagtccagtggttctaagtaaacaaaatgctgacaaagccacag

SEQ ID NO: 43523 - DNA, 110 bp, synthetic construct
  source 1..110: mol_type = other DNA
ggattgtttttagaatcgcacagatgagtgagtaggtgataaagatccttatacgggggcagcacagctggagaccaggacctgtgtttgcagagcagtgacaggttccc

SEQ ID NO: 43524 - DNA, 110 bp, synthetic construct
  source 1..110: mol_type = other DNA
cagcatgttctacctacgaatactagtcaggggtgacaaactatagcttcaacatgaccgctgactccagtggtgtttagcacattcacatgcgttagctcatcgcatct

SEQ ID NO: 43525 - DNA, 110 bp, synthetic construct
  source 1..110: mol_type = other DNA
atcgggcaagacgccactgaagatctagagaaaaaaatggaaaaatagtcttggtcatgtgctttcaacagccattaggagatgattccatttaaatcagctacgggggg

SEQ ID NO: 43526 - DNA, 110 bp, synthetic construct
  source 1..110: mol_type = other DNA
catgtgctttcaacagccattaggagatgattccatttaaatcagctacggggggcctacctcaagcattttagcttttctatgtcaaattgtctgttagtttttaggcc

SEQ ID NO: 43527 - DNA, 110 bp, synthetic construct
  source 1..110: mol_type = other DNA
agtgcagcattattcatatggaaaatgcaaatgaagacacaagggagatattcgtggcccatcagactggcagttacagatggacatctggtgtgggtgacggcgatcag

SEQ ID NO: 43528 - DNA, 110 bp, synthetic construct
  source 1..110: mol_type = other DNA
tttcagtctgaagttgacgagcagcagcatagaccctggtctaagtattaagcagttgggtggtttgtatattaatttcaatgcagacaagctacagttgaacaagagaa

SEQ ID NO: 43529 - DNA, 110 bp, synthetic construct
  source 1..110: mol_type = other DNA
ttgggtggtttgtatattaatttcaatgcagacaagctacagttgaacaagagaaccctaacacagctcaaggagaaaaagaaaaatgaggtaagttgtacaaagcgtcc

SEQ ID NO: 43530 - DNA, 110 bp, synthetic construct
  source 1..110: mol_type = other DNA
ctgactctgcatcttgagaattgtctgtcaagaggaagtcaaggcacctgctgccccccacccccaggatttcacagagctatttcctggccctgcccttcctgctcatc

SEQ ID NO: 43531 - DNA, 110 bp, synthetic construct
  source 1..110: mol_type = other DNA
tcttccattccaggcgactctggaagcctagggagcaccttcggtaaggctgggaacccccgcattagaggctaactttacacggtgcccgggatcacagccgtgaggat

SEQ ID NO: 43532 - DNA, 110 bp, synthetic construct
  source 1..110: mol_type = other DNA
acccccgcattagaggctaactttacacggtgcccgggatcacagccgtgaggatgcgaggggacagttgtgaaagccctgggactctccggggctgtcggtgcccggag

SEQ ID NO: 43533 - DNA, 110 bp, synthetic construct
  source 1..110: mol_type = other DNA
aacatctgaaatgggggggaaggcaatttagtgcaggacaggcaacataatgtttgttctggaagctgagcaggggagcatctgtagcaaggagggaagaacaagaaggc

SEQ ID NO: 43534 - DNA, 110 bp, synthetic construct
  source 1..110: mol_type = other DNA
gttctggaagctgagcaggggagcatctgtagcaaggagggaagaacaagaaggcacttccggttggtaattttattgccttcacccaatatggaattgcaacgcctggc

SEQ ID NO: 43535 - DNA, 110 bp, synthetic construct
  source 1..110: mol_type = other DNA
gagttggacccgccgtggtgcctgcttccagcatcccaggtggatttcccaggattgcaatctgagctgcagtctgagccccagaatcatgaaggaggagggggtgcagg

SEQ ID NO: 43536 - DNA, 110 bp, synthetic construct
  source 1..110: mol_type = other DNA
tgcaatctgagctgcagtctgagccccagaatcatgaaggaggagggggtgcaggaagccagtcgagggagcagaaaggaagtgacccccagttgtccgtgtgaccacag

SEQ ID NO: 43537 - DNA, 110 bp, synthetic construct
  source 1..110: mol_type = other DNA
aaaaaaaaagatagttctggctgacacgctactcctttaaatccctttagctactctgtaggtaatatctccattttacagatgatgtaatgaacacagcttgcctgaat

SEQ ID NO: 43538 - DNA, 110 bp, synthetic construct; identical to SEQ ID NO: 43537
  source 1..110: mol_type = other DNA

SEQ ID NO: 43539 - DNA, 110 bp, synthetic construct
  source 1..110: mol_type = other DNA
aggatcctcctacgttgccttcttcagctggaactctgccctcaatttgaaaacagaattcgaggtgaagcacttgaccccttgtttttcagagtctacgtgtgttcccc

SEQ ID NO: 43540 - DNA, 110 bp, synthetic construct
  source 1..110: mol_type = other DNA
gctgaagcattagagcgcatggataaccttcttgggcttcttcggcttctgctgaaacagctgtagaggtttcaggttgtgatcaagacgaaaacagtatggactgccct

SEQ ID NO: 43541 - DNA, 110 bp, synthetic construct
  source 1..110: mol_type = other DNA
aacagctgtagaggtttcaggttgtgatcaagacgaaaacagtatggactgccctagagttactccccagccttgtgcctgactttgcatgagcaagaaaaaagctttta

SEQ ID NO: 43542 - DNA, 110 bp, synthetic construct
  source 1..110: mol_type = other DNA
gcctcaggccaagcagccagccaggcagggatacaggcccacctgtcagcaggatgacaccagctttgagacaccttggactcagcactcacagcagcagatattttagc

SEQ ID NO: 43543 - DNA, 110 bp, synthetic construct
  source 1..110: mol_type = other DNA
agaaaacttgtaagtaacttagctgtcccgagtaaggggaaatggtcaagtaaatgaattctcctgcacagtcacataaactaggccttatactactaaggaaaatacca

SEQ ID NO: 43544 - DNA, 110 bp, synthetic construct
  source 1..110: mol_type = other DNA
ttgtttgagtcctgtcgggaactcattaaagaaggtagatctttcagctttcacttggggatgctgccatgagaggagatggaacacatggacaaaggggagccaggctg

SEQ ID NO: 43545 - DNA, 110 bp, synthetic construct
  source 1..110: mol_type = other DNA
cccttaaaagagtttggacaaaaatttagcagcctatattctatggctgccacccaaggaaatgctcctaaatcacctagctgtgggacttgttgagactcagcatttgt

SEQ ID NO: 43546 - DNA, 110 bp, synthetic construct
  source 1..110: mol_type = other DNA
aaggaaatgctcctaaatcacctagctgtgggacttgttgagactcagcatttgtaagttctatgggaccacagggaagaaagaggtggttctgtatgggtgcacaaaca

SEQ ID NO: 43547 - DNA, 110 bp, synthetic construct
  source 1..110: mol_type = other DNA
tatcatttttctcacttctcattcattcctcaacccacagcaatctggccactctacagaaactacactatgtcaccaaccgcttccctgctgctaattctatgctcagc

SEQ ID NO: 43548 - DNA, 110 bp, synthetic construct
  source 1..110: mol_type = other DNA
acagaaactacactatgtcaccaaccgcttccctgctgctaattctatgctcagccctcgatttgcttgacactcattgcagtatcccatgactcggatcatcatccctt

SEQ ID NO: 43549 - DNA, 110 bp, synthetic construct
  source 1..110: mol_type = other DNA
caatgagactgtgagataactgatttgcagtcaggtttgcctgaagcttttgaatttctgcctcttttattgcaagcttaattctggcacaaaagaaagtaaaccaaaaa

SEQ ID NO: 43550 - DNA, 110 bp, synthetic construct
  source 1..110: mol_type = other DNA
tttgcctgaagcttttgaatttctgcctcttttattgcaagcttaattctggcacaaaagaaagtaaaccaaaaattattagaaagagactataaaaatacctcagatca

SEQ ID NO: 43551 - DNA, 110 bp, synthetic construct
  source 1..110: mol_type = other DNA
ctaaggctttcaaaacagtgattgattgattgattctatggccacgcccacagcatatggaagttcccgagcaagggactgagtccaaacttcagcaacactgatccttt

SEQ ID NO: 43552 - DNA, 110 bp, synthetic construct
  source 1..110: mol_type = other DNA
tatggaagttcccgagcaagggactgagtccaaacttcagcaacactgatcctttaacccactgcatggggccaagaattgaacccacacctccgcagcaacctgagcca

SEQ ID NO: 43553 - DNA, 110 bp, synthetic construct
  source 1..110: mol_type = other DNA
ttcagcctctacctatgtatcctgcagccaagaggtgttaggatggactgaaaataagtccacttagtccaaacaatcctaacgatcaagctctaagacagtctatagac

SEQ ID NO: 43554 - DNA, 110 bp, synthetic construct
  source 1..110: mol_type = other DNA
aagtccacttagtccaaacaatcctaacgatcaagctctaagacagtctatagaccactaaagatttattggggtgagggaaagaattgtgtaagatacgtcaaaaagta

SEQ ID NO: 43555 - DNA, 110 bp, synthetic construct; identical to SEQ ID NO: 43553
  source 1..110: mol_type = other DNA

SEQ ID NO: 43556 - DNA, 110 bp, synthetic construct; identical to SEQ ID NO: 43554
  source 1..110: mol_type = other DNA

SEQ ID NO: 43557 - DNA, 110 bp, synthetic construct
  source 1..110: mol_type = other DNA
aaatcctgtctcttaactgttagcttgaataagtttcttaactccacacttgtgtagagataatggttaagagttgatttgaaactgtgagctaacaagtgttcatccac

SEQ ID NO: 43558 - DNA, 110 bp, synthetic construct
  source 1..110: mol_type = other DNA
taacaacaatcacacttttggtgggaactttcacaaagatatggtcaaattcacgatgccaagaagggccagagcagagcccaggtacaatggaagcagaaggaagtcta

SEQ ID NO: 43559 - DNA, 110 bp, synthetic construct
  source 1..110: mol_type = other DNA
atgtaaacatagaagtacaaaagtgtagtcatccaagttaaggaagccaggtgctcagggagtcaagggcactaagggagttgcagtaaaatgcaaagaatgtctgtaac

SEQ ID NO: 43560 - DNA, 110 bp, synthetic construct
  source 1..110: mol_type = other DNA
cagggagtcaagggcactaagggagttgcagtaaaatgcaaagaatgtctgtaactgtgttcttagaaatttctgttaactaagcaacatgcagtggatgagaaccttga

SEQ ID NO: 43561 - DNA, 110 bp, synthetic construct
  source 1..110: mol_type = other DNA
aactccatctcttacaattcttataaaaagaccattaacctggaattcctgtcgtggctcaatgtaatgaacccaactggtacccatgaggatgcaggtttgattcctgg

SEQ ID NO: 43562 - DNA, 110 bp, synthetic construct
  source 1..110: mol_type = other DNA
ggctcaatgtaatgaacccaactggtacccatgaggatgcaggtttgattcctggcttgactcagtgggtcggagatctagcatttgcgttgctgtgagttgtggtgtag

SEQ ID NO: 43563 - DNA, 110 bp, synthetic construct
  source 1..110: mol_type = other DNA
cttcccttgtctctaactagaccatgagccaacattttcttcttgctgcaaaacttcttcttcgcttgcagtccagatttgtcagtctaaaatatacatcttttcatatc

SEQ ID NO: 43564 - DNA, 110 bp, synthetic construct
  source 1..110: mol_type = other DNA
ttaaccactgcgccacgggaactcctgggtgttcttatcagttttctcagctgtggagcacagggaaaagagaagttgtggttgtgaaagctgtcatcaagaatcaaaaa

SEQ ID NO: 43565 - DNA, 110 bp, synthetic construct
  source 1..110: mol_type = other DNA
gagcacagggaaaagagaagttgtggttgtgaaagctgtcatcaagaatcaaaaatggagccaggagttcctgtcgtggctcagtggcgatgaatctgactagcatcctt

SEQ ID NO: 43566 - DNA, 110 bp, synthetic construct
  source 1..110: mol_type = other DNA
acgggaacccctgatagtctggttctttatgacctcatgtgggtattttgtgggatttagcaccagatagggttactgataccgataagctggtaagagtgacagtgatg

SEQ ID NO: 43567 - DNA, 110 bp, synthetic construct
  source 1..110: mol_type = other DNA
tttagcaccagatagggttactgataccgataagctggtaagagtgacagtgatgactgtggtaagagtaatatgacttcttggtcattttcagctcccaggattatttt

SEQ ID NO: 43568 - DNA, 110 bp, synthetic construct
  source 1..110: mol_type = other DNA
tttaacatttttatttagtcaggaaagagcaaattccctccactagactgttatgggatctctaattctgtgaagctgtgagtttggtaaaggttaatctgcaattagct

SEQ ID NO: 43569 - DNA, 110 bp, synthetic construct
  source 1..110: mol_type = other DNA
ccaaaaatagcttgagctttaacccgagatgcacgccagcctccactcagcatagcccctgattgatttaaggtgatcagctaccattgtatctgcctcctgggggaaag

SEQ ID NO: 43570 - DNA, 110 bp, synthetic construct
  source 1..110: mol_type = other DNA
ttaaggtggaagcatgaaaagatgaaattgccgctaaattttatttgtctcttaaggtttcatttctagagatagggctttgtggcttagaacacctagcttagcaatac

SEQ ID NO: 43571 - DNA, 110 bp, synthetic construct
  source 1..110: mol_type = other DNA
ggtttcatttctagagatagggctttgtggcttagaacacctagcttagcaatactaaatttaagctctttgggaccgtgctttttcatttccatttgcttgggatcaat

SEQ ID NO: 43572 - DNA, 110 bp, synthetic construct
  source 1..110: mol_type = other DNA
atccaaacctcatctgcgacctatgccacagattgtggtgggtccttaacccactgagcaaggccagtattgaacccacatcaccatggacactagttgggttcttaacc

SEQ ID NO: 43573 - DNA, 110 bp, synthetic construct; identical to SEQ ID NO: 43572
  source 1..110: mol_type = other DNA

SEQ ID NO: 43574 - DNA, 110 bp, synthetic construct
  source 1..110: mol_type = other DNA
cagggtgagtgaagaaaggaatgagccaggagtggcgttggggggtcagagctcctttcctcaggcctgtggcctcattagagacaatacattacgcactgagcccagcg

SEQ ID NO: 43575 - DNA, 110 bp, synthetic construct
  source 1..110: mol_type = other DNA
ttagatgttttctgttgtttgttggccacttgactgttttgttttggaaagtggcagtttaagttcttattcatttttaacaaatgtgttgtttgccttcttaattattg

SEQ ID NO: 43576 - DNA, 110 bp, synthetic construct
  source 1..110: mol_type = other DNA
gaccagcactcttcagactatcagggaaataaacactcgtgaggtctgagaaattgtcctggccaagggacctaagaagacacgacagctcagtgtgacgtggtgtcctg

SEQ ID NO: 43577 - DNA, 110 bp, synthetic construct
  source 1..110: mol_type = other DNA
gcatggctgttacaatttacactgacagaaatctgtaggcagtactgaagtgtgtaccaacagaagagtagtctcttgtgaaggatgtgagtggactaatttaaaaataa

SEQ ID NO: 43578 - DNA, 110 bp, synthetic construct
  source 1..110: mol_type = other DNA
accaacagaagagtagtctcttgtgaaggatgtgagtggactaatttaaaaataagatgatgtgacataggcaaatagcacttgatcatatttgagggttttttttgatg

SEQ ID NO: 43579 - DNA, 110 bp, synthetic construct
  source 1..110: mol_type = other DNA
atgactttgaaatttcagtgttgataaagttttattggaagttacctgtgcttactcattggcggtgttgccgtagctgctttggactatgatagcaagtggtgtagctt

SEQ ID NO: 43580 - DNA, 110 bp, synthetic construct
  source 1..110: mol_type = other DNA
gcctcaggccagaacaaagcacacaaataaaaactttagcgaaccggccttaatttcccttcagctaattcagcatttgtaatcgtctgattaagagtgcttccttctgc

SEQ ID NO: 43581 - DNA, 110 bp, synthetic construct
  source 1..110: mol_type = other DNA
tcccttcagctaattcagcatttgtaatcgtctgattaagagtgcttccttctgcatttatttatgaagaagtgtggtgagcacatgaaaagcagggtaaggaggacact

SEQ ID NO: 43582 - DNA, 110 bp, synthetic construct
  source 1..110: mol_type = other DNA
cagccgcagtcctggaagcagccggctgtgtgttttggtccagtgtgttagcgatgctttaacacgtcagcattttggccggtaaagtgccgtttccgtaaacccttctc

SEQ ID NO: 43583 - DNA, 110 bp, synthetic construct
  source 1..110: mol_type = other DNA
tcatcctttctgtgacagcccagaggcatcttcaaacaccattcactgatgactttagaaggagagctaagaagtctctctgaacaagcaaatcccggcaaacagagcta

SEQ ID NO: 43584 - DNA, 110 bp, synthetic construct
  source 1..110: mol_type = other DNA
gatttattggtagaggtaagttaacaaaaccagattctcttggtcacaatacatagcaatgttttataattccctttcatacctttggtgagaaagcttttcgttcatgt

SEQ ID NO: 43585 - DNA, 110 bp, synthetic construct
  source 1..110: mol_type = other DNA
gcaatgttttataattccctttcatacctttggtgagaaagcttttcgttcatgtaaacataggagggaactctttggagaaaagacccaaccttatttattggatgggc

SEQ ID NO: 43586 - DNA, 110 bp, synthetic construct; identical to SEQ ID NO: 43584
  source 1..110: mol_type = other DNA

SEQ ID NO: 43587 - DNA, 110 bp, synthetic construct; identical to SEQ ID NO: 43585
  source 1..110: mol_type = other DNA

SEQ ID NO: 43588 - DNA, 110 bp, synthetic construct
  source 1..110: mol_type = other DNA
ttgcaaagaatgatgtttgaaaggggagggaggtggcacattggctaggaacaagctgtatggtatactgcctaccaacatcgcttaggatgcatttaacggtcagttag

SEQ ID NO: 43589 - DNA, 110 bp, synthetic construct
  source 1..110: mol_type = other DNA
ctgtatggtatactgcctaccaacatcgcttaggatgcatttaacggtcagttagcagaagggctatgacattgtacagtttaattttatagtaacatagcacatagttg

SEQ ID NO: 43590 - DNA, 110 bp, synthetic construct
  source 1..110: mol_type = other DNA
aaatatctaatttaaagtcttattctagcctctgtccactttaccatggaacaatcacttcttgcaccttgagtctagacatcagctggtgtccataaaataaatatcag

SEQ ID NO: 43591 - DNA, 110 bp, synthetic construct
  source 1..110: mol_type = other DNA
cacttcttgcaccttgagtctagacatcagctggtgtccataaaataaatatcagggcaatggagaaatcctgttgattaaagagttggttttttgtttttgtttttgtt

SEQ ID NO: 43592 - DNA, 110 bp, synthetic construct
  source 1..110: mol_type = other DNA
ccacacatcacagccccaaatgccttcaatttctgcttagtttttatctcactgactatgaaaagtgaaataatcccacacactattcttagattgattttaaagtaatc

SEQ ID NO: 43593 - DNA, 110 bp, synthetic construct
  source 1..110: mol_type = other DNA
tcaatttctgcttagtttttatctcactgactatgaaaagtgaaataatcccacacactattcttagattgattttaaagtaatctgcccagaattttagcctgattttc

SEQ ID NO: 43594 - DNA, 110 bp, synthetic construct
  source 1..110: mol_type = other DNA
tgctagttgccaaaaaggttttcaaggaaattaaaaaggtagacaatatttcactgcccgtgccagcctgatttcaaaaatatacatcatttaaaaatttacaaaggtgt

SEQ ID NO: 43595 - DNA, 110 bp, synthetic construct
  source 1..110: mol_type = other DNA
gcccgtgccagcctgatttcaaaaatatacatcatttaaaaatttacaaaggtgttcccgtagtagcttagcttgttaagaacctggcataggagttcctgtcgtggctc

SEQ ID NO: 43596 - DNA, 110 bp, synthetic construct
  source 1..110: mol_type = other DNA
ttatctgttacaggcaacaatacttgaatcagacttactgaaacattaaggagggttattggctcatctaataaaacactagaggaaagacaggttggagcaaaggccca

SEQ ID NO: 43597 - DNA, 110 bp, synthetic construct; identical to SEQ ID NO: 43596
  source 1..110: mol_type = other DNA

SEQ ID NO: 43598 - DNA, 110 bp, synthetic construct
  source 1..110: mol_type = other DNA
ctgtatgtatgaaaagccatcacttgcctcagcgcttgagtaatgactgcatccactacagctgctgtattgcctgcatcagctcaatatatttttaaaagcaatgcaaa

SEQ ID NO: 43599 - DNA, 110 bp, synthetic construct
  source 1..110: mol_type = other DNA
cctccaccaggtgtttttgttgaaaggccttccctaacaactctgtctggagtggaacacgcatcgccttgctggtctcgcaatccccccactctgcttggtttctcttc

SEQ ID NO: 43600 - DNA, 110 bp, synthetic construct
  source 1..110: mol_type = other DNA
aacacgcatcgccttgctggtctcgcaatccccccactctgcttggtttctcttcacagaattcatcatccagccctatattcatcagtgattgtctgcctcccccaatg

SEQ ID NO: 43601 - DNA, 110 bp, synthetic construct
  source 1..110: mol_type = other DNA
gaggtaagtgtgttcatatgtatagacgattcaggactcttcctggcacagaggaaatgctccataaatgtcgatggttacacttttgagaatctgactattgtgaacag

SEQ ID NO: 43602 - DNA, 110 bp, synthetic construct
  source 1..110: mol_type = other DNA
aatgctccataaatgtcgatggttacacttttgagaatctgactattgtgaacagttagctcatcactctttaaagagaagacactcttaatttatctaggacttgcttt

SEQ ID NO: 43603 - DNA, 110 bp, synthetic construct
  source 1..110: mol_type = other DNA
accatcacactgaaaataaactgttttgaatggagctgttgctaatgacctcggtaaacatcaaagctgccattttcctaaaccctgagcacgtgcgtatgttcagtgct

SEQ ID NO: 43604 - DNA, 110 bp, synthetic construct
  source 1..110: mol_type = other DNA
ttttgcctgcacatagtgagttctcagctacgtgtgctaattctgtgagcctcaggtcccccctctctcaaaaggaatagtaaggcctgtctccgtagattttggaggag

SEQ ID NO: 43605 - DNA, 110 bp, synthetic construct
  source 1..110: mol_type = other DNA
atctggagaaggagggatttggaccagatgtgacccccaggggcccgttcagctgaaacgctccacgagactgttcgaaggatcacaacaagttttcacgcgtctcccgg

SEQ ID NO: 43606 - DNA, 110 bp, synthetic construct
  source 1..110: mol_type = other DNA
aaacgctccacgagactgttcgaaggatcacaacaagttttcacgcgtctcccggccgtcctaaagttggtgtgaaatgcgcagattcgatgtgtattggttcctcaccc

SEQ ID NO: 43607 - DNA, 110 bp, synthetic construct
  source 1..110: mol_type = other DNA
ttttatcaggtggtgggtatatgtcttcagagacctagggctaatctatttttctgcatccgtgactatctgagcatgtctttctgttgccttgattaatcaataacaac

SEQ ID NO: 43608 - DNA, 110 bp, synthetic construct
  source 1..110: mol_type = other DNA
cacacctgtcctccgcacagcaaccactggtacctggcccaactgcagcctggaggccttaactgccaaggaatcagctgttcggggaggggctttagaatgatgacgtc

SEQ ID NO: 43609 - DNA, 110 bp, synthetic construct
  source 1..110: mol_type = other DNA
gccttaactgccaaggaatcagctgttcggggaggggctttagaatgatgacgtcacagtcaccagatctgcaaaaggtggcagagcgtgagactgctctgagtctgaag

SEQ ID NO: 43610 - DNA, 110 bp, synthetic construct
  source 1..110: mol_type = other DNA
gagatcgcacggctccacggcacgtggggctctttgtccccacagctctgactgcctggctcactggtctaattcactgtggatcctgaaatatttccttcttctcctct

SEQ ID NO: 43611 - DNA, 110 bp, synthetic construct
  source 1..110: mol_type = other DNA
ggttcaaggcacagtcaggggctgttctgtgacaccggaggcttcgacgctcgactctgcatttgatttcagttgcttctcgcagcagcctcgtggcgtgtcagacagtt

SEQ ID NO: 43612 - DNA, 110 bp, synthetic construct
  source 1..110: mol_type = other DNA
tctgcatttgatttcagttgcttctcgcagcagcctcgtggcgtgtcagacagttgcggatatcttcactggtcttaacgtttcctctcgtaaattatcaacttgggaca

SEQ ID NO: 43613 - DNA, 110 bp, synthetic construct
  source 1..110: mol_type = other DNA
tactgagccacaacgggaactcccagtcagtacttttttctaaaaaaggcacttctggagctcctgctgtggcacaacaggattggtggcgtcttaggagcactgggacg

SEQ ID NO: 43614 - DNA, 110 bp, synthetic construct
  source 1..110: mol_type = other DNA
gtcagtacttttttctaaaaaaggcacttctggagctcctgctgtggcacaacaggattggtggcgtcttaggagcactgggacgcaggtctgattccggcccggcacag

SEQ ID NO: 43615 - DNA, 110 bp, synthetic construct
  source 1..110: mol_type = other DNA
atagtacttattaaaatacacaattatagatttactcctgccttcctacagctcccaataagtccctcttccttgaacccatccctaaatcatgtaacacaaacccagat

SEQ ID NO: 43616 - DNA, 110 bp, synthetic construct
  source 1..110: mol_type = other DNA
tggttctacaatatacactggggctgggcaatgcagtcaactctgtgctgaagaagaagataccaagctagttagtctgcagtgatctctgacacacttggagcccaaga

SEQ ID NO: 43617 - DNA, 110 bp, synthetic construct
  source 1..110: mol_type = other DNA
gaagataccaagctagttagtctgcagtgatctctgacacacttggagcccaagacagaccagggggtccctatggagcagggcagaaaggggctacgggggaatgggaa

SEQ ID NO: 43618 - DNA, 110 bp, synthetic construct
  source 1..110: mol_type = other DNA
ggggtggaatcggcttatgccacagccatagcaacttggtatcggagccacatttgcaacctacaccataactcattgcaatccctaatacttaacccattgtgtgaggc

SEQ ID NO: 43619 - DNA, 110 bp, synthetic construct
  source 1..110: mol_type = other DNA
gcaacctacaccataactcattgcaatccctaatacttaacccattgtgtgaggccagggatggaccccacatcgtcatggatactagtcgatttattactgctgagcca

SEQ ID NO: 43620 - DNA, 110 bp, synthetic construct
  source 1..110: mol_type = other DNA
tgggatttatggcaaaagtttctcaggctttcctacccattttgatgtgggtgttttctcatttacctagtgaaaagggatcgttcagcttgtttggggatttcttggcg

SEQ ID NO: 43621 - DNA, 110 bp, synthetic construct
  source 1..110: mol_type = other DNA
ttctcatttacctagtgaaaagggatcgttcagcttgtttggggatttcttggcgggaggtactccatgtgtagctgctcatttagtggatcctttggaagatggacctt

SEQ ID NO: 43622 - DNA, 110 bp, synthetic construct
  source 1..110: mol_type = other DNA
aaacctatagcacatacgcaaatgttagccctttccttgaaaagcagtatgccattttcctcttcccagctgttttctgtgtgtgtccataagacttgaaatttttcgta

SEQ ID NO: 43623 - DNA, 110 bp, synthetic construct
  source 1..110: mol_type = other DNA
tttggaaacctttccctaaactaatgtatgccttacaaacccctacatacttcagaaaaacaaatgaaacaaaccaaaaaatcgaaactcaatatagcattctgaaagat

SEQ ID NO: 43624 - DNA, 110 bp, synthetic construct
  source 1..110: mol_type = other DNA
gtatgccttacaaacccctacatacttcagaaaaacaaatgaaacaaaccaaaaaatcgaaactcaatatagcattctgaaagatttagaaaaatgtgcataaaactgca

SEQ ID NO: 43625 - DNA, 110 bp, synthetic construct
  source 1..110: mol_type = other DNA
aggccagggatccaacccaccacctcatggttactagtcagactggtttctgctaggccgcaacgggaactcctgtatcattcttctaggaccataacatgagaaaacca

SEQ ID NO: 43626 - DNA, 110 bp, synthetic construct; identical to SEQ ID NO: 43625
  source 1..110: mol_type = other DNA

SEQ ID NO: 43627 - DNA, 110 bp, synthetic construct
  source 1..110: mol_type = other DNA
aatattgaatcgttcgacccgtcctccacgtcgcacctaacaccccttcttccttccccagagttaagctcttgtccacccatgtccagcctccttgtctagggaactaa

SEQ ID NO: 43628 - DNA, 110 bp, synthetic construct
  source 1..110: mol_type = other DNA
ccccagagttaagctcttgtccacccatgtccagcctccttgtctagggaactaaagtttcttctaccagacccaggagagtccctggccccagggaaagcaatctggcc

SEQ ID NO: 43629 - DNA, 110 bp, synthetic construct
  source 1..110: mol_type = other DNA
tccatccttcccccacattaaaaaaaagaaaaagaaaaagaaaccagcaactctgctgtttttttctgttgggcacaagtctcatttctgtttatctgaaaatatgttcg

SEQ ID NO: 43630 - DNA, 110 bp, synthetic construct
  source 1..110: mol_type = other DNA
tctttctcaatattatttctttgtttatggccccttgtagtttcatatgaatttgagaatcacctcagctatttcagatttaaaacggctattcagattttgatggagat

SEQ ID NO: 43631 - DNA, 110 bp, synthetic construct; identical to SEQ ID NO: 43630
  source 1..110: mol_type = other DNA

SEQ ID NO: 43632 - DNA, 110 bp, synthetic construct; identical to SEQ ID NO: 43630
  source 1..110: mol_type = other DNA

SEQ ID NO: 43633 - DNA, 110 bp, synthetic construct; identical to SEQ ID NO: 43630
  source 1..110: mol_type = other DNA

SEQ ID NO: 43634 - DNA, 110 bp, synthetic construct
  source 1..110: mol_type = other DNA
ttttccctccctgtcttcactgattctatcatcggacccgaaaacttttgctggctggcgagtgttgatgctgtgtcgctgtgaatttacttcctgtttccctgatcctg

SEQ ID NO: 43635 - DNA, 110 bp, synthetic construct
  source 1..110: mol_type = other DNA
catgcctgaggtcattctcaagacttatttcttccccgagtttttccctgacagtagcagttagtgacagtgtgacccagtcatcttaattgctataagtttgcacagct

SEQ ID NO: 43636 - DNA, 110 bp, synthetic construct
  source 1..110: mol_type = other DNA
agcagttagtgacagtgtgacccagtcatcttaattgctataagtttgcacagctcttctgcatcgctcttggctaatgaattagattcttacgtggctgacatagcgtg

SEQ ID NO: 43637 - DNA, 110 bp, synthetic construct
  source 1..110: mol_type = other DNA
actccagaaagcagaccacccccaagacgcacggagtataaaagccgggaaggaacctaatgctaaataaaccgtagaccgcacttcagcttaactccctgccctcgcct

SEQ ID NO: 43638 - DNA, 110 bp, synthetic construct
  source 1..110: mol_type = other DNA
cctaatgctaaataaaccgtagaccgcacttcagcttaactccctgccctcgcctgcgagcctgtccctggctttcaggccgtataggtcgtgtatggccgtttggagtt

SEQ ID NO: 43639 - DNA, 110 bp, synthetic construct
  source 1..110: mol_type = other DNA
gcgtggatattggagtcccattgaccagatgagacttacttcttttaggaaactgtccaattgccaaaagttctcctggcagtgagatggcccaacccacattctgtcga

SEQ ID NO: 43640 - DNA, 110 bp, synthetic construct
  source 1..110: mol_type = other DNA
tccaattgccaaaagttctcctggcagtgagatggcccaacccacattctgtcgaaccccagctgctcaaagggtggtcctcggaccggcagtgcagcctcattggggag

SEQ ID NO: 43641 - DNA, 110 bp, synthetic construct
  source 1..110: mol_type = other DNA
tcaaattaagacctctgagtagcagacactcaggccttttgggcctgccccgggatggttctccatctccatagctggtcgccagtctggtatttccatcctggaagagc

SEQ ID NO: 43642 - DNA, 110 bp, synthetic construct
  source 1..110: mol_type = other DNA
gctcttttcccaattcgcattgcagcctagagagtaatttcattcacttatccattccactaatgcgtttaaagctcctactatgtgagagtgttggggagagaatcatg

SEQ ID NO: 43643 - DNA, 110 bp, synthetic construct
  source 1..110: mol_type = other DNA
tccactaatgcgtttaaagctcctactatgtgagagtgttggggagagaatcatgagaggtaggcccttcatgctttatgctttgtggtctagtacgtttgccttcatgc

SEQ ID NO: 43644 - DNA, 110 bp, synthetic construct
  source 1..110: mol_type = other DNA
tgtagtgcagcagtctgtttttggctttcacccacatgctgagcttacccccacatgatccaaggttgacaggtcccccctccatcggctagtcgtagatgactcccctc

SEQ ID NO: 43645 - DNA, 110 bp, synthetic construct
  source 1..110: mol_type = other DNA
gagatctagcccatttttagcaccttttaatgtgaaaatgtctctcagcaggactccccctcattgtttgtttagttatatgcccaggaagtggacataattttcttgaa

SEQ ID NO: 43646 - DNA, 110 bp, synthetic construct
  source 1..110: mol_type = other DNA
ccccctcattgtttgtttagttatatgcccaggaagtggacataattttcttgaattattcctgccagacgctaaattatatctcaaagagcaaacctttaggttttttt

SEQ ID NO: 43647 - DNA, 110 bp, synthetic construct
  source 1..110: mol_type = other DNA
ctcagatgcggggtttcgctctgaaatagtggactcttgagtttcttctcttcctaaaattaggtctgagatgctgtcggggcttcttgatgagtagctttaactattgt

SEQ ID NO: 43648 - DNA, 110 bp, synthetic construct
  source 1..110: mol_type = other DNA
aaaattaggtctgagatgctgtcggggcttcttgatgagtagctttaactattgtatgatgttgtaacataaagaaatactgataagcctccacccgcttagtggggtat

SEQ ID NO: 43649 - DNA, 110 bp, synthetic construct
  source 1..110: mol_type = other DNA
agcctcaaccaaatggacagctgaggataactttctgaaccgctgcaagcagacgtatggactatttagcatccaaccacaggagccattgtttggaaagccagtctgtg

SEQ ID NO: 43650 - DNA, 110 bp, synthetic construct
  source 1..110: mol_type = other DNA
cactgcaagcctctctgggacctggccagcaggtcagcaccagctcagggcccctctggccttacacccaatcatgtcaggacccatctccatccagcagcaagctggca

SEQ ID NO: 43651 - DNA, 110 bp, synthetic construct
  source 1..110: mol_type = other DNA
gccctaaaaagaaaaaaaaaaaagtgtgtgcgtgtgcatgtgtatatatgtgtaaaagacactcctggttctggtaaaatgatataagtatacttacttcattgtgtcta

SEQ ID NO: 43652 - DNA, 110 bp, synthetic construct
  source 1..110: mol_type = other DNA
aagacactcctggttctggtaaaatgatataagtatacttacttcattgtgtctatccctctgcagctataaaaaatctggacagaatgtctggtgcacctattttaaga

SEQ ID NO: 43653 - DNA, 110 bp, synthetic construct
  source 1..110: mol_type = other DNA
acggaatgacaacctgcaggtctaagaaggcttcataacctagccttggtactaatgaagtcgtatctgcagggctgagaaggaggaagaggggagctggcatgttcgct

SEQ ID NO: 43654 - DNA, 110 bp, synthetic construct
  source 1..110: mol_type = other DNA
tgaagtcgtatctgcagggctgagaaggaggaagaggggagctggcatgttcgctggcacggcagccttcctctcggagcaaacaggcattcacgactgtaggctgacca

SEQ ID NO: 43655 - DNA, 110 bp, synthetic construct; identical to SEQ ID NO: 43653
  source 1..110: mol_type = other DNA

SEQ ID NO: 43656 - DNA, 110 bp, synthetic construct; identical to SEQ ID NO: 43654
  source 1..110: mol_type = other DNA

SEQ ID NO: 43657 - DNA, 110 bp, synthetic construct
  source 1..110: mol_type = other DNA
ttttttcatgtgataagagcagttgaaatctattctcataacaaatttccagtattcaactatagtcaccaagctgtacatttgatctctaggctttttcatcctccata

SEQ ID NO: 43658 - DNA, 110 bp, synthetic construct
  source 1..110: mol_type = other DNA
ctgggttgagcaccactggtcgcagcttacgttcactcttatggactcagagtgaattgccatgttggtgggacctctacccaagagaatcgggctgggatcagatctgt

SEQ ID NO: 43659 - DNA, 110 bp, synthetic construct
  source 1..110: mol_type = other DNA
ctatatgtatggtatcctgcccaactgccttttcccacttttcttagacatttaaagagggctgtcatgtccccagccggaggattttaggtgagctcagggcaaggtct

SEQ ID NO: 43660 - DNA, 110 bp, synthetic construct
  source 1..110: mol_type = other DNA
agagggctgtcatgtccccagccggaggattttaggtgagctcagggcaaggtctccaccttagagaaggtgcgtgggagcagaaataatgctgtctcttatcttggtag

SEQ ID NO: 43661 - DNA, 110 bp, synthetic construct
  source 1..110: mol_type = other DNA
cttctttctctgataaagacaccactcatcacctttagtgcccaccctaatgcatcatgacctcagcttaacctgatcacatctgcaaaactgcttttccaatcaaggtc

SEQ ID NO: 43662 - DNA, 110 bp, synthetic construct
  source 1..110: mol_type = other DNA
cacttgaaaggtacagtctgcactggagggaagaaagcccctcgtcctatttactgtcagcatgtgtagcttttcttttcttacgaaagtcgccccacacatcatttgcc

SEQ ID NO: 43663 - DNA, 110 bp, synthetic construct
  source 1..110: mol_type = other DNA
ctgcgcctcttccaagtcctgggccaagtgccacttcttccaaagccttccctcgttccttcagctggagcaaatctttgtcggaagttcaatcccttccgatctccgct

SEQ ID NO: 43664 - DNA, 110 bp, synthetic construct
  source 1..110: mol_type = other DNA
ttccttcagctggagcaaatctttgtcggaagttcaatcccttccgatctccgctctttcaggtcaggtgagcaactgctgagtccctactgtgtgtgggaatgtactag

SEQ ID NO: 43665 - DNA, 110 bp, synthetic construct
  source 1..110: mol_type = other DNA
agtgattctttttgtgatgactgtttatgtgcacagacatccacgtttgccctgctatggtctccaaatttttgagcatgtgtacaatgtgaaatacacatttgaatcaa

SEQ ID NO: 43666 - DNA, 110 bp, synthetic construct
  source 1..110: mol_type = other DNA
tcggttcttacagggaaagtgcggttattgacactcgcctttccgcttattgtgaaaatgtatgagatggaagctggaaggcgtccagctcctagcgagactccctgcat

SEQ ID NO: 43667 - DNA, 110 bp, synthetic construct
  source 1..110: mol_type = other DNA
aaatgtatgagatggaagctggaaggcgtccagctcctagcgagactccctgcatgtagcgcttcccccccagttgcgagcagcgcagccagcatccgaagaggcgggac

SEQ ID NO: 43668 - DNA, 110 bp, synthetic construct
  source 1..110: mol_type = other DNA
ttcttatgacgatgtcctttttattctgaattcctttaatataaactgtgaccataattctagaagtcacgtggccagccaattcctaaatgcgacatgtagaaattacc

SEQ ID NO: 43669 - DNA, 110 bp, synthetic construct
  source 1..110: mol_type = other DNA
aggagcccctgcggtggtttgaatcctgctggtctgtggaccccatctagaaacactctgctagccttttaaacaccagatcagggaggggtgtgcagagttagctggta

SEQ ID NO: 43670 - DNA, 110 bp, synthetic construct
  source 1..110: mol_type = other DNA
ctctgctagccttttaaacaccagatcagggaggggtgtgcagagttagctggtaaattcccctccaagccccagagcgaaagctggcacttaaccccctacgccccagg

SEQ ID NO: 43671 - DNA, 110 bp, synthetic construct; identical to SEQ ID NO: 43669
  source 1..110: mol_type = other DNA

SEQ ID NO: 43672 - DNA, 110 bp, synthetic construct; identical to SEQ ID NO: 43670
  source 1..110: mol_type = other DNA

SEQ ID NO: 43673 - DNA, 110 bp, synthetic construct
  source 1..110: mol_type = other DNA
ctccagatattgtgtggccaaggattcaatcgcctatggaaagagctgagccaattgcctaggaggtaggtatcactcagtaactgttacctactatcagtgggtctgca

SEQ ID NO: 43674 - DNA, 110 bp, synthetic construct
  source 1..110: mol_type = other DNA
tccttgccggaggaagaggggtctctgctggtcgctgcagaggagccgtgagctctctggtgacaccgctctgtccttccatgctccaagctccttctgcgaattgcagc

SEQ ID NO: 43675 - DNA, 110 bp, synthetic construct
  source 1..110: mol_type = other DNA
tctggtgacaccgctctgtccttccatgctccaagctccttctgcgaattgcagcaagttctcagttcaccaaggctgctgctttcagttctctctgcagatgccagccc

SEQ ID NO: 43676 - DNA, 110 bp, synthetic construct
  source 1..110: mol_type = other DNA
ttaagaagggcacccctccctccaccacccacccatttgatgaggaggagaccatgactcaaggagctaagtgacttgctccgatacacatccagacagtggcagagatg

SEQ ID NO: 43677 - DNA, 110 bp, synthetic construct
  source 1..110: mol_type = other DNA
gactcaaggagctaagtgacttgctccgatacacatccagacagtggcagagatgagatgtaaactctggcttggattcagatgctatgaggcagccagcgtttagactc

SEQ ID NO: 43678 - DNA, 110 bp, synthetic construct; identical to SEQ ID NO: 43676
  source 1..110: mol_type = other DNA

SEQ ID NO: 43679 - DNA, 110 bp, synthetic construct; identical to SEQ ID NO: 43677
  source 1..110: mol_type = other DNA

SEQ ID NO: 43680 - DNA, 110 bp, synthetic construct
  source 1..110: mol_type = other DNA
agcttccctcccaccggcacaaacaagtacctgtctccgcgggcaatgggaaagcccagctgcaaggtggggcagcatttcgcttcttccttctttgatgatgctgttga

SEQ ID NO: 43681 - DNA, 110 bp, synthetic construct
  source 1..110: mol_type = other DNA
ccagctgcaaggtggggcagcatttcgcttcttccttctttgatgatgctgttgaaaaggtccgtgatggtcaggaaataaccccccgtggatggaggacgtttagaccc

SEQ ID NO: 43682 - DNA, 110 bp, synthetic construct
  source 1..110: mol_type = other DNA
atgctcttaaagctgccaccttaattacgggcctcacgccctgaacggcactgcttccgtatttccacggtcttcatcaaccgtcagccacctgagggctggagctgtgc

SEQ ID NO: 43683 - DNA, 110 bp, synthetic construct
  source 1..110: mol_type = other DNA
tccgtatttccacggtcttcatcaaccgtcagccacctgagggctggagctgtgctgttttctcttccagtgtctgcagcatccacccaacgcctggcacagtgcaggtt

SEQ ID NO: 43684 - DNA, 110 bp, synthetic construct
  source 1..110: mol_type = other DNA
taaggttctagtgagtatctttagtgcccctggtggattgtgtgggaatggcaattatagggcattggtctaccagatgcaagctggactatatcattctttaaaggcat

SEQ ID NO: 43685 - DNA, 110 bp, synthetic construct
  source 1..110: mol_type = other DNA
gatataaacgtggaatctaaggaaaacctgtcagctctgagggaagccactgccgccaagcaaaaaacagcaacctgcagcttcgcgtctttacccaggcccaaaggcaa

SEQ ID NO: 43686 - DNA, 110 bp, synthetic construct
  source 1..110: mol_type = other DNA
tcagcatcagggttcaagtttgttcattcttccaagatgtcagcttagaagaaaagaacaagagctagatggtggcatattcgtggtttcacattctcagcaagttggcc

SEQ ID NO: 43687 - DNA, 110 bp, synthetic construct
  source 1..110: mol_type = other DNA
gaacaagagctagatggtggcatattcgtggtttcacattctcagcaagttggccagagtccccctgtatgactgagcatattgctactgataaggaatctttatttaat

SEQ ID NO: 43688 - DNA, 110 bp, synthetic construct
  source 1..110: mol_type = other DNA
gtcctatcacctctgctctaagctctggccacctggtcacgttggagaccccaaggcatcttcttcctttatcggtacagctgcctcaccccatcctcccctcagctgga

SEQ ID NO: 43689 - DNA, 110 bp, synthetic construct
  source 1..110: mol_type = other DNA
tccggaggaggggggaggcctgcgactcgatgccccattacccgcttgagcctgctccttggatcccagggaagcttaggagatgaaagccttgtctccttcaaacagtg

SEQ ID NO: 43690 - DNA, 110 bp, synthetic construct
  source 1..110: mol_type = other DNA
tccctgatggcggccagctgcagctttaggttgcatatgtggattggagtctgtgctactatggctgtggaacaggccagctgctgcagctctgattcgaccccacatct

SEQ ID NO: 43691 - DNA, 110 bp, synthetic construct
  source 1..110: mol_type = other DNA
ttcctcatctctaacatggaaacagtagttcacaagtcagcattgttcaggatattcgataagatcagtagtgtgaacggcactgggtataaaagctactcgataaaaca

SEQ ID NO: 43692 - DNA, 110 bp, synthetic construct
  source 1..110: mol_type = other DNA
tcgataagatcagtagtgtgaacggcactgggtataaaagctactcgataaaacagatgtgtgcattatgtatgcaggccaagtgtattttgcacaattgaaaattctga

SEQ ID NO: 43693 - DNA, 110 bp, synthetic construct
  source 1..110: mol_type = other DNA
aggactgcacatatgagagacccagattcagggagcacttaaactgtgttccttctcacgacataattgaagaagtttgtgaagttcgaaatcatcagaccacagtgagg

SEQ ID NO: 43694 - DNA, 110 bp, synthetic construct
  source 1..110: mol_type = other DNA
ggctggttcacggtgcctctgcctttcactcatctcttccgtgaagacataggaaaaatgggaagcaggagagactcccataagacaccgcgccgattcctccttggaag

SEQ ID NO: 43695 - DNA, 110 bp, synthetic construct
  source 1..110: mol_type = other DNA
aaatgggaagcaggagagactcccataagacaccgcgccgattcctccttggaagcgcagatggagcccccaaagggattgtaggatttattcaataatttggacattga

SEQ ID NO: 43696 - DNA, 110 bp, synthetic construct
  source 1..110: mol_type = other DNA
ccaacctgtaattctactaaccagtaatttccccagcaggagactagattatcctagctgccggacacgtctttgcttcttgttattttcctcaggcaaccgaggtcctc

SEQ ID NO: 43697 - DNA, 110 bp, synthetic construct
  source 1..110: mol_type = other DNA
cccgtcatcattagactctatttacagtcagaaggaacccttgttcgtccctcgtctatggtctatggtgggcagtagaaaggccaggtgaggagcagggagggagaggc

SEQ ID NO: 43698 - DNA, 110 bp, synthetic construct
  source 1..110: mol_type = other DNA
ctatggtctatggtgggcagtagaaaggccaggtgaggagcagggagggagaggcactcacgaggcccattgactgtgatgcctcctgagagagtcttgaccttggaatg

SEQ ID NO: 43699 - DNA, 110 bp, synthetic construct
  source 1..110: mol_type = other DNA
ttcagcaagaccgtttggtagaggaaggctctcttatgaagctggcaagacaatactgtggaatggatgcctatccagtgatgcctatccagtgatgcctatccagtgat

SEQ ID NO: 43700 - DNA, 110 bp, synthetic construct
  source 1..110: mol_type = other DNA
catctttgcctgcgccactcccttgcaggtaggtgttagcgtggctgggggctgaaggcccgtctttgggtggaggtgttactgttacgttgtacccttgaattggctta

SEQ ID NO: 43701 - DNA, 110 bp, synthetic construct
  source 1..110: mol_type = other DNA
cgttgtgatctgatggcctttttcagccagatagtgcatacggacccatgcacgcacacaaacacacaagcttgaaattacacctctctccctttcgcctggtaaataaa

SEQ ID NO: 43702 - DNA, 110 bp, synthetic construct
  source 1..110: mol_type = other DNA
acacaaacacacaagcttgaaattacacctctctccctttcgcctggtaaataaatatttctaatcagggtctggttctcagtctaaagtaatactgataatgggagttc

SEQ ID NO: 43703 - DNA, 110 bp, synthetic construct
  source 1..110: mol_type = other DNA
ctacatgtaatactttcaaaagccctacttttgacacctttttaatacctttttttaatgtatggtgtgacaaagaaattcaatgtcttttcactttccatacggagaaa

SEQ ID NO: 43704 - DNA, 110 bp, synthetic construct
  source 1..110: mol_type = other DNA
taatgtatggtgtgacaaagaaattcaatgtcttttcactttccatacggagaaacagttttcctggttctacctacggagcattttctattatattattgcaagaagca

SEQ ID NO: 43705 - DNA, 110 bp, synthetic construct
  source 1..110: mol_type = other DNA
ccataccttagagcaagcctcttcattccacagttccttacccggcatctctgtgtttacccatatcaccaactctacaaaggaattccttctctctctctttttttttt

SEQ ID NO: 43706 - DNA, 110 bp, synthetic construct
  source 1..110: mol_type = other DNA
tactgcagcttgactaacttaattcctgaagctcaatctccttctctctcacctaaagtaagaggcaggttaagaggaaaaaaaaaaaacaacgtttctcagaccaggca

SEQ ID NO: 43707 - DNA, 110 bp, synthetic construct
  source 1..110: mol_type = other DNA
ttctactctgcaggctttaaagtgcaagctctaaacctgtatccatcagattctctagtccctagagtaaatataccttgcgtcagtttaaaaaaataaattctttcaca

SEQ ID NO: 43708 - DNA, 110 bp, synthetic construct
  source 1..110: mol_type = other DNA
tggaatccgaatgagggcggacgacactggaaacctgtcccacggcacataaaaaaagaaatccacgtgggttagggcggacatgtacggggcggagctccggtgctgag

SEQ ID NO: 43709 - DNA, 110 bp, synthetic construct
  source 1..110: mol_type = other DNA
aagaaatccacgtgggttagggcggacatgtacggggcggagctccggtgctgagtggaaagagcaagtttccagggtgtttccccttgaacaaagccacgcaaaactgt

SEQ ID NO: 43710 - DNA, 110 bp, synthetic construct
  source 1..110: mol_type = other DNA
atgtgtcgacaccaaaacggctcttaactcaaggttatcagtacagttctcagaaagattaaggcctttaaaaaagaaattcatcttttcaaaccactgctagatttcta

SEQ ID NO: 43711 - DNA, 110 bp, synthetic construct
  source 1..110: mol_type = other DNA
agattaaggcctttaaaaaagaaattcatcttttcaaaccactgctagatttctaggctttttccaaagatatctcaacccccttcaaaacttgcctttggagtggacca

SEQ ID NO: 43712 - DNA, 110 bp, synthetic construct
  source 1..110: mol_type = other DNA
aagacaatggaaggcatggtgtgctccaggttgacgcctgggatcttagctcccgggtttgcacctgagcgagtttttgatcccgatgtggaactgacgactatccttat

SEQ ID NO: 43713 - DNA, 110 bp, synthetic construct
  source 1..110: mol_type = other DNA
atcccatgaatgtccccagtttggggcggtggcccacaaagggagccctctgcatggggcgggagtggctgtcaggacagaccgccggcagctcagcgggctcaggagaa

SEQ ID NO: 43714 - DNA, 110 bp, synthetic construct
  source 1..110: mol_type = other DNA
ggggcgggagtggctgtcaggacagaccgccggcagctcagcgggctcaggagaaagaggctgggatgccatgtagcccatttagaaaaccagtatacctgctctaaaaa

SEQ ID NO: 43715 - DNA, 110 bp, synthetic construct
  source 1..110: mol_type = other DNA
tcccaagaagagtcaggagtaaatttcggttcagtctctcctgtcctgctccgaatcctctctggttcctgcggggtgtccccgggggaggtcgcgtacggaaggtggct

SEQ ID NO: 43716 - DNA, 110 bp, synthetic construct
  source 1..110: mol_type = other DNA
tcctctctggttcctgcggggtgtccccgggggaggtcgcgtacggaaggtggctctcctggactctgaggtggtgcctcctctctttctgctcccagatggtgtcctgg

SEQ ID NO: 43717 - DNA, 110 bp, synthetic construct
  source 1..110: mol_type = other DNA
ttgttttttgctttgtcaaagtcctctgttccctcttgacgcccacatttgcaagaagaaaacaacacgcctcccgccccgtcgctctcttcctccttttgtgcatcatc

SEQ ID NO: 43718 - DNA, 110 bp, synthetic construct
  source 1..110: mol_type = other DNA
cttaaagtcctaagcggaagctcctcctctgtctggtaacctcagctctggccgtctttcctttatcctcagacccttcactgccctcacggagagtcgttctggatccg

SEQ ID NO: 43719 - DNA, 110 bp, synthetic construct
  source 1..110: mol_type = other DNA
gtctgggtgctctgtttccagacagagaatccaagcaggcaagtagtcgataccgttcatttgtgaacctttgccctaaacctcaagctgactcttttctcagactcatt

SEQ ID NO: 43720 - DNA, 110 bp, synthetic construct
  source 1..110: mol_type = other DNA
cctccgcagcaggtgccagagccctgcaatttgatgaggttggccttcaccttgagtttcaccttgagtgccataggtggcccgtaattgaatgaggccagtcagcatga

SEQ ID NO: 43721 - DNA, 110 bp, synthetic construct
  source 1..110: mol_type = other DNA
gtttcaccttgagtgccataggtggcccgtaattgaatgaggccagtcagcatgatcccatccttctagttacggctgttaggttagaggtagacacataatccagtcat

SEQ ID NO: 43722 - DNA, 110 bp, synthetic construct
  source 1..110: mol_type = other DNA
ccctgatgcgggaagacattgactggtgccaaacagggcagtttctttgtgtgcgaactagagcatttcggctaaaagcttagaggagcttcgaggtaagttgtctcgca

SEQ ID NO: 43723 - DNA, 110 bp, synthetic construct
  source 1..110: mol_type = other DNA
actttgtggtcacctcttttcagaacatcagttatccacgagctacatgaaggagtcaggtgagtaacaattcgttgagtgacttcagccccggagcgtacgctggacca

SEQ ID NO: 43724 - DNA, 110 bp, synthetic construct
  source 1..110: mol_type = other DNA
tcaggtgagtaacaattcgttgagtgacttcagccccggagcgtacgctggaccaaagacttgagaaggacctttgtctgcactgaacgtgcctcttcaagaggcgggag

SEQ ID NO: 43725 - DNA, 110 bp, synthetic construct
  source 1..110: mol_type = other DNA
aggcagagcaaaataggaatgaacacaaattgttgtcagcacactcacaatgggtagatttatatttcagaatgcccagctgctactttaaagcggcagaaatatatttg

SEQ ID NO: 43726 - DNA, 110 bp, synthetic construct
  source 1..110: mol_type = other DNA
tgcaggttagtaaacctcacccccaggaaagtcatttgaaaatgtgattcattttacataaatctccctatttaaaaaaaaaaatctactatagttgatttatgatgtcc

SEQ ID NO: 43727 - DNA, 110 bp, synthetic construct; identical to SEQ ID NO: 43726
  source 1..110: mol_type = other DNA

SEQ ID NO: 43728 - DNA, 110 bp, synthetic construct
  source 1..110: mol_type = other DNA
gctctaaatgcagacactagactataaaatttggaccaaacagtgttcccctcgccgaggctggccttcaccttcttaaatgcttccaaaatcggtgactgtgtatttcc

SEQ ID NO: 43729 - DNA, 110 bp, synthetic construct
  source 1..110: mol_type = other DNA
tggttgacagagggagaaagagaagcaaaagttaatgacagaagttattttgtaggtgttttgagaggccggagagaaagaggaatgctcttggcgatttttctgaatct

SEQ ID NO: 43730 - DNA, 110 bp, synthetic construct
  source 1..110: mol_type = other DNA
gtgttttgagaggccggagagaaagaggaatgctcttggcgatttttctgaatcttctctgcgtcctccccggcgaatactccctgctctagattctttaccacattttc

SEQ ID NO: 43731 - DNA, 110 bp, synthetic construct
  source 1..110: mol_type = other DNA
tgctctccagctgtcatcactgtttgtccactgatggcgtttttcatccgccccggagagtcggtcatgccgctggcggccggggctgacagcctgtatccagggccttc

SEQ ID NO: 43732 - DNA, 110 bp, synthetic construct
  source 1..110: mol_type = other DNA
gacaaaagacaaaaaaacaaaaaaacaaaagaagacgccaacaaatctgacctgactacatctcagtaatcacatagctcaggatggtttattgtttattcaccgacagt

SEQ ID NO: 43733 - DNA, 110 bp, synthetic construct
  source 1..110: mol_type = other DNA
attattaaactctaaatcttttacttatctgtttaaaaaaatgtcttcatcttctatgacaggcattgctaggatctccaacagaaaaatgaaatcaacaggtagtggtg

SEQ ID NO: 43734 - DNA, 110 bp, synthetic construct; identical to SEQ ID NO: 43733
  source 1..110: mol_type = other DNA

SEQ ID NO: 43735 - DNA, 110 bp, synthetic construct
  source 1..110: mol_type = other DNA
agccatcacggttcgtgccccacccgatggcgcatctgaccacggtccttgttagcgactggggctgacccaacagctggagtccaaaacagtgttgacacgagttctgt

SEQ ID NO: 43736 - DNA, 110 bp, synthetic construct
  source 1..110: mol_type = other DNA
cgactggggctgacccaacagctggagtccaaaacagtgttgacacgagttctgtcaaaatcgtggttttttacgacacattggcaattttatggtagattgaagaagaa

SEQ ID NO: 43737 - DNA, 110 bp, synthetic construct
  source 1..110: mol_type = other DNA
gtcgaattaggctttaatctgacaattccgaagtcacataaatgagtggactaagcaagagctcgcggcatctggatgatctgaaatgatgtgtgttgcaaatggaaaca

SEQ ID NO: 43738 - DNA, 110 bp, synthetic construct
  source 1..110: mol_type = other DNA
caagagctcgcggcatctggatgatctgaaatgatgtgtgttgcaaatggaaacatattgtttggaaatgcccatttgaataaaaagctccatagcttctacaatcaaag

SEQ ID NO: 43739 - DNA, 110 bp, synthetic construct
  source 1..110: mol_type = other DNA
aaaaagagtgaatacctgcaattataaacagaaataaacagttcttccaattgtcacacctaccaatgccacaaccgcacaagagggcagcagccttttgagccgaggga

SEQ ID NO: 43740 - DNA, 110 bp, synthetic construct
  source 1..110: mol_type = other DNA
acacctaccaatgccacaaccgcacaagagggcagcagccttttgagccgagggatctctgattggctaagaaacacacatcagtgagaaatacaccttagcgggggaca

SEQ ID NO: 43741 - DNA, 110 bp, synthetic construct
  source 1..110: mol_type = other DNA
tgccagcagggtcaaacctacattagcctttttgaaagctctggccttgccggtgtccgaaatagcagaaaaggcctaactctcaagcctcttgctggccgttccccttt

SEQ ID NO: 43742 - DNA, 110 bp, synthetic construct
  source 1..110: mol_type = other DNA
attttagtacaacgccgcctcagcaggcagatgtgaactcagatgagtgctggtactgctttaccagcactgctgttagctcatgccgtccagcgagcgactctcggcag

SEQ ID NO: 43743 - DNA, 110 bp, synthetic construct
  source 1..110: mol_type = other DNA
ctgctttaccagcactgctgttagctcatgccgtccagcgagcgactctcggcagaggcgggagacactgaaacaagcagctcgccttggaagccctgcctctgagccgc

SEQ ID NO: 43744 - DNA, 110 bp, synthetic construct
  source 1..110: mol_type = other DNA
ttcggttgtgagtaggttggcaattttttcgcagattatactctcaagaaggaaacagattaaaactgaattcaggttgaagtgtggctcttttctaaacacgtagctga

SEQ ID NO: 43745 - DNA, 110 bp, synthetic construct
  source 1..110: mol_type = other DNA
cagattaaaactgaattcaggttgaagtgtggctcttttctaaacacgtagctgatgataacactgtcagaagtgaaaaatcatagatgattaagaagaaatggttcaaa

SEQ ID NO: 43746 - DNA, 110 bp, synthetic construct
  source 1..110: mol_type = other DNA
tagctgcccagtcccaccacatgggcggttttagtatggcattcgccattaacttgccatgaaaaactggaagattaacacatgccttttttaaccccttaaatttcggc

SEQ ID NO: 43747 - DNA, 110 bp, synthetic construct
  source 1..110: mol_type = other DNA
gccatgaaaaactggaagattaacacatgccttttttaaccccttaaatttcggccaaccaggttttcgaggtgaaggctacgctgtaccctcccaggtgcccggctcct

SEQ ID NO: 43748 - DNA, 110 bp, synthetic construct; identical to SEQ ID NO: 43746
  source 1..110: mol_type = other DNA

SEQ ID NO: 43749 - DNA, 110 bp, synthetic construct; identical to SEQ ID NO: 43747
  source 1..110: mol_type = other DNA

SEQ ID NO: 43750 - DNA, 110 bp, synthetic construct
  source 1..110: mol_type = other DNA
tctgaggtgtgcatgattcccgtaaaacctctcctaaggcaggaattctctctgctgtgcagttgaggaaactgaagcccggagaagagcagagacttgctcaaggtcat

SEQ ID NO: 43751 - DNA, 110 bp, synthetic construct
  source 1..110: mol_type = other DNA
agattgttaattggctcactgaaagttcacctttgtttcctgctaccccagggtggaaggatcttgaggaaaattcagtcagttgcagagaaacaaagaaattacacttt

SEQ ID NO: 43752 - DNA, 110 bp, synthetic construct
  source 1..110: mol_type = other DNA
ccctcagaggccactggcgagcttctggttttgccagcttacagcctgccgggtcctcgctcccttggtggtgggcacacaacgcttcccagacaactgggtaggagtgt

SEQ ID NO: 43753 - DNA, 110 bp, synthetic construct
  source 1..110: mol_type = other DNA
actttccagctacaggagattgtcctgagagctgcttggtaatggaaggggtcacaggagccactgttcccctgcctgcccactacaagagcaatcctgtaaaccatgaa

SEQ ID NO: 43754 - DNA, 110 bp, synthetic construct
  source 1..110: mol_type = other DNA
aaaccagattttaggggtgggctgtagcagaggtttttcactatgctttcacctcccagagaggcagctctggtttgggaaggagagaaatggaaaaattcaccggagag

SEQ ID NO: 43755 - DNA, 110 bp, synthetic construct
  source 1..110: mol_type = other DNA
ccagagaggcagctctggtttgggaaggagagaaatggaaaaattcaccggagaggcagagcttcttgctctcccatcaagctgcaaataacatcaccttacgttgtgcg

SEQ ID NO: 43756 - DNA, 110 bp, synthetic construct
  source 1..110: mol_type = other DNA
atgtgaaagtgtgtggtgacgataaaaaaagaggccccatctacctacctacctacctacctacctatctatctaattttcacgcaccctcctaacacagaacagctatg

SEQ ID NO: 43757 - DNA, 110 bp, synthetic construct
  source 1..110: mol_type = other DNA
cctacctacctatctatctaattttcacgcaccctcctaacacagaacagctatgagttttcctctttacgagggtgtggaacagccactgcagctccctggagtctgag

SEQ ID NO: 43758 - DNA, 110 bp, synthetic construct; identical to SEQ ID NO: 43756
  source 1..110: mol_type = other DNA

SEQ ID NO: 43759 - DNA, 110 bp, synthetic construct; identical to SEQ ID NO: 43757
  source 1..110: mol_type = other DNA

SEQ ID NO: 43760 - DNA, 110 bp, synthetic construct
  source 1..110: mol_type = other DNA
attgaagcaccttttttcctgctacgaagtcaggagtgaaataaattttttcacccttttctccacagtttcccatctgctccgtatagggcccatcattttctggagga

SEQ ID NO: 43761 - DNA, 110 bp, synthetic construct
  source 1..110: mol_type = other DNA
cttttctccacagtttcccatctgctccgtatagggcccatcattttctggaggatttggttcagtaaccacaacatcagcctgaaatttaagaaaaagtttttatcatt

SEQ ID NO: 43762 - DNA, 110 bp, synthetic construct
  source 1..110: mol_type = other DNA
aagtcaagccccttaataatatgcataaacaggagttcccactgttgcttagtaaggaacctcctagtatccatgaggacgcgagtttaatccctggtttgggtcagtgg

SEQ ID NO: 43763 - DNA, 110 bp, synthetic construct
  source 1..110: mol_type = other DNA
ataatatgcataaacaggagttcccactgttgcttagtaaggaacctcctagtatccatgaggacgcgagtttaatccctggtttgggtcagtgggttaaggatctggtg

SEQ ID NO: 43764 - DNA, 110 bp, synthetic construct
  source 1..110: mol_type = other DNA
atgtccaaacacatttggtaatgagctgtgctggtgtcttagcgtgtctgttcttttcctcttgggagatttaagctggaggtggtatcactcaggctctggttaattgg

SEQ ID NO: 43765 - DNA, 110 bp, synthetic construct
  source 1..110: mol_type = other DNA
ttcctcttgggagatttaagctggaggtggtatcactcaggctctggttaattggttcagatctgattggccattttctgggtcccgctgaccttcagcaagttgcttta

SEQ ID NO: 43766 - DNA, 110 bp, synthetic construct
  source 1..110: mol_type = other DNA
aagtcaaaattgaggctcacatagacatttaatatgtcagaactgatgaatttggtagattttcatgaaaacaaggggatcaagtcactggccttccctgttctgtagct

SEQ ID NO: 43767 - DNA, 110 bp, synthetic construct
  source 1..110: mol_type = other DNA
tagattttcatgaaaacaaggggatcaagtcactggccttccctgttctgtagcttcctctctgagaacaccaccagccctgtctagttccaggcttttatctggttctc

SEQ ID NO: 43768 - DNA, 110 bp, synthetic construct
  source 1..110: mol_type = other DNA
gactctttctagtccctaacccgctttattttccctcggtttcttgactagcccaggtcatttcatgttgtagctgtaaatgtgtgcttttgcttgtttatgaagccagg

SEQ ID NO: 43769 - DNA, 110 bp, synthetic construct
  source 1..110: mol_type = other DNA
ggtcatttcatgttgtagctgtaaatgtgtgcttttgcttgtttatgaagccaggcatttgtttcttctccctgccatatcctccgggcctaaaacaggacctcgcttac

SEQ ID NO: 43770 - DNA, 110 bp, synthetic construct
  source 1..110: mol_type = other DNA
tacttacaatccgtgtcaattcggatcgctgcctctcaagtgctcaacagccaccgcagcccatggctaccccctggacagcgcagctgtgatgccctcatcgaggggtt

SEQ ID NO: 43771 - DNA, 110 bp, synthetic construct
  source 1..110: mol_type = other DNA
gcagcccatggctaccccctggacagcgcagctgtgatgccctcatcgaggggtttcccaacttgactacacatccgaattacacacaaaggcacttgttaaaaagatgt

SEQ ID NO: 43772 - DNA, 110 bp, synthetic construct
  source 1..110: mol_type = other DNA
gacaccggaccctcctagtctgtgagaggctgcctgtcccttctccacgaccccacccacggcgggggcagcggaaagcttcccccacggcccaccctgtgtcaaaggaa

SEQ ID NO: 43773 - DNA, 110 bp, synthetic construct
  source 1..110: mol_type = other DNA
cccacggcgggggcagcggaaagcttcccccacggcccaccctgtgtcaaaggaaaggattctcatgcaagacgttcaggctctaacgtgagagcggggacaagggcaca

SEQ ID NO: 43774 - DNA, 110 bp, synthetic construct
  source 1..110: mol_type = other DNA
tgtttccacacacatggacgtggtgagtaaaccaaagcatgacgtcctgcgtccagcgcaggatggcagatgttcagaaagcacagctctcgttagaagggccgcagcag

SEQ ID NO: 43775 - DNA, 110 bp, synthetic construct
  source 1..110: mol_type = other DNA
gcgcaggatggcagatgttcagaaagcacagctctcgttagaagggccgcagcagagccctgtgcccattcgtctcgccgaccccagcccagctccgctgacgctgctct

SEQ ID NO: 43776 - DNA, 110 bp, synthetic construct
  source 1..110: mol_type = other DNA
gctaataaagcatatggtaaaacgtagcccccgaagtggaagtgacatttgaccttcaagttgttctccagcttctggggaagacacccacgctgtaggtacggcactgc

SEQ ID NO: 43777 - DNA, 110 bp, synthetic construct
  source 1..110: mol_type = other DNA
tcaagttgttctccagcttctggggaagacacccacgctgtaggtacggcactgcgacagggtcctccttagaaataacgacgtgcaagagaagcagattgaaagtaaac

SEQ ID NO: 43778 - DNA, 110 bp, synthetic construct
  source 1..110: mol_type = other DNA
aagctacttggaagttcatccagtcactctggctaattatgagctgcttaggttttcctcttctttttctacttttctttccactgtaacagtagcaaggctatcttatg

SEQ ID NO: 43779 - DNA, 110 bp, synthetic construct
  source 1..110: mol_type = other DNA
tcctcttctttttctacttttctttccactgtaacagtagcaaggctatcttatgtcactctggctaagtagctaaaccgagagttcctaatttaatctttccctggagg

SEQ ID NO: 43780 - DNA, 110 bp, synthetic construct
  source 1..110: mol_type = other DNA
tacgatagggctgtcaattacgtctctttcttactgttacccttctcttaaacatattaaaatataataaccaccttcctagtttgaccaaagaagatatttagacaatt

SEQ ID NO: 43781 - DNA, 110 bp, synthetic construct; identical to SEQ ID NO: 43780
  source 1..110: mol_type = other DNA

SEQ ID NO: 43782 - DNA, 110 bp, synthetic construct
  source 1..110: mol_type = other DNA
ctccgggtctttctccagatgctggcttggtcacaccgtccgttggcgaggctacgaaggggaagctaagagacctggttacctgtcgggacccattcatttctacattg

SEQ ID NO: 43783 - DNA, 110 bp, synthetic construct
  source 1..110: mol_type = other DNA
gaaggggaagctaagagacctggttacctgtcgggacccattcatttctacattgcgcctcacaaagaactgacaaggcaggggttcccgttgtggatcaatggttaacg

SEQ ID NO: 43784 - DNA, 110 bp, synthetic construct
  source 1..110: mol_type = other DNA
tcttgtgaggtgtcctcgggggaaagtgtcagatgtgccttcgctggacatgaagaaagacccaagtaatagaaatcagagtgttttaggagaggaacagattaagccca

SEQ ID NO: 43785 - DNA, 110 bp, synthetic construct
  source 1..110: mol_type = other DNA
aaagacccaagtaatagaaatcagagtgttttaggagaggaacagattaagcccaaaggttttattgagagagaagtcacatgtaacaagacagacagccagggagaata

SEQ ID NO: 43786 - DNA, 110 bp, synthetic construct
  source 1..110: mol_type = other DNA
ccactgcgccacgacgggaactccaaggggcctagactttgaaccaaagaacaaagctggagggttcacaccacctgatgtcatgacggaaacgatgcagcaatcaaggc

SEQ ID NO: 43787 - DNA, 110 bp, synthetic construct
  source 1..110: mol_type = other DNA
gctggagggttcacaccacctgatgtcatgacggaaacgatgcagcaatcaaggctgatgacgcggtttagaaacagacaaatgggtgactggaacagacagagccgcag

SEQ ID NO: 43788 - DNA, 110 bp, synthetic construct
  source 1..110: mol_type = other DNA
tttttcagtcccagagtcccatccaggaccctcatgacacggagtcatagtgtctcctcatgttcctcggcactgtgacaccatctcagacgtcccttgattttgtgtcc

SEQ ID NO: 43789 - DNA, 110 bp, synthetic construct
  source 1..110: mol_type = other DNA
cctcatgttcctcggcactgtgacaccatctcagacgtcccttgattttgtgtcctgactgtgttggggtccccaggcaagcattttatagaatgtccccccagtgcttt

SEQ ID NO: 43790 - DNA, 110 bp, synthetic construct
  source 1..110: mol_type = other DNA
cgcggcggcagggtctgaaggagcccggggagcccaccgctttgtttctgtccctcttcttctccttccacttcagttctgacagtgtgggcagtcgtggtgggagcaaa

SEQ ID NO: 43791 - DNA, 110 bp, synthetic construct
  source 1..110: mol_type = other DNA
gtgatttctgcccggaggcggggacctgggtcccaggacgccacgtcttccactaattagcctccttgcgctgctgagtgccgttggctgcggtgatgagctgggtctgg

SEQ ID NO: 43792 - DNA, 110 bp, synthetic construct
  source 1..110: mol_type = other DNA
attagcctccttgcgctgctgagtgccgttggctgcggtgatgagctgggtctgggcccgcctgggccctggggaggaagctctggaagctggtccctccgcagagcaaa

SEQ ID NO: 43793 - DNA, 110 bp, synthetic construct
  source 1..110: mol_type = other DNA
gtctcagaagcttgaggacttccccttccctgcccttcatcttcagaacttgaacaaagaacgcaagagaaagccagctcctggggctgtgcctggtgggcctgccctga

SEQ ID NO: 43794 - DNA, 110 bp, synthetic construct
  source 1..110: mol_type = other DNA
aaagaacgcaagagaaagccagctcctggggctgtgcctggtgggcctgccctgacacaaagcctgggtgcagccttggccctgagagacccaggaccccggagctcctg

SEQ ID NO: 43795 - DNA, 110 bp, synthetic construct
  source 1..110: mol_type = other DNA
ccagcaagggctcatgtgcctgaggcacaagagaaggctaagctcgccagcagatgtttgccgcagagtaaggctgtgtttacagggcgccaagcaccaagaaggcactg

SEQ ID NO: 43796 - DNA, 110 bp, synthetic construct
  source 1..110: mol_type = other DNA
ccccgcccagcgctgtggagctgccctctttcagctgggcagcagtgctcactctgaggcccgagcctgctgccacgggcctcgtgacgttgccgggaccctgtctgacc

SEQ ID NO: 43797 - DNA, 110 bp, synthetic construct
  source 1..110: mol_type = other DNA
gaggcccgagcctgctgccacgggcctcgtgacgttgccgggaccctgtctgaccatatggtttttgaacctgccacgccagtgacaacggaggccctggaaggcaaagc

SEQ ID NO: 43798 - DNA, 110 bp, synthetic construct
  source 1..110: mol_type = other DNA
gaggcttcagaaaggacagaaaattggaagcagcctgtttgtatggtagatgtttcatatcttgcggcaagtttaatcttggtgattttattattccgaagttctatgct

SEQ ID NO: 43799 - DNA, 110 bp, synthetic construct
  source 1..110: mol_type = other DNA
catatcttgcggcaagtttaatcttggtgattttattattccgaagttctatgcttcggttctttttattggtcttatcaggggtgtgtacttgaccttaacacccattt

SEQ ID NO: 43800 - DNA, 110 bp, synthetic construct
  source 1..110: mol_type = other DNA
tgcgtgtggactcctgcaggttttctcggcagcaggtgatgacacctgtcaacagacagctgcgccgcctccgttcccatcaggatgacttttcttcacttttcttgccc

SEQ ID NO: 43801 - DNA, 110 bp, synthetic construct
  source 1..110: mol_type = other DNA
ccctggctgtaactggctggcatcccgcaaggcgaagccacgaagagcttccccatcacccttgtcctccgggacccagcacatctgcagtggctttgacagcgctgagg

SEQ ID NO: 43802 - DNA, 110 bp, synthetic construct
  source 1..110: mol_type = other DNA
tcacccttgtcctccgggacccagcacatctgcagtggctttgacagcgctgagggctgagttctggaaagaccactgtcctggggttgttgctccagggactgaagctt

SEQ ID NO: 43803 - DNA, 110 bp, synthetic construct
  source 1..110: mol_type = other DNA
gctcgctgcctccagggtttccagcaccttccacccatccatcctccctggagaacgctcaccttcgtcttggtggcatgtcctgcgttcatcagggagcctgagctgga

SEQ ID NO: 43804 - DNA, 110 bp, synthetic construct
  source 1..110: mol_type = other DNA
cgctcaccttcgtcttggtggcatgtcctgcgttcatcagggagcctgagctggaatggggaggctgagtggaaggtgggttgggggagaaagcagtggtcttttaggat

SEQ ID NO: 43805 - DNA, 110 bp, synthetic construct
  source 1..110: mol_type = other DNA
cccgcccaaccgtgctctattttcctgcagacccacactctgctctcagactgtggtgtccagccttaacttaaacctaaccttcagctccatgcatgcacttccagagc

SEQ ID NO: 43806 - DNA, 110 bp, synthetic construct
  source 1..110: mol_type = other DNA
gtgtccagccttaacttaaacctaaccttcagctccatgcatgcacttccagagcctggctcagacttgcctgctctgagaagcctctgcggcccctcctgtgctgagct

SEQ ID NO: 43807 - DNA, 110 bp, synthetic construct
  source 1..110: mol_type = other DNA
agccatcactgtggtagagatgatataaggattgaggggtgagaattctcattttgctgcactgtagagcttttggaaaacatgataaactctgggttataaaggctcag

SEQ ID NO: 43808 - DNA, 110 bp, synthetic construct
  source 1..110: mol_type = other DNA
gctgcactgtagagcttttggaaaacatgataaactctgggttataaaggctcagtttaagtcatggtcagagaaccacagagattccaggacagcctgaaacaacctct

SEQ ID NO: 43809 - DNA, 110 bp, synthetic construct
  source 1..110: mol_type = other DNA
cttctgctgggccaccctccgctagcctttgtgacctgcttccaaactggtgctgccctcattcttctctgcccccatgagctgagaccttctgaaaagtcccttcattg

SEQ ID NO: 43810 - DNA, 110 bp, synthetic construct
  source 1..110: mol_type = other DNA
gcattgtcttcctacgtcctcttaacagccttgcagatagatgtcacccccacgctcgccaatgaaagacgagctcagaaagtaactcatcaagatcacagagctggtaa

SEQ ID NO: 43811 - DNA, 110 bp, synthetic construct
  source 1..110: mol_type = other DNA
gccaataaatccctctggctgtggagagaaatatctatttcagatgagttctccagagcgaaatccccattccaaggggcagaggcaaattaggctgaactgactccact

SEQ ID NO: 43812 - DNA, 110 bp, synthetic construct
  source 1..110: mol_type = other DNA
gagcgaaatccccattccaaggggcagaggcaaattaggctgaactgactccactcagcgggtgggggtccttcggcacatccagcctgggtccctcaccttggtaccca

SEQ ID NO: 43813 - DNA, 110 bp, synthetic construct
  source 1..110: mol_type = other DNA
cagcagcccgacctcctctgcccggcacgcctgcacacacacacacacacacacacacacacacacacggagtccttgatgtcctttcctttatgccattaggtttaatg

SEQ ID NO: 43814 - DNA, 110 bp, synthetic construct
  source 1..110: mol_type = other DNA
cacacacacacacggagtccttgatgtcctttcctttatgccattaggtttaatggtcacagagacccagcgagccaaggccagccctgcaggaccctgctcccccagga

SEQ ID NO: 43815 - DNA, 110 bp, synthetic construct
  source 1..110: mol_type = other DNA
taaatacactgagccagaggcaggatcactggacggaccgtgtgggacgtcacgagatgggaatcgggcactaacccttagatgagccgaggagaatggagtcgagcctg

SEQ ID NO: 43816 - DNA, 110 bp, synthetic construct
  source 1..110: mol_type = other DNA
gcccgttctgaaaactcacaaacggctgcacatcggagtcagaaaagaaagcttgtggtgttggaatgaggcagcccttaacagtcaatttgcaaggaggagtcttcccc

SEQ ID NO: 43817 - DNA, 110 bp, synthetic construct
  source 1..110: mol_type = other DNA
gagcatgtccgactctccagatgaattgataaagcatttatgtcagtcttgttgtttattgggtgtctccccacacctcccgcgggtgggcgtgagctatactgggggcg

SEQ ID NO: 43818 - DNA, 110 bp, synthetic construct
  source 1..110: mol_type = other DNA
ttattgggtgtctccccacacctcccgcgggtgggcgtgagctatactgggggcgggggtttctgttcccgcacctgcttcctgtctggagccacgtcagcctcatagcc

SEQ ID NO: 43819 - DNA, 110 bp, synthetic construct
  source 1..110: mol_type = other DNA
cccgagggcccagcatccacctgcccgcggccgggcctgtgcacctgttcatgctgcggccatttcctgtcgggtctcggtcttgctggttgtgtgtctgtgtggttagt

SEQ ID NO: 43820 - DNA, 110 bp, synthetic construct
  source 1..110: mol_type = other DNA
gcggccatttcctgtcgggtctcggtcttgctggttgtgtgtctgtgtggttagttattgagcggttctgggtccgtcagtttattctccacgggttctgagctcttcag

SEQ ID NO: 43821 - DNA, 110 bp, synthetic construct
  source 1..110: mol_type = other DNA
gcccccccacccccatggggcaggagggcggcccaacctgcgcaggacgagctcacctcggctgcaccctacaacccggtcaccacaactctcagatggagagggaagac

SEQ ID NO: 43822 - DNA, 110 bp, synthetic construct
  source 1..110: mol_type = other DNA
cctcggctgcaccctacaacccggtcaccacaactctcagatggagagggaagaccgacagggacgttgtccatggacagagaggaggcccgggtcccagaagccaagtg

SEQ ID NO: 43823 - DNA, 110 bp, synthetic construct
  source 1..110: mol_type = other DNA
gcgatggaaggtgtcagggcactgtttcaacgagagcatcgggatgcgttgtctccttttctcgccaaacttccagcgtcacgttttggttcatattagggtttccagag

SEQ ID NO: 43824 - DNA, 110 bp, synthetic construct
  source 1..110: mol_type = other DNA
cttttctcgccaaacttccagcgtcacgttttggttcatattagggtttccagagccgctggtctcccgtgttctgagtgggaccaaagggctgccttggttttcaccct

SEQ ID NO: 43825 - DNA, 110 bp, synthetic construct
  source 1..110: mol_type = other DNA
gggaactcctaggggggtgtgtattttaaggaatgaaatcgaatgtgggatgaagagtctgtatgtcacagaggtttaactagatatctggatctttcccaacaacgccg

SEQ ID NO: 43826 - DNA, 110 bp, synthetic construct
  source 1..110: mol_type = other DNA
agtctgtatgtcacagaggtttaactagatatctggatctttcccaacaacgccggaggcgtgaaagttgtcatcgaaagaatggggcgaaaacgggggacagaagagca

SEQ ID NO: 43827 - DNA, 110 bp, synthetic construct
  source 1..110: mol_type = other DNA
cacggcagccagatcaactgggctccaaacacctgatcttggtttttctttgtttgttttgttttgtttttgtttttagggccgcacccgcggcatacggaggttcccag

SEQ ID NO: 43828 - DNA, 110 bp, synthetic construct; identical to SEQ ID NO: 43827
  source 1..110: mol_type = other DNA

SEQ ID NO: 43829 - DNA, 110 bp, synthetic construct
  source 1..110: mol_type = other DNA
cccctcgagggcaggggtctgggctttgtgcccagtgggcagagcttggcatggggtggaggatggagtggctcctggaacacgttctccggccaagagaccgggcgggg

SEQ ID NO: 43830 - DNA, 110 bp, synthetic construct
  source 1..110: mol_type = other DNA
ttggcatggggtggaggatggagtggctcctggaacacgttctccggccaagagaccgggcggggggggttggaggggccccgccagcgtctcaccttccccgtgtccac

SEQ ID NO: 43831 - DNA, 110 bp, synthetic construct
  source 1..110: mol_type = other DNA
tgaaactgggcagagagacagagagacagctgcatgagaaggagagggcacatgagcggtaagcaaccacatttaccggttacggtaattcctaccaaggaaagaaacag

SEQ ID NO: 43832 - DNA, 110 bp, synthetic construct
  source 1..110: mol_type = other DNA
gcggtaagcaaccacatttaccggttacggtaattcctaccaaggaaagaaacagcatggtcacctagagagtgacagaggagatggaatttcagaaagggtggtcagct

SEQ ID NO: 43833 - DNA, 110 bp, synthetic construct
  source 1..110: mol_type = other DNA
aacctcatagggttaagcggaaccatttgcattttatgcacggcgaagctgagattcagagaggctgagtcactggcccaaatgtacacagctaaaagagggtgaagcga

SEQ ID NO: 43834 - DNA, 110 bp, synthetic construct
  source 1..110: mol_type = other DNA
tcagagaggctgagtcactggcccaaatgtacacagctaaaagagggtgaagcgaccgggcaggcctgggcttctccgtgccttgtctggacgctctgccccatttcgag

SEQ ID NO: 43835 - DNA, 110 bp, synthetic construct
  source 1..110: mol_type = other DNA
cattgacggagggcaccacgtcctttatatgttcacatgctttatttcatttattcctccgtacaattcggcaatgaaatcatgtattatagtcgcatcgttaggcaaga

SEQ ID NO: 43836 - DNA, 110 bp, synthetic construct
  source 1..110: mol_type = other DNA
cctccgtacaattcggcaatgaaatcatgtattatagtcgcatcgttaggcaagaaatctaaggcctggagacactgcccgataacgcagagcctgcagggccaggaacc

SEQ ID NO: 43837 - DNA, 110 bp, synthetic construct
  source 1..110: mol_type = other DNA
cactcagggattttctcggacccaagtctgggccatgctgcaaagattctgtgcctcgccttttctagaggaacaaactggcagctaggggccagggccaccggctcctg

SEQ ID NO: 43838 - DNA, 110 bp, synthetic construct
  source 1..110: mol_type = other DNA
tcgccttttctagaggaacaaactggcagctaggggccagggccaccggctcctgcaggcaaccacatccctggggcacctctcctgccctcccaccccagcggccaggt

SEQ ID NO: 43839 - DNA, 110 bp, synthetic construct
  source 1..110: mol_type = other DNA
agactgagatttaacgggtcctatgtcacacccagtgtccagggctggtcactatctgggcctgggggactgtcacaaggtgaccttggccatggggagccgtccccctt

SEQ ID NO: 43840 - DNA, 110 bp, synthetic construct
  source 1..110: mol_type = other DNA
agccagaggcatcaaggcttgtgtccacagaaggacggtcacctgtcagaaatggtccctcagatacagctcaaagcaggcaggtgagcgagcaggaggtgagtcacagg

SEQ ID NO: 43841 - DNA, 110 bp, synthetic construct
  source 1..110: mol_type = other DNA
ggaggataaacggtctctacaggctgtcactcacccagcatccccactgaagggtggctcgttcagcttgggcaacaacctttttaatgggattatcctgggaagccctg

SEQ ID NO: 43842 - DNA, 110 bp, synthetic construct
  source 1..110: mol_type = other DNA
ggctcgttcagcttgggcaacaacctttttaatgggattatcctgggaagccctggggccaggtgcccctcagcaatccccctgttcagggtggaattgtgccccctgct

SEQ ID NO: 43843 - DNA, 110 bp, synthetic construct
  source 1..110: mol_type = other DNA
cccatgtcgcctccagggttcttgccccctgtggctaaggtgcctctgtaaccagcttactccataacgatgttgttgttacaagggttcaaggggcaggtagagtctag

SEQ ID NO: 43844 - DNA, 110 bp, synthetic construct
  source 1..110: mol_type = other DNA
cttactccataacgatgttgttgttacaagggttcaaggggcaggtagagtctagacacaaggtaaactctgcgcgcttaaggggcaaatgcaccgtggaaacgccggct

SEQ ID NO: 43845 - DNA, 110 bp, synthetic construct
  source 1..110: mol_type = other DNA
cttccctcccagtcttcttcttcttttctcgcattttatttagggctgcatgggcggcatatggagtttcccaggctgcgggtcgaattggagctacagctgctggcctg

SEQ ID NO: 43846 - DNA, 110 bp, synthetic construct; identical to SEQ ID NO: 43845
  source 1..110: mol_type = other DNA

SEQ ID NO: 43847 - DNA, 110 bp, synthetic construct
  source 1..110: mol_type = other DNA
agacggtaatatcgactcggagatgttaaccttttggctgcggggctgagagctttgaaatgcgatctccgcagctctagttgtaattgttttatgtcacgttgaccgag

SEQ ID NO: 43848 - DNA, 110 bp, synthetic construct
  source 1..110: mol_type = other DNA
tgaaatgcgatctccgcagctctagttgtaattgttttatgtcacgttgaccgagcgtgtttacgattttttaacaacagccttaaaaagtccagtgacatctgtcgaga

SEQ ID NO: 43849 - DNA, 110 bp, synthetic construct
  source 1..110: mol_type = other DNA
ggctgaccaagggggtccctgagagtttgcagtgtccccaagtctccaagcccaccatctgtggaatgcagaaatgggtgcccgagagagaggagagtgctttggccaga

SEQ ID NO: 43850 - DNA, 110 bp, synthetic construct
  source 1..110: mol_type = other DNA
catctgtggaatgcagaaatgggtgcccgagagagaggagagtgctttggccagatggtgcagcagcggatccggacgcggatctggcattgtccccatctccctgctga

SEQ ID NO: 43851 - DNA, 110 bp, synthetic construct
  source 1..110: mol_type = other DNA
tacgatttgacccctatggaacctccatatgccacaatgcagccctaaaaagacccccaaatttttttttctcttcacaagtcactacgtttttaggagggaaaaacaaa

SEQ ID NO: 43852 - DNA, 110 bp, synthetic construct; identical to SEQ ID NO: 43851
  source 1..110: mol_type = other DNA

SEQ ID NO: 43853 - DNA, 110 bp, synthetic construct
  source 1..110: mol_type = other DNA
gcctggaaacttccatatgctgcaggggcagccatcaaaaaaaaagagagacaataaataaatacatgaaagccggcgttcccaatgtggctcagtagtaacgaaccgac

SEQ ID NO: 43854 - DNA, 110 bp, synthetic construct; identical to SEQ ID NO: 43853
  source 1..110: mol_type = other DNA

SEQ ID NO: 43855 - DNA, 110 bp, synthetic construct
  source 1..110: mol_type = other DNA
cctcgtcagattcgtttccactgtgccaccacgggaactcctggtggagcttcttaatcagggatgcctgtgatctcggggtttgaggtcttacacccccgctctgtggg

SEQ ID NO: 43856 - DNA, 110 bp, synthetic construct; identical to SEQ ID NO: 43855
  source 1..110: mol_type = other DNA

SEQ ID NO: 43857 - DNA, 110 bp, synthetic construct
  source 1..110: mol_type = other DNA
agaacggccaaaatccacggcgctgccatcaccaaatgctggcaaaaacgtggaacaacaggaaagctcattcattgcaggtgggaatagaaaatggtgcagagaacttg

SEQ ID NO: 43858 - DNA, 110 bp, synthetic construct
  source 1..110: mol_type = other DNA
caacaggaaagctcattcattgcaggtgggaatagaaaatggtgcagagaacttggaaggcagtctggtggtttctttttttttttttttttactttttcttttttcttt

SEQ ID NO: 43859 - DNA, 110 bp, synthetic construct
  source 1..110: mol_type = other DNA
ggcaccagtgcagccgtcgttgtcacatacacacactctgtgtcccacctgcctgtctggggatggaatccctgactcccagtgaagaggtggctccttttcaaccgggt

SEQ ID NO: 43860 - DNA, 110 bp, synthetic construct
  source 1..110: mol_type = other DNA
agatgctctcccagtccccaccctgtccccccgccacccatcctccgtcgccagggactttccatgtggtgtcaggaggaggtggcacctctgcacacacacagaaatgc

SEQ ID NO: 43861 - DNA, 110 bp, synthetic construct
  source 1..110: mol_type = other DNA
gactttccatgtggtgtcaggaggaggtggcacctctgcacacacacagaaatgcaacctcacacagacacatagagatacgcatacagagatacatggacccacataaa

SEQ ID NO: 43862 - DNA, 110 bp, synthetic construct
  source 1..110: mol_type = other DNA
agtacaaaaaaaggagaccagagcaaccttttggaagctggaaaacccgtgggtgagccatgacccaccaggcaggtcagacgctcggccggcagggtggaagcctggga

SEQ ID NO: 43863 - DNA, 110 bp, synthetic construct
  source 1..110: mol_type = other DNA
agcaggggcgggggcttggttgggtatttttatttgtccaattgtacttaagctctgtgccttttactgcaagcaaattacattgcagtagtcagtcatggcgggcatgg

SEQ ID NO: 43864 - DNA, 110 bp, synthetic construct
  source 1..110: mol_type = other DNA
tgtgccttttactgcaagcaaattacattgcagtagtcagtcatggcgggcatggagagtttgccaggtgaagtaaggttttctggcaggtgagggtggcacaggcgtgc

SEQ ID NO: 43865 - DNA, 110 bp, synthetic construct
  source 1..110: mol_type = other DNA
atatgaagagattatgtggtatatcttttttgcatctcctgtcagtcaggatgctgctggggaggctcatccttgtaggagtgactcactgattctcattgccctggagc

SEQ ID NO: 43866 - DNA, 110 bp, synthetic construct
  source 1..110: mol_type = other DNA
gctggggaggctcatccttgtaggagtgactcactgattctcattgccctggagccgagtttgtccaagtgggtccccagagctgctgcatcactgtcaccagaggcctt

SEQ ID NO: 43867 - DNA, 110 bp, synthetic construct
  source 1..110: mol_type = other DNA
gtaaacagggcttagtcttaagcaacgagagactgttccacagacaaaagtgagaaggaaaccttggaatgtggccagaacatcgttgagagaccgcctctctagccgat

SEQ ID NO: 43868 - DNA, 110 bp, synthetic construct
  source 1..110: mol_type = other DNA
aggaaaccttggaatgtggccagaacatcgttgagagaccgcctctctagccgataggggttcaacagaccccactggattcgggtttgggagacataaaaaggggtcta

SEQ ID NO: 43869 - DNA, 110 bp, synthetic construct
  source 1..110: mol_type = other DNA
ggttatcctcacgttaaggttccccgtgtaagtgggggggggtggacctgggcagctctaagcacccctccccgcaaacctgacatcagggattgcagatctggggtggc

SEQ ID NO: 43870 - DNA, 110 bp, synthetic construct
  source 1..110: mol_type = other DNA
ctctaagcacccctccccgcaaacctgacatcagggattgcagatctggggtggcagggagagtgcccagtttaataactgatgaattaatcagtcagccactcatttaa

SEQ ID NO: 43871 - DNA, 110 bp, synthetic construct
  source 1..110: mol_type = other DNA
ctgagggccctcccccaaccccacgtggacgaaacttccgtcaggctttctgagccctcttctccttgaccttgacctgccagacccaggtgcagcgaagactcctccta

SEQ ID NO: 43872 - DNA, 110 bp, synthetic construct
  source 1..110: mol_type = other DNA
cctcttctccttgaccttgacctgccagacccaggtgcagcgaagactcctcctaagccagttcgcgaagcatcccctccaccggagcgtcgttccccgacccttggcca

SEQ ID NO: 43873 - DNA, 110 bp, synthetic construct
  source 1..110: mol_type = other DNA
cgtggctctgaagtgccatccgtgctcagaggagtggcagacgggctgtgggcacacagaccagggtccctgacttcaggcaggggttggggaggcctcttaaagacaca

SEQ ID NO: 43874 - DNA, 110 bp, synthetic construct
  source 1..110: mol_type = other DNA
acagaccagggtccctgacttcaggcaggggttggggaggcctcttaaagacacaggctctgggggattctgaatctgccggttgaggtgaagccacaagatggggtgca

SEQ ID NO: 43875 - DNA, 110 bp, synthetic construct
  source 1..110: mol_type = other DNA
gggacccccagcccggctctcgatggaaacagcgtgggggctcaggacgcaccagcccccagggtccagaagaagggacccggccacgtccaaagggacctggggctgtg

SEQ ID NO: 43876 - DNA, 110 bp, synthetic construct
  source 1..110: mol_type = other DNA
cccccagggtccagaagaagggacccggccacgtccaaagggacctggggctgtgccagtgaatttcccactcgtaccaaggagcaaattgggatcttagagcagaaggg

SEQ ID NO: 43877 - DNA, 110 bp, synthetic construct
  source 1..110: mol_type = other DNA
agggaggtcctgtggccactgccaccaagtcggtggcttaaaacaacacaaacgtgttctcttaaggttctgaagttcaaaatatgtgatatccaggccttggcagagct

SEQ ID NO: 43878 - DNA, 110 bp, synthetic construct
  source 1..110: mol_type = other DNA
gttctcttaaggttctgaagttcaaaatatgtgatatccaggccttggcagagctgggtccttggaggctcgggagaatctgtgtcccagcctttgcctctttctagatg

SEQ ID NO: 43879 - DNA, 110 bp, synthetic construct
  source 1..110: mol_type = other DNA
tcattggcccaaccaccatgaaccaacatacttcatcaaggcccaggaagaccatccatcactgagagtaccgtgggtgtaggctgaggggtcctcaaaagcagaagctg

SEQ ID NO: 43880 - DNA, 110 bp, synthetic construct
  source 1..110: mol_type = other DNA
ccatcactgagagtaccgtgggtgtaggctgaggggtcctcaaaagcagaagctgtgtgggactttatggtccttgtggacacaagaaggacctcagaaaatgagggatc

SEQ ID NO: 43881 - DNA, 110 bp, synthetic construct
  source 1..110: mol_type = other DNA
tcccggattccagcccaggaagggctggctgcccagcctgcaagcggaggtgaaccgaactggccttggtgaggataaaaagagtcaaaggagctaaatcagccccgtac

SEQ ID NO: 43882 - DNA, 110 bp, synthetic construct
  source 1..110: mol_type = other DNA
cgaactggccttggtgaggataaaaagagtcaaaggagctaaatcagccccgtaccctgtgcacagtaggtcttcagtcatgttagacaagaaaggggaatcctcaacat

SEQ ID NO: 43883 - DNA, 110 bp, synthetic construct
  source 1..110: mol_type = other DNA
cagatccaggtggtgggcctggccgccttgggaataaaaacagatccagttcagatcctgatgcctgtgacgtaggcaaggcgcttccctctcgacggtgggagcgaaaa

SEQ ID NO: 43884 - DNA, 110 bp, synthetic construct
  source 1..110: mol_type = other DNA
tcctgatgcctgtgacgtaggcaaggcgcttccctctcgacggtgggagcgaaaatagcccctggctcaccgctggtgtaagaattacccaagagagtgactcaagggcc

SEQ ID NO: 43885 - DNA, 110 bp, synthetic construct
  source 1..110: mol_type = other DNA
cgcaacgactgccctgttttctgtccagaagaccatcctcaggccgcggactttcttcagagggacaaagggagggagaaactagaacgaacaccccggaagagtctcgt

SEQ ID NO: 43886 - DNA, 110 bp, synthetic construct
  source 1..110: mol_type = other DNA
ttcagagggacaaagggagggagaaactagaacgaacaccccggaagagtctcgtccaggaaactgggagacgagatgcgaaatctgctcatgggcagcaatgaccacac

SEQ ID NO: 43887 - DNA, 110 bp, synthetic construct
  source 1..110: mol_type = other DNA
tggtgggacgagggcacgggtagcgcagcagcagcaagaacgagacacagcacggtgacaacctgctgccctgtgagctgagtgtgttagttcactcagtcctgccctga

SEQ ID NO: 43888 - DNA, 110 bp, synthetic construct
  source 1..110: mol_type = other DNA
tgacaacctgctgccctgtgagctgagtgtgttagttcactcagtcctgccctgaacgcctgttctccagatacagagacccagagaggttcggtaactcgcccagggcc

SEQ ID NO: 43889 - DNA, 110 bp, synthetic construct
  source 1..110: mol_type = other DNA
gctcaagagactcccatggaactaaaaggaaacgcccttggttctccaggattttactcacctgtggcaacacggccaccaaggcacagcatcttgtggctgaaggtatc

SEQ ID NO: 43890 - DNA, 110 bp, synthetic construct
  source 1..110: mol_type = other DNA
atacgcatgcactcactttagtgttacagtgggtttttttttttttgagaactatttgaaaataagttgtagacataattctccattcccaaatacgccagcatgtaccg

SEQ ID NO: 43891 - DNA, 110 bp, synthetic construct
  source 1..110: mol_type = other DNA
ggcagggctggaaggacagggcaggtcactctccaggacagagacaacagccacgtcgccttgttgcttatttcctggctgcgtcttcacaaacgtttattatttacaat

SEQ ID NO: 43892 - DNA, 110 bp, synthetic construct
  source 1..110: mol_type = other DNA
tcgccttgttgcttatttcctggctgcgtcttcacaaacgtttattatttacaatttatttgctcttttttagttttgcttttgctgtgttttgtttcccttggatgtgg

SEQ ID NO: 43893 - DNA, 110 bp, synthetic construct
  source 1..110: mol_type = other DNA
ctactattattatggacatgacttgttgggcttccgctcaggctgtgggtgtgagtaactggctcagctggtggctctctacctcaccaaccatctatgtgctggcggca

SEQ ID NO: 43894 - DNA, 110 bp, synthetic construct
  source 1..110: mol_type = other DNA
cttttcttctttaaagaagtagttcctttattccaaaatgtcccaaatagtacacgttgattctttcacgtcatccttgattgtagctgctttataaggaaaagctttat

SEQ ID NO: 43895 - DNA, 110 bp, synthetic construct
  source 1..110: mol_type = other DNA
gttgattctttcacgtcatccttgattgtagctgctttataaggaaaagctttattaaaacataacttacatatcataaaatccaccattaaaaatggacacgtttgtga

SEQ ID NO: 43896 - DNA, 110 bp, synthetic construct
  source 1..110: mol_type = other DNA
cagttcctttcccctggaaggtgaagagtagatcactgtgagtccacagaatgacatgcctatatgccttctgcaggcacctattctgtctgcccaaggatttccttggc

SEQ ID NO: 43897 - DNA, 110 bp, synthetic construct
  source 1..110: mol_type = other DNA
atgcctatatgccttctgcaggcacctattctgtctgcccaaggatttccttggcttaccaaggccttttccttatgaatgttgcagtcacccatccctccctccaactg

SEQ ID NO: 43898 - DNA, 110 bp, synthetic construct
  source 1..110: mol_type = other DNA
catcaagcacctcttttccaggcttctttgtcactagattctggtctcactcatcctgagtccctgagcagccagccagcccatcagtcacagcccacgaatcagtaagg

SEQ ID NO: 43899 - DNA, 110 bp, synthetic construct
  source 1..110: mol_type = other DNA
ctgagtccctgagcagccagccagcccatcagtcacagcccacgaatcagtaaggagcttcctccttccctaatgggcgttagattctccggagacgtgcccgcggcttc

SEQ ID NO: 43900 - DNA, 110 bp, synthetic construct
  source 1..110: mol_type = other DNA
accaggagtacagtgaatttccgtgcctcagactcacacgcgtctacggccatagcaccctgaacacgcccgatctcgtcttttggcggaagctaagcagggtcctgcct

SEQ ID NO: 43901 - DNA, 110 bp, synthetic construct
  source 1..110: mol_type = other DNA
caccctgaacacgcccgatctcgtcttttggcggaagctaagcagggtcctgcctgcttagtacttggatgggagagtgggaagaggagttagctggccgcggtgtccgc

SEQ ID NO: 43902 - DNA, 110 bp, synthetic construct
  source 1..110: mol_type = other DNA
cctactacgccgtggacactgatggagacactgcccctgtggctcagtccccaccacaagcccggccggtggctctgacagctccttctcaggggtaaggaaatggaggc

SEQ ID NO: 43903 - DNA, 110 bp, synthetic construct
  source 1..110: mol_type = other DNA
acaagcccggccggtggctctgacagctccttctcaggggtaaggaaatggaggcccagagaagttaagcacctcccgacacacacgggctggtgagcaggggagctggg

SEQ ID NO: 43904 - DNA, 110 bp, synthetic construct
  source 1..110: mol_type = other DNA
caagttcagtggtttcttccgcaaacattgttacgcgctaactaataaggcagcagtgcatcgcggcaaggagctaaagacacgctaacaaaaaataaaataaaacaaag

SEQ ID NO: 43905 - DNA, 110 bp, synthetic construct
  source 1..110: mol_type = other DNA
gtgcatcgcggcaaggagctaaagacacgctaacaaaaaataaaataaaacaaaggcacagtctctggtgtgaacaccaacgccaacgccaaagaatgccgtgtgttatg

SEQ ID NO: 43906 - DNA, 110 bp, synthetic construct
  source 1..110: mol_type = other DNA
tcctgggccagagatcaaacccctgccacagccgtgacaaagccaggtcctgaacccactgagccaccaggggacccctgaaatactgtactcttgcctcagaaggagag

SEQ ID NO: 43907 - DNA, 110 bp, synthetic construct
  source 1..110: mol_type = other DNA
ccactgagccaccaggggacccctgaaatactgtactcttgcctcagaaggagagagacggtccagcagaggtgtctgccaggcgggtggtctgtgcacgtcctttcagg

SEQ ID NO: 43908 - DNA, 110 bp, synthetic construct
  source 1..110: mol_type = other DNA
tgggtttgtggtggttgcgtcgaatcctgcctttggcactgagggtttccttgcttagtatcatgcactttcagctttcgccagggtgttaccctgtaaaggaaggaatt

SEQ ID NO: 43909 - DNA, 110 bp, synthetic construct
  source 1..110: mol_type = other DNA
tagtatcatgcactttcagctttcgccagggtgttaccctgtaaaggaaggaattctcctgaatgaacacgccccgctcaggggtcgtcctccctcccatctcgtgaaga

SEQ ID NO: 43910 - DNA, 110 bp, synthetic construct
  source 1..110: mol_type = other DNA
tcctcttccctgggctctgtgtcctgatcaggcatcttccaccccgagcggccggcccagctgaaagcaacatcgcctctggaccccactgtgttgaaagacctgagcgc

SEQ ID NO: 43911 - DNA, 110 bp, synthetic construct
  source 1..110: mol_type = other DNA
cccagggccagcagcagactgagcctgggagcagagtttccaggttgaaaactttctaaacaaacatcgcagtatcgtgaaaatgaacttcatcctcgcagccccactca

SEQ ID NO: 43912 - DNA, 110 bp, synthetic construct
  source 1..110: mol_type = other DNA
ctaaacaaacatcgcagtatcgtgaaaatgaacttcatcctcgcagccccactcacgtggcccgcgtctgggtctgctcgcaccgccagcctcccggagccgccccatat

SEQ ID NO: 43913 - DNA, 110 bp, synthetic construct
  source 1..110: mol_type = other DNA
agcctcctgagacatcccaggtgacgacaggctggcagtcaatgcgtaaaaagaatctctgtgaaccagtaccggacgaggcagacaacctgttttttttgtttttttgt

SEQ ID NO: 43914 - DNA, 110 bp, synthetic construct
  source 1..110: mol_type = other DNA
acagtgagaaggccttggctgacacggagcatcaccacagctgctggatttctgcaaggtgacacccggcgggtccccgcagtccagctctgcaccacagataagtgaca

SEQ ID NO: 43915 - DNA, 110 bp, synthetic construct
  source 1..110: mol_type = other DNA
gggtggatggatgaggccccgtggtcacctcctccaggaagccttccctgctgccccagacagatgagctgtcacttgtgagcatccccgcttcagagctcctgtcacac

SEQ ID NO: 43916 - DNA, 110 bp, synthetic construct
  source 1..110: mol_type = other DNA
tggctgaaataagtaacgctgtcaggggaagcgcgacttggggtttgaagctgtagcccaagttctgtcaccaccacttacgcgttttatggtttgagaccagtcgctca

SEQ ID NO: 43917 - DNA, 110 bp, synthetic construct
  source 1..110: mol_type = other DNA
gcccaagttctgtcaccaccacttacgcgttttatggtttgagaccagtcgctcactccccgagcgcccgttcgcgtgactgtgagaatgggtcagtggtaacggtcttg

SEQ ID NO: 43918 - DNA, 110 bp, synthetic construct
  source 1..110: mol_type = other DNA
tatggaagcgttagaacttgaacaattagaacgctcaaagaattaggtctgaagttctacaactgccctctgaaaaacctttgcaaaaccacggcttgtaagaaaaaact

SEQ ID NO: 43919 - DNA, 110 bp, synthetic construct
  source 1..110: mol_type = other DNA
ctggaaacttccatatgctgcaggtgcggcactgagaagaaaaataaagcaaaataaagtagaggtagaggaagctcccttgtggctcagcgagttaaggatccagtgtt

SEQ ID NO: 43920 - DNA, 110 bp, synthetic construct; identical to SEQ ID NO: 43919
  source 1..110: mol_type = other DNA

SEQ ID NO: 43921 - DNA, 110 bp, synthetic construct
  source 1..110: mol_type = other DNA
tccttaacctactgagtggggccagagcttgaacctgaattctcatggatactagtcggattcgttcccgctgcaccatgacggggactgccctttatttctgtttcagg

SEQ ID NO: 43922 - DNA, 110 bp, synthetic construct
  source 1..110: mol_type = other DNA
tcggattcgttcccgctgcaccatgacggggactgccctttatttctgtttcaggcagaaagtgactaagagcccaattcttgactctgcctccaattttcttggtgaac

SEQ ID NO: 43923 - DNA, 110 bp, synthetic construct
  source 1..110: mol_type = other DNA
gccccattttacaggttggggcaacaagttcagagaggttaagtaacttgcccaaagtcacaccgctggtcaaacccaagctctggagcctaggtttgaccacagtcccg

SEQ ID NO: 43924 - DNA, 110 bp, synthetic construct
  source 1..110: mol_type = other DNA
cggaggatgaggcagaggaggagacgaaagggcaagggtggggcctgaaatgcggcagtgtttgcaagttgatatgataaaagtgttctgagataattctgataaaagcc

SEQ ID NO: 43925 - DNA, 110 bp, synthetic construct
  source 1..110: mol_type = other DNA
cagtgtttgcaagttgatatgataaaagtgttctgagataattctgataaaagccccgtccaaaaaagagatgtttatcctgctttttgtatctatgtgcatgcgtgtgt

SEQ ID NO: 43926 - DNA, 110 bp, synthetic construct
  source 1..110: mol_type = other DNA
caggaaaacagtgtacttgctagattaccggtgggctaacaaacgcgactcaggaagagccagatggaagaggtgctcagggtgaggtgagctttgggggcaccaccctc

SEQ ID NO: 43927 - DNA, 110 bp, synthetic construct
  source 1..110: mol_type = other DNA
agagccagatggaagaggtgctcagggtgaggtgagctttgggggcaccaccctcccagcccttccaggccttcagcagcctggaagctctttgcactccatagcccatg

SEQ ID NO: 43928 - DNA, 110 bp, synthetic construct
  source 1..110: mol_type = other DNA
actcttttttgaattcagaccttcttccttaggtgtgttacccaaagaagccttgagctgttcccagggctggggggtaattgggggagctccataacatcttaaccact

SEQ ID NO: 43929 - DNA, 110 bp, synthetic construct
  source 1..110: mol_type = other DNA
agctgttcccagggctggggggtaattgggggagctccataacatcttaaccactgagatgtgttacaagtctaggtgttgcttctcatgctggcattttataaaatgca

SEQ ID NO: 43930 - DNA, 110 bp, synthetic construct
  source 1..110: mol_type = other DNA
gagggggacttcacacgcccctcttggattacatcagaggtactcgcgttcactttaaacattttttatattgtaaaactaagtggaaggagttgtgtaattttgctttt

SEQ ID NO: 43931 - DNA, 110 bp, synthetic construct
  source 1..110: mol_type = other DNA
taaacattttttatattgtaaaactaagtggaaggagttgtgtaattttgcttttgaaactatttggcagcaaagaattatttcctcctcccgtcattcactcctgcgtt

SEQ ID NO: 43932 - DNA, 110 bp, synthetic construct
  source 1..110: mol_type = other DNA
tggtccttgtaggccgcgagctggcctggagaagagggcagttcctcccaccccccttcttgaagcagttccttaaaccagcgctccctggctgcacacatccttctgtc

SEQ ID NO: 43933 - DNA, 110 bp, synthetic construct
  source 1..110: mol_type = other DNA
cttcttgaagcagttccttaaaccagcgctccctggctgcacacatccttctgtctgcccctggccaggcggtgcccccgtcttgcggtgtccttcggaaaggaacctct

SEQ ID NO: 43934 - DNA, 110 bp, synthetic construct
  source 1..110: mol_type = other DNA
ccagcacaagggtctcctccaagtgtccgcagccatcagggagcaggaagctacactgtaatcacaggccagggagggaggggaaaatctttattttgtgctacttggac

SEQ ID NO: 43935 - DNA, 110 bp, synthetic construct
  source 1..110: mol_type = other DNA
ctgtaatcacaggccagggagggaggggaaaatctttattttgtgctacttggacattgagaaatggctgccgccatcacaagctatgcattttgttcagtgtttccagg

SEQ ID NO: 43936 - DNA, 110 bp, synthetic construct
  source 1..110: mol_type = other DNA
acactgaagggactggctggcacctgccatgtcagttgtcaccccctcatcactcttcctgcgtgtttgaggtgaacctgtcccggtgaggggcctcggaaaatccacat

SEQ ID NO: 43937 - DNA, 110 bp, synthetic construct
  source 1..110: mol_type = other DNA
ttcctgcgtgtttgaggtgaacctgtcccggtgaggggcctcggaaaatccacatgtatctttggtctttattgccctcgaaaggccaggagccagatttttgttgatgg

SEQ ID NO: 43938 - DNA, 110 bp, synthetic construct
  source 1..110: mol_type = other DNA
cgtcatgtgccctggcctcacgtcttcagtggctccacactgccttcaagaaaaagagcagggagttcctgttgtggcacagtggtaatgaacccagctagtatcatgag

SEQ ID NO: 43939 - DNA, 110 bp, synthetic construct
  source 1..110: mol_type = other DNA
cctcacgtcttcagtggctccacactgccttcaagaaaaagagcagggagttcctgttgtggcacagtggtaatgaacccagctagtatcatgaggtttcgggttcaatc

SEQ ID NO: 43940 - DNA, 110 bp, synthetic construct
  source 1..110: mol_type = other DNA
ggctgaggcgggggcaggttctcctgcccggcctgtgtcagagcctcggcccttctcccgcaggaaagtttgccatccgcccagacaagaaatccagtcccgtcatcaag

SEQ ID NO: 43941 - DNA, 110 bp, synthetic construct
  source 1..110: mol_type = other DNA
tcccgcaggaaagtttgccatccgcccagacaagaaatccagtcccgtcatcaagacggtgaagtctgtgggcatgatcgcgggaggaaccggtatgtgctccggagccc

SEQ ID NO: 43942 - DNA, 110 bp, synthetic construct
  source 1..110: mol_type = other DNA
atagaacccgcgtcctcatggatactagttgggttcttaaccccctgagccacgatggaaactccctggattccctactttaacacagggcagtaactttctcaagagct

SEQ ID NO: 43943 - DNA, 110 bp, synthetic construct
  source 1..110: mol_type = other DNA
tggaaactccctggattccctactttaacacagggcagtaactttctcaagagctacctctgttcaaaagggcgtgcacacagactcaggaaagggatggcctgggtttg

SEQ ID NO: 43944 - DNA, 110 bp, synthetic construct
  source 1..110: mol_type = other DNA
caccaaatgtctgacatctcccagtcccaccctattgtcctctgtcccaagcgccctctccgcccttctccaacacaaggggacccccgacctcatggaagctctccaaa

SEQ ID NO: 43945 - DNA, 110 bp, synthetic construct
  source 1..110: mol_type = other DNA
ctctccgcccttctccaacacaaggggacccccgacctcatggaagctctccaaactgggtgcacggtcaccatcacactgagtcagtgtctcctctttgtgtgtaaaat

SEQ ID NO: 43946 - DNA, 110 bp, synthetic construct
  source 1..110: mol_type = other DNA
gaacacgtgggcagacatctgtccccagccgcatccagctctgcccagtgctgagctccaatgccagggctgcgcagctcccggtctgctggggaaagggccccaggtgg

SEQ ID NO: 43947 - DNA, 110 bp, synthetic construct
  source 1..110: mol_type = other DNA
ctccaatgccagggctgcgcagctcccggtctgctggggaaagggccccaggtggcaaataattgctggccctgagttggcgcccatggaagtgaggacaggggctttgg

SEQ ID NO: 43948 - DNA, 110 bp, synthetic construct
  source 1..110: mol_type = other DNA
tctcccatgggagggggtgctttgtatgggaggtcaggccaagagaactgctgcccgccccgagctattagaacaagtctgtgcagttgagtccccagcagaggaagtga

SEQ ID NO: 43949 - DNA, 110 bp, synthetic construct
  source 1..110: mol_type = other DNA
cgccccgagctattagaacaagtctgtgcagttgagtccccagcagaggaagtgaccaggctccgaaagaaaaatggcaacagtgatgatgcaaagcgaaccctgagccc

SEQ ID NO: 43950 - DNA, 110 bp, synthetic construct
  source 1..110: mol_type = other DNA
cacacagcagccagagtgatcttgttagaattcaggtcggatcctgcactcctttgcccagaacccagcaaggctcccagctcgctcagggtcaaagcagagtcctgcct

SEQ ID NO: 43951 - DNA, 110 bp, synthetic construct
  source 1..110: mol_type = other DNA
gctgtagggtcagtctcagagcagggggcagagtcaaacaagagcctggacttcaggtatctgtcggcattccttccctcctgaatgaggctttgcacagcttggggcca

SEQ ID NO: 43952 - DNA, 110 bp, synthetic construct
  source 1..110: mol_type = other DNA
acctcaaaacaaacttgacgtgggtcccatcatgctcctacaggagactgaggtccaggattcagacccagagagtttgccccgttacactggatataggtctccgtgct

SEQ ID NO: 43953 - DNA, 110 bp, synthetic construct
  source 1..110: mol_type = other DNA
caggattcagacccagagagtttgccccgttacactggatataggtctccgtgctgcttttttcacttaattttgacattttaattttcacattaatctgtgttttttgt

SEQ ID NO: 43954 - DNA, 110 bp, synthetic construct
  source 1..110: mol_type = other DNA
gtctctctgtaaacttgggtgatggcaaggcctgctccacaggttgcttttgttggtctctgtcatcttgggtcacatttactgggcacttttgatccagccaccattgt

SEQ ID NO: 43955 - DNA, 110 bp, synthetic construct
  source 1..110: mol_type = other DNA
gtctctgtcatcttgggtcacatttactgggcacttttgatccagccaccattgtaagcctggattaatgtattcaaccctcagagcatatctgaggtagatggtatatt

SEQ ID NO: 43956 - DNA, 110 bp, synthetic construct
  source 1..110: mol_type = other DNA
tgtggtgaggtgtcagcaagccctgggcatgctgccctctcggccgcatacggaaccctgcagctgtccagggctggcggccaggagacgtgagttctaatctcctgcca

SEQ ID NO: 43957 - DNA, 110 bp, synthetic construct
  source 1..110: mol_type = other DNA
ccctgcagctgtccagggctggcggccaggagacgtgagttctaatctcctgccaccctcctgccagcatgtgaggacctggtgctcatcccttaccagccagcagtgcc

SEQ ID NO: 43958 - DNA, 110 bp, synthetic construct
  source 1..110: mol_type = other DNA
gaccataatgtatgtaactcccagggtcctaaggctggatgaagtccttgcagcaggggtcccccaaggctaacgccgtgaggctaggcctgcagcctggtggggcctga

SEQ ID NO: 43959 - DNA, 110 bp, synthetic construct
  source 1..110: mol_type = other DNA
ggggtcccccaaggctaacgccgtgaggctaggcctgcagcctggtggggcctgaacttgacaaaacgcctttgacctttggcctgcagctgcggcgccgctttggggat

SEQ ID NO: 43960 - DNA, 110 bp, synthetic construct
  source 1..110: mol_type = other DNA
aaaggggatgcaccccgccttttgagccttagtttcctcacactcggtaggagggctgggttgagggccctgatttcctcttgtatgtcttcatcctaaaacatgggggt

SEQ ID NO: 43961 - DNA, 110 bp, synthetic construct
  source 1..110: mol_type = other DNA
acaaactccttcaggacagggagggcctaaatcttgtgttcccagcatgtagtgtggtacctggcatacggatggtgggctcggggaatgcctgctgaatacatgtgcaa

SEQ ID NO: 43962 - DNA, 110 bp, synthetic construct
  source 1..110: mol_type = other DNA
ggtacctggcatacggatggtgggctcggggaatgcctgctgaatacatgtgcaaccaccagctgcctgagcagggaggccagaagtcttcgacagtaaacagtccttca

SEQ ID NO: 43963 - DNA, 110 bp, synthetic construct
  source 1..110: mol_type = other DNA
acagggtgcctctgaccccctgcgcctggccctgcaggacctggtggactctgagctaaccgagcttggaaaggtagggtcaagtatgaactcaccaggggcttctccac

SEQ ID NO: 43964 - DNA, 110 bp, synthetic construct
  source 1..110: mol_type = other DNA
ctaaccgagcttggaaaggtagggtcaagtatgaactcaccaggggcttctccaccgtgggcatcttgctgggtttggccagacctgggttacctgggtcctcggaatgg

SEQ ID NO: 43965 - DNA, 110 bp, synthetic construct
  source 1..110: mol_type = other DNA
accccgagccatgacgggaactcaggcatggcttctttgcagccgggcgggagagccactgcagcattcaccgcagcacagttgtgaagctggcccacacctaccggagc

SEQ ID NO: 43966 - DNA, 110 bp, synthetic construct
  source 1..110: mol_type = other DNA
ccactgcagcattcaccgcagcacagttgtgaagctggcccacacctaccggagccccctgctcttctgtgacctggaggtgagccccctgagcgcgcgggtggggcggg

SEQ ID NO: 43967 - DNA, 110 bp, synthetic construct
  source 1..110: mol_type = other DNA
ttttgccagagcactgtccgcagcgacagcagcaggtcacaggtcagcagctggaccacctgcggggtgagccacaagggagtagacaggtgactggctgatgactcgga

SEQ ID NO: 43968 - DNA, 110 bp, synthetic construct
  source 1..110: mol_type = other DNA
ccacctgcggggtgagccacaagggagtagacaggtgactggctgatgactcggataaggattccagcatcactagccccccacccctggcccgacacctggcagctcca

SEQ ID NO: 43969 - DNA, 110 bp, synthetic construct
  source 1..110: mol_type = other DNA
tgcccagcacaggactcggcccacaaccagaagatctgaaacccttttctcaacgagcacactcactgttcttctgatttgccagcttcagcaccatgttctcctggcgc

SEQ ID NO: 43970 - DNA, 110 bp, synthetic construct
  source 1..110: mol_type = other DNA
ggtatagagtttagtttccaaagttaatcctgaaagacataatcggcactcatgttaacagtatcccttctgatattttgagtccatggactgtaacccaacaactgaga

SEQ ID NO: 43971 - DNA, 110 bp, synthetic construct
  source 1..110: mol_type = other DNA
taaggatgtaagaggagaagaggctgaaagggtacaccgagcctcaaataacatagaaacctgggcttcacactgaggccagcgggaggcatagatgattttccaaatag

SEQ ID NO: 43972 - DNA, 110 bp, synthetic construct
  source 1..110: mol_type = other DNA
gaaacctgggcttcacactgaggccagcgggaggcatagatgattttccaaataggaaactgacaacatgtgagttatacagtgtggagattaatttggcagcaagtaca

SEQ ID NO: 43973 - DNA, 110 bp, synthetic construct
  source 1..110: mol_type = other DNA
gagagcagtgacccaaattctttttggaggcctccatggaccaaaaacccactgcaaagtgggtcggcattgagggaccaggcggccggtgcttcagcccactctgcctc

SEQ ID NO: 43974 - DNA, 110 bp, synthetic construct
  source 1..110: mol_type = other DNA
aaagtgggtcggcattgagggaccaggcggccggtgcttcagcccactctgcctcttggaaaggtcttcccctcactccacccctgcccggctataacttccacccgctg

SEQ ID NO: 43975 - DNA, 110 bp, synthetic construct
  source 1..110: mol_type = other DNA
tgaggtcagtgcaaaggcactggatggaacagggtcatttgtagaacagcaagagggcctgtgtggccagaatggaacaagcggtgaagagagctctaggaggtgaggtg

SEQ ID NO: 43976 - DNA, 110 bp, synthetic construct
  source 1..110: mol_type = other DNA
ggcctgtgtggccagaatggaacaagcggtgaagagagctctaggaggtgaggtgagggagaaacgtgggatgggttattctgagtcttgtagctgtggttagggattgg

SEQ ID NO: 43977 - DNA, 110 bp, synthetic construct
  source 1..110: mol_type = other DNA
tcgttaaccactgagccacaacagtaattcctcaatattagacttttcatcctctgtatagcttgtaaaaactaataatcagttaatggaaaagagtaaaatcacattct

SEQ ID NO: 43978 - DNA, 110 bp, synthetic construct; identical to SEQ ID NO: 43977
  source 1..110: mol_type = other DNA

SEQ ID NO: 43979 - DNA, 110 bp, synthetic construct; identical to SEQ ID NO: 43977
  source 1..110: mol_type = other DNA

SEQ ID NO: 43980 - DNA, 110 bp, synthetic construct; identical to SEQ ID NO: 43977
  source 1..110: mol_type = other DNA

SEQ ID NO: 43981 - DNA, 110 bp, synthetic construct
  source 1..110: mol_type = other DNA
gggtggcaaagtcatttgaataagaagccagagcagccaagactggagttaagaacattggtctcattagcactgtgtgtcagccagcagaggtaatgaaacggaatgtg

SEQ ID NO: 43982 - DNA, 110 bp, synthetic construct
  source 1..110: mol_type = other DNA
cattggtctcattagcactgtgtgtcagccagcagaggtaatgaaacggaatgtgcgtgtagcatctctgtcctctgttccagaatctctgcttggtgctggaattacaa

SEQ ID NO: 43983 - DNA, 110 bp, synthetic construct
  source 1..110: mol_type = other DNA
caagccaaccaaaaagcatgatgcacaacattgccactcactcataggtacgtggatgtatgtgtctctgtaggatcagaacggccagagttgatcagaggcatcagggt

SEQ ID NO: 43984 - DNA, 110 bp, synthetic construct
  source 1..110: mol_type = other DNA
atgtatgtgtctctgtaggatcagaacggccagagttgatcagaggcatcagggtaaggatggtggatgtggcaaaaatgcctgcttacccaggcacactggcaaactgg

SEQ ID NO: 43985 - DNA, 110 bp, synthetic construct
  source 1..110: mol_type = other DNA
tcagcttggagagaaggaagtctggccgtcacttatctgtcgaactgctgactggcgcggcctggcgttgtccaaagaagtcttattacaataaaaaggagggaggagtt

SEQ ID NO: 43986 - DNA, 110 bp, synthetic construct
  source 1..110: mol_type = other DNA
cgcggcctggcgttgtccaaagaagtcttattacaataaaaaggagggaggagttttaagggaaacgatcaagcacaaatgcaaatacctaataaaaatagctggtaagt

SEQ ID NO: 43987 - DNA, 110 bp, synthetic construct
  source 1..110: mol_type = other DNA
caagcgtctatgttaactctccttctaagcatgacgaagagcaagggggaagtgtttctgcacactacaagaaaatccattatttttccacttagctgtgacccgaaagc

SEQ ID NO: 43988 - DNA, 110 bp, synthetic construct
  source 1..110: mol_type = other DNA
cttctcactgtatcctgagcaagcagtgggaactcagtaaacatgtggtgaatgaagtagtaacattaaatgcacagacagggttctgacagcgaaggcattaccttcta

SEQ ID NO: 43989 - DNA, 110 bp, synthetic construct
  source 1..110: mol_type = other DNA
tggttttccctggagggaggagagaaagaatagcccaaaggctaagaaggaggctctggatccagagggcctaggtttccggccgggcagtggtccaggtaacctcttgg

SEQ ID NO: 43990 - DNA, 110 bp, synthetic construct
  source 1..110: mol_type = other DNA
tcaagttccgccctccctgccccagttcgctgttagaccctgggaagatggttgacctttttaaagaccacactttcctccacgttaacacggctgaacttgggaaaacc

SEQ ID NO: 43991 - DNA, 110 bp, synthetic construct
  source 1..110: mol_type = other DNA
cctttttaaagaccacactttcctccacgttaacacggctgaacttgggaaaaccagtaaagaatgtgtaagtactgctttgtaaagtgtagagcactttcaaagacgtt

SEQ ID NO: 43992 - DNA, 110 bp, synthetic construct
  source 1..110: mol_type = other DNA
tagaatcagaatttaggctgtacaacaagatggcacaattaaccacctacttctaggctagtgtcaggttctccatttatggtgcttgcacttactctacctgtttcgcc

SEQ ID NO: 43993 - DNA, 110 bp, synthetic construct
  source 1..110: mol_type = other DNA
aaaaaaaaaaaaaaaagctggagaattattctaaagctagtcatttctcaaatatccacttagaaaacagaatccacccatcaattctgctttgttagtttttccccgtg

SEQ ID NO: 43994 - DNA, 110 bp, synthetic construct
  source 1..110: mol_type = other DNA
ccacttagaaaacagaatccacccatcaattctgctttgttagtttttccccgtggtattaaaatgctttttaaaaaatgaacattctaatcttaaaacctttctttcat

SEQ ID NO: 43995 - DNA, 110 bp, synthetic construct
  source 1..110: mol_type = other DNA
acacatgtatttatgttatcatttagtcaccatccaagcatcaccaaacactttgtgccggggattaccaagtccagggaacgctgagacaaaccagaccctgtccttgg

SEQ ID NO: 43996 - DNA, 110 bp, synthetic construct
  source 1..110: mol_type = other DNA
tgccggggattaccaagtccagggaacgctgagacaaaccagaccctgtccttggccttgtggaacttcagggccaggaagtctctttagagagacttgtgttatgagag

SEQ ID NO: 43997 - DNA, 110 bp, synthetic construct; identical to SEQ ID NO: 43995
  source 1..110: mol_type = other DNA

SEQ ID NO: 43998 - DNA, 110 bp, synthetic construct; identical to SEQ ID NO: 43996
  source 1..110: mol_type = other DNA

SEQ ID NO: 43999 - DNA, 110 bp, synthetic construct
  source 1..110: mol_type = other DNA
gccctgaacttccacatgccctgcgctgaccccccaccaaaggatctgaagtcactctaggtaatcttttgaaaactatgtatttatttttcttttctttttttggcctt

SEQ ID NO: 44000 - DNA, 110 bp, synthetic construct
  source 1..110: mol_type = other DNA
ttactgttttcatttttttcacagcaatcctagtccaaaaggaatacatattttatactgtatttaggtccaaacagtctaacaggtatctgtgtcctagcaagttggag

SEQ ID NO: 44001 - DNA, 110 bp, synthetic construct
  source 1..110: mol_type = other DNA
aatcctagtccaaaaggaatacatattttatactgtatttaggtccaaacagtctaacaggtatctgtgtcctagcaagttggagtttgaaaaagtaattaaacacaaat

SEQ ID NO: 44002 - DNA, 110 bp, synthetic construct
  source 1..110: mol_type = other DNA
ggtcgggggcggctgtgccagcatctcgggtgggtctgtgtccagccccatccttacttccatcgccagtgacatgagggcagaaactggctggcctcccagatcaggga

SEQ ID NO: 44003 - DNA, 110 bp, synthetic construct; identical to SEQ ID NO: 44002
  source 1..110: mol_type = other DNA

SEQ ID NO: 44004 - DNA, 110 bp, synthetic construct
  source 1..110: mol_type = other DNA
gaaaatttgatttggcccattgataataatgaagttgtgttcatttaaaagtcatggctcattatttttgtgatactctaatggataaaggctcttcaaacttttcaggg

SEQ ID NO: 44005 - DNA, 110 bp, synthetic construct
  source 1..110: mol_type = other DNA
aattctgagggtgagtgctggggttctccctgcatttagttaaacaacattctcttttttttttttttttgcttgttgtaggaccgcatgtgaggcatatggaaattccc

SEQ ID NO: 44006 - DNA, 110 bp, synthetic construct
  source 1..110: mol_type = other DNA
tgctggggttctccctgcatttagttaaacaacattctcttttttttttttttttgcttgttgtaggaccgcatgtgaggcatatggaaattcccaagctagggattaaa

SEQ ID NO: 44007 - DNA, 110 bp, synthetic construct
  source 1..110: mol_type = other DNA
cgggctctcgtctgacactcaggaatgaactgtctgaggagacacgtgtgctgacaaagcaagagactttattgcgaagaggtgcccaggtgcagagcagcagggtgagc

SEQ ID NO: 44008 - DNA, 110 bp, synthetic construct
  source 1..110: mol_type = other DNA
aaagcaagagactttattgcgaagaggtgcccaggtgcagagcagcagggtgagcaaacccaggagaactgcccagtcctctctttaaattcgcaactagtttataggtg

SEQ ID NO: 44009 - DNA, 110 bp, synthetic construct
  source 1..110: mol_type = other DNA
gatttactttctcttaccctccaggttattcttctctgaatatatccagttgacggctctctttgtctagagctcatctctcatttcaaaagaaattatcactgtgctag

SEQ ID NO: 44010 - DNA, 110 bp, synthetic construct
  source 1..110: mol_type = other DNA
accctttccttaggtctctggagagctatctggtggctgtaatttacccagacgttttctatttcattttcagctgacacacactgatccatggcatagctccaaggaga

SEQ ID NO: 44011 - DNA, 110 bp, synthetic construct
  source 1..110: mol_type = other DNA
tttctatttcattttcagctgacacacactgatccatggcatagctccaaggagagtgcctgcggcttcggcaggacagaaaggagatggccctggcctggccactagca

SEQ ID NO: 44012 - DNA, 110 bp, synthetic construct
  source 1..110: mol_type = other DNA
aggatcttgtaggtgtttaatgggcttgaacaaaacgtctgtgcagcatttgaaatatgtgtctggcacgtgctcagtaaccattggctctaactgctactctctgccag

SEQ ID NO: 44013 - DNA, 110 bp, synthetic construct
  source 1..110: mol_type = other DNA
tatgtgtctggcacgtgctcagtaaccattggctctaactgctactctctgccaggaaccccgtgagctgtcctctgcacatttctctctggggctccgagaaaagtgaa

SEQ ID NO: 44014 - DNA, 110 bp, synthetic construct
  source 1..110: mol_type = other DNA
gctgtgaaatgggcacaaagttcccgtttgggaagatgaaaaatttctggagatggccgtacaacaatgtgaatgaacttaacgcccctgaactgtaggcttaaaaatga

SEQ ID NO: 44015 - DNA, 110 bp, synthetic construct
  source 1..110: mol_type = other DNA
gccgtacaacaatgtgaatgaacttaacgcccctgaactgtaggcttaaaaatgattaagtcagagtccccgttgaggcacaaatcacaaatccagccaggatccacgag

SEQ ID NO: 44016 - DNA, 110 bp, synthetic construct
  source 1..110: mol_type = other DNA
atgtcgaaagacagggatatggagcaacagggagtgacgttgatgcccctgaaacaaagtcttctctttggagagaggacagtcctttctgacaaagcaacagcaagtgc

SEQ ID NO: 44017 - DNA, 110 bp, synthetic construct
  source 1..110: mol_type = other DNA
aaagtcttctctttggagagaggacagtcctttctgacaaagcaacagcaagtgctttgcagaacctaaggcaggaagacaaaccgggagtagcaactgtgttccatttt

SEQ ID NO: 44018 - DNA, 110 bp, synthetic construct
  source 1..110: mol_type = other DNA
tgttccacgacgggaactccagggcaaagattttttagctatgacatcaaaagcacaatccataagggaaaacatttataatagacttcatcaaaattaaaagcttttat

SEQ ID NO: 44019 - DNA, 110 bp, synthetic construct
  source 1..110: mol_type = other DNA
caatccataagggaaaacatttataatagacttcatcaaaattaaaagcttttatttttcaaaaggcactattaggaattcccttgtagctcactgtttttaggggtctg

SEQ ID NO: 44020 - DNA, 110 bp, synthetic construct
  source 1..110: mol_type = other DNA
cccatcacatttaacaccagttaaataccagtgattcccaaatgcgtatctctttcttttttgagcacctatcacttagccacctctgcctggatgtcttgcagacacct

SEQ ID NO: 44021 - DNA, 110 bp, synthetic construct
  source 1..110: mol_type = other DNA
cttttttgagcacctatcacttagccacctctgcctggatgtcttgcagacacctcagatatacatttcaaactaaactttttttttctcctcctttttctgcggcccct

SEQ ID NO: 44022 - DNA, 110 bp, synthetic construct
  source 1..110: mol_type = other DNA
cttattgcacgtcaaacatatcacccttttgtcatttttattccattttttccccacaactttaaaaaaagtgtaacctttctgtaaaagaagggctttaacttactcat

SEQ ID NO: 44023 - DNA, 110 bp, synthetic construct
  source 1..110: mol_type = other DNA
cttagggtattcatttgttgctgggtgggtttaccttgacatgtgagtaaattgtgacttttctcaagggagtcgtagttaggctagacggtgttccatcgtagaggggg

SEQ ID NO: 44024 - DNA, 110 bp, synthetic construct
  source 1..110: mol_type = other DNA
gacttttctcaagggagtcgtagttaggctagacggtgttccatcgtagaggggggtgtgtgtgtgtgtaagagttaagttttactgtggctgaattgaagaaagtgact

SEQ ID NO: 44025 - DNA, 110 bp, synthetic construct
  source 1..110: mol_type = other DNA
tgtggttataaggttatttaaaaatgtggaaggagttcccactctggctgagtgggttaagaatctgactgcagcagcttagatcactgtgaaggcgtgggttcaatctt

SEQ ID NO: 44026 - DNA, 110 bp, synthetic construct
  source 1..110: mol_type = other DNA
gttaagaatctgactgcagcagcttagatcactgtgaaggcgtgggttcaatcttcctcctagcatagtgggttagaggatctggcgttgccgcaactgtggctcagatt

SEQ ID NO: 44027 - DNA, 110 bp, synthetic construct
  source 1..110: mol_type = other DNA
tctacaatgctgtgttttaggtgtagagcaaattcagttatacatgcacatatacccactctttttcagattcttttcccatgtaggttgttaaagaatattgagtagag

SEQ ID NO: 44028 - DNA, 110 bp, synthetic construct; identical to SEQ ID NO: 44027
  source 1..110: mol_type = other DNA

SEQ ID NO: 44029 - DNA, 110 bp, synthetic construct
  source 1..110: mol_type = other DNA
tgtcagtttttttgatcttcttaacacgtttttggatcccttggttttctctgtttttctactttccacataattgctttctgctttaatttacctttctttattctact

SEQ ID NO: 44030 - DNA, 110 bp, synthetic construct; identical to SEQ ID NO: 44029
  source 1..110: mol_type = other DNA

SEQ ID NO: 44031 - DNA, 110 bp, synthetic construct
  source 1..110: mol_type = other DNA
cctaaagctttctttaatgatgcctgaagctctgcatatcttgagggagaggagagacgccacagataggaagctggtgtgtaagtccaaagataagaccaagaatgctt

SEQ ID NO: 44032 - DNA, 110 bp, synthetic construct
  source 1..110: mol_type = other DNA
gacgccacagataggaagctggtgtgtaagtccaaagataagaccaagaatgcttctgtatccaggatgaagattcgcagaagaagtggtcatgtgtggtgcgccattct

SEQ ID NO: 44033 - DNA, 110 bp, synthetic construct
  source 1..110: mol_type = other DNA
ttagttttcctttcagtgcgcgtttgcataacctccctgtgttcacacaaagctgttgcaagccttccagcgaaaccagctccgggagggtgggagtaaaggatcaggtt

SEQ ID NO: 44034 - DNA, 110 bp, synthetic construct
  source 1..110: mol_type = other DNA
ttgcaagccttccagcgaaaccagctccgggagggtgggagtaaaggatcaggtttcagtgccctctgaccccaagaatgtatattctcagaaacaacatgcatgcttct

SEQ ID NO: 44035 - DNA, 110 bp, synthetic construct
  source 1..110: mol_type = other DNA
cccctccacctctgggggggcaggctggaaggagaggacagggactcaggaaaaccaagaggagcgctgcagtaactcccagacgcgcatcagaagaccctcctccctcc

SEQ ID NO: 44036 - DNA, 110 bp, synthetic construct
  source 1..110: mol_type = other DNA
caagaggagcgctgcagtaactcccagacgcgcatcagaagaccctcctccctccaccccttacctggatggcccacatgacccgcaaaggtccgtggaaggcaagcctg

SEQ ID NO: 44037 - DNA, 110 bp, synthetic construct
  source 1..110: mol_type = other DNA
aacactgactggcctaacctgggtcatgtctaatcgtctactccgtcagggacacactgttacctcagcaacaaaaagctgctatttccagaaaaatctggattggatgg

SEQ ID NO: 44038 - DNA, 110 bp, synthetic construct
  source 1..110: mol_type = other DNA
tgcggactgtcagcaatgcagctttctgagaagtcggggtggggagaggacacaggcacacacacacacacagagacagagagaaggatgcacgcgaatgcacatgaaca

SEQ ID NO: 44039 - DNA, 110 bp, synthetic construct
  source 1..110: mol_type = other DNA
gcacacacacacacacagagacagagagaaggatgcacgcgaatgcacatgaacacacgtgcacacacataccagaacgagcatgcctgggcagttacatgtgccagaac

SEQ ID NO: 44040 - DNA, 110 bp, synthetic construct
  source 1..110: mol_type = other DNA
gctggaagaagcagagtaaacagagggagttcactggagagaaaagcatctgcaattgctttaaattccagagccatgagcccgcattcccgccgaggggctttgccagc

SEQ ID NO: 44041 - DNA, 110 bp, synthetic construct
  source 1..110: mol_type = other DNA
ttgctttaaattccagagccatgagcccgcattcccgccgaggggctttgccagcccaagaccagcagtgaactcgacagctctgagatccgtggccccacacatgaaga

SEQ ID NO: 44042 - DNA, 110 bp, synthetic construct
  source 1..110: mol_type = other DNA
cttgggtcgctgctgtggcgtgggttcaatccctggtccaggaatttttatgtatcgtgggcacagctaaaaaagagagactgggaagcaggtgtggtacccacaacaga

SEQ ID NO: 44043 - DNA, 110 bp, synthetic construct
  source 1..110: mol_type = other DNA
aagaaagggaaaaaaatctttcctacgtggaacacctgtacaagtgagggctctttatcggtgcacacacaggttgcacacatagttccctaagatggcaaaactttaaa

SEQ ID NO: 44044 - DNA, 110 bp, synthetic construct
  source 1..110: mol_type = other DNA
tatcggtgcacacacaggttgcacacatagttccctaagatggcaaaactttaaaccagagctttggcaggcatgggggccgttcctttgagtgtagtttcacttttaaa

SEQ ID NO: 44045 - DNA, 110 bp, synthetic construct
  source 1..110: mol_type = other DNA
tcatcagctaagggggcactgtcacaaccatggcctagaggaccatctctgtaagtaaacggatggttcccagctttcctcctgagctccagaccctcgtgaccacgtgc

SEQ ID NO: 44046 - DNA, 110 bp, synthetic construct
  source 1..110: mol_type = other DNA
ttccttgacactccctgtctagaccaggccttcctgttcaacagtcccgaaacatcctctaccacctcctcagagtgctggtaacaaccgcagttcattatttgtcaaag

SEQ ID NO: 44047 - DNA, 110 bp, synthetic construct
  source 1..110: mol_type = other DNA
cctctaccacctcctcagagtgctggtaacaaccgcagttcattatttgtcaaagaacttgcttacagctgtttgtataaagacacaccacacaccacctctttcttcac

SEQ ID NO: 44048 - DNA, 110 bp, synthetic construct
  source 1..110: mol_type = other DNA
ctggttgaagttatatagagcactgttttccttctcaggtaggagtgatggcagattccttccaaacatcattctgaaatgctcagagctacaccgttaatccttccacc

SEQ ID NO: 44049 - DNA, 110 bp, synthetic construct
  source 1..110: mol_type = other DNA
tttcaaaacccttcaccctcctacgcccctccaacctcatttcatttcatttcacttcaccctttcttggttgaataggctccggcttactggccttccttctgttcttc

SEQ ID NO: 44050 - DNA, 110 bp, synthetic construct
  source 1..110: mol_type = other DNA
ttcaccctttcttggttgaataggctccggcttactggccttccttctgttcttcagaggtaaagagtttgtacccagtttacaacctttgtactagttgttccctctgc

SEQ ID NO: 44051 - DNA, 110 bp, synthetic construct
  source 1..110: mol_type = other DNA
caagaaaggctgaaacctttcaggctaaagaaaattgatacaagtgggaactcagatctggacaaaggaatgaagggcaacagaagtgtccaatacgtgggtaaataaaa

SEQ ID NO: 44052 - DNA, 110 bp, synthetic construct
  source 1..110: mol_type = other DNA
atctggacaaaggaatgaagggcaacagaagtgtccaatacgtgggtaaataaaaaaagtcttcttttttcagatttttaaattttaccaaaagcaaagatggtaacaat

SEQ ID NO: 44053 - DNA, 110 bp, synthetic construct
  source 1..110: mol_type = other DNA
ccccacgcacttgctggcttctgtggcaggtcctggctggtctcctacaacgtggacatctgttcctggagctgcttttcagcggctgctgacaatgcctaacttctagc

SEQ ID NO: 44054 - DNA, 110 bp, synthetic construct
  source 1..110: mol_type = other DNA
acatctgttcctggagctgcttttcagcggctgctgacaatgcctaacttctagccacttttctgatgaaaacttgtctccggagtgctgtcacttggaaaggccacatg

SEQ ID NO: 44055 - DNA, 110 bp, synthetic construct
  source 1..110: mol_type = other DNA
ccccccaggcttgccctgcctgcctcccagggctgtctggaggttcacaagagatcatgcccatgaaatccgatggaaaagcggtgcggttatgaggggccattaaactc

SEQ ID NO: 44056 - DNA, 110 bp, synthetic construct
  source 1..110: mol_type = other DNA
catgcccatgaaatccgatggaaaagcggtgcggttatgaggggccattaaactcactggctacgaggtgaacagggccaagtaccacacctacagctctgaggtccctt

SEQ ID NO: 44057 - DNA, 110 bp, synthetic construct
  source 1..110: mol_type = other DNA
tgacggggcaggtgtggggcagaatatgtgtggcagggtaaactttaaagatgaaggagaaggagttccctggtagctcagccggttaaggacctggtgttgtcactgca

SEQ ID NO: 44058 - DNA, 110 bp, synthetic construct
  source 1..110: mol_type = other DNA
ggggcagaatatgtgtggcagggtaaactttaaagatgaaggagaaggagttccctggtagctcagccggttaaggacctggtgttgtcactgcagtggcttgggttgct

SEQ ID NO: 44059 - DNA, 110 bp, synthetic construct
  source 1..110: mol_type = other DNA
ccactgcgccacgatgggagctccaaaagtttcttgattcttgatagagatgaagatgctaaaataagaagtctgggctgccaaacacgaatgatgttatgacagttctg

SEQ ID NO: 44060 - DNA, 110 bp, synthetic construct; identical to SEQ ID NO: 44059
  source 1..110: mol_type = other DNA

SEQ ID NO: 44061 - DNA, 110 bp, synthetic construct
  source 1..110: mol_type = other DNA
agggcgcacctgtgtaccccttccaccacctcacatggtgggttaaataaatattagtttcccccttttcttaaccccctgatgctttctaaaaacctcttctattgcta

SEQ ID NO: 44062 - DNA, 110 bp, synthetic construct
  source 1..110: mol_type = other DNA
agtttcccccttttcttaaccccctgatgctttctaaaaacctcttctattgctatataacattccaccttggattgtagactgggagtcctccaacagaattttttggt

SEQ ID NO: 44063 - DNA, 110 bp, synthetic construct
  source 1..110: mol_type = other DNA
ttcttgccttttttttttttttttttttgggccaccccgtggcatctggaagttccctggccagggatcagatcccagccgcaggtgcaacatatgtcgcagctgtggca

SEQ ID NO: 44064 - DNA, 110 bp, synthetic construct
  source 1..110: mol_type = other DNA
cctggccagggatcagatcccagccgcaggtgcaacatatgtcgcagctgtggcaacgccgtatcctttaatccactgctccaggctgggtattgaaccttcgccaatcc

SEQ ID NO: 44065 - DNA, 110 bp, synthetic construct
  source 1..110: mol_type = other DNA
aaagtatcatcttgtgtgcaatctacacatagttgagaaagaaatacatatagatggaataaatatgccaaaaagttagcaactgttgaacctgggaggtgagtgtagag

SEQ ID NO: 44066 - DNA, 110 bp, synthetic construct
  source 1..110: mol_type = other DNA
ggaataaatatgccaaaaagttagcaactgttgaacctgggaggtgagtgtagaggtagtcactgcacaaatatttcaacttttctttatgtttggacattctcttcact

SEQ ID NO: 44067 - DNA, 110 bp, synthetic construct
  source 1..110: mol_type = other DNA
tcaggaaatgctgccactcaagattaatgcttggaaatcaacagaggtaagtcattatagtagtttcctattgctgctccaacaaattaccacaatatgagtgcctgaaa

SEQ ID NO: 44068 - DNA, 110 bp, synthetic construct
  source 1..110: mol_type = other DNA
tatagtagtttcctattgctgctccaacaaattaccacaatatgagtgcctgaaatcaacacacatgtagtattttacagttctggaggctagaagtctgacccaggttt

SEQ ID NO: 44069 - DNA, 110 bp, synthetic construct
  source 1..110: mol_type = other DNA
gtggggattcttaagagcaggaaaaaaaaacaccctatatcagtggatacccaaatgtatagatataagcatgtgtgtgttcttacaatcaaaatgtatttatggtgatg

SEQ ID NO: 44070 - DNA, 110 bp, synthetic construct
  source 1..110: mol_type = other DNA
aaaaacaccctatatcagtggatacccaaatgtatagatataagcatgtgtgtgttcttacaatcaaaatgtatttatggtgatgttaatacttagagacacattgcttc

SEQ ID NO: 44071 - DNA, 110 bp, synthetic construct
  source 1..110: mol_type = other DNA
tccttgccgctgccaagggcccagcaaccaggcactagctacgagccctgcacattgcctccatctccctggaagcacgcactgcaacctggaaataaaaagtaagctct

SEQ ID NO: 44072 - DNA, 110 bp, synthetic construct; identical to SEQ ID NO: 44071
  source 1..110: mol_type = other DNA

SEQ ID NO: 44073 - DNA, 110 bp, synthetic construct
  source 1..110: mol_type = other DNA
tccacacacactcccagcccctccctgccctccttcatgtctggacccagcgtggcagaggctggagaaggctggatcacagaaagagctggttcggaggagaagagact

SEQ ID NO: 44074 - DNA, 110 bp, synthetic construct
  source 1..110: mol_type = other DNA
ttgcggagggtggagtgagggtacctgaggcccccgagttcccactgggggaggcaaacaccagctctcagtcccaggctcccaggcctgtgctgctggctctggggccc

SEQ ID NO: 44075 - DNA, 110 bp, synthetic construct
  source 1..110: mol_type = other DNA
aaacaccagctctcagtcccaggctcccaggcctgtgctgctggctctggggcccaaaccgggcaaggtgcctgctcacctgtatccactgtgcacctgtagcatctctg

SEQ ID NO: 44076 - DNA, 110 bp, synthetic construct
  source 1..110: mol_type = other DNA
ctggtaaaggccttctctccacccctcaatgctcagatcacaggtcacctcctctgagaagccttccctgatgcctcccctcactggttctgggcacacgcatctcttaa

SEQ ID NO: 44077 - DNA, 110 bp, synthetic construct
  source 1..110: mol_type = other DNA
gagaagccttccctgatgcctcccctcactggttctgggcacacgcatctcttaaagtggttgtaagtaccatcgcaggactcctgctggaggctgggacctcctaaggc

SEQ ID NO: 44078 - DNA, 110 bp, synthetic construct
  source 1..110: mol_type = other DNA
ttttgtcaatggaaacatagacatgtttttacctatggaacctggccagatggttccaggatttctgtgaatgggagaatagcccagacaagtttttaaaagaagaaaga

SEQ ID NO: 44079 - DNA, 110 bp, synthetic construct
  source 1..110: mol_type = other DNA
ccaggatttctgtgaatgggagaatagcccagacaagtttttaaaagaagaaagatggagtgcagcctcataagagatcaaaatattctacaagtattaatacagtgcag

SEQ ID NO: 44080 - DNA, 110 bp, synthetic construct
  source 1..110: mol_type = other DNA
cagaaagaaatgctacatttcaatcagaggtcaggggaaacaaacatgcaccttgcgcccaaccaagttcgcaaacctcagtttaagtgatttttctagaaacgctctcc

SEQ ID NO: 44081 - DNA, 110 bp, synthetic construct
  source 1..110: mol_type = other DNA
cgcccaaccaagttcgcaaacctcagtttaagtgatttttctagaaacgctctcctcctggggcccctaggcagatcccctttctacttggtagacgccaccccttaaat

SEQ ID NO: 44082 - DNA, 110 bp, synthetic construct
  source 1..110: mol_type = other DNA
tgtcctatgcctgctggacatccttcgatgactccccagcgcccaccagatgaagagcaagctccaacctagcacttcatacacagctatccagcccctgcctcacaccg

SEQ ID NO: 44083 - DNA, 110 bp, synthetic construct
  source 1..110: mol_type = other DNA
agcaagctccaacctagcacttcatacacagctatccagcccctgcctcacaccgttccagccacatgaaactcctcactgttctctacactattctctctgcctaaaat

SEQ ID NO: 44084 - DNA, 110 bp, synthetic construct
  source 1..110: mol_type = other DNA
tgggctgtttgccgtggagggcccgtccctgggcccccagggaccacacctctgccaggaggcgggctagatgggcttccagtttctaataaatgtggcccagcggctgt

SEQ ID NO: 44085 - DNA, 110 bp, synthetic construct
  source 1..110: mol_type = other DNA
caggaggcgggctagatgggcttccagtttctaataaatgtggcccagcggctgtgagcgctgccctgacctacagggtgtctcctgcgcccctggtgccaaggagcctt

SEQ ID NO: 44086 - DNA, 110 bp, synthetic construct
  source 1..110: mol_type = other DNA
agtctcagatgtgccacaactggcagcaatcgggatacaggggattccctacttccacaaccctcctggggcctctgcggggccttctgatcctgaagctgattcgtcaa

SEQ ID NO: 44087 - DNA, 110 bp, synthetic construct
  source 1..110: mol_type = other DNA
cacaaccctcctggggcctctgcggggccttctgatcctgaagctgattcgtcaaaaccatctgagctctcaacctgaatagagcgcaagggagcaaaaccagctcatct

SEQ ID NO: 44088 - DNA, 110 bp, synthetic construct
  source 1..110: mol_type = other DNA
cccaggggggagaaccactctctaaaggacccttggatgtgacacaacaaaacaaggcaggcacatccgcctgggcagaagctggaaggagcctctctgggccatctagt

SEQ ID NO: 44089 - DNA, 110 bp, synthetic construct
  source 1..110: mol_type = other DNA
ggcaggcacatccgcctgggcagaagctggaaggagcctctctgggccatctagttcttggcctctcggctaactggtgagatcgaggcagggaggtggcataatagaga

SEQ ID NO: 44090 - DNA, 110 bp, synthetic construct
  source 1..110: mol_type = other DNA
caaagctctggcttcttcatctatagagtgggcatgaggtggctgcctgaccccgtgtgggctggcagctgacgtattcgatgcatgttaatccccctcctacctcatca

SEQ ID NO: 44091 - DNA, 110 bp, synthetic construct
  source 1..110: mol_type = other DNA
tgacagtacctggaaaccctagagaatgcatgataaactaacgcaggtaagacaggaggggggcaagatggaaaatcaacccgaagaatctacagcctttaggcgttccc

SEQ ID NO: 44092 - DNA, 110 bp, synthetic construct
  source 1..110: mol_type = other DNA
gaggggggcaagatggaaaatcaacccgaagaatctacagcctttaggcgttcccttgcagcagcacaggatccagcgctgtcactgcagcagcccagggtcgaaccctg

SEQ ID NO: 44093 - DNA, 110 bp, synthetic construct
  source 1..110: mol_type = other DNA
ccccattgaccaatccctctggcccagtgcagagggaagcaatctgattggcttagtcatggcgcccatcccctttataatacgtgtcggcctatgaaaggacggccagt

SEQ ID NO: 44094 - DNA, 110 bp, synthetic construct
  source 1..110: mol_type = other DNA
gtcatggcgcccatcccctttataatacgtgtcggcctatgaaaggacggccagtggatcaggtgctcatctctgtccaattggaggcctagcagccacttccttggcga

SEQ ID NO: 44095 - DNA, 110 bp, synthetic construct
  source 1..110: mol_type = other DNA
tccagctgagcccagccttctggccatcaccaccgctgccctgtaccagctgaatatgaatgacttcaggtgatgccacatggaatagaagaatcactcagctcagccgc

SEQ ID NO: 44096 - DNA, 110 bp, synthetic construct
  source 1..110: mol_type = other DNA
atgaatgacttcaggtgatgccacatggaatagaagaatcactcagctcagccgcaaggtacaacatcatgacgcctaaaaaaaatgcgtgttgtttcaagccaccaaat

SEQ ID NO: 44097 - DNA, 110 bp, synthetic construct
  source 1..110: mol_type = other DNA
ctgccaccatgaagtttccagtccagtaagagagatggacatggaaatgccctaatgaccaaactgcctgactcagctcttctccagtcctcctgcttccccattctgct

SEQ ID NO: 44098 - DNA, 110 bp, synthetic construct
  source 1..110: mol_type = other DNA
tgtggcagagaggcgtgcctcccatgataggagggcccatttgaacattccctactctcaggctgtaatggcatggtgagcctgtgttgtctgacccaggcccaggcctg

SEQ ID NO: 44099 - DNA, 110 bp, synthetic construct
  source 1..110: mol_type = other DNA
tctcaggctgtaatggcatggtgagcctgtgttgtctgacccaggcccaggcctggccgcctcctccactcccacggcctgaaacagctctggaccccaagcctgttcct

SEQ ID NO: 44100 - DNA, 110 bp, synthetic construct
  source 1..110: mol_type = other DNA
ttgaaaaccaaaaaatctggcaacagctccctacagccaagtagcagctgccccctttggatggggccagggtgctccacttggccgcaggccccaccgctccctattgc

SEQ ID NO: 44101 - DNA, 110 bp, synthetic construct
  source 1..110: mol_type = other DNA
tgaagccacggcacttccctctggggcaaagcgtggggccaccgccgcctcgtccaagtgggaatcggaactgcagccgagcgctctgtctgtgtgcatccacatccagt

SEQ ID NO: 44102 - DNA, 110 bp, synthetic construct
  source 1..110: mol_type = other DNA
aagtgggaatcggaactgcagccgagcgctctgtctgtgtgcatccacatccagtcactagattatccccgagaccaaatggaggaggctccagaattatcctcatctac

SEQ ID NO: 44103 - DNA, 110 bp, synthetic construct
  source 1..110: mol_type = other DNA
ctttcattcccgagatagagagattttgcgcgcgcacacacagacacacgcgcaaaaaaggggaaaaaaagcccaccctccagcctcattgccaagggaagcagccgcag

SEQ ID NO: 44104 - DNA, 110 bp, synthetic construct
  source 1..110: mol_type = other DNA
aaaaggggaaaaaaagcccaccctccagcctcattgccaagggaagcagccgcagctcgcagcccgcagaggacgcccagaacggcgagcgggcgggcagacggactgac

SEQ ID NO: 44105 - DNA, 110 bp, synthetic construct
  source 1..110: mol_type = other DNA
tcaccccgccctggaggccaaggagggttctcttacagtagcaaaggggatgggttatttttaactccattgacatgggttctgtccaaatatgtggctgaagggcccgg

SEQ ID NO: 44106 - DNA, 110 bp, synthetic construct
  source 1..110: mol_type = other DNA
tatttttaactccattgacatgggttctgtccaaatatgtggctgaagggcccggcgtggggctgacgatccccgggcgatgcggtcagggctccaccaccctctgagcc

SEQ ID NO: 44107 - DNA, 110 bp, synthetic construct
  source 1..110: mol_type = other DNA
ttggtatttgaatctctccatccccagcggttggaaaggatagttcagaacgcagatcagctctgctgctcaccagctttgtcccttcgtttgctaaattggtatagaag

SEQ ID NO: 44108 - DNA, 110 bp, synthetic construct
  source 1..110: mol_type = other DNA
catcccagggctccaggcctggccagatgggcagctggtactggaaatagccttgatgggagatgtcccccctctttccggtactcaaccacttcctctctgacagagca

SEQ ID NO: 44109 - DNA, 110 bp, synthetic construct
  source 1..110: mol_type = other DNA
atgggagatgtcccccctctttccggtactcaaccacttcctctctgacagagcacactgtctccagaaggttctgctggactgaggacatgcccgggacccttgtctgt

SEQ ID NO: 44110 - DNA, 110 bp, synthetic construct
  source 1..110: mol_type = other DNA
tgaccgctgcccagacgggctgctgctttccgtgggaggcttaggtgccgtgttgacctgagacctgagctgagcgagggaacgagcccagtgggtattttagagcccac

SEQ ID NO: 44111 - DNA, 110 bp, synthetic construct
  source 1..110: mol_type = other DNA
acctgagacctgagctgagcgagggaacgagcccagtgggtattttagagcccactgagctcaggggctctgggcggaggcaggcgtggctgtgcgcgtggctggcctga

SEQ ID NO: 44112 - DNA, 110 bp, synthetic construct
  source 1..110: mol_type = other DNA
gatatgtgagtacacacgtaagtcatatctgcttacaagtctgggaccccaatccagagttctgggctcatgaacatccagaaacatttgaaaagttaaatatcaagcta

SEQ ID NO: 44113 - DNA, 110 bp, synthetic construct
  source 1..110: mol_type = other DNA
agagttctgggctcatgaacatccagaaacatttgaaaagttaaatatcaagctaaaaaataaaggagagccatcaaagttgagtaaatgaggcattcaaggggcatcat

SEQ ID NO: 44114 - DNA, 110 bp, synthetic construct
  source 1..110: mol_type = other DNA
aaacctggtggggttttttggttcgtttgttttgattttgctttagagccacaggcgcagcatatgaaagttcccaggcgagaggtcaaatgggagcctgcacacagcca

SEQ ID NO: 44115 - DNA, 110 bp, synthetic construct
  source 1..110: mol_type = other DNA
gagccacaggcgcagcatatgaaagttcccaggcgagaggtcaaatgggagcctgcacacagccaagcaacgccagatcaaggcgcatctgcaacctataccacagctca

SEQ ID NO: 44116 - DNA, 110 bp, synthetic construct
  source 1..110: mol_type = other DNA
tttttttcttttgagggccaggccgcagcctatgaaagttcccaggttaggggttgaagcagagctgccgaggagtagccgaaggaaggttgagatggagcagaaggtca

SEQ ID NO: 44117 - DNA, 110 bp, synthetic construct
  source 1..110: mol_type = other DNA
gaagcagagctgccgaggagtagccgaaggaaggttgagatggagcagaaggtcatgcgaactcctgctgtggtgcaacaggatcagcagcgtcttggtagcgctgggac

SEQ ID NO: 44118 - DNA, 110 bp, synthetic construct
  source 1..110: mol_type = other DNA
tcgttaaccactgagccatgacaggaactccaagatctccctgattcttatccccgttgaaaacaagaatgctttgaagaaggcaaagacaaagtttattattagaggca

SEQ ID NO: 44119 - DNA, 110 bp, synthetic construct
  source 1..110: mol_type = other DNA
gttgaaaacaagaatgctttgaagaaggcaaagacaaagtttattattagaggcacaggacaacatgtgggagagcacacagagaagcagcttatttaagatagcagcta

SEQ ID NO: 44120 - DNA, 110 bp, synthetic construct
  source 1..110: mol_type = other DNA
ccaggtgctccttggtcatcccaacgatgccagcattgctgcccacctgtcccaacatagaaagagctgtcaggagaagggggacagattatggctgggtgggcagagga

SEQ ID NO: 44121 - DNA, 110 bp, synthetic construct
  source 1..110: mol_type = other DNA
catagaaagagctgtcaggagaagggggacagattatggctgggtgggcagaggagctcaaagatgactcaggtaagagagaattcccacccctgaggccaccaacagaa

SEQ ID NO: 44122 - DNA, 110 bp, synthetic construct
  source 1..110: mol_type = other DNA
accctctccgggaacatctccgtcagaccccacagtctctccgacagggtctcatctagctgtggtggaggaggcggggtctaagccgagcagctgcaactacccctcga

SEQ ID NO: 44123 - DNA, 110 bp, synthetic construct
  source 1..110: mol_type = other DNA
ctagctgtggtggaggaggcggggtctaagccgagcagctgcaactacccctcgaccccaggacacacgggtcccccggagctagggtccctcgaccccagcggggactc

SEQ ID NO: 44124 - DNA, 110 bp, synthetic construct
  source 1..110: mol_type = other DNA
ttgcagcttcacagtctgcggggtgatctgatcctcacacgcacactgtccggagggcggggtggacatcacatctccactttgcaggtggacaaaccaaagtctcccag

SEQ ID NO: 44125 - DNA, 110 bp, synthetic construct
  source 1..110: mol_type = other DNA
ggcggggtggacatcacatctccactttgcaggtggacaaaccaaagtctcccagagaggaagtgactcagccaagactacaagcccagtgtggggtggggctggtgctg

SEQ ID NO: 44126 - DNA, 110 bp, synthetic construct
  source 1..110: mol_type = other DNA
ctgagcctaagctgtggaaatgctggatccctaacccactgtgctaggccggatcttcaaccagtcacatcttcaacctacactgaagcttgcagcaatgccagatcctt

SEQ ID NO: 44127 - DNA, 110 bp, synthetic construct
  source 1..110: mol_type = other DNA
gatccctaacccactgtgctaggccggatcttcaaccagtcacatcttcaacctacactgaagcttgcagcaatgccagatccttaacctagtgagcgaggccagggatt

SEQ ID NO: 44128 - DNA, 110 bp, synthetic construct
  source 1..110: mol_type = other DNA
cgtttttcaaaagataagtgccaagcatttgtatatgtgagtgtggtatttgtcacaccttgttaattataatccccctttctcatttagaggctctctttctttccttc

SEQ ID NO: 44129 - DNA, 110 bp, synthetic construct
  source 1..110: mol_type = other DNA
gctactgtaatgctactgtaaatatttcatatagtctcagttcttaaagttttaatttagatcgtgtagataatgccttagctcttttagctatctgaaatatgtggaag

SEQ ID NO: 44130 - DNA, 110 bp, synthetic construct; identical to SEQ ID NO: 44129
  source 1..110: mol_type = other DNA

SEQ ID NO: 44131 - DNA, 110 bp, synthetic construct
  source 1..110: mol_type = other DNA
tcaaatctggtataaaatccctacacaagccctttgggattccagccagaggcgtttgcccagatcctggccatcggctcccacatcagccctactcattacagatttca

SEQ ID NO: 44132 - DNA, 110 bp, synthetic construct
  source 1..110: mol_type = other DNA
cccctagcctgggagcttccatatgctaagggtacagctgtttaaataaaaaaaaaaaagaagaatacatacatatattatatgtggccaatctgtaaggaaagtcagaa

SEQ ID NO: 44133 - DNA, 110 bp, synthetic construct
  source 1..110: mol_type = other DNA
aaaagaagaatacatacatatattatatgtggccaatctgtaaggaaagtcagaagcagtagggggtgcagctgcagaggggcataaagctgtgtttcttaggtaccagg

SEQ ID NO: 44134 - DNA, 110 bp, synthetic construct
  source 1..110: mol_type = other DNA
gccctgcccctgagaggctcctattggagggtctgcacatgagtgtcccccgaggagatgttcccttcactctttcctccccagcctcgggccttgtctccaatcccctt

SEQ ID NO: 44135 - DNA, 110 bp, synthetic construct
  source 1..110: mol_type = other DNA
agatgttcccttcactctttcctccccagcctcgggccttgtctccaatccccttctgtctggtgtctggctataccaccaacacctgttctaagcctgcctcagctatt

SEQ ID NO: 44136 - DNA, 110 bp, synthetic construct
  source 1..110: mol_type = other DNA
gagcgagcgggggagtcagccttgccctgtgccggtagctgtgatctgggatggtggctggcctggccaggcctttggggatgcatgcttgaaggtgtacacacgccttg

SEQ ID NO: 44137 - DNA, 110 bp, synthetic construct
  source 1..110: mol_type = other DNA
ggctggcctggccaggcctttggggatgcatgcttgaaggtgtacacacgccttgtgtacaggtgggcaatccggagggtcccccacgggaacctggggctctaaagata

SEQ ID NO: 44138 - DNA, 110 bp, synthetic construct
  source 1..110: mol_type = other DNA
aaaaaatccttaacttaatcacacctgccgcatccctttggccgcgtaaggtaaaatattcacagcttcggggtttaggatgcgggcatctttgggaggcctttttttag

SEQ ID NO: 44139 - DNA, 110 bp, synthetic construct
  source 1..110: mol_type = other DNA
atattcacagcttcggggtttaggatgcgggcatctttgggaggcctttttttagctttccacacaggaaatctgtgggggacacagaacagcaaagtgtcccccaagca

SEQ ID NO: 44140 - DNA, 110 bp, synthetic construct
  source 1..110: mol_type = other DNA
ggccttagtctgcctggaactgtgacagccatcccttaaacctcccaaaggccgtgggtttcatatgcacattgacccctagcttcccaagtgatcaaatgttgcagccg

SEQ ID NO: 44141 - DNA, 110 bp, synthetic construct
  source 1..110: mol_type = other DNA
aatccccgttctccaccgtggctggaggaatagccttcgtgaccactgcccctacctgctcagcacagcgcggccgggctgctaagggagcctgtgcgttcggcaagcct

SEQ ID NO: 44142 - DNA, 110 bp, synthetic construct
  source 1..110: mol_type = other DNA
ctgctcagcacagcgcggccgggctgctaagggagcctgtgcgttcggcaagcctacatttctctggaagccttgcctggccctctctcctccacctaaggccccacctc

SEQ ID NO: 44143 - DNA, 110 bp, synthetic construct; identical to SEQ ID NO: 44141
  source 1..110: mol_type = other DNA

SEQ ID NO: 44144 - DNA, 110 bp, synthetic construct; identical to SEQ ID NO: 44142
  source 1..110: mol_type = other DNA

SEQ ID NO: 44145 - DNA, 110 bp, synthetic construct
  source 1..110: mol_type = other DNA
ggggaggggctgtaataaccaaaaagtccattggaggaagccggaagtccaaaatatggaggtttctcattggttgagctggggcagtctgattggctgggctttcacag

SEQ ID NO: 44146 - DNA, 110 bp, synthetic construct
  source 1..110: mol_type = other DNA
atggaggtttctcattggttgagctggggcagtctgattggctgggctttcacagggatgggggttggagggagaaatagtccgcggctgccggatggtaaagtaggcaa

SEQ ID NO: 44147 - DNA, 110 bp, synthetic construct
  source 1..110: mol_type = other DNA
tagttgaatgaatgaatgaacgaagcaacaacagcagcgactgccgcgaccccctacacactggccattcacctgacgatgacgctgtcacacaccctgtgaccacaggg

SEQ ID NO: 44148 - DNA, 110 bp, synthetic construct
  source 1..110: mol_type = other DNA
acacactggccattcacctgacgatgacgctgtcacacaccctgtgaccacagggcacaggccgcaggaacttggacacacaccctgccgggccatcaccaccccagcga

SEQ ID NO: 44149 - DNA, 110 bp, synthetic construct
  source 1..110: mol_type = other DNA
gcagccctttaggctcagcccaaagaagccagggctctctgtgggttctctccctagtcagtgagattcaacaagcatttattgagcatctgctatatgctctcgtgtcc

SEQ ID NO: 44150 - DNA, 110 bp, synthetic construct
  source 1..110: mol_type = other DNA
agtcagtgagattcaacaagcatttattgagcatctgctatatgctctcgtgtcccaccctgagccctgactcagggagacaaaagcagacataagcagtttcccatagg

SEQ ID NO: 44151 - DNA, 110 bp, synthetic construct
  source 1..110: mol_type = other DNA
gggactcccgctacccgacagagcctgaccccagggtggagggagttgggtcccaagaacctttcagatctacttgaagacaatcccagcccagctccggcccagcctcc

SEQ ID NO: 44152 - DNA, 110 bp, synthetic construct
  source 1..110: mol_type = other DNA
agaacctttcagatctacttgaagacaatcccagcccagctccggcccagcctcctgtctctccgccttgagccagcgtagcccttaggggctgggcctccggtgacagg

SEQ ID NO: 44153 - DNA, 110 bp, synthetic construct
  source 1..110: mol_type = other DNA
ttcagtcatcactggccgggctatctggcaacttgggctgccgagaggagagcccaaggctaaacacttacctcctcggcattttccaagtcatctagcccttcgtcctc

SEQ ID NO: 44154 - DNA, 110 bp, synthetic construct
  source 1..110: mol_type = other DNA
cgtcagctcctcttttccacacccatctgctggtccctagaataccctaccagggaggtatcttcactcctgtcttacatacgaagtcactgaggctcagtggggctaag

SEQ ID NO: 44155 - DNA, 110 bp, synthetic construct
  source 1..110: mol_type = other DNA
aggtatcttcactcctgtcttacatacgaagtcactgaggctcagtggggctaagcaagctgcctgaggtcacccagcaagttagcggcagaacacggactatctgactc

SEQ ID NO: 44156 - DNA, 110 bp, synthetic construct
  source 1..110: mol_type = other DNA
gaaagggggactgggaagagctgctaatggggaggagtttcttgtggggacgagggaaatgccgtggagctggacagcagaggtggttgcacaacccgaataatcacaca

SEQ ID NO: 44157 - DNA, 110 bp, synthetic construct
  source 1..110: mol_type = other DNA
gaaatgccgtggagctggacagcagaggtggttgcacaacccgaataatcacacaactgtaccctttcaaggatgacgcttgtcatgcaaattgtattttaaactgtcag

SEQ ID NO: 44158 - DNA, 110 bp, synthetic construct
  source 1..110: mol_type = other DNA
ctcactgtccatggctgctacaaagctgaagagatatgacagagacagcacggctctcaaagcctggaatgcttcctagctggccctgtacacagcaggctgccgaccct

SEQ ID NO: 44159 - DNA, 110 bp, synthetic construct
  source 1..110: mol_type = other DNA
ctcaaagcctggaatgcttcctagctggccctgtacacagcaggctgccgaccctgagaggtgctgtggggcgcagctagcagctgtgggaggcagggaaagaggctgga

SEQ ID NO: 44160 - DNA, 110 bp, synthetic construct
  source 1..110: mol_type = other DNA
agctgcaatgagatacagcaaagcacagaagctgtgggaatcgacgaggtttggcaggactaaggccagggcctaagaaatcagagttcaattacagaaacacagaaccc

SEQ ID NO: 44161 - DNA, 110 bp, synthetic construct
  source 1..110: mol_type = other DNA
aagcgacaccgtttccaaaacaaccccctcaccgaaaaaccaaggtctcatatttagttggagaggtgtatgttcttgagccagagttacctgggtttctagcccagctt

SEQ ID NO: 44162 - DNA, 110 bp, synthetic construct
  source 1..110: mol_type = other DNA
agttggagaggtgtatgttcttgagccagagttacctgggtttctagcccagcttggcctggagtctatctcaggtccgtcgtagcatagacttgataccgtgctgcgtg

SEQ ID NO: 44163 - DNA, 110 bp, synthetic construct
  source 1..110: mol_type = other DNA
cagtgctctgcgccagggtcaaggctgtggcctaagggtctgggctgtacactggactgttttggagccagaaatcaacctgcctcttgtttaagcctgtgtttaggatt

SEQ ID NO: 44164 - DNA, 110 bp, synthetic construct
  source 1..110: mol_type = other DNA
actgttttggagccagaaatcaacctgcctcttgtttaagcctgtgtttaggatttctctgttacggcagcagagcctacaaactaaatcacagttcagctgcacagcag

SEQ ID NO: 44165 - DNA, 110 bp, synthetic construct
  source 1..110: mol_type = other DNA
cattatcccaatacatccatctccaatgtatgcaccatctctccatccatcctatatccatgtatccttcctgaatccatccaacatccatttgtccatcatccatctac

SEQ ID NO: 44166 - DNA, 110 bp, synthetic construct; identical to SEQ ID NO: 44165
  source 1..110: mol_type = other DNA

SEQ ID NO: 44167 - DNA, 110 bp, synthetic construct
  source 1..110: mol_type = other DNA
ggaacttacataggccccaggcacggccagaaaaaaaaaaaagatggcttagctgctgggggagaatgggcttcactatatcatatacctgaagcggatctaagacagca

SEQ ID NO: 44168 - DNA, 110 bp, synthetic construct
  source 1..110: mol_type = other DNA
ctgggggagaatgggcttcactatatcatatacctgaagcggatctaagacagcaaaccaaccatacttctataaaaataaatacgtacttaatgaatgagtcaaataaa

SEQ ID NO: 44169 - DNA, 110 bp, synthetic construct
  source 1..110: mol_type = other DNA
catggcatggcctagggcaggcaggagctgctgcagctgggagccctgaccagtgccctcacctgggatttatcgggaaacggagacagaagtggtcatgcagctacgag

SEQ ID NO: 44170 - DNA, 110 bp, synthetic construct
  source 1..110: mol_type = other DNA
ccctcacctgggatttatcgggaaacggagacagaagtggtcatgcagctacgaggtctgcagcaaagctaagacaggcctaggatgataagattcccagcctggaactg

SEQ ID NO: 44171 - DNA, 110 bp, synthetic construct
  source 1..110: mol_type = other DNA
ctgagccacagttgcgattacaccacaattgcagcaacactggatcctttaaacccactgtgctgggtgggggactgatctgtaccctggcgctgcagagaggccactga

SEQ ID NO: 44172 - DNA, 110 bp, synthetic construct
  source 1..110: mol_type = other DNA
cactgtgctgggtgggggactgatctgtaccctggcgctgcagagaggccactgaatctcgttgcaccacagcgggaactcccccctttgacctcttgagggctttttac

SEQ ID NO: 44173 - DNA, 110 bp, synthetic construct
  source 1..110: mol_type = other DNA
gggctggagttcctgttgtggctcaggagttatgaacttgactagtatccaggaggactcgggttcagtccctggtcccgctcagtgggttaaggcttcagcgttgccgt

SEQ ID NO: 44174 - DNA, 110 bp, synthetic construct
  source 1..110: mol_type = other DNA
ttgtggctcaggagttatgaacttgactagtatccaggaggactcgggttcagtccctggtcccgctcagtgggttaaggcttcagcgttgccgtgagctggggtgtagg

SEQ ID NO: 44175 - DNA, 110 bp, synthetic construct
  source 1..110: mol_type = other DNA
ttcatcgtgtcttttgtctcttgcccccactggaaggtaagctctgtgaggacgaggaatttcatctatttggttcatcgatgtatcctcaaggcttgaaagaataactg

SEQ ID NO: 44176 - DNA, 110 bp, synthetic construct
  source 1..110: mol_type = other DNA
actcacctcacctgtaaagtaggcacgatgccttccacaccgcctgcaggtgcggtttggggctgctgcacagaaagcttctggggcaggtagtcgcttaatccatgccc

SEQ ID NO: 44177 - DNA, 110 bp, synthetic construct
  source 1..110: mol_type = other DNA
gtgaggatggagcagcaaacagaacaataaacactccgcttttcacggagctcacccttgtgtgggagcagagaaggaggagaaggtttcaaggagggagtggccagctc

SEQ ID NO: 44178 - DNA, 110 bp, synthetic construct
  source 1..110: mol_type = other DNA
ccttgtgtgggagcagagaaggaggagaaggtttcaaggagggagtggccagctctgtccaaggtggccgacaaatcagaggtgaggtgatagcctggtgaccttgacaa

SEQ ID NO: 44179 - DNA, 110 bp, synthetic construct
  source 1..110: mol_type = other DNA
ctgggtccatgcgcacacgtgtgtccgagctagtgtgaaattctggtgtgttggttgctctctggctgtgctctgtgggtgccggtgtgtgcctgaggaaatagtgtgca

SEQ ID NO: 44180 - DNA, 110 bp, synthetic construct
  source 1..110: mol_type = other DNA
tgctctctggctgtgctctgtgggtgccggtgtgtgcctgaggaaatagtgtgcaacccggggtgtgtggccactggactcagggtcaagggtgagccccatggctaggg

SEQ ID NO: 44181 - DNA, 110 bp, synthetic construct
  source 1..110: mol_type = other DNA
tttggggtacagaaaggctcgctcctttatactcaggtttcagaatgaacttttatttacaaagttacacattcaaagagccccacccttcatttcaacacaaaagttcg

SEQ ID NO: 44182 - DNA, 110 bp, synthetic construct
  source 1..110: mol_type = other DNA
tttacaaagttacacattcaaagagccccacccttcatttcaacacaaaagttcgcctatgtacacatgtagtaaatgtacacatttccccttcaaggggactgggggtt

SEQ ID NO: 44183 - DNA, 110 bp, synthetic construct
  source 1..110: mol_type = other DNA
agagatgcctggggtggaagcctttatctctgaatctgtcagcttcttggccctgctttctccccattattcccctcccccagggtcccctcatccccaggacagacaga

SEQ ID NO: 44184 - DNA, 110 bp, synthetic construct
  source 1..110: mol_type = other DNA
gaagactccacggttctgtccttgtggcctctgctaatatccaatgtaagaggcgtgcaggtgaatgtgggggaaggcgttttcctgctttgctggtggcaggagggatg

SEQ ID NO: 44185 - DNA, 110 bp, synthetic construct
  source 1..110: mol_type = other DNA
tgcaggtgaatgtgggggaaggcgttttcctgctttgctggtggcaggagggatgggtagagcccccaggaggggattggacacaaatgacagccctgtcacccagcagc

SEQ ID NO: 44186 - DNA, 110 bp, synthetic construct
  source 1..110: mol_type = other DNA
ttattgttgtgcactacagaagtgtttgtggttgtttgttacacagtagtagctgactgatacagggggactcagtgaaagtctgaatacataaccaggggaccccaggc

SEQ ID NO: 44187 - DNA, 110 bp, synthetic construct
  source 1..110: mol_type = other DNA
actgatacagggggactcagtgaaagtctgaatacataaccaggggaccccaggccccttccccggccctgcataggaatgctagcacccaggcatgcactcatcccaga

SEQ ID NO: 44188 - DNA, 110 bp, synthetic construct
  source 1..110: mol_type = other DNA
tcttcctcaaccgtgtgcgtcaggagaatgggctcgtgccctcaccgtattcagggtttaaccagggagaagctctgggtggcgaccagtatagagtagcctcattgcat

SEQ ID NO: 44189 - DNA, 110 bp, synthetic construct
  source 1..110: mol_type = other DNA
gtttaaccagggagaagctctgggtggcgaccagtatagagtagcctcattgcatattccaccaggctgcccggatgattttgtcctcgtagccccctggcccagggtca

SEQ ID NO: 44190 - DNA, 110 bp, synthetic construct
  source 1..110: mol_type = other DNA
tctggcttctgaatcctgatgcttctgcccaggtgactcgttctctgggtcagaaacaccaggtgcatcttgccatgcccacgtccctctagagtccccctgggttcaaa

SEQ ID NO: 44191 - DNA, 110 bp, synthetic construct
  source 1..110: mol_type = other DNA
acaccaggtgcatcttgccatgcccacgtccctctagagtccccctgggttcaaagacttgtgcccgccatacacccattttacttggagacagaccacagctggagtcc

SEQ ID NO: 44192 - DNA, 110 bp, synthetic construct
  source 1..110: mol_type = other DNA
gctggttgctgcttggacttcttgggatgagtttgagatgccgtgcttctgggccatgtgctgaagatgctggtagatgtcattgtcaccctgcttcctgagaggtgatt

SEQ ID NO: 44193 - DNA, 110 bp, synthetic construct
  source 1..110: mol_type = other DNA
atgtgctgaagatgctggtagatgtcattgtcaccctgcttcctgagaggtgattccactttggggaatgccagcaagatgatccagcctcatgactgatgtgctggcag

SEQ ID NO: 44194 - DNA, 110 bp, synthetic construct; identical to SEQ ID NO: 44192
  source 1..110: mol_type = other DNA

SEQ ID NO: 44195 - DNA, 110 bp, synthetic construct; identical to SEQ ID NO: 44193
  source 1..110: mol_type = other DNA

SEQ ID NO: 44196 - DNA, 110 bp, synthetic construct
  source 1..110: mol_type = other DNA
catggcagaagggattcctacactggagctggttggaggctggactagacgccttcctcagacctattccagcttgaagtccttctgattctctgggcttaacacatttt

SEQ ID NO: 44197 - DNA, 110 bp, synthetic construct
  source 1..110: mol_type = other DNA
cctcagacctattccagcttgaagtccttctgattctctgggcttaacacattttgaggtggcggggtcctctgtggggagccgcaaaccactccatcttcgcgtgagat

SEQ ID NO: 44198 - DNA, 110 bp, synthetic construct
  source 1..110: mol_type = other DNA
gggcagagcgggatgatgcagagtttgagacttaggaattgtttctggaatgtttcatttcatatttcagactgaggttggccgcaggtaactgaaatgggagataagag

SEQ ID NO: 44199 - DNA, 110 bp, synthetic construct
  source 1..110: mol_type = other DNA
catttcatatttcagactgaggttggccgcaggtaactgaaatgggagataagagggaattactgtagttgatggagcgtggctcttggaagagggaggaactgctctga

SEQ ID NO: 44200 - DNA, 110 bp, synthetic construct
  source 1..110: mol_type = other DNA
ggggggatgactctcttagccatggtgatgcccgtttgttgagtgactaacaaacctcagccctagccagtactctgtgttcagcaggcctccttctccttttgttgtcc

SEQ ID NO: 44201 - DNA, 110 bp, synthetic construct
  source 1..110: mol_type = other DNA
ctcagccctagccagtactctgtgttcagcaggcctccttctccttttgttgtccagggaagtggggccacctgctgaccagctcctctgtcccaggtgccctccctgga

SEQ ID NO: 44202 - DNA, 110 bp, synthetic construct
  source 1..110: mol_type = other DNA
accgtgaggatcttgagccagttctcctgacctgcactgaagcctcaggtcttcgagaaaagcaccgctgtccgggcccctccctggccatacagaccagctctccggtg

SEQ ID NO: 44203 - DNA, 110 bp, synthetic construct
  source 1..110: mol_type = other DNA
aatccctccccaattctggcagtaacggggtgttcatggaagctcagagggggtcagtgacgtgcccaaggtcacccagctagagagcagcagagccagggctggaacac

SEQ ID NO: 44204 - DNA, 110 bp, synthetic construct
  source 1..110: mol_type = other DNA
agtgacgtgcccaaggtcacccagctagagagcagcagagccagggctggaacacaggaggggcttgggggacaccctgggtccctcactaactgaggcagcccctccag

SEQ ID NO: 44205 - DNA, 110 bp, synthetic construct
  source 1..110: mol_type = other DNA
taaaaagaaaacgaagtaaattcagagtcaggacatctgagtctggtcccagctccatcgtgagcccctcatgtgatcttgggtaagtccctgtctgctttgtttccttc

SEQ ID NO: 44206 - DNA, 110 bp, synthetic construct
  source 1..110: mol_type = other DNA
catcgtgagcccctcatgtgatcttgggtaagtccctgtctgctttgtttccttctagggttccccccactgacaatggggaaagacggaaaggtcctggcagggggtgt

SEQ ID NO: 44207 - DNA, 110 bp, synthetic construct
  source 1..110: mol_type = other DNA
cttcccatgctggctttagatcccttctcggagccttgagtggccgaggagccaatcccaggggatgaaagctctctctccttctcctccctcgccaaccccagagctca

SEQ ID NO: 44208 - DNA, 110 bp, synthetic construct
  source 1..110: mol_type = other DNA
tcccaggggatgaaagctctctctccttctcctccctcgccaaccccagagctcattccagcaacacttttttttttcttcttcttttgttttttttagggccgcaactg

SEQ ID NO: 44209 - DNA, 110 bp, synthetic construct
  source 1..110: mol_type = other DNA
actccaggaagaaactcagtttggaagcagaaaagctgacaggggagatggagggtgagaaagcagacagagcccgagtgtctctttcttggtatctgagcagggcttgg

SEQ ID NO: 44210 - DNA, 110 bp, synthetic construct
  source 1..110: mol_type = other DNA
tgagaaagcagacagagcccgagtgtctctttcttggtatctgagcagggcttggccagcaggggacagataaacacgttacgtgttatccagctgtctgggccctggtc

SEQ ID NO: 44211 - DNA, 110 bp, synthetic construct
  source 1..110: mol_type = other DNA
cagagacgtgagggtcggcggtctaggagcctagttgaacggggtgacaggaggccagtgttttaaagcaatttaaggcatcgtgatttcactgtcagtggcgaaagttc

SEQ ID NO: 44212 - DNA, 110 bp, synthetic construct
  source 1..110: mol_type = other DNA
cagtgttttaaagcaatttaaggcatcgtgatttcactgtcagtggcgaaagttcagacttatgagcaaaggagcgacattttaacacctgctttgaaaggattcctctg

SEQ ID NO: 44213 - DNA, 110 bp, synthetic construct
  source 1..110: mol_type = other DNA
ctctctgatgactttgagaacaggaagggatcccaggagcaaatgcgaaatcccaaggtttctgtaccctctcctcccattgcacactccagctccggggactttgggaa

SEQ ID NO: 44214 - DNA, 110 bp, synthetic construct
  source 1..110: mol_type = other DNA
ggaatgcctgatttcacttcttcatagctttctgtgatctctgactttttttttttaaataacgaatagatcttacttttacggtcataggaaggtaccaatggctattt

SEQ ID NO: 44215 - DNA, 110 bp, synthetic construct
  source 1..110: mol_type = other DNA
taaataacgaatagatcttacttttacggtcataggaaggtaccaatggctatttccattctgtaaacaactattcataactaaactggaccttgcagggggtggttccc

SEQ ID NO: 44216 - DNA, 110 bp, synthetic construct
  source 1..110: mol_type = other DNA
gtgctcccagtgtgaagctgagtgtcagaaccgattaaaggaacagaatgtctcagctaacagcctggagtcactacaggacactctcccaggccgtgggtggaatgaga

SEQ ID NO: 44217 - DNA, 110 bp, synthetic construct
  source 1..110: mol_type = other DNA
gctaacagcctggagtcactacaggacactctcccaggccgtgggtggaatgagagatacatacaccagatcagagcgtcaagcctgaaacccacactgatgtcaggccc

SEQ ID NO: 44218 - DNA, 110 bp, synthetic construct
  source 1..110: mol_type = other DNA
tcagattcgttaaccactgtgccacgacgggaactcctcctgtagacattgctaattctgtcatgaattcaaagatggtttcctcccagacccatgggcatccaacaagc

SEQ ID NO: 44219 - DNA, 110 bp, synthetic construct; identical to SEQ ID NO: 44218
  source 1..110: mol_type = other DNA

SEQ ID NO: 44220 - DNA, 110 bp, synthetic construct
  source 1..110: mol_type = other DNA
agtcattcactcattcattcattaactcattcgtccccatgctcacgcccttcatcactctggctcttccttctgcagcagatctgagaatcgagagaaaacacccagca

SEQ ID NO: 44221 - DNA, 110 bp, synthetic construct
  source 1..110: mol_type = other DNA
cactctggctcttccttctgcagcagatctgagaatcgagagaaaacacccagcaggagacccagcgctcagggcccggccagcctctgctgcacggcccacctctgact

SEQ ID NO: 44222 - DNA, 110 bp, synthetic construct
  source 1..110: mol_type = other DNA
gactggtgtgggagagtctcaagtctaattgggttgaaagtggctttttttcttctactctgacctcaacaggagacccagctgtgggcaaaaccgccctggcacagatc

SEQ ID NO: 44223 - DNA, 110 bp, synthetic construct
  source 1..110: mol_type = other DNA
tactctgacctcaacaggagacccagctgtgggcaaaaccgccctggcacagatcttccgcagcgacggagcccaattccagaagaactacaccctggtgagtggtggtg

SEQ ID NO: 44224 - DNA, 110 bp, synthetic construct
  source 1..110: mol_type = other DNA
ccccccactgtcacttctcaacacaaagtcactgcagccacaactgtcttcccgtccgagccactctttcagaagaagatagttccccagggccggccatgtgcctggca

SEQ ID NO: 44225 - DNA, 110 bp, synthetic construct
  source 1..110: mol_type = other DNA
ccttggcccccaagtctataaataaatttctttgagaaagttgaaggcgaggctgagcagaaattgctgtttgtactccatgcatgaggaagtcttcaaaactttgaagc

SEQ ID NO: 44226 - DNA, 110 bp, synthetic construct
  source 1..110: mol_type = other DNA
agcagaaattgctgtttgtactccatgcatgaggaagtcttcaaaactttgaagcttaaattaagagatgctccttacctggggtggggagggggcggggagggctgcct

SEQ ID NO: 44227 - DNA, 110 bp, synthetic construct
  source 1..110: mol_type = other DNA
gttcacattcaagggggaaatgcacctagtcgtcaaccctgtattttccgagcactttgtctgggccagacactggaataggtgtttgtctgctctcacgggacttagcc

SEQ ID NO: 44228 - DNA, 110 bp, synthetic construct
  source 1..110: mol_type = other DNA
tttgtctgggccagacactggaataggtgtttgtctgctctcacgggacttagcctgctaataggaacttgtcttaaaccagcgacggggctgggaaccaggaatacttg

SEQ ID NO: 44229 - DNA, 110 bp, synthetic construct; identical to SEQ ID NO: 44227
  source 1..110: mol_type = other DNA

SEQ ID NO: 44230 - DNA, 110 bp, synthetic construct; identical to SEQ ID NO: 44228
  source 1..110: mol_type = other DNA

SEQ ID NO: 44231 - DNA, 110 bp, synthetic construct
  source 1..110: mol_type = other DNA
tccaaacttagagtttcctcctcgcaggagcgctgagctcaccaaactccagaagctctgagatggtctgtgtgggagtaagcgtaggctgctgtctcggtgagtgtcta

SEQ ID NO: 44232 - DNA, 110 bp, synthetic construct
  source 1..110: mol_type = other DNA
ctctgagatggtctgtgtgggagtaagcgtaggctgctgtctcggtgagtgtctagacccccctaacaaggagcatcagtttggactggcttccaagccaatgctgagaa

SEQ ID NO: 44233 - DNA, 110 bp, synthetic construct
  source 1..110: mol_type = other DNA
aatgagggtagggctctctgcatcactgagacagaaaagtttggtccaagtccacgattcctcatctaaaaccctggagactcgatgagtttgatagcttagaattcttt

SEQ ID NO: 44234 - DNA, 110 bp, synthetic construct
  source 1..110: mol_type = other DNA
gattcctcatctaaaaccctggagactcgatgagtttgatagcttagaattctttggatttcacaaaggttttacggtgggtctcttgtatattactccatatgcccagc

SEQ ID NO: 44235 - DNA, 110 bp, synthetic construct
  source 1..110: mol_type = other DNA
acatcaggaggcaaactcaacacctttaagagccagtaaacctacttcagtaaaaagtgtgtgtgtggatataaatctaagctaactccaggtacaaacacacctcgctt

SEQ ID NO: 44236 - DNA, 110 bp, synthetic construct
  source 1..110: mol_type = other DNA
acagccctaaaaaaaaagaaaaagaaaacccacctcctctgagccttccctaaatattaaaacattaaagcaaacatctcctcatcaccctcctcatgaatttcccttat

SEQ ID NO: 44237 - DNA, 110 bp, synthetic construct
  source 1..110: mol_type = other DNA
attaaaacattaaagcaaacatctcctcatcaccctcctcatgaatttcccttatgtgaacactggatgacaagaattaagaaatgacaatatcaaacccaggagagtga

SEQ ID NO: 44238 - DNA, 110 bp, synthetic construct
  source 1..110: mol_type = other DNA
tttaaggccgtgtctgcaggcacagcccctccccacttgtgagccacactcggggtcagcaaagccacatcctctttggggctgaggggaggccagtcacaacccaggta

SEQ ID NO: 44239 - DNA, 110 bp, synthetic construct
  source 1..110: mol_type = other DNA
tcagcaaagccacatcctctttggggctgaggggaggccagtcacaacccaggtatccctgcagtgtcccggaagatccagcttcttggcaagcctgcggctttgtgtgt

SEQ ID NO: 44240 - DNA, 110 bp, synthetic construct
  source 1..110: mol_type = other DNA
agtcagattcgtttccgctgggccatgatgggaactcctcctgttatttttaaaccttcaatttttaatttgattttggccacgtccacagcatgtgaatggttccccag

SEQ ID NO: 44241 - DNA, 110 bp, synthetic construct
  source 1..110: mol_type = other DNA
cttcaatttttaatttgattttggccacgtccacagcatgtgaatggttccccagcccgggatcaaacctgagccaagcagtgacccaaaagcaactacagtgacagagc

SEQ ID NO: 44242 - DNA, 110 bp, synthetic construct; identical to SEQ ID NO: 44240
  source 1..110: mol_type = other DNA

SEQ ID NO: 44243 - DNA, 110 bp, synthetic construct; identical to SEQ ID NO: 44241
  source 1..110: mol_type = other DNA

SEQ ID NO: 44244 - DNA, 110 bp, synthetic construct
  source 1..110: mol_type = other DNA
ggaggatgaatcccacccctctggccccacaggctcctcccgcctccttcttacaggtccaggtgcctgtccatcttaaccacaagcgggctggagtgggtgcaacagcc

SEQ ID NO: 44245 - DNA, 110 bp, synthetic construct
  source 1..110: mol_type = other DNA
ggtccaggtgcctgtccatcttaaccacaagcgggctggagtgggtgcaacagcctggggggcgtgtacgtccctccaggctccgccccacagccggcgctgggctccga

SEQ ID NO: 44246 - DNA, 110 bp, synthetic construct
  source 1..110: mol_type = other DNA
ggaagccggcatggcgatgcttgatctgatcttcaatgggccagagctgacttctttcgccttaactccttgctggcctgccaagtcccaccgcttcccaggacctcgga

SEQ ID NO: 44247 - DNA, 110 bp, synthetic construct
  source 1..110: mol_type = other DNA
ttcgccttaactccttgctggcctgccaagtcccaccgcttcccaggacctcggaggctccccagtctgagccacatgttctttcccgcagttttcttggtgccggggcg

SEQ ID NO: 44248 - DNA, 110 bp, synthetic construct
  source 1..110: mol_type = other DNA
ctccccccaccttccctttttgtggggccttttctgggcaccgagggcccccaaattccacttaccctcctcaagactctgcctcttggagctcagtctaaatctcttct

SEQ ID NO: 44249 - DNA, 110 bp, synthetic construct
  source 1..110: mol_type = other DNA
gtgatgaatattgtacaagaatacatgtaataaattgtgtaatttaaaaaaaaacacttggggagtttctgtcgtggtgcagtgaaaatgaatcgactaggaaccatgag

SEQ ID NO: 44250 - DNA, 110 bp, synthetic construct; identical to SEQ ID NO: 44249
  source 1..110: mol_type = other DNA

SEQ ID NO: 44251 - DNA, 110 bp, synthetic construct
  source 1..110: mol_type = other DNA
gcgaggggcccgagggaggcgctcacatcgaagatctcgaagccggcgatgtccaggatgccgatgaacgaggcgccctgcctcttggtcttgtccagagccttgttgat

SEQ ID NO: 44252 - DNA, 110 bp, synthetic construct
  source 1..110: mol_type = other DNA
ggatgccgatgaacgaggcgccctgcctcttggtcttgtccagagccttgttgatgcgcaggaccagccagcggaacatgcgctcgtaggtggccttggccaaggcctcg

SEQ ID NO: 44253 - DNA, 110 bp, synthetic construct
  source 1..110: mol_type = other DNA
aacccccatcctcttggatactaatcgggtccttaacctgctgagccacagtgggaactccaagatttctgaccttgggcaaatcaggcaacatctgtgcttcagcttcc

SEQ ID NO: 44254 - DNA, 110 bp, synthetic construct
  source 1..110: mol_type = other DNA
aactccaagatttctgaccttgggcaaatcaggcaacatctgtgcttcagcttccttacctcaaagtgggattacaggggttcacacctcaaggtcactggaatgatacg

SEQ ID NO: 44255 - DNA, 110 bp, synthetic construct
  source 1..110: mol_type = other DNA
tcccaaaccccctgctttgtaatttctgcttccattcaaagtgcaattcatctctgctcactggagcctaggccctgcacagaatatggggacatggacgtatttgggtg

SEQ ID NO: 44256 - DNA, 110 bp, synthetic construct
  source 1..110: mol_type = other DNA
gctcactggagcctaggccctgcacagaatatggggacatggacgtatttgggtgcacacaatctagctaccaggctggtagaaggagacagaccagaaaagggggctag

SEQ ID NO: 44257 - DNA, 110 bp, synthetic construct
  source 1..110: mol_type = other DNA
tagatgtggacatctagttttgacatcaaaaatatttggagtctacccccgtctctgccacttctcagctgtttgatcttgggcaagttgcttcatccacagcatgaagg

SEQ ID NO: 44258 - DNA, 110 bp, synthetic construct
  source 1..110: mol_type = other DNA
tgccacttctcagctgtttgatcttgggcaagttgcttcatccacagcatgaaggtgaagatgacacgagataatgtatgttaccctcttagaaataactgattgccgac

SEQ ID NO: 44259 - DNA, 110 bp, synthetic construct
  source 1..110: mol_type = other DNA
tataaaacgggtacacgaacacctgaagcttggggccttaatacaattaaattgcatttcctgctcaaatttcctgatcaaaccacagtcttttgttgttgtcattgtct

SEQ ID NO: 44260 - DNA, 110 bp, synthetic construct
  source 1..110: mol_type = other DNA
attaaattgcatttcctgctcaaatttcctgatcaaaccacagtcttttgttgttgtcattgtcttttttttagggccatacctgcagtatatggaagttgccaggctag

SEQ ID NO: 44261 - DNA, 110 bp, synthetic construct
  source 1..110: mol_type = other DNA
aggtgcacttgatgtgtttgagacccgtgtagctggaggaggatgagcagggacgaggcagctttaagccatggtatcatgggtatagctgtgtctgtaggcccatgtaa

SEQ ID NO: 44262 - DNA, 110 bp, synthetic construct
  source 1..110: mol_type = other DNA
cgcctgctttgcagttgagagatgggtggacaggtggctcaagttactctctgttcctgataagagccaccgatccaggctgatggccgctgagggggtgggagctgtac

SEQ ID NO: 44263 - DNA, 110 bp, synthetic construct
  source 1..110: mol_type = other DNA
cctgataagagccaccgatccaggctgatggccgctgagggggtgggagctgtactgccagtgccctgcccagcaggaatggtggtgtgggtctctggtgtttcaggact

SEQ ID NO: 44264 - DNA, 110 bp, synthetic construct
  source 1..110: mol_type = other DNA
tcagaggtgatctagtctaggcggccttgcaaactataggcctatgctctggcccttaacagaaggacttagagttggctaacaccccaaccaaatgtattttaaagaca

SEQ ID NO: 44265 - DNA, 110 bp, synthetic construct
  source 1..110: mol_type = other DNA
ttaacagaaggacttagagttggctaacaccccaaccaaatgtattttaaagacatttggatgtaacgattagacactggaggagctcatgtgaaattcagatttctggc

SEQ ID NO: 44266 - DNA, 110 bp, synthetic construct
  source 1..110: mol_type = other DNA
ggtgctctagcatgagaagcacccgggtgcagttcctagttcaagcaggccatgaaaccatgatgtgtttgagcagagacagcgctcagaatgaaggacagattgggggc

SEQ ID NO: 44267 - DNA, 110 bp, synthetic construct
  source 1..110: mol_type = other DNA
aaccatgatgtgtttgagcagagacagcgctcagaatgaaggacagattgggggcagagaccatcgcagaccgtggaagaagtgagttggaattgatggggcgaatcaac

SEQ ID NO: 44268 - DNA, 110 bp, synthetic construct
  source 1..110: mol_type = other DNA
gtgatagcctggtatacagttagatgtttgtctgtatatatgtgaccaaaacaagtttcatggagtaattttcacccttaccaaacattagatgtatgattctttctttc

SEQ ID NO: 44269 - DNA, 110 bp, synthetic construct
  source 1..110: mol_type = other DNA
tttcatggagtaattttcacccttaccaaacattagatgtatgattctttctttctctttaaaaattctgaccttgattcttgaagtgtgatccgttgaccgcccccccc

SEQ ID NO: 44270 - DNA, 110 bp, synthetic construct
  source 1..110: mol_type = other DNA
ttcctaagcaaaagctgctctttgtgttttgcttcggtagatgctgagctgagagatgtgtgtagttaggtagagtggagcagagcaatggaacaccctcagaactggtg

SEQ ID NO: 44271 - DNA, 110 bp, synthetic construct
  source 1..110: mol_type = other DNA
tctttggcctcctcttcttcttactcctgcccagtctttgaacagttcaaacacaccctttgcccacctccttgctctttccacagagagcagcttgacttccttgctta

SEQ ID NO: 44272 - DNA, 110 bp, synthetic construct
  source 1..110: mol_type = other DNA
ccctttgcccacctccttgctctttccacagagagcagcttgacttccttgcttacctgaaacctctactcctttgtttttttttgtttgttttgttttgttttcccact

SEQ ID NO: 44273 - DNA, 110 bp, synthetic construct
  source 1..110: mol_type = other DNA
aagtgtagatagttttattgaaattcggaaaatctgacttttttcatatagttgtaaattctgttgcttctggaaaggcagctcaccaagggatttctttgtttataatt

SEQ ID NO: 44274 - DNA, 110 bp, synthetic construct; identical to SEQ ID NO: 44273
  source 1..110: mol_type = other DNA

SEQ ID NO: 44275 - DNA, 110 bp, synthetic construct
  source 1..110: mol_type = other DNA
acaagaataatcatcagccagagaacgttgatagcaatcgatttaaactgctcgtagaagttaaagtcccgtctctcctgatggcagtagctcccagagccgcttgacct

SEQ ID NO: 44276 - DNA, 110 bp, synthetic construct
  source 1..110: mol_type = other DNA
agcaaaccaaaccccaagattagtgactacttagtttgtgcaggtattgttatcggtaatatttcttctactttgagaatgatagagttcctgtcatagctcagcagtaa

SEQ ID NO: 44277 - DNA, 110 bp, synthetic construct
  source 1..110: mol_type = other DNA
attgttatcggtaatatttcttctactttgagaatgatagagttcctgtcatagctcagcagtaactaacctggcgagtatccatgaggacaaaggttcgatccctggcc

SEQ ID NO: 44278 - DNA, 110 bp, synthetic construct
  source 1..110: mol_type = other DNA
ggcagaatggcaggaaagagtctttctttggggttaggtatcaagcttgtgttggcctttgttgaaagaaaatctctcggtggggagatgggaggggttgaattccacca

SEQ ID NO: 44279 - DNA, 110 bp, synthetic construct
  source 1..110: mol_type = other DNA
cctttgttgaaagaaaatctctcggtggggagatgggaggggttgaattccaccagtgacccttcagacaggtcaggagggaaaatgatacccaggacaactacattttg

SEQ ID NO: 44280 - DNA, 110 bp, synthetic construct
  source 1..110: mol_type = other DNA
ataaaacccctttggtctgggcagcctcaaaccccagctgtcagagccaggacgcccagtacgcccgcacttgctctgtttctcttctgcagactgtgccatgggggctc

SEQ ID NO: 44281 - DNA, 110 bp, synthetic construct
  source 1..110: mol_type = other DNA
cattgatgactctgaggtcctttactgataaggcaggtgctatttggaagcctccccagagaagaaggggctgagctgagtccgaatggaccggctgaagaatgtaggaa

SEQ ID NO: 44282 - DNA, 110 bp, synthetic construct
  source 1..110: mol_type = other DNA
ccagagaagaaggggctgagctgagtccgaatggaccggctgaagaatgtaggaaggcaaaggggaggcgtgccaggcagagggagcgcggaggtgagaccattgcgtgt

SEQ ID NO: 44283 - DNA, 110 bp, synthetic construct
  source 1..110: mol_type = other DNA
tagtggtacagtcatacaagaagatggatttttaactcagtctaaacagaaactgttcagcagtgctaagtaatgatgaatggaccacatctttttggtagttagggagt

SEQ ID NO: 44284 - DNA, 110 bp, synthetic construct
  source 1..110: mol_type = other DNA
gcagaagagtggggagctgctgcttgcgggccacctactgtgagccgtgcaccggactggacccttaaccatacttccttgatttttcctaacaaggtcaataccaccat

SEQ ID NO: 44285 - DNA, 110 bp, synthetic construct
  source 1..110: mol_type = other DNA
gaaaggattaagtgagttcatgtgtgcttagctagtgttggccttaaccgctaattcccaaagagtaatccatgcatcagcagtgttagacatttgttagaagtatatct

SEQ ID NO: 44286 - DNA, 110 bp, synthetic construct
  source 1..110: mol_type = other DNA
tcccaaagagtaatccatgcatcagcagtgttagacatttgttagaagtatatctaaattcttaggaatgttgcctaggttcagctagacctggttttacatgatcgttc

SEQ ID NO: 44287 - DNA, 110 bp, synthetic construct
  source 1..110: mol_type = other DNA
gcaacctgaaaccctgtgaccgcccccccccaccccagccaagtgggggatgcagcttcaccttcgtcccctctactttcctcgggctcacctatgctcaagcccagagg

SEQ ID NO: 44288 - DNA, 110 bp, synthetic construct
  source 1..110: mol_type = other DNA
cttcaccttcgtcccctctactttcctcgggctcacctatgctcaagcccagaggccagccttggaggttatttataactgtgtcagaggagaaggaggcaggaaatagg

SEQ ID NO: 44289 - DNA, 110 bp, synthetic construct
  source 1..110: mol_type = other DNA
cattacccactgcctgaaaactcaacctctagctctttttggccaggaagctgtctgggctagtctgagaagcccatgtcgaagaccaagaacatcacatgggctttagt

SEQ ID NO: 44290 - DNA, 110 bp, synthetic construct
  source 1..110: mol_type = other DNA
tggaccgaggccccattttcaccccctcagccaggcacccttgtacagatcagtacccacacagctatgtacaaacagcaaccacaaaactcaggctgctttgcctaccc

SEQ ID NO: 44291 - DNA, 110 bp, synthetic construct
  source 1..110: mol_type = other DNA
gagagccaagagggaggagttttgctaagcctctctccccatcattgtttatgatctgttgggtggaacagcaggcacacacctgcagataccctgagatggtgcaaaga

SEQ ID NO: 44292 - DNA, 110 bp, synthetic construct
  source 1..110: mol_type = other DNA
ctgttgggtggaacagcaggcacacacctgcagataccctgagatggtgcaaagagcagctgtgtgttatagtttcatttccagctctgtgcttagctgctacatggcct

SEQ ID NO: 44293 - DNA, 110 bp, synthetic construct
  source 1..110: mol_type = other DNA
aaacacttttccaagtaatcatcccacccacaaacttctcttcctaagaattccggtggaggccataagcttttctaccatgttacagcagtaaaatccaatgtcaaaat

SEQ ID NO: 44294 - DNA, 110 bp, synthetic construct
  source 1..110: mol_type = other DNA
gacagaaaccactcagaaagcttttgaaacacatcatctgaaaccatggctgacttggttatggctgagtaacgctgactcatcctatgaaatgctttccccagcctggt

SEQ ID NO: 44295 - DNA, 110 bp, synthetic construct
  source 1..110: mol_type = other DNA
acccacagtgggaactcccttaagagtattttaaatctgcaagtggtttaaatcgttctctacagagaaattacctgcttcattagtaaaaggtagtggttaaataaact

SEQ ID NO: 44296 - DNA, 110 bp, synthetic construct
  source 1..110: mol_type = other DNA
cttttaattgtccattcacgcagacagattgtcttttcatattcagagctaaactgggagatgtgtccttttgcggggcgcttgttatctgactgcctcatcaggaatgg

SEQ ID NO: 44297 - DNA, 110 bp, synthetic construct
  source 1..110: mol_type = other DNA
gggagatgtgtccttttgcggggcgcttgttatctgactgcctcatcaggaatgggaactaatgtgcaatgtgattgctgagttcgaattctatttttttttttcctatg

SEQ ID NO: 44298 - DNA, 110 bp, synthetic construct
  source 1..110: mol_type = other DNA
ctgtgcacagttcccagcgtctagctcctgctccaaactctaacaggcctttccttggggctgtgtgattttcaggtagggtccaaggccccacagcagggaggtgctta

SEQ ID NO: 44299 - DNA, 110 bp, synthetic construct
  source 1..110: mol_type = other DNA
tctgtgtggtggttggggattcacagcagggaacaaaaattcccctcatactgaaacattcaagatcccaaatggttctggagccaaaactgtgtctgttacctgctttc

SEQ ID NO: 44300 - DNA, 110 bp, synthetic construct
  source 1..110: mol_type = other DNA
acattcaagatcccaaatggttctggagccaaaactgtgtctgttacctgctttcctcagatgaacagaaagctcactaattaaaaaaaaaaaaaaaagcagcacactac

SEQ ID NO: 44301 - DNA, 110 bp, synthetic construct
  source 1..110: mol_type = other DNA
tccctccgcaggacttttggctcccagcactcgggccacccccagcccttgtcatccagggccagctttcagtttgcactaggcagcttcaagggctaatttttgccaat

SEQ ID NO: 44302 - DNA, 110 bp, synthetic construct
  source 1..110: mol_type = other DNA
catgtcacttttaagacctcagttcttagaagcttccaatccagagaggaagatcctgagacaataagaaaacgctatacccatgctctagctggtgggtgctgaggcag

SEQ ID NO: 44303 - DNA, 110 bp, synthetic construct
  source 1..110: mol_type = other DNA
ctgagacaataagaaaacgctatacccatgctctagctggtgggtgctgaggcagagagaggcggggacaaagctgtgtggggtcacaaaggaggaagtggcccaaggtg

SEQ ID NO: 44304 - DNA, 110 bp, synthetic construct
  source 1..110: mol_type = other DNA
tttttggaactagtccattaaatggggacactcaggttgcttccacttgggagctattacaaaataacaacaacaacaacaacggaagttcacggatatcaacacataca

SEQ ID NO: 44305 - DNA, 110 bp, synthetic construct
  source 1..110: mol_type = other DNA
attacaaaataacaacaacaacaacaacggaagttcacggatatcaacacatacacacagtcctgtgaaacctgtgttattctgagggtgattccacagaagtcaaagca

SEQ ID NO: 44306 - DNA, 110 bp, synthetic construct
  source 1..110: mol_type = other DNA
acacaacaaggtgaatcggacgaactcaatactgaaccaaagaaaccaggcacaaaagaggacatcctgtgtgattctgctttggggaagttcgctgctggaggcgtcag

SEQ ID NO: 44307 - DNA, 110 bp, synthetic construct
  source 1..110: mol_type = other DNA
agtcagggtgtgctggggcactgcatccttgaccttgggctcccagggctccaggccacaagcggactggttctcaggccccagcaccagttgaaccagttgaacagggc

SEQ ID NO: 44308 - DNA, 110 bp, synthetic construct
  source 1..110: mol_type = other DNA
ccacaagcggactggttctcaggccccagcaccagttgaaccagttgaacagggctagatgcagctcaggtcctaaaccacgccatccactcaccaggggacttaaaatg

SEQ ID NO: 44309 - DNA, 110 bp, synthetic construct
  source 1..110: mol_type = other DNA
gagcctcacaagcatgcgtcagtgctgttcccattcccggctggacccccagctcctggcacaagacctaccacaaggtaggtaccccagaagcatctgctaaacagaac

SEQ ID NO: 44310 - DNA, 110 bp, synthetic construct
  source 1..110: mol_type = other DNA
ctggcacaagacctaccacaaggtaggtaccccagaagcatctgctaaacagaactctgaaacgggatggaggtgactttcagtgtaaccttggtagagccacagttact

SEQ ID NO: 44311 - DNA, 110 bp, synthetic construct
  source 1..110: mol_type = other DNA
gaagggagggaaaagaagcaggattgggcagagggacaagttaagctgtgaggcatgcccaatagcagcttctgttgacctccgggggagttctggttataggagagcct

SEQ ID NO: 44312 - DNA, 110 bp, synthetic construct
  source 1..110: mol_type = other DNA
tgcccaatagcagcttctgttgacctccgggggagttctggttataggagagccttcatagctgtatcaagataggtcaagacagctggaactgtgtacccccatccctc

SEQ ID NO: 44313 - DNA, 110 bp, synthetic construct
  source 1..110: mol_type = other DNA
tcaacaacaagcattttattttatcttcatgggtcaatcatagtttggttcatcttgactgactgagccaagcttagttggggtttgggtccagatttgggatcagattg

SEQ ID NO: 44314 - DNA, 110 bp, synthetic construct
  source 1..110: mol_type = other DNA
tgactgactgagccaagcttagttggggtttgggtccagatttgggatcagattgaagtctgtatcaggtatcttccttccaagatccaggctgaagggacaatggctac

SEQ ID NO: 44315 - DNA, 110 bp, synthetic construct
  source 1..110: mol_type = other DNA
ggagttacctctgaactgtgacctcctagtgacacactagcaaaattttttctctctgctctcacaattttatgctcagctagcctagagttttttagttgcagaggagg

SEQ ID NO: 44316 - DNA, 110 bp, synthetic construct
  source 1..110: mol_type = other DNA
tcttgtgacgtagttccggcaattttaaatgacagcctttagctcacactttcttgaaaaacaaaccaaatacattcaagactcattttgggctggcagcgaggcatgcg

SEQ ID NO: 44317 - DNA, 110 bp, synthetic construct
  source 1..110: mol_type = other DNA
gaaaaacaaaccaaatacattcaagactcattttgggctggcagcgaggcatgcgtaagaggttatttatgacgtgctatgcttgcctggatctggtgggcggcccagat

SEQ ID NO: 44318 - DNA, 110 bp, synthetic construct
  source 1..110: mol_type = other DNA
gtccatccttttgcagcccttggctctgggtcctgcttggtatttgagaggcccagtcactattaagcattcagaaggtggtgtgtatgaattggttgaatgcagagagg

SEQ ID NO: 44319 - DNA, 110 bp, synthetic construct
  source 1..110: mol_type = other DNA
tctttgtctttggttttgtgtagtttcagtatgatgtgtttgatgtgaatcctttctctctttctcatttctccctctctgtatctctgcctgttttaatctgttcttca

SEQ ID NO: 44320 - DNA, 110 bp, synthetic construct
  source 1..110: mol_type = other DNA
ctctctttctcatttctccctctctgtatctctgcctgttttaatctgttcttcattcctttttttatttcccctcctttccatcccaccttccatctctagccctatgt

SEQ ID NO: 44321 - DNA, 110 bp, synthetic construct
  source 1..110: mol_type = other DNA
catgacaggaacttcaaattttccctctttaaattactaatgtggattctgtctcctgacttcactttttaattaattcagttatcaaagccaaaagcttgatcttttga

SEQ ID NO: 44322 - DNA, 110 bp, synthetic construct
  source 1..110: mol_type = other DNA
attctgtctcctgacttcactttttaattaattcagttatcaaagccaaaagcttgatcttttgaaaagattaataaaattgattaactcctagcaacactgataagggc

SEQ ID NO: 44323 - DNA, 110 bp, synthetic construct
  source 1..110: mol_type = other DNA
tgctttctttcaccctcgaaagtgtctccgtttggaatacattatatggtcaccttggtagctctattttagacgtcagttttgagatgcctactagaatctgagcagaa

SEQ ID NO: 44324 - DNA, 110 bp, synthetic construct
  source 1..110: mol_type = other DNA
gaactcaccacacaacattgctgggagcagcaaatgagcttatgtgtaggatgcgactctggtaggcattagatgccccatgacagtgtttgatgaaaccatttctgagc

SEQ ID NO: 44325 - DNA, 110 bp, synthetic construct
  source 1..110: mol_type = other DNA
tctgaaactattccaaaaaattgcaaaaggtggaacactttcaaactcagtctacaaggccaccatcaccttgataccaaagccatacaaagataccacaaggaaagaaa

SEQ ID NO: 44326 - DNA, 110 bp, synthetic construct; identical to SEQ ID NO: 44325
  source 1..110: mol_type = other DNA

SEQ ID NO: 44327 - DNA, 110 bp, synthetic construct
  source 1..110: mol_type = other DNA
ggctgaatcatctcagtcttcaaatctcaggagagacttttagaggtctttgactatactaagtgttctcaatcattgtactgtttctcctagcacttaacacaatctga

SEQ ID NO: 44328 - DNA, 110 bp, synthetic construct
  source 1..110: mol_type = other DNA
atactaagtgttctcaatcattgtactgtttctcctagcacttaacacaatctgatttatatatttatttactacctgtctcaccaacaaaactgaagtgtacagagact

SEQ ID NO: 44329 - DNA, 110 bp, synthetic construct; identical to SEQ ID NO: 44327
  source 1..110: mol_type = other DNA

SEQ ID NO: 44330 - DNA, 110 bp, synthetic construct; identical to SEQ ID NO: 44328
  source 1..110: mol_type = other DNA

SEQ ID NO: 44331 - DNA, 110 bp, synthetic construct
  source 1..110: mol_type = other DNA
aataagcacaggtgcttatatccaaatataccataagccacatgcacctggaactattcacattctttgcacaaacattagcagttgtatccaactttacttctctggaa

SEQ ID NO: 44332 - DNA, 110 bp, synthetic construct
  source 1..110: mol_type = other DNA
tccatccatcctctatccatccactcactcatctgcccaacaaacatttactgagatcctgagagtatagctgacctggatacagtaataaacaagacaaacaagatccc

SEQ ID NO: 44333 - DNA, 110 bp, synthetic construct
  source 1..110: mol_type = other DNA
atcctgagagtatagctgacctggatacagtaataaacaagacaaacaagatccctgcctcaagggcttacatagtagcaataggagacacacaatgaacaaagaaacaa

SEQ ID NO: 44334 - DNA, 110 bp, synthetic construct
  source 1..110: mol_type = other DNA
ttatatctgccactctaaattactcaattgaaccagcatctggagcagtctaactcaaatcctgcgattcgcctacaagctacagaataggtgttccagaaaggccaggg

SEQ ID NO: 44335 - DNA, 110 bp, synthetic construct
  source 1..110: mol_type = other DNA
actctattctctagaccatctactattcattttcattcattcattccctcaacagcattggccaagtacatcagttctgctgcagttcttgtttggaaaatacaaatgtg

SEQ ID NO: 44336 - DNA, 110 bp, synthetic construct
  source 1..110: mol_type = other DNA
agctgggattctctggttgagtaagaattaggagttgagaaaaaaaacaaaaaacaaaaaacaagaaaagattgatgggaaccctcaactaggtctccagccattcatca

SEQ ID NO: 44337 - DNA, 110 bp, synthetic construct
  source 1..110: mol_type = other DNA
aaaaaacaagaaaagattgatgggaaccctcaactaggtctccagccattcatcatcaagttgcatataaatcctgggtaaaaatggcaaatgtcatccctttcacagat

SEQ ID NO: 44338 - DNA, 110 bp, synthetic construct
  source 1..110: mol_type = other DNA
ttaaaagccatctggaaaaggaaaactcgcaagataaactcctcacgataagcgaaaggtcatctagacccaggaggacttctctgagtttcgtttagagatgtaccagt

SEQ ID NO: 44339 - DNA, 110 bp, synthetic construct
  source 1..110: mol_type = other DNA
ctcggaagttgaattctttaacctgtaattcagaaattagagaacatatttgagatgatgcatacttacatttagggtatctcaagaacctatgttacagatttgaataa

SEQ ID NO: 44340 - DNA, 110 bp, synthetic construct
  source 1..110: mol_type = other DNA
acaggaactccccaacaccattattaaacgcacaatattgtgggttctgtccatttccatgggggagttaatatagttccctgatgaggaaaagcagacagcaaaaatgc

SEQ ID NO: 44341 - DNA, 110 bp, synthetic construct
  source 1..110: mol_type = other DNA
tccatgggggagttaatatagttccctgatgaggaaaagcagacagcaaaaatgccagctgatgctatctattatttccaacaatatttcagcaagtaaataacctcgtc

SEQ ID NO: 44342 - DNA, 110 bp, synthetic construct
  source 1..110: mol_type = other DNA
ttgggggaaaccatctcttccctagtttcagaccaggtgttaccggcaaagctgactcactttggctacaggaactgaatacgtgtctagggtttaagttcctttcccac

SEQ ID NO: 44343 - DNA, 110 bp, synthetic construct
  source 1..110: mol_type = other DNA
ctcactttggctacaggaactgaatacgtgtctagggtttaagttcctttcccactggccaccatgactgagtcaacaatggaacacaaccaccaaatagagccagtgag

SEQ ID NO: 44344 - DNA, 110 bp, synthetic construct
  source 1..110: mol_type = other DNA
tgtatcgttcctttagaaaggatgcctggaaatgaaatccttgctgtggaagatatgaatagtttcaatgcttctacttgtcgagagaattttgagggcacctggaagag

SEQ ID NO: 44345 - DNA, 110 bp, synthetic construct
  source 1..110: mol_type = other DNA
tgaatagtttcaatgcttctacttgtcgagagaattttgagggcacctggaagaggggtgtctacctccagtttcttcccttaagaccctcttttttgcctcttttccaa

SEQ ID NO: 44346 - DNA, 110 bp, synthetic construct
  source 1..110: mol_type = other DNA
gcgccacagtggaaagtcccatccataatttctgatccagtctccttcctagcaatttgtagagaaccagctcagattaggagtgagtcaaggatcagggggaaatggac

SEQ ID NO: 44347 - DNA, 110 bp, synthetic construct
  source 1..110: mol_type = other DNA
cataaccagcagttctctttggagccattaggcatacaatcagatggcctttatctttcagtgagctgactttttgtgacttttatagaactgctgtttgcaagatgtga

SEQ ID NO: 44348 - DNA, 110 bp, synthetic construct
  source 1..110: mol_type = other DNA
tttcagtgagctgactttttgtgacttttatagaactgctgtttgcaagatgtgatgttgcttggatactccctgtggcggagctaaaatgccttgagtttgagtcctgg

SEQ ID NO: 44349 - DNA, 110 bp, synthetic construct
  source 1..110: mol_type = other DNA
ttctagaatgagcagctgcctcttgtcacttctagatccccagccattgtggtccccacttacccctccttgctggtccggttaaggagactgattcctttttttttttg

SEQ ID NO: 44350 - DNA, 110 bp, synthetic construct
  source 1..110: mol_type = other DNA
tgtctccagggggtgggtctgaccacccccattttacagatgaggaggctcctgcagctaataagcagtggggcaggccacacacctaaggctgtttgactcgaaagacc

SEQ ID NO: 44351 - DNA, 110 bp, synthetic construct
  source 1..110: mol_type = other DNA
atcgtaaggcattcttcactcttggctggcttttttctccccctgaagctgtatatgtcagagtcgtgggaggggaccaccacgggtcatggtgtgtaggtgtgtgtatg

SEQ ID NO: 44352 - DNA, 110 bp, synthetic construct
  source 1..110: mol_type = other DNA
tgtcagagtcgtgggaggggaccaccacgggtcatggtgtgtaggtgtgtgtatgtgagggattgtgtgctcttagacaattctgccttacaaggtagctcaagacacca

SEQ ID NO: 44353 - DNA, 110 bp, synthetic construct
  source 1..110: mol_type = other DNA
gcccatgcacatcacggattcttgcagagcttttgccgggaaggatgacaataatgcgggtaggcaagactttcggagcctttagaagcggtctgctaaagaccttacgc

SEQ ID NO: 44354 - DNA, 110 bp, synthetic construct
  source 1..110: mol_type = other DNA
aacctgctgttccccagatgcagacccggaagcacgacaatttgtgcatgagtcatttattaggagtgtgctcccaggagaagctggaagaggagtgaggaaagtaggtc

SEQ ID NO: 44355 - DNA, 110 bp, synthetic construct
  source 1..110: mol_type = other DNA
agtcagaggtctgggccccgagggtcaaacacgatggacaggatcatggcatgctttggagggcacagtcagcttgattccaccaactatgtgacgggcaggccctatgc

SEQ ID NO: 44356 - DNA, 110 bp, synthetic construct
  source 1..110: mol_type = other DNA
ttggagggcacagtcagcttgattccaccaactatgtgacgggcaggccctatgctggagggtggagataccacagcatatcggaagcaagccagtttgcagggatgggc

SEQ ID NO: 44357 - DNA, 110 bp, synthetic construct
  source 1..110: mol_type = other DNA
aatgcatcaaaaaaaccccacaaataattgaatgaggaatgcttccttcttgctcagtggaaaaatttatccctgcagcagcgggagtggaatccctgctagaggctagg

SEQ ID NO: 44358 - DNA, 110 bp, synthetic construct
  source 1..110: mol_type = other DNA
agtggaaaaatttatccctgcagcagcgggagtggaatccctgctagaggctaggagtcaatcggtctctataaattccgatcccaatgcccgggatttccacccaacag

SEQ ID NO: 44359 - DNA, 110 bp, synthetic construct
  source 1..110: mol_type = other DNA
ctctaatttgaaaagatacatgcatccgaatgtttataacagcgctatttataaatgccaagacagggaaacaaccccagtggctattaacagataatgggtgtaagaag

SEQ ID NO: 44360 - DNA, 110 bp, synthetic construct; identical to SEQ ID NO: 44359
  source 1..110: mol_type = other DNA

SEQ ID NO: 44361 - DNA, 110 bp, synthetic construct
  source 1..110: mol_type = other DNA
aagtgaagactcatgaaattagtcacacgcagactcccttccttccctgacccgtccaagtctggccctcttcttaacagcactgcattcctggaacattcattcccaca

SEQ ID NO: 44362 - DNA, 110 bp, synthetic construct
  source 1..110: mol_type = other DNA
ttgagagacaagagcaggtgacgtaaccttctacagtgacattggtcaccatacttcagagctttacaagaggccctggtagcttctggggcatcagccgtcttttgcta

SEQ ID NO: 44363 - DNA, 110 bp, synthetic construct
  source 1..110: mol_type = other DNA
agagctagctggaactcaagcccaaatgtgtgtgcatccaacaacacctgttctcttgactgctcctctagaccgtggttcatctgaggcaagagctgtatgcctggaga

SEQ ID NO: 44364 - DNA, 110 bp, synthetic construct
  source 1..110: mol_type = other DNA
ttgactgctcctctagaccgtggttcatctgaggcaagagctgtatgcctggagaagaaatgagatgtccgaacacagccaggcaaggcttatgtgctagcagctgggat

SEQ ID NO: 44365 - DNA, 110 bp, synthetic construct
  source 1..110: mol_type = other DNA
tttttaatattgtgcatttcaatgtaattggcttcctctataatcccatgtatttcgctcactcaggaactctattctgaggggggtctacaagctttaacaaattgcca

SEQ ID NO: 44366 - DNA, 110 bp, synthetic construct
  source 1..110: mol_type = other DNA
cgctcactcaggaactctattctgaggggggtctacaagctttaacaaattgccaaaggatccgtggcacacaaaatgaacaactcttggttggcaaagtccaagatgtg

SEQ ID NO: 44367 - DNA, 110 bp, synthetic construct
  source 1..110: mol_type = other DNA
caggtgatccacagctgtccaggtgttttcttttgctagaggtcacttgcatctcttttggctgccgttttcaacaatgagatcgaccaaagtcttgctcccccagacaa

SEQ ID NO: 44368 - DNA, 110 bp, synthetic construct
  source 1..110: mol_type = other DNA
ttttggctgccgttttcaacaatgagatcgaccaaagtcttgctcccccagacaacatggatggattttaccaacctaaggccaaacaaaagaaatcaagccaaaaacat

SEQ ID NO: 44369 - DNA, 110 bp, synthetic construct
  source 1..110: mol_type = other DNA
tgacttgcataatttccatgatgtatatttaagtggaatgtttgtgctattctttttccttttccctggggtttggataaaatttgagatagctggagctagagcagccc

SEQ ID NO: 44370 - DNA, 110 bp, synthetic construct
  source 1..110: mol_type = other DNA
ttccttttccctggggtttggataaaatttgagatagctggagctagagcagccctcttggaccacaaggtaggagtcttgtattgagaatgagagagaaacgagcttga

SEQ ID NO: 44371 - DNA, 110 bp, synthetic construct
  source 1..110: mol_type = other DNA
ataggagtcaagttcatgcaccctctctgggcctcggttgaagatattaccttgaaggttccatccagctctagtatctcaagaccccacaggcagctgcatgggactag

SEQ ID NO: 44372 - DNA, 110 bp, synthetic construct
  source 1..110: mol_type = other DNA
ctgtctgattgtaaagtcctggaggaaaggctttgctcttcctccacttctctagcccccaagagcccctggcacctatcagcgccccatcagctgctgacagtgcaagc

SEQ ID NO: 44373 - DNA, 110 bp, synthetic construct
  source 1..110: mol_type = other DNA
cccccaagagcccctggcacctatcagcgccccatcagctgctgacagtgcaagcaagctcactttttgaggccatgggtctccaaaaaggcgcgttgagtggaggagct

SEQ ID NO: 44374 - DNA, 110 bp, synthetic construct
  source 1..110: mol_type = other DNA
tttgagtccaagtctgaagggctgagaaccagcaatgccaagggcaggagaaggttgacggccccactaaagcaatcaggccgagaacaaatgtgaccttccttcacgtg

SEQ ID NO: 44375 - DNA, 110 bp, synthetic construct
  source 1..110: mol_type = other DNA
tgacggccccactaaagcaatcaggccgagaacaaatgtgaccttccttcacgtgtgtttcgttcttttcatgattgatgccgtccacatcagagtccaccaattcaaat

SEQ ID NO: 44376 - DNA, 110 bp, synthetic construct
  source 1..110: mol_type = other DNA
aatgggaatctgatggggctcatttcaccagtgaggaaacagacgcacacacagatttgcccaaagtttgggaggtggcaacgggctgggatgaacaaccagcttctgct

SEQ ID NO: 44377 - DNA, 110 bp, synthetic construct
  source 1..110: mol_type = other DNA
tttgcccaaagtttgggaggtggcaacgggctgggatgaacaaccagcttctgctccctgagcctaggcccctgaccagtctaggactgttatgcagatgaggaaacaga

SEQ ID NO: 44378 - DNA, 110 bp, synthetic construct
  source 1..110: mol_type = other DNA
ttacagctaccaaagttaaatcagaataataagcaagtcctgccaagagcttaccaacaatgaaagcaagttcaaataacttctagatgacccctgggtagcctttaaga

SEQ ID NO: 44379 - DNA, 110 bp, synthetic construct
  source 1..110: mol_type = other DNA
aaaaaaaaaaagaaactagaagcaatactttccatcgtcacatccaacattccactgcatctataccttccctctggtacaaggaatgaatgaacggtctccatttgtgg

SEQ ID NO: 44380 - DNA, 110 bp, synthetic construct
  source 1..110: mol_type = other DNA
gtggggtactgagcagttccagccaagctaagtcagatgtgacttagacaaacctcaaaacagcttcttcctttttccaccaatattcactaatgcctcctaggtagcag

SEQ ID NO: 44381 - DNA, 110 bp, synthetic construct
  source 1..110: mol_type = other DNA
caaaacagcttcttcctttttccaccaatattcactaatgcctcctaggtagcaggaaccattccaggcgctgggatacagacagtggtgagtcaagaagacagacaaag

SEQ ID NO: 44382 - DNA, 110 bp, synthetic construct
  source 1..110: mol_type = other DNA
caccaagtgaaatgcccaacctgtggcattctgaacaagaaaacagaagctcgctcacacggcagatcagtcgctatccagccaccgctcacaccaaacaagcccctgct

SEQ ID NO: 44383 - DNA, 110 bp, synthetic construct
  source 1..110: mol_type = other DNA
caagagcctcaagggctaccttggatttaatcaccctacaactccagatccaatgcactaaaggtcatgccaccgaggagctggaaaccaaatccggggctggcagggaa

SEQ ID NO: 44384 - DNA, 110 bp, synthetic construct
  source 1..110: mol_type = other DNA
agagactcctagagtgggccctttgatacctccacatgcttactctttccatccctttctctagaatcttctaggcacaccccaccagattatgcccacacactgatcac

SEQ ID NO: 44385 - DNA, 110 bp, synthetic construct
  source 1..110: mol_type = other DNA
tttctctagaatcttctaggcacaccccaccagattatgcccacacactgatcaccaaaatgaaggctttgcaacggcccttgctagtgtctcagcagtaccagcattgc

SEQ ID NO: 44386 - DNA, 110 bp, synthetic construct
  source 1..110: mol_type = other DNA
gagcccagctgagggaaacgaggggcctcctctcccaggatgctctcgggggatgaagccggcacaatgctgtcaggagaatcgctgtcttcgtcactctccatcctgtg

SEQ ID NO: 44387 - DNA, 110 bp, synthetic construct
  source 1..110: mol_type = other DNA
gtacggctgccgtctaggccaggggttccacaccccagatgctgctctcgttcagaacccagaacgtccttgaaaagctgctgcaggtccttggattccatcttgggcag

SEQ ID NO: 44388 - DNA, 110 bp, synthetic construct
  source 1..110: mol_type = other DNA
gatctgatccctggcctaggaactccatatgccatggggcagcaaaaaaaaaaaaaaaaaaggagcagatactctggttcagccttttcagtttccaattagctgtgtgg

SEQ ID NO: 44389 - DNA, 110 bp, synthetic construct; identical to SEQ ID NO: 44388
  source 1..110: mol_type = other DNA

SEQ ID NO: 44390 - DNA, 110 bp, synthetic construct
  source 1..110: mol_type = other DNA
ttttatgttagagtcatacccgaggcatagggtaattcccagactaggggtcgaatcctcagagctgtagcggccacagccgaagcaatgccagaccctagctgcatctg

SEQ ID NO: 44391 - DNA, 110 bp, synthetic construct
  source 1..110: mol_type = other DNA
atacccgaggcatagggtaattcccagactaggggtcgaatcctcagagctgtagcggccacagccgaagcaatgccagaccctagctgcatctgtgacctacatcacag

SEQ ID NO: 44392 - DNA, 110 bp, synthetic construct
  source 1..110: mol_type = other DNA
agttgtgcttgggtgccgcctttgagggaaggccaaacaagtggcaggagatgagcgagggtgcagagctgcagacctgttcaccttttgctccatggctgagcttattc

SEQ ID NO: 44393 - DNA, 110 bp, synthetic construct
  source 1..110: mol_type = other DNA
cctgaggcatgtggagtttcccaagctaggggtccagttggagctacagctgctggcctacatgagatctaagcagcgtctgcgacctacaccacagctcactgcaatgc

SEQ ID NO: 44394 - DNA, 110 bp, synthetic construct; identical to SEQ ID NO: 44393
  source 1..110: mol_type = other DNA

SEQ ID NO: 44395 - DNA, 110 bp, synthetic construct
  source 1..110: mol_type = other DNA
agccactttccctttgccttgcgcttctttaaacatagagtatctcttggaaccgctatagttttgtcgccacacccctccttctgtctgtaggtctccacatttaggaa

SEQ ID NO: 44396 - DNA, 110 bp, synthetic construct
  source 1..110: mol_type = other DNA
ggccctgcctaaagctgggaagcttcatgagaatgtaaatgagatgcccaccatgcagaaagggacagcaaggcagcttgcgtgtcccaaccctggcgttgtgtaggagg

SEQ ID NO: 44397 - DNA, 110 bp, synthetic construct
  source 1..110: mol_type = other DNA
tggtctagtctgctggtccattgcctgcattaactatgacagcaacctcaggccagctgagccctttgtcttgcttgtgtgtttgccgccaagaatgtaaactcctactg

SEQ ID NO: 44398 - DNA, 110 bp, synthetic construct
  source 1..110: mol_type = other DNA
cgaggctagggatcgaacctgtgtccttatggattctagtcaacttcattactgctgagccatgatgggaactcctagccatataatttttaaacttgaagaaaccttaa

SEQ ID NO: 44399 - DNA, 110 bp, synthetic construct; identical to SEQ ID NO: 44398
  source 1..110: mol_type = other DNA

SEQ ID NO: 44400 - DNA, 110 bp, synthetic construct
  source 1..110: mol_type = other DNA
caggctggggtcaaattggagctgtagttgccaacctacacactacgcggatctgagccgagtctgcagcctacaccacagctctctgcaatgccacatccaaaacccac

SEQ ID NO: 44401 - DNA, 110 bp, synthetic construct; identical to SEQ ID NO: 44400
  source 1..110: mol_type = other DNA

SEQ ID NO: 44402 - DNA, 110 bp, synthetic construct
  source 1..110: mol_type = other DNA
atgttacatgcggctgagactcctttagagagctttctagtaagcttcactctatgagttctgcttagatcgcacccgacagactatagcacgactctcttagatgtagc

SEQ ID NO: 44403 - DNA, 110 bp, synthetic construct
  source 1..110: mol_type = other DNA
tgcaggagcgaggctgcggcagagtctcccaggggagagccagggaacagcatttccatacaggtgcagagggaattttgctgcctcctctgccactcctgaccaaggga

SEQ ID NO: 44404 - DNA, 110 bp, synthetic construct
  source 1..110: mol_type = other DNA
ccatacaggtgcagagggaattttgctgcctcctctgccactcctgaccaagggaaacgctgtctgaagaagatttttctgggtgaggaaactcacccaccctcgccacc

SEQ ID NO: 44405 - DNA, 110 bp, synthetic construct; identical to SEQ ID NO: 44403
  source 1..110: mol_type = other DNA

SEQ ID NO: 44406 - DNA, 110 bp, synthetic construct; identical to SEQ ID NO: 44404
  source 1..110: mol_type = other DNA

SEQ ID NO: 44407 - DNA, 110 bp, synthetic construct
  source 1..110: mol_type = other DNA
ctgagcctgaggaagcagcagagatctggaagctgcaggaataaagagggctgtccactgggcactgaattcacaggtcttccttcagccaggaaagacggggcctctcc

SEQ ID NO: 44408 - DNA, 110 bp, synthetic construct
  source 1..110: mol_type = other DNA
gtgccttctagaaggggcacgtcatccttatcgctccctatcacctccctgacatgggagcgaggttacttgctgtttactgtcatgtgtgcacattgaattctcagtat

SEQ ID NO: 44409 - DNA, 110 bp, synthetic construct
  source 1..110: mol_type = other DNA
gaagccccctccaaacaacccagagctctgcacactccttcctctgaatttctgtagggtttactgctcttgcctcccaccaacaatcatattcagtcattccttcaaca

SEQ ID NO: 44410 - DNA, 110 bp, synthetic construct
  source 1..110: mol_type = other DNA
aattcttagcaacctcttgttctaggtggagaattcaatacaggttgacaaacagtttcttgtgccttaagtatggtgtggaaatagctactgctgtacgtgaaaagggc

SEQ ID NO: 44411 - DNA, 110 bp, synthetic construct
  source 1..110: mol_type = other DNA
ccaacagattcagccaggggtctgcagagttgtgctaacctctacccacctgaatgaccaccttaaaggggtgtccagcttcatgaggccagcgatttgctcaacttctt

SEQ ID NO: 44412 - DNA, 110 bp, synthetic construct
  source 1..110: mol_type = other DNA
caccaatgcagcaaagaatgagatggacaagatccctaaccttgcagagcttatgagtctagcagggaagacattgttagtatgatgagacaccaaagagaaacacgcgg

SEQ ID NO: 44413 - DNA, 110 bp, synthetic construct
  source 1..110: mol_type = other DNA
agtctagcagggaagacattgttagtatgatgagacaccaaagagaaacacgcggtgccacagggaggtgggggcgctggtaacaggaacctaacctctgtgagcgtggc

SEQ ID NO: 44414 - DNA, 110 bp, synthetic construct
  source 1..110: mol_type = other DNA
cttgctctcttctgcctcccacccccatcccactaacccagccaggtcctggaggcctgcccggaagagagcaggaggagagggctctatgccaatgtttcgtgcctgcc

SEQ ID NO: 44415 - DNA, 110 bp, synthetic construct
  source 1..110: mol_type = other DNA
cctgcccggaagagagcaggaggagagggctctatgccaatgtttcgtgcctgcccaaaccccaccccatctaaatgctcccaggagtgatggtgtttggggaagttccc

SEQ ID NO: 44416 - DNA, 110 bp, synthetic construct
  source 1..110: mol_type = other DNA
ccttctgcttcttgcatagcttcctgcctctctagcctccctcctctgccttacctagcacagtgctctgcatgtagtaaacgctcaatcaattctcatttgccaataaa

SEQ ID NO: 44417 - DNA, 110 bp, synthetic construct
  source 1..110: mol_type = other DNA
atttgaggtgaagctttctcccctggttagttagaatgttttactctgctttgatctgtaggaaagacagattcagctgattcgagagatgctcatgtgtgacacatctg

SEQ ID NO: 44418 - DNA, 110 bp, synthetic construct
  source 1..110: mol_type = other DNA
ctggagaagacacccccaggcccctgggagatatttggggtccccacccgcggcaacggcaggacagctccgaatcagaggaagaagaggagaagggggcagggaggaag

SEQ ID NO: 44419 - DNA, 110 bp, synthetic construct
  source 1..110: mol_type = other DNA
acggcaggacagctccgaatcagaggaagaagaggagaagggggcagggaggaaggaggccagagaaggggactcaccgatggacctggtggccttcgccaacagctgca

SEQ ID NO: 44420 - DNA, 110 bp, synthetic construct
  source 1..110: mol_type = other DNA
gatggagacggcggggtgaggtgtggggagaagaggctttgtgccgacccccagctctccagctagccacgtagtcctagcacccggttggaaacaggcttgggggagag

SEQ ID NO: 44421 - DNA, 110 bp, synthetic construct
  source 1..110: mol_type = other DNA
tctccagctagccacgtagtcctagcacccggttggaaacaggcttgggggagagatggtgcatttcgtttggagagtttaaggtgccttgagtggtcaagcagttggat

SEQ ID NO: 44422 - DNA, 110 bp, synthetic construct
  source 1..110: mol_type = other DNA
tttacatctctaaaaaatattagagctaaatttctaaaaatgcagtacaaagaaaagcctatcacttaaaacacctctctcccccccaccatacactttggaatatgaat

SEQ ID NO: 44423 - DNA, 110 bp, synthetic construct
  source 1..110: mol_type = other DNA
agcctatcacttaaaacacctctctcccccccaccatacactttggaatatgaattatgtacaacaaatgtactcaagtttatattgttccaaaaccttaatactagaaa

SEQ ID NO: 44424 - DNA, 110 bp, synthetic construct
  source 1..110: mol_type = other DNA
tcagaatattagacacagaggaggattccccagcatccaaggattggcagcgatgtggcgtaagtgagcgagcaagagagctgtcgaccagcagaccatactcctctacc

SEQ ID NO: 44425 - DNA, 110 bp, synthetic construct
  source 1..110: mol_type = other DNA
tggcgtaagtgagcgagcaagagagctgtcgaccagcagaccatactcctctaccggttctctcaaaaactgttaacttcggtcagatgattgaatttgggttgtagttt

SEQ ID NO: 44426 - DNA, 110 bp, synthetic construct
  source 1..110: mol_type = other DNA
ttgctcccacctttagagccaaacctttgtctccaggtcctcattgtttctacctcctcatcttccattcatctctcagcccacttgagtttgagttccactcccatcat

SEQ ID NO: 44427 - DNA, 110 bp, synthetic construct
  source 1..110: mol_type = other DNA
ttgcacgctggatcagcctataggcaatgtattttcggaataggtatcccagccgaactgtgtccgtatgaagtgtctcaattatgagcttcttagctgatgtgtatagc

SEQ ID NO: 44428 - DNA, 110 bp, synthetic construct
  source 1..110: mol_type = other DNA
cacatggaaattcccaggccagagttctaatcagagctgcagctaccagcctagccatagccacagcaataccagatccatgcgctgtctgggacctacaccacagctca

SEQ ID NO: 44429 - DNA, 110 bp, synthetic construct; identical to SEQ ID NO: 44428
  source 1..110: mol_type = other DNA

SEQ ID NO: 44430 - DNA, 110 bp, synthetic construct
  source 1..110: mol_type = other DNA
tgacctcatctttggatgtttgagtgctttaaatattcctacaaagatacagtgctctaaaattaagaaatgaaaataatatgaagagatagacgtttaaggagtgtgac

SEQ ID NO: 44431 - DNA, 110 bp, synthetic construct
  source 1..110: mol_type = other DNA
gaagttcctaggctaggggtcaactcaaagctgtagctgctagcccacaacacagcttagagcaacactggatccccccccacactgagcaggccagggattgatcaaac

SEQ ID NO: 44432 - DNA, 110 bp, synthetic construct
  source 1..110: mol_type = other DNA
cacaacacagcttagagcaacactggatccccccccacactgagcaggccagggattgatcaaacccacatcctaatggatgcgagtcagattcatttctgctgtgccac

SEQ ID NO: 44433 - DNA, 110 bp, synthetic construct
  source 1..110: mol_type = other DNA
tccctgcgtggggggatgtccacgtctttcggtgctttgttctttgcctgtgcactccttcccttttccgctaccttgaccagctgtattacccactggatctgatccga

SEQ ID NO: 44434 - DNA, 110 bp, synthetic construct
  source 1..110: mol_type = other DNA
tagccagatgtgtttctactgagccaggatgggaaactccaggccttatattttccagttcaaaatcaacccctctctccccaagctctcactccctttcagccagttaa

SEQ ID NO: 44435 - DNA, 110 bp, synthetic construct; identical to SEQ ID NO: 44434
  source 1..110: mol_type = other DNA

SEQ ID NO: 44436 - DNA, 110 bp, synthetic construct
  source 1..110: mol_type = other DNA
ctgttctgaattaatttgaagttttcacttgggacctcttattacacacagaacactgctagtgagtttcaagcatcctgagtataacagggagctattaaagtgttgtc

SEQ ID NO: 44437 - DNA, 110 bp, synthetic construct
  source 1..110: mol_type = other DNA
ctgctagtgagtttcaagcatcctgagtataacagggagctattaaagtgttgtcagcagagaatgaaaagaataaagatattgcgaaaagatttgtgtggcggggttaa

SEQ ID NO: 44438 - DNA, 110 bp, synthetic construct
  source 1..110: mol_type = other DNA
tccttttagaaatgtaaattaaccccatcacacgctctcatcattagttgagtgattgctttagttagaagagtaagtggatgtctgagtgtaagggtaactctgcagct

SEQ ID NO: 44439 - DNA, 110 bp, synthetic construct
  source 1..110: mol_type = other DNA
ttgctttagttagaagagtaagtggatgtctgagtgtaagggtaactctgcagctagactcttaggatgtatgaattctgtttatttctactcagtgatttctgtatccc

SEQ ID NO: 44440 - DNA, 110 bp, synthetic construct
  source 1..110: mol_type = other DNA
gaacacagagtaggtatagtataattctgaagggcctcaggatattgggggatggtaaatgagcattggcttcaacttaaaagtcaccagctgcattagccccttgcaag

SEQ ID NO: 44441 - DNA, 110 bp, synthetic construct
  source 1..110: mol_type = other DNA
cactggattttacagcacataggtcatttatttaggggctggttcaggggttctgtaggatctaattacacttttcacacacacccccacctgagttcttcatgatctgt

SEQ ID NO: 44442 - DNA, 110 bp, synthetic construct
  source 1..110: mol_type = other DNA
taggatctaattacacttttcacacacacccccacctgagttcttcatgatctgtctgacgtgttttcccctcctctgtcaccttgttctggccctgctggctgtccttt

SEQ ID NO: 44443 - DNA, 110 bp, synthetic construct
  source 1..110: mol_type = other DNA
gagtctagagtaaaaaattagggttccataagaacacaagagggtattttcctgactgcctcctgccctgcacctgttattagaggacttccaggccctcttaaaagccc

SEQ ID NO: 44444 - DNA, 110 bp, synthetic construct
  source 1..110: mol_type = other DNA
ctgcctcctgccctgcacctgttattagaggacttccaggccctcttaaaagcccccagagccgactcatgtctgcttatgaacatgtgcacctcagtgataacttcgca

SEQ ID NO: 44445 - DNA, 110 bp, synthetic construct
  source 1..110: mol_type = other DNA
cccacatatcaaaatttgtacaagactgctaaagcagtacttagaaatttataacaacaaatgtctgttttagaaaaggcgatggcctcaaatcaacgacctcagcttct

SEQ ID NO: 44446 - DNA, 110 bp, synthetic construct
  source 1..110: mol_type = other DNA
aacaaatgtctgttttagaaaaggcgatggcctcaaatcaacgacctcagcttctactttaagaaagtggggggtagggagaacaaaagaaacaaagcaagcagaataaa

SEQ ID NO: 44447 - DNA, 110 bp, synthetic construct
  source 1..110: mol_type = other DNA
atgaattcttaggagagtgctaatttcatttaggaatacaagatgcactgtaatgatgacctcttttagatcatgagctcctgaaattgtgatagtagaggtcactgtca

SEQ ID NO: 44448 - DNA, 110 bp, synthetic construct
  source 1..110: mol_type = other DNA
gcccctgatcatgggttatgtggatccctagtattttatctttagtgctgttgtgtcactacattgtaattggctggtaatccgtctgtctctcctagattttaagcccc

SEQ ID NO: 44449 - DNA, 110 bp, synthetic construct
  source 1..110: mol_type = other DNA
tcactacattgtaattggctggtaatccgtctgtctctcctagattttaagccccacaagactgggatacggatattttgttcattattcagtcagcccccatatttagc

SEQ ID NO: 44450 - DNA, 110 bp, synthetic construct
  source 1..110: mol_type = other DNA
gactggatctataaagccctgtgcctcatacatgaaaatgatttttttgaccccatcatctgcagaacagtggtttttgtgtaaagcatggagctaacttgtggttctgg

SEQ ID NO: 44451 - DNA, 110 bp, synthetic construct
  source 1..110: mol_type = other DNA
tcatctgcagaacagtggtttttgtgtaaagcatggagctaacttgtggttctggcctcatcagcgccaggctgtcagcaagtgagctgacccacccgcgtcgataccac

SEQ ID NO: 44452 - DNA, 110 bp, synthetic construct
  source 1..110: mol_type = other DNA
atgtcctgggctgaaatttcatctgcaggcataactgcaaagatatgcgtacaactcctgtcccagtcatctatgcagacaatttgggcatttttgccattgtcaaccag

SEQ ID NO: 44453 - DNA, 110 bp, synthetic construct
  source 1..110: mol_type = other DNA
tgcaatgtgtcttaatactcccgttctctatttctagccactttcctctcagtcctggtccctccagtctttccactccttccgtgaatacagctactgcctgctggtcc

SEQ ID NO: 44454 - DNA, 110 bp, synthetic construct
  source 1..110: mol_type = other DNA
tggtccctccagtctttccactccttccgtgaatacagctactgcctgctggtccacagcaggatcagcaccagagccctgaactcccacccttcctctagtctcctgtc

SEQ ID NO: 44455 - DNA, 110 bp, synthetic construct
  source 1..110: mol_type = other DNA
aatgacagctgagcaatcctacgtaacaactccgtggaagttacctaagcgatgtgacaactatggcagtgctgtgacgctgtcctcatgtcagctcaaccccagagaga

SEQ ID NO: 44456 - DNA, 110 bp, synthetic construct
  source 1..110: mol_type = other DNA
gacaactatggcagtgctgtgacgctgtcctcatgtcagctcaaccccagagagaggcctcaagttcatgtatcacagccagaggcgtagcattccatccggtctgcttc

SEQ ID NO: 44457 - DNA, 110 bp, synthetic construct
  source 1..110: mol_type = other DNA
gatcccagtactccctagagaaactcagtcaggggaggagagggacaggtggataaacaaatgcaagatgctgagatggccacaagtggggaagcagtggggtacgctgc

SEQ ID NO: 44458 - DNA, 110 bp, synthetic construct
  source 1..110: mol_type = other DNA
attttagacaagtttcttaacctctctgatctttatttcattgccgataaagtagagctaatagtatttcttagctcatcatgttgtgaggattcaatgccatgtaggta

SEQ ID NO: 44459 - DNA, 110 bp, synthetic construct
  source 1..110: mol_type = other DNA
aaaaggggcttggccagaactgtggttcgacagataatcataatagcgtcaatgagagggcacggtcctcacccacagcctttgcggcttcagttcttccagagctccag

SEQ ID NO: 44460 - DNA, 110 bp, synthetic construct
  source 1..110: mol_type = other DNA
gagggcacggtcctcacccacagcctttgcggcttcagttcttccagagctccaggccggctgggtgtcaatgcctctggcgttggccccccttcaaatgagaggacaga

SEQ ID NO: 44461 - DNA, 110 bp, synthetic construct
  source 1..110: mol_type = other DNA
acagtgagttttttcttcgggaatttttttcttacatctttggtatttacaactgttccgtcatgtcagaccccggtgaaaggtagtagcagacttagcagaaaacagtt

SEQ ID NO: 44462 - DNA, 110 bp, synthetic construct
  source 1..110: mol_type = other DNA
gctgggcgtgtggcccaaaaactcagctagccccccgggccccgggggccaggcattcctgtgcctccctctccagaggctggattgattctgtgtggctccctgaagct

SEQ ID NO: 44463 - DNA, 110 bp, synthetic construct
  source 1..110: mol_type = other DNA
catatagtttaatgacttttccatggtacacacacccaggtgaccagactaggagctgggatgtttccagtcccttcaaagacccctctcgtaggcactgctgttttcag

SEQ ID NO: 44464 - DNA, 110 bp, synthetic construct; identical to SEQ ID NO: 44463
  source 1..110: mol_type = other DNA

SEQ ID NO: 44465 - DNA, 110 bp, synthetic construct
  source 1..110: mol_type = other DNA
atgtgccagagttggcaagcaagtgtgggtggaatctctgctctgctctcacctcccggatctggcatccaagggcgtgacatggctgtacgtggtggccttggtgcggg

SEQ ID NO: 44466 - DNA, 110 bp, synthetic construct
  source 1..110: mol_type = other DNA
gatgctgcagccactattcctatgtggtcgtgaatactcgaaatgtggccagtcagaactgagatgagctggaggtgtgaaatacacaccagattttgaagacttggaat

SEQ ID NO: 44467 - DNA, 110 bp, synthetic construct
  source 1..110: mol_type = other DNA
agcccaaaccactccccgagcttcagctgctgctttatctgccctgataatagaccgaaaccatattctgctgcctgtggcgcgatcagtgcccggcctctgcgggcctg

SEQ ID NO: 44468 - DNA, 110 bp, synthetic construct
  source 1..110: mol_type = other DNA
cgaaaccatattctgctgcctgtggcgcgatcagtgcccggcctctgcgggcctgccagggtggccgcagcccagggtagcacctggcaccgcaccagctgacacaggcc

SEQ ID NO: 44469 - DNA, 110 bp, synthetic construct
  source 1..110: mol_type = other DNA
aagcagccattctcttaagagtctgtagaaacttctgtgaactagcctcctctgcccacctttgaagatctagctccttgtctaccccttcgctcattcctgccatagac

SEQ ID NO: 44470 - DNA, 110 bp, synthetic construct
  source 1..110: mol_type = other DNA
ccacctttgaagatctagctccttgtctaccccttcgctcattcctgccatagacagaagtgtttctcttctacaccagggtgggatgctccaccctcatcccacctact

SEQ ID NO: 44471 - DNA, 110 bp, synthetic construct
  source 1..110: mol_type = other DNA
acaagaagcccactccgcgtggcaaggcgggcagcccaggtgtctgggcttataaaagggacgggcagtgagggagaagtcagactgcttctctccttcctctggcttca

SEQ ID NO: 44472 - DNA, 110 bp, synthetic construct
  source 1..110: mol_type = other DNA
aagggacgggcagtgagggagaagtcagactgcttctctccttcctctggcttcatctcctccagcccagaatcaccatgacctgtggatcgtcttgccttagctcccgt

SEQ ID NO: 44473 - DNA, 110 bp, synthetic construct
  source 1..110: mol_type = other DNA
cgcgggttcaatctctggcccagctcagtgggttaaggatccgacactgccgtcgctgtggcataggttgcggccacggctcggattcagtccctggcctgggagcttcc

SEQ ID NO: 44474 - DNA, 110 bp, synthetic construct
  source 1..110: mol_type = other DNA
ctgtggcataggttgcggccacggctcggattcagtccctggcctgggagcttccacatgctgcaggtgtggccagaaataagtaaataaataaatgaaaggatagttaa

SEQ ID NO: 44475 - DNA, 110 bp, synthetic construct
  source 1..110: mol_type = other DNA
ccggccccgcccggtgcagggatgtgctgggtgaagctgacatcactgcaggtagtggctgcttggggagactgtccacgtggtgcttcggattgaaagggctgggctgg

SEQ ID NO: 44476 - DNA, 110 bp, synthetic construct
  source 1..110: mol_type = other DNA
cagggtgaaatgatgctgcttgtaggcgtgcaggtcactttgcttcaacaaaccttgctgatgtgagcccggcatctaggttaggtgttgggaccttctatcggacttgg

SEQ ID NO: 44477 - DNA, 110 bp, synthetic construct
  source 1..110: mol_type = other DNA
tgctgatgtgagcccggcatctaggttaggtgttgggaccttctatcggacttggtaaccctaaattctcctcctctgctcacagttccatttctttctttctttttttt

SEQ ID NO: 44478 - DNA, 110 bp, synthetic construct
  source 1..110: mol_type = other DNA
tgacaactgtcactcccagaaggggccgcctgggcccagagtcaggagggagcaccttctgactcaccttcttgagcaccacgaactcattctctgccaccgtgcgcctg

SEQ ID NO: 44479 - DNA, 110 bp, synthetic construct
  source 1..110: mol_type = other DNA
cttctgactcaccttcttgagcaccacgaactcattctctgccaccgtgcgcctgttgatttcttcttcgtacctgtgggaaggatgaagcggatgggtgctgggggtgg

SEQ ID NO: 44480 - DNA, 110 bp, synthetic construct; identical to SEQ ID NO: 44478
  source 1..110: mol_type = other DNA

SEQ ID NO: 44481 - DNA, 110 bp, synthetic construct; identical to SEQ ID NO: 44479
  source 1..110: mol_type = other DNA

SEQ ID NO: 44482 - DNA, 110 bp, synthetic construct
  source 1..110: mol_type = other DNA
tttgattgatacagctcagatgttatgtggaagcaatagctttgtggcaaaagtctgtacctatcacagagagggatctggcatttcacctgcctcccatctagcctctg

SEQ ID NO: 44483 - DNA, 110 bp, synthetic construct
  source 1..110: mol_type = other DNA
tgtacctatcacagagagggatctggcatttcacctgcctcccatctagcctctgttgggtcagtgcgatgttttcctggtggcgagtgggcacggtgggggatgtgtct

SEQ ID NO: 44484 - DNA, 110 bp, synthetic construct
  source 1..110: mol_type = other DNA
atggctgcagtgtggctcacaattcagtcctagctttctttgcttcacaactacactctttcaatcggcctttcttctgattctttactcagccttgccttcattttgtc

SEQ ID NO: 44485 - DNA, 110 bp, synthetic construct
  source 1..110: mol_type = other DNA
cattccctagtatttctcaattttcacacacacattgtccacccatttttcacagagaatgtagtgatgggttgcctatctggatacgataccttcatggctttatccaa

SEQ ID NO: 44486 - DNA, 110 bp, synthetic construct
  source 1..110: mol_type = other DNA
agaatgtagtgatgggttgcctatctggatacgataccttcatggctttatccaaagctgcaggtagtttctgacaattctgtcttccagtgggatggggctctactttg

SEQ ID NO: 44487 - DNA, 110 bp, synthetic construct
  source 1..110: mol_type = other DNA
gtgccttaagcgagcataaccacaggcgacagtttctctgctacccacgcaccttcttcagcatcacaaattcattctcggctgtggtacgcttgttgatttcatcttca

SEQ ID NO: 44488 - DNA, 110 bp, synthetic construct
  source 1..110: mol_type = other DNA
cttcagcatcacaaattcattctcggctgtggtacgcttgttgatttcatcttcatacctggtggtaaaagggatgggaagtgcttatcagagaatgaagcctggggtct

SEQ ID NO: 44489 - DNA, 110 bp, synthetic construct
  source 1..110: mol_type = other DNA
ttttcatgcccccaatagacctctggtgcttcatggtttgcatctaatctccttttgcagggaagctgcaactgggctcagcagtccaacagtccccttccgtgctcatg

SEQ ID NO: 44490 - DNA, 110 bp, synthetic construct
  source 1..110: mol_type = other DNA
tgcagggaagctgcaactgggctcagcagtccaacagtccccttccgtgctcatgtcgccagcactgccatctttcatcttttacctcccaaatggcccctcgacccaga

SEQ ID NO: 44491 - DNA, 110 bp, synthetic construct
  source 1..110: mol_type = other DNA
tcatttggggacaccaagatagatgtcactcttgctttgatctgtaaagctcctagcatccaaatgctagacattccccaggctcttaaagttcctgatgattaagcggc

SEQ ID NO: 44492 - DNA, 110 bp, synthetic construct
  source 1..110: mol_type = other DNA
agggacttgatttgctccctttcttgagactttattttttgaatctcagggtcaacttccacattgagaggttgcagaaggctctggttgacgatgacttcgtgtatgcc

SEQ ID NO: 44493 - DNA, 110 bp, synthetic construct
  source 1..110: mol_type = other DNA
ttgccctccttaccttcaaaacctagctgcctgcctcattcccctctggccccaattcttgcccaaagcatcgcactaatctgagaaatcaacttacagcaactgagtcc

SEQ ID NO: 44494 - DNA, 110 bp, synthetic construct
  source 1..110: mol_type = other DNA
cctaaccacacgtccaatccgttcacaagtcctcttatttctccagctcagcatccagtttcttctcttcatactcttaaccacagcttatttttttaatttgttttttt

SEQ ID NO: 44495 - DNA, 110 bp, synthetic construct
  source 1..110: mol_type = other DNA
ggccttactgcagcatagaggatcctcaggaagttgatctcatcattaaggccatccaccttggcctccaactccaccttgttcatgtaggcagcatccacatcctgtgg

SEQ ID NO: 44496 - DNA, 110 bp, synthetic construct
  source 1..110: mol_type = other DNA
aaaatatgacaagtgagagcagccatcttgttggatcagcccttaggagactttagaggaacaggtgaagatgtgtcaacagtgcttaacctttgccttcactttcaaca

SEQ ID NO: 44497 - DNA, 110 bp, synthetic construct
  source 1..110: mol_type = other DNA
gaggaacaggtgaagatgtgtcaacagtgcttaacctttgccttcactttcaacagcaggatgttgttgagaggagctaacctttccccaactgccattgcggagacttg

SEQ ID NO: 44498 - DNA, 110 bp, synthetic construct
  source 1..110: mol_type = other DNA
ggcccctcgagacagggaaggggtccctcacaggtgagcaagctgctgtctctttggcctctctgtgcccaggtaatgaacccccaaatccacggggagtccattcccga

SEQ ID NO: 44499 - DNA, 110 bp, synthetic construct
  source 1..110: mol_type = other DNA
tgttcgaatctcggacctgccacttctcagtaaggccagtaacatggctgggcctgcctttccttattggaaggtagtgaataggagctgcagccacactggatccttaa

SEQ ID NO: 44500 - DNA, 110 bp, synthetic construct
  source 1..110: mol_type = other DNA
ctcagtaaggccagtaacatggctgggcctgcctttccttattggaaggtagtgaataggagctgcagccacactggatccttaacccacagagcgaggccaaggatcaa

SEQ ID NO: 44501 - DNA, 110 bp, synthetic construct
  source 1..110: mol_type = other DNA
tcctctctgctgagaccaaaccagaaggtgggcagtcaaaccggaagaggccatcattggatggacagtccagcctggctcggcctcgcaagtccttccccttaattctg

SEQ ID NO: 44502 - DNA, 110 bp, synthetic construct
  source 1..110: mol_type = other DNA
aatgagaattaattttcaggttgagaattgtcttcagccatccttggaataacacggagtagcaggcaaacataaattggggaatcaaacgagttgctctcatctcagct

SEQ ID NO: 44503 - DNA, 110 bp, synthetic construct
  source 1..110: mol_type = other DNA
ggagtagcaggcaaacataaattggggaatcaaacgagttgctctcatctcagctccatctctaaattgctgtgtgaccttggacaggtcacgtcccctctcggagctac

SEQ ID NO: 44504 - DNA, 110 bp, synthetic construct
  source 1..110: mol_type = other DNA
accatgtccaccctgcagattgaggagagcacctcagtggtcacctcacagtcggctgagattggagctgctgagatgacactcacagagctgagacggaccgtccagtc

SEQ ID NO: 44505 - DNA, 110 bp, synthetic construct
  source 1..110: mol_type = other DNA
attgctcttgtctgttacagaagttcagttctgcaagcaagtatgctgctctctccattgatggtgaagatgaaaatgagggagattacaccgaatagacctctgcgttg

SEQ ID NO: 44506 - DNA, 110 bp, synthetic construct
  source 1..110: mol_type = other DNA
cagttctgcaagcaagtatgctgctctctccattgatggtgaagatgaaaatgagggagattacaccgaatagacctctgcgttgtgtgctttctcctagtctctctcca

SEQ ID NO: 44507 - DNA, 110 bp, synthetic construct
  source 1..110: mol_type = other DNA
tcacaaactgacatttgttgtctcggttctggaagctagaagtctaaaatcaaagtgtgagcagggccacactcccactgagactctgggtagaatcctcccttgcctct

SEQ ID NO: 44508 - DNA, 110 bp, synthetic construct
  source 1..110: mol_type = other DNA
tctgcagagggctatgccaatgggatacaaggttcttagggcagaagcccagaaaggctcaggaattaaaagcactagctaccgtggaagacaggagggagaggcacagc

SEQ ID NO: 44509 - DNA, 110 bp, synthetic construct
  source 1..110: mol_type = other DNA
ggctcaggaattaaaagcactagctaccgtggaagacaggagggagaggcacagctaaaaacatggaaatcagggagttcccatcgtggcgcagcagaaacgaatccgac

SEQ ID NO: 44510 - DNA, 110 bp, synthetic construct
  source 1..110: mol_type = other DNA
cctccatatgctgcaggtgtggccataaaaagcaataaataaataaataaagtgtacaattcagtggtttttagtatagtcacaaagttgtacaccaatcacactattta

SEQ ID NO: 44511 - DNA, 110 bp, synthetic construct; identical to SEQ ID NO: 44510
  source 1..110: mol_type = other DNA

SEQ ID NO: 44512 - DNA, 110 bp, synthetic construct
  source 1..110: mol_type = other DNA
ctgcaggaaggacattagaacatgagctaaggcccaccctggggggctctcttcctgccaatagcccaggctctccctcctgcattcggatgccctccttgtcatcagca

SEQ ID NO: 44513 - DNA, 110 bp, synthetic construct
  source 1..110: mol_type = other DNA
atgggtagcaccccaaaaacaaggggaaagagccctgattagtcaactccaggctgtcagtccgcccccccccttccccctctgaaatctgaaaggtcccaattaagtca

SEQ ID NO: 44514 - DNA, 110 bp, synthetic construct
  source 1..110: mol_type = other DNA
gtcagtccgcccccccccttccccctctgaaatctgaaaggtcccaattaagtcaggcctgcctggtgggtaattagaaccagaagtggccaggccacagggaggggggt

SEQ ID NO: 44515 - DNA, 110 bp, synthetic construct
  source 1..110: mol_type = other DNA
gagaaaacattaggattttataaaaaaataataagccgtgctaatatttagtatgttagctagtactatatacaagccgttagtaaggaagtgacacacattagggcact

SEQ ID NO: 44516 - DNA, 110 bp, synthetic construct
  source 1..110: mol_type = other DNA
tcccttgaagcccatcaccctggccttgccctccacctagccagttgcccccagggtgcatgtcccaccaaggcgtgggtgcattgcctgggcctggtgagatgcctgcg

SEQ ID NO: 44517 - DNA, 110 bp, synthetic construct
  source 1..110: mol_type = other DNA
gtgcatgtcccaccaaggcgtgggtgcattgcctgggcctggtgagatgcctgcgtggatgcctgccttgtaccaggagccataggggtgtgccatgtccagggaggtgt

SEQ ID NO: 44518 - DNA, 110 bp, synthetic construct
  source 1..110: mol_type = other DNA
tcatggattctagttagatttgttaccgctgagccacaatgggaacccttcctgtgtcatgttttatcttattttatttatttattttagtcttttcagggccacacctt

SEQ ID NO: 44519 - DNA, 110 bp, synthetic construct; identical to SEQ ID NO: 44518
  source 1..110: mol_type = other DNA

SEQ ID NO: 44520 - DNA, 110 bp, synthetic construct
  source 1..110: mol_type = other DNA
agctttcaaaaaattatttgctgaaaactgtggtaaaataattgtggcagccaatctttttaaatcttcctagatcgccctcctaaaaatagagtatgttgataccaagt

SEQ ID NO: 44521 - DNA, 110 bp, synthetic construct
  source 1..110: mol_type = other DNA
ttctgcaaaagtcaacaactctagttaaattggagtgggctgcactcagaccctgaggcctgctgtgaagctgtcactgtctgctgtggtagatgggaagagcattaatg

SEQ ID NO: 44522 - DNA, 110 bp, synthetic construct
  source 1..110: mol_type = other DNA
ccctagttccttctttctcccagcccagcagggtgaggtgggactacacgtaacaagccactgggcaagtccagagcggtgggtactagaatttagggtcctcttcctgg

SEQ ID NO: 44523 - DNA, 110 bp, synthetic construct
  source 1..110: mol_type = other DNA
cccataccctctctaaagtgatgccttttggccattaacacaccactattaagtcttcccaaactcactcacttaattttctccatatccacttttttcctgctatcatg

SEQ ID NO: 44524 - DNA, 110 bp, synthetic construct
  source 1..110: mol_type = other DNA
aaagcaggaagagtatttgaaaaatgacaaacagtccactttggggaagactgtatgggaataataaaaataaagctgaaaaggttgaggtcagactgtttttgaattgg

SEQ ID NO: 44525 - DNA, 110 bp, synthetic construct
  source 1..110: mol_type = other DNA
tgggaataataaaaataaagctgaaaaggttgaggtcagactgtttttgaattggaacatggcaaaaccagtcttatgcttaagggagattaacctggcagtggtgagaa

SEQ ID NO: 44526 - DNA, 110 bp, synthetic construct
  source 1..110: mol_type = other DNA
tgtgaataatctgaaaatccaaacgtaatttcctggggacttggagcatggtctgagaacacgtggttacaaacacagatggatcctgtctgtcaaacacagagactggc

SEQ ID NO: 44527 - DNA, 110 bp, synthetic construct
  source 1..110: mol_type = other DNA
tctctctctctccctccctccccgagtcgactccagttctccctctccgagttcggcctctaaccctcgggtcgtctttttgccgcagtctccgtgtttcttccacaggg

SEQ ID NO: 44528 - DNA, 110 bp, synthetic construct
  source 1..110: mol_type = other DNA
actttattcctcaggccactgtcccaagctctttcacaacatctgggagatgccgggagaggtggtatttgaggctgatgaagagaatggactccctgaagggatgttga

SEQ ID NO: 44529 - DNA, 110 bp, synthetic construct
  source 1..110: mol_type = other DNA
cagactttgaagtgagccagatctgggttcaaatcctagctcctcaacagtctagctttttgaccttgggcaagttactttaccctttgagcttgggtttccaaatctgg

SEQ ID NO: 44530 - DNA, 110 bp, synthetic construct
  source 1..110: mol_type = other DNA
ctttttgaccttgggcaagttactttaccctttgagcttgggtttccaaatctggattgagtaatagaccatctcacagggtgttgggagaaagagtaaagcatgcacat

SEQ ID NO: 44531 - DNA, 110 bp, synthetic construct
  source 1..110: mol_type = other DNA
ggatgacatgcagattcgtgaaggaagtcgtgtggtccctttatctgaggagctagaagaattgggtcaataaccaagtattggcatgattttggcggcactggaacaca

SEQ ID NO: 44532 - DNA, 110 bp, synthetic construct
  source 1..110: mol_type = other DNA
gaagaattgggtcaataaccaagtattggcatgattttggcggcactggaacacatgaggagacctccaagtttctgtcttcaggtctaagattgcagaacaggacctgg

SEQ ID NO: 44533 - DNA, 110 bp, synthetic construct; identical to SEQ ID NO: 44531
  source 1..110: mol_type = other DNA

SEQ ID NO: 44534 - DNA, 110 bp, synthetic construct; identical to SEQ ID NO: 44532
  source 1..110: mol_type = other DNA

SEQ ID NO: 44535 - DNA, 110 bp, synthetic construct
  source 1..110: mol_type = other DNA
tagcacaatacttggcacataataaggattcgggaaatcttagccattaatatgtttatgaggagagaaacttgagctactggagaggaggagaacatttttgacatgaa

SEQ ID NO: 44536 - DNA, 110 bp, synthetic construct
  source 1..110: mol_type = other DNA
ttatgaggagagaaacttgagctactggagaggaggagaacatttttgacatgaaggcctaagattttacatgagtatgtcacatatgaaagagaagaagcagggaacct

SEQ ID NO: 44537 - DNA, 110 bp, synthetic construct
  source 1..110: mol_type = other DNA
cccattcttgcctcatcctttacacaggcaggtacacgacccttctgagggtgcggccaggtgcaggacctggagagctcctactttcctcccagtccctcctctgctcc

SEQ ID NO: 44538 - DNA, 110 bp, synthetic construct
  source 1..110: mol_type = other DNA
gccaggtgcaggacctggagagctcctactttcctcccagtccctcctctgctccctgtccctggcactccttagttaggcaagatttcccagttaagattttctgtgca

SEQ ID NO: 44539 - DNA, 110 bp, synthetic construct
  source 1..110: mol_type = other DNA
cgaacaaagatctttgcctgaagaagcagtgtaacactagacagcactataaagtctgggaatgtaagaacgcaggactccgttcagcttcctccatttggaatcctgtc

SEQ ID NO: 44540 - DNA, 110 bp, synthetic construct
  source 1..110: mol_type = other DNA
ctgggaatgtaagaacgcaggactccgttcagcttcctccatttggaatcctgtcccttgaacttcctgctgaaatcccaaccctgactccacagcagtgttcaaggaag

SEQ ID NO: 44541 - DNA, 110 bp, synthetic construct
  source 1..110: mol_type = other DNA
gtcaactcttgttctgtgtcatttcacccgcgtccgggtccctggctttcacgcaaagtggtcctgaatatgggattggatcaggcgtcgttaatagggggactcctgcg

SEQ ID NO: 44542 - DNA, 110 bp, synthetic construct
  source 1..110: mol_type = other DNA
aagtggtcctgaatatgggattggatcaggcgtcgttaatagggggactcctgcggcctgagagaggcggcggattggaagcgcaggctgcgggcagccgggaacagctg

SEQ ID NO: 44543 - DNA, 110 bp, synthetic construct
  source 1..110: mol_type = other DNA
tcatgacaactcactgtgacgtcatacatgctgcgttcttgaattttacgattctcctaagcctccaaaaatgggtccaagcagtgccagggcgtgcgggtataagagaa

SEQ ID NO: 44544 - DNA, 110 bp, synthetic construct
  source 1..110: mol_type = other DNA
cctaagcctccaaaaatgggtccaagcagtgccagggcgtgcgggtataagagaagccaggaagttggggatcctctggccttgttctggaggttaaaaatagtgtgaat

SEQ ID NO: 44545 - DNA, 110 bp, synthetic construct
  source 1..110: mol_type = other DNA
ggaaaattcctgggttatagaacaatagagatttcttggcatagtcttgtctttcaattatcctgtgaaaaatcagagctcccgggggctcaagatcctctgacagcact

SEQ ID NO: 44546 - DNA, 110 bp, synthetic construct
  source 1..110: mol_type = other DNA
aattatcctgtgaaaaatcagagctcccgggggctcaagatcctctgacagcactcatcatagagatgaggaaactagacccagaaaaataaacacagggtttttagcat

SEQ ID NO: 44547 - DNA, 110 bp, synthetic construct
  source 1..110: mol_type = other DNA
tttgtcgctccggtccaggaggcgcgtggtcatctgcttgtccagaacgaccctgggggtcttgaacgcgtcctgtgccggcagcaggggcactcatttcgtcagcagcg

SEQ ID NO: 44548 - DNA, 110 bp, synthetic construct
  source 1..110: mol_type = other DNA
ggggtcttgaacgcgtcctgtgccggcagcaggggcactcatttcgtcagcagcggcagcagccccagctcattcagtctctccttggccactgcctcccagcccttgtt

SEQ ID NO: 44549 - DNA, 110 bp, synthetic construct
  source 1..110: mol_type = other DNA
tgggagcttgtgcgggtgggacctagggtaggtgatggcagaggctggtatcctaccctcctcaagcaagttcctcttacttcacatcaaaagacattttcttagacggc

SEQ ID NO: 44550 - DNA, 110 bp, synthetic construct
  source 1..110: mol_type = other DNA
ccctcctcaagcaagttcctcttacttcacatcaaaagacattttcttagacggcacagaccagggaaggtcatgtggtccaaacctcccctcccccggtgggactcctc

SEQ ID NO: 44551 - DNA, 110 bp, synthetic construct
  source 1..110: mol_type = other DNA
cctcagttaagacagggactgtgtttgctgctatttcccagctcccaagttcacggtcctggcacccaggagatgctcagaaattctgaatgaaggagggagagaaggga

SEQ ID NO: 44552 - DNA, 110 bp, synthetic construct
  source 1..110: mol_type = other DNA
gggtaaatttctagctactggattattcaactgaatgccttgcccagaaggaatgaaatatgtaattaaactttgaaacaaccagagtttgggagaaaggcaggtagatc

SEQ ID NO: 44553 - DNA, 110 bp, synthetic construct
  source 1..110: mol_type = other DNA
cattaatcctctggaactggatggaagttttcctgtgtgtgtctgtgtgtgtgaacgtgccatatgtgatttctctgaggagagcaagactcagttgcttcttctagagt

SEQ ID NO: 44554 - DNA, 110 bp, synthetic construct
  source 1..110: mol_type = other DNA
tgtctgtggaagtgatggagcgctggattgtcagtaagttttgtgggatgaaatgggaatagatagagctgcatgttacgtgaatatcaagttctaaaagccttcctctg

SEQ ID NO: 44555 - DNA, 110 bp, synthetic construct
  source 1..110: mol_type = other DNA
ggaatagatagagctgcatgttacgtgaatatcaagttctaaaagccttcctctgcactgttttacctacctgtagtcgggtttcttctttgtcacgggtgcctcaactc

SEQ ID NO: 44556 - DNA, 110 bp, synthetic construct
  source 1..110: mol_type = other DNA
ggaggccagactcaacaggtagcactgcttgtcctctgtttgagtggtatggtagttctcaaagctgggttccattagagtcgtcttggtggtcattctgatgcagtcag

SEQ ID NO: 44557 - DNA, 110 bp, synthetic construct
  source 1..110: mol_type = other DNA
ttctcaaagctgggttccattagagtcgtcttggtggtcattctgatgcagtcagtctgacacaggtctcaaacatctctattaaaaacaaataaacccaaagaacccca

SEQ ID NO: 44558 - DNA, 110 bp, synthetic construct
  source 1..110: mol_type = other DNA
cagtctgggatgaaatcaactatgaactggtttctgctctcaggttcccagcaggctttatttaggcctaaaaggaactgaagaatgaatatcagaaagaaattctgacc

SEQ ID NO: 44559 - DNA, 110 bp, synthetic construct
  source 1..110: mol_type = other DNA
ccctctttgcatgctgcccttttgtctcttccagagctcaccgtttacctccacgactgattttccctctgggagtcttggcgtccatcacctcctgttaaagtgatttc

SEQ ID NO: 44560 - DNA, 110 bp, synthetic construct
  source 1..110: mol_type = other DNA
actgattttccctctgggagtcttggcgtccatcacctcctgttaaagtgatttctcatgtgcaaatttgtggctgaacacacgcagccttcacgagcgggctcctgtct

SEQ ID NO: 44561 - DNA, 110 bp, synthetic construct
  source 1..110: mol_type = other DNA
aatattttctagggcctgggtggaagctggtagcttcccctgcagctgttcagagcctgggcttctactggctatgttttcacttacagcatctgcatcaaaagcttatt

SEQ ID NO: 44562 - DNA, 110 bp, synthetic construct
  source 1..110: mol_type = other DNA
gactacctatggaaaataaacatatatttctttgtatggagtgaggtgggtggcagtattcatttttgtttatatgactaccctattttaaaaattaatcttttcccagc

SEQ ID NO: 44563 - DNA, 110 bp, synthetic construct
  source 1..110: mol_type = other DNA
gcttgagtacggtggtggaagacctcctggactttaactggggcacacagggatgagtagaggcacagagggaattccactgtaggttgcaccaggtttcagagcctgaa

SEQ ID NO: 44564 - DNA, 110 bp, synthetic construct
  source 1..110: mol_type = other DNA
agtagaggcacagagggaattccactgtaggttgcaccaggtttcagagcctgaaagtgggatttcttcttcttcctttagcttgagccctttgagggtattctagtagc

SEQ ID NO: 44565 - DNA, 110 bp, synthetic construct
  source 1..110: mol_type = other DNA
gtgcctacctggaactagtcttgttggtcccaccagtcatgctgctagaagccaaactgcagccaagatcccgtagctgtccaagccgggctgtctccaggaaactcctg

SEQ ID NO: 44566 - DNA, 110 bp, synthetic construct
  source 1..110: mol_type = other DNA
actgcagccaagatcccgtagctgtccaagccgggctgtctccaggaaactcctgcagggatcaaagctgaaatcacactaatctggtaagcagtctgtaccttggttgc

SEQ ID NO: 44567 - DNA, 110 bp, synthetic construct
  source 1..110: mol_type = other DNA
tgactcttctgaacatatcctggacaacggggaagcagataagaatgccatcctgccaggtgctccagagaggccactgttaatcattttactttgtgtgcctcctggag

SEQ ID NO: 44568 - DNA, 110 bp, synthetic construct
  source 1..110: mol_type = other DNA
aacagtttgaggaaggagtcactgagagggagctgaggagggcctgtatcaggccttcctaagaggtagaagaaagacccaaggagggtataaatcccaggggtcataga

SEQ ID NO: 44569 - DNA, 110 bp, synthetic construct
  source 1..110: mol_type = other DNA
gagaaaactgggtccagatgttgtgcatgacttcacatgatttatgacagagctaatcaaagaaatcatgaaagacagtgagaatatgggaaaaaaggtggtggtaaagg

SEQ ID NO: 44570 - DNA, 110 bp, synthetic construct
  source 1..110: mol_type = other DNA
atcaaagaaatcatgaaagacagtgagaatatgggaaaaaaggtggtggtaaagggtttctggatatggatcttggagaaattcaagacctaataaataccacaccagag

SEQ ID NO: 44571 - DNA, 110 bp, synthetic construct
  source 1..110: mol_type = other DNA
cttctgggtgactactattcatctaggaaacagtggacatagactttagctctctgtgccccatttttcccatttttaaaatggagaacatataaatccctacctcacag

SEQ ID NO: 44572 - DNA, 110 bp, synthetic construct
  source 1..110: mol_type = other DNA
gacatagactttagctctctgtgccccatttttcccatttttaaaatggagaacatataaatccctacctcacaggatatcataacgcttgtatggatgacatctgtaat

SEQ ID NO: 44573 - DNA, 110 bp, synthetic construct
  source 1..110: mol_type = other DNA
tctaatgctttatttctaagacatggatattattcaataatttatttgtttaatatcctaaattccctcctccctaaccttcccctgatgggtggattttgaacaaagat

SEQ ID NO: 44574 - DNA, 110 bp, synthetic construct; identical to SEQ ID NO: 44573
  source 1..110: mol_type = other DNA

SEQ ID NO: 44575 - DNA, 110 bp, synthetic construct
  source 1..110: mol_type = other DNA
gatctgggcatgagagttgtaaaatgaggagtcactagagaagtgatcagttacactggaagcacagaaatctaacaggaggatacccatcctccttaaactttttcaaa

SEQ ID NO: 44576 - DNA, 110 bp, synthetic construct
  source 1..110: mol_type = other DNA
tgtgtttaatgtacggtattctgcgtaacacttggcacattgatagagacatgtggaaggacgccaagggagggaagcttagacagagtcttctgtgtaatgtttaccct

SEQ ID NO: 44577 - DNA, 110 bp, synthetic construct
  source 1..110: mol_type = other DNA
gaaggacgccaagggagggaagcttagacagagtcttctgtgtaatgtttacccttgttcataggagaaaacacacttatccacaacaacaaaaatagaaaagtcgtaga

SEQ ID NO: 44578 - DNA, 110 bp, synthetic construct
  source 1..110: mol_type = other DNA
tctctgtctgttacctacatgttgagtgtgactggaaatttaaccatcattattctcactctgctggattcccaccttaagacaccaatgtgcttcttcctacgcaattt

SEQ ID NO: 44579 - DNA, 110 bp, synthetic construct
  source 1..110: mol_type = other DNA
tcactctgctggattcccaccttaagacaccaatgtgcttcttcctacgcaatttctcctttttagaaatctcattcacaacctcttgtattccaaggttcctgaagagc

SEQ ID NO: 44580 - DNA, 110 bp, synthetic construct
  source 1..110: mol_type = other DNA
acccagtgctgcccatctctctgtgggttctgtgcccacatctgtgactcaagaggccgtggcatcctacacaccatcccacagacagctggcctcctccaagaatcgcc

SEQ ID NO: 44581 - DNA, 110 bp, synthetic construct
  source 1..110: mol_type = other DNA
gccgtggcatcctacacaccatcccacagacagctggcctcctccaagaatcgccctactctctcacaccctgtcccccacccccaaccacccagccagactctggagca

SEQ ID NO: 44582 - DNA, 110 bp, synthetic construct
  source 1..110: mol_type = other DNA
tgcagcagctgccccacaagcatgacatgacctgtctcgccaacttgccccagggatctgatcatcacacctctgacaggccacccaccctgaagctccatgcgctcccc

SEQ ID NO: 44583 - DNA, 110 bp, synthetic construct
  source 1..110: mol_type = other DNA
atctgatcatcacacctctgacaggccacccaccctgaagctccatgcgctccccaccccccagcatcctctgccaagctccccccagtctggctgcagcacatgtgccc

SEQ ID NO: 44584 - DNA, 110 bp, synthetic construct
  source 1..110: mol_type = other DNA
tctgatcaaactgcaacccgagctgttgtagtaggattcttaacccattacgctatagcaggaatgcctcaacaaagttatcttacttaaactaaatagtgtcagacaat

SEQ ID NO: 44585 - DNA, 110 bp, synthetic construct
  source 1..110: mol_type = other DNA
ataatggaggaagcatcgacactggacaagcatatcctgcacagagtgagggaaaaagagctaaaggattttaaagtgacagaggggcacgattccagtttgagttggag

SEQ ID NO: 44586 - DNA, 110 bp, synthetic construct
  source 1..110: mol_type = other DNA
tggacaaattgacaagagcgagagatacgctgcgttccatcccgacctggggctgccgtgcagggccctgtttccccctcctcggcccccgagagctgggtgccgctttc

SEQ ID NO: 44587 - DNA, 110 bp, synthetic construct
  source 1..110: mol_type = other DNA
cctgccccctggagcccatggtcaagaaggggaaagcagttaggatgaggtcctttacagagaagtgtggaggctctcagacctcattcctggctcttcccttgaggtgg

SEQ ID NO: 44588 - DNA, 110 bp, synthetic construct
  source 1..110: mol_type = other DNA
gcttgtcccaggcccggcgaggtaggttaaggatccagcattgttgcagctctcgcataggtcacagccgtttgtatgactgaaagaggataaaaaaggtgtgtggagga

SEQ ID NO: 44589 - DNA, 110 bp, synthetic construct
  source 1..110: mol_type = other DNA
atttcctgctctgcctgcacattcttcttcctgcccagctcctcaggccttctgcgtctgtgcctggccactggcagcactagcagtggcattagcttatgccaaataca

SEQ ID NO: 44590 - DNA, 110 bp, synthetic construct
  source 1..110: mol_type = other DNA
gccccttccttgcccccctgccccaggggtagacagcctccagagagccaatatgttcccgccccagcttcagcacacagctgccttcttagtagagcataggagtgaag

SEQ ID NO: 44591 - DNA, 110 bp, synthetic construct
  source 1..110: mol_type = other DNA
tccaagcaaaacagctaactaccatttccccttctctctccacatttaggaaaacactcaagctacttagtctgattctaaaactccaacaaggacatatgtaaaggtac

SEQ ID NO: 44592 - DNA, 110 bp, synthetic construct
  source 1..110: mol_type = other DNA
actcaagctacttagtctgattctaaaactccaacaaggacatatgtaaaggtactcagaagccttgctatgaaagtattattaaaatataccaatattggaattcctgt

SEQ ID NO: 44593 - DNA, 110 bp, synthetic construct
  source 1..110: mol_type = other DNA
caagatttctccatggcggatattttggagcgcgtggaattaaaatgagtaggtagagagcaaacgccgtcagctccgcgggaaattccagtttccccaattctcccccg

SEQ ID NO: 44594 - DNA, 110 bp, synthetic construct
  source 1..110: mol_type = other DNA
tcagggtcctggccacagcggccacagtcatagttcagttggtccaagaagtggaagaacagcatgttagccttggaatcatcgttgcccagtgcagcttcctgcctgga

SEQ ID NO: 44595 - DNA, 110 bp, synthetic construct
  source 1..110: mol_type = other DNA
cttctccaccctagcttctttcccaccacccacttgccccagagagttggcaccttgcttccagccagcagcaagtagggaaggacaacctgcacagaagtcccacagtg

SEQ ID NO: 44596 - DNA, 110 bp, synthetic construct
  source 1..110: mol_type = other DNA
tgcttccagccagcagcaagtagggaaggacaacctgcacagaagtcccacagtggagtgaagtcaccgatgccccatctggggacagactatggatccctaggcaaagc

SEQ ID NO: 44597 - DNA, 110 bp, synthetic construct
  source 1..110: mol_type = other DNA
ataaggatttcccccttttctgcattctttagggtgcccgactagctcagtcattagagcatgagagtctgttttctttagagatctagtatattgtcgctattttgtaa

SEQ ID NO: 44598 - DNA, 110 bp, synthetic construct
  source 1..110: mol_type = other DNA
taaacttgtatgtgtcttttggtacatgtgtctgcacatttatcttgggtaagcacccaggagtaaagttgctaaatcataggctatatacatttgttcaacttttatag

SEQ ID NO: 44599 - DNA, 110 bp, synthetic construct
  source 1..110: mol_type = other DNA
cccaggagtaaagttgctaaatcataggctatatacatttgttcaacttttatagatactactaaacaattttctgaagcggtcacactaactcatactcccacagcaat

SEQ ID NO: 44600 - DNA, 110 bp, synthetic construct
  source 1..110: mol_type = other DNA
gaaaccatagattgaataaatgaataaatctatcttttctgtcagtgctcatctagcttactcatccaataacagttgtgggttttgctcctaccattctcattctttaa

SEQ ID NO: 44601 - DNA, 110 bp, synthetic construct
  source 1..110: mol_type = other DNA
acttggtgctttcaccactgtggcatgggttcaatccctagtgatcccacatccagccactgaatgagcttatagattacctggcccctccatgctgtgatgaaagaatt

SEQ ID NO: 44602 - DNA, 110 bp, synthetic construct
  source 1..110: mol_type = other DNA
gctgccacaagctttgacacaggctgcagacgaattttggatcctgcggctgtcgcccacagctgcaattctgattcaacccctagaatctgtgaacctttatatgccac

SEQ ID NO: 44603 - DNA, 110 bp, synthetic construct
  source 1..110: mol_type = other DNA
aaactttttcctttcataactttatatttatagttgtggcctttcttttcactgagagaaatccctgtaatatttcttgtaatgctggtttgatggtgctaaactctttt

SEQ ID NO: 44604 - DNA, 110 bp, synthetic construct
  source 1..110: mol_type = other DNA
gtggcctttcttttcactgagagaaatccctgtaatatttcttgtaatgctggtttgatggtgctaaactcttttagcttctgcttatctgtaaaacttttttttttttt

SEQ ID NO: 44605 - DNA, 110 bp, synthetic construct
  source 1..110: mol_type = other DNA
cccaacttggatagcccattgtctcaacacagttcattgagaaaccagtattttcctcatttatttgaaatgttaccactgtcaaaacactgcactttcacatatacatt

SEQ ID NO: 44606 - DNA, 110 bp, synthetic construct
  source 1..110: mol_type = other DNA
ctcatttatttgaaatgttaccactgtcaaaacactgcactttcacatatacatttcatatttgggggttctctattttgtacttccgagatgtttatcaatttcagaga

SEQ ID NO: 44607 - DNA, 110 bp, synthetic construct
  source 1..110: mol_type = other DNA
ctacacacatcataaagtatgactaagcagaattagctgctgtcttggatccatatcattcttcttttctgtcaaagtaaataattaagagtacattttatacacaaaag

SEQ ID NO: 44608 - DNA, 110 bp, synthetic construct; identical to SEQ ID NO: 44607
  source 1..110: mol_type = other DNA

SEQ ID NO: 44609 - DNA, 110 bp, synthetic construct
  source 1..110: mol_type = other DNA
gcttggtcatctgccccaagccatccctcgccccccagcacatggccttactcttcagtcatggtgattggaagctgcctctgcgtggcatccagcacagcccggtacat

SEQ ID NO: 44610 - DNA, 110 bp, synthetic construct
  source 1..110: mol_type = other DNA
gattatctctctctcttccccaccccccagcttgcttcagctaggggagggaggttagggggtcaggtagtagctgtgcccagaaagacactatattcagtggccctcaa

SEQ ID NO: 44611 - DNA, 110 bp, synthetic construct
  source 1..110: mol_type = other DNA
ctgggcctggggctctggaagggccacgttctgagcccccctgcctgcctcccactgttgatccagaggtgaccgggcaatgcagcttcagaagctccaccaggttcctt

SEQ ID NO: 44612 - DNA, 110 bp, synthetic construct
  source 1..110: mol_type = other DNA
gaggggcccccagctgcagcttggaacacacacccctccagtcagtatcttccctctgcccgctaggatggccgggagagggtctacccggagacaatcctcaaaaactc

SEQ ID NO: 44613 - DNA, 110 bp, synthetic construct
  source 1..110: mol_type = other DNA
ggccaaagaatgaaagtagttatcaccctcattttagtacataaccagaacctgggctgatagggatgtcctatctcggtcaaaaatcagataaaataacctaattccaa

SEQ ID NO: 44614 - DNA, 110 bp, synthetic construct
  source 1..110: mol_type = other DNA
gctgatagggatgtcctatctcggtcaaaaatcagataaaataacctaattccaattggtgtttttcaattaggaaagaaggtttgaaagactatcagagaaaaggactc

SEQ ID NO: 44615 - DNA, 110 bp, synthetic construct
  source 1..110: mol_type = other DNA
accctatcccaaccccttgggtccaactcacaaagatggagacagtcatcggaaagacacaggatttaaagggatgtcctagaaacagaacaccctccaccctcaccccc

SEQ ID NO: 44616 - DNA, 110 bp, synthetic construct
  source 1..110: mol_type = other DNA
ccaggaccccggcctccatcatcccttgaagtagttacagcctggacttggggggagggcagggatctgagaaaaggttttcggagaaagaaatacattgatgccacacc

SEQ ID NO: 44617 - DNA, 110 bp, synthetic construct
  source 1..110: mol_type = other DNA
agggcagggatctgagaaaaggttttcggagaaagaaatacattgatgccacacccagcttgatggaggagcctctgagtcctaaggaaatgtctgcctttccctcccag

SEQ ID NO: 44618 - DNA, 110 bp, synthetic construct
  source 1..110: mol_type = other DNA
aaggctgctgtcttggcaaagggaagggaagctgaagtaggagtaagtggggagaaggggtgtggaagagagcagttggcccttggcatcagtcatttgaggagcgagcg

SEQ ID NO: 44619 - DNA, 110 bp, synthetic construct
  source 1..110: mol_type = other DNA
aggggtgtggaagagagcagttggcccttggcatcagtcatttgaggagcgagcgggtggaagaagaaaggcgaggggtgtaagataaaagatgataaccccatctttgt

SEQ ID NO: 44620 - DNA, 110 bp, synthetic construct
  source 1..110: mol_type = other DNA
cccttctccccagtttaaggcctatctcaaatcagctttcttaggtgtgcatttaatcgataaaggaatgtctagctgcaagcgatttagggaaatgtaggttttagtac

SEQ ID NO: 44621 - DNA, 110 bp, synthetic construct
  source 1..110: mol_type = other DNA
atcgataaaggaatgtctagctgcaagcgatttagggaaatgtaggttttagtactccaacgtctgctgcagagcctttagaaaaagttgctaagtacgctagtccactt

SEQ ID NO: 44622 - DNA, 110 bp, synthetic construct
  source 1..110: mol_type = other DNA
cagatatcaccattgccaacaacatagcttcgtgtcccagcaaagaaactcctcacacatccacctgggattttgcagaaggcaaactcatgggctgtcggattttaaca

SEQ ID NO: 44623 - DNA, 110 bp, synthetic construct
  source 1..110: mol_type = other DNA
agaaaggtaatatatactaatgttaaaaacagaaatgcaggagttcctgctgtggctgctgtggctccgtgggattggcaggaactctgggatgcaggtatgatccctgg

SEQ ID NO: 44624 - DNA, 110 bp, synthetic construct
  source 1..110: mol_type = other DNA
ggtgttttgttttttttttaaaccctgaaaggttggtgttattgtcccaattagagatgaggaaactgaagctcttagagattaagtgatctgcttaaggccacacaccc

SEQ ID NO: 44625 - DNA, 110 bp, synthetic construct
  source 1..110: mol_type = other DNA
gatgaggaaactgaagctcttagagattaagtgatctgcttaaggccacacacccagaaagtgatggagtcagaatttaaaaccaggtcttcctaacagagagccaatgc

SEQ ID NO: 44626 - DNA, 110 bp, synthetic construct
  source 1..110: mol_type = other DNA
gaaatctggtatcatatgaaaagactgagctgtgggtaaggctgctggaagattgagaagactgagggagaggttgctatagagatgtccaagtgttgaggaagaaaggc

SEQ ID NO: 44627 - DNA, 110 bp, synthetic construct
  source 1..110: mol_type = other DNA
cagcttcctgtcatagcttgcatcttttttctttttcaacctgcaccacagctgcagcaatgctggatccttcacccattgcgctacagtgggagctcccatagcttcct

SEQ ID NO: 44628 - DNA, 110 bp, synthetic construct
  source 1..110: mol_type = other DNA
agcaatgctggatccttcacccattgcgctacagtgggagctcccatagcttccttcttggtgcattctaacttcctatttacttgtctctgtcacatagactatcagct

SEQ ID NO: 44629 - DNA, 110 bp, synthetic construct
  source 1..110: mol_type = other DNA
ggcagtctctttcctgctatttgtctgcagcatgaaggtagaacaacagatggagaaggttcagcttcacctttgtggttaatgcttacaatcttattaaaggctaaaga

SEQ ID NO: 44630 - DNA, 110 bp, synthetic construct
  source 1..110: mol_type = other DNA
ttgtactccagattcataactggctttaactcactgacttcgcttgaggattttgtcatgccccaaattaattagaagttgtagacactggattgagttaatgcaaagac

SEQ ID NO: 44631 - DNA, 110 bp, synthetic construct
  source 1..110: mol_type = other DNA
tcatgccccaaattaattagaagttgtagacactggattgagttaatgcaaagacatcacagctggcttttgtatgttacaaatctcattcaaatatgcaacagtttctc

SEQ ID NO: 44632 - DNA, 110 bp, synthetic construct
  source 1..110: mol_type = other DNA
gtaaccatagtttggttttgaaatcttgagttgcaaattaggttacttttaagtacatgcacttgcttgaaacacttgtttagaaaccactgtctttttaggggtacgat

SEQ ID NO: 44633 - DNA, 110 bp, synthetic construct
  source 1..110: mol_type = other DNA
ttgggctggattaattttctcttttgccctttgtagttgtaaagtgctgggcagtcactaagctgcccatcaataatgactattcacctttcttattcatcataataaca

SEQ ID NO: 44634 - DNA, 110 bp, synthetic construct
  source 1..110: mol_type = other DNA
ttaattaatggaattttctactttcccatcatattttgattcatctcttttggctgctggaacacagccgctcaggttgcctctggaagagggagaatttgtcaacagag

SEQ ID NO: 44635 - DNA, 110 bp, synthetic construct
  source 1..110: mol_type = other DNA
gctggaacacagccgctcaggttgcctctggaagagggagaatttgtcaacagagatactcggggagctattaggagcagagcaactctggctctcactgaggcctgact

SEQ ID NO: 44636 - DNA, 110 bp, synthetic construct
  source 1..110: mol_type = other DNA
ttctagaccttagctcaaggaggtaggcatttgatagttattttcttattctgtgacatctttctcatgatcctgctccatcctgtggctgagacacagctgagaatgag

SEQ ID NO: 44637 - DNA, 110 bp, synthetic construct
  source 1..110: mol_type = other DNA
acatctttctcatgatcctgctccatcctgtggctgagacacagctgagaatgaggctgaaggtctctaggctctattccctatagtctaagtaaagtggccatttctac

SEQ ID NO: 44638 - DNA, 110 bp, synthetic construct
  source 1..110: mol_type = other DNA
tgcaggtcctggaatacaggcctctcaagccattctgcactcacacctctgccatctctcagcttcttcttttcttttcagaaaggtcctcattgatttcccttgctaga

SEQ ID NO: 44639 - DNA, 110 bp, synthetic construct
  source 1..110: mol_type = other DNA
agatcctgaggagaggcagctccatttggctgagggcagatcctagaactgtcgtcagcatacattctcagatactagtgcctcatttctgaaggagagagccaagaggt

SEQ ID NO: 44640 - DNA, 110 bp, synthetic construct
  source 1..110: mol_type = other DNA
atcgattaaaaatgtaactttaaaaaagaagtgtctacatcatgttctgcttctttcatatcctcactaaggacacagcagcagtgggagctgcttggtacaagggaggt

SEQ ID NO: 44641 - DNA, 110 bp, synthetic construct; identical to SEQ ID NO: 44640
  source 1..110: mol_type = other DNA

SEQ ID NO: 44642 - DNA, 110 bp, synthetic construct
  source 1..110: mol_type = other DNA
tttgagtgagagtagagcttctggggtggcattgaaccagaaagcttgcaatcgttgactactgactttataaactaactctgtcactcagcacttatgtgtagaacata

SEQ ID NO: 44643 - DNA, 110 bp, synthetic construct
  source 1..110: mol_type = other DNA
caccgagtccttggaacgtgagcccatctacgtttttaatcttgtttcggttcagttcactgtgttggatattacagttaaatggttagcttgtatgacaaattctagag

SEQ ID NO: 44644 - DNA, 110 bp, synthetic construct
  source 1..110: mol_type = other DNA
ttcactgtgttggatattacagttaaatggttagcttgtatgacaaattctagaggcagtaagaaaatatgacattactacaatagcgttaaaccagcctgggttaaatt

SEQ ID NO: 44645 - DNA, 110 bp, synthetic construct
  source 1..110: mol_type = other DNA
tggcccttcaggggagctgccaagtggctgctactggatctgcctgtggccctgtggtgtcagcgtgggtaggaatatgtgcggagatgtgaataatcaagtccaaatac

SEQ ID NO: 44646 - DNA, 110 bp, synthetic construct
  source 1..110: mol_type = other DNA
cttcatcattactgatactgtcaatctaggcaataggatgaaaaatagcaactgataagttcacttgtctttgtattctggcctcctttcctcttctattaagaagcata

SEQ ID NO: 44647 - DNA, 110 bp, synthetic construct
  source 1..110: mol_type = other DNA
gagtttcttaatcactggtgatccgttaggaaagttctgcacaaaggaaggcatgaaatagctcaagaagaaagcgaatcagaaaagaaagggttcagatgcaaattaag

SEQ ID NO: 44648 - DNA, 110 bp, synthetic construct
  source 1..110: mol_type = other DNA
ttccaattaagccaaggaacttgccccttgctgtctgtgccagcgggtatgacattcagccaggtatggtcatactggttgtgtcgagctggtacctatcctacttgatt

SEQ ID NO: 44649 - DNA, 110 bp, synthetic construct
  source 1..110: mol_type = other DNA
taaacgtattttttatgcctttatgttggcatggttctgggcactgcatttttaagattgactcagattctgctcacagggagcttgtttttacaggatggacacctttg

SEQ ID NO: 44650 - DNA, 110 bp, synthetic construct
  source 1..110: mol_type = other DNA
gggccttagactattgcctgtgatttccaagccaaggtcataaaacatgacacagctctcactcttagaaatcaactaccatgctagagaaagcccaggccatgtggggt

SEQ ID NO: 44651 - DNA, 110 bp, synthetic construct
  source 1..110: mol_type = other DNA
ctctcactcttagaaatcaactaccatgctagagaaagcccaggccatgtggggtggacatgtgtaggtgttccagctgacagacccatgtgagggcccagtgttcagcc

SEQ ID NO: 44652 - DNA, 110 bp, synthetic construct
  source 1..110: mol_type = other DNA
gcattaagacttaactatgtttgagaaccacaaatttttttcagcactgagctatgttcatttgtgtagtctccccccacccctgctttttaggaccattcccacagcat

SEQ ID NO: 44653 - DNA, 110 bp, synthetic construct
  source 1..110: mol_type = other DNA
aggaattttataagctgcagagaactggaagtttccacttaactatttttttttttttttttggtctttttctttttagggccatacctgtggcatatggaaattccccg

SEQ ID NO: 44654 - DNA, 110 bp, synthetic construct; identical to SEQ ID NO: 44653
  source 1..110: mol_type = other DNA

SEQ ID NO: 44655 - DNA, 110 bp, synthetic construct
  source 1..110: mol_type = other DNA
aactaccatcttaacctcatctccattttggaattaaaaactaaacatttcctttattctctgtcattcaacttcctacttctcgcatgagctttgccactcttctcttt

SEQ ID NO: 44656 - DNA, 110 bp, synthetic construct
  source 1..110: mol_type = other DNA
attctctgtcattcaacttcctacttctcgcatgagctttgccactcttctctttaaaatattttatggctgacatatgctaaacagaaaatgcactaatatataccttc

SEQ ID NO: 44657 - DNA, 110 bp, synthetic construct
  source 1..110: mol_type = other DNA
taaaagccagtatccagtgctgggagctagcggcctccccttgaccatgcaaacaacttaaggacctgtgtaacgcaaaatgggtgttcaatggactgccattctcaggc

SEQ ID NO: 44658 - DNA, 110 bp, synthetic construct
  source 1..110: mol_type = other DNA
aagaagagcatggtaataggagttttcaaaaagaatgtgagtgatctaatccataacaactttaaactatagcatgtggattaagagatgatcagagttttaaaagagaa

SEQ ID NO: 44659 - DNA, 110 bp, synthetic construct
  source 1..110: mol_type = other DNA
agtaactgattaggcctttttaaacaggtacatttagctccaaatatatcttaataagaaaaactagggagttcccattgtggtacagtggaaacaaatctgaccagtat

SEQ ID NO: 44660 - DNA, 110 bp, synthetic construct
  source 1..110: mol_type = other DNA
aaaccagtagcaccctcccagctgtgacagccaaagaagtctccaaatactgctggccgtcccctgggaaacaaaacctcccaggttaggagcatctgcactttaactgg

SEQ ID NO: 44661 - DNA, 110 bp, synthetic construct
  source 1..110: mol_type = other DNA
cccttctcaaacttgtttcctttttttttttgccccagcagcagtgtgtagacattcctgggccagggatcaaaccatgtcataccagccacctgagctgctgcagtaac

SEQ ID NO: 44662 - DNA, 110 bp, synthetic construct
  source 1..110: mol_type = other DNA
aagcccagtggctttggagattagggagtcattgctcatcctcaagagaaaatttactcagtgaagcttgcaaaagaaaggtctaaaacaaggaatgaggagtaggtggt

SEQ ID NO: 44663 - DNA, 110 bp, synthetic construct
  source 1..110: mol_type = other DNA
actcagtgaagcttgcaaaagaaaggtctaaaacaaggaatgaggagtaggtggtgagaaagaagaggtgtgaagttttgaagtgaagatgagaagaaatatagtgatag

SEQ ID NO: 44664 - DNA, 110 bp, synthetic construct
  source 1..110: mol_type = other DNA
taagggtgatggttttatgatggactactttacacaagagaccaagcatcagatcaatgagcttgttttactagagaccaacaagcaaaagattttagatataagaggct

SEQ ID NO: 44665 - DNA, 110 bp, synthetic construct
  source 1..110: mol_type = other DNA
aagttagcttgacagttatggccagtgcctcttttctagctgcctttcattaatgttctttcattttctctataggattaggctactgccatcagcagacaaggcatatg

SEQ ID NO: 44666 - DNA, 110 bp, synthetic construct
  source 1..110: mol_type = other DNA
atgatggaccagatcaacgtacatcctgacttcagtaacttataattgggtatattcctatatttctccacggtagctggtaaatgggcaaagctatgtggtgttttgtg

SEQ ID NO: 44667 - DNA, 110 bp, synthetic construct
  source 1..110: mol_type = other DNA
agaaactaaagttagtaaactgtaaatgacctaaggataatgttggaagaaaagtgtgatgacaagcttgctaaagaactgtggaagattagattattattccaaattct

SEQ ID NO: 44668 - DNA, 110 bp, synthetic construct
  source 1..110: mol_type = other DNA
cactagacatgcattaaaattaaaaattaggcagttatctagacaatccagtggttttttttgaaatgtgtttaaagttctatcggtgatggggtggatcatgtcagggg

SEQ ID NO: 44669 - DNA, 110 bp, synthetic construct
  source 1..110: mol_type = other DNA
acagggacttgtgttattagaaaagactttcactttgataaaatgttttccacaaagcatccaacaccctcacgatgaatgcaggcaactgtcattttgatatttcttca

SEQ ID NO: 44670 - DNA, 110 bp, synthetic construct
  source 1..110: mol_type = other DNA
agcatccaacaccctcacgatgaatgcaggcaactgtcattttgatatttcttcatgcatgaattacagaaaacaaaactgaacaaaagataataattttatctctataa

SEQ ID NO: 44671 - DNA, 110 bp, synthetic construct
  source 1..110: mol_type = other DNA
agaaattcttctttaaatcgacactattcctacatccagtgttctcagctacagaagagcaccctacaagaatgtggaataactcaaccagataattcagggccctggac

SEQ ID NO: 44672 - DNA, 110 bp, synthetic construct
  source 1..110: mol_type = other DNA
tctctcctggttcccacctagaaactttgtttctgatgtgaagctcagccagtctgcgtttagccttgcattaccctcaagattagtggatcctagatttgtcttaacac

SEQ ID NO: 44673 - DNA, 110 bp, synthetic construct
  source 1..110: mol_type = other DNA
ttgttacctagagtatatttggttgaaacgtcttctttgctattctagctgttaactcatgcacagcagtgagagatttactgtaatcttaatgtgcagtccaagttact

SEQ ID NO: 44674 - DNA, 110 bp, synthetic construct
  source 1..110: mol_type = other DNA
ctcatgcacagcagtgagagatttactgtaatcttaatgtgcagtccaagttactctctaaaacaaagagcatctattagaatacagtggtttaagaagtgataggaaaa

SEQ ID NO: 44675 - DNA, 110 bp, synthetic construct
  source 1..110: mol_type = other DNA
gaaattcaaactcgtcttaagggggaattctttgctcctgaccatgtattcctctgtgagactgctgatttcagagtctaaaacacttcaagaacacttctattcaacta

SEQ ID NO: 44676 - DNA, 110 bp, synthetic construct
  source 1..110: mol_type = other DNA
ctgttgttatcatggttttacaggtaaggaaatctgaatgtagcagagctggaatttgaatttagggctcataagaaccacactgttaggccttatgggtttcatttaaa

SEQ ID NO: 44677 - DNA, 110 bp, synthetic construct
  source 1..110: mol_type = other DNA
ttgaatttagggctcataagaaccacactgttaggccttatgggtttcatttaaagtgtcttagcgacgtccatgtaaagatgtacagtagggtattggaaacacagaac

SEQ ID NO: 44678 - DNA, 110 bp, synthetic construct; identical to SEQ ID NO: 44676
  source 1..110: mol_type = other DNA

SEQ ID NO: 44679 - DNA, 110 bp, synthetic construct; identical to SEQ ID NO: 44677
  source 1..110: mol_type = other DNA

SEQ ID NO: 44680 - DNA, 110 bp, synthetic construct
  source 1..110: mol_type = other DNA
tcttaaatgctctaagtccttcctagagcatcttcagaagacaaaagattataaaaccttgataagaatgtaaaagaggccaacagttcctgcctgtgtcttttctgact

SEQ ID NO: 44681 - DNA, 110 bp, synthetic construct; identical to SEQ ID NO: 44680
  source 1..110: mol_type = other DNA

SEQ ID NO: 44682 - DNA, 110 bp, synthetic construct
  source 1..110: mol_type = other DNA
aatacatcaaaaacatatctacatgtggaacagttttcacagaattcctattgaaagcttgcagaagagctcatacaaacaaagctgtaagatccccacttaaccacgta

SEQ ID NO: 44683 - DNA, 110 bp, synthetic construct
  source 1..110: mol_type = other DNA
agtgtgtctcagtgcatatacagcttagtctccaggcaaatgctcaaggaggagtctatggagaaatccagatctgctcatctgtgctaagccttcatcactgatttcct

SEQ ID NO: 44684 - DNA, 110 bp, synthetic construct
  source 1..110: mol_type = other DNA
gtcgttgtcaacacaaggggatagagtagtcttaggatcagtggcttctggactcagagagtaaatgtttagtgttaattagtatggttagcttaaatgccaattggaag

SEQ ID NO: 44685 - DNA, 110 bp, synthetic construct
  source 1..110: mol_type = other DNA
agagagtaaatgtttagtgttaattagtatggttagcttaaatgccaattggaagagtcccaggcattttgagtacaactaacattttattggtctgtagttgcatcaga

SEQ ID NO: 44686 - DNA, 110 bp, synthetic construct
  source 1..110: mol_type = other DNA
tatggagggagaagaaggcaggtagcctaatccttatcaacagctaaacttgtaaaaccccttgatatgccctctcaagggaagacaaagtttggaggtattagcctgct

SEQ ID NO: 44687 - DNA, 110 bp, synthetic construct
  source 1..110: mol_type = other DNA
cctaatccttatcaacagctaaacttgtaaaaccccttgatatgccctctcaagggaagacaaagtttggaggtattagcctgctgcggcctcctttgcctggcaaagca

SEQ ID NO: 44688 - DNA, 110 bp, synthetic construct
  source 1..110: mol_type = other DNA
ggggaaagaagacaggaaaatagtcaagagctaattccaaaggaagaagaacacccaaacaccttactaagtggggtaggtgcctcgaggttggtacatagtctgtcctg

SEQ ID NO: 44689 - DNA, 110 bp, synthetic construct
  source 1..110: mol_type = other DNA
tgtgcttgtcattcttccaaaaaataagacaaaagatagacaaaggaaaacaacgtccatctttgggagggaaaatatcaattaaaaccaaaagtacacaaaacaaaaag

SEQ ID NO: 44690 - DNA, 110 bp, synthetic construct
  source 1..110: mol_type = other DNA
tcaggcactaaatccatctcctgcaattttaaagatggagaaccacatatataattgagagcttaacaacaaatgcaggcctcatgaacaggtccatcagataaagaaac

SEQ ID NO: 44691 - DNA, 110 bp, synthetic construct
  source 1..110: mol_type = other DNA
tccagagtctgtattggggcttgatcatattaacctggttggctggccaggtggctaacttccatctctaacccctctgtaatttgagctgataccatgtgacctaagac

SEQ ID NO: 44692 - DNA, 110 bp, synthetic construct
  source 1..110: mol_type = other DNA
taacttccatctctaacccctctgtaatttgagctgataccatgtgacctaagacctccaccctaattcatgtcattaagtctctagttgactcaagactcccagacaga

SEQ ID NO: 44693 - DNA, 110 bp, synthetic construct
  source 1..110: mol_type = other DNA
ttaacagaatgaataatcttctagatcacatttaagctaatttgaaagtggcagaaaagggaaaaagacacagggagaaaaggatgtagaaatgcaaaagccaagacaaa

SEQ ID NO: 44694 - DNA, 110 bp, synthetic construct
  source 1..110: mol_type = other DNA
caacagatggatacacttgatcactaacattatatagggccatttttatagatgatagctaaaatgcaccataaccatggagctattttggacttgcatcaacaatttca

SEQ ID NO: 44695 - DNA, 110 bp, synthetic construct
  source 1..110: mol_type = other DNA
gagcaatgatggaaactcctccattttatttttaaaaatgtttattttcataatgagctgcatatgcaagttagagaaagcagcttgattataatgcgttattagttagg

SEQ ID NO: 44696 - DNA, 110 bp, synthetic construct
  source 1..110: mol_type = other DNA
gagctcatgcatattcttatgattagttgttggtgatgtaacctgtagtactttgggaatttcagtcatcaatcatctggttccaactggtctgtgagctacatgctggt

SEQ ID NO: 44697 - DNA, 110 bp, synthetic construct
  source 1..110: mol_type = other DNA
cataggtctctgcctcagttgtctcaccaaacagctgggatagtaacatggagctgtgaaggttaaatgttcaaaatgcttatgaaaatgccaggcctatgccattcact

SEQ ID NO: 44698 - DNA, 110 bp, synthetic construct
  source 1..110: mol_type = other DNA
tgtaatatgaggactagtgcttgaaataacaggaaaaaaacagaggcagagaaaaaatggtttagcctcaaggaaagactgagcacaggccactggagggtcacactgca

SEQ ID NO: 44699 - DNA, 110 bp, synthetic construct
  source 1..110: mol_type = other DNA
attcataagggaaaaacaagatggcacctgccagttgaagcaaggcagaaggagagtatgaaaatgatgccaacattctccatccctgatgaatattcctgcaggtacct

SEQ ID NO: 44700 - DNA, 110 bp, synthetic construct
  source 1..110: mol_type = other DNA
agggtcagatacacctggttggaaagctgaccaactgtgcatgacctccctcagattactttactccaacattgcaagtcataaaacgggaatcaaactgtgtacctcat

SEQ ID NO: 44701 - DNA, 110 bp, synthetic construct
  source 1..110: mol_type = other DNA
agaaaggagatgaggttggttccaaagactctggcttgaacaactgggaagagttcaaaggcaagctgtggaatggggaacctggtgccaagaaggccttctaaaccttc

SEQ ID NO: 44702 - DNA, 110 bp, synthetic construct
  source 1..110: mol_type = other DNA
ttaatgcacacaactaagacagcagtacaagttctaacaaacatagttttatgatttctacagcacctgtgactatggatacggattccagctctacacctctgccacat

SEQ ID NO: 44703 - DNA, 110 bp, synthetic construct
  source 1..110: mol_type = other DNA
ttctacagcacctgtgactatggatacggattccagctctacacctctgccacataaactcttttgttgcaacctactgatttagctaagggcagtaacatttaagatcc

SEQ ID NO: 44704 - DNA, 110 bp, synthetic construct
  source 1..110: mol_type = other DNA
cccaaattgatcctgctgccgtagtcagaatacccaggtccccaatttatagagttttagaaataaaagagatcctagctaaaaatttatacctcccctgtattacaaag

SEQ ID NO: 44705 - DNA, 110 bp, synthetic construct
  source 1..110: mol_type = other DNA
aagcccacatctaccaataactgagtcatttcatttatcactggacaattttagttcccaggtcactatgactttctaaaactcagctcctatcttaacttttggctgtt

SEQ ID NO: 44706 - DNA, 110 bp, synthetic construct
  source 1..110: mol_type = other DNA
tcccaggtcactatgactttctaaaactcagctcctatcttaacttttggctgtttcaattcatacataaataggcctcccaacaccctgccctctccccaaatttcttt

SEQ ID NO: 44707 - DNA, 110 bp, synthetic construct
  source 1..110: mol_type = other DNA
gaatagcccaggacataacagatgctccttaaatacctaatagattgttgactaataacctttgtgagctactgtgaaacaaattaaccaaatttttaaaatacacagta

SEQ ID NO: 44708 - DNA, 110 bp, synthetic construct
  source 1..110: mol_type = other DNA
ggcacagcagtgaataaaaggtagaagtgccaatgcaaggaactataaactcaatatccatacctgagtgacatagctcaaaagacattttttaataagatagaccccta

SEQ ID NO: 44709 - DNA, 110 bp, synthetic construct
  source 1..110: mol_type = other DNA
tccttttttatgggatagtaataaataatctggaaaaaaggtcaaaaaatgtttttcgtgtaacatgtaaggagttcccaccatagctcagtggaaacgaatctaactag

SEQ ID NO: 44710 - DNA, 110 bp, synthetic construct
  source 1..110: mol_type = other DNA
taatctggaaaaaaggtcaaaaaatgtttttcgtgtaacatgtaaggagttcccaccatagctcagtggaaacgaatctaactagtatccatgaagacacaggttcaatc

SEQ ID NO: 44711 - DNA, 110 bp, synthetic construct
  source 1..110: mol_type = other DNA
atactgcaagtaagggcttagctgagatttaaacccaggcattcaagtgccagagaccactatgctatttagtttctctataccttcctttcaaaacacctttgctttta

SEQ ID NO: 44712 - DNA, 110 bp, synthetic construct
  source 1..110: mol_type = other DNA
agtgccagagaccactatgctatttagtttctctataccttcctttcaaaacacctttgcttttaaagaaatttaagaaatgactaagtttaaaattgtgccaaacaatt

SEQ ID NO: 44713 - DNA, 110 bp, synthetic construct
  source 1..110: mol_type = other DNA
ggatgaaataatgccatttgcagcaacgtgtctggaactagagattcacatactaaatgaagtaagttaggagaaaaacgaataccgtatgatgtcacatatctggaatc

SEQ ID NO: 44714 - DNA, 110 bp, synthetic construct; identical to SEQ ID NO: 44713
  source 1..110: mol_type = other DNA

SEQ ID NO: 44715 - DNA, 110 bp, synthetic construct
  source 1..110: mol_type = other DNA
gagctttttacaacaaaagaaaagctaggtgctgaagatccttggtaagagacgaaattaaataattgtttctaattatttttaagaatttttactgaggtatgtgctac

SEQ ID NO: 44716 - DNA, 110 bp, synthetic construct
  source 1..110: mol_type = other DNA
tacggatttttactgcttttggattgaagggaagaaacaaatggagcttctcacactgctatgatgctgacttcactctctgactttttttaactaaattggtcagaatt

SEQ ID NO: 44717 - DNA, 110 bp, synthetic construct
  source 1..110: mol_type = other DNA
tcaattataagggctaatgtgttcagagtcttccctgaaggcaggcagtgttcttagggcagcttctgaaacccttggcagtgtcagtttcatgctttgaaattctcatg

SEQ ID NO: 44718 - DNA, 110 bp, synthetic construct
  source 1..110: mol_type = other DNA
acaatgcatggcagtgaggctgtgcggtgctggcaatggcactcacttgggagccagaatttttaggtgccacccccacctttggctgatcgccagctctgggccttgga

SEQ ID NO: 44719 - DNA, 110 bp, synthetic construct
  source 1..110: mol_type = other DNA
agaatttttaggtgccacccccacctttggctgatcgccagctctgggccttggagtccccacctataaaaagaaggagtgggactagatcacttcttggggcacctccc

SEQ ID NO: 44720 - DNA, 110 bp, synthetic construct
  source 1..110: mol_type = other DNA
gaaagaggcaaacggactattctagtcctgattgcagcttaaataaaagaaggctccagtatgttctagcctggctcacaaaggggacgcactgggacctaaggccaaaa

SEQ ID NO: 44721 - DNA, 110 bp, synthetic construct
  source 1..110: mol_type = other DNA
aggagacagtgcctctgctccaggcatccccaaggctcttgaatgtcattcactctggaggtgaagctggatgggcaaagtgcaaggaggtttgggttccaaattaaggc

SEQ ID NO: 44722 - DNA, 110 bp, synthetic construct
  source 1..110: mol_type = other DNA
ggccatttgattaaaaacctcactgtgagccttcatcatctggcccaggtgatatttctagttaactttccctccattccaacaacgctggacccttactcattgctcat

SEQ ID NO: 44723 - DNA, 110 bp, synthetic construct
  source 1..110: mol_type = other DNA
tttcccacttctgaagcctgttgcttgcttagctttctcaatctcctggccactagagcatctataattggcttgatttgttccatgattttgaacccaatttagacttc

SEQ ID NO: 44724 - DNA, 110 bp, synthetic construct
  source 1..110: mol_type = other DNA
tcagttagcaaacagtggacttagtgctgcatcccatagattttgtttggttgcgtctggaagagtccttgttgtaggtgcagtcacatggtttactgcttgtgcttcaa

SEQ ID NO: 44725 - DNA, 110 bp, synthetic construct
  source 1..110: mol_type = other DNA
ctgaattttgaaggatgagtaataattagcctctaaaataaactggagctttgccaggtcactccagtcagtgggaacagctcgtcaaagactcaaaggaaacaactgag

SEQ ID NO: 44726 - DNA, 110 bp, synthetic construct
  source 1..110: mol_type = other DNA
aggtcactccagtcagtgggaacagctcgtcaaagactcaaaggaaacaactgagtttttagtggcttgagtttatgattcaatgggttgtaagaccaggaaaaatgtag

SEQ ID NO: 44727 - DNA, 110 bp, synthetic construct; identical to SEQ ID NO: 44725
  source 1..110: mol_type = other DNA

SEQ ID NO: 44728 - DNA, 110 bp, synthetic construct; identical to SEQ ID NO: 44726
  source 1..110: mol_type = other DNA

SEQ ID NO: 44729 - DNA, 110 bp, synthetic construct
  source 1..110: mol_type = other DNA
ctctgcagatgggggaagccacgggctgtgctgtctgttcaagcacctcttacatagggctagcggatggactctccagcttcctgtgtgctctggtttggtttcctggt

SEQ ID NO: 44730 - DNA, 110 bp, synthetic construct
  source 1..110: mol_type = other DNA
aacatgcaaataattctggtaagcataaacttcccatgaaaataaatgtaataaggacaaaggtaggtctcctgctagttcgcagtacagtcagatggtgtatatggaaa

SEQ ID NO: 44731 - DNA, 110 bp, synthetic construct
  source 1..110: mol_type = other DNA
aattatagatggaattatgtttccctatatgatcaggccacctgagatggctatttgcttgctctctgtccatctcctgctgaaacagtccctgcttcacctacacccta

SEQ ID NO: 44732 - DNA, 110 bp, synthetic construct
  source 1..110: mol_type = other DNA
ggccacctgagatggctatttgcttgctctctgtccatctcctgctgaaacagtccctgcttcacctacaccctactcacattatggctcttctcccttaatcatagagc

SEQ ID NO: 44733 - DNA, 110 bp, synthetic construct
  source 1..110: mol_type = other DNA
tactccgcttcagaaacctccagctcaaacccttacaaagagtgcctagtttctgtgtccatctacagtgcctgtgttgactcttcttgctgtcctggtccccaccccag

SEQ ID NO: 44734 - DNA, 110 bp, synthetic construct
  source 1..110: mol_type = other DNA
cattctggattcacacagcacccttaaggactccagttagtgggaggccactgtcatgcctggcctcaactttttctccctgcctgccctgtacaccagctcttgctctt

SEQ ID NO: 44735 - DNA, 110 bp, synthetic construct
  source 1..110: mol_type = other DNA
atgcctggcctcaactttttctccctgcctgccctgtacaccagctcttgctcttttcccttaaaacctcatttatattcttttaatatatatatatatattttttttta

SEQ ID NO: 44736 - DNA, 110 bp, synthetic construct
  source 1..110: mol_type = other DNA
acccaggtcacacatgtatacctgtgtgtacatgggcttcccatgcttggccagatctatttgtagtcatcgtcacagcaaaagaagcttgagagaggaaaacatgggaa

SEQ ID NO: 44737 - DNA, 110 bp, synthetic construct
  source 1..110: mol_type = other DNA
tattcccatctcattcccctatcaccaagcaactgggaatctggaaaacttacgtgcaccctttcttgacaaagtgtggcctttgcttcttgacagagtgtgggcttcct

SEQ ID NO: 44738 - DNA, 110 bp, synthetic construct
  source 1..110: mol_type = other DNA
gtataggagatatggaagtatcacaagccacctgatctgagtctcagttctggttctaccactttctagtaacaagacctttcgcaagttgtgttgcctttctgagctgc

SEQ ID NO: 44739 - DNA, 110 bp, synthetic construct
  source 1..110: mol_type = other DNA
ctaccactttctagtaacaagacctttcgcaagttgtgttgcctttctgagctgccgttttcttttccataaaataagaataatgctctccatcccagagcgttgttggg

SEQ ID NO: 44740 - DNA, 110 bp, synthetic construct
  source 1..110: mol_type = other DNA
tggtcctttctgttaagggctctatacatgttagatgtcagttttctctttttagtcgtgaatgtaggcagggctggaaggatgaatctgattaatatgagggagtaggt

SEQ ID NO: 44741 - DNA, 110 bp, synthetic construct
  source 1..110: mol_type = other DNA
tcgtgaatgtaggcagggctggaaggatgaatctgattaatatgagggagtaggttacatcaactttataatgtctctgaagaaagaaatcaaagtaccttacttttggg

SEQ ID NO: 44742 - DNA, 110 bp, synthetic construct
  source 1..110: mol_type = other DNA
tctgtgttcagcacttggtaatcacttgtgaactgaaaacacacatgggcccatgcaccttagtctgatccctgagtggatcggctgcggctcttagtttctcctggttt

SEQ ID NO: 44743 - DNA, 110 bp, synthetic construct
  source 1..110: mol_type = other DNA
aagaccttctaaccattcctgcagtctgaagtcagcaagggctgtctcagccgtagacttctgcttccttgtagctttgcaaggttctctgcaatggactcgatcctcct

SEQ ID NO: 44744 - DNA, 110 bp, synthetic construct
  source 1..110: mol_type = other DNA
gacttctgcttccttgtagctttgcaaggttctctgcaatggactcgatcctccttggtctagtacctcaaatacaagtattccagaaaggaaacattggattaggttga

SEQ ID NO: 44745 - DNA, 110 bp, synthetic construct
  source 1..110: mol_type = other DNA
tgcaaatttttggcatttgtcccacatctcagaatctgctccctgcctctaagccagctaaatgcaaagtactaaaaggatagttgcctcaggtctaaaattgttagagc

SEQ ID NO: 44746 - DNA, 110 bp, synthetic construct
  source 1..110: mol_type = other DNA
gctgaaaagccaacacagagctccagaggaagggtcttcagagcacagcgctcttaagagtggagaagtggggagttcccatcatggcacagaggttaacgactccgact

SEQ ID NO: 44747 - DNA, 110 bp, synthetic construct
  source 1..110: mol_type = other DNA
ttcatcttggctggggaggcttgatgtgttcagagctcccaatcaatctataaaaaataaatctatcagaaaaaataaaaagtatcatcagcaatgcctgctgcagggaa

SEQ ID NO: 44748 - DNA, 110 bp, synthetic construct
  source 1..110: mol_type = other DNA
cttgcaccgtatggaagttccccagccaaggactgaatctgagccacagctacagaaactctggattctttaactcattacgtcaggctagggtacccacacctcggcag

SEQ ID NO: 44749 - DNA, 110 bp, synthetic construct
  source 1..110: mol_type = other DNA
aaactctggattctttaactcattacgtcaggctagggtacccacacctcggcagcaacctgagccactgtagttggattcttccccccacacaccccagtggccgcaac

SEQ ID NO: 44750 - DNA, 110 bp, synthetic construct
  source 1..110: mol_type = other DNA
cttacattgtaacaaacaagtggaaggtgacgtaggtggatgggaggccagctttggatcagtgaagccctctttgaagtgacatttgaaaatctgggggggaagcattt

SEQ ID NO: 44751 - DNA, 110 bp, synthetic construct
  source 1..110: mol_type = other DNA
taggttaaagatccagctttgccctgagctatggtgtaggttacacacgcagctcagatccctggttgctgtggctgtggtatagaacagaagctatggctccgattcaa

SEQ ID NO: 44752 - DNA, 110 bp, synthetic construct; identical to SEQ ID NO: 44751
  source 1..110: mol_type = other DNA

SEQ ID NO: 44753 - DNA, 110 bp, synthetic construct
  source 1..110: mol_type = other DNA
gcttgattccctagatttgagaaagcaaatttgggttttaaaaatctaaccttcatttgttatgaaaacttacaatttacaggagtggcagagcttccatgcctacctgc

SEQ ID NO: 44754 - DNA, 110 bp, synthetic construct
  source 1..110: mol_type = other DNA
tttgagaaagcaaatttgggttttaaaaatctaaccttcatttgttatgaaaacttacaatttacaggagtggcagagcttccatgcctacctgcttgcatctctcacaa

SEQ ID NO: 44755 - DNA, 110 bp, synthetic construct
  source 1..110: mol_type = other DNA
tgaatcctataattggcatttgattcatacttaagtttagagttttccctcttaattggttggttttaaattgatgtctgtattatttgtaggaagaagatgttgacttc

SEQ ID NO: 44756 - DNA, 110 bp, synthetic construct
  source 1..110: mol_type = other DNA
aaaaaatatggagcaacagttgatctttggagcattggggtaacattttaccatgcagctactggatcactgccatttaggccatttgaagggccacgtaggaataagga

SEQ ID NO: 44757 - DNA, 110 bp, synthetic construct
  source 1..110: mol_type = other DNA
agacaaggtctcgcccaaagccaatttctcagacacagacgaggctgaggaattcagtcttgagacacacaatgtagaggatagacaagcaaacattaacagaagacagg

SEQ ID NO: 44758 - DNA, 110 bp, synthetic construct
  source 1..110: mol_type = other DNA
agtcttgagacacacaatgtagaggatagacaagcaaacattaacagaagacaggagagtaatgaaagccaggtttcaccagaagataccaaggtctgattagaacctac

SEQ ID NO: 44759 - DNA, 110 bp, synthetic construct
  source 1..110: mol_type = other DNA
tgcttgtgatagtaggaatagctgcccctttgtgtgagcccatattctagaaccttctaggacctaacacatgacatcattttaaggcttgcaggagtgaggtgaggcta

SEQ ID NO: 44760 - DNA, 110 bp, synthetic construct
  source 1..110: mol_type = other DNA
gagtctgggccagtgcttaaggcttggcctcatttaatcatccccacaatcctaggagtatttcccccattttatagacgagaaaatgaaagggaagtgaatgaaacaaa

SEQ ID NO: 44761 - DNA, 110 bp, synthetic construct
  source 1..110: mol_type = other DNA
gagtatttcccccattttatagacgagaaaatgaaagggaagtgaatgaaacaaagtcagcagcttgtaactggaatagctatcatttgctggaaagaatcaggttttca

SEQ ID NO: 44762 - DNA, 110 bp, synthetic construct
  source 1..110: mol_type = other DNA
gcatctgcggggctgtgtagaactgttactgacttcagtaattactcaccaaggcataccagtaactccagcccagaggaacatgtgctagtccacctgcatctggggct

SEQ ID NO: 44763 - DNA, 110 bp, synthetic construct
  source 1..110: mol_type = other DNA
ataccagtaactccagcccagaggaacatgtgctagtccacctgcatctggggctccatactgaaagaaggacaagcagcacattagaagttcttagacatgaccaactg

SEQ ID NO: 44764 - DNA, 110 bp, synthetic construct
  source 1..110: mol_type = other DNA
gccattagaaaaagaaagaaagaaaagaaaagaaaaaagaaaagaaaagaaagaaaggaagggaggaaggaaaggggtgcttcttattttattctcatttatctgttatc

SEQ ID NO: 44765 - DNA, 110 bp, synthetic construct; identical to SEQ ID NO: 44764
  source 1..110: mol_type = other DNA

SEQ ID NO: 44766 - DNA, 110 bp, synthetic construct
  source 1..110: mol_type = other DNA
caatttcagctctgtgtcaactgtgaaaggaagaccacgtattcccgggatgggctgggaattaccactccttgtggcccggcatctaccagcacagctggcaggagttg

SEQ ID NO: 44767 - DNA, 110 bp, synthetic construct
  source 1..110: mol_type = other DNA
gtctttttcacgctcattttctcatgagtggacaaggcatgtttcagagtctacatgatgtgtgatattagaacaaattacacgcagaaggagatatgagaaatcagctg

SEQ ID NO: 44768 - DNA, 110 bp, synthetic construct
  source 1..110: mol_type = other DNA
tgatgtgtgatattagaacaaattacacgcagaaggagatatgagaaatcagctgtcttctaaataaccaggcatgaaaggaacttgccaaagtgtaaagcaatgccact

SEQ ID NO: 44769 - DNA, 110 bp, synthetic construct
  source 1..110: mol_type = other DNA
aaaggcaatagtttatattgcaagggcattttacccatcacattctgagtcagagaagcctctgtcccagtttatggagccatgggttgatgatgtgcctggtcaggaga

SEQ ID NO: 44770 - DNA, 110 bp, synthetic construct
  source 1..110: mol_type = other DNA
taaaaatctgcctccatcttcctgagcattagattcaagttcggcatttcatttgctccttgtggtttttaaatgcaagcaccccactaaataactactgagcacagaat

SEQ ID NO: 44771 - DNA, 110 bp, synthetic construct
  source 1..110: mol_type = other DNA
gagccacgaagggaaatccttttttttttttttttttaggtggtatctatatattcctaaaagtcctaaaatctgggctctggtctaagctcccctacttattactatta

SEQ ID NO: 44772 - DNA, 110 bp, synthetic construct
  source 1..110: mol_type = other DNA
cctaaaagtcctaaaatctgggctctggtctaagctcccctacttattactattacgtgattttgggaaagtcagtgaacctcacgagcctcaattttctaatttgtaaa

SEQ ID NO: 44773 - DNA, 110 bp, synthetic construct
  source 1..110: mol_type = other DNA
tgttaagctaaactacactattactaaatttaaaatgtgggtatttagtgttgcttagttgacttcactttggggggaagggcagtaagcattgcagagaagatttggga

SEQ ID NO: 44774 - DNA, 110 bp, synthetic construct; identical to SEQ ID NO: 44773
  source 1..110: mol_type = other DNA

SEQ ID NO: 44775 - DNA, 110 bp, synthetic construct
  source 1..110: mol_type = other DNA
agctggtattttataagttagcagcagtggtctgaaaagctaagactcaaggtgtggccttgagttttagctatcagaggccatcctgaggacctggggctggggtgggg

SEQ ID NO: 44776 - DNA, 110 bp, synthetic construct
  source 1..110: mol_type = other DNA
ggccttgagttttagctatcagaggccatcctgaggacctggggctggggtggggggtgttcttgtcgtggtcacccatctctgaagtctccagaatactgtaagccatc

SEQ ID NO: 44777 - DNA, 110 bp, synthetic construct
  source 1..110: mol_type = other DNA
tctctcggcttcactgctattttctgtgcttgtattctgctctctatttttgctaggttcttgtttaaccacctcatactgaccgttcatgaccttttagcttaacctat

SEQ ID NO: 44778 - DNA, 110 bp, synthetic construct
  source 1..110: mol_type = other DNA
ggttcttgtttaaccacctcatactgaccgttcatgaccttttagcttaacctatatagtcaagtgatgacagcactatgttttagttcaaattatccaagggaaaaaag

SEQ ID NO: 44779 - DNA, 110 bp, synthetic construct
  source 1..110: mol_type = other DNA
tgtgctgtgggtgcggccttgaaaaagcacccccccaaaaaaagccaataaatgaatgttaaaaaaaaaaaaaaaaggagtcatcttttaccattacctaattagtgcgt

SEQ ID NO: 44780 - DNA, 110 bp, synthetic construct
  source 1..110: mol_type = other DNA
agtgaaagatgcgcatgtcaaagtgcaacaaaggatgggttcaagagggagatgtaatgaatgaataaataaggaaagctgcaaactccatgagctggctctcattaacc

SEQ ID NO: 44781 - DNA, 110 bp, synthetic construct
  source 1..110: mol_type = other DNA
tatactgcccagatcataccatgcgatgagatggtcctatgtttcagtgttataacagctcttgaaatcagattaatttatttacagccacctgcataattcaactgaat

SEQ ID NO: 44782 - DNA, 110 bp, synthetic construct
  source 1..110: mol_type = other DNA
cttggatctactcttctcactctgttctagtatattctttagaacagtctctgtgctgtatgcagatagcttaaaatctaaccgacaaatagcttagtatctgcctaaca

SEQ ID NO: 44783 - DNA, 110 bp, synthetic construct
  source 1..110: mol_type = other DNA
gtaccatgaaaggccttgacctagccgggactgttagagctagaagatgagaggtaattaactaggctaccacgtgagggaagactacttcaggcaaggcgaatggcctg

SEQ ID NO: 44784 - DNA, 110 bp, synthetic construct
  source 1..110: mol_type = other DNA
aaagtaaaagtacatgagggcttccaaaggaaactaagcttcaaggagagacaattcaacacgggccagtggagatacaagatactcagaagatgaagggagcttgacca

SEQ ID NO: 44785 - DNA, 110 bp, synthetic construct
  source 1..110: mol_type = other DNA
tcaacacgggccagtggagatacaagatactcagaagatgaagggagcttgaccaagaggaagaggagccatcaggtcctcatgcgaacgattgagaacacatgagggga

SEQ ID NO: 44786 - DNA, 110 bp, synthetic construct
  source 1..110: mol_type = other DNA
gaggaagcagtactatcatggagacactgattaaattcattgtctgtgagctgcaaagatggggaatctgcatctcagcttcaatgatgggcactgtgcctactacaaag

SEQ ID NO: 44787 - DNA, 110 bp, synthetic construct
  source 1..110: mol_type = other DNA
aagatggggaatctgcatctcagcttcaatgatgggcactgtgcctactacaaagtaggtgttcaattaatgtctgttgtaccattgacctacaatgtagcattctgcag

SEQ ID NO: 44788 - DNA, 110 bp, synthetic construct; identical to SEQ ID NO: 44786
  source 1..110: mol_type = other DNA

SEQ ID NO: 44789 - DNA, 110 bp, synthetic construct; identical to SEQ ID NO: 44787
  source 1..110: mol_type = other DNA

SEQ ID NO: 44790 - DNA, 110 bp, synthetic construct
  source 1..110: mol_type = other DNA
gtggggtattggcaaatgtttaacaacaaggcaaaggcacctgatttgttacactggccaattcccttggtgcaaatactctcaccagagctgatttcgagctaacaaag

SEQ ID NO: 44791 - DNA, 110 bp, synthetic construct
  source 1..110: mol_type = other DNA
tagcctgtctggacaggggccaagctaggtcccctgaggacgggtccacactggctgtttgactttcgtagctctggggctggtaaggtaaccctggacaacttgcataa

SEQ ID NO: 44792 - DNA, 110 bp, synthetic construct
  source 1..110: mol_type = other DNA
tgtttgactttcgtagctctggggctggtaaggtaaccctggacaacttgcataagtctcagtggcctcagtgatctcagctgtaaaatggggatgagaataatacctct

SEQ ID NO: 44793 - DNA, 110 bp, synthetic construct
  source 1..110: mol_type = other DNA
agtctctccattctcagttctgtgcgatcgcttatgtattcctcttgttaagctcctgttctctgggcatctccatttttcgccttgccacatctcttgtctttcatgct

SEQ ID NO: 44794 - DNA, 110 bp, synthetic construct
  source 1..110: mol_type = other DNA
ctgttctctgggcatctccatttttcgccttgccacatctcttgtctttcatgctcattggctttctctttcttcttcccctctttccgatcccagcacggatgactctc

SEQ ID NO: 44795 - DNA, 110 bp, synthetic construct
  source 1..110: mol_type = other DNA
actttcacccagaagactcctgactctgccataaattacagagtgaagaaatggatgaacacagtgaacatcagcagaagtgaccttcagaaggccttgattctagtggt

SEQ ID NO: 44796 - DNA, 110 bp, synthetic construct
  source 1..110: mol_type = other DNA
ggcaaagcagtgtcttcctaaagcagaacactgtgatgctgcaggctccagaaaatatgtccccatgactgctaggcagggccccacctgcttgcaccattttaacagct

SEQ ID NO: 44797 - DNA, 110 bp, synthetic construct
  source 1..110: mol_type = other DNA
atattttaatcatatcccccccaaatatttcagaatacatttaaatatgcagactggcaaacaagaaaatgtagtttacccacagggcagaatatgacggaacttttcaa

SEQ ID NO: 44798 - DNA, 110 bp, synthetic construct; identical to SEQ ID NO: 44797
  source 1..110: mol_type = other DNA

SEQ ID NO: 44799 - DNA, 110 bp, synthetic construct
  source 1..110: mol_type = other DNA
tgtgtacaagtgcatatgtgataaaagatttaaagaatacacacaaaggtgttaataatggttttctctgggaatcacgactgaggatgatttccatgttcaattctttg

SEQ ID NO: 44800 - DNA, 110 bp, synthetic construct
  source 1..110: mol_type = other DNA
ttccatgcccgtctcacattccacagatagcgctgtatatatacacttgaactccagttttggatggaggaagctcgtttccttcccataggttttataggccctcgaca

SEQ ID NO: 44801 - DNA, 110 bp, synthetic construct
  source 1..110: mol_type = other DNA
gctagtttggccagagatgaaattccacatttgaatgaggaataccccttgtcaactgggcctttactcagaaagcttaagatcataaggtaccaggaaagcaaaaacaa

SEQ ID NO: 44802 - DNA, 110 bp, synthetic construct
  source 1..110: mol_type = other DNA
ctgctttttgcatgtgccagactttgtactaggagctggtgatgcagcagtggccaggacactgaattgctgccttcaggctgacagtccagagggagagttatatcatt

SEQ ID NO: 44803 - DNA, 110 bp, synthetic construct
  source 1..110: mol_type = other DNA
catgactaatgtgtcagacccatctaaatctagctctctgtgttgctggccttccagcctagtctaggagctcctggagcccagcttcctgctttgggttacccacctgc

SEQ ID NO: 44804 - DNA, 110 bp, synthetic construct
  source 1..110: mol_type = other DNA
gtggttttctcgatgttgggaaagtcagggagtgtagagagctagaagaaaaaatagtattctcatagtttgggaaggcagccctttatttccagaatgagtattatcgt

SEQ ID NO: 44805 - DNA, 110 bp, synthetic construct
  source 1..110: mol_type = other DNA
aaataaattttatcacacacagaaaacaaacaaacaaacaaacaaaactccacctagaaagctcaccatcaccagcagagaccttgtcacctttggacgaccccagtccc

SEQ ID NO: 44806 - DNA, 110 bp, synthetic construct
  source 1..110: mol_type = other DNA
agaaagctcaccatcaccagcagagaccttgtcacctttggacgaccccagtcccatggaaatcaacctgcctgcacggaaaaaaaaaaaaaaaaatctaggttcccgcg

SEQ ID NO: 44807 - DNA, 110 bp, synthetic construct
  source 1..110: mol_type = other DNA
ttaatgaggaggaaatgcaaggttaccataattcagcgtgtttaacctggatgccctaaaataaagatactcttttcatggaacagaaggtggaccttcgagaaacagga

SEQ ID NO: 44808 - DNA, 110 bp, synthetic construct
  source 1..110: mol_type = other DNA
ctaaaataaagatactcttttcatggaacagaaggtggaccttcgagaaacaggagcttccccaatgacaaatttcctgctccccaaggctaagacataccttgattccc

SEQ ID NO: 44809 - DNA, 110 bp, synthetic construct; identical to SEQ ID NO: 44807
  source 1..110: mol_type = other DNA

SEQ ID NO: 44810 - DNA, 110 bp, synthetic construct; identical to SEQ ID NO: 44808
  source 1..110: mol_type = other DNA

SEQ ID NO: 44811 - DNA, 110 bp, synthetic construct
  source 1..110: mol_type = other DNA
taacagccagtgaggatgccatgcctctgtcctctgcagactgcaagcttgctatgaatgcagagcttatgtcccatccatcgcagcatccatcctcagtgcctggcata

SEQ ID NO: 44812 - DNA, 110 bp, synthetic construct
  source 1..110: mol_type = other DNA
tattaataataccccaaagtaagataagttgaactgatgcacagaggtgcccaaggcattagaacatcagcaattcctttttaggaagctatggtaccaaaatgtattta

SEQ ID NO: 44813 - DNA, 110 bp, synthetic construct
  source 1..110: mol_type = other DNA
gcattagaacatcagcaattcctttttaggaagctatggtaccaaaatgtatttaaacagagttgcttaatcctcatgtatgaaaatcaaatcaacccaaatacatcatc

SEQ ID NO: 44814 - DNA, 110 bp, synthetic construct
  source 1..110: mol_type = other DNA
taccaatgcctttaaaatctattaaagaacatctcaccaggcccaggagggcattgcaataattgcttctcttacccaggtgaaaaaagaacatatctgtcaactaaagc

SEQ ID NO: 44815 - DNA, 110 bp, synthetic construct
  source 1..110: mol_type = other DNA
agagaacaaagggtgtttttgatcatgttcaaactccaggaaaatatcccctgaaggctataaaaaaggttcctgattctagggactttaaaactgacatcaggaagaac

SEQ ID NO: 44816 - DNA, 110 bp, synthetic construct
  source 1..110: mol_type = other DNA
ggctataaaaaaggttcctgattctagggactttaaaactgacatcaggaagaacaaatggaaaaattcccttacgaagactcactgtgttgtgagctaaggattgtaat

SEQ ID NO: 44817 - DNA, 110 bp, synthetic construct
  source 1..110: mol_type = other DNA
ccatttgagtatatttggtttagatattaagaaatgcttgggaaattgacaagagctactaaagctatggctctggctgcaacagtccctcatgctctgcagtccataaa

SEQ ID NO: 44818 - DNA, 110 bp, synthetic construct
  source 1..110: mol_type = other DNA
ctactaaagctatggctctggctgcaacagtccctcatgctctgcagtccataaaactgacaagcctcaatgacacaaatagcaggaaacctaacatgtgtgatgaccac

SEQ ID NO: 44819 - DNA, 110 bp, synthetic construct
  source 1..110: mol_type = other DNA
caaggaactgctgatccacattagatttaaaggaagaaactatttgctctaagaatgtcgctgatccacagtaaaccccatctgagacaatcatttctctgactcattcc

SEQ ID NO: 44820 - DNA, 110 bp, synthetic construct
  source 1..110: mol_type = other DNA
tgtcgctgatccacagtaaaccccatctgagacaatcatttctctgactcattccaaacacacagcagtgaaaaattaaagcaaaattaagggggcgcagttacacttaa

SEQ ID NO: 44821 - DNA, 110 bp, synthetic construct
  source 1..110: mol_type = other DNA
aaagtaaggcgctatggatgctcaatgggtaaagcaaagctggaccactagttagtaggaaccgaaagaatcctaagtggtttaggactagcatcatttaaagaaattaa

SEQ ID NO: 44822 - DNA, 110 bp, synthetic construct
  source 1..110: mol_type = other DNA
tcaatgaccacagtgtgggcagcaaggtcagaattggcaaaggtgggcccctgcgatgctgggctccagcacccaattacaccagagcagaggcatgtgggacattggct

SEQ ID NO: 44823 - DNA, 110 bp, synthetic construct
  source 1..110: mol_type = other DNA
taggagaagagaggggcggggcaacttgttaatcaatggactgaaccaaagctagagactaaccgacctttcccctacctgctaatcccaccccctagagcctagcaccc

SEQ ID NO: 44824 - DNA, 110 bp, synthetic construct
  source 1..110: mol_type = other DNA
agaattgggggtctaagaactggctttaagagaaaaaggtcaagaagctaagacgaatcatgcaggaaaacacttacaggaaggaaaagaagagaaatttaaattagatt

SEQ ID NO: 44825 - DNA, 110 bp, synthetic construct
  source 1..110: mol_type = other DNA
cattacgccctcagtttcctcacctgtaaaatgggcgtgatgatagcacctgccttgccatctgcctgtgaggattactgcatgtaaccagcaccataaatatcagctgt

SEQ ID NO: 44826 - DNA, 110 bp, synthetic construct
  source 1..110: mol_type = other DNA
tgccatctgcctgtgaggattactgcatgtaaccagcaccataaatatcagctgtcactccgctgacggggatgctcttcggatggctaatagcaaatttctttttttcc

SEQ ID NO: 44827 - DNA, 110 bp, synthetic construct
  source 1..110: mol_type = other DNA
agctgcagccggagcattaagcagaggccagcttgtgaagagcacacacagactgttcagccatgcaaacttaggaaggagagaaggatggattaattaagagcaccctg

SEQ ID NO: 44828 - DNA, 110 bp, synthetic construct
  source 1..110: mol_type = other DNA
ctggttcttaacccactgagccacaatggaaactccgcatattccacttatagtgatgataaaatactggctatgttccctgagatgcacaatatatcctcgaagcttac

SEQ ID NO: 44829 - DNA, 110 bp, synthetic construct
  source 1..110: mol_type = other DNA
atgataaaatactggctatgttccctgagatgcacaatatatcctcgaagcttacttacttcataccgaatagtctgtacttctgactcccccacccctatcttgccctg

SEQ ID NO: 44830 - DNA, 110 bp, synthetic construct; identical to SEQ ID NO: 44828
  source 1..110: mol_type = other DNA

SEQ ID NO: 44831 - DNA, 110 bp, synthetic construct; identical to SEQ ID NO: 44829
  source 1..110: mol_type = other DNA

SEQ ID NO: 44832 - DNA, 110 bp, synthetic construct
  source 1..110: mol_type = other DNA
acaaagaaaaaagaagatggtaataaattcagccattcagcaaagggccttcggttcttcaaagactatagccaatattctgcgccatgcccttggagctgttttgcagg

SEQ ID NO: 44833 - DNA, 110 bp, synthetic construct
  source 1..110: mol_type = other DNA
gatggtaataaattcagccattcagcaaagggccttcggttcttcaaagactatagccaatattctgcgccatgcccttggagctgttttgcaggtgctgaagcccctac

SEQ ID NO: 44834 - DNA, 110 bp, synthetic construct
  source 1..110: mol_type = other DNA
ctgttgcctcggtttgcagaggcaagtacatgcaaggggcatgtttcctctagttcctaggaatccagagctaggatgaggtcagggcccgcagtgctcacctttttagt

SEQ ID NO: 44835 - DNA, 110 bp, synthetic construct
  source 1..110: mol_type = other DNA
cctaggaatccagagctaggatgaggtcagggcccgcagtgctcacctttttagtttccttggaatgtccctaatgggaaatacagcccatagggagagcatgcatggga

SEQ ID NO: 44836 - DNA, 110 bp, synthetic construct
  source 1..110: mol_type = other DNA
tggagcagaactgctcgactgcccgacgtgcagaatcccaagagataatgaacggcctatgtgctatgccactaaactctaagctggctgacgacactgcaatagccacc

SEQ ID NO: 44837 - DNA, 110 bp, synthetic construct
  source 1..110: mol_type = other DNA
gatgggaatactacattttcaaatatttttaacctgtttttagttaccgaatatctcttttaacgggagaaatttgtgaacaactcctcataagacacagaggcctccaa

SEQ ID NO: 44838 - DNA, 110 bp, synthetic construct
  source 1..110: mol_type = other DNA
tcttttaacgggagaaatttgtgaacaactcctcataagacacagaggcctccaaacatcctggaacccaccttgaaaaacaaccctcaggtaactgcatcacccaccag

SEQ ID NO: 44839 - DNA, 110 bp, synthetic construct
  source 1..110: mol_type = other DNA
atagggagcacccttcctgcatccatactgtcttttagcggcattaatctctgcaatgcctctcggattgtactgcagctgacttactatctttgccaagggtggaatga

SEQ ID NO: 44840 - DNA, 110 bp, synthetic construct
  source 1..110: mol_type = other DNA
atgcctctcggattgtactgcagctgacttactatctttgccaagggtggaatgacagtttcagggactttcacgggctcttaacatcattatagtccttactttgcaag

SEQ ID NO: 44841 - DNA, 110 bp, synthetic construct
  source 1..110: mol_type = other DNA
tgggtgcaccactctgcccaaatatccatgtagtcaccagctcggaagctctctgaacctcctcctttggagtgtttacggaggattccttacaaatgattgaacaatta

SEQ ID NO: 44842 - DNA, 110 bp, synthetic construct
  source 1..110: mol_type = other DNA
ggcctgttttgttgttgttgctgtttttcaattctgtggctgcacctgtggcatatggaagttcctgagccaggagttaaacccaggcctcagctgcaacctatgttgca

SEQ ID NO: 44843 - DNA, 110 bp, synthetic construct
  source 1..110: mol_type = other DNA
tggaagttcctgagccaggagttaaacccaggcctcagctgcaacctatgttgcagttacggcatcatttaacacacttcactgggctcaggatggaacccatgcatccg

SEQ ID NO: 44844 - DNA, 110 bp, synthetic construct
  source 1..110: mol_type = other DNA
gtatcatgagggctgatgtttcccttcaataaacaagcaggtggaaccattttgacctaaggactggaacactcactagctgaggcaggggccaagtacaaaggcattta

SEQ ID NO: 44845 - DNA, 110 bp, synthetic construct
  source 1..110: mol_type = other DNA
cctaaggactggaacactcactagctgaggcaggggccaagtacaaaggcatttaccagcatttaccgattatgctagggggcaaggccagtcaggtgagcagggggtgg

SEQ ID NO: 44846 - DNA, 110 bp, synthetic construct
  source 1..110: mol_type = other DNA
tgaagttggtctgactttagaaaccaccctctctttcgctatttttttggtgtgacttttgtttgcttggttttgcttcatatatttatgtatggaacaaattcaggacc

SEQ ID NO: 44847 - DNA, 110 bp, synthetic construct
  source 1..110: mol_type = other DNA
cttttgtttgcttggttttgcttcatatatttatgtatggaacaaattcaggaccaactaggtgaaagccattgtgctcagaactcataccaattcgagcaagacatgcc

SEQ ID NO: 44848 - DNA, 110 bp, synthetic construct; identical to SEQ ID NO: 44846
  source 1..110: mol_type = other DNA

SEQ ID NO: 44849 - DNA, 110 bp, synthetic construct; identical to SEQ ID NO: 44847
  source 1..110: mol_type = other DNA

SEQ ID NO: 44850 - DNA, 110 bp, synthetic construct
  source 1..110: mol_type = other DNA
tcacgggggtggacgttaacagataatcaggcaaatgtcagctataaattgtgaaacgtgccaccaggaggaagtagctagacgtggtgagaaagaatactggaccagga

SEQ ID NO: 44851 - DNA, 110 bp, synthetic construct
  source 1..110: mol_type = other DNA
acgtgccaccaggaggaagtagctagacgtggtgagaaagaatactggaccaggaggtcagcagagtaacaccagccaccctgcccttctccccacgatggcatccaaag

SEQ ID NO: 44852 - DNA, 110 bp, synthetic construct
  source 1..110: mol_type = other DNA
cacccaaccccagtcctttggaacaagccgttccagtgctcaggcttgtttcttgtgccttaattcatctccagattttcttttcaaaatcccacagacttaccccttca

SEQ ID NO: 44853 - DNA, 110 bp, synthetic construct
  source 1..110: mol_type = other DNA
tgccttaattcatctccagattttcttttcaaaatcccacagacttaccccttcagagcttttcccccttcctgttatatctgtactgcctgttcctccctgatgctgtg

SEQ ID NO: 44854 - DNA, 110 bp, synthetic construct
  source 1..110: mol_type = other DNA
tcttatgaaacttccttatctggtcacttctgatgtcatactcctcatctcattgccataggaataggaaacaggataaaggtaaccaaagcaaaggttgatgacaatat

SEQ ID NO: 44855 - DNA, 110 bp, synthetic construct
  source 1..110: mol_type = other DNA
tcatactcctcatctcattgccataggaataggaaacaggataaaggtaaccaaagcaaaggttgatgacaatatacattattctctattgcatgtattattatatatga

SEQ ID NO: 44856 - DNA, 110 bp, synthetic construct
  source 1..110: mol_type = other DNA
aacaccagttgtgcagagtttagaaagtggcgtggttgctaggtcctggtttctcaagcaggatgaatgtcagactttgtggttggtggggaacgtgtccagactgatgg

SEQ ID NO: 44857 - DNA, 110 bp, synthetic construct
  source 1..110: mol_type = other DNA
aagcaggatgaatgtcagactttgtggttggtggggaacgtgtccagactgatggagatgaggatcacccgactcccctgtgggctctgctgaattcagagtgatatctg

SEQ ID NO: 44858 - DNA, 110 bp, synthetic construct
  source 1..110: mol_type = other DNA
attactgtatgctgccaaacccagtcccgtcctaggcactgaggatactatgatgaataacgaaacaaggtctctgccttcaaagagcttccaggctagaagggaagaca

SEQ ID NO: 44859 - DNA, 110 bp, synthetic construct
  source 1..110: mol_type = other DNA
aataacgaaacaaggtctctgccttcaaagagcttccaggctagaagggaagacagacaaagtatgtaacctaagagctgggaagaaatagagtaatagagccttatcct

SEQ ID NO: 44860 - DNA, 110 bp, synthetic construct
  source 1..110: mol_type = other DNA
aatctgtcattagtgctctttggatgcagcaatgcccaaagttctttagagcttgcattgctggtgatctcttgcttagagttttcctgatgtgggctgcaactcttctg

SEQ ID NO: 44861 - DNA, 110 bp, synthetic construct
  source 1..110: mol_type = other DNA
atggaaccaaagatcaagtgcaagatataacgcaccagtaggtaatagtaagctcaggtccaggagagctggaatcagaattgtgttcaaggttacggtcatggattaca

SEQ ID NO: 44862 - DNA, 110 bp, synthetic construct
  source 1..110: mol_type = other DNA
taaaccagtctaatatctctcagccaagaaatagatggggatttcatgttacaatagtatagctctttggtgagtctactcaattcattcacagttggtcaaaatgagat

SEQ ID NO: 44863 - DNA, 110 bp, synthetic construct
  source 1..110: mol_type = other DNA
attttctcagtacactcactactagacatcctaattgaatggattctcaacacgaagatttatacccatactatgctcatcttttggaggattcatgaactctcccttaa

SEQ ID NO: 44864 - DNA, 110 bp, synthetic construct
  source 1..110: mol_type = other DNA
agcattctctgtcgcggggtcaggaggctgtttgacttatttctacttaaagaactgtaagcaaaccacctagagagctcccagggctgccccatttcaccttccctctt

SEQ ID NO: 44865 - DNA, 110 bp, synthetic construct
  source 1..110: mol_type = other DNA
tgtaagcaaaccacctagagagctcccagggctgccccatttcaccttccctcttccgaggtgaccacatgtactgtcacagctgtaacagctgaagccaaggagtggga

SEQ ID NO: 44866 - DNA, 110 bp, synthetic construct
  source 1..110: mol_type = other DNA
tgacaatttcatggggaagatgataagaaagtaaatataaaattgaaattacaatgaaaagtacaattaaagctgtgtttatgatgcccaagactccatgatagggcctc

SEQ ID NO: 44867 - DNA, 110 bp, synthetic construct
  source 1..110: mol_type = other DNA
gaaaagtacaattaaagctgtgtttatgatgcccaagactccatgatagggcctcacaagaatgacctcctttaagttgtgtgggcaaagagcgttcttttgaggaaaca

SEQ ID NO: 44868 - DNA, 110 bp, synthetic construct; identical to SEQ ID NO: 44866
  source 1..110: mol_type = other DNA

SEQ ID NO: 44869 - DNA, 110 bp, synthetic construct; identical to SEQ ID NO: 44867
  source 1..110: mol_type = other DNA

SEQ ID NO: 44870 - DNA, 110 bp, synthetic construct
  source 1..110: mol_type = other DNA
gctgctaaatgactccttttcgagtaaaactcaatatacatattctaaaggccaaaatagaaggtcttctggtaaagctccacctccaaagagtctcagaagagccatag

SEQ ID NO: 44871 - DNA, 110 bp, synthetic construct
  source 1..110: mol_type = other DNA
aatagaaggtcttctggtaaagctccacctccaaagagtctcagaagagccatagaacatgatggctggtctagcagtagagataaatgttggtttcttaaagatcttag

SEQ ID NO: 44872 - DNA, 110 bp, synthetic construct
  source 1..110: mol_type = other DNA
aacacagaagagctccttaataatagctaatatttatccagccctgcagtaggcagttcatagtgttatatcctttaatcctcacaatcacttgaggcagatgctactag

SEQ ID NO: 44873 - DNA, 110 bp, synthetic construct
  source 1..110: mol_type = other DNA
aaaaatgagtaaaaaaacaatcactaccaccacggcaaacaatcctcttcagggtaataaattcaatgtgtttctcatggacgtatctgagagtctccttggaagactgc

SEQ ID NO: 44874 - DNA, 110 bp, synthetic construct
  source 1..110: mol_type = other DNA
aataaattcaatgtgtttctcatggacgtatctgagagtctccttggaagactgccttatgcccatcagtgtctataaccaacatttattttggttggcatcctttgcca

SEQ ID NO: 44875 - DNA, 110 bp, synthetic construct
  source 1..110: mol_type = other DNA
actctgctagaactcagtcatctttcagcctgaaggagatctcatcacagcaggtctttcaaacctctgtgggctctgaattagattctcactttgagagtcatccagag

SEQ ID NO: 44876 - DNA, 110 bp, synthetic construct
  source 1..110: mol_type = other DNA
agaaagtctttttatgtgcttcatcacaatgatcctgtgtggtagctgggtgcagaagtataaatgttccctggtggcccgctactttgggaatagatctccaatatata

SEQ ID NO: 44877 - DNA, 110 bp, synthetic construct
  source 1..110: mol_type = other DNA
ctctctaggataaagtttaatggtaagttttgcccaacccaaaccctatgctacccaacctacctcaagcagttagaaactactatacaggaatagtttggccatcccca

SEQ ID NO: 44878 - DNA, 110 bp, synthetic construct
  source 1..110: mol_type = other DNA
caacctacctcaagcagttagaaactactatacaggaatagtttggccatccccattgaaaagggaaacagtcacacaaagacaagggattttcttactgaaatcatccc

SEQ ID NO: 44879 - DNA, 110 bp, synthetic construct
  source 1..110: mol_type = other DNA
aattcctgttgtggtgcagaggaaactaacccgactagtaaccacaggttgccacttcgatccctggccttgtccactgggttggggatccagcattaccttgagctgtg

SEQ ID NO: 44880 - DNA, 110 bp, synthetic construct
  source 1..110: mol_type = other DNA
aacaagtgatagttctgaacagtctggaagggatatagctggggcatagatgggactaggattagttatcctgccacttgtcagcatgaaaaaccttactgtaattgcat

SEQ ID NO: 44881 - DNA, 110 bp, synthetic construct
  source 1..110: mol_type = other DNA
gcaagatcgtcagaaatttgggaaagtgcgagcaaattcagggatggtgaggggaaggactctggcttatctttggaagtctcagctcagaggattaacttctgagcagc

SEQ ID NO: 44882 - DNA, 110 bp, synthetic construct
  source 1..110: mol_type = other DNA
aggactctggcttatctttggaagtctcagctcagaggattaacttctgagcagcaggttgcaacctctgaaatgtcaggaattcaataaacaaactgctggagtcaatg

SEQ ID NO: 44883 - DNA, 110 bp, synthetic construct
  source 1..110: mol_type = other DNA
ggacagttgggagagaacgtccttggggatgtgcacagctggagcactgattcgggaaggacttccttctgctcaggatgtgtgcatcacctctgctctctaccagtgtt

SEQ ID NO: 44884 - DNA, 110 bp, synthetic construct
  source 1..110: mol_type = other DNA
tataccacctcgaatggatgcaactggtcacatatccaggccacccagcaggagggcgctcaaccccaaagagaagcttaccgctggggagggtggtttggtctagtggt

SEQ ID NO: 44885 - DNA, 110 bp, synthetic construct
  source 1..110: mol_type = other DNA
gaaaggaagatttatgtcacctatggtgttctttcctaaaagcctactggtatatggcatttagaaagattttagcttcttcaaataacccaccttgctcattcataaaa

SEQ ID NO: 44886 - DNA, 110 bp, synthetic construct
  source 1..110: mol_type = other DNA
ggcatttagaaagattttagcttcttcaaataacccaccttgctcattcataaaagctgcctgtaaattccctctatgatttttagacattgcaatgaaaagtcttcaca

SEQ ID NO: 44887 - DNA, 110 bp, synthetic construct
  source 1..110: mol_type = other DNA
gactggcagaagacaatcacaatagcaaagcctggaatacagatgttcagcacacacctctagacgacatccatcataatccggtcccctcgctgaatacgactgaagaa

SEQ ID NO: 44888 - DNA, 110 bp, synthetic construct
  source 1..110: mol_type = other DNA
acctctagacgacatccatcataatccggtcccctcgctgaatacgactgaagaataaatgagtaacacagatgctgctgttacttagagtaagccaggcagaagcagga

SEQ ID NO: 44889 - DNA, 110 bp, synthetic construct
  source 1..110: mol_type = other DNA
ggacctccagggtgagagctagtttggctcactgagaagtggccaaactttgaagccaaactgatttgagattcactggggtaatgtagtccattgctcactggcagcct

SEQ ID NO: 44890 - DNA, 110 bp, synthetic construct
  source 1..110: mol_type = other DNA
ccaaactgatttgagattcactggggtaatgtagtccattgctcactggcagccttgggagtgaatttgcagtgccttgcatttatatgactttctttctcagggacaat

SEQ ID NO: 44891 - DNA, 110 bp, synthetic construct
  source 1..110: mol_type = other DNA
gaagagtacatgcccttaactgctatactttgctgccaaattaataagccatcgtcccagctatgagaaagtgctggtgtagtagttggggcaagggatgagctagaggt

SEQ ID NO: 44892 - DNA, 110 bp, synthetic construct
  source 1..110: mol_type = other DNA
gtccttcattctgcaaacttgccttatattttgcaaaagagatttggggtaaccgatgttatgtattccagcttctctactgtggtctacccatccttattttcttccct

SEQ ID NO: 44893 - DNA, 110 bp, synthetic construct
  source 1..110: mol_type = other DNA
gctcctgaaaccctgtaacttcctatgtgataagagcactaggaccatctttcattccaatatttggcctttgtacccgtctagacacagggcccctgacacacttgtaa

SEQ ID NO: 44894 - DNA, 110 bp, synthetic construct
  source 1..110: mol_type = other DNA
aggaccttccttcccaggttctcacttggagataaatgaatcagtacatggtggtttggctgaattcattgttaaaatatcagctgatagttccacatcagctggtaagg

SEQ ID NO: 44895 - DNA, 110 bp, synthetic construct
  source 1..110: mol_type = other DNA
ttggctgaattcattgttaaaatatcagctgatagttccacatcagctggtaaggaatccttgcccagaggctgctgagtagtctctccattgctccacttccctggccc

SEQ ID NO: 44896 - DNA, 110 bp, synthetic construct
  source 1..110: mol_type = other DNA
tggcacaggccaaggatagtcagagagtggcagaggcatgtgccccgttgggagagcttggaaactgtccccatgtgccgacagagtcagccctctctagtggggcaagg

SEQ ID NO: 44897 - DNA, 110 bp, synthetic construct
  source 1..110: mol_type = other DNA
gcttggaaactgtccccatgtgccgacagagtcagccctctctagtggggcaaggagccagaagggaggtaaatctatgccagtcagagagggtacccccccatgtggct

SEQ ID NO: 44898 - DNA, 110 bp, synthetic construct
  source 1..110: mol_type = other DNA
gcactggtacaaaaacatgttgagaacaatgataacttctgttcttacactaagactcttcttatatagctcaggtcacaaatttgcctgatgaataatgcaaagagcat

SEQ ID NO: 44899 - DNA, 110 bp, synthetic construct
  source 1..110: mol_type = other DNA
attatgatttcctttctcaaatattcattagagtgaggacagcaaaactagatacgatcgtctcatgaggagggccagttgttgtatgctgtgcacctttgatgtgtcag

SEQ ID NO: 44900 - DNA, 110 bp, synthetic construct
  source 1..110: mol_type = other DNA
gatcgtctcatgaggagggccagttgttgtatgctgtgcacctttgatgtgtcagcttctaattaatacaatctcattaaaaaaatcaaggtctgaaaagcaagaaaagt

SEQ ID NO: 44901 - DNA, 110 bp, synthetic construct; identical to SEQ ID NO: 44899
  source 1..110: mol_type = other DNA

SEQ ID NO: 44902 - DNA, 110 bp, synthetic construct; identical to SEQ ID NO: 44900
  source 1..110: mol_type = other DNA

SEQ ID NO: 44903 - DNA, 110 bp, synthetic construct
  source 1..110: mol_type = other DNA
ccccctgcattgagtgcaaataaactgcgtgccttagtttaacccttggacattggcttccagatggcaattactgaagctatcagtgaccaggagctacaatgaagctg

SEQ ID NO: 44904 - DNA, 110 bp, synthetic construct
  source 1..110: mol_type = other DNA
gcttccagatggcaattactgaagctatcagtgaccaggagctacaatgaagctgtcactggggtggtaggttttcgtgccactcagactgatgggataagacaaaggct

SEQ ID NO: 44905 - DNA, 110 bp, synthetic construct
  source 1..110: mol_type = other DNA
ccttatgagtcagaaactccaggcttgagctcctgctgaatgagcaatttctcgtcattcaagaattattccctggcagccattcctgaccaggctgtaggtagtttatt

SEQ ID NO: 44906 - DNA, 110 bp, synthetic construct
  source 1..110: mol_type = other DNA
tttcccttgtttgaccagtgtgtgagaattaaagaaaatcaaccctggccaactgtctgaagagctttccttcagttttctttcttcttcaaatccactgccaatcagtt

SEQ ID NO: 44907 - DNA, 110 bp, synthetic construct
  source 1..110: mol_type = other DNA
tctgaagagctttccttcagttttctttcttcttcaaatccactgccaatcagtttcccagtcgtctctctctcttgcttccttgctccttcctccttccctatgtccca

SEQ ID NO: 44908 - DNA, 110 bp, synthetic construct
  source 1..110: mol_type = other DNA
ctcaaataaggcagatataaggatcaacactcagatcctccaccaagaaaagatgtgctgccttggcagctgagagagtgctcagcagatagtgtttggcttacagttcc

SEQ ID NO: 44909 - DNA, 110 bp, synthetic construct
  source 1..110: mol_type = other DNA
gagtaaaggactctgattttaagacaatagtcttcactttttaactgtatcttgttgggcctcttaggtgaaatctttgacaatttgttcatatttgagagtgagatctt

SEQ ID NO: 44910 - DNA, 110 bp, synthetic construct
  source 1..110: mol_type = other DNA
tgggcctcttaggtgaaatctttgacaatttgttcatatttgagagtgagatctttaaaagacttgtctacttgtagaagcattctagttaacaaatacagtatagaaga

SEQ ID NO: 44911 - DNA, 110 bp, synthetic construct
  source 1..110: mol_type = other DNA
taattatctacagggcaaggatctgttctttgaattgaccacagcaaaatctaaatttggagtcagcttcctctggctactattctcatcactgcattctctctttgtaa

SEQ ID NO: 44912 - DNA, 110 bp, synthetic construct
  source 1..110: mol_type = other DNA
tttggagtcagcttcctctggctactattctcatcactgcattctctctttgtaactcacagttttatgtgctaagagttttggttcccaaccatggccatacattcgaa

SEQ ID NO: 44913 - DNA, 110 bp, synthetic construct
  source 1..110: mol_type = other DNA
ttcatttttagcttattgtaacattctaacaatctacactaatccactcaataaaattgagaaggaatctagggagaatctgagttaggcctcacagaaattttaaagcc

SEQ ID NO: 44914 - DNA, 110 bp, synthetic construct; identical to SEQ ID NO: 44913
  source 1..110: mol_type = other DNA

SEQ ID NO: 44915 - DNA, 110 bp, synthetic construct
  source 1..110: mol_type = other DNA
atacactgattacctctgaatttccctgtgtagaaattctatttcagtttcagaatttaaaaacaatttgaaggaaagctgacggagaaaaagttcaggaaggtcacatt

SEQ ID NO: 44916 - DNA, 110 bp, synthetic construct
  source 1..110: mol_type = other DNA
tttaaaaacaatttgaaggaaagctgacggagaaaaagttcaggaaggtcacatttatgatgtgacataggattgtgattaaagttaatacggagaatgactagtgacat

SEQ ID NO: 44917 - DNA, 110 bp, synthetic construct
  source 1..110: mol_type = other DNA
aagcctaatgctccctgaagccccctctctgatttcctaacactataccatttccctgatggactggccagctccctttcactgttggaatgcatacaatccagaaaaac

SEQ ID NO: 44918 - DNA, 110 bp, synthetic construct
  source 1..110: mol_type = other DNA
gcaactacctgcgtgctctttggatacaacataaagcacaagttacaaccgttacagctttaatgtttggcgcaaaatttgacagaacattttaagtcaactgtgataaa

SEQ ID NO: 44919 - DNA, 110 bp, synthetic construct
  source 1..110: mol_type = other DNA
gtcacctatagagaggccaaacataagctaaatccagccaaaccaaggtggcttgagagcccaaagtgcaggtgagcctgaagaacaaggttgtgtggtttataccctag

SEQ ID NO: 44920 - DNA, 110 bp, synthetic construct
  source 1..110: mol_type = other DNA
gaaggtgaggttttcctgcattttcctcctcacttatttggagactcacacggagctgtgatctttctgagggccaaatggaaggaagcacagagctgttaaacccagac

SEQ ID NO: 44921 - DNA, 110 bp, synthetic construct
  source 1..110: mol_type = other DNA
cttaaggctcctcttacagtcacacaatagctctctgaacactagaaaacaaccatcaaagtgccataatcttttcttctctagactaaacatcctgtggtcactcaata

SEQ ID NO: 44922 - DNA, 110 bp, synthetic construct
  source 1..110: mol_type = other DNA
aaaccagtctgcctggtttctttcaatggagcatcaattatttcgctgcaagacccgggctattgtgtgtgtcttaaaacccatgcctcctggaagaatccaagaagagt

SEQ ID NO: 44923 - DNA, 110 bp, synthetic construct
  source 1..110: mol_type = other DNA
cgggctattgtgtgtgtcttaaaacccatgcctcctggaagaatccaagaagagtgacaaagaatcttgaaaaaggtactgaacaaagaaagaggcattcagtagcccag

SEQ ID NO: 44924 - DNA, 110 bp, synthetic construct
  source 1..110: mol_type = other DNA
aaatgttataaggttgggctaattgccaagatttttaaaatataaaatcaccatgtctatctgggaaatatcagttaacagttacagagaatgcagtcgctctttttgag

SEQ ID NO: 44925 - DNA, 110 bp, synthetic construct
  source 1..110: mol_type = other DNA
ggtgagcatttagcctacatttcccccaaacaattctgatttaaaatattctgtcctattgaccccataagcacacttaaacttgtcagttcacgtgcccatttttggtt

SEQ ID NO: 44926 - DNA, 110 bp, synthetic construct
  source 1..110: mol_type = other DNA
ctacacctcccacccgacccgccaatctgcccccaccctcaccccatttaatggaccagcttgccacccacccctcctcagcaagcaagcaaaggaacttgttatctatt

SEQ ID NO: 44927 - DNA, 110 bp, synthetic construct
  source 1..110: mol_type = other DNA
ccagcttgccacccacccctcctcagcaagcaagcaaaggaacttgttatctattcttgttcccttgtgctgtagcataaatctcaataaagacttgcctgaatttctca

SEQ ID NO: 44928 - DNA, 110 bp, synthetic construct
  source 1..110: mol_type = other DNA
tttcctctgggaacaaacatgccctgctattgttactgccaaaggctctgggtgctgcctacaactgcctgagggtaacttccacttcccaaggccctgtaaccaggagc

SEQ ID NO: 44929 - DNA, 110 bp, synthetic construct
  source 1..110: mol_type = other DNA
tgcctacaactgcctgagggtaacttccacttcccaaggccctgtaaccaggagcagcctgcaccaccttcctgcaggtcctcactgctgtcgagggaccagcaaccagg

SEQ ID NO: 44930 - DNA, 110 bp, synthetic construct
  source 1..110: mol_type = other DNA
ttctttttaagacttgtgcatttaaaagttaaagccaataaagtcggtgaaactccaaatacatgaaaaatagtttgtgatactttcgtcaagtctcaattccagctgat

SEQ ID NO: 44931 - DNA, 110 bp, synthetic construct
  source 1..110: mol_type = other DNA
ctatgaatctaggtttccattgacacagcactaaacctaagacaaacattataatgtaggtgaaatatgatccccttgcctgcgggctgcttcctttggccaaccacctc

SEQ ID NO: 44932 - DNA, 110 bp, synthetic construct
  source 1..110: mol_type = other DNA
gtaggtgaaatatgatccccttgcctgcgggctgcttcctttggccaaccacctcctaatgccagtgcctgcccagcctcaaggatctgttccccttctgtactttcatt

SEQ ID NO: 44933 - DNA, 110 bp, synthetic construct
  source 1..110: mol_type = other DNA
aagataaagtcatcatgctcatgtggatatcaaatgagcatgtattgaagattttatttaattcatcactaatgaaggagtcgataagagattattagcaggagtttctg

SEQ ID NO: 44934 - DNA, 110 bp, synthetic construct
  source 1..110: mol_type = other DNA
atttaattcatcactaatgaaggagtcgataagagattattagcaggagtttctgctgtggcacagtggactaagaatctgactgcagcagctgagggtcactgtgaagg

SEQ ID NO: 44935 - DNA, 110 bp, synthetic construct
  source 1..110: mol_type = other DNA
catatgactccgttttatcgcctataggtgatataaattctgtgctgaagccagacaactgtgggaaaatatatgttttaaatacagtctcctggacactgaacaattta

SEQ ID NO: 44936 - DNA, 110 bp, synthetic construct
  source 1..110: mol_type = other DNA
ggctgagtgaggggaccctgagacagatgaggatggagggttaggcaggagccagatcatctggagcttcatcagctgtgctaaagcactaggatttcattgaagaacaa

SEQ ID NO: 44937 - DNA, 110 bp, synthetic construct
  source 1..110: mol_type = other DNA
tcactgtgatgaaactgtgtctgaaaggggcttgaaaagtcatcaaacagatccactgaatgccagacaaggccctatgtaaccaatcccactttttaaagattctcaga

SEQ ID NO: 44938 - DNA, 110 bp, synthetic construct
  source 1..110: mol_type = other DNA
ctgaatgccagacaaggccctatgtaaccaatcccactttttaaagattctcagagaaagaggaaacccctttaggattcattctaaaatttcatcttttccgtaagtga

SEQ ID NO: 44939 - DNA, 110 bp, synthetic construct
  source 1..110: mol_type = other DNA
tctttcaccatccaaatctattcagctcctgagttaggagagttagagagtagcaagttcattcattaagggacattgtattatccaaatctatctgttttgaatttcgg

SEQ ID NO: 44940 - DNA, 110 bp, synthetic construct
  source 1..110: mol_type = other DNA
ggatttggccatgggttataaatagtaagtacctatgtaactctttcctgtgacttgttgctgtgttaaacagacctgtcttttccacactttaacttttgcagaaagca

SEQ ID NO: 44941 - DNA, 110 bp, synthetic construct
  source 1..110: mol_type = other DNA
tgttgctgtgttaaacagacctgtcttttccacactttaacttttgcagaaagcagacacaaaccattttaaagactcaccaactctgaaggctttaaatgccaacatgg

SEQ ID NO: 44942 - DNA, 110 bp, synthetic construct
  source 1..110: mol_type = other DNA
aggctacaaaatagactgtagctattaagacagctcatctcaacatataaagagcatacactctttacagaaataataagtaatatgatattcccatgttaatatcagtg

SEQ ID NO: 44943 - DNA, 110 bp, synthetic construct
  source 1..110: mol_type = other DNA
ctggctatttccgctatttaggttttaggagctgataagtaactgtgattagccattcagattttgtctgaaaagaaataaaatcatttaattactttaaaaagacatgt

SEQ ID NO: 44944 - DNA, 110 bp, synthetic construct
  source 1..110: mol_type = other DNA
gtaattagtaccagaagtggttctcaccaataaaacatcaaagaaatggacttgattttgtttaaaggcaattgcatcccagaatgagcaattacttaagttgtggtctc

SEQ ID NO: 44945 - DNA, 110 bp, synthetic construct
  source 1..110: mol_type = other DNA
aaaggctattcccctctcccaccaagattgcctgctatagctgatgaccaaaaaagatatgtactacaaaatagaagggcagcagggccattacatatggtccagtcaca

SEQ ID NO: 44946 - DNA, 110 bp, synthetic construct
  source 1..110: mol_type = other DNA
ctcaagcttaggattcctgagctgtggcacagaccccactgtgtgtgtaccacatccctcttggccatactgcatcatccacgttggacttggggccaaggggaacccat

SEQ ID NO: 44947 - DNA, 110 bp, synthetic construct
  source 1..110: mol_type = other DNA
aaaaatctctgtgtaatatattgttcagcacatcgttcatcatcataattgccatagtcgacactttgctcatttgtagatgtttttcctttcttgccagaaaacttctt

SEQ ID NO: 44948 - DNA, 110 bp, synthetic construct
  source 1..110: mol_type = other DNA
gccacagccacagcagtgtggtatctgagccatgtctacagctcacaacactggatccttaatccactgatcagagtcagggatcaaacctgcactctcatggatactag

SEQ ID NO: 44949 - DNA, 110 bp, synthetic construct
  source 1..110: mol_type = other DNA
ggatttggcatcctggggccatttaaaatgatgaggagagaaattttagtagattagtggaaaggcagtgttgcaggagagaaattttagagtagtggaaaggcagtgtt

SEQ ID NO: 44950 - DNA, 110 bp, synthetic construct
  source 1..110: mol_type = other DNA
atactttactatacactttctggtatatgatgtatgttgattaactagcactttaggtcgtttttgtagaatagctggacaacgggcttttggtcaggtatataatggca

SEQ ID NO: 44951 - DNA, 110 bp, synthetic construct
  source 1..110: mol_type = other DNA
caaagagaactcaagtactccttgcagtgggtttaagtaacagttttatgctacactgtataagatggtggttctttaatcttattgtacataagaatcactacagaggc

SEQ ID NO: 44952 - DNA, 110 bp, synthetic construct
  source 1..110: mol_type = other DNA
ctgtataagatggtggttctttaatcttattgtacataagaatcactacagaggcttggacggtctttgctgggctccacatctagagttctgatttagtaggtggaatg

SEQ ID NO: 44953 - DNA, 110 bp, synthetic construct
  source 1..110: mol_type = other DNA
tcatatctcagctcgacctcattttagctggtgaagtattccatgcaaccaaaaacaacatcaatagcactcaagtccattatcagttccttgaattctacgagggaaat

SEQ ID NO: 44954 - DNA, 110 bp, synthetic construct
  source 1..110: mol_type = other DNA
caacatcaatagcactcaagtccattatcagttccttgaattctacgagggaaattacatatccatcagcaatactcttaccattttttcctccagttccttgtcttcac

SEQ ID NO: 44955 - DNA, 110 bp, synthetic construct
  source 1..110: mol_type = other DNA
gctccatcaaatcattctttaaattgttttgcccttaattcccttattagagagcaataaccctgaacttatgactttagaattttagtttgcctgtagttttatgtcaa

SEQ ID NO: 44956 - DNA, 110 bp, synthetic construct; identical to SEQ ID NO: 44955
  source 1..110: mol_type = other DNA

SEQ ID NO: 44957 - DNA, 110 bp, synthetic construct
  source 1..110: mol_type = other DNA
actttgcaaagtgatatatacatatgaatatttttattgctgaccttagctcacagcatccctcatatgcagtcagaagtcctggtcctgtatggatgcaaacagatgcc

SEQ ID NO: 44958 - DNA, 110 bp, synthetic construct
  source 1..110: mol_type = other DNA
tttgtgggtgttccatctgtgcagtcatacaaggctccatgctcagatggccccacatttgttttaaagctttgctgttgctgtcttgagattcttaataatttttcaac

SEQ ID NO: 44959 - DNA, 110 bp, synthetic construct
  source 1..110: mol_type = other DNA
gaggcagtagtgagtgtgtgtgtgaagcctttactgtaacatcaaaaatgatatatcatgagaaaacctcatcacattgggagtcaccccaccacccaagtattcctgag

SEQ ID NO: 44960 - DNA, 110 bp, synthetic construct
  source 1..110: mol_type = other DNA
ttgtcaaattatatgactttgctaaaaatggtgagttttccagagtctaccctaatagagaattacattaagtctctacaaattcaggataaattgtcagcaacccaact

SEQ ID NO: 44961 - DNA, 110 bp, synthetic construct
  source 1..110: mol_type = other DNA
acaatatacactttaatgcctactggaaatcttgtattcttttctcaaagagcttctcccttccttcatcccttaactgtttaagcttcaggcaccacaaaatgtgtctt

SEQ ID NO: 44962 - DNA, 110 bp, synthetic construct
  source 1..110: mol_type = other DNA
tgactggttttacttagcattattgtcttccagatctatcaatgttgacacaaatggtaggatatctttcttatataagctgaatgatattccattgtatgtctatgtca

SEQ ID NO: 44963 - DNA, 110 bp, synthetic construct
  source 1..110: mol_type = other DNA
cacaaggaattgctgaaaaaagtgacagaaacatccaactaggtgctgggcatagtgaggcaaggagctgttacacttgagaaaagcttgttgcttagtattttacaaat

SEQ ID NO: 44964 - DNA, 110 bp, synthetic construct
  source 1..110: mol_type = other DNA
tgaggcaaggagctgttacacttgagaaaagcttgttgcttagtattttacaaatacagtctcattgaaaactctgtgaggttaagagctattatgtcaatttatagaac

SEQ ID NO: 44965 - DNA, 110 bp, synthetic construct
  source 1..110: mol_type = other DNA
ttgtctcttttcctcatttagcctggatagaatcttattggtattattgatatattcaaggaaacagcttctggtttccatgatattctctactgatctcctattttcaa

SEQ ID NO: 44966 - DNA, 110 bp, synthetic construct
  source 1..110: mol_type = other DNA
tcctgacaccaatttcatttggaggtccatatccctcatttaaaaaaatttgtgtcctcgcactaacttgttgagagtggtatcacaattatcacaggtaatatgtgaac

SEQ ID NO: 44967 - DNA, 110 bp, synthetic construct
  source 1..110: mol_type = other DNA
agagaaaaattttatactaaaagtgattcaaaacgacagtggtacctatatgtaaatgctgccgtaattctggtgcctaacattgtgctgtactgcaactaaaaagagaa

SEQ ID NO: 44968 - DNA, 110 bp, synthetic construct
  source 1..110: mol_type = other DNA
atgctgccgtaattctggtgcctaacattgtgctgtactgcaactaaaaagagaaaattaaagatgttgtcgctggaaattctggaaaaatttctgatctttttcacata

SEQ ID NO: 44969 - DNA, 110 bp, synthetic construct
  source 1..110: mol_type = other DNA
tgcattcattttttttttactagtactttatccttcatcatgctcttgtattttaacttctgtgggacaaattgagctgcacagaaataattatcggacacgtgacctcc

SEQ ID NO: 44970 - DNA, 110 bp, synthetic construct
  source 1..110: mol_type = other DNA
tgttcaataaaagctaaaagcgaattatagaaacgatgcctccagttttctcatatacactctggaaagacaatgcaatgtttggggcaacaaaataataaaaatgaaga

SEQ ID NO: 44971 - DNA, 110 bp, synthetic construct; identical to SEQ ID NO: 44970
  source 1..110: mol_type = other DNA

SEQ ID NO: 44972 - DNA, 110 bp, synthetic construct
  source 1..110: mol_type = other DNA
aagacttgtaataactaaaaagtcaaactttggcaagagctaaaataatttggagttatctgcccttgacttttttttatagacatctccttctaaggggatgcagaggg

SEQ ID NO: 44973 - DNA, 110 bp, synthetic construct
  source 1..110: mol_type = other DNA
aaatcccatagctagcaagtggtcaaacagcatttgaatttctttctttctttttttttttttttttttgtctttttttttgccatttcttgggccgcttgcacagcata

SEQ ID NO: 44974 - DNA, 110 bp, synthetic construct; identical to SEQ ID NO: 44973
  source 1..110: mol_type = other DNA

SEQ ID NO: 44975 - DNA, 110 bp, synthetic construct
  source 1..110: mol_type = other DNA
cattgcagccagaacacagcttctgtagaaaaattcaatgaagcagtggcatatgacggaggaaatattgtttcagcaataaaattcttcactaactaataaagttgtct

SEQ ID NO: 44976 - DNA, 110 bp, synthetic construct
  source 1..110: mol_type = other DNA
ttgtatagtcaccatcatcttcggccaacttagtctgcaagtcttatttccaacccaaggtctaccaattaatcttttgcccacctttttagagaccacatacccattct

SEQ ID NO: 44977 - DNA, 110 bp, synthetic construct
  source 1..110: mol_type = other DNA
agggccttgttggatctttagattcagacatttaaattcacaagttcacttacagtaattccattagttagctgggggaaaggtcaagagagacaagcaagttggcaaga

SEQ ID NO: 44978 - DNA, 110 bp, synthetic construct
  source 1..110: mol_type = other DNA
aatccacgccatttatcttcctagattgtagtaactgttaggagtagacatttcattgatcagaactgtgctctcactacttgtgtttctgtaagtgggcttcaagtcca

SEQ ID NO: 44979 - DNA, 110 bp, synthetic construct
  source 1..110: mol_type = other DNA
gaggccaacaagatcccagagaagcttgcccagagctgcacctccctggccacagagctgacaccaactactgcctacctccaagcagctggttgaataaggaaaataaa

SEQ ID NO: 44980 - DNA, 110 bp, synthetic construct
  source 1..110: mol_type = other DNA
ctgtgcatttgcagtttgcccgtacatgtcaagctcgccaattgattagctaagatttgtcctctttttcattaccttcatttagaggtataggacttcctccccccacc

SEQ ID NO: 44981 - DNA, 110 bp, synthetic construct
  source 1..110: mol_type = other DNA
aatcattaacagtgatatctgcctttgtcatttaggaaaaacactattacaaactgaaatagaatagctatggttcgggcatacaaggtaacactaagtggcattagaaa

SEQ ID NO: 44982 - DNA, 110 bp, synthetic construct
  source 1..110: mol_type = other DNA
actggctgtgacagcctggatggtctctttagtctccagctcttcctctccagcaaattctctaccagatatcaaaaatgaggatttcatcaaagactgtgttcgaattc

SEQ ID NO: 44983 - DNA, 110 bp, synthetic construct
  source 1..110: mol_type = other DNA
tttgtaagggacacagtccaaagataggacttctctccagctatgtttagcggacacattaaaggaaaaaagtcaagttctaggactgatccaagtcttagagttctgtt

SEQ ID NO: 44984 - DNA, 110 bp, synthetic construct
  source 1..110: mol_type = other DNA
actttcccatatagattattaaagaacattgagtagacctccctatcatctatcatttttttaatattggcagtatttaacaataagatcccagggttttcatcatggct

SEQ ID NO: 44985 - DNA, 110 bp, synthetic construct
  source 1..110: mol_type = other DNA
taccagatatacattcttgtgaagcaaggagaccaagagctacagaagctaagggaaaagttgccaggaattagagaaaagaggtatggggagaaaagtcagggccccta

SEQ ID NO: 44986 - DNA, 110 bp, synthetic construct
  source 1..110: mol_type = other DNA
gtttcctttgatttaattaagaaggagctggaagaagttggcttaagccaatagcatgagagagcagaagaggcgtggtaccaaggatctgctcaggaagcaaaaccatg

SEQ ID NO: 44987 - DNA, 110 bp, synthetic construct
  source 1..110: mol_type = other DNA
taaagagccagtttcctcagaccccattgcaatgcttgctgaaggccacttaacttcccaggctaaagtcttcccagcccagagtctccaatctcccagaagtcagaggc

SEQ ID NO: 44988 - DNA, 110 bp, synthetic construct
  source 1..110: mol_type = other DNA
tgaaagtaaacattttaccacattcaagcaaaagcattcatagctactccccagttactccctgctctttcctctctgccatgaaaatgtcatgtcctaaatagggactg

SEQ ID NO: 44989 - DNA, 110 bp, synthetic construct
  source 1..110: mol_type = other DNA
agataaaggcctgaaagcaacttcttcaaggttaagcaatgacgtgtgtgtgatggatttgaactcaaccttgctcccctttaacacttgtgctttgtcttttcggtatt

SEQ ID NO: 44990 - DNA, 110 bp, synthetic construct
  source 1..110: mol_type = other DNA
gctccaagtcagaaagctcacaatgcagctgaatggggctgagatccaagggaatgttcccataccctccagaggcagcaagtaggtagtgagcactggccaaaagagag

SEQ ID NO: 44991 - DNA, 110 bp, synthetic construct
  source 1..110: mol_type = other DNA
gacagtttaagaaatattaaagtgtgcaattaaacagaccgaggcttgaatcctaatcccagaccctattagttatgtaaacaaaagcaattcctccacctccaagtctc

SEQ ID NO: 44992 - DNA, 110 bp, synthetic construct
  source 1..110: mol_type = other DNA
atcccagaccctattagttatgtaaacaaaagcaattcctccacctccaagtctcttgcttttctgtggggggaggagggacagtctgtgaaagaactataaaaatactc

SEQ ID NO: 44993 - DNA, 110 bp, synthetic construct
  source 1..110: mol_type = other DNA
aaatattaagatatttccataatctagcttctctttatgaagtttatagagtatgaattcaactgtcataaaagctaactacagagagttccctggtggcacagtgggtt

SEQ ID NO: 44994 - DNA, 110 bp, synthetic construct
  source 1..110: mol_type = other DNA
ttcaagaggatacatgtaagatatgcctgtctttaaattatacaataatttttattggtgggtacatacacagaaaacaaaagaaggatggtcacaaatttggattagca

SEQ ID NO: 44995 - DNA, 110 bp, synthetic construct
  source 1..110: mol_type = other DNA
ctttgcctcccccaagcagttattctgctcttgccaaactcatagttttaaatatcttgatgattaagtttatgaaaaatgcatatcagtgacctgacacaaaattaaaa

SEQ ID NO: 44996 - DNA, 110 bp, synthetic construct
  source 1..110: mol_type = other DNA
tctaacgcttcttagaaagtatacctcaatatgtgtccaaatttggagacagaatcttcaaatagctgattaagttaaaacaaggccattcaattgggctctaattcaat

SEQ ID NO: 44997 - DNA, 110 bp, synthetic construct
  source 1..110: mol_type = other DNA
agattctaggatatcagaaccacgtcagctgagattagtacttaacccactgacctgtgactttctggagtatctcaagtttcaccataggataaaagcatggtaatttc

SEQ ID NO: 44998 - DNA, 110 bp, synthetic construct
  source 1..110: mol_type = other DNA
agaaagggaaacctagggaactctgggagatcatcaaattaataattgcccaagagggccatcagaaggaggccggtttgcgtgactagcggaggctcaagatatgcctc

SEQ ID NO: 44999 - DNA, 110 bp, synthetic construct
  source 1..110: mol_type = other DNA
ctgcttggttaacaaatgtatatttgtggccctttcatgcaatagaattcaagctgtattttataaaaagcaaaacaggagttctcgttgtggcgcagcagaaacaaatc

SEQ ID NO: 45000 - DNA, 110 bp, synthetic construct
  source 1..110: mol_type = other DNA
gaccttaactgggagtatagcttgggtgcatcttacaagtttcaggtcccgggaaaactaccccattccaggctcactcaggctcgccatgctctcacacatgaattaaa

SEQ ID NO: 45001 - DNA, 110 bp, synthetic construct
  source 1..110: mol_type = other DNA
aacagaatacaaaggctatggacaatcctgcagaaaaggttaggacataagcagtcgtactgcaaaaaattttgaagctctactaaggaatttgagatttaaccttagga

SEQ ID NO: 45002 - DNA, 110 bp, synthetic construct
  source 1..110: mol_type = other DNA
cgtactgcaaaaaattttgaagctctactaaggaatttgagatttaaccttaggatagttaaccttaggatagtgaagcattattgaagggttttgaagggtaataacat

SEQ ID NO: 45003 - DNA, 110 bp, synthetic construct
  source 1..110: mol_type = other DNA
tacactgtgagtgcagggtacgctaggagacatctgagaaagaagccacctttaagaagtgatttctgctttctaaaataagacatttacaaatagcagtaacaggcttt

SEQ ID NO: 45004 - DNA, 110 bp, synthetic construct
  source 1..110: mol_type = other DNA
ctaatgtgttatacatttaatttatagcgcaatcaattgagcagcgactgatgaaaatggatcacactgcaatccacccacatctacttgatatgaaaattggtcaaggc

SEQ ID NO: 45005 - DNA, 110 bp, synthetic construct
  source 1..110: mol_type = other DNA
aatggatcacactgcaatccacccacatctacttgatatgaaaattggtcaaggcaaatacgagcaaggattctttccgaagctacagtctgatgtcttggcaacaggac

SEQ ID NO: 45006 - DNA, 110 bp, synthetic construct
  source 1..110: mol_type = other DNA
caatgaaatgcctaacaaacttgataccagcccttcaagcatttgtagtagagaagattgtatagaaaatagagataagtaattgtaacaccctgtgatagctactgcaa

SEQ ID NO: 45007 - DNA, 110 bp, synthetic construct
  source 1..110: mol_type = other DNA
gattgtatagaaaatagagataagtaattgtaacaccctgtgatagctactgcaattggagagtataagaggggtagctaatttagatttggaggaatcctaactttcta

SEQ ID NO: 45008 - DNA, 110 bp, synthetic construct
  source 1..110: mol_type = other DNA
atatagaaataattgcaatatgtctttcggtagagtggatagcacttgctgatgatttattatatggctgttcacagacaagttaagtaagtttggccaagttcacaaac

SEQ ID NO: 45009 - DNA, 110 bp, synthetic construct
  source 1..110: mol_type = other DNA
tttattatatggctgttcacagacaagttaagtaagtttggccaagttcacaaactgtcattgaaagagccagtattagacctctgccagcatgattcttagtccagttc

SEQ ID NO: 45010 - DNA, 110 bp, synthetic construct
  source 1..110: mol_type = other DNA
ttaaatttgaagagaccttagaaatcgtctagtcgagttcttccaaatatgtatgtgtggaggatgggcagtagtagaatgggcagtaggatttgtttgaaaacaaaaca

SEQ ID NO: 45011 - DNA, 110 bp, synthetic construct; identical to SEQ ID NO: 45010
  source 1..110: mol_type = other DNA

SEQ ID NO: 45012 - DNA, 110 bp, synthetic construct
  source 1..110: mol_type = other DNA
cattgtaaaggttatatttcatcttttaaatctgtagtatagaaattgacacacaatcacttctgaaatcagacttggagaccatgtggatattttgttctgcacaatgg

SEQ ID NO: 45013 - DNA, 110 bp, synthetic construct
  source 1..110: mol_type = other DNA
tgaacaaggtgagggcagctatagctgatgttggtggagatgtcaggttgggagctgtcttgagttctgactggtgtgccagaacccctccagttcctactctggtgggg

SEQ ID NO: 45014 - DNA, 110 bp, synthetic construct
  source 1..110: mol_type = other DNA
tgtcttgagttctgactggtgtgccagaacccctccagttcctactctggtgggggcagggagaacacacatgtagaggaaaagaaaccagctcagactcaacccgtatg

SEQ ID NO: 45015 - DNA, 110 bp, synthetic construct
  source 1..110: mol_type = other DNA
ttatggctgattttacagcccagctcatcattaatatggtttccatgtgaattcgtagaccaaaaaccttcccatgagccttctctttatatattcaccttaggagcgga

SEQ ID NO: 45016 - DNA, 110 bp, synthetic construct
  source 1..110: mol_type = other DNA
ggagagggcgagcgtgtagccctactcttccgccatcttgtctccttcctcacgcttgtttatttcaatggtaagctcaataagggtagagcctttttttttggtttgtt

SEQ ID NO: 45017 - DNA, 110 bp, synthetic construct
  source 1..110: mol_type = other DNA
cctgatttgacccccgcccaggaacttccatatgccacaggtgccgccctaaaaataaaacaaacaaacaatggccctggttgcctactagaaacactagacctgcctgc

SEQ ID NO: 45018 - DNA, 110 bp, synthetic construct
  source 1..110: mol_type = other DNA
tacaaatgctggaatgcgaagcaatttgaatcttgattggttccagcttttccttggaaaactcatcagctgttatgccagggatcaagccgcaattcccaggtctaccc

SEQ ID NO: 45019 - DNA, 110 bp, synthetic construct
  source 1..110: mol_type = other DNA
gcatacatttttgattatcttgggttggtcttttgtactttcaagcaccctcacaacctagtacttctttataatgcaatgacttccacctgtcttagcatgacattcaa

SEQ ID NO: 45020 - DNA, 110 bp, synthetic construct
  source 1..110: mol_type = other DNA
acctagtacttctttataatgcaatgacttccacctgtcttagcatgacattcaagacttttcatagtatgtccccagattcccttccaaatttgcctctaggtgtcttc

SEQ ID NO: 45021 - DNA, 110 bp, synthetic construct
  source 1..110: mol_type = other DNA
tgagctctgttgtaactgacttgctatatgaccttgggccagttatttcagttctctgggtctctattttctcatctttaaaatggatatgagttatccttgcggctcag

SEQ ID NO: 45022 - DNA, 110 bp, synthetic construct
  source 1..110: mol_type = other DNA
agctgtttcaatttacacaattctgagaactggcttcagggaattgggaacaatctgacctggaactgtacataataccaccaagagatgctgatcacaccaccacatga

SEQ ID NO: 45023 - DNA, 110 bp, synthetic construct
  source 1..110: mol_type = other DNA
gaattcatcactccttttatataatgtggccttgaagtaagccaagaatgtcattgtaaatttgtttgataaagcgtaacaaattcttatctgcctttaggaaatattgt

SEQ ID NO: 45024 - DNA, 110 bp, synthetic construct
  source 1..110: mol_type = other DNA
aggagttacacatcccctattttaaataaaaagctagaaatgactaagctttgtgaggaaggcatgtcaaaagctgagacaggctgaaggctaggcctcttgtaccaaac

SEQ ID NO: 45025 - DNA, 110 bp, synthetic construct
  source 1..110: mol_type = other DNA
agaaatgactaagctttgtgaggaaggcatgtcaaaagctgagacaggctgaaggctaggcctcttgtaccaaacagttagccaagttatgaatggaaaggaaaagttgg

SEQ ID NO: 45026 - DNA, 110 bp, synthetic construct
  source 1..110: mol_type = other DNA
gtcctaacttagggtccaggttgactgtataatcaccaaggaattcagcagccatgactgaggctctgagaatcagcttacaatttttcttattctcttaccatgaaggc

SEQ ID NO: 45027 - DNA, 110 bp, synthetic construct
  source 1..110: mol_type = other DNA
atataaagtcgatggagttcttttatggcataacaaggtgaggatctggcctcgtccctgcagtagctgggtcactgctgtagtgtgggtttaatccctggcctgggaac

SEQ ID NO: 45028 - DNA, 110 bp, synthetic construct
  source 1..110: mol_type = other DNA
catgactcaattattggtcatttgctggtcatcaaggaccctgaacctgagaatgagaggagaggtcacctttgtttaggtggattaaaaaggtctttccagtgtcagca

SEQ ID NO: 45029 - DNA, 110 bp, synthetic construct
  source 1..110: mol_type = other DNA
agaggagaggtcacctttgtttaggtggattaaaaaggtctttccagtgtcagcaggaaatgactccatgttccactgaacatttgtactcttagatgccccttcattcc

SEQ ID NO: 45030 - DNA, 110 bp, synthetic construct
  source 1..110: mol_type = other DNA
aaatctaacaatagagggagaaaggcctcattctatggcacccaggtcttttttattaaggcagccgaggctgtaaagggcggcgaggtggggggtgggtctcgaggcat

SEQ ID NO: 45031 - DNA, 110 bp, synthetic construct
  source 1..110: mol_type = other DNA
gtgtctcttgtcattgctaccaaactctatgtcactttccataacccttgtcattgaggagcttggttttggtgtgtatatacattcaatattaaacatcggtcacagac

SEQ ID NO: 45032 - DNA, 110 bp, synthetic construct
  source 1..110: mol_type = other DNA
atgtgatccaaatactcagaaaacttgaatatattccagagtcatgttgaatcctgtggcttggtgactttctaagtgaaatcagtacaggcaatgtgaagcttttaaga

SEQ ID NO: 45033 - DNA, 110 bp, synthetic construct
  source 1..110: mol_type = other DNA
gtggcttggtgactttctaagtgaaatcagtacaggcaatgtgaagcttttaagaaaaagactggatgtgattggaagaaatttaaaaagaaggaaagaagccaggtgtg

SEQ ID NO: 45034 - DNA, 110 bp, synthetic construct
  source 1..110: mol_type = other DNA
ttctagagaggaaagagagggcctgactgcaacagtcagagctctctgaaaaataagaaatgcaaacaaaaatctgtgctgtggataatgaggcagtaaaataagtataa

SEQ ID NO: 45035 - DNA, 110 bp, synthetic construct
  source 1..110: mol_type = other DNA
acacgctgcaccaacactttcaaataattttgtgtctaacccttacaagacatagggtaagattcttaccctcattcaatcaattttggaaatggagatatacagtgatg

SEQ ID NO: 45036 - DNA, 110 bp, synthetic construct
  source 1..110: mol_type = other DNA
ggtaagattcttaccctcattcaatcaattttggaaatggagatatacagtgatgaactaatatgcacctaagaactgatgcagacaactttcaaactgtctgcctccag

SEQ ID NO: 45037 - DNA, 110 bp, synthetic construct; identical to SEQ ID NO: 45035
  source 1..110: mol_type = other DNA

SEQ ID NO: 45038 - DNA, 110 bp, synthetic construct; identical to SEQ ID NO: 45036
  source 1..110: mol_type = other DNA

SEQ ID NO: 45039 - DNA, 110 bp, synthetic construct
  source 1..110: mol_type = other DNA
tccaaagagttgtgggaatcatttgtgaatgacttctttgacttttcttaaataaaattctgttttgactcatgttaaacaactgttcccagagtacagtttattcagcg

SEQ ID NO: 45040 - DNA, 110 bp, synthetic construct
  source 1..110: mol_type = other DNA
gaagtactgaacttattaaaactgaaaaacaaaccgaagatgtttggaacctcccaaaacactcacggtgtgtctgagggtgaaggcttggatccatttctgatttgacg

SEQ ID NO: 45041 - DNA, 110 bp, synthetic construct
  source 1..110: mol_type = other DNA
agagtaaagccaaagtgccaaaaatatattcagatacagaacaaagaccttaatcagaaaggacgacaccttaaaggtgatcccaaataaaacctggagagggaggaagc

SEQ ID NO: 45042 - DNA, 110 bp, synthetic construct
  source 1..110: mol_type = other DNA
gtgttgtgctgttgtattcacaatggtcaagaccctgaaaaaagctaaaggtccatcaacagaggaatggtttaagaagatatggtacatgcaaacaatggaatgccact

SEQ ID NO: 45043 - DNA, 110 bp, synthetic construct
  source 1..110: mol_type = other DNA
taaaggtccatcaacagaggaatggtttaagaagatatggtacatgcaaacaatggaatgccactcagccataaaaggaaacagaatcatgccatctgcatcaacatgga

SEQ ID NO: 45044 - DNA, 110 bp, synthetic construct
  source 1..110: mol_type = other DNA
gaacttctatagattcatccacaaaatagaaaaaagagagaaagagagaacacaaatgactaatatgaggaataaaaagggggtgtcaccacagaattcacatacagcaa

SEQ ID NO: 45045 - DNA, 110 bp, synthetic construct
  source 1..110: mol_type = other DNA
atgactaatatgaggaataaaaagggggtgtcaccacagaattcacatacagcaaaaggataataagaagatgttataaatgactttatgtcaacaaacttgacaaatac

SEQ ID NO: 45046 - DNA, 110 bp, synthetic construct
  source 1..110: mol_type = other DNA
ctcttaaataatatgaatgtgtactgggcactgttctaaactctttgaaaatactggttcatttatttcacttatttaaacttccaatcatccccaccatattatccaaa

SEQ ID NO: 45047 - DNA, 110 bp, synthetic construct
  source 1..110: mol_type = other DNA
tggctatacactatgtaatcagccattcagagggtgcgttatattagtgaattcattcattcatccattcgagagtattaactgagcccacattatatgccaagtattgc

SEQ ID NO: 45048 - DNA, 110 bp, synthetic construct
  source 1..110: mol_type = other DNA
acaaatcatgccgctatcattcctgttttgagtgagaatactttttaatatttccccatttaaaaagatacctgtggatttttgttgggttgttttgtttcctttttttt

SEQ ID NO: 45049 - DNA, 110 bp, synthetic construct
  source 1..110: mol_type = other DNA
tgaagatcatctattaccagtatcactctttaaaaatgtagtttcctaaagttgggaataggataagacaataacaaaagtccttgtatacaaacaataaatagggttga

SEQ ID NO: 45050 - DNA, 110 bp, synthetic construct
  source 1..110: mol_type = other DNA
acaaacaaaaaatagagcattgtataaatgtagatttctacagatttagtatgatggaatctaggaatgcacatttttaatcagctttccaggcgatcctggtgcagttg

SEQ ID NO: 45051 - DNA, 110 bp, synthetic construct
  source 1..110: mol_type = other DNA
ctctcactcttgcagtcatgaaccactgtgtgagaaatccagtcaccttaaggacatcatgctagaggggccacatgcaggcgctcctgctgacagtcccagctaagccc

SEQ ID NO: 45052 - DNA, 110 bp, synthetic construct
  source 1..110: mol_type = other DNA
atcatgctagaggggccacatgcaggcgctcctgctgacagtcccagctaagcccagccttttggccctctcaccaaagtgagtagagccatcctggactttatttagcc

SEQ ID NO: 45053 - DNA, 110 bp, synthetic construct; identical to SEQ ID NO: 45051
  source 1..110: mol_type = other DNA

SEQ ID NO: 45054 - DNA, 110 bp, synthetic construct; identical to SEQ ID NO: 45052
  source 1..110: mol_type = other DNA

SEQ ID NO: 45055 - DNA, 110 bp, synthetic construct
  source 1..110: mol_type = other DNA
gcatgacatcatggctgggttgatgatatttcaaaggacagcttcccactctgatcacttaacccagttaattctcacctccccaaacgaacccttcttgcttaagggag

SEQ ID NO: 45056 - DNA, 110 bp, synthetic construct
  source 1..110: mol_type = other DNA
catatattttcaaatgttttggcattgcagtagaagtaacttcattaatatttggaaatttaaaactatttccctagtgcacatttcttgcaactacatctgcttcagag

SEQ ID NO: 45057 - DNA, 110 bp, synthetic construct
  source 1..110: mol_type = other DNA
ttcttcatgtgacaaattcttattcatccctcagtagtaattcactgattcattcaaaagttgtttgagtgatattgtgtaccagcagctcggaaggcagcaatgaacaa

SEQ ID NO: 45058 - DNA, 110 bp, synthetic construct
  source 1..110: mol_type = other DNA
aaaagttgtttgagtgatattgtgtaccagcagctcggaaggcagcaatgaacaacagcaacatagtgcctgctctcactgaatggagtatgtcaaataaaccaaccatt

SEQ ID NO: 45059 - DNA, 110 bp, synthetic construct
  source 1..110: mol_type = other DNA
cacatctccgttcccaggtaggtgtccatttgtctgaaaaaagaagtcatatgagtaaggctgaccctctttaaaactcagctactgtgggtaaataaaaattgcatgtg

SEQ ID NO: 45060 - DNA, 110 bp, synthetic construct
  source 1..110: mol_type = other DNA
tagctggctaagaggaaagctgttctgggatatgtgtgatccagacttgcactcgaaggagggcagggctgggtaacagctactcaaagctctgaaagggaggaaaagga

SEQ ID NO: 45061 - DNA, 110 bp, synthetic construct
  source 1..110: mol_type = other DNA
atcaatgttcatgctcaacaataaccccctgggaagcttttgtcaaaccaagatatggccacagttaaatttttaagatgtaaattcacaacatgacatataaccctgtt

SEQ ID NO: 45062 - DNA, 110 bp, synthetic construct
  source 1..110: mol_type = other DNA
cccaacttccggtccttgtcagctctcagctcctattggtgtcctggcttcctgtctgcctcctgtgctattcctgcctcagtgtcctgcctgcctgcttacctgccgtg

SEQ ID NO: 45063 - DNA, 110 bp, synthetic construct
  source 1..110: mol_type = other DNA
aggctctcatgtagctgtaggatctgtgccattcccatggtctctccacctgccgggccactggtaggagtgctgtctatagctgcctcagagcttgtgcttttcccatg

SEQ ID NO: 45064 - DNA, 110 bp, synthetic construct
  source 1..110: mol_type = other DNA
cacttttagaaacaagcccctttggatggagtccatggatgccctatttcattttgaatcctgtaatagtgctatgacgaggtctagtatactactccagactggaaggc

SEQ ID NO: 45065 - DNA, 110 bp, synthetic construct
  source 1..110: mol_type = other DNA
gcacaagtagccctcagcaaaaggcagggagaggtgaaatgtttatttgaagcataatcagtgacagtagacttcacatcaaagggcattcagagaaactgacaagaagt

SEQ ID NO: 45066 - DNA, 110 bp, synthetic construct
  source 1..110: mol_type = other DNA
tgaaatattgctacctgtttggtctcagaagcaccaacctgcagcatcagtgatttaatggagctttccctccccctgaggcctttctcagacaaccagaagaaaataat

SEQ ID NO: 45067 - DNA, 110 bp, synthetic construct
  source 1..110: mol_type = other DNA
accaatttggcttttaaaagttatgattaacatctactttaaaaaacattcttgggattgtagaatgaaataccactattggagttcccatcatggctcagtgattaatg

SEQ ID NO: 45068 - DNA, 110 bp, synthetic construct
  source 1..110: mol_type = other DNA
agagatgaacaataccgcatcatgtggaatgaattagaaacccttgtcagagctcacatcaacaattcggagaaacatcaaagagtcttggagtgtctgatggcgtgtag

SEQ ID NO: 45069 - DNA, 110 bp, synthetic construct
  source 1..110: mol_type = other DNA
gctgggtttataaatcttaagctaccatttgtttctgagagatttcatagtacgagtccagtgtttgcgaccccaacattttgcagatgaggtctgctacaccccaccct

SEQ ID NO: 45070 - DNA, 110 bp, synthetic construct
  source 1..110: mol_type = other DNA
gggaaggggcttttgattgatgtgtgaaagggagggagggttggacatccctgtgtgctgagaagtgagaattagcatgggtgctggggatgtgacaagtctgttgtgtg

SEQ ID NO: 45071 - DNA, 110 bp, synthetic construct
  source 1..110: mol_type = other DNA
tgctgagaagtgagaattagcatgggtgctggggatgtgacaagtctgttgtgtgtggcctttttatattcagagggaattcggtgatttggaatattgaattcagcacg

SEQ ID NO: 45072 - DNA, 110 bp, synthetic construct
  source 1..110: mol_type = other DNA
acagtggagctttaagtatttgtttagaatgattagattcctgcagaccttttctgctatggccttcattgaaaaaaattttttcacatgttgcttgctacatattctgc

SEQ ID NO: 45073 - DNA, 110 bp, synthetic construct
  source 1..110: mol_type = other DNA
agagtgaaaaccaagagtttattgggtgttgaacttggacatctgtttcttcaatctgaagcttgacatcctggtgaacgttttccaaattgagaaaaaggtcttttgat

SEQ ID NO: 45074 - DNA, 110 bp, synthetic construct
  source 1..110: mol_type = other DNA
tgtgcactagggtgagtgtgatgtggtagaaaatgacttcaccctcaagttctgtattgaatctgtggcttctcagaaggcatctgaccccatcagtggatcaggctcca

SEQ ID NO: 45075 - DNA, 110 bp, synthetic construct
  source 1..110: mol_type = other DNA
agggagagctcttaggatcaacacccatggagtggaagggaaagaagcgggaccgggccaagggagaaatcaggttatgatgtggttttagtgggagcttctgggagatc

SEQ ID NO: 45076 - DNA, 110 bp, synthetic construct
  source 1..110: mol_type = other DNA
aaaatagggcctgaatgctaaaaatgattttacacaatgaaatgtaatgaagtgaatagtctaagtatccagaatgtgaaagtacttgtgaaaggacagctgaaaagttt

SEQ ID NO: 45077 - DNA, 110 bp, synthetic construct; identical to SEQ ID NO: 45076
  source 1..110: mol_type = other DNA

SEQ ID NO: 45078 - DNA, 110 bp, synthetic construct
  source 1..110: mol_type = other DNA
ttgcagtaatgagcattatcaccttgggtcccaaatggattccttgctcacattgataaagactaatagcttcgaggggaaggtttgacctagggcaacccgtgagccag

SEQ ID NO: 45079 - DNA, 110 bp, synthetic construct
  source 1..110: mol_type = other DNA
ataaagactaatagcttcgaggggaaggtttgacctagggcaacccgtgagccagaccagcagccaaaacattgctcaccatatcaggtgcttaggaaccaggaagctgg

SEQ ID NO: 45080 - DNA, 110 bp, synthetic construct
  source 1..110: mol_type = other DNA
attcatgggtagtagtgggatggagaataaaaacaagggcgggcccatgaggcatgacctctgagatgtctttgactgcttcctgaatgatcagagctgaatctgctgat

SEQ ID NO: 45081 - DNA, 110 bp, synthetic construct
  source 1..110: mol_type = other DNA
tgataccccctacctggggagaagggtcccactctctgccactagatatgaaccaagaagagtgtagcttacctggtgtttggcagccacctaatgaccataaagaaacc

SEQ ID NO: 45082 - DNA, 110 bp, synthetic construct
  source 1..110: mol_type = other DNA
aaagcaaaacaccgaaacagctggttaagtgatccactcaagagttaaaagaagtaagaactcaggtctctaatctccagtcctcaagaggaatctaccataagactcta

SEQ ID NO: 45083 - DNA, 110 bp, synthetic construct
  source 1..110: mol_type = other DNA
aggaaagaattaacacatcccctctgcagaccggacaaaactaggaaatatttgcaacaacttaccccctttttcactttacctcctcaccccttctctttgttctataa

SEQ ID NO: 45084 - DNA, 110 bp, synthetic construct
  source 1..110: mol_type = other DNA
aatattattatcccattttatagattaggaagccaaagcatagagagattaaatgattgacccaaaattccattattagataatggcagaactgggattcaaacccagga

SEQ ID NO: 45085 - DNA, 110 bp, synthetic construct
  source 1..110: mol_type = other DNA
attgacccaaaattccattattagataatggcagaactgggattcaaacccaggaagtctggcttcaaactctgtactcttcgccactttaatatgtagttaaagagtga

SEQ ID NO: 45086 - DNA, 110 bp, synthetic construct
  source 1..110: mol_type = other DNA
cttttccttatcacaatagccctgtattgtcacagggcagacacagagttttgaccctctggagtgggccgtgggtgaggctgagccactgagtagctgcagaatatcaa

SEQ ID NO: 45087 - DNA, 110 bp, synthetic construct
  source 1..110: mol_type = other DNA
cctctggagtgggccgtgggtgaggctgagccactgagtagctgcagaatatcaatattgtctctgcttcaccttagccttccttgtggcatttttcctcaccagaaact

SEQ ID NO: 45088 - DNA, 110 bp, synthetic construct
  source 1..110: mol_type = other DNA
caccaatgagaagtgcctctccctggtatagagcatgaattgcctacagctgctgtgacaaattaccactaacttagtggctcaaagcaatgcaaatatattcaacagtt

SEQ ID NO: 45089 - DNA, 110 bp, synthetic construct
  source 1..110: mol_type = other DNA
tgacaaattaccactaacttagtggctcaaagcaatgcaaatatattcaacagttctggaggccagatgtctgaaatcagtttcactgggctaaagccaaggtgtgggca

SEQ ID NO: 45090 - DNA, 110 bp, synthetic construct
  source 1..110: mol_type = other DNA
ttagtaaatgaaagaactgggatacaattgcaggtctgcctaaatccaagacacatcgctttatctccttcatcatgatgcctctctgccctgttactctttctttgcgg

SEQ ID NO: 45091 - DNA, 110 bp, synthetic construct
  source 1..110: mol_type = other DNA
aggggaacatgggttaggttcggctactcaaggccctcaaatttatcagctgtcaaggtagcacataatattaattttaggccttacatcacagaaggtgagtacaaaag

SEQ ID NO: 45092 - DNA, 110 bp, synthetic construct
  source 1..110: mol_type = other DNA
aggtagcacataatattaattttaggccttacatcacagaaggtgagtacaaaagggagtctgtgcaaatagattttggcatgcacaactagatgcagagcaggttaaaa

SEQ ID NO: 45093 - DNA, 110 bp, synthetic construct
  source 1..110: mol_type = other DNA
gcccaggaacttccacattccgtgggtgtggccaaatgaaacaaaaaacaaaccaagaacactttatgaaacctgggcctgatttctaactgacacctttagaagcaaac

SEQ ID NO: 45094 - DNA, 110 bp, synthetic construct
  source 1..110: mol_type = other DNA
ctaggtagtatatcaacctctcaaacctttcttggtagtttatcaatgcagacactgggcatactagcagttttaattgttccattgtttaatgtgttaactccctgaac

SEQ ID NO: 45095 - DNA, 110 bp, synthetic construct
  source 1..110: mol_type = other DNA
gtttacaggctaggaaactgaaccacagtttgcttatctctcatagctactggacagaactaagtaaaactatgcatatgaagaatttagcctagtacttagcacagtat

SEQ ID NO: 45096 - DNA, 110 bp, synthetic construct
  source 1..110: mol_type = other DNA
agttcctggggacaatggaagacatccacagcaggaaaaccttcagcatacccctgcatttccacaggagcttttgacaggagcttgtcttgtgatctgtttgctcctac

SEQ ID NO: 45097 - DNA, 110 bp, synthetic construct
  source 1..110: mol_type = other DNA
ggaatcagcagagcattacaatttggggtctgcaaccatggccagctatatgcgtatctccacatggcaagggaaggagaggaaaaggacactgggaggcccttaataaa

SEQ ID NO: 45098 - DNA, 110 bp, synthetic construct
  source 1..110: mol_type = other DNA
atagtcatggatacaatagatccaggcttacgtcatagcaaacaagaatgaattcacgcaaagaagaacttaggagcagcttagtcccatgcccatccttctccttaatt

SEQ ID NO: 45099 - DNA, 110 bp, synthetic construct
  source 1..110: mol_type = other DNA
tgaaggtttcggtcatgggatatgaatgtgctgtggtatttttaaaccggaataacattgagagaaggaattgagcgtgccagaaagatctgaaccatacatctggatag

SEQ ID NO: 45100 - DNA, 110 bp, synthetic construct
  source 1..110: mol_type = other DNA
cctcattctctggtctttggcccacagagattattgttataaactccttgtccctttatacttttctgctctagagtcttacactataggaaaagaaagcagatgtctca

SEQ ID NO: 45101 - DNA, 110 bp, synthetic construct
  source 1..110: mol_type = other DNA
cttaaaaggagcacaccatgatacatcttctgtttgttccaatgtgggggaacagaggctgcccgtcaggttggaaaggaagtcctcccttcgccacagcactaccatcc

SEQ ID NO: 45102 - DNA, 110 bp, synthetic construct
  source 1..110: mol_type = other DNA
atgaatgctacccgttatacaggattttcttttcatctcttataatttctcttcaccaatagttactaaaaagtggatgaccaccaaaatgagaagtatgtccaaaggaa

SEQ ID NO: 45103 - DNA, 110 bp, synthetic construct
  source 1..110: mol_type = other DNA
accagggcacatttaaagaaattcaactttaaaggattcctgaatcttaaaaaatctttccatgaactttcgataggcaggtgttctacatctatatgtagaagagagaa

SEQ ID NO: 45104 - DNA, 110 bp, synthetic construct
  source 1..110: mol_type = other DNA
taaaaacagatgcttataaataaaaggcacatctcttcattggtcaaacctttgttagctcctgtggtccacatgtaaggaacaattgggaaaaggcagtttatatgtga

SEQ ID NO: 45105 - DNA, 110 bp, synthetic construct
  source 1..110: mol_type = other DNA
catgagttaagagcacacatcctctctgatggaactgaccttgtgccatagctgccacatgttctaaagtaagtttaaaacctactataccagtgtatgtaaaaattatc

SEQ ID NO: 45106 - DNA, 110 bp, synthetic construct
  source 1..110: mol_type = other DNA
aggatttgggcagctccaaatgatgcatctcatggggtttacgagtccaagaagactatggaaaaaatttaaactcaagcaattctaactcattctaatatcaatagatt

SEQ ID NO: 45107 - DNA, 110 bp, synthetic construct
  source 1..110: mol_type = other DNA
tgtttaacttcaagccatttatctatttcattttggcagaataaaacaatagtggggaaacatcagcttccaaggatttttttcttgttatttcaaatgtatttgagacc

SEQ ID NO: 45108 - DNA, 110 bp, synthetic construct
  source 1..110: mol_type = other DNA
cctcatattctatgttctgtccatccagaaaccctgttgtttctaaattcagaacagaatctacccacttctcactagctcttgtattaccacttcaggccagatcacca

SEQ ID NO: 45109 - DNA, 110 bp, synthetic construct
  source 1..110: mol_type = other DNA
cagctcatacacagtcactaggcacaaggattccaagatgtgattatgcaatggtttcttcatgttccattaacaccatccagtacatgtttacgtttaaacaatgtata

SEQ ID NO: 45110 - DNA, 110 bp, synthetic construct
  source 1..110: mol_type = other DNA
agagagagagagataaaatttaatttaatttaaaaaaagagagccaatgccctgcacatattctcttggtctcttccttcctccttcctacccccagcattggcttcaag

SEQ ID NO: 45111 - DNA, 110 bp, synthetic construct
  source 1..110: mol_type = other DNA
catcaaagtttgagaagcactatatagagcatgaacacaaaaaccagacagatctatattgaaatcatagctctggcatttagttgtgtgaaagagcaaaacttgaggct

SEQ ID NO: 45112 - DNA, 110 bp, synthetic construct
  source 1..110: mol_type = other DNA
aacctctacaattaaatcagctctgttctgcttggttacagagaccaagaagggcttgcataaatttagtatttccagaattatcataaaataaagaaactgaacttcta

SEQ ID NO: 45113 - DNA, 110 bp, synthetic construct
  source 1..110: mol_type = other DNA
gtggaaagcagtgggtaattcttccaagagtgaggaatgagactattgtggtcgttgggctgtttttagtaaataactttccatcaacttctcaagttccatctctcaat

SEQ ID NO: 45114 - DNA, 110 bp, synthetic construct
  source 1..110: mol_type = other DNA
tgaaattactaactctgagaccccactacccgaactgtggttcaggaattggcgggcccagctgccactgccattagcgtgaccacaactgcctccaacagaaaaagaaa

SEQ ID NO: 45115 - DNA, 110 bp, synthetic construct
  source 1..110: mol_type = other DNA
cacctgtgatttaagtaatgcatattcttggtggaaacttttttgaagataaactaaggcaaaaaaatcaaaatcagcctgactattactatttacggataatcactaca

SEQ ID NO: 45116 - DNA, 110 bp, synthetic construct; identical to SEQ ID NO: 45115
  source 1..110: mol_type = other DNA

SEQ ID NO: 45117 - DNA, 110 bp, synthetic construct
  source 1..110: mol_type = other DNA
atgatttctgttctatgcctgactttgctttaggcgctgaaaatacagagatggaagacaggcctcccaaagtttgggttcacaggtaaattaacagactctgcctgtgg

SEQ ID NO: 45118 - DNA, 110 bp, synthetic construct
  source 1..110: mol_type = other DNA
gggtgcctggcttgaaattcagctatagcatgtccctggctttgtgaagttgggtgagctatgtaacctctctgtgactcagtgtcttcatctgtaagatggggataata

SEQ ID NO: 45119 - DNA, 110 bp, synthetic construct
  source 1..110: mol_type = other DNA
gagctatgtaacctctctgtgactcagtgtcttcatctgtaagatggggataataagagccttgcttcccagggttgttgcaaagattaaattaattcatgcatataaga

SEQ ID NO: 45120 - DNA, 110 bp, synthetic construct
  source 1..110: mol_type = other DNA
gtaaatgaagtgaggagaatgcttcctatcctgccatattccaacccaacccctttgttctagtttttggaaggatgtacatctggcacttgttcctataagacttcaat

SEQ ID NO: 45121 - DNA, 110 bp, synthetic construct
  source 1..110: mol_type = other DNA
gccattctttttgtttgctggttgtttgtgtaacaaaataacttaatgatagcttcctacttaaagtagaaaagttggaaaaccacagaaagttggatttgctggcagta

SEQ ID NO: 45122 - DNA, 110 bp, synthetic construct; identical to SEQ ID NO: 45121
  source 1..110: mol_type = other DNA

SEQ ID NO: 45123 - DNA, 110 bp, synthetic construct
  source 1..110: mol_type = other DNA
aattgggttttcctttatttccccatgttgcagacctggttggggacctaatttctcccaccccaggcccactaatttttctttccccagccactgcatgtgtgagggat

SEQ ID NO: 45124 - DNA, 110 bp, synthetic construct
  source 1..110: mol_type = other DNA
tcccaccccaggcccactaatttttctttccccagccactgcatgtgtgagggatgaatgtggattgatctctgtatgggatgcatttggtttcaggcaggatggcttat

SEQ ID NO: 45125 - DNA, 110 bp, synthetic construct
  source 1..110: mol_type = other DNA
tccaaagcctttcctttttagaatcatctcaggcttctaataataatcaaactttagttatggaaatattttgtgcatggaatgcttaagttttctagctacacgtaata

SEQ ID NO: 45126 - DNA, 110 bp, synthetic construct
  source 1..110: mol_type = other DNA
tggaactgtgacatacagagagctccttactatgtggaatctaccaaagatccgacggcaaaaatgtgtacagcaaggttggcctgtgaaatacaactctaatcctctat

SEQ ID NO: 45127 - DNA, 110 bp, synthetic construct
  source 1..110: mol_type = other DNA
cagccggacatctcggcggacaccacggagctggaccgcctcctcctcttaaataccgggatatcttccttggtcccagcaagcagctgggacccaaaatgctccctcgg

SEQ ID NO: 45128 - DNA, 110 bp, synthetic construct
  source 1..110: mol_type = other DNA
tttcctaaagtagctgcacatatatctcctaaagaagctgcatatgtctcagggtttttgcacaaattctagattatagttgacatttaaagcaaatcctgggaggaaat

SEQ ID NO: 45129 - DNA, 110 bp, synthetic construct
  source 1..110: mol_type = other DNA
tcctgcttcttgaggctgccctcattccttcaaatgaggcccccttcatccatattcaaagccagctgagttgagtccttctcacaatgtatcattctgcctggcctccc

SEQ ID NO: 45130 - DNA, 110 bp, synthetic construct
  source 1..110: mol_type = other DNA
aggaacctccatatgccacaagtggccctaaaaaagaaaaaaaaagaaaaaaataaaaccggttgtaactgggacagagagcacattcttcctccccacaaggtgaaact

SEQ ID NO: 45131 - DNA, 110 bp, synthetic construct
  source 1..110: mol_type = other DNA
gggatagaaatgctctaaaatcaggttgtgatgatggttgtataactatacgtatgataaatatcattgaattatttaaaaagtatcccccttaagccttctacctgtat

SEQ ID NO: 45132 - DNA, 110 bp, synthetic construct; identical to SEQ ID NO: 45131
  source 1..110: mol_type = other DNA

SEQ ID NO: 45133 - DNA, 110 bp, synthetic construct
  source 1..110: mol_type = other DNA
cacatgttaatcatattcatcacatgccagacaaggctcagatgcttctgctcctgcttgctcttgtcagaaagctgtgtagcaaacaagttacatgtcgtgatacttac

SEQ ID NO: 45134 - DNA, 110 bp, synthetic construct
  source 1..110: mol_type = other DNA
tgccggatccttaacccactgtgccaggccagggaccaaacctgcatcccagcactccaaagacgccgctgagccaatctgttgcaccactgcaggagctcctcaatcta

SEQ ID NO: 45135 - DNA, 110 bp, synthetic construct; identical to SEQ ID NO: 45134
  source 1..110: mol_type = other DNA

SEQ ID NO: 45136 - DNA, 110 bp, synthetic construct
  source 1..110: mol_type = other DNA
tcagttcccttgagcatattcagctaccaatgaatctaggggggaaactctagattttagaaggttaaatcagacaataattcagaaagtttgctttcaggcagaggcaa

SEQ ID NO: 45137 - DNA, 110 bp, synthetic construct
  source 1..110: mol_type = other DNA
gaactcccctatttacccatttttaattgatgtttttgtaatcacccaaggctaatgagaataaggaagtttgaattggatacgagggtcagggtaaaaatccaaataca

SEQ ID NO: 45138 - DNA, 110 bp, synthetic construct
  source 1..110: mol_type = other DNA
tgagaataaggaagtttgaattggatacgagggtcagggtaaaaatccaaatacatatggggactgaggcaaggccaaaactgtgcattgacatggacacagaaacagag

SEQ ID NO: 45139 - DNA, 110 bp, synthetic construct
  source 1..110: mol_type = other DNA
tgtgtccctcccaaaaatgaaaagaaaatggagataacaatatacgtacacaacacagaaatacaaacattttgccgtcatctgtagatgagccccacattctcatctaa

SEQ ID NO: 45140 - DNA, 110 bp, synthetic construct
  source 1..110: mol_type = other DNA
cagaaatacaaacattttgccgtcatctgtagatgagccccacattctcatctaagatgtgtgaatagagtctgctttacctggctccttgagttgttgaaaagaattaa

SEQ ID NO: 45141 - DNA, 110 bp, synthetic construct
  source 1..110: mol_type = other DNA
agaaaaatattttttaaaagcgtattgtgtaaatgaaaagaaaaaaataagggtggggcaggataattttcttctttctgctaagagacagaacagtatttatgagtgcc

SEQ ID NO: 45142 - DNA, 110 bp, synthetic construct; identical to SEQ ID NO: 45141
  source 1..110: mol_type = other DNA

SEQ ID NO: 45143 - DNA, 110 bp, synthetic construct
  source 1..110: mol_type = other DNA
accacgagcccctccctcactaggcttatctcacttgtaatttgactttgatgtgtgacagctggtttactactgccttccctcccaaaatgaagactctgtgaggatat

SEQ ID NO: 45144 - DNA, 110 bp, synthetic construct
  source 1..110: mol_type = other DNA
tgacagctggtttactactgccttccctcccaaaatgaagactctgtgaggatatatgtgctcaccacagtcacctgaagaagagcacagcactgggtgcaagagagaag

SEQ ID NO: 45145 - DNA, 110 bp, synthetic construct
  source 1..110: mol_type = other DNA
atactgtgcttggaatgcctaatttcctaggtaaatgcacactagactctccactgggacaggttagcaaccctattaacacttatttttaaaacacaataaaataagtg

SEQ ID NO: 45146 - DNA, 110 bp, synthetic construct
  source 1..110: mol_type = other DNA
agataaagccatctgtccatctattaaaccagcttggctaatataaacctctatgaaccactgaggtcaaaatgtcctgcccatacactaaagtctaaagctctttgctg

SEQ ID NO: 45147 - DNA, 110 bp, synthetic construct
  source 1..110: mol_type = other DNA
gatagagacactgtctccttctggagcagagaactgtttcctaacaaagcctctttcaagagcaaagttcaggccaatttgctaactctcattataaaagattggggata

SEQ ID NO: 45148 - DNA, 110 bp, synthetic construct
  source 1..110: mol_type = other DNA
ttgctctacttcatttctggttcatcaaggaagcctgtactaagatggacctcctttgagcctcagtccttgaatgactgtaatgaacagaattctgatgtggttgacac

SEQ ID NO: 45149 - DNA, 110 bp, synthetic construct
  source 1..110: mol_type = other DNA
gcagcatgctcccctctggtcaccagagcttcatgttctaggaatgtccctgtgtaggctctgtgcacccctctgttgtagtgcggctgactcctgtggatgggctatta

SEQ ID NO: 45150 - DNA, 110 bp, synthetic construct
  source 1..110: mol_type = other DNA
tggtttagtagaagaccagagaagctggtgaagctcagcgttactcttgcctatttattgcacccagattaagacctttagtcaattaccctgtgacacagacagtcctt

SEQ ID NO: 45151 - DNA, 110 bp, synthetic construct
  source 1..110: mol_type = other DNA
cttttaaccttaggtatggtgttctagataaatccctaaaggatcctatatctcgcccagaactttggaagattctgttagcttggtacctgcctctgaaacttagcatt

SEQ ID NO: 45152 - DNA, 110 bp, synthetic construct
  source 1..110: mol_type = other DNA
ctttgggataaagaaatatatctatttaaaactactttactataccaaccaaaatcttcacttgtaaactaaaaagtcagctttttggcaggttgcaaatcttcaactac

SEQ ID NO: 45153 - DNA, 110 bp, synthetic construct
  source 1..110: mol_type = other DNA
atgaataggtagatttcacatcatttcaattcatgggcagcatattaaagctcatatagtccttttatacaaagggccaccttgaacaaggcctcatggtccgagacacc

SEQ ID NO: 45154 - DNA, 110 bp, synthetic construct
  source 1..110: mol_type = other DNA
tgcaaacctaggcacaaagggttgcctcactaagggttgctgcacaaaggcatgccttttgtggaagtacagtgaggattctttgaaatgctatgcatagatagctaaag

SEQ ID NO: 45155 - DNA, 110 bp, synthetic construct
  source 1..110: mol_type = other DNA
aaagggttgcctcactaagggttgctgcacaaaggcatgccttttgtggaagtacagtgaggattctttgaaatgctatgcatagatagctaaagccaagcttcctcaaa

SEQ ID NO: 45156 - DNA, 110 bp, synthetic construct
  source 1..110: mol_type = other DNA
gcacacagacggtcagggagtatgataccagccctgaagggagaaagtcctcggacccaaacctgatagcctttaaaatatgccactttgtggggactatataaagacag

SEQ ID NO: 45157 - DNA, 110 bp, synthetic construct
  source 1..110: mol_type = other DNA
cccaaacctgatagcctttaaaatatgccactttgtggggactatataaagacagcctagtgatgtttggtgagaagcaaatatctatctattgtcagatgaatctattc

SEQ ID NO: 45158 - DNA, 110 bp, synthetic construct
  source 1..110: mol_type = other DNA
aatctatactgctctcttcacgaaacaacactccctccttcccacagaaaataatcacacatttaaaatcatgcctacgcatggttttaattttatgaggagatgtctat

SEQ ID NO: 45159 - DNA, 110 bp, synthetic construct
  source 1..110: mol_type = other DNA
atagctacttgtcagccccaagtcctgtcactggcctgcactgctggtctcacctgcagctagccccttcagctatgcactacactctgccagtctaactcctatcaatg

SEQ ID NO: 45160 - DNA, 110 bp, synthetic construct
  source 1..110: mol_type = other DNA
cttgcactccaatagaaggaggaggatgaagaaccactttaaaatacaccagcacatctgttcctcccaacaaggcctgttcttaggcaaaactagttaaccagacccta

SEQ ID NO: 45161 - DNA, 110 bp, synthetic construct
  source 1..110: mol_type = other DNA
aaacatcagtttgtttgtctttggctggaattctgtcaactcattgggatcatattagttatcttatgctagcaagaaagagtaattgatagctttattttttgcttaat

SEQ ID NO: 45162 - DNA, 110 bp, synthetic construct
  source 1..110: mol_type = other DNA
tgtctttggctggaattctgtcaactcattgggatcatattagttatcttatgctagcaagaaagagtaattgatagctttattttttgcttaattttaaatgagaccaa

SEQ ID NO: 45163 - DNA, 110 bp, synthetic construct
  source 1..110: mol_type = other DNA
ttttttttttttggttttcagagctgcaggggcagcatatggaagtttccagaccagggattgcatccgaactacagctgccagcctacaccactgtaatgcaggattca

SEQ ID NO: 45164 - DNA, 110 bp, synthetic construct
  source 1..110: mol_type = other DNA
agggattgcatccgaactacagctgccagcctacaccactgtaatgcaggattcaaaccatgtctgtgtgaccttcaccacagctcacagtgatgccagatcctttaaac

SEQ ID NO: 45165 - DNA, 110 bp, synthetic construct
  source 1..110: mol_type = other DNA
tttgacttccacctaaggtgttatagccatcatagactgggttcaaagtgggatttcaaaataggtgatatgaatctagcaggtatacgtaaaattcctatatgaaatct

SEQ ID NO: 45166 - DNA, 110 bp, synthetic construct
  source 1..110: mol_type = other DNA
aacatcactgactttcccaggcatgttttgtgggctctccctttggtcagccaattgtatttttcaacactgagcccacagctgactcttgtgaaaaccatttgttcatg

SEQ ID NO: 45167 - DNA, 110 bp, synthetic construct
  source 1..110: mol_type = other DNA
gattctatggaaattcccttctggccgattcgattttttcagtgacgtaggataccaagccattagctctgagtgaggatggaggaggacatttggggagttggaagaga

SEQ ID NO: 45168 - DNA, 110 bp, synthetic construct
  source 1..110: mol_type = other DNA
attcaaactcaagtttgtttgtctccaaagcccttaacactttctcctagctgatgctgcttctaactgttacagaggagccttctgcctgtgctctcacaatccttaac

SEQ ID NO: 45169 - DNA, 110 bp, synthetic construct
  source 1..110: mol_type = other DNA
ccttgagtgatgtgtggtgaggccaggtgcaggtggagatagagaagccggaaagagctgttccagttccctgaggagggcacagcagcatacagggccctgcaagagaa

SEQ ID NO: 45170 - DNA, 110 bp, synthetic construct
  source 1..110: mol_type = other DNA
tgaagttcaaagtccggaggcagaggctcactaaaagacagacctagctatccacaggactatagaatgcttcccttaacctcatgcttcaccacataactaaaggtcta

SEQ ID NO: 45171 - DNA, 110 bp, synthetic construct
  source 1..110: mol_type = other DNA
gaacatattccttgtctctttaacttcttatggctgccagcattcctttgctgcatcactgccatctctgtccccattttcacactgtcttcccttctgtgtgtaagctt

SEQ ID NO: 45172 - DNA, 110 bp, synthetic construct
  source 1..110: mol_type = other DNA
tcactgccatctctgtccccattttcacactgtcttcccttctgtgtgtaagcttaatactcctctgcctctcttctataagaccatgtgtgatggcatcttgagcccac

SEQ ID NO: 45173 - DNA, 110 bp, synthetic construct
  source 1..110: mol_type = other DNA
gacagagaacaaggatactcccatagggcaggggcgtccccatgtcctctgtccatgtttctgctcattcctggtgatgcacgagagctacatgtaagtcaaggttatat

SEQ ID NO: 45174 - DNA, 110 bp, synthetic construct
  source 1..110: mol_type = other DNA
gttcctagtcggattcgttagccactgaaccaagatggaaacctttttttttttttttgaccattgcgtgcagcagcttgatatgggatctcagttcccagaccagggat

SEQ ID NO: 45175 - DNA, 110 bp, synthetic construct; identical to SEQ ID NO: 45174
  source 1..110: mol_type = other DNA

SEQ ID NO: 45176 - DNA, 110 bp, synthetic construct
  source 1..110: mol_type = other DNA
attatctatactaagagacggtgcttgcctgcagagtatttcttggcagagcctcccaagtaagcagacctcttctaaaccatccaggaatgactggggcctaaccaact

SEQ ID NO: 45177 - DNA, 110 bp, synthetic construct
  source 1..110: mol_type = other DNA
gaggtcctgaatcttgatttctgtatcaatggggatattttaacagctaagatgcttcctgatgagccttaggcatattgcatttagtttggtgctgggatgaagtgggc

SEQ ID NO: 45178 - DNA, 110 bp, synthetic construct
  source 1..110: mol_type = other DNA
agaagaagaaaaatcagagtgaaggaataatttgtcaagataatcttgtcctcaatatctgtacccaatatcaaatcagttggtgatagggtaagtagacaacacttatt

SEQ ID NO: 45179 - DNA, 110 bp, synthetic construct; identical to SEQ ID NO: 45178
  source 1..110: mol_type = other DNA

SEQ ID NO: 45180 - DNA, 110 bp, synthetic construct
  source 1..110: mol_type = other DNA
ccacatttacttttccagcctagaattctcccctgatctctaggtacatataccaatagtctcttcacttgacaattgcacttggatatcacatcaatttttctatgtct

SEQ ID NO: 45181 - DNA, 110 bp, synthetic construct
  source 1..110: mol_type = other DNA
ggactctgccaaaggaaactttaattaacttttgacagatatgttaaaaatacgtcctctaacttgattctgagttcttgcttcctagagaatctctttccttttatccc

SEQ ID NO: 45182 - DNA, 110 bp, synthetic construct
  source 1..110: mol_type = other DNA
acattttctgctataattagtgatacactaaacatccctctggcccaatcttcgcacacattcaaaagcttttcaaatgtcaaagaatttttcagacattcacttgattg

SEQ ID NO: 45183 - DNA, 110 bp, synthetic construct
  source 1..110: mol_type = other DNA
ggttctgggaaccttaatcagccataatgtctataataaaatggacttcaaaattgcaactagttttgaagcttataaattgttggactgactaaatgaatgacttggat

SEQ ID NO: 45184 - DNA, 110 bp, synthetic construct
  source 1..110: mol_type = other DNA
aagaattcaaccaggatccataaggatatgggttcaatccctggcttcactcagtgggtcactcagcattgtcctgagctgtggtgaaggtacagacgccgctcagatct

SEQ ID NO: 45185 - DNA, 110 bp, synthetic construct; identical to SEQ ID NO: 45184
  source 1..110: mol_type = other DNA

SEQ ID NO: 45186 - DNA, 110 bp, synthetic construct
  source 1..110: mol_type = other DNA
attacttgagccttagaggaaataagacatagatattaactagaactatgttttgtcaaaaatgaagtagaaaggagttcccgtctcagctcagtggttaacgaacccaa

SEQ ID NO: 45187 - DNA, 110 bp, synthetic construct
  source 1..110: mol_type = other DNA
gaggaaataagacatagatattaactagaactatgttttgtcaaaaatgaagtagaaaggagttcccgtctcagctcagtggttaacgaacccaactagcatccatgagg

SEQ ID NO: 45188 - DNA, 110 bp, synthetic construct; identical to SEQ ID NO: 45186
  source 1..110: mol_type = other DNA

SEQ ID NO: 45189 - DNA, 110 bp, synthetic construct; identical to SEQ ID NO: 45187
  source 1..110: mol_type = other DNA

SEQ ID NO: 45190 - DNA, 110 bp, synthetic construct
  source 1..110: mol_type = other DNA
ttgttttgcccacctctgaaatcttgaactctgtgtatattaagaagtaaattataaattttcatttttgtttcagcaatgctatctcctgatattgccatctggctaaa

SEQ ID NO: 45191 - DNA, 110 bp, synthetic construct
  source 1..110: mol_type = other DNA
ttctcttgttttatttctctgccttgggatccccttgatttgtaaactaaatcgaatcttttctccctaaaagtcattataataatattctcaaacaaaggagaaaactt

SEQ ID NO: 45192 - DNA, 110 bp, synthetic construct
  source 1..110: mol_type = other DNA
gatagtttgctgttgtgctgggaagtgtatatagtctttattctatagtcatccataaactctgtgtttcacacagaagcagctgttcaatatcagggatcttgtcctta

SEQ ID NO: 45193 - DNA, 110 bp, synthetic construct
  source 1..110: mol_type = other DNA
agtaaacatccactctgatgtcttagctgtaacaatggtgtaaaataaggacaaggtgatggttgatcccatctacatccaagaggggcttctaaggaaaactacttgga

SEQ ID NO: 45194 - DNA, 110 bp, synthetic construct
  source 1..110: mol_type = other DNA
ttacatagcatgttggtaccagctctgtgtttgaagcatctacatagacatgtacaaaacacacacacacacagtcactccaaatgtcaaattacacagggtcacattgg

SEQ ID NO: 45195 - DNA, 110 bp, synthetic construct
  source 1..110: mol_type = other DNA
caaattatagctatgtgcaataacaagaacgaccctcgtaaacaaaattttaagcaaaagaatcaagatacacatacaaaagaacatagtttgtttccacagacataatg

SEQ ID NO: 45196 - DNA, 110 bp, synthetic construct; identical to SEQ ID NO: 45195
  source 1..110: mol_type = other DNA

SEQ ID NO: 45197 - DNA, 110 bp, synthetic construct
  source 1..110: mol_type = other DNA
aggcataaatgagatggtggagatcatgtgcttagttgcccaaagcttctttttcagctggctcttaaacctcacaattcatatcaatgagagaattataataagctgtc

SEQ ID NO: 45198 - DNA, 110 bp, synthetic construct
  source 1..110: mol_type = other DNA
aaaaataaatacataaatccagtgaaagaaaattctgtagagtttaatttgcttgagttctctgatgatctgcatcaaactgacttaacgctgaatgaactagttcttga

SEQ ID NO: 45199 - DNA, 110 bp, synthetic construct
  source 1..110: mol_type = other DNA
aaagcatgatggcatgtgatgcttggatttagttttagtgttagaaaaacaagatggagtggggggatattacaaactagaagtctcatctagaataagagggaaaccgt

SEQ ID NO: 45200 - DNA, 110 bp, synthetic construct
  source 1..110: mol_type = other DNA
ggtagcctgcagatcgttttcccaggcaagagcatcacctagtggtgaatctaggcaaccacagttctagactagtcctgtcactcccaggggacttgattaaggcaaag

SEQ ID NO: 45201 - DNA, 110 bp, synthetic construct
  source 1..110: mol_type = other DNA
caaccacagttctagactagtcctgtcactcccaggggacttgattaaggcaaagagcacagacaggaactgcttctcaaaccatttgtggtcctgttttgggtcatagt

SEQ ID NO: 45202 - DNA, 110 bp, synthetic construct
  source 1..110: mol_type = other DNA
taccagacactgctcacccagaacagttggtcactggttccttttccactcttcgatagctcaccagggccatttgagactaatagattgcctctctagataggctaata

SEQ ID NO: 45203 - DNA, 110 bp, synthetic construct
  source 1..110: mol_type = other DNA
tacttcaaaagaacatacattaaaacaaccattttaaaaatcccaagcgacacggttaaaaagcaacaggagaaagtttgtgcccctgaaacatgaatgtaccttccatt

SEQ ID NO: 45204 - DNA, 110 bp, synthetic construct
  source 1..110: mol_type = other DNA
tgtggaccagccacagcaacaccagacccaagccacatctgcaacctctgccaaagcttgcagcagcaccagacaacttaactcactgagccaggtcaggaatcaaacct

SEQ ID NO: 45205 - DNA, 110 bp, synthetic construct
  source 1..110: mol_type = other DNA
gcttgcagcagcaccagacaacttaactcactgagccaggtcaggaatcaaacctgcaacctcagaagacatcgggtccttagcccactgaaccacaatggcaactcctt

SEQ ID NO: 45206 - DNA, 110 bp, synthetic construct
  source 1..110: mol_type = other DNA
ccctgattttccctatccacactcagatgtatgttagttccccaaaacccacaaccatgctcccagcacaaagcaatgtgagctcagatatttgcaagttaacacctgca

SEQ ID NO: 45207 - DNA, 110 bp, synthetic construct
  source 1..110: mol_type = other DNA
catgctcccagcacaaagcaatgtgagctcagatatttgcaagttaacacctgcagcagagctgccctttcatttgccccaattaaatacaaaaagtacatactttattg

SEQ ID NO: 45208 - DNA, 110 bp, synthetic construct
  source 1..110: mol_type = other DNA
gcctaatctgaggatcatttctgtggcccaggagatgtctgtgcaagtgatcaaggtagatgattgttgcaaatgagcatcacgccagcacctagggcagtggctggggc

SEQ ID NO: 45209 - DNA, 110 bp, synthetic construct
  source 1..110: mol_type = other DNA
gtagatgattgttgcaaatgagcatcacgccagcacctagggcagtggctggggcagaggacccaataagtaccatattccaaggtggactgacccaggcaggctgccac

SEQ ID NO: 45210 - DNA, 110 bp, synthetic construct
  source 1..110: mol_type = other DNA
atcccatgagtggggagcctgttgagcgctccaagcagggtcatcgtaatgcaactcttccagaggcagagaacatccttctttaaatactcactcatcgtttaggtcct

SEQ ID NO: 45211 - DNA, 110 bp, synthetic construct
  source 1..110: mol_type = other DNA
tctacaactcagattttcatgcagcagattccaaccaaatcaaagagaacaaatgcaagttagggctcccttaaccaattggtttcttcagcaacataaagtcccattta

SEQ ID NO: 45212 - DNA, 110 bp, synthetic construct
  source 1..110: mol_type = other DNA
aaccttgaggtgtggtcattaggatgaaaagtgaactcatgtaaagcactggcgcatagtaggtggtcattggtttcagctgggatgattacttttatgttgctgtggct

SEQ ID NO: 45213 - DNA, 110 bp, synthetic construct
  source 1..110: mol_type = other DNA
gtactcattggtttgccaaattcgaatgtgtggcctgaatcatttaatctttctggctgtcctcatacagggggaccatttttatcaccattttgccattgaggaaacac

SEQ ID NO: 45214 - DNA, 110 bp, synthetic construct
  source 1..110: mol_type = other DNA
tggcagggaagatcatggttttccatgatcttccattgtgtggttcagtcatggtacatctgattaatggtgcagctggagaacattgggcattttttttccccttttgt

SEQ ID NO: 45215 - DNA, 110 bp, synthetic construct
  source 1..110: mol_type = other DNA
aggtgaaggaacatgctagggtctcacaggtgagaaggaagccctagaacctgcgccacccaattctaaatccccaaaggactaggtgcagagcctgacacaaccttggt

SEQ ID NO: 45216 - DNA, 110 bp, synthetic construct
  source 1..110: mol_type = other DNA
atgtcctagagaaatctttgctagtcattgtttggctggctttggcatagcccctgagtagagttgccagctcatgaactaaaatggatgtcagaaaggcaagccttcac

SEQ ID NO: 45217 - DNA, 110 bp, synthetic construct
  source 1..110: mol_type = other DNA
gggggctggtctcccccctgctctcctcacagtgttcagccttgagcctggcatggactatgttccccactatttgcggagcgctttcagaagccgtgctgtagaaattg

SEQ ID NO: 45218 - DNA, 110 bp, synthetic construct
  source 1..110: mol_type = other DNA
gactatgttccccactatttgcggagcgctttcagaagccgtgctgtagaaattgaacatcatgatggacaggatggagctagggtttatcccactccctctgcgcgccc

SEQ ID NO: 45219 - DNA, 110 bp, synthetic construct
  source 1..110: mol_type = other DNA
agagcaccagctactggggtgtgaatcaggctctgatgtgtaaagtcaccagtaggtctgactagatttgggtgtatttggcatccaaacagcgtgggcagcatagcttg

SEQ ID NO: 45220 - DNA, 110 bp, synthetic construct
  source 1..110: mol_type = other DNA
gtctgactagatttgggtgtatttggcatccaaacagcgtgggcagcatagcttgattcttgatagtctgacaaccataaataacagttcacaggacatgtgggcatctg

SEQ ID NO: 45221 - DNA, 110 bp, synthetic construct
  source 1..110: mol_type = other DNA
caatgctggcccgtcctgatctgcataagctgatggatcagatccagcagggcgggcagctactccagaaggcatttccaccgctttcctcatctgaatagagctgccat

SEQ ID NO: 45222 - DNA, 110 bp, synthetic construct
  source 1..110: mol_type = other DNA
tgtggtcctgtatgtggtacctttcttagtagccatgcttaaatttcagcattcctatcaacctcagataatctaacccttgaatttgcctgagtcagaagtgtacacac

SEQ ID NO: 45223 - DNA, 110 bp, synthetic construct
  source 1..110: mol_type = other DNA
ccagttgtacatttgttctctggtaattccaggcaaaactagggcaggaagacaacagagcagctgaaggtttagtttctatcacctcatcccttctcaaacttctgaaa

SEQ ID NO: 45224 - DNA, 110 bp, synthetic construct
  source 1..110: mol_type = other DNA
aggcattccaccctgtaggtagaaaagaagctaaggcatggagatggaaaggggaatggtttcatatgcttgaaggagtggttttatttggctctgtgattgaggtaata

SEQ ID NO: 45225 - DNA, 110 bp, synthetic construct
  source 1..110: mol_type = other DNA
catgtttaatccatgaagtttttggtcatttgtgacacaagaacaaaactaattcagtagttaactcagactctcagccattatgtccttgctgaataaagagactgagc

SEQ ID NO: 45226 - DNA, 110 bp, synthetic construct
  source 1..110: mol_type = other DNA
attgatgggaactagagaatttatgggaaatcatttagcctatggctagtatgtctaccatctccccaggtatcaggagacaatagttatgctaacgttcccaggttggg

SEQ ID NO: 45227 - DNA, 110 bp, synthetic construct
  source 1..110: mol_type = other DNA
agtgcagacaagaaactaagagcgagccatgaacaagagggctgtgtttgaacaggaagctaataggaccactgcagtgaaattgaggatactaatagaattaaccaaat

SEQ ID NO: 45228 - DNA, 110 bp, synthetic construct
  source 1..110: mol_type = other DNA
agagggctgtgtttgaacaggaagctaataggaccactgcagtgaaattgaggatactaatagaattaaccaaatttaggagttccctggtggtacagtgggttaaggat

SEQ ID NO: 45229 - DNA, 110 bp, synthetic construct
  source 1..110: mol_type = other DNA
ttatggccaaaagcatcacagtcaggtcttgcaacctgcctccagtatttatctcccaagcatcctcacgtttcactcccatcgtcactgaccagctcaggaccatcagc

SEQ ID NO: 45230 - DNA, 110 bp, synthetic construct
  source 1..110: mol_type = other DNA
ccaagcatcctcacgtttcactcccatcgtcactgaccagctcaggaccatcagcctctcccgtgaccctctctctgaactcccccttcttaagtatattctctgtgcca

SEQ ID NO: 45231 - DNA, 110 bp, synthetic construct
  source 1..110: mol_type = other DNA
gctgcggagtgaacacaatgtcctgactgctctttcttgcagctctgccagccatgaggtgtgtcttggtcccttcgtaatttcgccctaaggaacttctttccccatca

SEQ ID NO: 45232 - DNA, 110 bp, synthetic construct
  source 1..110: mol_type = other DNA
tctctcactccagttgattgtctctttgcacaatagtaacatttccaagactgaataaagtattcaagaagtgttctcaaaagaactatgtatccaaattgctttagctc

SEQ ID NO: 45233 - DNA, 110 bp, synthetic construct
  source 1..110: mol_type = other DNA
taaagtattcaagaagtgttctcaaaagaactatgtatccaaattgctttagctcccctctttctcaaatcctaggtcagacttcccttgccaaaggctacattgtcccc

SEQ ID NO: 45234 - DNA, 110 bp, synthetic construct
  source 1..110: mol_type = other DNA
gccttgaaccaagatctgtctaaatccaaagctcttaagaagtttacacttcctcattttagctttatgacatcctcaagacataagtaggaatggttttattaacccca

SEQ ID NO: 45235 - DNA, 110 bp, synthetic construct
  source 1..110: mol_type = other DNA
attttagctttatgacatcctcaagacataagtaggaatggttttattaaccccattttaaagatgaggaaacaggagttcctgttgtggctcagcaggttaagaatctg

SEQ ID NO: 45236 - DNA, 110 bp, synthetic construct
  source 1..110: mol_type = other DNA
gtttctccagtcatcgcttcctccttatctaagggcttaggaacaccccccaaagctggaaagcccacagccaggcccgcttcactatttccctggaagttagaaagcag

SEQ ID NO: 45237 - DNA, 110 bp, synthetic construct
  source 1..110: mol_type = other DNA
cttaggaacaccccccaaagctggaaagcccacagccaggcccgcttcactatttccctggaagttagaaagcaggacaggagttccctggtggctcagtgggttaagga

SEQ ID NO: 45238 - DNA, 110 bp, synthetic construct; identical to SEQ ID NO: 45236
  source 1..110: mol_type = other DNA

SEQ ID NO: 45239 - DNA, 110 bp, synthetic construct; identical to SEQ ID NO: 45237
  source 1..110: mol_type = other DNA

SEQ ID NO: 45240 - DNA, 110 bp, synthetic construct
  source 1..110: mol_type = other DNA
agacccagcagcaaactatgggccacctgtcaagtcagcagccttgcccgtcctctctccctttgtgaattaaaattcagctaaaaaaaattcttatgccaccactacta

SEQ ID NO: 45241 - DNA, 110 bp, synthetic construct
  source 1..110: mol_type = other DNA
gcccaacaggagtgcttgtgagtggatctcatcgtgtttgtctcatcttttttccttctttttcttttttgggcaggggaaatacaagaccattctcaggaggtccactt

SEQ ID NO: 45242 - DNA, 110 bp, synthetic construct
  source 1..110: mol_type = other DNA
ttctttttcttttttgggcaggggaaatacaagaccattctcaggaggtccacttacacgtcaccatgtacgaggactgcgtgaagtccactggggactataacctcttc

SEQ ID NO: 45243 - DNA, 110 bp, synthetic construct
  source 1..110: mol_type = other DNA
agctgagacatttttcaaagcgtgacacacaattcatttcagtctgtctccctggtggatggtcagtttctcaaggaaggagattgtcctcaagcccaggaccaggcaca

SEQ ID NO: 45244 - DNA, 110 bp, synthetic construct
  source 1..110: mol_type = other DNA
tggatggtcagtttctcaaggaaggagattgtcctcaagcccaggaccaggcacagagtcagccccaaactggctgaataaatgaataactagcctcgtataactgctag

SEQ ID NO: 45245 - DNA, 110 bp, synthetic construct
  source 1..110: mol_type = other DNA
gatacttcctgatgcagccttggggaaggaaaacattctgaaacagagatgattttgcacgtgccagcgggcgctgggaaatgctgctaagagcccacctagcacagctg

SEQ ID NO: 45246 - DNA, 110 bp, synthetic construct
  source 1..110: mol_type = other DNA
tgcacgtgccagcgggcgctgggaaatgctgctaagagcccacctagcacagctggagtcccaggcctccatcttgaagtggccttggtttcgtcctcccacctccagca

SEQ ID NO: 45247 - DNA, 110 bp, synthetic construct
  source 1..110: mol_type = other DNA
cctagttagtccgcttgcctctactcaccccctcagctgtgaattctcaacaagcagcaaagggaccctttaaaacctatgtctgatcagatcactctactctgctcaaa

SEQ ID NO: 45248 - DNA, 110 bp, synthetic construct
  source 1..110: mol_type = other DNA
ccttgtttctgctcctaaatcaagatccacttctctccttgccactgatgcagagctggacagcctctccagctcctccgtccttgaggtttgggaaaagctacctgtgc

SEQ ID NO: 45249 - DNA, 110 bp, synthetic construct
  source 1..110: mol_type = other DNA
agatcttgttagttgctgaataatctagtgggaaaacattaagaatttgtatcgtcttcctctgaggtttagatagggatttaactttcagtatctagatcatcagggca

SEQ ID NO: 45250 - DNA, 110 bp, synthetic construct
  source 1..110: mol_type = other DNA
catatgcctcttagactttttttcctgaagacattctggtatttatactgttggttctcctttcctaccacttgaaccactcttttcctttcttcattaactcttgaagt

SEQ ID NO: 45251 - DNA, 110 bp, synthetic construct
  source 1..110: mol_type = other DNA
cctgcatccttatggatactagtcagactcatttccgctgagccatgacaggaactccaaagctgcttttatgacaatatgctagtctacatatagtctacaatatgcag

SEQ ID NO: 45252 - DNA, 110 bp, synthetic construct; identical to SEQ ID NO: 45251
  source 1..110: mol_type = other DNA

SEQ ID NO: 45253 - DNA, 110 bp, synthetic construct
  source 1..110: mol_type = other DNA
tgagccaccatgggaactcccaattagagcttttaaatgtactcagctgggttttgttatttaatagattcgatggcagcagtgggattgaaggagatttctgatggctt

SEQ ID NO: 45254 - DNA, 110 bp, synthetic construct
  source 1..110: mol_type = other DNA
gattctctctttctctctaatgaaggctttcttctttgaacgactttgtttctttttcttgcctaattgctctggtcaagactttgagtattaattatgctggataaaag

SEQ ID NO: 45255 - DNA, 110 bp, synthetic construct; identical to SEQ ID NO: 45254
  source 1..110: mol_type = other DNA

SEQ ID NO: 45256 - DNA, 110 bp, synthetic construct
  source 1..110: mol_type = other DNA
cctgattggaaatgcattccttaaatgttcctcaagttaaggattacattgctgatattctagctctgggtccaaagaagttcagtttgctatctgcctgaccagtaagt

SEQ ID NO: 45257 - DNA, 110 bp, synthetic construct
  source 1..110: mol_type = other DNA
tattctagctctgggtccaaagaagttcagtttgctatctgcctgaccagtaagtgagtcatgacgaacaaattacaagccaggaagcccagaccgtaccacggactcta

SEQ ID NO: 45258 - DNA, 110 bp, synthetic construct
  source 1..110: mol_type = other DNA
cgtcctgcttccccacgtttcccaaacatcctgaagccttgtgcacacttgtggcggcttccacagccctggccaggatctatctccacagggctgtcctttctgccctc

SEQ ID NO: 45259 - DNA, 110 bp, synthetic construct
  source 1..110: mol_type = other DNA
ggcttccacagccctggccaggatctatctccacagggctgtcctttctgccctccgaagacctgggtgtctccttatggctttgacccctggctacatcctgcctccca

SEQ ID NO: 45260 - DNA, 110 bp, synthetic construct
  source 1..110: mol_type = other DNA
ctgacacctgctatgctgtggatcaactctgaggccattatgctaaatgaaataaaccagacacaaacaggacaatacctgcatgattccacttctctgaaatagctagt

SEQ ID NO: 45261 - DNA, 110 bp, synthetic construct
  source 1..110: mol_type = other DNA
accagacacaaacaggacaatacctgcatgattccacttctctgaaatagctagtgtagtcaggttcctagatactgaaagtagaaagagtagctgccaggatcagggag

SEQ ID NO: 45262 - DNA, 110 bp, synthetic construct
  source 1..110: mol_type = other DNA
tctgtagagtacttggtagaggatgtgtttggcaagtacgagcccatccaaagattggcacccacaattataaagggtgggaagctaaaggagccactacatcatgatac

SEQ ID NO: 45263 - DNA, 110 bp, synthetic construct
  source 1..110: mol_type = other DNA
gtgaatcacattctaagcatagatcatttcatttttcacaggttttgaagcctatacatcacagttcttggccattttcttggttcaatgtccctgatgtaaattattta

SEQ ID NO: 45264 - DNA, 110 bp, synthetic construct
  source 1..110: mol_type = other DNA
acatcacagttcttggccattttcttggttcaatgtccctgatgtaaattatttagaatgataaaatcaaggtgacactggaggtgccctgggggctaaaggaaatctta

SEQ ID NO: 45265 - DNA, 110 bp, synthetic construct
  source 1..110: mol_type = other DNA
acctggatgtgtaaagtagagggtatatgttactgaggctggggatttagcaagatcaggagccagaactggggagagggtgtgggaaaggggggcccacgccggagtgt

SEQ ID NO: 45266 - DNA, 110 bp, synthetic construct
  source 1..110: mol_type = other DNA
tcaggagccagaactggggagagggtgtgggaaaggggggcccacgccggagtgttctagcgtggacatcaggattaacagaaaaacttcctgacatctgctgtttcttt

SEQ ID NO: 45267 - DNA, 110 bp, synthetic construct
  source 1..110: mol_type = other DNA
ctggtaactcatggacaagcccacccatggatgtagaacctccaaccagtgcaccattaactctttagtatgagcagacaaacgagctcacctgatgtttgagcatagaa

SEQ ID NO: 45268 - DNA, 110 bp, synthetic construct
  source 1..110: mol_type = other DNA
attaactctttagtatgagcagacaaacgagctcacctgatgtttgagcatagaaggcagagagcaaaccaaagccaaaccaaagcatacaagcaaacagaaaaaggcaa

SEQ ID NO: 45269 - DNA, 110 bp, synthetic construct
  source 1..110: mol_type = other DNA
tgtgagtcaggagggggatacaccggggagcgtgtcactgggttcccccactcaaagaacagcttaaagctgccctctacacacatttgcaaaaggcatccttccacctc

SEQ ID NO: 45270 - DNA, 110 bp, synthetic construct
  source 1..110: mol_type = other DNA
agaacagcttaaagctgccctctacacacatttgcaaaaggcatccttccacctctctaatctcctagaagcaggatttgcacattacaatgtcattctctagggaaggg

SEQ ID NO: 45271 - DNA, 110 bp, synthetic construct
  source 1..110: mol_type = other DNA
cccatgatctctgacgtcaacaaacccagtgaacactactgaccatgaacaaactcttgtctggctgccctggctcacacccgcaccacctcctgccaaagacggtgcaa

SEQ ID NO: 45272 - DNA, 110 bp, synthetic construct
  source 1..110: mol_type = other DNA
cttgtctggctgccctggctcacacccgcaccacctcctgccaaagacggtgcaaccacattgcctcccactctcccccatacatgctgctttccaatcccatctctctt

SEQ ID NO: 45273 - DNA, 110 bp, synthetic construct
  source 1..110: mol_type = other DNA
tcggcctttgaagaaggagcgagaggtgatttggcagaactatgattactatcctgcttctggctgctctcccctgtgattcagatcccagacagttccgcgtagctctg

SEQ ID NO: 45274 - DNA, 110 bp, synthetic construct
  source 1..110: mol_type = other DNA
gcttctggctgctctcccctgtgattcagatcccagacagttccgcgtagctctgtctttatggtctaagactctcaggtggattcttttaacagaaacctccaccaaga

SEQ ID NO: 45275 - DNA, 110 bp, synthetic construct
  source 1..110: mol_type = other DNA
caatacaccctctcgacccagggcgcccccacataccatcttccttggcacatacctccatgccctcagaccagctggcttgcgattaaaatggaccaggctaggaagcg

SEQ ID NO: 45276 - DNA, 110 bp, synthetic construct
  source 1..110: mol_type = other DNA
ctccatgccctcagaccagctggcttgcgattaaaatggaccaggctaggaagcgccagagagtgcagtctattgtatcaaatttccttggccttttatagggctgcacc

SEQ ID NO: 45277 - DNA, 110 bp, synthetic construct
  source 1..110: mol_type = other DNA
gaaaattcattattattaggggtccactccagtttttcccttgtggcttcctcacttcaactatagaccatttagagttcaaaatccatttctttgtattctcacagatt

SEQ ID NO: 45278 - DNA, 110 bp, synthetic construct
  source 1..110: mol_type = other DNA
actagttgggttcattaccgctgagccatggcaggaactccttcaaggcccttcaaacaccaccttctttctctctgcatgtactctacctcatatttttctaaaacaag

SEQ ID NO: 45279 - DNA, 110 bp, synthetic construct
  source 1..110: mol_type = other DNA
aaagaacacaggtcacaagtttgataggcacagatctcagcacctgacagatgcagggtattcagtgaccaaagggacaagggtcaatgccctggacagaagctgatatc

SEQ ID NO: 45280 - DNA, 110 bp, synthetic construct
  source 1..110: mol_type = other DNA
gggtattcagtgaccaaagggacaagggtcaatgccctggacagaagctgatatcagccagcacaagtcaaggactgctaggagaccaggggctctttgcccctctccca

SEQ ID NO: 45281 - DNA, 110 bp, synthetic construct
  source 1..110: mol_type = other DNA
tttgtctgtgtctgaaatcatctttggccatcacaacttagggaggggctgccagcatggagctggtagaagccaggaataatatatcctgtagtcacaggagcccccac

SEQ ID NO: 45282 - DNA, 110 bp, synthetic construct
  source 1..110: mol_type = other DNA
gtctgctccaatctgatttctgggtcctgcctacttggcttctctaaggaggataaatcccttcgtctctctgtagggttgatggatgggttggcaagaaagaggttaac

SEQ ID NO: 45283 - DNA, 110 bp, synthetic construct
  source 1..110: mol_type = other DNA
atagccttctcagtgttgtaattgcactttggtcaaacttttgtgatattcaatagtagtggttgatttaatattgctttttcctctactctgtgagctccttgatgttg

SEQ ID NO: 45284 - DNA, 110 bp, synthetic construct
  source 1..110: mol_type = other DNA
gtagtggttgatttaatattgctttttcctctactctgtgagctccttgatgttgcttctctttattacacttgtttcatctgtaacattatctaaaatgttatggcttt

SEQ ID NO: 45285 - DNA, 110 bp, synthetic construct
  source 1..110: mol_type = other DNA
ctgggatgcaggttctatccctggctgtgcatagtgggataaggatctgatgttactatagctgcagcatatgatgcaactgcagcttagagctgatccctggcttggaa

SEQ ID NO: 45286 - DNA, 110 bp, synthetic construct
  source 1..110: mol_type = other DNA
ctatagctgcagcatatgatgcaactgcagcttagagctgatccctggcttggaactccatattctgtggggcagacaaaaaagaaaaaacccaaaaaacccatagtagt

SEQ ID NO: 45287 - DNA, 110 bp, synthetic construct
  source 1..110: mol_type = other DNA
tcatataaatcagtggagcactgaaggaagagcttccctgtcagcaggcatgggaagcacattggagaatatacttatgatcatttatgctgtaatattcctagtgggga

SEQ ID NO: 45288 - DNA, 110 bp, synthetic construct
  source 1..110: mol_type = other DNA
agcacattggagaatatacttatgatcatttatgctgtaatattcctagtggggattttgggaaatggattcattttactggttaactgtattgattggatcaagaacag

SEQ ID NO: 45289 - DNA, 110 bp, synthetic construct
  source 1..110: mol_type = other DNA
ttgctttggaatattggtggtagttaaatccaacaaaattattaagatttgagctactataaagccatacagtttagaatatctggaatccaatcagggttttatgtctc

SEQ ID NO: 45290 - DNA, 110 bp, synthetic construct; identical to SEQ ID NO: 45289
  source 1..110: mol_type = other DNA

SEQ ID NO: 45291 - DNA, 110 bp, synthetic construct
  source 1..110: mol_type = other DNA
cctcctggagatcctgtgccaccagtggcttcagggaagcccttgagaagccctgcattggtggggctggagtctgagatctccagtggagctctccagctttctctccc

SEQ ID NO: 45292 - DNA, 110 bp, synthetic construct
  source 1..110: mol_type = other DNA
cattggtggggctggagtctgagatctccagtggagctctccagctttctctccccttccaacagttgtgaaactctctgttcatactaggaacagcgtggctttcattt

SEQ ID NO: 45293 - DNA, 110 bp, synthetic construct
  source 1..110: mol_type = other DNA
acccatttatcagtcctgggaactttttttttttgatagatttggattttctgtagttacaaaacaggatttttatgctcttctctgcattcaaggacagttttattctt

SEQ ID NO: 45294 - DNA, 110 bp, synthetic construct
  source 1..110: mol_type = other DNA
gttacaaaacaggatttttatgctcttctctgcattcaaggacagttttattctttctttcctgtctatgtgccttttttccttcccttgcctcagtgtgctgggtggct

SEQ ID NO: 45295 - DNA, 110 bp, synthetic construct
  source 1..110: mol_type = other DNA
ttggggactcctgaagcagttgatgaggtttttattttatagtttatagaaaaggtcaagttttttttttttcttatttcctgtgatcgctggaaagcttgcagataaaa

SEQ ID NO: 45296 - DNA, 110 bp, synthetic construct
  source 1..110: mol_type = other DNA
tcaagttttttttttttcttatttcctgtgatcgctggaaagcttgcagataaaattgggacctcatatcgcaagagtaaactgtctttgggatggatttttatattaac

SEQ ID NO: 45297 - DNA, 110 bp, synthetic construct
  source 1..110: mol_type = other DNA
ccgaattaccagcatcactactcttgtactttgggaccattattaagtgagataggggttacttggatgcaagccctgcacatctccaagtcatctgataatggctgcta

SEQ ID NO: 45298 - DNA, 110 bp, synthetic construct
  source 1..110: mol_type = other DNA
gggttacttggatgcaagccctgcacatctccaagtcatctgataatggctgctaagtgacaaaggaatcattccccttccagggcaggaacaaagagatggtgcaagat

SEQ ID NO: 45299 - DNA, 110 bp, synthetic construct
  source 1..110: mol_type = other DNA
tattaaaattgtgatctacaacatatgataaagatatttttcattccaggaattgcaatttcttgcaatacggtcggctgacttctttgaattggggataatcaaacttt

SEQ ID NO: 45300 - DNA, 110 bp, synthetic construct
  source 1..110: mol_type = other DNA
caatttcttgcaatacggtcggctgacttctttgaattggggataatcaaactttagtggtttccgtttattgtcccataagctaattcactgcatataaagaagaaatg

SEQ ID NO: 45301 - DNA, 110 bp, synthetic construct
  source 1..110: mol_type = other DNA
ataagtatagaaggtgtcagaagcttttgaggaacttgggaaatgaccaagtgactacattagtggtgaaggtggaggtgtgtctgggtagcgcaggagagcatagcttt

SEQ ID NO: 45302 - DNA, 110 bp, synthetic construct
  source 1..110: mol_type = other DNA
tacattagtggtgaaggtggaggtgtgtctgggtagcgcaggagagcatagctttggaactcctaggaaaggaagactggtaaaaatagaaattcctaagggaggaaata

SEQ ID NO: 45303 - DNA, 110 bp, synthetic construct
  source 1..110: mol_type = other DNA
agcgggcttttcaggatagaagtcagatttgctatttaattcttttctaccatcctctaaaatagtttttcccccttatttagcttgatagttaatagtaattcacatat

SEQ ID NO: 45304 - DNA, 110 bp, synthetic construct
  source 1..110: mol_type = other DNA
tgcacaggtttcccttgctcatggccatatatcttatgccttcatttctaggcgatagtccagtgaacacccttgaccacatcagttttagtatcacagcttgcaatgtg

SEQ ID NO: 45305 - DNA, 110 bp, synthetic construct
  source 1..110: mol_type = other DNA
gtagaaaacaaatcaccgtttgttacatcaattatataacaacaaaatatccaagatcccagggcaaaatagatgtacaggtgtaactatttctacaggaaatgcctaaa

SEQ ID NO: 45306 - DNA, 110 bp, synthetic construct
  source 1..110: mol_type = other DNA
atcccagggcaaaatagatgtacaggtgtaactatttctacaggaaatgcctaaacacatatacacgtccttatgtatgagtatatatacatattagaggatttcacaat

SEQ ID NO: 45307 - DNA, 110 bp, synthetic construct
  source 1..110: mol_type = other DNA
aaacaagggttttacccgtcttgtttactgctgtttctagaactcctagaatcaagacacagcagatttttaaaataattaccttttccatgaatgaatatatcaattta

SEQ ID NO: 45308 - DNA, 110 bp, synthetic construct
  source 1..110: mol_type = other DNA
ccgtcttgtttactgctgtttctagaactcctagaatcaagacacagcagatttttaaaataattaccttttccatgaatgaatatatcaatttataaatggaatcagga

SEQ ID NO: 45309 - DNA, 110 bp, synthetic construct
  source 1..110: mol_type = other DNA
aagttaccggtggtccacgatccctggccccagcctgcccacctcctgcctcttctatggaaatcacacgaaagttaatacgtggtagtgttgtgagattagagggcatc

SEQ ID NO: 45310 - DNA, 110 bp, synthetic construct
  source 1..110: mol_type = other DNA
tatggaaatcacacgaaagttaatacgtggtagtgttgtgagattagagggcatcctcatttttctaccaaagccaatctgccagctctgtcctgacgtgctttctccct

SEQ ID NO: 45311 - DNA, 110 bp, synthetic construct
  source 1..110: mol_type = other DNA
aacccgcactgtggtgagagttcgtggggggggggggggctgggttgtttcccagcttaggcggaatcagtcttcaatgtctacgtttttaattcttgtttcgatatttt

SEQ ID NO: 45312 - DNA, 110 bp, synthetic construct
  source 1..110: mol_type = other DNA
cttaggcggaatcagtcttcaatgtctacgtttttaattcttgtttcgatattttatagaatgactcaagattttaacacttaggctttcccttcacgtgaatactttct

SEQ ID NO: 45313 - DNA, 110 bp, synthetic construct
  source 1..110: mol_type = other DNA
aatcaagtgacattttaaggtttcattcctattttcctttggtcagaacctcagttccatgttgtaactttagtgaaaaatcgaatggtacaaacagcaccttctttaga

SEQ ID NO: 45314 - DNA, 110 bp, synthetic construct
  source 1..110: mol_type = other DNA
tccatgttgtaactttagtgaaaaatcgaatggtacaaacagcaccttctttagactttctctgttgattaactgattaaaggcttatttgtttgttgtctggcatttgt

SEQ ID NO: 45315 - DNA, 110 bp, synthetic construct
  source 1..110: mol_type = other DNA
atgaacacacccatgacatacggaagttcctcagtcaggaattgaatccaagccaccgctgcgatctatgcctgcagctatggcaatgctggatcctttaacccactgca

SEQ ID NO: 45316 - DNA, 110 bp, synthetic construct; identical to SEQ ID NO: 45315
  source 1..110: mol_type = other DNA

SEQ ID NO: 45317 - DNA, 110 bp, synthetic construct
  source 1..110: mol_type = other DNA
cctcagcgagcaaagtacacaactcactccatccctacttcccctggccttctttatgagtccaaatataactagctgtcaaggtcttgtggttttgtctttaataaata

SEQ ID NO: 45318 - DNA, 110 bp, synthetic construct
  source 1..110: mol_type = other DNA
ggctcacgagtggcaaaatcaggactgagggcttggcttgtgcaatcaagatttcagcctctcaggggagttcccttaatggttcagtggttgacaaacctgacaaggat

SEQ ID NO: 45319 - DNA, 110 bp, synthetic construct
  source 1..110: mol_type = other DNA
tgagggcttggcttgtgcaatcaagatttcagcctctcaggggagttcccttaatggttcagtggttgacaaacctgacaaggatctatgaggatatgggttcgatccct

SEQ ID NO: 45320 - DNA, 110 bp, synthetic construct
  source 1..110: mol_type = other DNA
tctggcttattttgtttggagtaggaggtgaatggaacttggtatacttatctcagggtacctcagccagagttaatcatatataaccttagctttggacctcagcatcg

SEQ ID NO: 45321 - DNA, 110 bp, synthetic construct
  source 1..110: mol_type = other DNA
gggtacctcagccagagttaatcatatataaccttagctttggacctcagcatcggtggaatcttagaggctgatgggtggatgggtacataagggacacccaaaatctt

SEQ ID NO: 45322 - DNA, 110 bp, synthetic construct
  source 1..110: mol_type = other DNA
tctataagtgaagagaatctccaagaactttaacaaggaatcaggaaactctctacctctatacttgtgaaatctgttttttccctaggtgacttatgtggcaagcatat

SEQ ID NO: 45323 - DNA, 110 bp, synthetic construct
  source 1..110: mol_type = other DNA
actaaatgtgagccagggcttcccctctgctcagtgccctatatcatgttactggggcaagggcaggtcccaggttactggaccagaagccttgatggttgggtctaggc

SEQ ID NO: 45324 - DNA, 110 bp, synthetic construct
  source 1..110: mol_type = other DNA
ggcaagggcaggtcccaggttactggaccagaagccttgatggttgggtctaggctgacacttttccctttaaatgtgtgctctcaccccagaggagagcaatgctggag

SEQ ID NO: 45325 - DNA, 110 bp, synthetic construct
  source 1..110: mol_type = other DNA
gctcaacttcttcatctgtctttgaaagtcttctgtaagaaaaggagctcttcagagttcctgtcagggcacagaggaaacaaatccgaccagaaaccatgaggctgtgg

SEQ ID NO: 45326 - DNA, 110 bp, synthetic construct
  source 1..110: mol_type = other DNA
tgctataccttacgttaaatgtcagctacattccagacctatctgcttttgtttactcttcaacaatgactcttcaagtcactgtatgatatgtatgtgttcttaaagaa

SEQ ID NO: 45327 - DNA, 110 bp, synthetic construct
  source 1..110: mol_type = other DNA
taacccactgagctaggccagggaaggtacccttttcctcatagatactagaagggtccattaccaacgagttacaacgggatctgcgagaactttattttttaaaacat

SEQ ID NO: 45328 - DNA, 110 bp, synthetic construct
  source 1..110: mol_type = other DNA
gtccattaccaacgagttacaacgggatctgcgagaactttattttttaaaacatgtacagttgatttacaatgttgtcttggtattgggtgtgcagcaaggtgattcag

SEQ ID NO: 45329 - DNA, 110 bp, synthetic construct; identical to SEQ ID NO: 45327
  source 1..110: mol_type = other DNA

SEQ ID NO: 45330 - DNA, 110 bp, synthetic construct; identical to SEQ ID NO: 45328
  source 1..110: mol_type = other DNA

SEQ ID NO: 45331 - DNA, 110 bp, synthetic construct
  source 1..110: mol_type = other DNA
gatggacagcaatgttgaaaagagtggaccaggtagaggagagcagaggcaggcctggcacgtcaagagtttcaaagtggtactagaaatggagaagtaggagttcccat

SEQ ID NO: 45332 - DNA, 110 bp, synthetic construct
  source 1..110: mol_type = other DNA
attttaatctttttaagctatatgcctggaagtcggatcgctggatcatatggcaactctatttctagtgttttaaggaacacctgtactgtgttctatagtggctgcct

SEQ ID NO: 45333 - DNA, 110 bp, synthetic construct
  source 1..110: mol_type = other DNA
actctatttctagtgttttaaggaacacctgtactgtgttctatagtggctgcctcaatttatattcccaccaacagtaatgctcaacatcactaattattagagaaatg

SEQ ID NO: 45334 - DNA, 110 bp, synthetic construct
  source 1..110: mol_type = other DNA
gaagcacaaaccacagaaaagctattcacagattctcgtgtaagatggtcgagataaccataggtgttacaggaggattcgtactacacagttaagttacacatttaaat

SEQ ID NO: 45335 - DNA, 110 bp, synthetic construct
  source 1..110: mol_type = other DNA
aaccataggtgttacaggaggattcgtactacacagttaagttacacatttaaatggacttcatggttatttgcacagaagagggcaggacgtctttttcccttgaaagc

SEQ ID NO: 45336 - DNA, 110 bp, synthetic construct
  source 1..110: mol_type = other DNA
tcgacacttcagatatattcgatccagccttcagcctgaaagtaaggcatcagcgtaaatgagatctggcaggggatttcaatgttagcaattctgactattaggaatct

SEQ ID NO: 45337 - DNA, 110 bp, synthetic construct
  source 1..110: mol_type = other DNA
acatagcagattatcttagttcaattcagcaatccaagtccaatattatttagcacagtgttctgatgtttcatcccaacccaaatcaactttcagtccaagaacctaga

SEQ ID NO: 45338 - DNA, 110 bp, synthetic construct
  source 1..110: mol_type = other DNA
atgacaggggagaagatctttttgcagaaaaagattctttgcttcaacaaaattgaaggagaatctaaggggaacaccagccgatagatgattagaagcaattcttgatc

SEQ ID NO: 45339 - DNA, 110 bp, synthetic construct
  source 1..110: mol_type = other DNA
aaggagaatctaaggggaacaccagccgatagatgattagaagcaattcttgatcataaaacactgggtgattttttcagaaggagttacaaggactggtaaaaatgata

SEQ ID NO: 45340 - DNA, 110 bp, synthetic construct
  source 1..110: mol_type = other DNA
agcatccttaaccaagtgggagccgctaccatcacgtgcttaaccaagaggtacccggagccctcagaagcaaaggtaagagattataaagagacacttgcctctgcaaa

SEQ ID NO: 45341 - DNA, 110 bp, synthetic construct
  source 1..110: mol_type = other DNA
ggtgaatatgaacgcagactgttaaataaggatttagggggagttcccatcatggctcagtgattaaggaatccgactaggagccatgagtttgcgggttcgatacccta

SEQ ID NO: 45342 - DNA, 110 bp, synthetic construct; identical to SEQ ID NO: 45341
  source 1..110: mol_type = other DNA

SEQ ID NO: 45343 - DNA, 110 bp, synthetic construct
  source 1..110: mol_type = other DNA
tcccccacattcttcgttttctctgcccttccttctttacaactaaccatacaaacaagagaattgaaccagtccgttccgtcgcagctgctggccaatgcgctactaat

SEQ ID NO: 45344 - DNA, 110 bp, synthetic construct
  source 1..110: mol_type = other DNA
caagagaattgaaccagtccgttccgtcgcagctgctggccaatgcgctactaattacatccttccgagcctttcgattttgtggagtttgaaaagacaaccatgagacc

SEQ ID NO: 45345 - DNA, 110 bp, synthetic construct
  source 1..110: mol_type = other DNA
gacacaaaaaagtatcctaacaaacaggccttgctgagtttccctgttactacctggcactccttaccctatggtagccctccatgcctgtccacgcttcagcacaccca

SEQ ID NO: 45346 - DNA, 110 bp, synthetic construct
  source 1..110: mol_type = other DNA
ggcactccttaccctatggtagccctccatgcctgtccacgcttcagcacacccagcctaaaaatatatatctaaatgtttcttggagtcttcatttctttagcaaggct

SEQ ID NO: 45347 - DNA, 110 bp, synthetic construct
  source 1..110: mol_type = other DNA
gttagtttgcttggttttgtttgatgttagaatcctgagttgagggatttagctgaaatagatatagcatattatttgagagggttcttatcctggatctttgttgtaaa

SEQ ID NO: 45348 - DNA, 110 bp, synthetic construct
  source 1..110: mol_type = other DNA
aaatagatatagcatattatttgagagggttcttatcctggatctttgttgtaaacaataaagggatttctaggagttcctgttgtggcccagcggtagcaaacccaggt

SEQ ID NO: 45349 - DNA, 110 bp, synthetic construct
  source 1..110: mol_type = other DNA
ggttgtgttgcaactcatttttcctatgcactaagcaaatgacatcaccagtttataaaaggaaagtgtgcctaacaatcctcagtttactgttccattggtgtcggtat

SEQ ID NO: 45350 - DNA, 110 bp, synthetic construct
  source 1..110: mol_type = other DNA
acaggtacgattaccttttgcatgttttttccttccttaactttttttttcttcctgaggaatctttacctccttgttcttccgattccttctcaaagaatatttgcagt

SEQ ID NO: 45351 - DNA, 110 bp, synthetic construct
  source 1..110: mol_type = other DNA
tgaggaatctttacctccttgttcttccgattccttctcaaagaatatttgcagtactcttcaaacccccccatactaccccactttttttaatgagctcctgttgtaaa

SEQ ID NO: 45352 - DNA, 110 bp, synthetic construct
  source 1..110: mol_type = other DNA
aaattaactacaatggaaaaaattaaaatcacttaaacaaagaatttcccaggctagggttaaatcagagctgctgctgaggactatgccacagctgcggccacactgga

SEQ ID NO: 45353 - DNA, 110 bp, synthetic construct
  source 1..110: mol_type = other DNA
ttcccaggctagggttaaatcagagctgctgctgaggactatgccacagctgcggccacactggatccaagccgcgtctgagacctacaccacggtgtgtggcaatatca

SEQ ID NO: 45354 - DNA, 110 bp, synthetic construct
  source 1..110: mol_type = other DNA
atctgtgtctcatatgcagtatttatgaactgctaatgatctctcataagctttcaatgtgagagtttttccaagtacttgtaccttctccacctccttgaattcttgat

SEQ ID NO: 45355 - DNA, 110 bp, synthetic construct
  source 1..110: mol_type = other DNA
gaatttctaaggggggaattcagaaatttgtgtttaacaagctctccaggtaatggttgagggaagcaatgggaatggggtgtccaagtctgagaagtacctatctagcc

SEQ ID NO: 45356 - DNA, 110 bp, synthetic construct
  source 1..110: mol_type = other DNA
ctttagtcataacagtacaccccccacaagccgggggaccaagtatagataaaggactggaaaaaagagcctctaaggctggtatggaagggccccctatactgtaattc

SEQ ID NO: 45357 - DNA, 110 bp, synthetic construct
  source 1..110: mol_type = other DNA
tacaccccccacaagccgggggaccaagtatagataaaggactggaaaaaagagcctctaaggctggtatggaagggccccctatactgtaattctagccactcccactg

SEQ ID NO: 45358 - DNA, 110 bp, synthetic construct
  source 1..110: mol_type = other DNA
ggagaaaggaatggtggagacaagttttactttggcacatggaccctatggctcggaaaagaaaactacatatggtgtagcatagctgctgataaatttgggggcttaca

SEQ ID NO: 45359 - DNA, 110 bp, synthetic construct
  source 1..110: mol_type = other DNA
taagagaagagttagcgccgtcagttcccacttccctaagaaaatggttatacaggaaaaagaaactaagttttttttcctccttgatagtgacttatcacaactttcta

SEQ ID NO: 45360 - DNA, 110 bp, synthetic construct
  source 1..110: mol_type = other DNA
gaaaaagaaactaagttttttttcctccttgatagtgacttatcacaactttctacgctgtaagagaggaatcagaggtttgtggtcacgggagcaccacccaaggctga

SEQ ID NO: 45361 - DNA, 110 bp, synthetic construct
  source 1..110: mol_type = other DNA
tgtcacaggcaatggtgtgaaagaaagcttttcttttgcaagagtggggcaggagagagaattcgacactttgtgtcataattgtgttctctttagccagtttctgaaga

SEQ ID NO: 45362 - DNA, 110 bp, synthetic construct
  source 1..110: mol_type = other DNA
agagaattcgacactttgtgtcataattgtgttctctttagccagtttctgaagagacatccagaagggtttctttgcagggtccttctggatggctgaatctcaaaaat

SEQ ID NO: 45363 - DNA, 110 bp, synthetic construct
  source 1..110: mol_type = other DNA
cacaattccaccgtccaaggctccaactctgttcaagatgacttgatgccagaatcccaaaggaagtgctgaacagttttctcctcctgggcaacactgtcacccatcca

SEQ ID NO: 45364 - DNA, 110 bp, synthetic construct
  source 1..110: mol_type = other DNA
aaatttttaaaattatatgtgtggcttgcatctaggacccattctatttctcttgagcatcacacgtgtatgtggcttttattggtttcttcctggtctttctcactatc

SEQ ID NO: 45365 - DNA, 110 bp, synthetic construct
  source 1..110: mol_type = other DNA
agcatcacacgtgtatgtggcttttattggtttcttcctggtctttctcactatcatcacctcaactcaggtcctcattttcctctggtccccaaactggtccctagtct

SEQ ID NO: 45366 - DNA, 110 bp, synthetic construct
  source 1..110: mol_type = other DNA
caggggtcctcaagaccctatgtcacccactcctgaacccccacatcctttcagattctccctccccaggaattcctgcctcagtgaaggggacaacagctggctcacac

SEQ ID NO: 45367 - DNA, 110 bp, synthetic construct
  source 1..110: mol_type = other DNA
ttctccctccccaggaattcctgcctcagtgaaggggacaacagctggctcacactgtcctgctggccccactcctgcagacacctgagctggaggtttctacaggcacc

SEQ ID NO: 45368 - DNA, 110 bp, synthetic construct
  source 1..110: mol_type = other DNA
tggctcaggtcgctgctgtgacagggttccatccctggcatgggaacttctgcatgctttggttgaagccaaaaaagaaaaaaaaaaaaaaatcaagttggtgaatcctg

SEQ ID NO: 45369 - DNA, 110 bp, synthetic construct
  source 1..110: mol_type = other DNA
tggcatgggaacttctgcatgctttggttgaagccaaaaaagaaaaaaaaaaaaaaatcaagttggtgaatcctgatcagcactttttttttctttttagggccgcaccc

SEQ ID NO: 45370 - DNA, 110 bp, synthetic construct
  source 1..110: mol_type = other DNA
gcaaggggtgtgtccttagtcaagtcagcaggagggagccactgcagatacttgaaaggggaatgatggcactggcactgtcctggcagacggtacagtgtagagtggtt

SEQ ID NO: 45371 - DNA, 110 bp, synthetic construct
  source 1..110: mol_type = other DNA
aaggggaatgatggcactggcactgtcctggcagacggtacagtgtagagtggttagaagtagacacaggtgggaggttggggatccagtgagaaggaacaatgatctaa

SEQ ID NO: 45372 - DNA, 110 bp, synthetic construct
  source 1..110: mol_type = other DNA
tcctccacacactgatctagggctgacagtgtagcccaaagtccagaccaaaacgtgcttcccagtcctggcatcccaggtcccagctggccctccctgttgaccagcca

SEQ ID NO: 45373 - DNA, 110 bp, synthetic construct
  source 1..110: mol_type = other DNA
tagtcagattcgtttccactgagccaccaagggaaatcctcacagaacatttacttacatctattagttcactatcaagggtgcagataaaaagccagattaagagttac

SEQ ID NO: 45374 - DNA, 110 bp, synthetic construct
  source 1..110: mol_type = other DNA
tacatctattagttcactatcaagggtgcagataaaaagccagattaagagttacatagcggagttcccatcgtggctcagaggttagtatccacgaggacgcagatttg

SEQ ID NO: 45375 - DNA, 110 bp, synthetic construct
  source 1..110: mol_type = other DNA
gctgggcccccaggccaggaggagaggctgatgcattgttaaggggtctcagggcaggtgggggaggcaggtttggtgtcacgtgagggaaagtggctggtggtggagca

SEQ ID NO: 45376 - DNA, 110 bp, synthetic construct
  source 1..110: mol_type = other DNA
aggtgggggaggcaggtttggtgtcacgtgagggaaagtggctggtggtggagcagtgggtaggttcccaccaccaactggagtgttaggcggctttgttggaggagcac

SEQ ID NO: 45377 - DNA, 110 bp, synthetic construct
  source 1..110: mol_type = other DNA
caggttcccatgacagcaatctgtctggattaggggacgagaacccccacgggagcagggggaacccttccctcagtaaccatgattctcaagagctgggcctctctcct

SEQ ID NO: 45378 - DNA, 110 bp, synthetic construct
  source 1..110: mol_type = other DNA
cagggggaacccttccctcagtaaccatgattctcaagagctgggcctctctccttcttcttcatcctcccctaacccaggattccttccagcaccccggtgccgccacc

SEQ ID NO: 45379 - DNA, 110 bp, synthetic construct
  source 1..110: mol_type = other DNA
ttggccaggtgtccccgcaaggtccgccgggtccgcatctggactcgtcccacgacctctagaccagataccagctgcaggaaaggcgggattcgaaattagggtgagca

SEQ ID NO: 45380 - DNA, 110 bp, synthetic construct
  source 1..110: mol_type = other DNA
aaggagggattccagccagagaggccctcctgcatgttcctgaaccctttgaggcgacctccctgtggcggaaggctcctgtgaatccaaaatatgtaccaggcatctgt

SEQ ID NO: 45381 - DNA, 110 bp, synthetic construct
  source 1..110: mol_type = other DNA
ggagaagcactaatctaacaaatttgtattcactcatcagatctttatttcttttggtgggggagggtggcgagcttgcaacatttggaagttcctgggctggtggtcaa

SEQ ID NO: 45382 - DNA, 110 bp, synthetic construct
  source 1..110: mol_type = other DNA
gtattcactcatcagatctttatttcttttggtgggggagggtggcgagcttgcaacatttggaagttcctgggctggtggtcaaatcggagctgcagctgttggcctac

SEQ ID NO: 45383 - DNA, 110 bp, synthetic construct
  source 1..110: mol_type = other DNA
atttcttgggcaaggttatggatgagccccatgttcttagtttgattggagcttttttgtcagcttagggctgagttaggtgttgctgatgtcctcaccaaggagggcaa

SEQ ID NO: 45384 - DNA, 110 bp, synthetic construct
  source 1..110: mol_type = other DNA
tttgtcagcttagggctgagttaggtgttgctgatgtcctcaccaaggagggcaagctgtcacctaagtcaaatattgaaaacttaggcgttcccgttggggctcagcag

SEQ ID NO: 45385 - DNA, 110 bp, synthetic construct
  source 1..110: mol_type = other DNA
tggattcgttaaccactgtgccacgacgggatctcctggaataaacattttaaagaatttaagaggaaaacaatctgtattaacctgtctgttgctctttcttgggagtt

SEQ ID NO: 45386 - DNA, 110 bp, synthetic construct; identical to SEQ ID NO: 45385
  source 1..110: mol_type = other DNA

SEQ ID NO: 45387 - DNA, 110 bp, synthetic construct
  source 1..110: mol_type = other DNA
cttcatagtacttctcaccacctgacataatacctatttgcctgcactttatcatctgtttcccttcaagggaatgtaaagtaagtaggggcaacacttttgttttgttc

SEQ ID NO: 45388 - DNA, 110 bp, synthetic construct
  source 1..110: mol_type = other DNA
accaaggagaagctggggaggagcagtagagctggaggtggggaaaggaaatcatgtttgggagtgggcgtgatactgggctggcagctgaacctgcggcgtggagattc

SEQ ID NO: 45389 - DNA, 110 bp, synthetic construct
  source 1..110: mol_type = other DNA
gtttgggagtgggcgtgatactgggctggcagctgaacctgcggcgtggagattctggtggttttgagcagtgatgacccaaggagggtagtaaagggtgtggtttctgg

SEQ ID NO: 45390 - DNA, 110 bp, synthetic construct
  source 1..110: mol_type = other DNA
gaggggcagctgcgacacgcagtaggccaggtcccggtactgcctctcagttctgcgggtgggagggcgtggtgaggagcagggggatggagggcaggcccatgcctgcc

SEQ ID NO: 45391 - DNA, 110 bp, synthetic construct
  source 1..110: mol_type = other DNA
cgggtgggagggcgtggtgaggagcagggggatggagggcaggcccatgcctgccccgcagtccctcccagcccagatgccaccgtgcgctcttttcctctgggcacaga

SEQ ID NO: 45392 - DNA, 110 bp, synthetic construct
  source 1..110: mol_type = other DNA
acataccagcaccgacttgtctgccagacgccccactgctaaggccaccactgcctggaaacgtgtcaggggtagagcctacgcggggtaagaagagaggatgagatccc

SEQ ID NO: 45393 - DNA, 110 bp, synthetic construct
  source 1..110: mol_type = other DNA
tggaaacgtgtcaggggtagagcctacgcggggtaagaagagaggatgagatcccaccttacaccttccgttctgctcaagacgctcatgaagtacactctacatgagat

SEQ ID NO: 45394 - DNA, 110 bp, synthetic construct
  source 1..110: mol_type = other DNA
tgtatactaagtgagtggattcatatggtatgtgaattttatcccactttgaaaaaatgggatgggaggagttccctggtggctcagtgggttaagaaatctggcattgt

SEQ ID NO: 45395 - DNA, 110 bp, synthetic construct
  source 1..110: mol_type = other DNA
attttatcccactttgaaaaaatgggatgggaggagttccctggtggctcagtgggttaagaaatctggcattgtggctcaggtcactgctgtggtgtgggttttatccc

SEQ ID NO: 45396 - DNA, 110 bp, synthetic construct
  source 1..110: mol_type = other DNA
agaatgtgactgcctcttaagtctaaggcgggagagtggctacccaaagtgccgcggggtctcggcaggctttggtgaggcagctaggagagaacaggagggaacgacgt

SEQ ID NO: 45397 - DNA, 110 bp, synthetic construct
  source 1..110: mol_type = other DNA
ttgttccatctgtctgggctttgggagcccccttgtggtggaatagtgattctgttttcagagggtcccgggaggaaccctctcaggaacccaatcttcctgctccaagg

SEQ ID NO: 45398 - DNA, 110 bp, synthetic construct
  source 1..110: mol_type = other DNA
ggtgcagagacccatggagagtctgggacagccagcaagccagccagccagccagcccaacatctgggaaccagaagacccagctggcagactggactcccgggttcctg

SEQ ID NO: 45399 - DNA, 110 bp, synthetic construct
  source 1..110: mol_type = other DNA
cccaacatctgggaaccagaagacccagctggcagactggactcccgggttcctgccttgttatgtgactttttaagattaactacaaaggagtcactgcccagccagcc

SEQ ID NO: 45400 - DNA, 110 bp, synthetic construct
  source 1..110: mol_type = other DNA
cctcactgcagcatgcccacctcgatcctggaaaaatcctctctgttctttctcccctctgggtaccacgtagtccattccaggcgtgaaaggaatcctgtcctggtcct

SEQ ID NO: 45401 - DNA, 110 bp, synthetic construct
  source 1..110: mol_type = other DNA
gtgggagctaagtgctatttctcatctttcctcctgggggctggggtgggtggctaggctgtcccagcttccagctccaatttggcctggatttggggtccccaggagaa

SEQ ID NO: 45402 - DNA, 110 bp, synthetic construct
  source 1..110: mol_type = other DNA
gatcgcacaggttgtgggctcagtcccacaaggccactccactccttcccacgtgggatgtcaatctcacgtctaggttgttgcctctgctctgactgactggctatgtc

SEQ ID NO: 45403 - DNA, 110 bp, synthetic construct
  source 1..110: mol_type = other DNA
agggagttgggctggcagtgagagagccactggaggcaaaagcttttcccacgcagagagaacgcgctcctattgggcctgttggttaatattaaatattcattcttggg

SEQ ID NO: 45404 - DNA, 110 bp, synthetic construct
  source 1..110: mol_type = other DNA
gagagaacgcgctcctattgggcctgttggttaatattaaatattcattcttgggctcagtagaagacattaggacaaagggtcttgttggttttaaatctctgcttggg

SEQ ID NO: 45405 - DNA, 110 bp, synthetic construct
  source 1..110: mol_type = other DNA
ctcagcctaagagcctgtcaagatgccagcggggtgagtcctagagaaggtgcttttccagctatgagaacacgtgtcatcgtggtgggatttgagggctgggccatatg

SEQ ID NO: 45406 - DNA, 110 bp, synthetic construct
  source 1..110: mol_type = other DNA
ttccagctatgagaacacgtgtcatcgtggtgggatttgagggctgggccatatgaaggctcagcttggagggtgaacatgggctttctcacttcctctccagcaagtca

SEQ ID NO: 45407 - DNA, 110 bp, synthetic construct
  source 1..110: mol_type = other DNA
ttttatgggtgaggaaaccaaggtgcagagaggggagatagttttgctgaattagttgcaggaaaggggaccccttctagggactgagaatgggctcttgtctaacactc

SEQ ID NO: 45408 - DNA, 110 bp, synthetic construct
  source 1..110: mol_type = other DNA
ttgcaggaaaggggaccccttctagggactgagaatgggctcttgtctaacactcctcggaaatgaattgcccaaggagatgcatgtgctgccaaagcaagactttaatt

SEQ ID NO: 45409 - DNA, 110 bp, synthetic construct
  source 1..110: mol_type = other DNA
tcagagagaatgaggcagagcacccaagacagaagccacagtcttttaaaaacctgctctccaaagggatgtcctttacttcggctgcattatattattcgctagaggca

SEQ ID NO: 45410 - DNA, 110 bp, synthetic construct
  source 1..110: mol_type = other DNA
gctctccaaagggatgtcctttacttcggctgcattatattattcgctagaggcaagaccacgtgtctgctctacactcaagatgagggcatcacacaaagacatggata

SEQ ID NO: 45411 - DNA, 110 bp, synthetic construct
  source 1..110: mol_type = other DNA
ttttgggttccagatgcatgtatcggttccctgttataataatctgctctcctgccacgctctgcaaagccccttcatcttcgaagagctgctggcagatgtcggggttt

SEQ ID NO: 45412 - DNA, 110 bp, synthetic construct
  source 1..110: mol_type = other DNA
cacgctctgcaaagccccttcatcttcgaagagctgctggcagatgtcggggtttgtaaataacagtgaagttgagtggggtgaatctgcggggcctgtttggaaagagg

SEQ ID NO: 45413 - DNA, 110 bp, synthetic construct
  source 1..110: mol_type = other DNA
gacgggaactccgggtttgccttcttaagacaggctagagggagcgcagggaaggtgtgaatgtggcctttttatgacgtcccagtcgtccatctgtttctggagatgct

SEQ ID NO: 45414 - DNA, 110 bp, synthetic construct
  source 1..110: mol_type = other DNA
tgtgaatgtggcctttttatgacgtcccagtcgtccatctgtttctggagatgctgccatgctctcgagggtgtgcgtgatggtcccgcagctattgatttgcactaatg

SEQ ID NO: 45415 - DNA, 110 bp, synthetic construct
  source 1..110: mol_type = other DNA
tatatgctggatgccatggcagctgctgaggacaaaatgataggatggacatagtctctgtccgagtggagcttagggtccatccaggaagatgggcatttagacacctg

SEQ ID NO: 45416 - DNA, 110 bp, synthetic construct
  source 1..110: mol_type = other DNA
ctctgtccgagtggagcttagggtccatccaggaagatgggcatttagacacctgctcacagtgacctcaggagaggtcagtgactggaacgaagggggatgggggaaat

SEQ ID NO: 45417 - DNA, 110 bp, synthetic construct
  source 1..110: mol_type = other DNA
acttgcaagtaagtcagcagggtgacgagacgggcaggagggaacaggtgatggggggaagctgcagagcctttccaggtcatgctgaaaacacggccttgatgctgctt

SEQ ID NO: 45418 - DNA, 110 bp, synthetic construct
  source 1..110: mol_type = other DNA
gggaagctgcagagcctttccaggtcatgctgaaaacacggccttgatgctgcttgcaggacaggcaagaagacacctcaggtcccctggcctagggctctaggaagatt

SEQ ID NO: 45419 - DNA, 110 bp, synthetic construct
  source 1..110: mol_type = other DNA
gatcgtgggagaagctgacccccagataagacatctgtgctgaggggccaggggctgtctgctgtgcctcaggcagagctggctgggggtggctgtaactctttctggaa

SEQ ID NO: 45420 - DNA, 110 bp, synthetic construct
  source 1..110: mol_type = other DNA
tgtctgctgtgcctcaggcagagctggctgggggtggctgtaactctttctggaaacatctgataggtagcagcacccaagaccccagaaattctcagaaaacattttag

SEQ ID NO: 45421 - DNA, 110 bp, synthetic construct
  source 1..110: mol_type = other DNA
gagtagtccctgttccccatagatgggcctgagccctctcatttttggctggtcatgcctggcctgcttcaatcatttatgtgtcctgcctggctcctgtaggcatctga

SEQ ID NO: 45422 - DNA, 110 bp, synthetic construct
  source 1..110: mol_type = other DNA
tgcctggcctgcttcaatcatttatgtgtcctgcctggctcctgtaggcatctgaattttcaacctgttctattgttttcccttaagtgatataatggatctttatcttt

SEQ ID NO: 45423 - DNA, 110 bp, synthetic construct
  source 1..110: mol_type = other DNA
tcggcacctccaggtacatctcctaagacgtgtgatgtcctcagtgtcatccaccatgacactcggagtggtggggtgactgtcatggtcacagggggagctgggggtga

SEQ ID NO: 45424 - DNA, 110 bp, synthetic construct
  source 1..110: mol_type = other DNA
atgacactcggagtggtggggtgactgtcatggtcacagggggagctgggggtgaaggtgggctcaaatctggtctcccgactccacatgctgcgcagttttcaagacac

SEQ ID NO: 45425 - DNA, 110 bp, synthetic construct
  source 1..110: mol_type = other DNA
catctgtttctccagctggggtttggctcaccgaaacctaaagtcgaggtctgaagacagatggtgggatgaccagagagagtccccggccttgggtcaaactgttgcgt

SEQ ID NO: 45426 - DNA, 110 bp, synthetic construct
  source 1..110: mol_type = other DNA
gacagatggtgggatgaccagagagagtccccggccttgggtcaaactgttgcgtaaaagcgcttgggtcctctctgttagcggctgcccagttaacgtttcctctctcc

SEQ ID NO: 45427 - DNA, 110 bp, synthetic construct
  source 1..110: mol_type = other DNA
cttaattccacaaggatttcttgagcgtttcttatgtgccagacactaggctgaccactcaacaaggctgaaccctaagcttgaccacaaggaagacaaagcccacaagg

SEQ ID NO: 45428 - DNA, 110 bp, synthetic construct
  source 1..110: mol_type = other DNA
cactcaacaaggctgaaccctaagcttgaccacaaggaagacaaagcccacaaggaagtctctcccccacctgcccttggccatgggcaccctgcaggggtctaacttca

SEQ ID NO: 45429 - DNA, 110 bp, synthetic construct
  source 1..110: mol_type = other DNA
acattacctgttctaggatagtaacgttggctctttctgatcataattgctaagtgccccatgctgtcttttaactttctcattgctagactcctgccggagattttcaa

SEQ ID NO: 45430 - DNA, 110 bp, synthetic construct
  source 1..110: mol_type = other DNA
gccccatgctgtcttttaactttctcattgctagactcctgccggagattttcaagatactggctccctgctgcttttcctattcccttactcctgcaagcacgcttata

SEQ ID NO: 45431 - DNA, 110 bp, synthetic construct
  source 1..110: mol_type = other DNA
ctccagagtcaccccagaaggacacccctctggtacagcatttagacctttgaccccgaaaagtaagtcttgggtttggcatcggtatgctggaggttatggttttatat

SEQ ID NO: 45432 - DNA, 110 bp, synthetic construct
  source 1..110: mol_type = other DNA
ccgaaaagtaagtcttgggtttggcatcggtatgctggaggttatggttttatatttttctctccccaagatgaaacaaagcttcctatttgtttctgcctctttgggtt

SEQ ID NO: 45433 - DNA, 110 bp, synthetic construct
  source 1..110: mol_type = other DNA
ggtccatttgtcatttggcttcgctccgtagacatttatagagcacttaggtacgccagatgctatggtgggtgtgtgagttccatccagcagacctgcttttcccctct

SEQ ID NO: 45434 - DNA, 110 bp, synthetic construct
  source 1..110: mol_type = other DNA
ccagatgctatggtgggtgtgtgagttccatccagcagacctgcttttcccctctctgtgtctccttttttccaagcaaaatggatgaaagaatgacttccattacatga

SEQ ID NO: 45435 - DNA, 110 bp, synthetic construct
  source 1..110: mol_type = other DNA
aggctctttattggcctttttataccaatatttccaataagaagaagagaaaggaaatttcgtctgtcctccagcaagtttgatctgcagtttttacttctgatggacat

SEQ ID NO: 45436 - DNA, 110 bp, synthetic construct
  source 1..110: mol_type = other DNA
aatttcgtctgtcctccagcaagtttgatctgcagtttttacttctgatggacatgtaaaaattgtctagcaattctacaactcattggtcatttcctgtgaattttaag

SEQ ID NO: 45437 - DNA, 110 bp, synthetic construct
  source 1..110: mol_type = other DNA
tttagtatcacagttcttgctctgcctgcaaggacgttaagagacaattcggaatgtggattttaaatatcttggcaaaacaagagaaagttggtattagaatccttaat

SEQ ID NO: 45438 - DNA, 110 bp, synthetic construct
  source 1..110: mol_type = other DNA
gtggattttaaatatcttggcaaaacaagagaaagttggtattagaatccttaattctttacttctggatggtaatattccatccaacaaggacaattaacatggcctct

SEQ ID NO: 45439 - DNA, 110 bp, synthetic construct
  source 1..110: mol_type = other DNA
gccagagtgtgcacagcgccttagggggaggaagcagccactgaacaataacccgttactaggcgtatttattcctccggctggccttacctttcatccccggaccccag

SEQ ID NO: 45440 - DNA, 110 bp, synthetic construct
  source 1..110: mol_type = other DNA
gcgcatgacgcggagagggacaggggacagtcccttacacgcaacagagctcacatggcttgtccacaatccaggtcactgtcggaggtgaacagtgaaatctctatggg

SEQ ID NO: 45441 - DNA, 110 bp, synthetic construct
  source 1..110: mol_type = other DNA
tggcttgtccacaatccaggtcactgtcggaggtgaacagtgaaatctctatgggaaacacttggcacggtgcttgggacacagtgatacactggatgtgtcagacgaac

SEQ ID NO: 45442 - DNA, 110 bp, synthetic construct
  source 1..110: mol_type = other DNA
ccagataacagaaaggacttagaataagacatgaatgaagccttggtactggggaggcgtgtcaaacagacaagcaaatcgctcacctgctttttatgcctctgttctgt

SEQ ID NO: 45443 - DNA, 110 bp, synthetic construct
  source 1..110: mol_type = other DNA
ggcgtgtcaaacagacaagcaaatcgctcacctgctttttatgcctctgttctgtagatgggagttaccctgggagatgcaaggcatccgccctcagtttataacttgtg

SEQ ID NO: 45444 - DNA, 110 bp, synthetic construct
  source 1..110: mol_type = other DNA
gtaagaagatgggagagtctctgtggagctaagaccttggagatgacactggcagttctctctggttccctgtgccttccctaaggggaattcctgcatcctcatatgcc

SEQ ID NO: 45445 - DNA, 110 bp, synthetic construct
  source 1..110: mol_type = other DNA
gctgggctccccctcttccagtctatcttgagcgctgtggccctatccattcttctaaattacgattcgcttctcatcaccccctttctgaggagtcaggcggctcccag

SEQ ID NO: 45446 - DNA, 110 bp, synthetic construct
  source 1..110: mol_type = other DNA
taatgaatgatgtttggggcgaggaatagactaatacgcagctgaaaaggaaaagctaagcgtagggctttgaaaagctccagcatggtccttaatatctagaaggccac

SEQ ID NO: 45447 - DNA, 110 bp, synthetic construct
  source 1..110: mol_type = other DNA
ctaagcgtagggctttgaaaagctccagcatggtccttaatatctagaaggccacgaggatgcacaggaccacgcacgtatgcataagagatgtgagatggcctgtactt

SEQ ID NO: 45448 - DNA, 110 bp, synthetic construct
  source 1..110: mol_type = other DNA
acccgcagccatccctagctgcccccaggagggaggagctcacctaagagcccaggctattatctcctatgataacgggtgcactgacatatcagaatctaaggctagag

SEQ ID NO: 45449 - DNA, 110 bp, synthetic construct
  source 1..110: mol_type = other DNA
gctattatctcctatgataacgggtgcactgacatatcagaatctaaggctagaggctttatgtgagtgagtgagaatccagagacttatttagttctgcctctcttttc

SEQ ID NO: 45450 - DNA, 110 bp, synthetic construct
  source 1..110: mol_type = other DNA
tttcttgagagctgacatcttagctccttctctgctcaaggaagctggcagcctaacacaaagccagagttccatatgatcccgtgaggctgagaataaaatcgaatccc

SEQ ID NO: 45451 - DNA, 110 bp, synthetic construct
  source 1..110: mol_type = other DNA
acacaaagccagagttccatatgatcccgtgaggctgagaataaaatcgaatccccccctcacatcagggaaccttgagatttggagactcaaaaatatcctggcagaag

SEQ ID NO: 45452 - DNA, 110 bp, synthetic construct
  source 1..110: mol_type = other DNA
aaaggaatattttcaccaccctggaaagttccttaaggcctctttcaaaccaacatcatcgcccccaccaaggtcaaccactgttcagatttccactatcatttattagt

SEQ ID NO: 45453 - DNA, 110 bp, synthetic construct
  source 1..110: mol_type = other DNA
gtctttatgttccccaggccactccttaacggcaacaaatggagaactccaacccagggccctgcagtgggcagaaaggccagttcctggatgtggggaacagggggccg

SEQ ID NO: 45454 - DNA, 110 bp, synthetic construct
  source 1..110: mol_type = other DNA
agggccctgcagtgggcagaaaggccagttcctggatgtggggaacagggggccggaaggaaaaacttagcaagcacgcccttttcctctaatttcctctccctgtttgt

SEQ ID NO: 45455 - DNA, 110 bp, synthetic construct
  source 1..110: mol_type = other DNA
ccatagcactttggagtcatagctcatttgcagaccagtggacactgcactttgaccatccttttgaaaccgagcagggcccagtggagctcctgggcacacaagccttt

SEQ ID NO: 45456 - DNA, 110 bp, synthetic construct
  source 1..110: mol_type = other DNA
gtcatagctcatttgcagaccagtggacactgcactttgaccatccttttgaaaccgagcagggcccagtggagctcctgggcacacaagcctttctgtgtcccccactt

SEQ ID NO: 45457 - DNA, 110 bp, synthetic construct
  source 1..110: mol_type = other DNA
gtatgcagttcccagaccaagggtcagagccaagttatgcagatgtggccacacgagatccttaacccactctgctgcgctgaggatcaaacccggcactacaaagacac

SEQ ID NO: 45458 - DNA, 110 bp, synthetic construct
  source 1..110: mol_type = other DNA
gaccacatctgaatccagggttcagcaaaggagacttggaaatcagttgtgactgggagagaaggacatgctgcagaaagctggctatgacccccagaagaggtggcaac

SEQ ID NO: 45459 - DNA, 110 bp, synthetic construct
  source 1..110: mol_type = other DNA
ggagagaaggacatgctgcagaaagctggctatgacccccagaagaggtggcaacgggagacaatgaaccgtgggagtgagagccaggcagcctggacaggaagctggga

SEQ ID NO: 45460 - DNA, 110 bp, synthetic construct
  source 1..110: mol_type = other DNA
ttcccatgattctgggattctctctatatctgtaataaaatcagtgttctcccgtagaaagaacggggacgggcaagatgcccttggcatttcattccagccttgggatt

SEQ ID NO: 45461 - DNA, 110 bp, synthetic construct
  source 1..110: mol_type = other DNA
ttccgagcttctcttcgtagagttgggtagaggtgttagaaaatccctgttagcccagaaggtcctggagctaggagagctcgatagtgcctgctgccctagactcccca

SEQ ID NO: 45462 - DNA, 110 bp, synthetic construct
  source 1..110: mol_type = other DNA
cagaaggtcctggagctaggagagctcgatagtgcctgctgccctagactccccaggctcagaacgtagcatcctacaaaatgccaaccgactcaaggccaataaagcct

SEQ ID NO: 45463 - DNA, 110 bp, synthetic construct
  source 1..110: mol_type = other DNA
ctgtgggcacagtgaaaatgggaggaggctccagcttctgcaggcacagcaagagcacccacccttccgaaggggcagccttactcagcacctctgactgatgatagaaa

SEQ ID NO: 45464 - DNA, 110 bp, synthetic construct
  source 1..110: mol_type = other DNA
cacccacccttccgaaggggcagccttactcagcacctctgactgatgatagaaaactgaaatgcaagaaccatgagaccaaacgcagaagccacagttttccaaaagaa

SEQ ID NO: 45465 - DNA, 110 bp, synthetic construct
  source 1..110: mol_type = other DNA
cctctgatcttcggaggaagggtgggcgcactgcaagggcggggctcctctgcccactggtggagcacaagctctcggaggttacatggaaggagcatgggaccctgccc

SEQ ID NO: 45466 - DNA, 110 bp, synthetic construct
  source 1..110: mol_type = other DNA
actaatacccccaacaaatggaagatgttaaatacttaaagaagaattttttttttttttggtctttttaggaccacacctgcagcatttggaagttcccaggtgagggg

SEQ ID NO: 45467 - DNA, 110 bp, synthetic construct
  source 1..110: mol_type = other DNA
aaatggaagatgttaaatacttaaagaagaattttttttttttttggtctttttaggaccacacctgcagcatttggaagttcccaggtgaggggtggaattggaactgc

SEQ ID NO: 45468 - DNA, 110 bp, synthetic construct
  source 1..110: mol_type = other DNA
aatggatgtatgactcagccagccactacacagcaacttgaatggtaagagcttatatttacttagtgctgtgggccgggctcagcattttaggtgttttatctcattta

SEQ ID NO: 45469 - DNA, 110 bp, synthetic construct
  source 1..110: mol_type = other DNA
cggggaagagaggaagtaggaagagaagagtcccggtgtcgaaatcccagctacagagcggattgtaaagataacttcttattgtcaagaaacctgaagttcagggtgaa

SEQ ID NO: 45470 - DNA, 110 bp, synthetic construct
  source 1..110: mol_type = other DNA
caactttgcctcgatgaaatccgaagggaaattgagggaaaaaatatgctctcattcacccaaaccagagacggagaagagctgtgccgaaactctgggcgagcacatca

SEQ ID NO: 45471 - DNA, 110 bp, synthetic construct
  source 1..110: mol_type = other DNA
gcgtgaggtcgtgggctcacttctgacgaccaagaggacaaaatgcgcagagaagataaagaatggaagaagaaagctttgtcccccaggttgtcaggggcagggctgga

SEQ ID NO: 45472 - DNA, 110 bp, synthetic construct
  source 1..110: mol_type = other DNA
ataaagaatggaagaagaaagctttgtcccccaggttgtcaggggcagggctggaaacagtgttcgggtaatcttacgagatccctaaaatccacctctccccatcctgc

SEQ ID NO: 45473 - DNA, 110 bp, synthetic construct
  source 1..110: mol_type = other DNA
ctgttggtcccttagattttgccacagtttgccaagaatgcactgactttcattttccccgaattgaagagcagctggaggttgtccagcaggtggtcctttatgccaga

SEQ ID NO: 45474 - DNA, 110 bp, synthetic construct
  source 1..110: mol_type = other DNA
tccccgaattgaagagcagctggaggttgtccagcaggtggtcctttatgccagaactcagcgcaggagcaagttgaaagaatcacacggtcagtgagactcagattttt

SEQ ID NO: 45475 - DNA, 110 bp, synthetic construct
  source 1..110: mol_type = other DNA
ctggtaccagcccccgcccccacccatacctgctgccttctccccatcacacacaccgctgggagggccagtgctgagactttggttaaccttgccaacttccacattta

SEQ ID NO: 45476 - DNA, 110 bp, synthetic construct
  source 1..110: mol_type = other DNA
gcagagcagcacccacccagagacatttgctcccgagggctgctgatgttccaggagatcctccatctcctgcttctcctccgcccacgttgtcacgacagcttcctctt

SEQ ID NO: 45477 - DNA, 110 bp, synthetic construct
  source 1..110: mol_type = other DNA
agatcctccatctcctgcttctcctccgcccacgttgtcacgacagcttcctcttggtcacagtctagaaggttccccctccaatactctccagaattcctactctcagc

SEQ ID NO: 45478 - DNA, 110 bp, synthetic construct
  source 1..110: mol_type = other DNA
cggaagtgtggggacatggtacctggaagcctaggtgccagagaaacatttgttgaatggggtgtctcgagcagggtgcctggcctgtgaccagcgctcgctcattgaat

SEQ ID NO: 45479 - DNA, 110 bp, synthetic construct
  source 1..110: mol_type = other DNA
agcaacttttgtatcgaactgaggtaccctggcagctcactggagttgtgctagaaagtctgtttcttcctttacagcctaggtccaaaggctgaaatcccagaagcctt

SEQ ID NO: 45480 - DNA, 110 bp, synthetic construct
  source 1..110: mol_type = other DNA
tctgtgcttaggatataggaacccctaagggatggagttttgtctttcaaccccgggaagttaatccttcagcttctgggattgcccacttagccgtctctgctccttcc

SEQ ID NO: 45481 - DNA, 110 bp, synthetic construct
  source 1..110: mol_type = other DNA
actcacccgcctcccccacctggggtctccctatttgctcaggaatctgtctgtcctgctatcttagcctctgtggggccacagatgacttttcttctctcatttcttca

SEQ ID NO: 45482 - DNA, 110 bp, synthetic construct
  source 1..110: mol_type = other DNA
ctgctatcttagcctctgtggggccacagatgacttttcttctctcatttcttcaacttctttctccctctctaaagacgtctcataaagattaaaatgtgttccaacaa

SEQ ID NO: 45483 - DNA, 110 bp, synthetic construct; identical to SEQ ID NO: 45481
  source 1..110: mol_type = other DNA

SEQ ID NO: 45484 - DNA, 110 bp, synthetic construct; identical to SEQ ID NO: 45482
  source 1..110: mol_type = other DNA

SEQ ID NO: 45485 - DNA, 110 bp, synthetic construct
  source 1..110: mol_type = other DNA
aatagaaccctccccaaagcaaggagtgatgcctcaggagaaaacttggaccagccaggccatgtggctacgcacccgaggtggctccccacccccagggatgttaaagc

SEQ ID NO: 45486 - DNA, 110 bp, synthetic construct
  source 1..110: mol_type = other DNA
caggccatgtggctacgcacccgaggtggctccccacccccagggatgttaaagctctcagatgacactgatgcctgcaggtgatgagacgctgcagatggaggtgaact

SEQ ID NO: 45487 - DNA, 110 bp, synthetic construct
  source 1..110: mol_type = other DNA
ttccaaatgtaactatttgcaatgactaatggtaacaagtcatcaacatctcacacatatggatggccagtaggcacatgaaaagatgctcaacattgctaattattaga

SEQ ID NO: 45488 - DNA, 110 bp, synthetic construct
  source 1..110: mol_type = other DNA
taccttccagggtaactgtagaagcttggatgagattaaatgggaaacaaacaaaaagacaggatttttgtggcacaacaggctcggcaacatctctgcggggcccgaga

SEQ ID NO: 45489 - DNA, 110 bp, synthetic construct
  source 1..110: mol_type = other DNA
aacaaacaaaaagacaggatttttgtggcacaacaggctcggcaacatctctgcggggcccgagaagcaagttagatccccagccggcacagtgggttaaggatctggcg

SEQ ID NO: 45490 - DNA, 110 bp, synthetic construct
  source 1..110: mol_type = other DNA
ccagctgcacaagtactgtctggaaattgtgtgaatctcagaggttttcagctcagagaaggtagtgggctcgtccctgaagttctctgaagatagagaatctggagacc

SEQ ID NO: 45491 - DNA, 110 bp, synthetic construct
  source 1..110: mol_type = other DNA
gagaaggtagtgggctcgtccctgaagttctctgaagatagagaatctggagacccctgggatcctggagattttcaagattagggagaattctacctgtcctgtgagag

SEQ ID NO: 45492 - DNA, 110 bp, synthetic construct
  source 1..110: mol_type = other DNA
cttccacatttttatcaggactttgggtgaaaatgtagaaggcttgcttatcacacttgtggaagattggaagctagaaagggtagcgaacttcgagtatgaattaatca

SEQ ID NO: 45493 - DNA, 110 bp, synthetic construct
  source 1..110: mol_type = other DNA
gttagccagcgccctgccccagtcattcaatgggcctcgtggccagaggacctgatttttgcattacatttaatttccgtgggtaagcctatgctctaaactgtttcatg

SEQ ID NO: 45494 - DNA, 110 bp, synthetic construct
  source 1..110: mol_type = other DNA
tttttgcattacatttaatttccgtgggtaagcctatgctctaaactgtttcatgtcagatgtatagagcactgtgaaataaattaattgctgtgtatacattgtacaca

SEQ ID NO: 45495 - DNA, 110 bp, synthetic construct
  source 1..110: mol_type = other DNA
gggcagccgccttccaggcaggactctcacatcagagttcatctttgtcaaagacctgcgcaccacacagctggcctgcagatgagaagtctccgagagctgcctacaaa

SEQ ID NO: 45496 - DNA, 110 bp, synthetic construct
  source 1..110: mol_type = other DNA
gttttttacaaggcctcccctgattctctcacacactgtcaaataggatggcccacctccttccaccaacaggatgcaagttctgttcgtttatttgttctaacactgcc

SEQ ID NO: 45497 - DNA, 110 bp, synthetic construct
  source 1..110: mol_type = other DNA
ttggtatcatccactcctttgaatttccaggggccattgtttcccccacaatcgtgatgatcaaacctggctgtggtctgtggactgggagggaacactcagagaacccg

SEQ ID NO: 45498 - DNA, 110 bp, synthetic construct
  source 1..110: mol_type = other DNA
tagaggaaggtgaggacggggcagggagagaagcaggacgcattctcctctgcagaccttggaggcctccggggacccagcgggagaggctgggaagatgtgtcctcatg

SEQ ID NO: 45499 - DNA, 110 bp, synthetic construct
  source 1..110: mol_type = other DNA
aatttggctgaatccctcctcttaaaccaaagtcatgataatgctctcaatgaagagctgttggatcaaatggattctagcgccttgttctagcatgctaagttttaatt

SEQ ID NO: 45500 - DNA, 110 bp, synthetic construct
  source 1..110: mol_type = other DNA
agctgttggatcaaatggattctagcgccttgttctagcatgctaagttttaatttaagtttttctacatttaaaaaatagttgttgagagcgtctcaacaggtcctcct

SEQ ID NO: 45501 - DNA, 110 bp, synthetic construct
  source 1..110: mol_type = other DNA
attattgattgacaaggtagctacgccactgggaacaaggaaagctggacaacgtataattaaagatccatttgaaggcatctgaaagattatggaggcagtaaaacgct

SEQ ID NO: 45502 - DNA, 110 bp, synthetic construct
  source 1..110: mol_type = other DNA
ggcaacctcatttctgggaactcgacagccaacactctctaggaatgcaaaggagctttgcccaggaaagagggacacacactcggttctgcagaaccgtctctgcagct

SEQ ID NO: 45503 - DNA, 110 bp, synthetic construct
  source 1..110: mol_type = other DNA
ctttgcccaggaaagagggacacacactcggttctgcagaaccgtctctgcagcttacacaccacaagtgtctggtgcaaaataaataaacaagccgttttgctttggtc

SEQ ID NO: 45504 - DNA, 110 bp, synthetic construct
  source 1..110: mol_type = other DNA
tctcggcccccaccagggacctgaggctacgtctgtgcctgcgccactgtgagctcctaaggaccaactctagcagttctaagtagggctcccggcgcacggtggggact

SEQ ID NO: 45505 - DNA, 110 bp, synthetic construct
  source 1..110: mol_type = other DNA
cggggaggacggcgagagggggtcccgccacagtggtctccctgcctcaggctgggacccatgggagtcgtggtgggaagcataggactgggagtcaggcctggattcac

SEQ ID NO: 45506 - DNA, 110 bp, synthetic construct
  source 1..110: mol_type = other DNA
gacccatgggagtcgtggtgggaagcataggactgggagtcaggcctggattcacactctgtccctgcttctccccttgaccaggaataagcctgtttccccatctacac

SEQ ID NO: 45507 - DNA, 110 bp, synthetic construct
  source 1..110: mol_type = other DNA
ccccaacccagagcctcccaaagcttccagggctagccctatattagcacttaggagacagtattgtaatcacttctctctctccctcaccaataattgagggtaataat

SEQ ID NO: 45508 - DNA, 110 bp, synthetic construct
  source 1..110: mol_type = other DNA
agacagtattgtaatcacttctctctctccctcaccaataattgagggtaataattgatacctggcatacagtaggtgcttaataaacattggctgggtggacagattcg

SEQ ID NO: 45509 - DNA, 110 bp, synthetic construct
  source 1..110: mol_type = other DNA
tgtcgccaaggctccctctctccaaagatggccttggatctttaacatgcctgccacctctctgctaaaaaacccatgctggcatgaagtcaaaaagcagatcttcagaa

SEQ ID NO: 45510 - DNA, 110 bp, synthetic construct
  source 1..110: mol_type = other DNA
actaaacactcgcttggatttgcacactgcagtgcttcagacaccagaagccacaggactcgatgtgtccccagaaagagtcacggggccaggggctccgtttcctccac

SEQ ID NO: 45511 - DNA, 110 bp, synthetic construct
  source 1..110: mol_type = other DNA
ggactcgatgtgtccccagaaagagtcacggggccaggggctccgtttcctccaccccaattgggtaagtgcctgagtctccctgtctgcacctcggaagctcattagtc

SEQ ID NO: 45512 - DNA, 110 bp, synthetic construct
  source 1..110: mol_type = other DNA
gcaaacacaggagaggcagttcacccagcacctgcctaaccctgatccccaaccgcgtcaggctggcacatccagacccagctcttctcaaaggccttgccagaggcctg

SEQ ID NO: 45513 - DNA, 110 bp, synthetic construct
  source 1..110: mol_type = other DNA
gtcacacagtgaggcacataattacatttcacactagcaccaccaggcttccagggctatgttccttcctctgcaccagctgcaaactgaaaatgccagtgaaggctctg

SEQ ID NO: 45514 - DNA, 110 bp, synthetic construct
  source 1..110: mol_type = other DNA
ctcctctagcctggcaggaaaagcgagcatcctgcctaacccatttccctgtgcaacccatctgcagcagagggggctgagatgggccggaggtgggctgtcttccaaaa

SEQ ID NO: 45515 - DNA, 110 bp, synthetic construct
  source 1..110: mol_type = other DNA
acccatctgcagcagagggggctgagatgggccggaggtgggctgtcttccaaaagtctgtagcgtctagcccccaatattctatcccccctcttctgggcccatggagg

SEQ ID NO: 45516 - DNA, 110 bp, synthetic construct
  source 1..110: mol_type = other DNA
tcaagtttacaatacagtgctatggttaactcccatccccaggctggacatcacagtcccatgacatttcttgagaatgtcttggtccatactgagcctactctgtctct

SEQ ID NO: 45517 - DNA, 110 bp, synthetic construct
  source 1..110: mol_type = other DNA
gtcccatgacatttcttgagaatgtcttggtccatactgagcctactctgtctctctcagcagtgagcactgggccaagaacacagaggcagacagactccatgccctga

SEQ ID NO: 45518 - DNA, 110 bp, synthetic construct
  source 1..110: mol_type = other DNA
ggcggggccccaaactggtcttcaggaccctgccagtgccctttaagcaatggctttgggggctggcctcttgctctctctgtgcactgtgagtccggccacccctgacc

SEQ ID NO: 45519 - DNA, 110 bp, synthetic construct
  source 1..110: mol_type = other DNA
ttgggggctggcctcttgctctctctgtgcactgtgagtccggccacccctgaccttctgcacctctgttccacctccaggccaatctccccaacgccagcctccttctg

SEQ ID NO: 45520 - DNA, 110 bp, synthetic construct
  source 1..110: mol_type = other DNA
caaggcactgattaagtgcacataacacggtcccctgggacctttgcctcatcgggatcacaccatttgtgctcctccttttaataacttgtaatgcaccccctgggtca

SEQ ID NO: 45521 - DNA, 110 bp, synthetic construct
  source 1..110: mol_type = other DNA
agaatgtctcttctcaggcttcaggagactcaaactttaaccaggccaagaaagttctgcagtccttaccaacagtaagaatgtctgatgaggcagcacagattcagtag

SEQ ID NO: 45522 - DNA, 110 bp, synthetic construct
  source 1..110: mol_type = other DNA
cagattcgttaaccactgcgccacaacaggaactcctgctttgggggttttattggccgcggccacagcatgcagaacttcctggaccaggaattgaacttgtggcatag

SEQ ID NO: 45523 - DNA, 110 bp, synthetic construct; identical to SEQ ID NO: 45522
  source 1..110: mol_type = other DNA

SEQ ID NO: 45524 - DNA, 110 bp, synthetic construct
  source 1..110: mol_type = other DNA
caaataccagccagtttctgatgagcctactcccctgcaagcttcagctgttggccagatgacccttctgagcagtgactcccagacaactccatttagaactgccacct

SEQ ID NO: 45525 - DNA, 110 bp, synthetic construct
  source 1..110: mol_type = other DNA
tctagtccacgtgctcagctagtagtcaccatcccccacctgggacgggtgtgggggtaggtgtcttagttcctgcagaacagctcaaggatgtgtcagattgttgtgta

SEQ ID NO: 45526 - DNA, 110 bp, synthetic construct
  source 1..110: mol_type = other DNA
ggtaggtgtcttagttcctgcagaacagctcaaggatgtgtcagattgttgtgtacatcactcgaggatgcactaggactgatttatcactgaactcttattctcttctt

SEQ ID NO: 45527 - DNA, 110 bp, synthetic construct
  source 1..110: mol_type = other DNA
cagggggaaagcaaggcagaccccaactttaccaggactcgaatctgtggtctagtcaggatgtctcagcctagaaaaccctgtcgaggtggcagggaacaggggacact

SEQ ID NO: 45528 - DNA, 110 bp, synthetic construct
  source 1..110: mol_type = other DNA
tcaggatgtctcagcctagaaaaccctgtcgaggtggcagggaacaggggacactgccgtgagggtgaggccttgagaatcactcccggtgccagggctcacacgcacct

SEQ ID NO: 45529 - DNA, 110 bp, synthetic construct
  source 1..110: mol_type = other DNA
tgtgaatctaggtcttttcttcttgttcgctgagcatgtggaaagcaagctctaggtagcctgcttctgtgtaatcctttggggtgggcttttcagagggtgcagtgggt

SEQ ID NO: 45530 - DNA, 110 bp, synthetic construct
  source 1..110: mol_type = other DNA
tgaccggtgctgagatcagaagctgggtggagtgacccataacctgagcccttcgccctgcaccatcctgccttgtgctcatcccaaaagacaggtggaccgaatgcctt

SEQ ID NO: 45531 - DNA, 110 bp, synthetic construct
  source 1..110: mol_type = other DNA
aaggacacagcatttctggggtgttcttgcaaaaacgggcttccctcatgagaaaacgtaagacaaacccaaagtgagggacattgaactaaattactgatcactaactc

SEQ ID NO: 45532 - DNA, 110 bp, synthetic construct
  source 1..110: mol_type = other DNA
acgtaagacaaacccaaagtgagggacattgaactaaattactgatcactaactcttgaaaagtgtcctgctcaggacaggggactcggtgtagcttgaacactgaggtt

SEQ ID NO: 45533 - DNA, 110 bp, synthetic construct
  source 1..110: mol_type = other DNA
acctggcctctgcttcacaagtctatgtgaagccactgttgtccggaggcctggccttctcctgactccaattactcctctgggtgttgctggtcaaaggtctccctcac

SEQ ID NO: 45534 - DNA, 110 bp, synthetic construct
  source 1..110: mol_type = other DNA
cagacgctgccgcacagctcagaactctgaaactcttgattctaccctgctgtgtgcctgggatttgacctgcctctcatgtaaatcttcacaagaaccctgtagggatg

SEQ ID NO: 45535 - DNA, 110 bp, synthetic construct
  source 1..110: mol_type = other DNA
ccacctgcacctccagttagagaacaggcccgtcatcctgttctccgcaaggacacaggctggtctcagctgcagaatggtcggagagcatggtgttctttaaaacttcc

SEQ ID NO: 45536 - DNA, 110 bp, synthetic construct
  source 1..110: mol_type = other DNA
caggctggtctcagctgcagaatggtcggagagcatggtgttctttaaaacttcctgccatgcccctcctttccttgcacctttgctgtggtcttcaggcccacggggag

SEQ ID NO: 45537 - DNA, 110 bp, synthetic construct
  source 1..110: mol_type = other DNA
ccttgtcttttgagtccattaccacctcaccttcccccctttccacgtacagtctttttttttctggcagagttcgctttgacgtttgactacactggggcagcccaaca

SEQ ID NO: 45538 - DNA, 110 bp, synthetic construct
  source 1..110: mol_type = other DNA
gtaataaagaagacagtgagaaaagccattgagtttagtggtgataaatgtatgcatgggaagggaggacacttccataaatgtcaaattaaaagaattaggtagttgga

SEQ ID NO: 45539 - DNA, 110 bp, synthetic construct
  source 1..110: mol_type = other DNA
atccttccccttccttcccccagccccaagctggagacttctaacagtctttggttgactgttcatattaagatgaggtagttggatgctgatgacaaatctttagaact

SEQ ID NO: 45540 - DNA, 110 bp, synthetic construct
  source 1..110: mol_type = other DNA
gatttaatagaaaaggagtttatcaaatagataacgagtagctcatggaattctggtaaggctggagaattaggcttgaggcttagctttttataatgttctacaccatg

SEQ ID NO: 45541 - DNA, 110 bp, synthetic construct
  source 1..110: mol_type = other DNA
tgaccttgtgtggtgaaagggtctaagaaagtcttagcagccaaatcttcaaagttgtgtgaaagcttgctaggcagatggggagggcatgagatgtcccaacgtgagag

SEQ ID NO: 45542 - DNA, 110 bp, synthetic construct
  source 1..110: mol_type = other DNA
ctaatctaaaggttgttgtaaacagtgagggagttagtacaagtaacatgtagaactgtgtctagcacaaggtaagtagtcagtaaatggagctgttaccatgacttcct

SEQ ID NO: 45543 - DNA, 110 bp, synthetic construct
  source 1..110: mol_type = other DNA
ctgtgtctagcacaaggtaagtagtcagtaaatggagctgttaccatgacttccttttgccttctccatggagtcctgtgtgatcagaaatatcacagcatgattccgga

SEQ ID NO: 45544 - DNA, 110 bp, synthetic construct
  source 1..110: mol_type = other DNA
aggccaccacagagatgtacctggcatgtttaaatcctggatttctttgcttatatgtaatagattctcattttcaaagctcaagacgctctagtaggaccgggaaagca

SEQ ID NO: 45545 - DNA, 110 bp, synthetic construct
  source 1..110: mol_type = other DNA
tgtgtggttccctttacgtgagaaagctgcagtggtctgatttgtagagataagaagcaaagggtcgtttccatggctgtggggaaagggaatgggaattgtttaataca

SEQ ID NO: 45546 - DNA, 110 bp, synthetic construct
  source 1..110: mol_type = other DNA
tgagaacccagatgctctcacatccctgggtttgtttagattctttagcgcatgtgcacactagtgtacgatttatagccagctttattttgagtcagttccattcattc

SEQ ID NO: 45547 - DNA, 110 bp, synthetic construct
  source 1..110: mol_type = other DNA
ctcgtgcacgggaaatgctccataagggacagtatgtgatgttggtagtggtcatgataaaaatcctagaatatttataagagccttcaatgccactgttgatagatttc

SEQ ID NO: 45548 - DNA, 110 bp, synthetic construct
  source 1..110: mol_type = other DNA
ggactgaagaaaccatgtgacctcctcaccttcccctgtgcctccatcaagcacgttctcgatgcaagcagctgaattgcgatgcacagagacttggaaaccccttgaaa

SEQ ID NO: 45549 - DNA, 110 bp, synthetic construct
  source 1..110: mol_type = other DNA
ggatgcatcttaaagtcaacgtgtcatgggttagttgggaggactttgctttctgactggcatggaatgatggtgcattttaaaatcagtagcttcttagatttggtgaa

SEQ ID NO: 45550 - DNA, 110 bp, synthetic construct
  source 1..110: mol_type = other DNA
actggcatggaatgatggtgcattttaaaatcagtagcttcttagatttggtgaaataaggaagtgtcactgagcaccgttgactacgatgacctgttgtcatttcctgg

SEQ ID NO: 45551 - DNA, 110 bp, synthetic construct
  source 1..110: mol_type = other DNA
caggatctgtttctgcgtgccagctgccctgcagggcgattaaggtgggagggttgtcactgagaatgagggacacatttctggagaattttgccttcctccaaaaggcc

SEQ ID NO: 45552 - DNA, 110 bp, synthetic construct
  source 1..110: mol_type = other DNA
gtcactgagaatgagggacacatttctggagaattttgccttcctccaaaaggccagaattaaaaatctcatcactcctctaccccttcacatcatcctcagcatgactc

SEQ ID NO: 45553 - DNA, 110 bp, synthetic construct
  source 1..110: mol_type = other DNA
gaagatctttaggatgggaataatacctgtgggaaaggacatttcagtctttttatttttggtcaaggcatatgggaatttttgggccagggattggacctgcaccatag

SEQ ID NO: 45554 - DNA, 110 bp, synthetic construct
  source 1..110: mol_type = other DNA
tttttggtcaaggcatatgggaatttttgggccagggattggacctgcaccatagcagtaacctgagctgttgcagtgacaatgccaaatctttaacccactgaaccaca

SEQ ID NO: 45555 - DNA, 110 bp, synthetic construct; identical to SEQ ID NO: 45553
  source 1..110: mol_type = other DNA

SEQ ID NO: 45556 - DNA, 110 bp, synthetic construct
  source 1..110: mol_type = other DNA
cctgtgggaaaggacatttcagtctttttatttttggtcaaggcatatgggaatttttgggccagggattggacctgcaccatagcagtaacctgagctgttgcagtgac

SEQ ID NO: 45557 - DNA, 110 bp, synthetic construct
  source 1..110: mol_type = other DNA
gataaggccacaggcggcagacagcttatcaagatgcacctctttgctctgcaccccggctgtcacctccgtgtggctttgtcatcacagacggcaaaacaaaacagcta

SEQ ID NO: 45558 - DNA, 110 bp, synthetic construct
  source 1..110: mol_type = other DNA
gtgacagaggtttaaagcaaccttaggccttgccgtggggaacacctgtgccattgcaggtctgggagcccccagtcactggtgtggccctggtggggctgcctccaccc

SEQ ID NO: 45559 - DNA, 110 bp, synthetic construct
  source 1..110: mol_type = other DNA
tacacttactcacgcaggaggaagaaatccagtcccgcctgtcctgggatcagcggccccaaccagcctctgaggaagaatggattcctcgcatgcagatgataaggcat

SEQ ID NO: 45560 - DNA, 110 bp, synthetic construct
  source 1..110: mol_type = other DNA
ttaactgaagttagcacgactgatgtttcagagtaggtgatgagcgtgtgagtgtgttggaaacagccgtgtcgctaggctgcgtttgcaggtgttcagatgtgcccctt

SEQ ID NO: 45561 - DNA, 110 bp, synthetic construct
  source 1..110: mol_type = other DNA
gttggaaacagccgtgtcgctaggctgcgtttgcaggtgttcagatgtgccccttacacttgttggctgtgcaccggggcggcaatgttttatgtagaatgcgtgaaagg

SEQ ID NO: 45562 - DNA, 110 bp, synthetic construct
  source 1..110: mol_type = other DNA
gctaggccacctgcacaggagggccccgggctgcccagggccctgcggctacgcgtggtctcagagctcaggtttctttacccgaggaggtgtccacgagaaagccagcg

SEQ ID NO: 45563 - DNA, 110 bp, synthetic construct
  source 1..110: mol_type = other DNA
agcctttctttctcatcattgcaaaacaaaagatgaaagaagagggcctgcctttgaagcccattagccctgcccctgaatgtccgagtgcagctcagtagcccagatac

SEQ ID NO: 45564 - DNA, 110 bp, synthetic construct
  source 1..110: mol_type = other DNA
cctgccctgcctgctagattatatcctaacatcgtcttagaaaggcagacactcggcggccaaggagagcaacaactcaggataactctttgtgtctgtgacacaaataa

SEQ ID NO: 45565 - DNA, 110 bp, synthetic construct
  source 1..110: mol_type = other DNA
ctctgcaggctgagacattggcctctgtcccccaagctgcactactggtggagatgctggagggagtaactccaagggtatgtttctggagctggtggactttgtgtgac

SEQ ID NO: 45566 - DNA, 110 bp, synthetic construct
  source 1..110: mol_type = other DNA
gtcttctgaaccgaccttcattcttttaaaacacaacccaagaaccacctgtagaacctctaataaaacatggccagaccccggggatgggttgggggagcttatttcca

SEQ ID NO: 45567 - DNA, 110 bp, synthetic construct
  source 1..110: mol_type = other DNA
acctctaataaaacatggccagaccccggggatgggttgggggagcttatttccacccaatgttaagcaagattctggtgtgacaaaggagtatggacagttcctagaaa

SEQ ID NO: 45568 - DNA, 110 bp, synthetic construct
  source 1..110: mol_type = other DNA
ggccacccggtctggactcattggggaggagctagctgatggacaacaggacaacgggtggctggacatgggactactgagccaagtcccttatgatttcaagatctttt

SEQ ID NO: 45569 - DNA, 110 bp, synthetic construct
  source 1..110: mol_type = other DNA
ggaagctatccaggcaaaggttcttcctcccttcatcaggcacccttgaacctccatgtgatgagcttactccccgacccaggagaaaagcactgccttcccacttctaa

SEQ ID NO: 45570 - DNA, 110 bp, synthetic construct
  source 1..110: mol_type = other DNA
cccagatggagaattctttgctgctggagcagatccagtggacaaggcccacctgcctccatttctgacctggctctgggaagagcataatgaatctcccgccccagtgg

SEQ ID NO: 45571 - DNA, 110 bp, synthetic construct
  source 1..110: mol_type = other DNA
tgccagaaggagggcaaacttgtccccagaagggaccgaagggggctggcatcgccaaggtctccagcacttcctcgaggacatgctctgccagctcccgcagctctagg

SEQ ID NO: 45572 - DNA, 110 bp, synthetic construct
  source 1..110: mol_type = other DNA
caaggtctccagcacttcctcgaggacatgctctgccagctcccgcagctctagggtcccctaaatatccgcatttacgcacctcctctgtgcagataaaatcctcatta

SEQ ID NO: 45573 - DNA, 110 bp, synthetic construct
  source 1..110: mol_type = other DNA
aggactggccaggcctgtgctttgcgcccctccgctcggcccctcttaccctctgctgccatggtgttgctcctgtgttaccgagacctgaacgccggtgtcttcagtgg

SEQ ID NO: 45574 - DNA, 110 bp, synthetic construct
  source 1..110: mol_type = other DNA
ctgccatggtgttgctcctgtgttaccgagacctgaacgccggtgtcttcagtggagacgcgttacagcttgtctctgtctgcctttctttaaagccagctgaacatacg

SEQ ID NO: 45575 - DNA, 110 bp, synthetic construct; identical to SEQ ID NO: 45573
  source 1..110: mol_type = other DNA

SEQ ID NO: 45576 - DNA, 110 bp, synthetic construct; identical to SEQ ID NO: 45574
  source 1..110: mol_type = other DNA

SEQ ID NO: 45577 - DNA, 110 bp, synthetic construct
  source 1..110: mol_type = other DNA
tccacctcccaggaacattactcacagcacaggccaccaatgactgttttctgggctgaatcccttcctgaggccacattcctagctccgctccctgacggctttgcact

SEQ ID NO: 45578 - DNA, 110 bp, synthetic construct
  source 1..110: mol_type = other DNA
ctgaatcccttcctgaggccacattcctagctccgctccctgacggctttgcacttcagtaggtgccagggagcagagcagctctcgttactggtcacaggcttcacagt

SEQ ID NO: 45579 - DNA, 110 bp, synthetic construct
  source 1..110: mol_type = other DNA
tgcaggcagggagcagggagggaagggcaggtcatgacagaactgaccgtcccttgggtgccattagccaaaaagaacacatcggtcaggactccagagggcaaggccgg

SEQ ID NO: 45580 - DNA, 110 bp, synthetic construct
  source 1..110: mol_type = other DNA
gggtgccattagccaaaaagaacacatcggtcaggactccagagggcaaggccggggtttaataaagaccatctctgtgagtcttctgtgttcagcaacccacacttttc

SEQ ID NO: 45581 - DNA, 110 bp, synthetic construct
  source 1..110: mol_type = other DNA
catagcagtaaggctttttcgtgctataactgtggaagctgccccaagagcctacagaggaagcagcctcacaagatgcggaaagtttgctctcaaggccactctgagac

SEQ ID NO: 45582 - DNA, 110 bp, synthetic construct
  source 1..110: mol_type = other DNA
ctgcggtgcaggagtgtcaggctgcaagggacacaggcacagctctgagttcgaatcaagaaggcagcaaggtatctgtatccctaaccacaagaccactccaggatgga

SEQ ID NO: 45583 - DNA, 110 bp, synthetic construct
  source 1..110: mol_type = other DNA
ctaaagcacaaatgcatttatttcacaaacactgatttataaccgattatttgtagattgctcagttatttgcaaacagtccttgggctgtttcttatggaagggctggg

SEQ ID NO: 45584 - DNA, 110 bp, synthetic construct
  source 1..110: mol_type = other DNA
gattgctcagttatttgcaaacagtccttgggctgtttcttatggaagggctgggactttctccatgaaatccaatatccacgaaagaggtaggctgggagatgctgcaa

SEQ ID NO: 45585 - DNA, 110 bp, synthetic construct
  source 1..110: mol_type = other DNA
atggtacgagattttccagaagcatcttagccttgcagctcctagagcagagcatgcttttgtaagttgtctgtgtgaaggggcccttgagtggcagctagtatatgctg

SEQ ID NO: 45586 - DNA, 110 bp, synthetic construct
  source 1..110: mol_type = other DNA
cgtcgtggtccgggaggacctctgtggtgatcctggctgcatgggtgtagtgctgactgcgccaggtgctctttgagacgtcgtcacactaactcatttcattctcagaa

SEQ ID NO: 45587 - DNA, 110 bp, synthetic construct
  source 1..110: mol_type = other DNA
actgcgccaggtgctctttgagacgtcgtcacactaactcatttcattctcagaacaagcttttgcaggagcagttactactgtcctcatttatacagaggaaaacgcaa

SEQ ID NO: 45588 - DNA, 110 bp, synthetic construct
  source 1..110: mol_type = other DNA
aaaaagcaacatatacaaatactataataccgccgggaagaaatcaggaaattcacgatttataagcacccactgtgtgtgtggtaagtggcctagtcactgctgaaaat

SEQ ID NO: 45589 - DNA, 110 bp, synthetic construct
  source 1..110: mol_type = other DNA
actcagggggtcccaagagaagcctcactagctctaaggcaggtgacagcttgaaaatggggtaactgaagttcagagacagcaagtaagctgcccaagtcacctgtgag

SEQ ID NO: 45590 - DNA, 110 bp, synthetic construct
  source 1..110: mol_type = other DNA
aatggggtaactgaagttcagagacagcaagtaagctgcccaagtcacctgtgagtgatctgaattccaggaggacagtgtcagctaagggcactggtgggctgtcccag

SEQ ID NO: 45591 - DNA, 110 bp, synthetic construct
  source 1..110: mol_type = other DNA
gatcagtaggggacagggtggggaaggaagagctgtctgatcgctgggcagagatatcactcatttgtataccacgaccaactctgccattgctgctatgccctccacgc

SEQ ID NO: 45592 - DNA, 110 bp, synthetic construct
  source 1..110: mol_type = other DNA
gcaagctgcttccttccaccagagaagctactccttgagattcagatgtcatggggaaagaagggctctgagagcagtaggcccctccccacaaaagcctgccaacagta

SEQ ID NO: 45593 - DNA, 110 bp, synthetic construct
  source 1..110: mol_type = other DNA
gggcatcctaaagaacttgggttgaaatgggcaggctttctttcaacggaaatacaaacagtatcaacaccaccttttgtcaagaaaaaatcagtatttttctaggtccc

SEQ ID NO: 45594 - DNA, 110 bp, synthetic construct
  source 1..110: mol_type = other DNA
aaacagtatcaacaccaccttttgtcaagaaaaaatcagtatttttctaggtccctccccctcttaaagcagagctttcttatatgtggagatccacaccctcgccaaca

SEQ ID NO: 45595 - DNA, 110 bp, synthetic construct
  source 1..110: mol_type = other DNA
aaaaatgaacaagaatccctttctctaggacctgagaagatctgataagcacaactctcacatctccactttgggttgcggcatttaggaatccagggagcaggtgacac

SEQ ID NO: 45596 - DNA, 110 bp, synthetic construct
  source 1..110: mol_type = other DNA
tatatgagtgagaagggacgctggggccacgatggctgagccctactttgactctggacaaattatcttccctgtgctttagtttctttatctataatgtgaggattatt

SEQ ID NO: 45597 - DNA, 110 bp, synthetic construct
  source 1..110: mol_type = other DNA
taatggatggggagagagaaagtctacttattatgaaggagaggaggaataaaggcatctcttccctaaagttggcagctccagcaggatttggggaaaaatcaaaaggt

SEQ ID NO: 45598 - DNA, 110 bp, synthetic construct
  source 1..110: mol_type = other DNA
cgggagcccaggcaccagccatgggtatatattcacgtgtataaacctcatcatgcattcctttctgccctgagctttctccgttttcccttccgtgggcatgggcagtt

SEQ ID NO: 45599 - DNA, 110 bp, synthetic construct
  source 1..110: mol_type = other DNA
cattcctttctgccctgagctttctccgttttcccttccgtgggcatgggcagttgagagaggcccgtaattaaacaaatcattgcaagacacactgacattctttctgt

SEQ ID NO: 45600 - DNA, 110 bp, synthetic construct
  source 1..110: mol_type = other DNA
gtgtgcttgcacagttcctgggtccaaaccccatcacgtgtccaccagtcttgttctacctgcaggatcagttcagacttgtcttctccggggaggttttgtgagctcct

SEQ ID NO: 45601 - DNA, 110 bp, synthetic construct
  source 1..110: mol_type = other DNA
ctacctgcaggatcagttcagacttgtcttctccggggaggttttgtgagctcctcagcgtttcctcagctggttgttccttttccttttgggggcaaaaactcgttctt

SEQ ID NO: 45602 - DNA, 110 bp, synthetic construct
  source 1..110: mol_type = other DNA
ttccactgagaaatattaacaatgtagtgtgaacagattattgctgctccttcttaaactccaagtataagaagaattatgattaaacactaagtacaggctttgactta

SEQ ID NO: 45603 - DNA, 110 bp, synthetic construct
  source 1..110: mol_type = other DNA
gctccttcttaaactccaagtataagaagaattatgattaaacactaagtacaggctttgacttaaccacagaaataaccatagatttcctttcacaagatcattcaaat

SEQ ID NO: 45604 - DNA, 110 bp, synthetic construct
  source 1..110: mol_type = other DNA
gatagtttgtagttttctttgcttacttgagctccagttttctggccagaagcttttgggaaatgacaagttttattctgctgtttgacaataagttggagctgtgtaac

SEQ ID NO: 45605 - DNA, 110 bp, synthetic construct
  source 1..110: mol_type = other DNA
ttgggaaatgacaagttttattctgctgtttgacaataagttggagctgtgtaacaaaagtaaataatttcacagcatgaaaggaagacgagaaagcttgtgttgccaag

SEQ ID NO: 45606 - DNA, 110 bp, synthetic construct
  source 1..110: mol_type = other DNA
cacagcaaatcgggatctgagctgtgtcttcaacctaaatgacagctgatggcaacaatagatctccagcccactgagcgaggccaaggattgaactctcatcctcatgg

SEQ ID NO: 45607 - DNA, 110 bp, synthetic construct; identical to SEQ ID NO: 45606
  source 1..110: mol_type = other DNA

SEQ ID NO: 45608 - DNA, 110 bp, synthetic construct
  source 1..110: mol_type = other DNA
aggtgtttcacttagatcctcatccctggttgatccttctttttggccttggaactgcttgtgtaagttgcatcaatgtagcatgtttttgtagagactgactctaattt

SEQ ID NO: 45609 - DNA, 110 bp, synthetic construct
  source 1..110: mol_type = other DNA
aagtgtagagactacagttccagattaacgtggcattctggttgcttaagggtactcggtgtgcgcaagaagctgagacctattttccccactcatctgcccgcaaaata

SEQ ID NO: 45610 - DNA, 110 bp, synthetic construct
  source 1..110: mol_type = other DNA
caatggtaaacaatcccttctttgcctctagggcatcttccacattctctgtgtagggacatcttttcctacagttgtgtcagagctgccgacagcataaatgtctcccc

SEQ ID NO: 45611 - DNA, 110 bp, synthetic construct
  source 1..110: mol_type = other DNA
cttctggataacttgctgcagcttctatatcagcacttgctgcttcacctgtacttttatgttatggacagagtttctttccatcaacctcatgaatcaacctctgctag

SEQ ID NO: 45612 - DNA, 110 bp, synthetic construct
  source 1..110: mol_type = other DNA
tatatcagcacttgctgcttcacctgtacttttatgttatggacagagtttctttccatcaacctcatgaatcaacctctgctagcttcaaacttttcttctgcagcttc

SEQ ID NO: 45613 - DNA, 110 bp, synthetic construct
  source 1..110: mol_type = other DNA
ggaaagctttcagctatgcctggacacacttagaacagtgcactcagattacccagctactaatttgtagaatggactgaagctgaagagtgaagacaaatctggaagcc

SEQ ID NO: 45614 - DNA, 110 bp, synthetic construct
  source 1..110: mol_type = other DNA
gctactaatttgtagaatggactgaagctgaagagtgaagacaaatctggaagccagatcaatcaaaggctacagtagttaataagcaaagagttaaggcctaagcaaaa

SEQ ID NO: 45615 - DNA, 110 bp, synthetic construct; identical to SEQ ID NO: 45613
  source 1..110: mol_type = other DNA

SEQ ID NO: 45616 - DNA, 110 bp, synthetic construct; identical to SEQ ID NO: 45614
  source 1..110: mol_type = other DNA

SEQ ID NO: 45617 - DNA, 110 bp, synthetic construct
  source 1..110: mol_type = other DNA
gctctggagccgcatttacctggcaccagctttggcgtagagtaagccacaaacagcaagcacatggtgatgcaaagagtggtgggagattaggcaaagcaagttacgat

SEQ ID NO: 45618 - DNA, 110 bp, synthetic construct
  source 1..110: mol_type = other DNA
ccagatttgagggtaccagaagcagaaaaaaaaatgcttaaggtaaatctcctcttcacacttaattctcagagctatatgttctgaaatggaagacaaagcaccataaa

SEQ ID NO: 45619 - DNA, 110 bp, synthetic construct
  source 1..110: mol_type = other DNA
gggcttgacacttgccagctgcctctacatggatggattaaatcctgtgccacagcagctgctgaccccacagcaccccctgagcagagctcaagatggatactcagagt

SEQ ID NO: 45620 - DNA, 110 bp, synthetic construct
  source 1..110: mol_type = other DNA
cagctgcctctacatggatggattaaatcctgtgccacagcagctgctgaccccacagcaccccctgagcagagctcaagatggatactcagagtgaggcactctgtgct

SEQ ID NO: 45621 - DNA, 110 bp, synthetic construct
  source 1..110: mol_type = other DNA
caggaaggacaaggcaagggcaaagggctttatgcctttactggggaggaaaatccttctcagaagtccttagcagacttctcctgacaggttactggctaaagcagaat

SEQ ID NO: 45622 - DNA, 110 bp, synthetic construct
  source 1..110: mol_type = other DNA
cttctcagaagtccttagcagacttctcctgacaggttactggctaaagcagaatacatgccctcccctcaaatagtcactggcagagtcatgaaattgccacattatcc

SEQ ID NO: 45623 - DNA, 110 bp, synthetic construct
  source 1..110: mol_type = other DNA
ctgtatctttcagttcttctgcaggaactgaggtccccatccagacggaggatggcaacttcaggctgagcaccacttctggtgcaccactctgttacctcaccgccagc

SEQ ID NO: 45624 - DNA, 110 bp, synthetic construct
  source 1..110: mol_type = other DNA
caacttcaggctgagcaccacttctggtgcaccactctgttacctcaccgccagccgtcagatgaaagtcacaaaccctgcagctctcaccctaaattttgcctataatt

SEQ ID NO: 45625 - DNA, 110 bp, synthetic construct
  source 1..110: mol_type = other DNA
atatataaataatatgctaaataataaaaatactacatagcaatccagttgaaattcaagtaaatgctacgatagttacttaagcaccactaggtagctctgcaatcctg

SEQ ID NO: 45626 - DNA, 110 bp, synthetic construct
  source 1..110: mol_type = other DNA
tcaacctccggcctgggaatttccacacgcctcagatgcagccctaaaaaaaagtttcctttaattctatttaaaaaaacaaacaaacaaaaaaaaaaccacttcatggg

SEQ ID NO: 45627 - DNA, 110 bp, synthetic construct; identical to SEQ ID NO: 45626
  source 1..110: mol_type = other DNA

SEQ ID NO: 45628 - DNA, 110 bp, synthetic construct
  source 1..110: mol_type = other DNA
tgcatgtgcagcaagcagcctgtagggataatgtcttccacttcatagagctgacctgcttaggcaaagcaatggaaacagtgaatacataatgaaaacagtgaatcttc

SEQ ID NO: 45629 - DNA, 110 bp, synthetic construct
  source 1..110: mol_type = other DNA
tgtgaacttaatttcttctctgaggttttctgttccatgggtaacaggggtttttccaatgcctgggatagttcatctggtaatgtacttggaggctactattaaatcaa

SEQ ID NO: 45630 - DNA, 110 bp, synthetic construct
  source 1..110: mol_type = other DNA
actcagatacagtatgaacacatattttttatctatggttaattttgcataacaacatgatatttactttgttgcttgatagctggcaggtctcttctaagagtggcaag

SEQ ID NO: 45631 - DNA, 110 bp, synthetic construct
  source 1..110: mol_type = other DNA
cttcagttattatattcttctgctctgatttctgtttgatgttttattatattttctgtttctttgttgaaattctctctgtcttcatgtgttgttcccttacctcagtg

SEQ ID NO: 45632 - DNA, 110 bp, synthetic construct
  source 1..110: mol_type = other DNA
ctgtttctttgttgaaattctctctgtcttcatgtgttgttcccttacctcagtgagctattttatgaccattactttgaactcttatcaggcaaatcacttatctgcat

SEQ ID NO: 45633 - DNA, 110 bp, synthetic construct
  source 1..110: mol_type = other DNA
ggttgtaattttgttgtttttatgagagaaggtgagtgccagtccttctattccaccatcttaatccccagattaggaaaacccttaaaggccatacagtttcttgtgtg

SEQ ID NO: 45634 - DNA, 110 bp, synthetic construct
  source 1..110: mol_type = other DNA
ccatcttaatccccagattaggaaaacccttaaaggccatacagtttcttgtgtgtgaaccatattcccaaagccaaatgacattaagaaaattttattaaaatactaga

SEQ ID NO: 45635 - DNA, 110 bp, synthetic construct
  source 1..110: mol_type = other DNA
gtataatactcaggacttcattaaaatgctttgtactttgcctgtcacatcacttaaaattctagacagctagagcagcatttaaaaaagccatcttggagttcccattg

SEQ ID NO: 45636 - DNA, 110 bp, synthetic construct
  source 1..110: mol_type = other DNA
cttcattaaaatgctttgtactttgcctgtcacatcacttaaaattctagacagctagagcagcatttaaaaaagccatcttggagttcccattgtggcgcagcggaaat

SEQ ID NO: 45637 - DNA, 110 bp, synthetic construct
  source 1..110: mol_type = other DNA
tgtgccttcacccacaaatgcaaatacagctgaaggaattacacaacaggacacatcagcagttcttctagaacacactactatcagcctcaaaaggatcccccaaagcc

SEQ ID NO: 45638 - DNA, 110 bp, synthetic construct
  source 1..110: mol_type = other DNA
ggtagcagtatactaaggctctgtcaaaaggaaagtgtgtccatttaaaaacttttcaagtagctattacctcttttaagagttgacctgaacttcaggagtcattaaat

SEQ ID NO: 45639 - DNA, 110 bp, synthetic construct
  source 1..110: mol_type = other DNA
tcaagtagctattacctcttttaagagttgacctgaacttcaggagtcattaaatccaattttcttttctttctttctttctttttttttttttagggccgctcccacgg

SEQ ID NO: 45640 - DNA, 110 bp, synthetic construct
  source 1..110: mol_type = other DNA
ggtagcagtggtcattgctggtgtttactcaggcagtgcctcagaagcagcccgggtctctagtagcagctgctgtaccacagctaaccctaacatatgctgagaatcca

SEQ ID NO: 45641 - DNA, 110 bp, synthetic construct
  source 1..110: mol_type = other DNA
aaccaacaaccttgcgaacccagagaacacttctgacagctgcaggactccgaccctgggcttaacaaattatcatgcacaaggattttctgacaggaaaaactaccaca

SEQ ID NO: 45642 - DNA, 110 bp, synthetic construct
  source 1..110: mol_type = other DNA
taaaagagggaaagcaactccgttccaatttcaagttctaggatcctccttagcatatcatttcccgtgcttggatgctgtgacagtttctgttatagcctttcagccac

SEQ ID NO: 45643 - DNA, 110 bp, synthetic construct
  source 1..110: mol_type = other DNA
aatcctacccgtcccttctatcactagatgtgctaagccccttaacagcttagtccatgtgttacagatatgtttgtttcctcggtgtggcttgtgtaagtggacactga

SEQ ID NO: 45644 - DNA, 110 bp, synthetic construct
  source 1..110: mol_type = other DNA
ttcagcctacttataattcacattttaccactctcagtaaaatgcagaaggctcacacaataatcctttactttcccatctgtaataggtgtcatatatattaaactaca

SEQ ID NO: 45645 - DNA, 110 bp, synthetic construct
  source 1..110: mol_type = other DNA
agaaggctcacacaataatcctttactttcccatctgtaataggtgtcatatatattaaactacattcactgaaaaccatcagacaatgtcatgacttttgctttgaata

SEQ ID NO: 45646 - DNA, 110 bp, synthetic construct
  source 1..110: mol_type = other DNA
acaaatatcctcttccttcctcctctacccctcccggttgtatcaggaccatctcctagaagcagagtgtcaatgacttctacttttagttattttggtggttaccatca

SEQ ID NO: 45647 - DNA, 110 bp, synthetic construct
  source 1..110: mol_type = other DNA
tttttttaactggtcctatttttgcaatgaactaaattttatgactttggcaaagcagttgacctacattctgatctatataacgagggtcttggattaaatgatttctc

SEQ ID NO: 45648 - DNA, 110 bp, synthetic construct; identical to SEQ ID NO: 45647
  source 1..110: mol_type = other DNA

SEQ ID NO: 45649 - DNA, 110 bp, synthetic construct
  source 1..110: mol_type = other DNA
taaccctgggttattgtctagagaagctgctgaggaaggacacgagaaaagtctgcagtgagtaattaaatttggaacatggggcttcaatttcctgcagaaacatttcc

SEQ ID NO: 45650 - DNA, 110 bp, synthetic construct
  source 1..110: mol_type = other DNA
agtgctgacttccagtcccatcttctcctttgtgaaggaccccacctttactccaagacagatctgcctgcaatagctcatctcagtccagccctgtttttagtgtttct

SEQ ID NO: 45651 - DNA, 110 bp, synthetic construct
  source 1..110: mol_type = other DNA
aagggttcactggatcgcctgcttcagcaagacaaagccagtctcaccagaacactgcagcacaggatcgcgctccacgtggccgatggcttgaggtaattgattaaggt

SEQ ID NO: 45652 - DNA, 110 bp, synthetic construct
  source 1..110: mol_type = other DNA
tcctatttcaatctagaacaaaattctcaagatcaagatatgcatggacattacgggtagaagaggatcgtgtttttcggataatgggctttgcatttataaccaccctg

SEQ ID NO: 45653 - DNA, 110 bp, synthetic construct
  source 1..110: mol_type = other DNA
ggtgccggttcctgccggagtcagattgctggaagcagtaagcagaagaattgcagggaaattagaaactgcatcactctcagggactgatgacaccctgctttgaaaat

SEQ ID NO: 45654 - DNA, 110 bp, synthetic construct
  source 1..110: mol_type = other DNA
actggaactgcaaattgatttatcttatgaaatacttgatgtattatttatgggtttactcctagtaagttcaagtttaatagctaagccttcaatacactcataaggtg

SEQ ID NO: 45655 - DNA, 110 bp, synthetic construct
  source 1..110: mol_type = other DNA
ttactcctagtaagttcaagtttaatagctaagccttcaatacactcataaggtgatcacataccctgacttataagaatctcatcaatataagcaaaaatagggtataa

SEQ ID NO: 45656 - DNA, 110 bp, synthetic construct
  source 1..110: mol_type = other DNA
attgcgttaatctggaatctatcaaatctatcctccagccaaaaaatctggtcatataactcttgatgaaatctttaaatacctcattctctgtggaatagcttcaaact

SEQ ID NO: 45657 - DNA, 110 bp, synthetic construct
  source 1..110: mol_type = other DNA
gcatgggttgcagatgtgactcagagcaggtgttgctatggctatggtgtaggtctcagctgcagcactgattcaatccctagccctgaaacttccaaatgctgcagatg

SEQ ID NO: 45658 - DNA, 110 bp, synthetic construct
  source 1..110: mol_type = other DNA
tcagctgcagcactgattcaatccctagccctgaaacttccaaatgctgcagatgtggccatgaaaagatttaaaaaaaataagaaggagttggatctgttagagggata

SEQ ID NO: 45659 - DNA, 110 bp, synthetic construct
  source 1..110: mol_type = other DNA
gttctgaattgaattacagttaccacatgctgtaatagtgtcagatagagtttacttgcagacctgtagaaatacaatttcagtggctctacccttgatcttgggacaca

SEQ ID NO: 45660 - DNA, 110 bp, synthetic construct
  source 1..110: mol_type = other DNA
ttgcagacctgtagaaatacaatttcagtggctctacccttgatcttgggacacacagaatagctgttctccagaagaaggtcaactaagtgtagtatttgtcctcttga

SEQ ID NO: 45661 - DNA, 110 bp, synthetic construct
  source 1..110: mol_type = other DNA
agatagagccttctatgatacctcattctgtctgagtatctggaactccctttcgctatcttaataaatctttacttaaacctaactgttgtattttattttccattttc

SEQ ID NO: 45662 - DNA, 110 bp, synthetic construct
  source 1..110: mol_type = other DNA
catctggctcttcctgctgtggcccagtcttcacctgcccctacttgttgactgcccagctgcttggaaaagccccagtgtaacctttaccatcaatgagaacaccatgc

SEQ ID NO: 45663 - DNA, 110 bp, synthetic construct
  source 1..110: mol_type = other DNA
ccagctgcttggaaaagccccagtgtaacctttaccatcaatgagaacaccatgcccttgccaagagggatccttcagaatggttccaacatttctattcttcaggcatt

SEQ ID NO: 45664 - DNA, 110 bp, synthetic construct
  source 1..110: mol_type = other DNA
aaggaagaatacacaacttcttgattccacatttcatccttttctcaagaattccagtgaggccagacctggacctataaacttatctgactgcaggaagagcccttctt

SEQ ID NO: 45665 - DNA, 110 bp, synthetic construct
  source 1..110: mol_type = other DNA
taaaagccatagaaactatcctcgtatcgcccatgtttagcagacttagtagaagacacagccaggtaaagaggcaatttgcttttcctgctgttttttgaggtatggat

SEQ ID NO: 45666 - DNA, 110 bp, synthetic construct
  source 1..110: mol_type = other DNA
agctcctgcggtcgcagtcatttggtagttagctgatttgaaaggacagaagtgatttcaaacacatttgctgaagaaggactgaatgcagggcgattaagattcagcgg

SEQ ID NO: 45667 - DNA, 110 bp, synthetic construct
  source 1..110: mol_type = other DNA
tttcaaacacatttgctgaagaaggactgaatgcagggcgattaagattcagcggaaaatcggacaaagaccctgctctcctagaggaagcttccattctggtggaattc

SEQ ID NO: 45668 - DNA, 110 bp, synthetic construct
  source 1..110: mol_type = other DNA
taaattgtaaagtactatacagatgtaaactcttattactagttaaggacctgaaaactcactattatactttctggtcccgttgtggtcattccttccattttttctct

SEQ ID NO: 45669 - DNA, 110 bp, synthetic construct
  source 1..110: mol_type = other DNA
ctggctggaacatagaggaaccagtatagggtgaggtgggaggttaacctggggcaggatttccaagggccttgaggatcatattggcatatttggggattttattctat

SEQ ID NO: 45670 - DNA, 110 bp, synthetic construct
  source 1..110: mol_type = other DNA
aggatttccaagggccttgaggatcatattggcatatttggggattttattctatagaaagagatctaagaatgtttagtaggcacagcctctgtgttagaagctaatgt

SEQ ID NO: 45671 - DNA, 110 bp, synthetic construct
  source 1..110: mol_type = other DNA
tttcaataagctgcctggaacacccagaaatgcccctaattaaaatcaaacatatattagaaatatttcataatatgtaggttttattttttccctcgtggtcattatct

SEQ ID NO: 45672 - DNA, 110 bp, synthetic construct
  source 1..110: mol_type = other DNA
acatgcatcgtctgtctgtacatggccgtcttgtcaccaggacactaggcacagtggtttcggggtgcactctactgactcttagctaattacatcttcagtgaccctcc

SEQ ID NO: 45673 - DNA, 110 bp, synthetic construct
  source 1..110: mol_type = other DNA
ggaattgtcacctggcagggaagtatagaaacacaaatgtatgtcactttaccaaaatcaagtctgttctcatctcctgatcgcagtcattcattcactgtgcctctatt

SEQ ID NO: 45674 - DNA, 110 bp, synthetic construct
  source 1..110: mol_type = other DNA
aatcaagtctgttctcatctcctgatcgcagtcattcattcactgtgcctctattgcagaagtgctgtgtgaaagccaccaggctacaagcttgagcaagtcagaggtca

SEQ ID NO: 45675 - DNA, 110 bp, synthetic construct; identical to SEQ ID NO: 45673
  source 1..110: mol_type = other DNA

SEQ ID NO: 45676 - DNA, 110 bp, synthetic construct; identical to SEQ ID NO: 45674
  source 1..110: mol_type = other DNA

SEQ ID NO: 45677 - DNA, 110 bp, synthetic construct
  source 1..110: mol_type = other DNA
cttgcagccagatggggtcatatcccctgaagtcacttctagcactaataggtatagctggtgattcctggtcaccccgctgccaaatacacattcttttcttttttttt

SEQ ID NO: 45678 - DNA, 110 bp, synthetic construct
  source 1..110: mol_type = other DNA
caccagtaaagcaagatcctaccattttaatgatagcccaaagaatccaacatatagtagctgatggacaagcagcagcttcagggcctctgcatctagacagcacttgg

SEQ ID NO: 45679 - DNA, 110 bp, synthetic construct
  source 1..110: mol_type = other DNA
agtagctgatggacaagcagcagcttcagggcctctgcatctagacagcacttggtgaaagaactctgataatcacatttaacttttcttggctggcagaaaaagcaaac

SEQ ID NO: 45680 - DNA, 110 bp, synthetic construct
  source 1..110: mol_type = other DNA
ggaacacacagattacaagtcagcagcacagagaatcaagtgggggcccgaaactgatggacatgcagaggagggacctcaacccaccattgctctctcttcttaggggc

SEQ ID NO: 45681 - DNA, 110 bp, synthetic construct
  source 1..110: mol_type = other DNA
gaagtatgtttggatataaaacgtaactcataaagagactatctattatccatatgttgtggtagctattagggaaaagagaaaatagaatgctgagtatgaaaatgtag

SEQ ID NO: 45682 - DNA, 110 bp, synthetic construct
  source 1..110: mol_type = other DNA
agtcagaagttgcaggcacagttggcccatacttgtaagtagcaacaatccatagaggctgaatagccactacctgtttttccagctcactgcaatctccaggagcacta

SEQ ID NO: 45683 - DNA, 110 bp, synthetic construct
  source 1..110: mol_type = other DNA
gtgtgcagttgacttcttccacctgctgggggcttcagcacctgaaaagcagctccaaggacgtggctcagaatattatctacagtctttgaagaactgaaggtccttga

SEQ ID NO: 45684 - DNA, 110 bp, synthetic construct; identical to SEQ ID NO: 45683
  source 1..110: mol_type = other DNA

SEQ ID NO: 45685 - DNA, 110 bp, synthetic construct
  source 1..110: mol_type = other DNA
agccacaacagacactccccagagcctgtgttcttaaccacgatattatactattgcctcttcaaagtatggcttagcttcattttgttatctgattagtgacaaaagtt

SEQ ID NO: 45686 - DNA, 110 bp, synthetic construct
  source 1..110: mol_type = other DNA
aagacggacagggcaggcctcaggatatgaaatggaagacttgctcactcatcctttcatgcgctttcaccccttgaaatgactgggggaaaaaaactgcataacagaat

SEQ ID NO: 45687 - DNA, 110 bp, synthetic construct
  source 1..110: mol_type = other DNA
ttcatgcgctttcaccccttgaaatgactgggggaaaaaaactgcataacagaataaattcattcacaacaaaatgaaagccaaataggattctctctcagaactgaact

SEQ ID NO: 45688 - DNA, 110 bp, synthetic construct
  source 1..110: mol_type = other DNA
agaggacctgctttcaaaactcggatgcacccaagttcttccaaagtttctaacaggcagctgccaaagccaatagaaagactagggccaggtccctctggtgaactgag

SEQ ID NO: 45689 - DNA, 110 bp, synthetic construct
  source 1..110: mol_type = other DNA
ggcagctgccaaagccaatagaaagactagggccaggtccctctggtgaactgaggaagccgtcagattaagttacggagtgctttgcagaaggaagcaccttctatgcc

SEQ ID NO: 45690 - DNA, 110 bp, synthetic construct
  source 1..110: mol_type = other DNA
cttttcccccatgttccggtgcttcgttgactcccttgattaaagagctcacatagcaggatttcatgtgatcggtgtttttcaggagccgaagaacagggattaattga

SEQ ID NO: 45691 - DNA, 110 bp, synthetic construct
  source 1..110: mol_type = other DNA
gttctttttttatagttcccagagctctcctgagatttcttatcactttacccattgtagatttaatgaaatttataagcctctagtaagactcagaaagacatagaata

SEQ ID NO: 45692 - DNA, 110 bp, synthetic construct
  source 1..110: mol_type = other DNA
ttcccagagctctcctgagatttcttatcactttacccattgtagatttaatgaaatttataagcctctagtaagactcagaaagacatagaataaattaccaatataaa

SEQ ID NO: 45693 - DNA, 110 bp, synthetic construct
  source 1..110: mol_type = other DNA
agaacaaagaagtagaagagtaaaaagaagcacaaaagcaggagcccaaggcatttgaggctgttatacacaccttcaagcccgtaggaaatgaggccaacattccaggc

SEQ ID NO: 45694 - DNA, 110 bp, synthetic construct
  source 1..110: mol_type = other DNA
tgtgggttcctttcctctttcacagcttcctcttaggagtgctagtcctgtcctgattgctttctctccctctttttttttcccttttgttttacccagttatgtggaag

SEQ ID NO: 45695 - DNA, 110 bp, synthetic construct
  source 1..110: mol_type = other DNA
cttcctcttaggagtgctagtcctgtcctgattgctttctctccctctttttttttcccttttgttttacccagttatgtggaagtttgcttgctctttttggaggttta

SEQ ID NO: 45696 - DNA, 110 bp, synthetic construct
  source 1..110: mol_type = other DNA
ataaagtcagcccaccacaacagaaggccccacacagccctcttgggggaccccctggagcgtatagcttgggtgatgtgaatggagtgccctactgggatgcataggat

SEQ ID NO: 45697 - DNA, 110 bp, synthetic construct
  source 1..110: mol_type = other DNA
ataagaggagagactgtcgacactgatctgctgaccggctgcttttgcccatccggacactccttctggagtctctggatcgagccgactggaaggcagagtcggaagaa

SEQ ID NO: 45698 - DNA, 110 bp, synthetic construct
  source 1..110: mol_type = other DNA
gacactccttctggagtctctggatcgagccgactggaaggcagagtcggaagaatccgaggcatgcacgtcttcaccgaggctgcacgtcttcgagcagtaaatctgcc

SEQ ID NO: 45699 - DNA, 110 bp, synthetic construct
  source 1..110: mol_type = other DNA
cccctgagttcggatggtcattagcttcccagaactgggacacacagcaagccgatcacatagcatttctgggacaggggattatttaccgaaaatactaagatcacggt

SEQ ID NO: 45700 - DNA, 110 bp, synthetic construct
  source 1..110: mol_type = other DNA
cacccactgcatcacaatgggaactccgatatagagtcttgatggaagagttttggtagaagcgagatggccctggtggagggggcagcatgtgtagatgcaggaaaaca

SEQ ID NO: 45701 - DNA, 110 bp, synthetic construct
  source 1..110: mol_type = other DNA
agaaatgtagcccctgacctgtctactctccagtggaggggaaagtgattggagaagagttaggtggatttccaacacggtggacagaggcggtgaccaggagagtgtaa

SEQ ID NO: 45702 - DNA, 110 bp, synthetic construct
  source 1..110: mol_type = other DNA
gagactagtcaacaagattggcaacatggatgggggttagagctgtgctctcccatatgctctatgtggctacgggctacttctcagacaggacagatacagagcatttc

SEQ ID NO: 45703 - DNA, 110 bp, synthetic construct
  source 1..110: mol_type = other DNA
ggcttagtcagggaggtcgggcaaggcttcctggttgagaataagcctctctgtaaggatttgcactggagctagggacagctggcagagtgtttgttcgaagagggatc

SEQ ID NO: 45704 - DNA, 110 bp, synthetic construct
  source 1..110: mol_type = other DNA
aggatttgcactggagctagggacagctggcagagtgtttgttcgaagagggatcagcaagcccaaaggcactgtgatgagaggaagccagcatttcccagtcttagctc

SEQ ID NO: 45705 - DNA, 110 bp, synthetic construct
  source 1..110: mol_type = other DNA
aggtgcattgctcagagaaggcaatggtgtttacgtagagagcaataaaggtctgagtctgaccaacaggtaagttcagcgtccagagggctttgaggatggggccaagg

SEQ ID NO: 45706 - DNA, 110 bp, synthetic construct
  source 1..110: mol_type = other DNA
agtctgaccaacaggtaagttcagcgtccagagggctttgaggatggggccaaggaatctggccttgggcccagcagagccacattcttggttctttttttttccgtaca

SEQ ID NO: 45707 - DNA, 110 bp, synthetic construct
  source 1..110: mol_type = other DNA
tgtggatggatgaactttccccctaaagagtacattattagacccagaaatatgatcatttttaattgactaaagctggtccctgcagaagagtactcaacatttagtgc

SEQ ID NO: 45708 - DNA, 110 bp, synthetic construct
  source 1..110: mol_type = other DNA
gtaagtcatctttaattgtattttggtgtatttcttcattgtgagggaaaggggcaaggctataacgaacattcagaggaagatgtagaactggtacccactggtgcctg

SEQ ID NO: 45709 - DNA, 110 bp, synthetic construct
  source 1..110: mol_type = other DNA
aaggctataacgaacattcagaggaagatgtagaactggtacccactggtgcctgtgaacatgtgttcggtgtgtggcggaagagagatgggagagtcactgctttaggt

SEQ ID NO: 45710 - DNA, 110 bp, synthetic construct
  source 1..110: mol_type = other DNA
ggggccagggattgaacacagctcctcatggataactggtcagatttgttaccactgaaccataacaggaactccaagaaggttttgttgttgttgtttgtttgtttcct

SEQ ID NO: 45711 - DNA, 110 bp, synthetic construct; identical to SEQ ID NO: 45710
  source 1..110: mol_type = other DNA

SEQ ID NO: 45712 - DNA, 110 bp, synthetic construct
  source 1..110: mol_type = other DNA
taatctctaagatatctctagaaattagctgaccttggaaggagtggtgcatccgcgtgtccacagaccaccaagatgtcaaagcatcataaaatatggaaaaaatttta

SEQ ID NO: 45713 - DNA, 110 bp, synthetic construct
  source 1..110: mol_type = other DNA
aaagaaatacgtgaagcaacatttctatctcagatgaagaaaagtgagcttaccctgggggtggacagggcctcttcctctgccctgttcccaggaggtcttccaacatg

SEQ ID NO: 45714 - DNA, 110 bp, synthetic construct
  source 1..110: mol_type = other DNA
gaagaaaagtgagcttaccctgggggtggacagggcctcttcctctgccctgttcccaggaggtcttccaacatgttctacataagatgtagctggttagtaagtatgga

SEQ ID NO: 45715 - DNA, 110 bp, synthetic construct
  source 1..110: mol_type = other DNA
tggtaaaaatcctccccgggactaacagagcaaaatgacctaagtcgggagtcggtcagcactgcgtctataagtggagcacagtccgtaaggctgccccacatatgaac

SEQ ID NO: 45716 - DNA, 110 bp, synthetic construct
  source 1..110: mol_type = other DNA
tcagcactgcgtctataagtggagcacagtccgtaaggctgccccacatatgaacatgttttacactcattttaccttcatacctttgctaacgctttcccccttcacat

SEQ ID NO: 45717 - DNA, 110 bp, synthetic construct
  source 1..110: mol_type = other DNA
aagagtatgaagaataagaagagaataaagaccagaactgtgctgccaagaaataatagcatctaatggtcagaagagaaagaagagcaaataaagatacagggaggtag

SEQ ID NO: 45718 - DNA, 110 bp, synthetic construct
  source 1..110: mol_type = other DNA
gagcccatttgaggcaacatatcacagctgcatgagcagggatcgatggaggtaaattaatgtaccacattcattgcaactttgcacagcacattaaacatattattgac

SEQ ID NO: 45719 - DNA, 110 bp, synthetic construct
  source 1..110: mol_type = other DNA
cccagattatagtctatttataatgctatttataataatatcattataatcccagagcgacacctgggatagttgaacggttcagcaaaaaatataataagagatgagct

SEQ ID NO: 45720 - DNA, 110 bp, synthetic construct
  source 1..110: mol_type = other DNA
ttcattttagtcaatttcagcctttggctcaacaacagctaaccatacccatttcccagccccaaggcagacagccatggatatcttctttgagaagcttgcatgtagct

SEQ ID NO: 45721 - DNA, 110 bp, synthetic construct
  source 1..110: mol_type = other DNA
tgagattatttcccatattactcagcacaaataccaacaaaatgatccaatgatcaatatgcatattcaaatacaattgaaacacctttcctgatgacactgtcccttca

SEQ ID NO: 45722 - DNA, 110 bp, synthetic construct
  source 1..110: mol_type = other DNA
aatatgcatattcaaatacaattgaaacacctttcctgatgacactgtcccttcactcctgggaaaaatcagacatattcacccaccctaaacatctgctacccaaatcc

SEQ ID NO: 45723 - DNA, 110 bp, synthetic construct
  source 1..110: mol_type = other DNA
taaaccacccatgatactagacaaaggaggaagagttccaatttccttgctccacatagctccacacccagcttctgtttctgcctctgcttcctcctccctcaaagccc

SEQ ID NO: 45724 - DNA, 110 bp, synthetic construct
  source 1..110: mol_type = other DNA
ttttttccataaaagccagaaacatttatgtgaaaggcccttgcttacctttggattagaaattgaaataaaaaaatctttccacaaagcaattccagctatccacacag

SEQ ID NO: 45725 - DNA, 110 bp, synthetic construct
  source 1..110: mol_type = other DNA
ggttttaaatgtgagaatatagttttactcttttaggctctaggcctgagagctaaaccctgaaagggaaaactcaagtggcggaggcaccctggatcattacatctact

SEQ ID NO: 45726 - DNA, 110 bp, synthetic construct
  source 1..110: mol_type = other DNA
aaccctgaaagggaaaactcaagtggcggaggcaccctggatcattacatctactgtgttttcatgctgctatgagagaaagagcaatcatcattcagagataggcatag

SEQ ID NO: 45727 - DNA, 110 bp, synthetic construct
  source 1..110: mol_type = other DNA
ctttacctgccatcttagattggacattattttatctgctctctgttaaatgagttctcaaagacagctcctaaaagaaaaaactcttaagaactgtgtctctggctttt

SEQ ID NO: 45728 - DNA, 110 bp, synthetic construct
  source 1..110: mol_type = other DNA
ttgatcttcgtatttttagccacgtgcaaaatgagaatctattattattattgcttcctcaggtttaatcagctttattgctgggaaaaaagagagctataggacttctc

SEQ ID NO: 45729 - DNA, 110 bp, synthetic construct
  source 1..110: mol_type = other DNA
ccctggaagtggagagagggtagaagtgatgtagctggtagaactggaaggaaataacctggacgcagaaaaagacatccccctaaaagtgttaatcatcttgtgatatt

SEQ ID NO: 45730 - DNA, 110 bp, synthetic construct
  source 1..110: mol_type = other DNA
tgtagggatgggtaaatgatggagacctggggccgggtgcagaagctggggtggggagaaagcctcgctggaagcattactgcagcctgaaagtacttgaatcaatagct

SEQ ID NO: 45731 - DNA, 110 bp, synthetic construct
  source 1..110: mol_type = other DNA
gagaaagcctcgctggaagcattactgcagcctgaaagtacttgaatcaatagctgaaaagcttgattggctgctaatacaagactgaatgcaaattctgctggagtggt

SEQ ID NO: 45732 - DNA, 110 bp, synthetic construct
  source 1..110: mol_type = other DNA
ttccaattgttcctgaaactgagcttcatctctggcttccaaggactcatgtgctcaatctttttttggatgctttgagccagtaaattctcttctttcctgtctttacc

SEQ ID NO: 45733 - DNA, 110 bp, synthetic construct
  source 1..110: mol_type = other DNA
gacagtggggacggcatttcttccgtgcgaatgccattcgattacagatgaaaacaactacagtcacactggaagggtaaggtgggcagttggagggactgtttcagggc

SEQ ID NO: 45734 - DNA, 110 bp, synthetic construct
  source 1..110: mol_type = other DNA
aactacagtcacactggaagggtaaggtgggcagttggagggactgtttcagggcccctgagtctcctataggtgttttatcacatgaaagagatggcaagtgttttact

SEQ ID NO: 45735 - DNA, 110 bp, synthetic construct
  source 1..110: mol_type = other DNA
tggcaacaaaggtggggtttaagaaaattaattttaagccatgagatttgtagagctgacaagaggaaaagtatagctgcctcagatgacacacaggagatacaaagctc

SEQ ID NO: 45736 - DNA, 110 bp, synthetic construct
  source 1..110: mol_type = other DNA
ccagtctatggtattttgttacagcagcccaaaccaactaggacagcatatccggcataaacagtactttaaatattttagtgtttcttttttcagtctttttatggcca

SEQ ID NO: 45737 - DNA, 110 bp, synthetic construct
  source 1..110: mol_type = other DNA
acgtgaatctctagttgcatccatgttattgcaaatggcattattttgtccttttttatggctgaatactattcagcataactacatggagttgtctctcagcattacct

SEQ ID NO: 45738 - DNA, 110 bp, synthetic construct; identical to SEQ ID NO: 45737
  source 1..110: mol_type = other DNA

SEQ ID NO: 45739 - DNA, 110 bp, synthetic construct
  source 1..110: mol_type = other DNA
ctttaaaatacttcaatatatagtgacgcaaatgcgtgaatgtttgtttaatgtatgttctaggtagcaagtggtcctaataggaaatctcatttctagggggcggtcag

SEQ ID NO: 45740 - DNA, 110 bp, synthetic construct; identical to SEQ ID NO: 45739
  source 1..110: mol_type = other DNA

SEQ ID NO: 45741 - DNA, 110 bp, synthetic construct
  source 1..110: mol_type = other DNA
ggccacagccacagtaacacaagatcctagccacttcagtgacctatgtcatagctcatagcaaagtcggatccttaacccattgagagagaggccaaggatcaaaactc

SEQ ID NO: 45742 - DNA, 110 bp, synthetic construct
  source 1..110: mol_type = other DNA
tcatagcaaagtcggatccttaacccattgagagagaggccaaggatcaaaactcatgaatcctagtcaggttcttaccactgagccatggcgggaattttcgagatgca

SEQ ID NO: 45743 - DNA, 110 bp, synthetic construct
  source 1..110: mol_type = other DNA
gtacccctagacatgaagactgaagtaactgctgttacgaaaagttgtatagtaattgtagaacaagaagagttctagctcatcccaataaatcgaggccaactagatcc

SEQ ID NO: 45744 - DNA, 110 bp, synthetic construct
  source 1..110: mol_type = other DNA
ttgtagaacaagaagagttctagctcatcccaataaatcgaggccaactagatccagtgtggaaatcctctgggccctgagtgtttccaacacttggtcatctagattct

SEQ ID NO: 45745 - DNA, 110 bp, synthetic construct
  source 1..110: mol_type = other DNA
cctgtgctcaggtgagcttgcacaaaggcaagctcgtgtggacacacaccaccgggtgctccaacaatcaaaatattgctgggctggaggtcgtacatggatatgaaggc

SEQ ID NO: 45746 - DNA, 110 bp, synthetic construct
  source 1..110: mol_type = other DNA
agaaaagagaacaaagctggaagcctaacgttccacacctcattctttactacaaagctgcagtaatcaaaacaaagcaggattggtcccaaaacagacatatagatcaa

SEQ ID NO: 45747 - DNA, 110 bp, synthetic construct
  source 1..110: mol_type = other DNA
agctgcagtaatcaaaacaaagcaggattggtcccaaaacagacatatagatcaatagaacagaatatagaacccagaaataaagctatatacctaggtaaattatgata

SEQ ID NO: 45748 - DNA, 110 bp, synthetic construct
  source 1..110: mol_type = other DNA
ataccatttgcctaaggggcctctcaagtgatagctggatgctcttttcccactgtgaatgtttcatgcttatgggctggtctgagttcccctaaaattcagatgttgac

SEQ ID NO: 45749 - DNA, 110 bp, synthetic construct
  source 1..110: mol_type = other DNA
aattaaatagcatgattcctgacttaaagttcaccaggcgcagggaagctgacgggaatgacgggcggtattcagagtttctggcgttcattagagcagacagcagtgta

SEQ ID NO: 45750 - DNA, 110 bp, synthetic construct
  source 1..110: mol_type = other DNA
tgaagccatgggaacagatcttgctaaaattcttcatgcttcaattccacgcaaatccatattcaacatgcactcccccaaagaggccacgttattgaagttatcctgca

SEQ ID NO: 45751 - DNA, 110 bp, synthetic construct
  source 1..110: mol_type = other DNA
aatcattaaatgagagggaaaatcttgatgtgaaataacaatgcttatagctctccatggggtcaagaatttaagcattcgcacagaaaatgcaatgctgaaatggggaa

SEQ ID NO: 45752 - DNA, 110 bp, synthetic construct
  source 1..110: mol_type = other DNA
catggggtcaagaatttaagcattcgcacagaaaatgcaatgctgaaatggggaaccgtcactacaacacactgcaaatctctccaattcaaatgccattcaaacagtac

SEQ ID NO: 45753 - DNA, 110 bp, synthetic construct
  source 1..110: mol_type = other DNA
tcagccaagtgcctttgtgcagtaaacattctgtacaactgtacatggtggctccaggttaaagaaacacaaactccagagtcaggatgcccagggtgggagcccagctc

SEQ ID NO: 45754 - DNA, 110 bp, synthetic construct
  source 1..110: mol_type = other DNA
aggttaaagaaacacaaactccagagtcaggatgcccagggtgggagcccagctccaaagcagcttccttctgtgacaccagacctctgtgtagccctctacatttcctc

SEQ ID NO: 45755 - DNA, 110 bp, synthetic construct; identical to SEQ ID NO: 45753
  source 1..110: mol_type = other DNA

SEQ ID NO: 45756 - DNA, 110 bp, synthetic construct; identical to SEQ ID NO: 45754
  source 1..110: mol_type = other DNA

SEQ ID NO: 45757 - DNA, 110 bp, synthetic construct
  source 1..110: mol_type = other DNA
cttagtctctaagaggcttttccctttcttaccgccaatttcagcagcgccccccaccccaaataattctagctaaaataagggcaaactgtccgcatcatcttcccagt

SEQ ID NO: 45758 - DNA, 110 bp, synthetic construct
  source 1..110: mol_type = other DNA
accccaaataattctagctaaaataagggcaaactgtccgcatcatcttcccagtcccaacacttaagttttatgcgggaaataaaacaaccaaaccaaaattgcccttc

SEQ ID NO: 45759 - DNA, 110 bp, synthetic construct
  source 1..110: mol_type = other DNA
ccacagcaacacaggatccaagccccatttatgacctgtgatgcaggatccaggccccatctaccacttgtgacgcagaatccgagccctatctatgacctatgctgcag

SEQ ID NO: 45760 - DNA, 110 bp, synthetic construct
  source 1..110: mol_type = other DNA
ctgtgatgcaggatccaggccccatctaccacttgtgacgcagaatccgagccctatctatgacctatgctgcagcttttggcaataccggatccttaacccactgagca

SEQ ID NO: 45761 - DNA, 110 bp, synthetic construct
  source 1..110: mol_type = other DNA
gctggaagagcatttctgccacctgctacggacagcctcaccttggccaaggatgtgggccggtgtcctgttggatgctgtgatgagggagaaagggacccctctgctgg

SEQ ID NO: 45762 - DNA, 110 bp, synthetic construct
  source 1..110: mol_type = other DNA
acagatttcctcttagtctaaggtgatatggacatctttttaaaggcagagcacatcttgagtggtcctcaccctgctgtactgggctttcctcgttgaagtcagaggga

SEQ ID NO: 45763 - DNA, 110 bp, synthetic construct; identical to SEQ ID NO: 45762
  source 1..110: mol_type = other DNA

SEQ ID NO: 45764 - DNA, 110 bp, synthetic construct
  source 1..110: mol_type = other DNA
tttgtatgagaacgctttctctggaaattccatgttgaggtaccttggtgttggtctgtctgcattccatatgctggcaacttggtcggccttttacgtgtggagacccc

SEQ ID NO: 45765 - DNA, 110 bp, synthetic construct
  source 1..110: mol_type = other DNA
tgggccttcacagggccaccaacaggggccctgtatcttgtgcttttctccagtcgggaagcctgcagctctggcagggagcaggcaccagcagccctctcttggctctt

SEQ ID NO: 45766 - DNA, 110 bp, synthetic construct
  source 1..110: mol_type = other DNA
gggaagcctgcagctctggcagggagcaggcaccagcagccctctcttggctctttttggcacagatcaggcgttgtagcacgagcccctgcagaacctctggacggagc

SEQ ID NO: 45767 - DNA, 110 bp, synthetic construct
  source 1..110: mol_type = other DNA
aaatcagaaagagtaacctggaggaaacagggggaaaaaataaaaagtttctcccaacactctcttagagtgataaaagaagttatggtatccacaatacaaagacagga

SEQ ID NO: 45768 - DNA, 110 bp, synthetic construct
  source 1..110: mol_type = other DNA
aacactctcttagagtgataaaagaagttatggtatccacaatacaaagacaggattctgttgaagaaggatgattctgggaataaaatgtagctcttagaaattaaaca

SEQ ID NO: 45769 - DNA, 110 bp, synthetic construct
  source 1..110: mol_type = other DNA
atagacttctggatgttcctttaaagaccaaaagcatagtaagtattctactttaaagcagctgctcaaagattttaggacactcacactacctgtatgcatttgacaat

SEQ ID NO: 45770 - DNA, 110 bp, synthetic construct
  source 1..110: mol_type = other DNA
aagcagctgctcaaagattttaggacactcacactacctgtatgcatttgacaattaggaaagcattaagatttctgaatcttaaacaaacaaaacaaccattgaaaatg

SEQ ID NO: 45771 - DNA, 110 bp, synthetic construct
  source 1..110: mol_type = other DNA
ccaggaacttccatccaccttggtgtggggaaaaaaaaaaaaaaaaaaaagtttgttttaaggtctaggggaaaaaagcttatatgtaggccttaaactgtgctatgaaa

SEQ ID NO: 45772 - DNA, 110 bp, synthetic construct
  source 1..110: mol_type = other DNA
ttttaaggtctaggggaaaaaagcttatatgtaggccttaaactgtgctatgaaataaagttttggagttcctgctgtgatgcagtgggatcaatggtgtctttgcagtg

SEQ ID NO: 45773 - DNA, 110 bp, synthetic construct
  source 1..110: mol_type = other DNA
tgagatgttcagtatgcagctgaatgcactgcttcaaatgtcaggaaaagagtagagtccttgtaggatggaccttcctagcttacttgtgtttgagtggaagacatgta

SEQ ID NO: 45774 - DNA, 110 bp, synthetic construct
  source 1..110: mol_type = other DNA
gaagggaacaaggatgctggtctggatgcctgagagaatggctgtctaaccctgagcagctaagacagcaacactgcaaagctcacccagggggaggggcggagtcattg

SEQ ID NO: 45775 - DNA, 110 bp, synthetic construct
  source 1..110: mol_type = other DNA
gcagctaagacagcaacactgcaaagctcacccagggggaggggcggagtcattgggattaaacttgagttgggttagagaaaaacaatgaatggtttatttctatacaa

SEQ ID NO: 45776 - DNA, 110 bp, synthetic construct
  source 1..110: mol_type = other DNA
catggatatcatgaagattaaatgagttaattaatccatataaagtgcttgcccgagctatagtatgtgttatatgtctgactgcatcgccgtcaccctctgtgtttctg

SEQ ID NO: 45777 - DNA, 110 bp, synthetic construct
  source 1..110: mol_type = other DNA
tactgttcactgtaaacgcaatatatatatctcagatcttaaactcgggaggctaaaatgagtcgacttttgccttcaccttgtcgaggagcccaaaaaataatagcagc

SEQ ID NO: 45778 - DNA, 110 bp, synthetic construct
  source 1..110: mol_type = other DNA
aaatgagtcgacttttgccttcaccttgtcgaggagcccaaaaaataatagcagcataggtcaggggctgaaatttgaaagagtatccacttcattttctgaacattgct

SEQ ID NO: 45779 - DNA, 110 bp, synthetic construct
  source 1..110: mol_type = other DNA
ttccatttcctttcctttcctggcagtacacctgcttttcgctttacaaagcagggtctcatacataaccatccattatccacagttgttaaatatcttcgggtattttc

SEQ ID NO: 45780 - DNA, 110 bp, synthetic construct
  source 1..110: mol_type = other DNA
aagatatagtctctcaacaactttcagatatgcagtatggtattaactatagtcaccaggctctgtattacatccacaggacatatttgttttataactggaagtttata

SEQ ID NO: 45781 - DNA, 110 bp, synthetic construct; identical to SEQ ID NO: 45780
  source 1..110: mol_type = other DNA

SEQ ID NO: 45782 - DNA, 110 bp, synthetic construct
  source 1..110: mol_type = other DNA
attctctagtacatagtctctctcttttttttttttggcttttttggcttttttgctttttttcagggctgcacctgcagacatatgaaggttcacaggttaggggtcga

SEQ ID NO: 45783 - DNA, 110 bp, synthetic construct
  source 1..110: mol_type = other DNA
ctttttttcagggctgcacctgcagacatatgaaggttcacaggttaggggtcgaatcgggactacagctgcctgcctacgcctctgccacagcaatgcaagatccaagt

SEQ ID NO: 45784 - DNA, 110 bp, synthetic construct
  source 1..110: mol_type = other DNA
ttcatcttctacattgaaaccaaaacaagttttttgtatctgggcttttgaaagcttagtactcaaagagagaattggaaaagtatgtaccatccactgtaaaatgcgtg

SEQ ID NO: 45785 - DNA, 110 bp, synthetic construct
  source 1..110: mol_type = other DNA
ttagtactcaaagagagaattggaaaagtatgtaccatccactgtaaaatgcgtgtgtgttaggtgtaggcttgttcttagaattcctagttgcacacttctgctatttc

SEQ ID NO: 45786 - DNA, 110 bp, synthetic construct
  source 1..110: mol_type = other DNA
agtagggacttgatcaaacagctgagaaaaacattttggagacaggaagtgtcatgataaaagcagtgcttcagctaatagcagagagggaagatttggaatgaagggaa

SEQ ID NO: 45787 - DNA, 110 bp, synthetic construct
  source 1..110: mol_type = other DNA
caaattcaagatacctcagacaccattctagactagccgataagaatctgcacttgacaaagaacttctgtacagtaaagcctaagaaacactgctctagaaacttccaa

SEQ ID NO: 45788 - DNA, 110 bp, synthetic construct
  source 1..110: mol_type = other DNA
gacaaagaacttctgtacagtaaagcctaagaaacactgctctagaaacttccaaacctagctgattttagagtcacagtatactcctgtatgataattgagtgtaattc

SEQ ID NO: 45789 - DNA, 110 bp, synthetic construct
  source 1..110: mol_type = other DNA
aagtctgcagatagtgttagtggtgacatcacaaggtagggacgctgaacctgaagcttaatcctcctaagaagctagcggacttttctggctgtgcatgaccaaagaga

SEQ ID NO: 45790 - DNA, 110 bp, synthetic construct
  source 1..110: mol_type = other DNA
ccgccatgctggggaggcaacacgaaggtgttctggtgcacagtcccagctgaagccagcttcccaggcacccctgccaaggtgccagacatgtgaatgaaccatcttgt

SEQ ID NO: 45791 - DNA, 110 bp, synthetic construct
  source 1..110: mol_type = other DNA
gatgatttttctgtagcacagactgtgtcgctaagctcatcctgcatccagagtgatggagtcctgctctcactccctttggtcattcttctacgtacctgcccgggcgt

SEQ ID NO: 45792 - DNA, 110 bp, synthetic construct
  source 1..110: mol_type = other DNA
gtaaactgacaaccaacttatgactgctggacaatcacactgcttggtggacgggagactgacaggtgggaatgggccctgagctgagacttctcagtgaagaagagcat

SEQ ID NO: 45793 - DNA, 110 bp, synthetic construct
  source 1..110: mol_type = other DNA
ataaaaacaagggactatgattatataccttagtaaaactcaactctcctcatcccagggttaaatggccctcagacatgccgcacaagattggaatctggttcatcaaa

SEQ ID NO: 45794 - DNA, 110 bp, synthetic construct
  source 1..110: mol_type = other DNA
cagggttaaatggccctcagacatgccgcacaagattggaatctggttcatcaaaatttttaagccgcttggtggcctgaagattctggagggctggggatgttctggga

SEQ ID NO: 45795 - DNA, 110 bp, synthetic construct
  source 1..110: mol_type = other DNA
gtctcaggtccctgtggggggccttgcagctgtctgaaggtgtgtaagatcgggaccctgctgctatcagctcacttggcaaaatctggcgaagagcataggaagaatac

SEQ ID NO: 45796 - DNA, 110 bp, synthetic construct
  source 1..110: mol_type = other DNA
ttcctcccgagcatccgtgttgctttgtagcactgggatgctggcccttcccaagagagcctctggagacttgtaaccacacatctgcaggtagtagtgatgtgggttct

SEQ ID NO: 45797 - DNA, 110 bp, synthetic construct
  source 1..110: mol_type = other DNA
gtcaaagctctgttgggattttgatttggaattgatagattaatttggggagcatccacagcttcacaaaatcacctcttctcgcctgtgagcacgtcatgagtcgttca

SEQ ID NO: 45798 - DNA, 110 bp, synthetic construct
  source 1..110: mol_type = other DNA
ccacagcttcacaaaatcacctcttctcgcctgtgagcacgtcatgagtcgttcagtaagtgaaagggcctggaggagaagccaggttggtcagcctttcataccagttc

SEQ ID NO: 45799 - DNA, 110 bp, synthetic construct
  source 1..110: mol_type = other DNA
tagtcatagtggagtgtgcagctctcagaagcagggccatttctgatgaagctgcaacgcttgtggaatgctgggaaaatcatttgaccgaagatgatagaagaggcaaa

SEQ ID NO: 45800 - DNA, 110 bp, synthetic construct
  source 1..110: mol_type = other DNA
aacgcttgtggaatgctgggaaaatcatttgaccgaagatgatagaagaggcaaaaggaacaacgaagtgggtaccattgagctgaaagtagacctttgtctttggtcac

SEQ ID NO: 45801 - DNA, 110 bp, synthetic construct; identical to SEQ ID NO: 45799
  source 1..110: mol_type = other DNA

SEQ ID NO: 45802 - DNA, 110 bp, synthetic construct; identical to SEQ ID NO: 45800
  source 1..110: mol_type = other DNA

SEQ ID NO: 45803 - DNA, 110 bp, synthetic construct
  source 1..110: mol_type = other DNA
gccttatattgcagtgagcctcttcataggtgtaagttttattttcattccacctccatggctgacccagatttcagggcactagaagatcaatgcctagtagcgtttat

SEQ ID NO: 45804 - DNA, 110 bp, synthetic construct
  source 1..110: mol_type = other DNA
ccatggctgacccagatttcagggcactagaagatcaatgcctagtagcgtttatatagtttgctttccctatggcactgaaaagatcattctaagcccatagcagaccc

SEQ ID NO: 45805 - DNA, 110 bp, synthetic construct
  source 1..110: mol_type = other DNA
tctttctgcgtttcttgctggttcagggttctctagtggggactggtctcacgagtgaataagctggcccagccaactggccaagagattggacggatcgtagtcttttc

SEQ ID NO: 45806 - DNA, 110 bp, synthetic construct
  source 1..110: mol_type = other DNA
tgaataagctggcccagccaactggccaagagattggacggatcgtagtcttttcatgagcattttataatgaatataaaacccaagggtctactgtgtgctgggtaacc

SEQ ID NO: 45807 - DNA, 110 bp, synthetic construct; identical to SEQ ID NO: 45805
  source 1..110: mol_type = other DNA

SEQ ID NO: 45808 - DNA, 110 bp, synthetic construct; identical to SEQ ID NO: 45806
  source 1..110: mol_type = other DNA

SEQ ID NO: 45809 - DNA, 110 bp, synthetic construct
  source 1..110: mol_type = other DNA
ttgaggcatctcatctcactcttctaggaatcagaacctctaatccatgagggtgtagtgtttcagtaaccagaagcatagtggatccctggaagtgacggttaagaaaa

SEQ ID NO: 45810 - DNA, 110 bp, synthetic construct
  source 1..110: mol_type = other DNA
tagtgtttcagtaaccagaagcatagtggatccctggaagtgacggttaagaaaaaaaaaaaaaaagttattttctcttgatttctagacctatgtcttctagctatcag

SEQ ID NO: 45811 - DNA, 110 bp, synthetic construct
  source 1..110: mol_type = other DNA
aacatttataactgaggggctattcactgacctaactaaacttgaatctaagatctagaaatatagggagctcccatcgtggctcagcagttaacgaatctgactagtat

SEQ ID NO: 45812 - DNA, 110 bp, synthetic construct
  source 1..110: mol_type = other DNA
ggggctattcactgacctaactaaacttgaatctaagatctagaaatatagggagctcccatcgtggctcagcagttaacgaatctgactagtatccatgaggacgtggg

SEQ ID NO: 45813 - DNA, 110 bp, synthetic construct
  source 1..110: mol_type = other DNA
tagccttgatctgctaactcagagtaaataattagcttgaacttttcaatgttcatagtcaagattaaatgtttcagcttgcggtgtataagcaagatgccttaaaagcg

SEQ ID NO: 45814 - DNA, 110 bp, synthetic construct
  source 1..110: mol_type = other DNA
tagtcaagattaaatgtttcagcttgcggtgtataagcaagatgccttaaaagcggagtttatcctgcctttctatctataaggccccttctaccttcattaactcctta

SEQ ID NO: 45815 - DNA, 110 bp, synthetic construct
  source 1..110: mol_type = other DNA
gactgaccctttctggaaaagtttagctcttgttcgtttatgtacttggaaagaacaagggaagagtgatttattcagattagatgagttgcatttgaagtccctgggac

SEQ ID NO: 45816 - DNA, 110 bp, synthetic construct
  source 1..110: mol_type = other DNA
aaacttgaggcaaatagatggcctcatgtaaacagtatctcaaacacttgcagtagccaggcatatgatgtatgatgctatcggagttttctttccaaagagcgccaaag

SEQ ID NO: 45817 - DNA, 110 bp, synthetic construct
  source 1..110: mol_type = other DNA
gccaggcatatgatgtatgatgctatcggagttttctttccaaagagcgccaaagcagcttcagctctgaaaccatacctaagattgctaaataatagctgatcaaatta

SEQ ID NO: 45818 - DNA, 110 bp, synthetic construct
  source 1..110: mol_type = other DNA
ataggaagtctctgctcctttgggtggccttgtgttccggtctttgcacaccccctgctcttttccctggcgcactgtcctccaaccacgccttcatcttcctcgtcctt

SEQ ID NO: 45819 - DNA, 110 bp, synthetic construct
  source 1..110: mol_type = other DNA
cctcactttactgtgatctaatcaaatttgaaagccccaaagctcattgttacgaaccagatctcttgtcactgctttcaagccaaaaatagtttctaaagcatgaaaga

SEQ ID NO: 45820 - DNA, 110 bp, synthetic construct
  source 1..110: mol_type = other DNA
ctgagctggtgccaaggttacccaaggttaccacctgggaggacagcatttgcaggctggcagggtgatgaggaattgaagacggaggggtgggtgagcatggccttctc

SEQ ID NO: 45821 - DNA, 110 bp, synthetic construct
  source 1..110: mol_type = other DNA
gctggcagggtgatgaggaattgaagacggaggggtgggtgagcatggccttctccagttgagaacactgagctctggatgggagcaagagcccctgggaggaggagtag

SEQ ID NO: 45822 - DNA, 110 bp, synthetic construct
  source 1..110: mol_type = other DNA
ttgcttcttggtctctcttcttcggctgagatctagtctgccattctcagccttcatgttacttggccgcatctgatgacagcgtcagtggacctgtctttgcagagtga

SEQ ID NO: 45823 - DNA, 110 bp, synthetic construct
  source 1..110: mol_type = other DNA
atagctatacacatatttatctagatattatgactcttagaaatattttaaaatactcctttaacgtccctcttcagatatcgccagttctgccttgttggtgtttcgta

SEQ ID NO: 45824 - DNA, 110 bp, synthetic construct
  source 1..110: mol_type = other DNA
ctcctttaacgtccctcttcagatatcgccagttctgccttgttggtgtttcgtataggagactgaatcacaaattatggaaaattaaatttctggttgagtggaatatt

SEQ ID NO: 45825 - DNA, 110 bp, synthetic construct
  source 1..110: mol_type = other DNA
gaaggaagggcgggaacttgcactgagtgctgtgtcaggcaccacactagctgctgacataaaccattcttggccaccgcagcaatcatgagccacagcatttcgaggtg

SEQ ID NO: 45826 - DNA, 110 bp, synthetic construct
  source 1..110: mol_type = other DNA
gacataaaccattcttggccaccgcagcaatcatgagccacagcatttcgaggtgggaaggatgagtctcagaagtaggtaaattgcctggaagtctcagcgcatgtgtg

SEQ ID NO: 45827 - DNA, 110 bp, synthetic construct
  source 1..110: mol_type = other DNA
cctctgttagagccgaaccctgtaatttagctcatcagatttgcaaatgaaggttatcttctactgtttagcttggttaaacgttatccctgtgggcggttatgcatctc

SEQ ID NO: 45828 - DNA, 110 bp, synthetic construct
  source 1..110: mol_type = other DNA
atcttctactgtttagcttggttaaacgttatccctgtgggcggttatgcatctcctgtcacactgacgagaagcctgcctgcctggttctgttcaccaaggcctcctgc

SEQ ID NO: 45829 - DNA, 110 bp, synthetic construct
  source 1..110: mol_type = other DNA
tctaaaatatttgttctttctgatttgggacaagtttcttggatgtttataccctaataaagctcacatttgcaattttctgaattgctaaaatgtggcccttgctatga

SEQ ID NO: 45830 - DNA, 110 bp, synthetic construct
  source 1..110: mol_type = other DNA
cctcccactaaggtggtgaccaatagaagagaaacaggtttgatagacagagggtggggagggaccaaacattctgtttcccagggtgtattggattggagatgctatga

SEQ ID NO: 45831 - DNA, 110 bp, synthetic construct
  source 1..110: mol_type = other DNA
ggggagggaccaaacattctgtttcccagggtgtattggattggagatgctatgagacatccattcggatagagggcgcaagcagccagtgggcaccacagactcaaagc

SEQ ID NO: 45832 - DNA, 110 bp, synthetic construct
  source 1..110: mol_type = other DNA
gttcacagctatgtctacggcttagcattgtagcaggaagtaggttccgaagaagctattgaacaaatcacttgcgtctcagcccaaagataatgaataatgagctaaga

SEQ ID NO: 45833 - DNA, 110 bp, synthetic construct
  source 1..110: mol_type = other DNA
ctattgaacaaatcacttgcgtctcagcccaaagataatgaataatgagctaagatgaatggaatgaacccgcttgaaggtcttgaccttacaaaggagtcggaaaggtc

SEQ ID NO: 45834 - DNA, 110 bp, synthetic construct
  source 1..110: mol_type = other DNA
catccagaatcaacctctcccctcaactccagtcttgtgaatctagtggcacagtcaacctctcacatttaacattccccacggaagcactcctggctccccctcgcaag

SEQ ID NO: 45835 - DNA, 110 bp, synthetic construct
  source 1..110: mol_type = other DNA
caacctctcacatttaacattccccacggaagcactcctggctccccctcgcaagcaagctcatgccttcctgagtgttttgcatctcactaaatggcaccaccatccac

SEQ ID NO: 45836 - DNA, 110 bp, synthetic construct
  source 1..110: mol_type = other DNA
tgaaccttgaaaacatcatgccaaatgaaagaagccagacacaaaagtcacatactgaatagctctttttatatgagatatctagaatagataaatctatagagacagaa

SEQ ID NO: 45837 - DNA, 110 bp, synthetic construct
  source 1..110: mol_type = other DNA
tgaatagctctttttatatgagatatctagaatagataaatctatagagacagaatgtagattggtggttgccagtggctggggtttgcgaggagaaaagggagaaactg

SEQ ID NO: 45838 - DNA, 110 bp, synthetic construct
  source 1..110: mol_type = other DNA
tgagagcagcaaccagccagacctcaactttggtagcagctgtgaagaactggagtgtgtgtgagacaggatgaagggcaagtgacagggactttttcattcaggccagt

SEQ ID NO: 45839 - DNA, 110 bp, synthetic construct
  source 1..110: mol_type = other DNA
ctgattccttctagtttgggggcacatatcctgcattcaaatgaggacagagaagagaaacaaactgaaggcagctttcaacctcagaacaaacccagagccaaatggct

SEQ ID NO: 45840 - DNA, 110 bp, synthetic construct
  source 1..110: mol_type = other DNA
agaaacaaactgaaggcagctttcaacctcagaacaaacccagagccaaatggctttttgatactgtaggctgttgatgaaaatagtcaatataaacaatctataatggg

SEQ ID NO: 45841 - DNA, 110 bp, synthetic construct
  source 1..110: mol_type = other DNA
atgtctttggaacactggcttcagagcatgtgggggaagtcctgaaatagctggtgaatgagggcttagttttaagacaccattggtatcactggctgaacaatttcccg

SEQ ID NO: 45842 - DNA, 110 bp, synthetic construct
  source 1..110: mol_type = other DNA
gaatgagggcttagttttaagacaccattggtatcactggctgaacaatttcccggtggcagaaaaagagaaacaaaccctcagagacaccgtggtctgtctgagtacat

SEQ ID NO: 45843 - DNA, 110 bp, synthetic construct; identical to SEQ ID NO: 45841
  source 1..110: mol_type = other DNA

SEQ ID NO: 45844 - DNA, 110 bp, synthetic construct; identical to SEQ ID NO: 45842
  source 1..110: mol_type = other DNA

SEQ ID NO: 45845 - DNA, 110 bp, synthetic construct
  source 1..110: mol_type = other DNA
tgaattgtaggctcttggcactaaaatcaggtcagtatctggagaaacagattggcacaccagtggtctctatttatggctggggaataaatgggtgactgctttccttt

SEQ ID NO: 45846 - DNA, 110 bp, synthetic construct
  source 1..110: mol_type = other DNA
cacaccagtggtctctatttatggctggggaataaatgggtgactgctttcctttggtcctcttgccatcctcaaaaaccatcacctgcccaatgggcggtaacaaatta

SEQ ID NO: 45847 - DNA, 110 bp, synthetic construct
  source 1..110: mol_type = other DNA
tttttgttccaacattgtaagaaaaaactggctttgctggacttaacagaaaacagtatggtatagcaaaaacaatgtgcagtgtctattcttttctttttagctgcatc

SEQ ID NO: 45848 - DNA, 110 bp, synthetic construct
  source 1..110: mol_type = other DNA
gtatggtatagcaaaaacaatgtgcagtgtctattcttttctttttagctgcatccatgacatgacatgacatgcagaagttcccaggccagggttcgaacttgcaagtg

SEQ ID NO: 45849 - DNA, 110 bp, synthetic construct
  source 1..110: mol_type = other DNA
cacacaaaacctatccctcggccagatcctgtacatgatattgaagaaacacatgatctagtgctgacacccagattagaaggaaaaggtgaacacttagagcaaggacc

SEQ ID NO: 45850 - DNA, 110 bp, synthetic construct
  source 1..110: mol_type = other DNA
atctagtgctgacacccagattagaaggaaaaggtgaacacttagagcaaggacccatgacagaacaacttagcaaaatgttctttactactaagcacttttggtatcct

SEQ ID NO: 45851 - DNA, 110 bp, synthetic construct
  source 1..110: mol_type = other DNA
gtgcacggaaggctaggattggggtcagcagaacaccctgcttagactgctagttctaagccagactgctgagtttgaatccaagctctgccactcaccagccgtacaac

SEQ ID NO: 45852 - DNA, 110 bp, synthetic construct
  source 1..110: mol_type = other DNA
ctaagccagactgctgagtttgaatccaagctctgccactcaccagccgtacaactctggcaagtcccctgacctctctgtgccttaatttcccctggaactataaaata

SEQ ID NO: 45853 - DNA, 110 bp, synthetic construct
  source 1..110: mol_type = other DNA
catgattatttcatgatgggcacttctcctctggacgcagtgcaagaaatgttgtacctcagctgaccctgtccctaatctgatgaccctatccgctgagggggttctca

SEQ ID NO: 45854 - DNA, 110 bp, synthetic construct
  source 1..110: mol_type = other DNA
acctcagctgaccctgtccctaatctgatgaccctatccgctgagggggttctcagtgggaaggcagtgcctggaatgagtagggggaaggccccgcttccccccctcct

SEQ ID NO: 45855 - DNA, 110 bp, synthetic construct
  source 1..110: mol_type = other DNA
agctcagaagaggagggatggataaataaagacctgggatcattggtgagagctgagagggagcagtcagagacttaaatgatgtaagaggaagtgtcatgtcagaatcc

SEQ ID NO: 45856 - DNA, 110 bp, synthetic construct
  source 1..110: mol_type = other DNA
agagggagcagtcagagacttaaatgatgtaagaggaagtgtcatgtcagaatccaaaatgtgggagttcctgtcctcactcagcagtaacgaatccaacgcgtacccat

SEQ ID NO: 45857 - DNA, 110 bp, synthetic construct
  source 1..110: mol_type = other DNA
gccccttcgaaaacctcgtccaaaaaagcttagtctcagcgtccctggtccctagtccccagcttcagccacccaccccatctgacactggtgtgaagagaagggagtgc

SEQ ID NO: 45858 - DNA, 110 bp, synthetic construct
  source 1..110: mol_type = other DNA
tccccagcttcagccacccaccccatctgacactggtgtgaagagaagggagtgcatcctgagacctggacttgtaggtgggtgccaaaaattctccatagaaaatcttg

SEQ ID NO: 45859 - DNA, 110 bp, synthetic construct
  source 1..110: mol_type = other DNA
cacttcctttaatactgtttgctcaagcaagatgtctctgcccccgccccccaatcacactctggggaaggaaacttgaagttagaagcattttcagggccaaatgaagg

SEQ ID NO: 45860 - DNA, 110 bp, synthetic construct
  source 1..110: mol_type = other DNA
cacactctggggaaggaaacttgaagttagaagcattttcagggccaaatgaagggactgaattggaaggaattggagaagagggtgccctgggcggggaagagaggttt

SEQ ID NO: 45861 - DNA, 110 bp, synthetic construct
  source 1..110: mol_type = other DNA
tgtcctcagagagacacagctggtaccctgtgtccatcccccagcacacccacaacacacctacccccatgacagtgaagccaacttagctacttgagcctcatccctgg

SEQ ID NO: 45862 - DNA, 110 bp, synthetic construct
  source 1..110: mol_type = other DNA
cacacctacccccatgacagtgaagccaacttagctacttgagcctcatccctgggtacagatcctcctccctgcagccttcccctctggtggctgcggcagcagcaggc

SEQ ID NO: 45863 - DNA, 110 bp, synthetic construct
  source 1..110: mol_type = other DNA
aataataataattcttatcacagaaaggtcagcggctctacggactgagctgctgtcttcctgaggggcgcggttctgacagggtgacctggggatgaggtattgacgtt

SEQ ID NO: 45864 - DNA, 110 bp, synthetic construct
  source 1..110: mol_type = other DNA
tcttcctgaggggcgcggttctgacagggtgacctggggatgaggtattgacgtttgagaggagagacaccagcagagactggctgtgaaaggagatgcaaagggaaggg

SEQ ID NO: 45865 - DNA, 110 bp, synthetic construct
  source 1..110: mol_type = other DNA
ccagagagcagcagcttgcactcctggcttaaacaaaagcaccaaatcacccatctgccctaagtggcaacatgcatctcagcccattcctgacgtaaggacagattaca

SEQ ID NO: 45866 - DNA, 110 bp, synthetic construct
  source 1..110: mol_type = other DNA
gatatgcaaaatttatattgttaacctttctcccagtcttccccaaagggactcatggccttttaccagagttactgtgcagtggagaaaatgatataatcagatctctc

SEQ ID NO: 45867 - DNA, 110 bp, synthetic construct
  source 1..110: mol_type = other DNA
ctgcttatgtgtgcaaacaggatggagttagctaggtttcacaggcttcctggagcttgggtattttgaataattctttaggtctaagaaagaaggtgctgtccctgggt

SEQ ID NO: 45868 - DNA, 110 bp, synthetic construct
  source 1..110: mol_type = other DNA
ggtagatgcaatatttgaagaaaattatcccaaactgacaaaagcttccatcaacctactgatttaagaatagctccaaactccaacagtataaatacaaagaatctcat

SEQ ID NO: 45869 - DNA, 110 bp, synthetic construct
  source 1..110: mol_type = other DNA
tgacaaaagcttccatcaacctactgatttaagaatagctccaaactccaacagtataaatacaaagaatctcataacaagacaaatagtgaaacagctgaccatgaaaa

SEQ ID NO: 45870 - DNA, 110 bp, synthetic construct
  source 1..110: mol_type = other DNA
ttccaaagtcatgtagtggacaacatgggtattccagcttctgcattacaaatactgtctagcaacaacaaggagaaaggaataagaaaatggaaaagagcaatatacag

SEQ ID NO: 45871 - DNA, 110 bp, synthetic construct
  source 1..110: mol_type = other DNA
agaactatatcttggaggacttgggcactatagcttagagtgctcttgtttgattggtgggtcactgtctgccaagactaggtaacaactttggtaccacttctatactg

SEQ ID NO: 45872 - DNA, 110 bp, synthetic construct
  source 1..110: mol_type = other DNA
aaatagaggaaatgcttaacctctcgggtccccttatcaaccccagcacttgtgaaattagctaaatttacactaaatacatatgacactagcaaattgtaaagatcttt

SEQ ID NO: 45873 - DNA, 110 bp, synthetic construct
  source 1..110: mol_type = other DNA
aattagctaaatttacactaaatacatatgacactagcaaattgtaaagatcttttgttataagtctcattctcaaggaatatttcccaattacctgcctccttgtggca

SEQ ID NO: 45874 - DNA, 110 bp, synthetic construct
  source 1..110: mol_type = other DNA
ttactatctccttgtcaggcctgctttttctctctctggatcttgaagacattccttttcactttctcactttactttccacattcctttgagtctcaaaactctctcaa

SEQ ID NO: 45875 - DNA, 110 bp, synthetic construct
  source 1..110: mol_type = other DNA
tgctgatattgccagtgataggaagcagtcccaagagcttcctggtaacaagaagggttgcagaagccactgccacccacccctgccccaggagcagtccatgaaccatg

SEQ ID NO: 45876 - DNA, 110 bp, synthetic construct
  source 1..110: mol_type = other DNA
gatacaggtagggcagctttgtgatgtctgagtagagcagagaggaatgtataagaggggtgatgctctgaaagagataggaaatctcattccactttctattttattcc

SEQ ID NO: 45877 - DNA, 110 bp, synthetic construct
  source 1..110: mol_type = other DNA
aggggtgatgctctgaaagagataggaaatctcattccactttctattttattccaaggaaataccctctacaatggccttgaggaaccacagctccatcaccgagttta

SEQ ID NO: 45878 - DNA, 110 bp, synthetic construct
  source 1..110: mol_type = other DNA
aatggagagcccccaaataaacccacccatctaggatgaagtgatcttaaacagtagtcaacaatactactctgggaggaaatggagaggtgtttttttttccttttagg

SEQ ID NO: 45879 - DNA, 110 bp, synthetic construct
  source 1..110: mol_type = other DNA
tcccaaaactagcctcctcgaccaaataagcattacctgtgctccagttccgtaactcattcccatagccccactgcagatcttgccaccacccagaacggcttcacctc

SEQ ID NO: 45880 - DNA, 110 bp, synthetic construct
  source 1..110: mol_type = other DNA
aactgaggatgagacgtttccagaagcagaaggtaagtggctagttttgtgtgctttttctttccccagcacaaaatgacccaagctatgaattgaaattatgacccaca

SEQ ID NO: 45881 - DNA, 110 bp, synthetic construct
  source 1..110: mol_type = other DNA
ttttctttccccagcacaaaatgacccaagctatgaattgaaattatgacccacaggtgtgtgttctctgtgaaaactcattagagcacatgtaattagggcaagtctgg

SEQ ID NO: 45882 - DNA, 110 bp, synthetic construct
  source 1..110: mol_type = other DNA
aaaaaaaggcagagagtggtagttcaaggacaagtttcttaaatcagtgacaagggaagtgtgatttctcaaatctcatctttattttccataagtaatagcaatacact

SEQ ID NO: 45883 - DNA, 110 bp, synthetic construct
  source 1..110: mol_type = other DNA
cagaacaaattaaaaataaatatacacagctatgtttccaaatagtaaaaatgactgcatgttatagtcaaataagcaaccaaacgagaggagagaatgaaaactcaaag

SEQ ID NO: 45884 - DNA, 110 bp, synthetic construct
  source 1..110: mol_type = other DNA
atcctataaaatcccatgtatatgagttgctgatttttgtaatcttgtttgtttttgtctgtgtccctgtacgagaagcttaatgaaggactacgtaggtacaaagatgt

SEQ ID NO: 45885 - DNA, 110 bp, synthetic construct
  source 1..110: mol_type = other DNA
tgtctgtgtccctgtacgagaagcttaatgaaggactacgtaggtacaaagatgtgagccagggtcaagggaatccagcaaaggatcatgaagcatccagtagagataga

SEQ ID NO: 45886 - DNA, 110 bp, synthetic construct
  source 1..110: mol_type = other DNA
gacgtcaaactcaacacatgtaaagaaactcaaaatagtccctcagacttcctcccccgggtttccccccttagggagtagggtaagctcaagctagaaacctgggggtc

SEQ ID NO: 45887 - DNA, 110 bp, synthetic construct
  source 1..110: mol_type = other DNA
cccgggtttccccccttagggagtagggtaagctcaagctagaaacctgggggtcagtcagttttggacacttttcttcaccttccacttgcaaagatcaagtctttact

SEQ ID NO: 45888 - DNA, 110 bp, synthetic construct
  source 1..110: mol_type = other DNA
taataaaatctatcaccatgtgattcatattgaagcactcgtgtaaagtaatgaaaacgtttaaagaacaataatagatttccttggtggcctagtgattaaggactcag

SEQ ID NO: 45889 - DNA, 110 bp, synthetic construct
  source 1..110: mol_type = other DNA
cactcgtgtaaagtaatgaaaacgtttaaagaacaataatagatttccttggtggcctagtgattaaggactcagcattgtcaccgctatgacttgggttactgctgtgg

SEQ ID NO: 45890 - DNA, 110 bp, synthetic construct
  source 1..110: mol_type = other DNA
acatttgccgagaacatgttttgtttgtgaatgttgcaaaattttccatttctgcaagctaagtagatttttaaatagaacaaattcggttctctaaatctcagggaaca

SEQ ID NO: 45891 - DNA, 110 bp, synthetic construct
  source 1..110: mol_type = other DNA
tattctgagccaggcactggcctggacccttcacatcagtgaactcactgcctcctcaccacaacccagcgaggggagttgcacggctcgttcccgttcacaggtgaggc

SEQ ID NO: 45892 - DNA, 110 bp, synthetic construct
  source 1..110: mol_type = other DNA
tggaaggcagggatttttgaccaaaaaaaataatccgatgacacctgttaaagctggtaaggcagactttattcagggcaatcgtgataggaataggactattacggtgt

SEQ ID NO: 45893 - DNA, 110 bp, synthetic construct
  source 1..110: mol_type = other DNA
ggtaaggcagactttattcagggcaatcgtgataggaataggactattacggtgtgtttttacagcgagggagagagatgcgactcaacttgggtaagtggaaagatgta

SEQ ID NO: 45894 - DNA, 110 bp, synthetic construct
  source 1..110: mol_type = other DNA
atgacctagaggcttgggcaggcttcctggtaggaggggccaatgcctgcccaatggtggagtggagttggatcttggctatctggtggacaggaccatgtcaaggagcc

SEQ ID NO: 45895 - DNA, 110 bp, synthetic construct
  source 1..110: mol_type = other DNA
ctgcgagctggatgtttgtgcctggagaatagtccgctatgtgggaactgtgctgaggtgccacacagatagaactggtggtgcttgttcagtaatgggacagggcagtg

SEQ ID NO: 45896 - DNA, 110 bp, synthetic construct
  source 1..110: mol_type = other DNA
tattttgtttaaagtgttgtccttctcaaaaagcactgagggggaggcactgcggagctgagtaatgaggaacatgaggaggtgttcaatcaatgttaattaaattatct

SEQ ID NO: 45897 - DNA, 110 bp, synthetic construct
  source 1..110: mol_type = other DNA
agctgagtaatgaggaacatgaggaggtgttcaatcaatgttaattaaattatctgcacccgcacatcgcccgcttcaacccaaaaggacagaaaggtgtcacattcctg

SEQ ID NO: 45898 - DNA, 110 bp, synthetic construct
  source 1..110: mol_type = other DNA
agtcttatttaacgactatcgctgcagctcttagccagggacaggggtaggacaaacacagccatgggagacctttaaaagctaacagctctctctacctgcccattttc

SEQ ID NO: 45899 - DNA, 110 bp, synthetic construct
  source 1..110: mol_type = other DNA
acacagccatgggagacctttaaaagctaacagctctctctacctgcccattttccaggatgtgggctgagggcacagagggacacacacacacagggcgcccatggcct

SEQ ID NO: 45900 - DNA, 110 bp, synthetic construct
  source 1..110: mol_type = other DNA
actggaaactgctttcctctctccataggaccatcccccatctggaaggaaaagcagatgaatcccaacccacacttcaagacagtagagtaggtcgcctttgaaataag

SEQ ID NO: 45901 - DNA, 110 bp, synthetic construct
  source 1..110: mol_type = other DNA
agatgaatcccaacccacacttcaagacagtagagtaggtcgcctttgaaataagaccagcacctgcaaattgctgagaaataagctaccaaatgggaatcatcaccact

SEQ ID NO: 45902 - DNA, 110 bp, synthetic construct
  source 1..110: mol_type = other DNA
tttaaacatttgccctaaagaccgccccctcccgccgccagactggaagctaatggtaaacctccagatctttctctatagatcgccaggtccatttcttcattgaataa

SEQ ID NO: 45903 - DNA, 110 bp, synthetic construct
  source 1..110: mol_type = other DNA
tcacttgtattgattatggaagacatgatgtacaaacaatgtttctgcaacgaggaggaggaggaagcaacgttctgctgccatcactaaactcaatagtcaccagctcc

SEQ ID NO: 45904 - DNA, 110 bp, synthetic construct
  source 1..110: mol_type = other DNA
aggaggaggaagcaacgttctgctgccatcactaaactcaatagtcaccagctccctggagatgaaattctgctcccgaaagaacacttggtccttgctgatctcaaagg

SEQ ID NO: 45905 - DNA, 110 bp, synthetic construct
  source 1..110: mol_type = other DNA
ttcagcgtatggatttggaagggggtagcaattcagcccataacaaatgacaatgcctgtaactgtcctttaaggcctatgacccgcatattatgccaggactttgatgc

SEQ ID NO: 45906 - DNA, 110 bp, synthetic construct
  source 1..110: mol_type = other DNA
tatggatcagtaagcctttgagtgagacctaggcggtgcggtcaataataaagttcagagggagttctgaaaaccccctgccttctgcaggcagcgaaataccttcctcg

SEQ ID NO: 45907 - DNA, 110 bp, synthetic construct
  source 1..110: mol_type = other DNA
ctggtctcttctgctgacatcccctgtccccacccaacaccagttcctgacatccactccttgcaaagcccagctgctgggacgggccctccgggggtccaggaccttgt

SEQ ID NO: 45908 - DNA, 110 bp, synthetic construct
  source 1..110: mol_type = other DNA
actccttgcaaagcccagctgctgggacgggccctccgggggtccaggaccttgtcagcagcccctggtccccgctcgtgcagcgccccaggctgagggatgaccagaag

SEQ ID NO: 45909 - DNA, 110 bp, synthetic construct
  source 1..110: mol_type = other DNA
gtctccactggggaatttgtcaacttttgtaagcaataacttcccagagccaaagggtgtgcaattgcccaggccattttttcaaaatgataaggaagggttcattcagt

SEQ ID NO: 45910 - DNA, 110 bp, synthetic construct
  source 1..110: mol_type = other DNA
aacttgcccataagtcaagaattaaacccagatccaaataattaaaaacttcttgcttttctcaacatgatacccaataattcaaaagtacttgtcacatacacttccta

SEQ ID NO: 45911 - DNA, 110 bp, synthetic construct
  source 1..110: mol_type = other DNA
acccagatccaaataattaaaaacttcttgcttttctcaacatgatacccaataattcaaaagtacttgtcacatacacttcctaagtttatccttactgtaaatgtatg

SEQ ID NO: 45912 - DNA, 110 bp, synthetic construct
  source 1..110: mol_type = other DNA
gaatacatttactggctcccaccttcaaggcagtgcaccaaggactgtggaagatgttataatgaacaagacacactgattctcaaaaatccagtcagaaaaataagtgt

SEQ ID NO: 45913 - DNA, 110 bp, synthetic construct
  source 1..110: mol_type = other DNA
gttataatgaacaagacacactgattctcaaaaatccagtcagaaaaataagtgtttacgagttaatcaaaataggatggaatgtgtgtcatggtagaaatataaactct

SEQ ID NO: 45914 - DNA, 110 bp, synthetic construct
  source 1..110: mol_type = other DNA
ctggctcaagagtttctccaaagtttgcattggaagtgagccaaggttgccatcatctgagggtttgcttggagctggatctgcccccaaagcactcactcatctagcta

SEQ ID NO: 45915 - DNA, 110 bp, synthetic construct
  source 1..110: mol_type = other DNA
tctgagggtttgcttggagctggatctgcccccaaagcactcactcatctagctagcaagttggtgcggctgttggtgggaggcctcagctgctctccacagaggccttt

SEQ ID NO: 45916 - DNA, 110 bp, synthetic construct
  source 1..110: mol_type = other DNA
ctcaaagcttgggcctttttagataaaaaaggaattgaagctgtgtctttttcgtattgttgattgaattcttctacatttcctctttggtttttctttgcctgtggtct

SEQ ID NO: 45917 - DNA, 110 bp, synthetic construct
  source 1..110: mol_type = other DNA
ctaaccttgccatgaggttcacctagtctgcagtaacaaacagcaatgatgcagagaaagaatttttttaaattactggcttatttgatttacctagcaaaaaaaatcct

SEQ ID NO: 45918 - DNA, 110 bp, synthetic construct
  source 1..110: mol_type = other DNA
tggggggccttggagaccagtagctcatagcagcaaggagaatgggtactaaagacagcagttatattagtaacaatggtgataataataatggtaatacagcagtttac

SEQ ID NO: 45919 - DNA, 110 bp, synthetic construct
  source 1..110: mol_type = other DNA
agtaaactgcaacaagaaggaatctcaggaaacccagatgtctggccctgccgtatattttacctgagcgtttaaagggcttacccaatggcagagttgtgactgtaccc

SEQ ID NO: 45920 - DNA, 110 bp, synthetic construct
  source 1..110: mol_type = other DNA
caggttggtgtggggaatcccagctgttgttacagtccaccgccatggctatgggatcaaaggtcacctcaggcaagctgcttgcctgctctacatttcagctgtgaatc

SEQ ID NO: 45921 - DNA, 110 bp, synthetic construct
  source 1..110: mol_type = other DNA
acctcattaagggagcactcacttaaattaaactaccacagcgctcagagttctaacacagtgagctcggccatgtgcgccagtgcagataagctacagggggctcaacg

SEQ ID NO: 45922 - DNA, 110 bp, synthetic construct
  source 1..110: mol_type = other DNA
acacagtgagctcggccatgtgcgccagtgcagataagctacagggggctcaacgcttggactggatgcctactacaatttcagataaatcaaaatatgctttgggaaaa

SEQ ID NO: 45923 - DNA, 110 bp, synthetic construct; identical to SEQ ID NO: 45921
  source 1..110: mol_type = other DNA

SEQ ID NO: 45924 - DNA, 110 bp, synthetic construct; identical to SEQ ID NO: 45922
  source 1..110: mol_type = other DNA

SEQ ID NO: 45925 - DNA, 110 bp, synthetic construct
  source 1..110: mol_type = other DNA
cagtgcaaaagttgagagttacgttttatttggggcaaaatgagggcttaagccgagaggcagcctcctgagaaaccggctctgaggaggctggggaggtcaggatggat

SEQ ID NO: 45926 - DNA, 110 bp, synthetic construct
  source 1..110: mol_type = other DNA
agaggcagcctcctgagaaaccggctctgaggaggctggggaggtcaggatggatttgccttggagggcaggtcgcagggatggaagattgcagaacaccaggtatctcc

SEQ ID NO: 45927 - DNA, 110 bp, synthetic construct
  source 1..110: mol_type = other DNA
aggtcaagggaggaaggggagtttctcttcccagcagcttcaggcagcctcagagggggtggatgctgggtgggtgcagacagcacctacctcctttcctctgagctctc

SEQ ID NO: 45928 - DNA, 110 bp, synthetic construct
  source 1..110: mol_type = other DNA
ggggtggatgctgggtgggtgcagacagcacctacctcctttcctctgagctctcctttctcactgctcggcatctgtccaggctgacgttctcccaggatgctgtcttc

SEQ ID NO: 45929 - DNA, 110 bp, synthetic construct
  source 1..110: mol_type = other DNA
ggggaagaggctgcttgtgtgggagagatgataaatgacggagaagggtccccgggaggacaggtgggtgtgggtgggccatggatgggagggtgcgaggggaggctggg

SEQ ID NO: 45930 - DNA, 110 bp, synthetic construct
  source 1..110: mol_type = other DNA
ttgagaacactgaggcaaagaaggttaagtaacttgcttaaagtgacagcctgaaagtagcagagctgagattcaaacctaggcagtttacttcagagctcttcatctta

SEQ ID NO: 45931 - DNA, 110 bp, synthetic construct
  source 1..110: mol_type = other DNA
gacctctgactgtaaatgactctctcccagttcaggggagccctgcatgatagctgcttgctggggcctgcctttattctggaaaaaatgaaaacacaagacctcctgcc

SEQ ID NO: 45932 - DNA, 110 bp, synthetic construct
  source 1..110: mol_type = other DNA
gcttgctggggcctgcctttattctggaaaaaatgaaaacacaagacctcctgcccaaccgcctgaagcagacagaggctgtgtctagtcgcgtgggaaaagggcaagac

SEQ ID NO: 45933 - DNA, 110 bp, synthetic construct
  source 1..110: mol_type = other DNA
catttcaaccaatctttatgaaaggaagcagtgaagtaggaaacaagacaaagacctgccctgaagagatgacagtccagtggtagggacacttgggtgggacatgagct

SEQ ID NO: 45934 - DNA, 110 bp, synthetic construct
  source 1..110: mol_type = other DNA
ctgccctgaagagatgacagtccagtggtagggacacttgggtgggacatgagctacactgatagaacaccctggcagttaagcgctcggtctctgcacatagacagcca

SEQ ID NO: 45935 - DNA, 110 bp, synthetic construct
  source 1..110: mol_type = other DNA
tctcttttcttttttggctgcacgtacagccaatttctgcaacataaattccctaggccagtaagagagtccaagctctggcagtgacaatccttaatccttaaccgcca

SEQ ID NO: 45936 - DNA, 110 bp, synthetic construct
  source 1..110: mol_type = other DNA
agagaagcactcacaggtcccgtcgccatgtattccactgttgcacactccatgcacacaggggcaagctgcagacagaaagcggggacttttcatgacctaatctagac

SEQ ID NO: 45937 - DNA, 110 bp, synthetic construct
  source 1..110: mol_type = other DNA
acacaggggcaagctgcagacagaaagcggggacttttcatgacctaatctagacttcttccaaagattctgcaaggctgctgttttcaacagtgtttactgggattctg

SEQ ID NO: 45938 - DNA, 110 bp, synthetic construct
  source 1..110: mol_type = other DNA
tgcagcttctacttgaaccccctccttccacctctgcctcgtgaatccatttttcaagcagcagtcagagttgtcttttaaccgtataagtaagaccaagcatttacagc

SEQ ID NO: 45939 - DNA, 110 bp, synthetic construct
  source 1..110: mol_type = other DNA
aagcagcagtcagagttgtcttttaaccgtataagtaagaccaagcatttacagctacaaactcctgaatggcttgccatcgcacttcaaccaagcatccgctaggcgcc

SEQ ID NO: 45940 - DNA, 110 bp, synthetic construct
  source 1..110: mol_type = other DNA
gctggggcaacacatggggctttcccactcggcacaaatgaaggctgtttgtgctagttaaccttttccaagcccgggtcgctcctgctgggaggcagggccgagctgcg

SEQ ID NO: 45941 - DNA, 110 bp, synthetic construct
  source 1..110: mol_type = other DNA
agttaaccttttccaagcccgggtcgctcctgctgggaggcagggccgagctgcggagagtgaaagcctggcagagcccagagtcgccagctcgcctgggcccccaacac

SEQ ID NO: 45942 - DNA, 110 bp, synthetic construct
  source 1..110: mol_type = other DNA
ctcacaggctgcagaaggaagagcaaaagtggagaataattgtcagtctgttcgggctgccaaaaaaatgtggcatataaacaacagaaatttatttctcactgccctgg

SEQ ID NO: 45943 - DNA, 110 bp, synthetic construct
  source 1..110: mol_type = other DNA
taaacgcgtgagcagccatcagctactttcaattccgccatcatactttactttgtgtggctttaacaagaggcagtgttgtccacagacccacgcctttgagttctttt

SEQ ID NO: 45944 - DNA, 110 bp, synthetic construct
  source 1..110: mol_type = other DNA
tgtggctttaacaagaggcagtgttgtccacagacccacgcctttgagttcttttataccaattgtactatgattttgatagaattttattgatagataaattatactca

SEQ ID NO: 45945 - DNA, 110 bp, synthetic construct
  source 1..110: mol_type = other DNA
tacccaaattcttatgaagtccttaatttgccctgggactcagtgcacatgaaatcctgtgtgcaccctccaagcatggagtttctgcttcctccagtcctgtggagctt

SEQ ID NO: 45946 - DNA, 110 bp, synthetic construct
  source 1..110: mol_type = other DNA
cctgtgtgcaccctccaagcatggagtttctgcttcctccagtcctgtggagcttcagctctcaagtcttgctggccttcattgccaaatgctctggggctccttttccc

SEQ ID NO: 45947 - DNA, 110 bp, synthetic construct
  source 1..110: mol_type = other DNA
tacatcagtcccacccaaatgcccgtaaacaacacttccggtgaaatctatccagaatttgaccacttcccaccagttcagcactaacagcttgatgcagaccccacgat

SEQ ID NO: 45948 - DNA, 110 bp, synthetic construct
  source 1..110: mol_type = other DNA
aatttgaccacttcccaccagttcagcactaacagcttgatgcagaccccacgatctcgtacccgggctgacacagtagtttcttcgctggtcctcctgcctctcccttg

SEQ ID NO: 45949 - DNA, 110 bp, synthetic construct
  source 1..110: mol_type = other DNA
ttctccttttgcttcttccagagaagaaaattctgttttcccaagagaaccatatttaatatccccgagctgagataactccggtgtattgaccctctttttactaacac

SEQ ID NO: 45950 - DNA, 110 bp, synthetic construct
  source 1..110: mol_type = other DNA
ccactaggcttctgcctggtaagactctgctactcactcttcaagtcatagctgcctcctccccaagtctcctccgcctcaccgtggcacagtccttccctggtgctgcc

SEQ ID NO: 45951 - DNA, 110 bp, synthetic construct
  source 1..110: mol_type = other DNA
ctcctccccaagtctcctccgcctcaccgtggcacagtccttccctggtgctgccgctgtagatggtgcacacacacatccagccgcccgcttagccttcccttgcaaaa

SEQ ID NO: 45952 - DNA, 110 bp, synthetic construct
  source 1..110: mol_type = other DNA
gggagaataaacaagtggtcaagtcacgggctccttgatcctttaccacctacagacctcaggttccggggacagaggcggggctgtagggggacatccgggcaggtaag

SEQ ID NO: 45953 - DNA, 110 bp, synthetic construct
  source 1..110: mol_type = other DNA
ggcatttattcctggcttattcccagtcgtcatccctggaatgtaggcgccatcggagcgaagactcccccaggtcccccctccatgtccagtgctcaggagtaggacgt

SEQ ID NO: 45954 - DNA, 110 bp, synthetic construct
  source 1..110: mol_type = other DNA
gagcgaagactcccccaggtcccccctccatgtccagtgctcaggagtaggacgtgctcaggacatgtttgtggaaactcttttgccaagactaagggtccccaggtcgc

SEQ ID NO: 45955 - DNA, 110 bp, synthetic construct
  source 1..110: mol_type = other DNA
ctaaagcttaacatggttcagtcacctgccaaagtcataggatttgtaggtggcgtggtctggtgttgccctcaggcttgttgaactgcagaggcattctcaaccagttc

SEQ ID NO: 45956 - DNA, 110 bp, synthetic construct
  source 1..110: mol_type = other DNA
tggtctggtgttgccctcaggcttgttgaactgcagaggcattctcaaccagttcccggagtgtctggggacctgtcttctccatataagccaggagctgctcatgagct

SEQ ID NO: 45957 - DNA, 110 bp, synthetic construct
  source 1..110: mol_type = other DNA
ccaggctcgacacagcacttattcttaggcataaggttataagaaggcaagagttgctttctcttccccacccattctctgcacagaaagcctgagtctgcatggcttac

SEQ ID NO: 45958 - DNA, 110 bp, synthetic construct
  source 1..110: mol_type = other DNA
gaacaattttcttcaagtgacttaagattcttccaaagcaagagaaaccactgtggctggagtgagctgaggggcttcacagaagagactatgattcacctggagctata

SEQ ID NO: 45959 - DNA, 110 bp, synthetic construct
  source 1..110: mol_type = other DNA
tatttgcactctccgtcacagcttcgaggtggccaggaaggaagcgacaaagccgtccacgaggagattaaaggaaccaagctacagaaagtgagcatccaaatcctgac

SEQ ID NO: 45960 - DNA, 110 bp, synthetic construct
  source 1..110: mol_type = other DNA
taagagtttgcatttaccaacaccatactctccatccatcccactccctcccccttagccaccccaagtgtgatctctatttccgtgagtttgtttctgttttgtagata

SEQ ID NO: 45961 - DNA, 110 bp, synthetic construct
  source 1..110: mol_type = other DNA
tagccaccccaagtgtgatctctatttccgtgagtttgtttctgttttgtagataggataaattgtgccatattttaaattcatggaaacaacctaaatgtccatcgaca

SEQ ID NO: 45962 - DNA, 110 bp, synthetic construct
  source 1..110: mol_type = other DNA
tccccacggtggaggtccaaagcacagagagagggtagctcggaggaataggtttggaagtttctctgtacagatgatagctaaggcatggtcttcccctacctcaatat

SEQ ID NO: 45963 - DNA, 110 bp, synthetic construct
  source 1..110: mol_type = other DNA
tagctcggaggaataggtttggaagtttctctgtacagatgatagctaaggcatggtcttcccctacctcaatattaaaattttaagttatttttaaataaaaagaaatg

SEQ ID NO: 45964 - DNA, 110 bp, synthetic construct
  source 1..110: mol_type = other DNA
tcaaggcttttatatgcattttaaaattttgtgtgaattgtagaagaattccctgtcaatgcacatccaaagttaattagccccaaattctcagcaagactgaaccgtgt

SEQ ID NO: 45965 - DNA, 110 bp, synthetic construct
  source 1..110: mol_type = other DNA
tcaatgcacatccaaagttaattagccccaaattctcagcaagactgaaccgtgtcataaaatcccccagatttcctttcctgcagtgtcactggagactgcatttccta

SEQ ID NO: 45966 - DNA, 110 bp, synthetic construct
  source 1..110: mol_type = other DNA
caagattcacaaagctcagaggtagcactgccaggtttttaatccagatctgtcgggtttcaaagaccattctcatttttttcttctaaaaatccctctagaagtcttac

SEQ ID NO: 45967 - DNA, 110 bp, synthetic construct
  source 1..110: mol_type = other DNA
tactgggacccaggccttctcacatctcccaaccgaatccccataaccaacataacctagatatttccccaaagagcttaatcagggtaaggctggtgtattagattcag

SEQ ID NO: 45968 - DNA, 110 bp, synthetic construct
  source 1..110: mol_type = other DNA
cctagatatttccccaaagagcttaatcagggtaaggctggtgtattagattcagattcttaatctccttcccactaccagtactgaggagataaaaaattatttcattc

SEQ ID NO: 45969 - DNA, 110 bp, synthetic construct
  source 1..110: mol_type = other DNA
atttagaaggtttcctggtgccagacactttccaaaagcttaacatttattacctcattcactcttcacaagagtccagtgaggaaggtctattatcctcattttacatc

SEQ ID NO: 45970 - DNA, 110 bp, synthetic construct
  source 1..110: mol_type = other DNA
ggacgcagacttcatgggctgcttgctgactttttcagctgttctttgaactaccttagtaaaaacaattgttgcccttatgtaggcttaagttacatttctttggatga

SEQ ID NO: 45971 - DNA, 110 bp, synthetic construct
  source 1..110: mol_type = other DNA
accacctggtaaagtaactacatggcgaagtaggaaaaaatttaaaaatccttgtttcagaggccagggctcttccagacccaagcacaagggcttccactgaaatggag

SEQ ID NO: 45972 - DNA, 110 bp, synthetic construct
  source 1..110: mol_type = other DNA
aaagagtgagaaatagatcctctccccatgactactctccaaacatcctcaccaattgtgtaacttaggaactaggaagaagtgaagatgggcaccagtcctcacttagg

SEQ ID NO: 45973 - DNA, 110 bp, synthetic construct
  source 1..110: mol_type = other DNA
ttgtgtaacttaggaactaggaagaagtgaagatgggcaccagtcctcacttagggatcaccctagcttgcttaccttcctttgtgaataatctttagacggtcagtctc

SEQ ID NO: 45974 - DNA, 110 bp, synthetic construct
  source 1..110: mol_type = other DNA
gcctgggtttgaggatgtcacagggacgttaactgtgctcttctatcagtggagtcgccaaaccaggtggcttccctctctgaaaacctttgagactcagcacctccagg

SEQ ID NO: 45975 - DNA, 110 bp, synthetic construct
  source 1..110: mol_type = other DNA
aaggtggcaaaaaatatgttttagtgaactcaaaattctggagcttagggagttcccatcatggcacagaggaaatgaataagatagtatccatgaggatgtgggttcga

SEQ ID NO: 45976 - DNA, 110 bp, synthetic construct
  source 1..110: mol_type = other DNA
aactgtgagaatagggtctgacagcctattggcgcacctgacagcattctagatgaggagaggtgagctaacccacagccaaatttttatacatctttattttgaacctt

SEQ ID NO: 45977 - DNA, 110 bp, synthetic construct
  source 1..110: mol_type = other DNA
atcactgagaaataaggaatttgggaaagtgaaccatatgtggggggttttgtttgttttacattttgggggggatgccctcggcttgtggaagttcctaggccaggtgt

SEQ ID NO: 45978 - DNA, 110 bp, synthetic construct
  source 1..110: mol_type = other DNA
gttttacattttgggggggatgccctcggcttgtggaagttcctaggccaggtgtcaaacctgaaccacggcagcaacccaagaccctgtagtgacaatgctggatcctt

SEQ ID NO: 45979 - DNA, 110 bp, synthetic construct
  source 1..110: mol_type = other DNA
tattaaaactaataccatgtgagactccactcattgtccagcctggcataaatcctttggccccactttgctcgatccattgactagctagccattccttctctcccgaa

SEQ ID NO: 45980 - DNA, 110 bp, synthetic construct
  source 1..110: mol_type = other DNA
tttctgggaccaacaactttcttgataaaatggcctaaaatacaaaaagaaaagacatactcaggtcatgttttactgcatacggcctgatgtttgctaagctgacctga

SEQ ID NO: 45981 - DNA, 110 bp, synthetic construct
  source 1..110: mol_type = other DNA
catactcaggtcatgttttactgcatacggcctgatgtttgctaagctgacctgatgttagcagttaggcagttttcaaatacaatggaaatatctccaaaagaaaaaga

SEQ ID NO: 45982 - DNA, 110 bp, synthetic construct
  source 1..110: mol_type = other DNA
tgagcaaggcggccccggcctctacaaattgtactatcatccatttaaaaacaggtttatactctcaaccctcagtgaaccacatgacatgtttcacctccatgaacagc

SEQ ID NO: 45983 - DNA, 110 bp, synthetic construct
  source 1..110: mol_type = other DNA
ccttgaccctcccttgagcttctgtaaggcatctctgccctatagctgcatgagtatgttacgctccttgaaggggaggtatagtcttatttatctttttatcctcggga

SEQ ID NO: 45984 - DNA, 110 bp, synthetic construct
  source 1..110: mol_type = other DNA
tgtggtataggcaggcagctgcagctccaagtcgacccctagcccctagttatctttggtggctgtgcaaacataacttgtgttgtggggacttccatattccataggca

SEQ ID NO: 45985 - DNA, 110 bp, synthetic construct
  source 1..110: mol_type = other DNA
gacacccaggccttcctttgtaaacaaatgttgaaggaggattagattaataacataatagttcgtagctttaaaatccctatagttaattctagggagtctttacttat

SEQ ID NO: 45986 - DNA, 110 bp, synthetic construct
  source 1..110: mol_type = other DNA
ggctctttgtggtcttgattcaatctatctaccctccaacttccctggccctatggtcacataggtttgctctgcagattatcagctcagcctgccataccctgctcaag

SEQ ID NO: 45987 - DNA, 110 bp, synthetic construct
  source 1..110: mol_type = other DNA
tcagtattcagcataacccatgatgtctgaggaacctgttgatgtacaatgagttactcttagcagttagtgtggtggaaactcctgaaatttaagttcccagactccac

SEQ ID NO: 45988 - DNA, 110 bp, synthetic construct
  source 1..110: mol_type = other DNA
actcttagcagttagtgtggtggaaactcctgaaatttaagttcccagactccaccaagagccaaccatgtaagcagggcttcctaaagcagaacggttatgttagtctc

SEQ ID NO: 45989 - DNA, 110 bp, synthetic construct
  source 1..110: mol_type = other DNA
attttctctgtaaggattctatccctacccattatcagggacttgcagctcccctccctgaggagaagtataatttcccaacacatttccatgcttggctttgagacatg

SEQ ID NO: 45990 - DNA, 110 bp, synthetic construct
  source 1..110: mol_type = other DNA
ccctgaggagaagtataatttcccaacacatttccatgcttggctttgagacatgattggccaatggaatatgagcagaaacaataatgtgctacatttgaacagaaatt

SEQ ID NO: 45991 - DNA, 110 bp, synthetic construct
  source 1..110: mol_type = other DNA
aattataataatttaggatgaggctggagatatccaagccattttgtcactttgcctgtgtactcatctgctaagattgggatggcactgaatgtgtaatgcagtagggt

SEQ ID NO: 45992 - DNA, 110 bp, synthetic construct
  source 1..110: mol_type = other DNA
ctgtgtactcatctgctaagattgggatggcactgaatgtgtaatgcagtagggtccagcattcattctgccaggcatcgcaaagaagaacttcaggcaggacatgtatg

SEQ ID NO: 45993 - DNA, 110 bp, synthetic construct
  source 1..110: mol_type = other DNA
tttcctgagcttcggttttctctgaaaaacgagggcatgtgtctcttaaaagactttttttgtttctttttcttttttgattcttgattccctgagggactcatcagaat

SEQ ID NO: 45994 - DNA, 110 bp, synthetic construct
  source 1..110: mol_type = other DNA
tgaccaacattgaagttcacttttttctttgatgctttaaaaacagctcaagatttttaacctgttagaagttgctgaccagcataattcacaggaaattaaatgctatt

SEQ ID NO: 45995 - DNA, 110 bp, synthetic construct
  source 1..110: mol_type = other DNA
gaagagtctgctactcaccacatggtgacaaaagggggtcattaagggcctcaagaatagctttgatggagtggagaatgtaaaaaccagattgtgtggggttgggagtg

SEQ ID NO: 45996 - DNA, 110 bp, synthetic construct
  source 1..110: mol_type = other DNA
aatagctttgatggagtggagaatgtaaaaaccagattgtgtggggttgggagtggttggaaaggcagagaacatagccaacaaaagtagattcttctttcagaagtttg

SEQ ID NO: 45997 - DNA, 110 bp, synthetic construct
  source 1..110: mol_type = other DNA
tgtattcccattacactaatggcaagtgtatttttggctttagattgaatgtgtactcttcttcttcttccctgtgagacagaccatcagctcagaatcatcaaaacaac

SEQ ID NO: 45998 - DNA, 110 bp, synthetic construct
  source 1..110: mol_type = other DNA
ctcttcttcttcttccctgtgagacagaccatcagctcagaatcatcaaaacaacaaacccaggggctccatcatctcctgccaagttgacacctgagttatttttcagt

SEQ ID NO: 45999 - DNA, 110 bp, synthetic construct
  source 1..110: mol_type = other DNA
gcaggtgcggctctaaaaaagacaaataaataaataaaataattttataaaagggtgccatggtaataaaactcaggggcacaagtccaaactgggtgttcggaaaagtt

SEQ ID NO: 46000 - DNA, 110 bp, synthetic construct
  source 1..110: mol_type = other DNA
tgccatggtaataaaactcaggggcacaagtccaaactgggtgttcggaaaagttcctgaacaaagccaaatgaaggtaagttttgaaggacaattaacattaaatatcc

SEQ ID NO: 46001 - DNA, 110 bp, synthetic construct
  source 1..110: mol_type = other DNA
actcatttggaggcagagaaattttctggagtttggcatagcatttctaatgggttgcatcaggatggctgccaatctctttatccttctcagtacaattcatatagtca

SEQ ID NO: 46002 - DNA, 110 bp, synthetic construct
  source 1..110: mol_type = other DNA
tatttcctgcagcatcaactcaatacatctggtcacaatttgttgaaagaaattgaatttttgctattaaatggatacatctttctcaggtgctctacaccttaggcaat

SEQ ID NO: 46003 - DNA, 110 bp, synthetic construct
  source 1..110: mol_type = other DNA
actggaaagatggagaggggttaggccttaggtgcagatttgtcttaggtggctttggacccttggatgatgaatttaaatgcgcacccttgtgagagactgcatcatcc

SEQ ID NO: 46004 - DNA, 110 bp, synthetic construct
  source 1..110: mol_type = other DNA
tggacccttggatgatgaatttaaatgcgcacccttgtgagagactgcatcatccctggaagatacatggttgtgcctcacatgctttggctcgggttttccagaaccct

SEQ ID NO: 46005 - DNA, 110 bp, synthetic construct
  source 1..110: mol_type = other DNA
caatggctccccattacttaggaataaacgattaaagctttaacccagcattcaagcccaacccaccacactcaaccatttgattctgatattttatttcatttaccttc

SEQ ID NO: 46006 - DNA, 110 bp, synthetic construct
  source 1..110: mol_type = other DNA
tcttttttttttttttctttttcagccacacccatgacatatggaagttcctagggccaggaattgaatccaagctggaggtacgacctaggtcactgcaatccttaatc

SEQ ID NO: 46007 - DNA, 110 bp, synthetic construct
  source 1..110: mol_type = other DNA
gccaggaattgaatccaagctggaggtacgacctaggtcactgcaatccttaatccactgagcagagcaggggattgaaccagcacctccatagagacaagccggatcat

SEQ ID NO: 46008 - DNA, 110 bp, synthetic construct
  source 1..110: mol_type = other DNA
catactaagtgcagaaagacaaatgttgcatgatatcacttacatttggagcctaaaaaataatccaaatcaacttatttacaaaaccgagacagattcatagacataga

SEQ ID NO: 46009 - DNA, 110 bp, synthetic construct; identical to SEQ ID NO: 46008
  source 1..110: mol_type = other DNA

SEQ ID NO: 46010 - DNA, 110 bp, synthetic construct
  source 1..110: mol_type = other DNA
ttgagtctttctagggtgaggtctgtcactgctatttctccacatacagataggctgtagtccctgagctgggctgctggctatttatccactagacaagaccactgttc

SEQ ID NO: 46011 - DNA, 110 bp, synthetic construct
  source 1..110: mol_type = other DNA
tgtagtccctgagctgggctgctggctatttatccactagacaagaccactgttcacaaacacaactgtccagtaaacattcaggccccaggagtctaattacttcagat

SEQ ID NO: 46012 - DNA, 110 bp, synthetic construct
  source 1..110: mol_type = other DNA
agccacgatggaaaacagtatgcaggtttctctaaaaactaaaaacagagttgccacatgatcctgaatcccactcctgggcatctatctgacaaaaccataattcgaaa

SEQ ID NO: 46013 - DNA, 110 bp, synthetic construct
  source 1..110: mol_type = other DNA
aaactaaaaacagagttgccacatgatcctgaatcccactcctgggcatctatctgacaaaaccataattcgaaaagatacatccacttccaatgtttattgcaccacta

SEQ ID NO: 46014 - DNA, 110 bp, synthetic construct
  source 1..110: mol_type = other DNA
agcatttcttaacataaaaatgcatagatgcacattatggtacttattagcacattttttccaactggaccctgaattaaaacttacttgctttgttgacttctttgtgc

SEQ ID NO: 46015 - DNA, 110 bp, synthetic construct
  source 1..110: mol_type = other DNA
tttggccaccccacagcatatggagttccctggccagggttcatacccaacctatgccacagatgcagcaaccagcaaccacggatcctttaatgcactgagaccagcta

SEQ ID NO: 46016 - DNA, 110 bp, synthetic construct
  source 1..110: mol_type = other DNA
gccacagatgcagcaaccagcaaccacggatcctttaatgcactgagaccagctagggattgaacctgtgtcccagaactgtacagatgctgccacagcaggtaaaccaa

SEQ ID NO: 46017 - DNA, 110 bp, synthetic construct
  source 1..110: mol_type = other DNA
ttctcagtctgtacttggcatcactagtcttatgcacagaggaggaggcatcaattttgataaattgagatgagtacaatttcatcaaagttttctactttttaagtgtg

SEQ ID NO: 46018 - DNA, 110 bp, synthetic construct
  source 1..110: mol_type = other DNA
tctgttatttggtgttgtctgtggctaagcaccttggttttattctctgtcgatgtctcattctccagtaagctaacacagcttctttacatggcagtctcagggcattg

SEQ ID NO: 46019 - DNA, 110 bp, synthetic construct
  source 1..110: mol_type = other DNA
agaaaacaaacctgttgaagttttgatttcagacttctagcctccagaattgtgaggaaatagatttctgttgtttaaaccactcagtcagtgacactttgttatggtgg

SEQ ID NO: 46020 - DNA, 110 bp, synthetic construct
  source 1..110: mol_type = other DNA
ggaaatagatttctgttgtttaaaccactcagtcagtgacactttgttatggtggccctggtaaactaatgcagtactagtccttgttgtgtgtcttccatgtacgaggc

SEQ ID NO: 46021 - DNA, 110 bp, synthetic construct
  source 1..110: mol_type = other DNA
gcaccgcccccttttctcgccacccgtctttgtgggagccattttcccaggccttggttgctaagcacctctgggctttgtgattcatccatactctgtattcacagttc

SEQ ID NO: 46022 - DNA, 110 bp, synthetic construct
  source 1..110: mol_type = other DNA
atttggatgattatgggagattttccaattttacttgttttctccttaattcctcgagtatcagccaggcaaccactgtcctttattgtttgtgatttccttacctggct

SEQ ID NO: 46023 - DNA, 110 bp, synthetic construct
  source 1..110: mol_type = other DNA
catcaccatgctaaatatttgatctcgagcacttactcatcttttaattgaaaatttgtactctttgactgacattccattttccaccctacccagcccctggaaaaatc

SEQ ID NO: 46024 - DNA, 110 bp, synthetic construct
  source 1..110: mol_type = other DNA
tgctgggccgaataaaaggagatttgaatatgaaaatgacctaaaagaatgtttaattaattgagggagacttgtcttcaacatataatgtttggaatttgactgataga

SEQ ID NO: 46025 - DNA, 110 bp, synthetic construct
  source 1..110: mol_type = other DNA
aatgaccatgtaaagctaataatagatttcagatttccgtctggagagcacatggcacacatgaaaagaagcattattaactaaacaaatttctcagttcctaatgatta

SEQ ID NO: 46026 - DNA, 110 bp, synthetic construct
  source 1..110: mol_type = other DNA
gagcacatggcacacatgaaaagaagcattattaactaaacaaatttctcagttcctaatgattagcattttgacaagctgttgtctaagacgaaggatttagatcatat

SEQ ID NO: 46027 - DNA, 110 bp, synthetic construct; identical to SEQ ID NO: 46025
  source 1..110: mol_type = other DNA

SEQ ID NO: 46028 - DNA, 110 bp, synthetic construct; identical to SEQ ID NO: 46026
  source 1..110: mol_type = other DNA

SEQ ID NO: 46029 - DNA, 110 bp, synthetic construct
  source 1..110: mol_type = other DNA
atgagtaatgagactgtgctcataatcacgcacctgcttcatgaatctatccctcaatttctattcttggactcatcatgtttcttattacctcttgtctaaaacattgc

SEQ ID NO: 46030 - DNA, 110 bp, synthetic construct
  source 1..110: mol_type = other DNA
cagaacatggtatccaacatgtagatggatgatttaatgccccaaatttaaagtcccaaaccttctagtgaaattaaatattcactctgagcttctttaactctgttctc

SEQ ID NO: 46031 - DNA, 110 bp, synthetic construct
  source 1..110: mol_type = other DNA
ccatgctgagttacccccaagcatggacaccaccattaccttgcctgggatctgatacccaactccaggccacctctccactaaaggtatggctgccatctcactgggct

SEQ ID NO: 46032 - DNA, 110 bp, synthetic construct
  source 1..110: mol_type = other DNA
cctgggaactatcgtatgctgtgggtgtggccctaaaaagtcacctccccccaaaaaatgcatgtgttaaagtatttagggagcaaactatgacagcattttattccatg

SEQ ID NO: 46033 - DNA, 110 bp, synthetic construct
  source 1..110: mol_type = other DNA
aaatgcatgtgttaaagtatttagggagcaaactatgacagcattttattccatggcactttttttcccgaaagctcaaaaattacattttcaaactttctcctctagtt

SEQ ID NO: 46034 - DNA, 110 bp, synthetic construct
  source 1..110: mol_type = other DNA
aagtcccctttgtctccttccctaatctttctgttaagctgcctgcctcatttagtatcatactcagatactggtttttgtaattgccagatggttgctctcttgttttt

SEQ ID NO: 46035 - DNA, 110 bp, synthetic construct
  source 1..110: mol_type = other DNA
aatcggacttgtcattttggtagcatggatttctagccccataggaagcattaatgaaagcagaaccagctactaatttgtcttaatgactgaaaaatgagaagagaatt

SEQ ID NO: 46036 - DNA, 110 bp, synthetic construct
  source 1..110: mol_type = other DNA
ttcacttttcaatatttttttcccttattttcctgtttctaattatcccccatcctttgctcccactcatccttcagtctacttgggtccaactcgttcctctgctgcca

SEQ ID NO: 46037 - DNA, 110 bp, synthetic construct
  source 1..110: mol_type = other DNA
tgagctactttgctccaaaaccaaaattgattataaggcccagtttgtgtacctgcagatttatataaaggtcaagctgctagtgcaaccccttggcttgtgctctgaag

SEQ ID NO: 46038 - DNA, 110 bp, synthetic construct
  source 1..110: mol_type = other DNA
tcaatcagagaagcaggactagtaggaggtatataccacgagatatattgcaaggccctgaccccctatcattgtgaggactgtctaggcaaggctgaaattcgtagggc

SEQ ID NO: 46039 - DNA, 110 bp, synthetic construct
  source 1..110: mol_type = other DNA
ccctgaccccctatcattgtgaggactgtctaggcaaggctgaaattcgtagggcaggctgtcgggaggagcaggtttaaactctttggcagggactgaaacagccattc

SEQ ID NO: 46040 - DNA, 110 bp, synthetic construct
  source 1..110: mol_type = other DNA
agaatgcatgacactgtatgtgacctcccagagtttacagtctagttgaacaagtgagacacatacacataacaaaagagctagcaatacacacccctgtgtattaagtg

SEQ ID NO: 46041 - DNA, 110 bp, synthetic construct
  source 1..110: mol_type = other DNA
cgcagtgacaaccagcagagagaattcagccactgccacataagagcaaggcctctgtccttctcctgtatcctccttcccaacgaagtgcatgaacgaggtagagcttg

SEQ ID NO: 46042 - DNA, 110 bp, synthetic construct
  source 1..110: mol_type = other DNA
tcttggagcgtcttcccaggggttggggctggcatgcagctgcagctttccctggagacacagacactggtgtcagacatactggggaacattgaaacacatgaacacta

SEQ ID NO: 46043 - DNA, 110 bp, synthetic construct
  source 1..110: mol_type = other DNA
agtaggcaaaagatgctgaaaaattttctcctaatgatacgaaccaaaaactattagagctgagattcaagctcaggcagttcaaagccaaagtttgcaattttaacctc

SEQ ID NO: 46044 - DNA, 110 bp, synthetic construct
  source 1..110: mol_type = other DNA
agaggagaacctaaaaaatacaaaaagtcattgtgttaatactgattcgtttccaaattaccactaagtaaaaaatcaatttgtccttaggaaagtttctatccaaagcc

SEQ ID NO: 46045 - DNA, 110 bp, synthetic construct; identical to SEQ ID NO: 46044
  source 1..110: mol_type = other DNA

SEQ ID NO: 46046 - DNA, 110 bp, synthetic construct
  source 1..110: mol_type = other DNA
aatacaacccaattttagaatggcatctaaggtacacctacatggctcgtgtttttgagtataataaatcatacatgtcatatcccttgaactgtgaatatgtgttctat

SEQ ID NO: 46047 - DNA, 110 bp, synthetic construct
  source 1..110: mol_type = other DNA
acctacatggctcgtgtttttgagtataataaatcatacatgtcatatcccttgaactgtgaatatgtgttctattgtcacttgaacaaacgattgttttcagttttaac

SEQ ID NO: 46048 - DNA, 110 bp, synthetic construct
  source 1..110: mol_type = other DNA
tatattgagattcagaatatttcccataccctggtgtcttagcttggactgctatataaactaccagaattcctatcatggcatggtggaaacaaatccaactattatcc

SEQ ID NO: 46049 - DNA, 110 bp, synthetic construct
  source 1..110: mol_type = other DNA
tgattccttagggcgtaagcaatacctatgtctcttcttgaaatagctgtgtcgtcttgtcaaacttaatacagttttggtatttcggccctgacagcctgtcttccctc

SEQ ID NO: 46050 - DNA, 110 bp, synthetic construct
  source 1..110: mol_type = other DNA
gcaggccaaatcccattaaagtgaacagaaatttgatttgtggtgatatttgtaaaaacagaatgtgatatatctctctaaccaatctgttatcaatggaattattctct

SEQ ID NO: 46051 - DNA, 110 bp, synthetic construct
  source 1..110: mol_type = other DNA
tgactgcgtcttagcccaagataaaaccaagatgaggagatttaaattgaaaagtaaaaagatttttattggtgttcccactatagctcagtggtagtgaaccctactag

SEQ ID NO: 46052 - DNA, 110 bp, synthetic construct
  source 1..110: mol_type = other DNA
ccaagataaaaccaagatgaggagatttaaattgaaaagtaaaaagatttttattggtgttcccactatagctcagtggtagtgaaccctactagtatccatgaggacat

SEQ ID NO: 46053 - DNA, 110 bp, synthetic construct
  source 1..110: mol_type = other DNA
ctgagtgcccaaattactcagcaatgtctttctattctggctgggtgagccctaaatagagttatttgtcaagtttcatccttttgcatatggctgtccagtttttccaa

SEQ ID NO: 46054 - DNA, 110 bp, synthetic construct
  source 1..110: mol_type = other DNA
tcctttagaaccttgtatatactgttattatagcatttattatgtctgagtcttctgttggactgaggccttttaagtcaggagttgcatttttttgtatctagcacata

SEQ ID NO: 46055 - DNA, 110 bp, synthetic construct
  source 1..110: mol_type = other DNA
tgttggactgaggccttttaagtcaggagttgcatttttttgtatctagcacataacctagcacatgataagtattcaataaatattaaattaaggaatggaaatgtaca

SEQ ID NO: 46056 - DNA, 110 bp, synthetic construct; identical to SEQ ID NO: 46054
  source 1..110: mol_type = other DNA

SEQ ID NO: 46057 - DNA, 110 bp, synthetic construct; identical to SEQ ID NO: 46055
  source 1..110: mol_type = other DNA

SEQ ID NO: 46058 - DNA, 110 bp, synthetic construct
  source 1..110: mol_type = other DNA
ccccagaaacccagaaattagtttccctggtggtcctctctgatttcctctggcatggtcttctatatttaaatttcaactccaataatctgcccatcaaagaatcaaga

SEQ ID NO: 46059 - DNA, 110 bp, synthetic construct
  source 1..110: mol_type = other DNA
tggtcttctatatttaaatttcaactccaataatctgcccatcaaagaatcaagaggtttgcaaggagaagaaacagcacatgcaaagtcactgtgcaagaatctatgct

SEQ ID NO: 46060 - DNA, 110 bp, synthetic construct
  source 1..110: mol_type = other DNA
ccatggcactgaatgccttctcccatccttaatgaaatgaaagtgaatcagaacaaactactctcttccagcctgttccccatactcggcttgttggtcaagggcaagca

SEQ ID NO: 46061 - DNA, 110 bp, synthetic construct
  source 1..110: mol_type = other DNA
aactactctcttccagcctgttccccatactcggcttgttggtcaagggcaagcagagacttcatttgtcagtttctagcttgctcgaagtgggaacctagcgtgtgcta

SEQ ID NO: 46062 - DNA, 110 bp, synthetic construct
  source 1..110: mol_type = other DNA
cccacagaggctacctctttaaagccttttcagttgtttctcttgatagttacctacgtattccaaataaattcctcatactcctacctctcatttcagatttagacata

SEQ ID NO: 46063 - DNA, 110 bp, synthetic construct
  source 1..110: mol_type = other DNA
acgtattccaaataaattcctcatactcctacctctcatttcagatttagacatagttctggagaaggattttgtcagtggcattttgtatgtcaggtcagctttccttt

SEQ ID NO: 46064 - DNA, 110 bp, synthetic construct
  source 1..110: mol_type = other DNA
aagatgaacattgaagtgtgcgccaagtcctttgtctagtagctggcacgtgggaagtacccagtaaatgctagccatttccccatgtgagatgaaatgttctggaagat

SEQ ID NO: 46065 - DNA, 110 bp, synthetic construct
  source 1..110: mol_type = other DNA
acatgtccctacatattcagccaactgtgggagtgcaatagaaaccttcttttcattctctctaaacccaagaagcctagtttggggcaagagctggagatgtccccgaa

SEQ ID NO: 46066 - DNA, 110 bp, synthetic construct
  source 1..110: mol_type = other DNA
caggcattgatattgtccctggggatgtggaagggtgtagacccaaatgcctgtgctcttggagcttacattggtgggagatagaagataatcagcaagtaaacaaataa

SEQ ID NO: 46067 - DNA, 110 bp, synthetic construct
  source 1..110: mol_type = other DNA
ctcttggagcttacattggtgggagatagaagataatcagcaagtaaacaaataaatgcaccagataattttagagactgaaatgatatgaggaaaataaaaaatagaaa

SEQ ID NO: 46068 - DNA, 110 bp, synthetic construct
  source 1..110: mol_type = other DNA
ggcttctcttaaactctgtgactaagtcatttgaccttctgagcttcagtttcctcacctctaaagtatgaatgaaatggctaccccataagatttttgttataaactta

SEQ ID NO: 46069 - DNA, 110 bp, synthetic construct
  source 1..110: mol_type = other DNA
cacctctaaagtatgaatgaaatggctaccccataagatttttgttataaacttaataaatggcaactcttatcatccttaggactgcttaagcagtgaaatactctatt

SEQ ID NO: 46070 - DNA, 110 bp, synthetic construct
  source 1..110: mol_type = other DNA
attactgacacctgagcgtgaattaaagccgtggcaccaaactcctgcagttatgagagacgtcacagctgcaggcttcctttttaaaaatgccagttgcatttgcgaat

SEQ ID NO: 46071 - DNA, 110 bp, synthetic construct
  source 1..110: mol_type = other DNA
acatggcttggatcctgtgttgccagggctgtggtgtagaccgacagctacagctctaaatcgacccctaggccaggaatttccatgtgctgagggtgcgaccctgaaaa

SEQ ID NO: 46072 - DNA, 110 bp, synthetic construct; identical to SEQ ID NO: 46071
  source 1..110: mol_type = other DNA

SEQ ID NO: 46073 - DNA, 110 bp, synthetic construct
  source 1..110: mol_type = other DNA
ggaaacaaaacacatttgtagaagatgacggcacatgtacaaatgatcgcagcgtaaaatttagtaaatctaggaatgctcttggctggattcataatctgaagatatga

SEQ ID NO: 46074 - DNA, 110 bp, synthetic construct
  source 1..110: mol_type = other DNA
gtggtacaagtgtataaatgtttgtcctgagacaggaagttcactctcaaggctaagttcccaagatgccagcagaatatccagagccaagggggtacgagatgcagcac

SEQ ID NO: 46075 - DNA, 110 bp, synthetic construct
  source 1..110: mol_type = other DNA
aatatctttctaactcacctttgctgcttaaaaaaaaaaacaaaacccaccaaaactcttaaaactgatcagactcctgcaaaataaaatacttacactaactcttccgc

SEQ ID NO: 46076 - DNA, 110 bp, synthetic construct
  source 1..110: mol_type = other DNA
acaggaagacaaggtaatcactggcagggtagcagatggggttatgtgaactcgcgaatgaactgtactgcttgactttttatcccagctctatcacctcaagaaaatgc

SEQ ID NO: 46077 - DNA, 110 bp, synthetic construct
  source 1..110: mol_type = other DNA
ctgcactccacaggacctctttgctaaggaagctaaaatttgtgtacaaatacgtacaacctgcattactaggaatgagaagaaacacaacttaattcactcttacttat

SEQ ID NO: 46078 - DNA, 110 bp, synthetic construct
  source 1..110: mol_type = other DNA
cttgtgaatcagtgtactttactgcaattaattcttccacatcccaatattctcacgttatacataggacacctgagactcagtgcctctctccttttcatacctgttgg

SEQ ID NO: 46079 - DNA, 110 bp, synthetic construct
  source 1..110: mol_type = other DNA
cgttatacataggacacctgagactcagtgcctctctccttttcatacctgttggccctctggctctttaaaggtgctatatttaaggaaacgtggaaaatattgtcact

SEQ ID NO: 46080 - DNA, 110 bp, synthetic construct
  source 1..110: mol_type = other DNA
tgaaggcttctctagctgctctgggccacatctattcttccaacccattctacaccatttaatgagtaaatatacatttgacacaatatgtatatcagtgtatactgcca

SEQ ID NO: 46081 - DNA, 110 bp, synthetic construct
  source 1..110: mol_type = other DNA
cactaagatttaaatgactggaatgaaccaatgccaaacagaatgacatacacaaccgccatcactgcacatgccgaagacatgcccaggctgctgttattttggttctc

SEQ ID NO: 46082 - DNA, 110 bp, synthetic construct
  source 1..110: mol_type = other DNA
ccgccatcactgcacatgccgaagacatgcccaggctgctgttattttggttctcacacaccttagacaaaaatgttcatctggaaatccggactatccactctcttttg

SEQ ID NO: 46083 - DNA, 110 bp, synthetic construct
  source 1..110: mol_type = other DNA
gagtgatgggttcatttctgaactatcaccaaaaggaagtctttcaagaggacttggcaatacagaacattttatagtagtccttactgaggagaggtagcccctaaaag

SEQ ID NO: 46084 - DNA, 110 bp, synthetic construct
  source 1..110: mol_type = other DNA
gccctaaaaagaccaaaaaaaaaaaaaaaactctgagcttctgaccacttccctaaatgccttccaaaataaaagtcaaacctttggtctggcattcaaaatcccacatc

SEQ ID NO: 46085 - DNA, 110 bp, synthetic construct
  source 1..110: mol_type = other DNA
gaaggaaaactgtacagcaaccatgatggagacagggaaggaagttctaagagtgtcagtcaagctgagggagagcttgagtcacctctcataggagtcacatgtctcat

SEQ ID NO: 46086 - DNA, 110 bp, synthetic construct
  source 1..110: mol_type = other DNA
tcagtcaagctgagggagagcttgagtcacctctcataggagtcacatgtctcatagaaatgggcctgcctcagtatccctgtgtcacttagtcactggctgaaggcagc

SEQ ID NO: 46087 - DNA, 110 bp, synthetic construct
  source 1..110: mol_type = other DNA
tgatcaaaagcaatttaatagcaattaattttgtgtcatttccaaagctccagttgaaaatgtccttgttgtaataaaattcctttgcttctttacccagcattttagct

SEQ ID NO: 46088 - DNA, 110 bp, synthetic construct; identical to SEQ ID NO: 46087
  source 1..110: mol_type = other DNA

SEQ ID NO: 46089 - DNA, 110 bp, synthetic construct
  source 1..110: mol_type = other DNA
gctatcttgctgtgccttatccttgactaaagccctccatgatgcactctctggagtctggttcacagaacctcctgcatactctttcttgggaagctgaaagaggtgct

SEQ ID NO: 46090 - DNA, 110 bp, synthetic construct
  source 1..110: mol_type = other DNA
gtctggttcacagaacctcctgcatactctttcttgggaagctgaaagaggtgctcattcaacaggagagggcaagtcaagacagagagaaatgtgggacccagggcatc

SEQ ID NO: 46091 - DNA, 110 bp, synthetic construct; identical to SEQ ID NO: 46089
  source 1..110: mol_type = other DNA

SEQ ID NO: 46092 - DNA, 110 bp, synthetic construct; identical to SEQ ID NO: 46090
  source 1..110: mol_type = other DNA

SEQ ID NO: 46093 - DNA, 110 bp, synthetic construct
  source 1..110: mol_type = other DNA
actaaggagccattatgaaaaagaaatagccgtgtttgaagttttgaatcatacagttttcagatttcggccttatccataagtagatctaattcactcagtctacagat

SEQ ID NO: 46094 - DNA, 110 bp, synthetic construct
  source 1..110: mol_type = other DNA
gttttcagatttcggccttatccataagtagatctaattcactcagtctacagattagactgaggttgagagaaattcaacagtttgacgggatcggggtgtaagttgca

SEQ ID NO: 46095 - DNA, 110 bp, synthetic construct
  source 1..110: mol_type = other DNA
tgagaaacaattttgcctagacgtctgaacagtgcctgatccccaattaaaaatgaagctcagtccctgcaactgggtcctgtcccaccaaagggagaaggagtgagaag

SEQ ID NO: 46096 - DNA, 110 bp, synthetic construct
  source 1..110: mol_type = other DNA
aagctcagtccctgcaactgggtcctgtcccaccaaagggagaaggagtgagaaggggacctgggatgccttctatttagcaaaccatttcccatgattccacaattggc

SEQ ID NO: 46097 - DNA, 110 bp, synthetic construct
  source 1..110: mol_type = other DNA
taaatgacaaagaagcaaacacaacccctgccttcacagagcttacacactggccgaggaaacaagagatcttagtgggcaaatacaggtgctgtggggacaaagaaggg

SEQ ID NO: 46098 - DNA, 110 bp, synthetic construct
  source 1..110: mol_type = other DNA
gactgttctttggccgaagacccaaattgtgaacaaacaactacccttaattatagataacttcagatcagtgcaaatgctctgaaaatcagctaataaacaacagcctc

SEQ ID NO: 46099 - DNA, 110 bp, synthetic construct
  source 1..110: mol_type = other DNA
gataacttcagatcagtgcaaatgctctgaaaatcagctaataaacaacagcctcactctgtttctgaaagctggcgaattaatgaaagcacttggcttctgaaaaccag

SEQ ID NO: 46100 - DNA, 110 bp, synthetic construct
  source 1..110: mol_type = other DNA
gaagtttaatactaagtaacatttgtggcttccttactgctgaaataaaattacgttaatagacttaattcttctccttttcctctgcccctgctttttgcctttcttga

SEQ ID NO: 46101 - DNA, 110 bp, synthetic construct
  source 1..110: mol_type = other DNA
caccttgtccgccaatgggactcttcctcattggccatcgtgacaaccgtatcaccccccagcaagtccaacatgacagctggcaaacaagaggcattctttgccaaaag

SEQ ID NO: 46102 - DNA, 110 bp, synthetic construct
  source 1..110: mol_type = other DNA
aggggaagagacacgccatctccaggcagctgtcaggaaccaggcactgcagttcggaggcaaaggaagctggggtgatggcatgttattaaagtagtttcaaattaact

SEQ ID NO: 46103 - DNA, 110 bp, synthetic construct
  source 1..110: mol_type = other DNA
ggaggcaaaggaagctggggtgatggcatgttattaaagtagtttcaaattaactaggacttctgtacacccctctgagggctctgaggacagaagcagacacgggggtg

SEQ ID NO: 46104 - DNA, 110 bp, synthetic construct
  source 1..110: mol_type = other DNA
gaacggaaactgtcttgctaatctgcctttgaggcacagagcggcccctcggtattagctgtggttctgtctatgattcatcctgacaagctgctgcgcctgctctgttc

SEQ ID NO: 46105 - DNA, 110 bp, synthetic construct
  source 1..110: mol_type = other DNA
gactctttctcagcatcctggagctctgccccctagatatccgtggcacaacattttccctggttgaaacaaccaaaagcgtctccagatatggccaaatcacatttact

SEQ ID NO: 46106 - DNA, 110 bp, synthetic construct
  source 1..110: mol_type = other DNA
gtgagaaaatagatgtctgtcacttcagccacccagtcttttgttatgacagcctgagcagaggaatccagtggggaaaagcgaaaaggttcatcacagtagaaagaaag

SEQ ID NO: 46107 - DNA, 110 bp, synthetic construct
  source 1..110: mol_type = other DNA
gagcagaggaatccagtggggaaaagcgaaaaggttcatcacagtagaaagaaagcagagatgagagaaaaaggcgggcctggaggcagaagaagttcagttcttttctc

SEQ ID NO: 46108 - DNA, 110 bp, synthetic construct
  source 1..110: mol_type = other DNA
gtatctgatcaacctcgagaaacacagcacggcacgtgtaataacttttgaagctaaccattactaatttgctgattaccagctgccattaagtgacttgtaaaaaaaaa

SEQ ID NO: 46109 - DNA, 110 bp, synthetic construct
  source 1..110: mol_type = other DNA
cggccgtgcctccaaaactaactgatgaaattaaatgggctgctttcagcatcggctgaagggtttcatgaagctatttgcccgaaaaccccctgctggggttgttggtg

SEQ ID NO: 46110 - DNA, 110 bp, synthetic construct
  source 1..110: mol_type = other DNA
ctgaagggtttcatgaagctatttgcccgaaaaccccctgctggggttgttggtggaagcatgaaaacctctgttgcaagggtggtgacggagagcccagacgatggcat

SEQ ID NO: 46111 - DNA, 110 bp, synthetic construct
  source 1..110: mol_type = other DNA
aacatactatcacaatctcagaaattaaaacagtgtggtactggccttaggaattcagctcgatggtccagaaatagatcctattaaacgtaaaactttcgtaagtgatg

SEQ ID NO: 46112 - DNA, 110 bp, synthetic construct
  source 1..110: mol_type = other DNA
aacttttctttctttctttttttttaagggctgaaccagtggcatatcaaagttcccaggctagattttgaatcagagtcacggctgcctgcctacaccacagccatagc

SEQ ID NO: 46113 - DNA, 110 bp, synthetic construct; identical to SEQ ID NO: 46112
  source 1..110: mol_type = other DNA

SEQ ID NO: 46114 - DNA, 110 bp, synthetic construct
  source 1..110: mol_type = other DNA
ggtgagctctatgattgccccagcttatttcctagtttccagggaggagaaacttaagagaggcctaatgatgtcctgaatcaaggagctgagagtctgggaaggccaag

SEQ ID NO: 46115 - DNA, 110 bp, synthetic construct
  source 1..110: mol_type = other DNA
gaagcatcttgtgagaccagaatacactggaaatgttcctattgtagagtggctgcatctacatgaagaaatcacttaagacgtatgctagaagattccttctgtgtgtt

SEQ ID NO: 46116 - DNA, 110 bp, synthetic construct
  source 1..110: mol_type = other DNA
gcattttggagcaaaaacactgtgaatagattgtttttaatgaggtatttataagtacttaatttgcatcctccaaaattttacaagtctcaccaaatgtctcaggaaag

SEQ ID NO: 46117 - DNA, 110 bp, synthetic construct
  source 1..110: mol_type = other DNA
tacttaatttgcatcctccaaaattttacaagtctcaccaaatgtctcaggaaagaagactaactataagaaagatccctcacacaagataccacctcacaccagtcaga

SEQ ID NO: 46118 - DNA, 110 bp, synthetic construct
  source 1..110: mol_type = other DNA
ttattgctacctagctgacactataactgagtcttcaaaaagctattccaccactctctgaagactactgactcaagatgataggaatcatggtgagaacagtggtaaga

SEQ ID NO: 46119 - DNA, 110 bp, synthetic construct
  source 1..110: mol_type = other DNA
cttcattcaacctgaatggaaaaccaaaagtagcttgtaatcattttattgtcaagaatttcaggaggacaagtcacttgaatttctgttttgttcttaaaacctccaca

SEQ ID NO: 46120 - DNA, 110 bp, synthetic construct
  source 1..110: mol_type = other DNA
ctctgccctagtccatcctctctcttagaccactgacaggatgtcttaactggcctcccatgtttaattcagttccttaccaatccgtttgatcatgtcacctccttgct

SEQ ID NO: 46121 - DNA, 110 bp, synthetic construct
  source 1..110: mol_type = other DNA
acgaatagaaatgttttgcttttaaatctgatgttatttatgacaccacattgcctcaaactggaacttacagtgactgatggagacatcaaaatatattgccatcatgt

SEQ ID NO: 46122 - DNA, 110 bp, synthetic construct
  source 1..110: mol_type = other DNA
tcaaactggaacttacagtgactgatggagacatcaaaatatattgccatcatgtcagtcaagcgctgaggaaacctgaagctgtgtgactcaggctcgtgtcttattca

SEQ ID NO: 46123 - DNA, 110 bp, synthetic construct
  source 1..110: mol_type = other DNA
cctgggaacctccctgtgccacggtgcggccctaaggcaaaaaaaaaaaagagttggaaaataaagttgttgacgaactcactctgaaagtacatttgaccttgaacaac

SEQ ID NO: 46124 - DNA, 110 bp, synthetic construct; identical to SEQ ID NO: 46123
  source 1..110: mol_type = other DNA

SEQ ID NO: 46125 - DNA, 110 bp, synthetic construct
  source 1..110: mol_type = other DNA
aacctaagatatttgagccacctggatgatgcttattgttccttgtgtttctggggtttctggggcgtccgcgtgctctaatcccctctcatcactgtactgagaaaagt

SEQ ID NO: 46126 - DNA, 110 bp, synthetic construct
  source 1..110: mol_type = other DNA
tgcctgcaaacccggtccctggaatgacgagaggataataaaagccgcaagtgttgccagcacaggccttttgaactcatgcagagtttccatggaagtgggccttaggg

SEQ ID NO: 46127 - DNA, 110 bp, synthetic construct
  source 1..110: mol_type = other DNA
gccagcacaggccttttgaactcatgcagagtttccatggaagtgggccttagggtggatggatttgttttctcttctccctgagcgacgaggttttcatcctgtgctgg

SEQ ID NO: 46128 - DNA, 110 bp, synthetic construct
  source 1..110: mol_type = other DNA
gccaatggtgggctctccattgggtggcgatggcaggcagcagaggcgtcggcccaggacccaatctggtctttgcaagcccaccttagggaccgtgcccaggagggccg

SEQ ID NO: 46129 - DNA, 110 bp, synthetic construct
  source 1..110: mol_type = other DNA
aggacccaatctggtctttgcaagcccaccttagggaccgtgcccaggagggccgcctggctaacccttcctctgagtttcctcagcgtggaaatcgggcgcccgtggtg

SEQ ID NO: 46130 - DNA, 110 bp, synthetic construct
  source 1..110: mol_type = other DNA
tcttgaaacagtatgttttggaagagagttagatgccacctatggaatgttaatgccatgttgttaaaatgaaaacaggaggccataagatcacaagtgcattccagttg

SEQ ID NO: 46131 - DNA, 110 bp, synthetic construct
  source 1..110: mol_type = other DNA
ccatgttgttaaaatgaaaacaggaggccataagatcacaagtgcattccagttgtacgtgctagatgtatgcataaaacctgtgctggcagtgcccatctctgaattat

SEQ ID NO: 46132 - DNA, 110 bp, synthetic construct
  source 1..110: mol_type = other DNA
tctctgcatttagcacatatttcattctgccaggcaatacagccgtttgtattcctgcctctcttgttggatctagatggggatttttatagttctaagcaagagaagcc

SEQ ID NO: 46133 - DNA, 110 bp, synthetic construct
  source 1..110: mol_type = other DNA
tgcctctcttgttggatctagatggggatttttatagttctaagcaagagaagccagctgggaccagccttaaccgaacagtcatttaccagaacacgcgatgtcttttc

SEQ ID NO: 46134 - DNA, 110 bp, synthetic construct
  source 1..110: mol_type = other DNA
cccatggacttgtgagcctagcctggcggagctgggcgtttaatgtgactctaagactctctttcctgtctctctttgtaggtcacgagtgagacgttagcactcaccct

SEQ ID NO: 46135 - DNA, 110 bp, synthetic construct
  source 1..110: mol_type = other DNA
ctgcacattgtcttttttacttaaccatatatgttagtgatatttcgggagctatgcatagagaattgccctcttattagttacctgacactcccctggatgcatatatc

SEQ ID NO: 46136 - DNA, 110 bp, synthetic construct; identical to SEQ ID NO: 46135
  source 1..110: mol_type = other DNA

SEQ ID NO: 46137 - DNA, 110 bp, synthetic construct
  source 1..110: mol_type = other DNA
aaaattggaatgatacagagaagaaaatacaaaagtagtaacaatttatcttagtatacagctgatctaaatcactcctcacagtgtcggtatagtggtgactttagggc

SEQ ID NO: 46138 - DNA, 110 bp, synthetic construct
  source 1..110: mol_type = other DNA
atacagctgatctaaatcactcctcacagtgtcggtatagtggtgactttagggcaggtttgagggtttttttgagtttggatgcttctgttaccgactgcatgatatgg

SEQ ID NO: 46139 - DNA, 110 bp, synthetic construct
  source 1..110: mol_type = other DNA
actccttcaccaagtctcttaaaggaatagtctcccctcccctccccccagacttttcaatccactaaaaactagtaatagcccccagacttacctaaaacttccctcag

SEQ ID NO: 46140 - DNA, 110 bp, synthetic construct
  source 1..110: mol_type = other DNA
tgtcaaagatcagttggcttaatttttaggggtctgttttagggctctctattttgttgcatcgagctgtctattattttgccagtactacactgttttgattactgtag

SEQ ID NO: 46141 - DNA, 110 bp, synthetic construct
  source 1..110: mol_type = other DNA
ggataattcagtatgttacatgtgcacagtacttaaaacatggtaaattcattctgaacttggttagattcacataaattggagtatagttttctgtgattcgtaaatac

SEQ ID NO: 46142 - DNA, 110 bp, synthetic construct
  source 1..110: mol_type = other DNA
gaacttggttagattcacataaattggagtatagttttctgtgattcgtaaatactcctggaagagaaaattcctgaaatgctgttggcacatgcaacccaggggtgcgt

SEQ ID NO: 46143 - DNA, 110 bp, synthetic construct
  source 1..110: mol_type = other DNA
attttggctcttctaggtcctttgccctttccacgtagattttaaaatcagcttatcactagtttcaataaggcttgtaaagattttgattgggattgtgttgaatctgc

SEQ ID NO: 46144 - DNA, 110 bp, synthetic construct
  source 1..110: mol_type = other DNA
aaggaggctgtttgcaacaaccacttccatcctatttacagaaaggttcccacagtacccacacaggcacagtggttgggacgctttctaaaagctgtgcatgtgccttg

SEQ ID NO: 46145 - DNA, 110 bp, synthetic construct
  source 1..110: mol_type = other DNA
tacccacacaggcacagtggttgggacgctttctaaaagctgtgcatgtgccttggtctcttaaaagacggtactcggagtggaacctatgtgcaaacttaaaaaatgaa

SEQ ID NO: 46146 - DNA, 110 bp, synthetic construct
  source 1..110: mol_type = other DNA
gccccacatctaggcgcacaatttccccctcaagcggttttcgccaagatgcaagaagaggtggcaaggaaggtaggctatctgagctcaagtcccgtctctgggcagat

SEQ ID NO: 46147 - DNA, 110 bp, synthetic construct
  source 1..110: mol_type = other DNA
aagaggtggcaaggaaggtaggctatctgagctcaagtcccgtctctgggcagattcactgcatgaccctgagccaactgagaagactcccggtgccctggtttccagat

SEQ ID NO: 46148 - DNA, 110 bp, synthetic construct
  source 1..110: mol_type = other DNA
aatcttcagcggtaccctttcacctacaccaaactcctcaatcctttcgtaacctggagcctagaacacacatttccatgcttgtctcctcaccccgacactgtgatccc

SEQ ID NO: 46149 - DNA, 110 bp, synthetic construct
  source 1..110: mol_type = other DNA
ggagcctagaacacacatttccatgcttgtctcctcaccccgacactgtgatcccgccccaccttcctctccaaactcattccgaggcaatcggggttgataaaaccatc

SEQ ID NO: 46150 - DNA, 110 bp, synthetic construct
  source 1..110: mol_type = other DNA
ccctcgggatgggatatgcagagaaacccagctcttgcctcctattgctggagtgacaccaaaaatcaccttgaacacagatctcctaccttcactgtaaaggagttcac

SEQ ID NO: 46151 - DNA, 110 bp, synthetic construct
  source 1..110: mol_type = other DNA
ttctccagagcttggctcaagtctatatggtttgccacttcaaggcccttatcagaactcccagccccttttggtgacttgacaggaaaaagaaacgagccagcctcctt

SEQ ID NO: 46152 - DNA, 110 bp, synthetic construct
  source 1..110: mol_type = other DNA
aggaaggagggcaaagggaagtgtcctaacactgttgggaagggtggatcgctattttatctttgcaaaaatgaagtttcttctctacttatttagaactaagcacgcga

SEQ ID NO: 46153 - DNA, 110 bp, synthetic construct
  source 1..110: mol_type = other DNA
tttatctttgcaaaaatgaagtttcttctctacttatttagaactaagcacgcgaggtaccaattctccttcaacaattaccgtgtcatttagagggtatgtcttcacag

SEQ ID NO: 46154 - DNA, 110 bp, synthetic construct; identical to SEQ ID NO: 46152
  source 1..110: mol_type = other DNA

SEQ ID NO: 46155 - DNA, 110 bp, synthetic construct; identical to SEQ ID NO: 46153
  source 1..110: mol_type = other DNA

SEQ ID NO: 46156 - DNA, 110 bp, synthetic construct
  source 1..110: mol_type = other DNA
taaaacatgcagatgcattttacaattagacccaggtgggggctgggtgagacagaacttggaaggaaaaacaagcttcctctccacaaaaccaaaggctcctgctgaag

SEQ ID NO: 46157 - DNA, 110 bp, synthetic construct
  source 1..110: mol_type = other DNA
aacttggaaggaaaaacaagcttcctctccacaaaaccaaaggctcctgctgaagaaagcctgaagtctgaaggagcacatttgtactgttgagaagcttccttcattcc

SEQ ID NO: 46158 - DNA, 110 bp, synthetic construct
  source 1..110: mol_type = other DNA
tcagtcactggctgttctggctgttaccttctcacaactgcagcatgagaggcagcatggcactactgtccatgctgtatgaagagctcgggtcacattcaaactactgc

SEQ ID NO: 46159 - DNA, 110 bp, synthetic construct
  source 1..110: mol_type = other DNA
cccagcaattcccaaaacggaactcatccacctcgctctgaaaaactgcttccccagcagtgttgcagctcaggagctggcattctcattcatacctcccagaaactggg

SEQ ID NO: 46160 - DNA, 110 bp, synthetic construct
  source 1..110: mol_type = other DNA
aactcactgagaggttcaaaagaaaacaacattctctgataacctgtctaccacgatgaagctaaaaacccatttgcaggaatgaacacccccgtccccacaccccccat

SEQ ID NO: 46161 - DNA, 110 bp, synthetic construct
  source 1..110: mol_type = other DNA
caggagttggctgggaatatacttttatctgtcacaaccctaattaaaggaaaaggccttattttgcagctagaaatgtcaacatagtgaattgactaattgtccctttt

SEQ ID NO: 46162 - DNA, 110 bp, synthetic construct
  source 1..110: mol_type = other DNA
gccttattttgcagctagaaatgtcaacatagtgaattgactaattgtccctttttgctgcacaccttctccagtcctgactccaggtcacacagaactgaagttgggag

SEQ ID NO: 46163 - DNA, 110 bp, synthetic construct
  source 1..110: mol_type = other DNA
ggaaatatgggactcctctgacatgtggcctcatgagcctaccactcctttgcgaggattaggcaacacttgagagctgtattctttttaccatcagatagcaccttcac

SEQ ID NO: 46164 - DNA, 110 bp, synthetic construct
  source 1..110: mol_type = other DNA
agtcccccaaaggaaacagtcctcaggaggacactgagtttgcaccgtcttttatgaatgcgtgtatttcacaaagagggagtggagttccacgacagagggccttcgtt

SEQ ID NO: 46165 - DNA, 110 bp, synthetic construct
  source 1..110: mol_type = other DNA
gaatgcgtgtatttcacaaagagggagtggagttccacgacagagggccttcgttgggtgacttgggaacccatacatcccagaagagtcctagcttcgaaatcatttaa

SEQ ID NO: 46166 - DNA, 110 bp, synthetic construct
  source 1..110: mol_type = other DNA
gagacgtgccctgatgcctttaagccagaagcagctgacctccggacttcttgtgataagagtaaaacgcctctccttactctgcccttgtcagtttggtgggtttcgtt

SEQ ID NO: 46167 - DNA, 110 bp, synthetic construct
  source 1..110: mol_type = other DNA
gtttcgaaagttaccttatcagggagaccttccttgatcactcttatttaaatttgcaacttcctggagttcctgtagtggcgcagtggctaaggaatccgactgggaac

SEQ ID NO: 46168 - DNA, 110 bp, synthetic construct
  source 1..110: mol_type = other DNA
aaccagcaggatctctacattaaaaaaggaaaagtactggagttcccactgcgacacactgggttaagaacctgacggcagcagctcaggttatggaggcatgggttcga

SEQ ID NO: 46169 - DNA, 110 bp, synthetic construct
  source 1..110: mol_type = other DNA
gcctgcagggtccaatgcccaccgtctaaacgccagaggaaggaaagcttgaccatcaaagaactgcagggctcacggggtcgccgaaagcaagtgccagaggcggcgag

SEQ ID NO: 46170 - DNA, 110 bp, synthetic construct
  source 1..110: mol_type = other DNA
tcaaagaactgcagggctcacggggtcgccgaaagcaagtgccagaggcggcgagggaagtgaggggaggagggcagagctgtgacaaacacgaaacccgaggttaaaat

SEQ ID NO: 46171 - DNA, 110 bp, synthetic construct
  source 1..110: mol_type = other DNA
ttaaaccaaagtagattaagtaggtttctgcactcggaaacaaaccatcctttggaaaacagcatggggtatggtatgaacagtgaaaactttctaagtggaaaagtagc

SEQ ID NO: 46172 - DNA, 110 bp, synthetic construct
  source 1..110: mol_type = other DNA
aaaacagcatggggtatggtatgaacagtgaaaactttctaagtggaaaagtagcttggagggtgagttgctcttaaaataggtcattcagaagttcccactgtgctaca

SEQ ID NO: 46173 - DNA, 110 bp, synthetic construct
  source 1..110: mol_type = other DNA
ttaaccactgaaccatgatgggaactcccccaaaaatatttttgtttaaatttactagaagttcccttgtggctcagagggttaagaatccaacattgtcactgctgtgg

SEQ ID NO: 46174 - DNA, 110 bp, synthetic construct
  source 1..110: mol_type = other DNA
aatgtgtggtcggaagaactggatagttggttaagagcccttattgtcaacagaaaaaattacattacctaattttttaagagctatacaacaccatttagggcattgtc

SEQ ID NO: 46175 - DNA, 110 bp, synthetic construct
  source 1..110: mol_type = other DNA
aatgccagcagtggctagtatctcctaacctcatctcgggcctaagtaacaggcgcagctaggtgctggggccacgttgctcaatagaagggcatgtctgctacataggg

SEQ ID NO: 46176 - DNA, 110 bp, synthetic construct
  source 1..110: mol_type = other DNA
tctgatcttgagcttcaaacggagtgttttttacttggcctctacttcaccacgcaggtctttcaatagccctgccctgccgtgtcatcactcaggatgaccccaactgg

SEQ ID NO: 46177 - DNA, 110 bp, synthetic construct
  source 1..110: mol_type = other DNA
tggtcccaagtattgtaaagtcatttcgaaggcagtctgcagagtataaggagtttggaatttgtcccgtaaatcctaaaggcttttgtttgacgaagcatctggggcag

SEQ ID NO: 46178 - DNA, 110 bp, synthetic construct
  source 1..110: mol_type = other DNA
tggaatttgtcccgtaaatcctaaaggcttttgtttgacgaagcatctggggcagttagctgaagttagaggccctgcccaaggtcattcaatgatggtgtaaccaaagg

SEQ ID NO: 46179 - DNA, 110 bp, synthetic construct
  source 1..110: mol_type = other DNA
cccgccccagctagtgattgttctgatctccttgtgtgtgtgtgtgtgtgtgtgtgtgtgtgttgggggggtgcacagctgcggcatatggcagttgcaaggaggagaga

SEQ ID NO: 46180 - DNA, 110 bp, synthetic construct
  source 1..110: mol_type = other DNA
gtgtgtgttgggggggtgcacagctgcggcatatggcagttgcaaggaggagagagggattgaacccccagcatagcaggaacccaagccgctgcagtgacagcgctgga

SEQ ID NO: 46181 - DNA, 110 bp, synthetic construct
  source 1..110: mol_type = other DNA
aatagaaaaacattcacccaaattccttacatgtttattgaaaaacctgatctaacagtgctggaaatggatagcagtgagataggtacaaccagttatccatatggaag

SEQ ID NO: 46182 - DNA, 110 bp, synthetic construct
  source 1..110: mol_type = other DNA
ttttatggtgggcagagggtgatatagagtgacaaaatcagtgctgaaggttacattttaaaagaaattcgtgcagaagtcttataagtctccaaggctttgaggttgta

SEQ ID NO: 46183 - DNA, 110 bp, synthetic construct
  source 1..110: mol_type = other DNA
gtctgctcattatggcagagcttcccaacgagagggaaagggttctgcagaaatctgagtttctatcctccaacggtacctaccccacacaacatgggttatatcacgga

SEQ ID NO: 46184 - DNA, 110 bp, synthetic construct
  source 1..110: mol_type = other DNA
caatctatgacgatttaaagtaaattcactaggctttgacctctcaagctttacgaagccagcaaccaccactcacactgttagggaagcagtctcagtgtacttgaaat

SEQ ID NO: 46185 - DNA, 110 bp, synthetic construct
  source 1..110: mol_type = other DNA
gacatgaatactctgcacaggatgtatgaccagttctccaacaccagctaggtgtcctacagctgtattcagtcctggcactgtctacctggaattaacatcccacaagt

SEQ ID NO: 46186 - DNA, 110 bp, synthetic construct
  source 1..110: mol_type = other DNA
cctacagctgtattcagtcctggcactgtctacctggaattaacatcccacaagttaaggcctcagtcccacaagactgacccttcagatgccagttacaggtcctaaat

SEQ ID NO: 46187 - DNA, 110 bp, synthetic construct
  source 1..110: mol_type = other DNA
ctaagtttttttcatgtgttatttcacttaatcctcacaacaacccagtgagacagatagcactttccttttatagagaaggcattaaggaatttgcccagagtcccaca

SEQ ID NO: 46188 - DNA, 110 bp, synthetic construct
  source 1..110: mol_type = other DNA
gatagcactttccttttatagagaaggcattaaggaatttgcccagagtcccacagctggtcagtgacagagctgggattggaacccagacattagagatgggcgcttgc

SEQ ID NO: 46189 - DNA, 110 bp, synthetic construct
  source 1..110: mol_type = other DNA
tagggctcagattcacttcctggcctagaaactgtcatagtgtgtgcgtgcagccataaaattaaaaaaaataaagtgggatatagttaagaattttgtatttcttatag

SEQ ID NO: 46190 - DNA, 110 bp, synthetic construct
  source 1..110: mol_type = other DNA
gcgtgcagccataaaattaaaaaaaataaagtgggatatagttaagaattttgtatttcttatagcccctggaacatggaaccgcataaaatatgtgacggcactgttca

SEQ ID NO: 46191 - DNA, 110 bp, synthetic construct
  source 1..110: mol_type = other DNA
tgcagtactctgactcaggaactctaagttatttggtacagccaaggtactgggaagtaggaaaaaggcaggcaggagaggtgggttaagaatggccagtaacaaaggat

SEQ ID NO: 46192 - DNA, 110 bp, synthetic construct
  source 1..110: mol_type = other DNA
agtaggaaaaaggcaggcaggagaggtgggttaagaatggccagtaacaaaggatcttgtgtgttactctagggatgttggactcatcatgtgggtgtggggaaacacta

SEQ ID NO: 46193 - DNA, 110 bp, synthetic construct
  source 1..110: mol_type = other DNA
tattgttctgatcatcattgtttttattctctcggcgcatttctccttcttcaacaaactttgggctttttcataccacctgtgttttgagaagtgtgttctgattaatt

SEQ ID NO: 46194 - DNA, 110 bp, synthetic construct
  source 1..110: mol_type = other DNA
agagctcatcagaatcactaaggattctgtgtgagtagccagctataggcctgtaggtcttttctccttgcccaggctctataatcctcgccaagctcagggacaggaga

SEQ ID NO: 46195 - DNA, 110 bp, synthetic construct
  source 1..110: mol_type = other DNA
ttctgtgatggctaccttcctaacttagagagctgatcagcttatttccttgctaagaatttgttactgctctccagagctttcaagtttatggtatgattttgattctt

SEQ ID NO: 46196 - DNA, 110 bp, synthetic construct
  source 1..110: mol_type = other DNA
agaatttgttactgctctccagagctttcaagtttatggtatgattttgattctttggcccccatctcagtcaagcctgatcatctcacacctctcagcatgtcctttcc

SEQ ID NO: 46197 - DNA, 110 bp, synthetic construct
  source 1..110: mol_type = other DNA
gaaaactagtcattgcaatagaccaaaatgcaatttgatatgtgggtgtcacctattcaagataacagccgttgaataaattaacaaaagagcttgttgagaactgaagt

SEQ ID NO: 46198 - DNA, 110 bp, synthetic construct
  source 1..110: mol_type = other DNA
ttcaagataacagccgttgaataaattaacaaaagagcttgttgagaactgaagtgacatgatctttcccttgtttcttggctgaaatgtacccagttatgatacatttt

SEQ ID NO: 46199 - DNA, 110 bp, synthetic construct
  source 1..110: mol_type = other DNA
attagccttttctcctggtaggacagttacctcaccttcccctactccccgccattgttttcctttttaattttagaaacagattcattctaggaatatcaccttctaca

SEQ ID NO: 46200 - DNA, 110 bp, synthetic construct
  source 1..110: mol_type = other DNA
tgttttcctttttaattttagaaacagattcattctaggaatatcaccttctacagctattgtttggtgctatgtgagcagattctctaagggccctaataggggttgtg

SEQ ID NO: 46201 - DNA, 110 bp, synthetic construct
  source 1..110: mol_type = other DNA
ccgatgggatatgaggggtaggcatggacaagaccaggcagagcctgaagctggagtgtagaggggaccttggacactgggcagacaagtacagttattgagaccagaaa

SEQ ID NO: 46202 - DNA, 110 bp, synthetic construct
  source 1..110: mol_type = other DNA
agttattcagtgactctttcctatctggctcctatctgaaaaatgggggtaataatgcctgcctcatagtgttgtgagggttacatcaatacaaatgtagtgtttaaaat

SEQ ID NO: 46203 - DNA, 110 bp, synthetic construct
  source 1..110: mol_type = other DNA
ttgttcatcatctagtctctacagtagtgtctatgttagtcccaccttcctaatggaaccgtcctcattttaaaagggtgcagtgttcatagaatccatttatttgagat

SEQ ID NO: 46204 - DNA, 110 bp, synthetic construct
  source 1..110: mol_type = other DNA
attttagcaatgtagtccaaatggattttattttgtacatgatacatcaatctgactttcagctggaagaccattattgcagcctatataaaataaatgaatcctggaat

SEQ ID NO: 46205 - DNA, 110 bp, synthetic construct
  source 1..110: mol_type = other DNA
atctgaagtcaaaggaaagaacggaggaagggacagaaaagttatactcttattctggagctgccaaggagataggtgttaatagcatcttgtagggccacgttctggct

SEQ ID NO: 46206 - DNA, 110 bp, synthetic construct
  source 1..110: mol_type = other DNA
tcaggtaaatcaaataagtttgtgcctctgcacaaataaaagctagctccttttccccaggcccccatcatcctcttataaccgttccttggattctggctcttctcaat

SEQ ID NO: 46207 - DNA, 110 bp, synthetic construct
  source 1..110: mol_type = other DNA
cccaggcccccatcatcctcttataaccgttccttggattctggctcttctcaatgtggcttcccacatcgcatctcatgttcagaaataatttgggctctgcagccatt

SEQ ID NO: 46208 - DNA, 110 bp, synthetic construct; identical to SEQ ID NO: 46206
  source 1..110: mol_type = other DNA

SEQ ID NO: 46209 - DNA, 110 bp, synthetic construct; identical to SEQ ID NO: 46207
  source 1..110: mol_type = other DNA

SEQ ID NO: 46210 - DNA, 110 bp, synthetic construct
  source 1..110: mol_type = other DNA
ggcaccaagtggagacgcactgtgacgtatgagagacaccagaagcagttccttctggagtttgaggggctgcatggtgagagctgcagctgggtaggccgggctgctag

SEQ ID NO: 46211 - DNA, 110 bp, synthetic construct
  source 1..110: mol_type = other DNA
tggagtttgaggggctgcatggtgagagctgcagctgggtaggccgggctgctaggtcatagacaggcctggggcccatccagcagacaccgtctcatctctggctgcct

SEQ ID NO: 46212 - DNA, 110 bp, synthetic construct
  source 1..110: mol_type = other DNA
tttatattctttgaccttctctttactggaatcctgtgatagtaattttatcctcagttgaaaaatgagtaaaaggtagctcagagaggtccaacaacatggtcaaagcc

SEQ ID NO: 46213 - DNA, 110 bp, synthetic construct
  source 1..110: mol_type = other DNA
agttgaaaaatgagtaaaaggtagctcagagaggtccaacaacatggtcaaagccacacagcaagtaaaaagggaagccatatccttgtgccaaaaggttgatgccattt

SEQ ID NO: 46214 - DNA, 110 bp, synthetic construct; identical to SEQ ID NO: 46212
  source 1..110: mol_type = other DNA

SEQ ID NO: 46215 - DNA, 110 bp, synthetic construct; identical to SEQ ID NO: 46213
  source 1..110: mol_type = other DNA

SEQ ID NO: 46216 - DNA, 110 bp, synthetic construct
  source 1..110: mol_type = other DNA
atttcttttattttgtatttacatgatgtgatggatattcactaaacttattgtggtaatcattccatgaagtattttttttttttttgcgagggaggggcaggggttgc

SEQ ID NO: 46217 - DNA, 110 bp, synthetic construct; identical to SEQ ID NO: 46216
  source 1..110: mol_type = other DNA

SEQ ID NO: 46218 - DNA, 110 bp, synthetic construct
  source 1..110: mol_type = other DNA
ataccacaacttcagcaatgcaggatccttaacccactgtgccacagcaggagcacccacctattttttttctctataattaacacattgtgttagtcaaattcccatct

SEQ ID NO: 46219 - DNA, 110 bp, synthetic construct; identical to SEQ ID NO: 46218
  source 1..110: mol_type = other DNA

SEQ ID NO: 46220 - DNA, 110 bp, synthetic construct
  source 1..110: mol_type = other DNA
acatgaccttttggattctcagaaatatgtcagagcttttcaggctcctctattgctcattctctagcaattttttttttaaatgcctggcaaagcccttgttttccata

SEQ ID NO: 46221 - DNA, 110 bp, synthetic construct
  source 1..110: mol_type = other DNA
ctcattctctagcaattttttttttaaatgcctggcaaagcccttgttttccatagctgagatcatagccataagcagttgcttctggaagtttactattgtgttagaat

SEQ ID NO: 46222 - DNA, 110 bp, synthetic construct
  source 1..110: mol_type = other DNA
attcacagatatagagaacatacttgaagttgccacgggggaggtggttgggggagggacagaacaggaggctgaggttagctgatgtaaactactgcatatagaatgaa

SEQ ID NO: 46223 - DNA, 110 bp, synthetic construct
  source 1..110: mol_type = other DNA
aaattgtacaaagtttaatccattcccattaccttctcaagattgtaatctccttggatgctgaacctagagaagtttttttttttccctacaagaacgcattaccaagt

SEQ ID NO: 46224 - DNA, 110 bp, synthetic construct
  source 1..110: mol_type = other DNA
gtgtctcttctcaaaacttccttgtcctagatacacctatatatttttttattatgttttagccccttgttggagcttccaggctgttcaacacatgcctataaatctag

SEQ ID NO: 46225 - DNA, 110 bp, synthetic construct
  source 1..110: mol_type = other DNA
gaagcaaacatgttcacgagctggtgtattaaagatgatttgcctgggtaaaaatcaattcctttaaagttattgaaatcactgattctctacataggaaattacatgat

SEQ ID NO: 46226 - DNA, 110 bp, synthetic construct; identical to SEQ ID NO: 46225
  source 1..110: mol_type = other DNA

SEQ ID NO: 46227 - DNA, 110 bp, synthetic construct
  source 1..110: mol_type = other DNA
ttaacctactcagccacaacaggaactcccagatttgtttctcattcagactacaagttctttgctggttagctagggattctgctccatggcatctatactccatgaat

SEQ ID NO: 46228 - DNA, 110 bp, synthetic construct; identical to SEQ ID NO: 46227
  source 1..110: mol_type = other DNA

SEQ ID NO: 46229 - DNA, 110 bp, synthetic construct
  source 1..110: mol_type = other DNA
aaagcaagtctgggggggggggtctggtttatatcactggaataaaacaatggtataatctgcaatcctctatttcgttacaattatttcaagactggcctgtttccctt

SEQ ID NO: 46230 - DNA, 110 bp, synthetic construct
  source 1..110: mol_type = other DNA
taatctgcaatcctctatttcgttacaattatttcaagactggcctgtttcccttctctttcagtacaaagctgttttgattacaggaggggtggtggtggaggtgatgg

SEQ ID NO: 46231 - DNA, 110 bp, synthetic construct
  source 1..110: mol_type = other DNA
gctttatgggctttttgtgatttagtctttaggaatctctgcaattgtttctttggccacagagatgtcttttagtcacctatagctcagatgtccttgactctggtggg

SEQ ID NO: 46232 - DNA, 110 bp, synthetic construct
  source 1..110: mol_type = other DNA
gccacagagatgtcttttagtcacctatagctcagatgtccttgactctggtggggttttcctacatttccttttcaccacagctagtatcttttcctctttgcttggct

SEQ ID NO: 46233 - DNA, 110 bp, synthetic construct
  source 1..110: mol_type = other DNA
agggtgacttgtcatatcagcaggaagccttatcacactagattttaaacacagacactttccttgagatagctgtggaatgaattgctttccaaaggattttgcataat

SEQ ID NO: 46234 - DNA, 110 bp, synthetic construct
  source 1..110: mol_type = other DNA
atagcctgtccctaggtattccaacacactgagttacagtgttcccttggacacaaaccttgtcatctctctctaccatttattgtatataactagttcaacaagaccaa

SEQ ID NO: 46235 - DNA, 110 bp, synthetic construct
  source 1..110: mol_type = other DNA
catcttcacagttttttaaaataagcctccttggattgtgattagtgtttttttgaaatatgtatcaatttagtaaggattgacaacaatgttgagtttctcaacccatg

SEQ ID NO: 46236 - DNA, 110 bp, synthetic construct; identical to SEQ ID NO: 46235
  source 1..110: mol_type = other DNA

SEQ ID NO: 46237 - DNA, 110 bp, synthetic construct
  source 1..110: mol_type = other DNA
tggatgagttagttgaagtgaataagatattatataatatctagctcttccaaaagtgacatttcaaagacaagagcttatagtcagagtttttcatggtgtagaatgtt

SEQ ID NO: 46238 - DNA, 110 bp, synthetic construct
  source 1..110: mol_type = other DNA
aatatctagctcttccaaaagtgacatttcaaagacaagagcttatagtcagagtttttcatggtgtagaatgtttgtacatgtgaatggattgtttttaaaatcataga

SEQ ID NO: 46239 - DNA, 110 bp, synthetic construct
  source 1..110: mol_type = other DNA
agatattaagaggtgatcagtagagaaagtgaaaacgtagcaaattgtgcaaagaagtttactgcaaaacaggtattggtggttttctttaatctcctactttttggagt

SEQ ID NO: 46240 - DNA, 110 bp, synthetic construct
  source 1..110: mol_type = other DNA
tcactgtcagttgctttaaaaatacctggtatctaggatatgtgcatcaccttgcccttacaacaactctacttccttcacttattctccagctaaaactcttaatacat

SEQ ID NO: 46241 - DNA, 110 bp, synthetic construct
  source 1..110: mol_type = other DNA
attagagcggtaaagagaagagtgggtgaagtacatcgcttcttcagtccttagttccaggtttttaaaattgattatgaatattaattatgatatgcttaactgatagc

SEQ ID NO: 46242 - DNA, 110 bp, synthetic construct
  source 1..110: mol_type = other DNA
tgccctgagagctacccaacggccatgtactgcgatgagctgaaattgaaaagcgtgccaatggtgcctcctggaatcaagtacctttacctgagaaacaaccagatcga

SEQ ID NO: 46243 - DNA, 110 bp, synthetic construct
  source 1..110: mol_type = other DNA
aattatttcatgagagccttaaacgcaaatcatggcactcggaactttgagcgagacggtgaatcaggctttgggagatgattaactggcaaatggttggggaagtagct

SEQ ID NO: 46244 - DNA, 110 bp, synthetic construct
  source 1..110: mol_type = other DNA
acggtgaatcaggctttgggagatgattaactggcaaatggttggggaagtagcttgatacctggattcatatgactcctaccatgtgtatcttttccagcagagagcaa

SEQ ID NO: 46245 - DNA, 110 bp, synthetic construct
  source 1..110: mol_type = other DNA
tattcccaactccttccttccatcctttataaattgctgtcatttattttacttgtacatatgctgtaatcacctaaaacagtactgctatgattatttaaacaaaccat

SEQ ID NO: 46246 - DNA, 110 bp, synthetic construct; identical to SEQ ID NO: 46245
  source 1..110: mol_type = other DNA

SEQ ID NO: 46247 - DNA, 110 bp, synthetic construct
  source 1..110: mol_type = other DNA
cttgaatgcagtcttacaaattcagattcagggaggtcagataagcttatttacctcatctttataaattaaaggcagtggttccacatattctttatcttatatgatgc

SEQ ID NO: 46248 - DNA, 110 bp, synthetic construct
  source 1..110: mol_type = other DNA
tatatggtatagtaatacagttctggcaaaagcagattccctgagctgaaattctacttgatgctatttaatgactagacacgtatctcaacctccctgcatctcagttt

SEQ ID NO: 46249 - DNA, 110 bp, synthetic construct
  source 1..110: mol_type = other DNA
acttgatgctatttaatgactagacacgtatctcaacctccctgcatctcagttttagtttataaagtggtactgcatttactgatgcatgatcagtacttaaaaatgag

SEQ ID NO: 46250 - DNA, 110 bp, synthetic construct
  source 1..110: mol_type = other DNA
gaaaacatcagccagtgtgctacatggatactggctggagcacctgccttgaccacactcacttctaaacaaaactacctctgtgacaacactggcccccggagcagcca

SEQ ID NO: 46251 - DNA, 110 bp, synthetic construct
  source 1..110: mol_type = other DNA
cactcacttctaaacaaaactacctctgtgacaacactggcccccggagcagccatgtatgtaacaaatggtccttgattataggctggacaggcaacaataacctctgt

SEQ ID NO: 46252 - DNA, 110 bp, synthetic construct
  source 1..110: mol_type = other DNA
aataacactcacattttgccttctagcttctcattttatggatggtagataaggttttgattctgatatacacacctgaggatatatagaaaaatgctgataggtaggta

SEQ ID NO: 46253 - DNA, 110 bp, synthetic construct
  source 1..110: mol_type = other DNA
ttcaatgaccaagggcacacaaaagcttctggaattattggttcaggttcttcatgcagagagttgttggggatatagaaagtaaagtcttggagttcctgctgtggctc

SEQ ID NO: 46254 - DNA, 110 bp, synthetic construct
  source 1..110: mol_type = other DNA
ctggggcagaaatgaaagggttgtgatggataccagtctaggaattgacacataaggaatatttcacttatatttactgatacgaggagcataataatgaagggcataat

SEQ ID NO: 46255 - DNA, 110 bp, synthetic construct
  source 1..110: mol_type = other DNA
ggaatatttcacttatatttactgatacgaggagcataataatgaagggcataatatagaaaaatgtagcatgtgaggggttgacatactcatggaacctcagaaatctc

SEQ ID NO: 46256 - DNA, 110 bp, synthetic construct
  source 1..110: mol_type = other DNA
ataatcaagacattatttccaaatgaatcaagaaactggagcttaataatggataggacacattctgtcacgaaatactgcagccatttgttaatggataatttctgtgt

SEQ ID NO: 46257 - DNA, 110 bp, synthetic construct
  source 1..110: mol_type = other DNA
gggtcatcttcctcaaaacagtgatcctaaataatccttcatggagtaacattcatatataaagaacagctctctgtcaacaaaacaccaacaaaacactacgcatgtat

SEQ ID NO: 46258 - DNA, 110 bp, synthetic construct
  source 1..110: mol_type = other DNA
tatattgataaataattcaaatatcatgaaattcactcttttaaagtacacaagtcagtggagttccttcgtggctcaacagttaacaaacccgactagtacccatgagg

SEQ ID NO: 46259 - DNA, 110 bp, synthetic construct; identical to SEQ ID NO: 46258
  source 1..110: mol_type = other DNA

SEQ ID NO: 46260 - DNA, 110 bp, synthetic construct
  source 1..110: mol_type = other DNA
tcaggcccgataaacacatatagccatagagtgttaatgtgaggatgcttatcggtcgattccctataaccaccatggagatgaacaaatgtgtggcagtaatgactttg

SEQ ID NO: 46261 - DNA, 110 bp, synthetic construct
  source 1..110: mol_type = other DNA
ccagcaatgagtaggtttctgttattccacatccttaccagcttttggtgttgtgagtgttttggattttggacattctaatggatatgtaatggtatttaattattgtt

SEQ ID NO: 46262 - DNA, 110 bp, synthetic construct; identical to SEQ ID NO: 46261
  source 1..110: mol_type = other DNA

SEQ ID NO: 46263 - DNA, 110 bp, synthetic construct
  source 1..110: mol_type = other DNA
tgttttaaaacttttggtattttgacaaatctcccccaaccaaattctaggtcatgtctttttgacatggaactaaccagggctttccagaggacctctggaaaatttca

SEQ ID NO: 46264 - DNA, 110 bp, synthetic construct
  source 1..110: mol_type = other DNA
gtctttttgacatggaactaaccagggctttccagaggacctctggaaaatttcaaaagatttgttctctcgtgttataaaaaggagatgttaaactaattaggttcatt

SEQ ID NO: 46265 - DNA, 110 bp, synthetic construct
  source 1..110: mol_type = other DNA
tattttataaaatatccatgacaactgtgaaataagctggcaatgttagtcttctttcggagacaaaaaaaatgtcctcaaggcaaagtaacttgcccaaagttaaataa

SEQ ID NO: 46266 - DNA, 110 bp, synthetic construct; identical to SEQ ID NO: 46265
  source 1..110: mol_type = other DNA

SEQ ID NO: 46267 - DNA, 110 bp, synthetic construct; identical to SEQ ID NO: 46265
  source 1..110: mol_type = other DNA

SEQ ID NO: 46268 - DNA, 110 bp, synthetic construct; identical to SEQ ID NO: 46265
  source 1..110: mol_type = other DNA

SEQ ID NO: 46269 - DNA, 110 bp, synthetic construct
  source 1..110: mol_type = other DNA
gcaggattacagtagttgggcattgattgttttgggtggggcttttttatcttcaaaaatttcaggtatagcaagtcttatataacaagttttttttccctgtctctaga

SEQ ID NO: 46270 - DNA, 110 bp, synthetic construct
  source 1..110: mol_type = other DNA
ttgggcattgattgttttgggtggggcttttttatcttcaaaaatttcaggtatagcaagtcttatataacaagttttttttccctgtctctagaggaagtagttaaaaa

SEQ ID NO: 46271 - DNA, 110 bp, synthetic construct
  source 1..110: mol_type = other DNA
gtgtttgctgcattcttttcagaagtctctttcagttgcaagaaattgagtgccccaagaaatgaataattttgtttgtcttcccatatttaaaatacgactgggtcatg

SEQ ID NO: 46272 - DNA, 110 bp, synthetic construct
  source 1..110: mol_type = other DNA
caagaaatgaataattttgtttgtcttcccatatttaaaatacgactgggtcatgttttctcattcatctagcaaatactattcttcttgcatatcaggtactctaccca

SEQ ID NO: 46273 - DNA, 110 bp, synthetic construct
  source 1..110: mol_type = other DNA
agtaccacatgtatcttctttgcttttggcacctttcccttttcccccgagaaatgcagagctccagcagccaccttgagcaagctatgagggaaaagccaagaatatca

SEQ ID NO: 46274 - DNA, 110 bp, synthetic construct
  source 1..110: mol_type = other DNA
gcagagctccagcagccaccttgagcaagctatgagggaaaagccaagaatatcagccctgacatccttgagacatcagactgcccacttgtgaatttcttgctttgagg

SEQ ID NO: 46275 - DNA, 110 bp, synthetic construct
  source 1..110: mol_type = other DNA
gaaatctcatgagagagtgcaaactaataggagagttaaatttattcccactcccaagtgcaaaaccattaattaatagctgattttataaccattcattgccttcagaa

SEQ ID NO: 46276 - DNA, 110 bp, synthetic construct
  source 1..110: mol_type = other DNA
tcccactcccaagtgcaaaaccattaattaatagctgattttataaccattcattgccttcagaaaaacaggtactttttttatcatggaccattcaaaaacaattagtc

SEQ ID NO: 46277 - DNA, 110 bp, synthetic construct
  source 1..110: mol_type = other DNA
tctaaacagattatatttctaaccaattataaaggacctaatgagtgatctctatatttcagcaatgaatttagagctctagaaaaggcaaaggggtatacaatgctatc

SEQ ID NO: 46278 - DNA, 110 bp, synthetic construct
  source 1..110: mol_type = other DNA
caagccaaggggtgccaggaacctccagaagctgaaagagttgaggaaagattcttccctgggacctttggcaagagcatggcactgccaacatcttgatttcagacctc

SEQ ID NO: 46279 - DNA, 110 bp, synthetic construct
  source 1..110: mol_type = other DNA
tccctgggacctttggcaagagcatggcactgccaacatcttgatttcagacctctggccttcagaactgagacagaatcagtttctgttgtttgaagctacccagtttg

SEQ ID NO: 46280 - DNA, 110 bp, synthetic construct
  source 1..110: mol_type = other DNA
tgcagggaaacaatcatgaaaaaattcagacttcttatgaaaaaatataggggccagaaggaaatgaaataaatatctttaaagtgataaatggtgcaggcaggggcaga

SEQ ID NO: 46281 - DNA, 110 bp, synthetic construct
  source 1..110: mol_type = other DNA
agaaggaaatgaaataaatatctttaaagtgataaatggtgcaggcaggggcagaagggaatccaaatttatttatcaagtgataatattcttcaagaatcatggtaaag

SEQ ID NO: 46282 - DNA, 110 bp, synthetic construct
  source 1..110: mol_type = other DNA
taggtggataaacaataagatcctcctctatagcatagggaattatgtccaatttcttgggatagacagaccatggtgcagaataataatttaaagaatcacttgctgtg

SEQ ID NO: 46283 - DNA, 110 bp, synthetic construct; identical to SEQ ID NO: 46282
  source 1..110: mol_type = other DNA

SEQ ID NO: 46284 - DNA, 110 bp, synthetic construct
  source 1..110: mol_type = other DNA
gaccagcccctgagtgagcacagagctgtggaggcatagaaccaagatgggccacctcgaactcccactactactaatttgcagagtgccagtccctaacctgcatcaac

SEQ ID NO: 46285 - DNA, 110 bp, synthetic construct
  source 1..110: mol_type = other DNA
ctaccaaattatcatttcatagagcagcctcaatgctctcttctactcagtcctttaaaattgagtcatgcttcagcttgaaaactaaataaggaatattgaatcactca

SEQ ID NO: 46286 - DNA, 110 bp, synthetic construct
  source 1..110: mol_type = other DNA
ggccgtctccaaggtagggtactggagtggtttctctggtcagattgtacgagacattcataagaggacccccaatcgtccgatctctgggtcagaggcctagtacgtct

SEQ ID NO: 46287 - DNA, 110 bp, synthetic construct
  source 1..110: mol_type = other DNA
caagcctttatcatgtctgtcctctatgaactggactactagtaaccacacagtcaatgaggacgatgatgattttaaaaatcagatgatatacaggaattactgtggag

SEQ ID NO: 46288 - DNA, 110 bp, synthetic construct
  source 1..110: mol_type = other DNA
aatgaggacgatgatgattttaaaaatcagatgatatacaggaattactgtggagaagaaaattagtagaagctaattagatagaagggctggaagagagagtatggtca

SEQ ID NO: 46289 - DNA, 110 bp, synthetic construct; identical to SEQ ID NO: 46287
  source 1..110: mol_type = other DNA

SEQ ID NO: 46290 - DNA, 110 bp, synthetic construct; identical to SEQ ID NO: 46288
  source 1..110: mol_type = other DNA

SEQ ID NO: 46291 - DNA, 110 bp, synthetic construct
  source 1..110: mol_type = other DNA
tttttttgtaattttggcctggtcttttaccactttcatttccttcataaagcaatgtttaactggagttcccatcgtggtgtagcggaaacaaatccgactaggaacca

SEQ ID NO: 46292 - DNA, 110 bp, synthetic construct; identical to SEQ ID NO: 46291
  source 1..110: mol_type = other DNA

SEQ ID NO: 46293 - DNA, 110 bp, synthetic construct
  source 1..110: mol_type = other DNA
cgaacaggatgcactcagctccttcctaccttgtagccttctgtgctctcgtgggggggggttcatttttcactccgcaaagattggagggaggactgtgtgctgggttt

SEQ ID NO: 46294 - DNA, 110 bp, synthetic construct
  source 1..110: mol_type = other DNA
tctggaagggaatggggggtgcctgttgggcagaagtcaagggacatattcctggactccctctccaccctcttcaggtcctcgaaagactccccgttgagtccaggtta

SEQ ID NO: 46295 - DNA, 110 bp, synthetic construct
  source 1..110: mol_type = other DNA
actccctctccaccctcttcaggtcctcgaaagactccccgttgagtccaggttaacacagtccatacaggacaatgttgtgggccgcaaagaaggatgcaaaaggttag

SEQ ID NO: 46296 - DNA, 110 bp, synthetic construct
  source 1..110: mol_type = other DNA
aaacataaccagcctgctccctctgatgctggttagttattgatgaggtctaacctggtgaataccgggacgtgtctgaaagaacaggctgagaaagggtagaaggtagc

SEQ ID NO: 46297 - DNA, 110 bp, synthetic construct
  source 1..110: mol_type = other DNA
ggtgtagtgacctaagtgggtgctcatatgtgtggtgggagcataggagagttaggatagcctttgaatcagctgcgtttttacttcccacattccctccaacatacatt

SEQ ID NO: 46298 - DNA, 110 bp, synthetic construct
  source 1..110: mol_type = other DNA
caagggtatgcacagggtggcaaagtaaaggtaacacagaaaggctgcgttaaggatctctgagcatataacatttgagctgcgatctcatggctgagagtgaaccagcc

SEQ ID NO: 46299 - DNA, 110 bp, synthetic construct
  source 1..110: mol_type = other DNA
atctctgagcatataacatttgagctgcgatctcatggctgagagtgaaccagccatgtaaatagctgcaggaggagtgttccaggcaaatggaacaaaaaaatgcagga

SEQ ID NO: 46300 - DNA, 110 bp, synthetic construct
  source 1..110: mol_type = other DNA
aaaaacatccaaactgttggcatctagcaacattagaccctgattctgtgtggcaacaatagcttggtgcattagctgccctttctggtttgccacagtctccaccactc

SEQ ID NO: 46301 - DNA, 110 bp, synthetic construct
  source 1..110: mol_type = other DNA
tttctcctctttgccttctgcgtgcgttcccccagcacccaccttggccgtattagaaccatccaaacagtgggctgaagataaaggaatctctgactttttaccccatc

SEQ ID NO: 46302 - DNA, 110 bp, synthetic construct
  source 1..110: mol_type = other DNA
cagggagaggcaacgtcttgtgaggttggggtgttattgctcaagtggtcccatcagtggtccatacaaggtgttggattgtagctctgggaacccaggggtggagatgg

SEQ ID NO: 46303 - DNA, 110 bp, synthetic construct
  source 1..110: mol_type = other DNA
agtggtccatacaaggtgttggattgtagctctgggaacccaggggtggagatggaggtgtcttcttactgttatccttgaacactccctccaagaagattatcttcccg

SEQ ID NO: 46304 - DNA, 110 bp, synthetic construct
  source 1..110: mol_type = other DNA
agaaaagaccaagtccgacttctgcctccagtcttgatggtaactggtaaccatacttgccctccagctgaaaacgactgtgaaacgagacagaacatgcagcagctgtt

SEQ ID NO: 46305 - DNA, 110 bp, synthetic construct
  source 1..110: mol_type = other DNA
ttgtcttcttcagaccgtcacaagctacactgcacagtccagcccccagacaacacccagctttccttccttccggaggagctaacttagtgtgtgtgtctgtcactttt

SEQ ID NO: 46306 - DNA, 110 bp, synthetic construct
  source 1..110: mol_type = other DNA
atttattaaatattccatgggtttttgaatactacatttgtagataaggaagctcaatatcataaagatactagttgtgcccgagtaaatctacaaactcaaggcaattc

SEQ ID NO: 46307 - DNA, 110 bp, synthetic construct
  source 1..110: mol_type = other DNA
aatatcataaagatactagttgtgcccgagtaaatctacaaactcaaggcaattccagtaaacatcccagtgagatttttaatgaaacctaaaaagttgatatgatggcc

SEQ ID NO: 46308 - DNA, 110 bp, synthetic construct
  source 1..110: mol_type = other DNA
ggatagactattccgaagtcatgtggactctgaagaagccgatggacacgagaggcttctgctggtaccacagctacgatagcgttcaggcaaagtagagatgtcttctc

SEQ ID NO: 46309 - DNA, 110 bp, synthetic construct
  source 1..110: mol_type = other DNA
cttctgctggtaccacagctacgatagcgttcaggcaaagtagagatgtcttctctgggtcccttagttggtcaccatgactgtcaactggaaaaaaacaaacaagagac

SEQ ID NO: 46310 - DNA, 110 bp, synthetic construct
  source 1..110: mol_type = other DNA
caaatgaattaggcagtaacctaaaaacaaggggctggtaatttcaggaatggcaattggagaagagctctaggagcaacttattacattaattttcatcaattttgggg

SEQ ID NO: 46311 - DNA, 110 bp, synthetic construct
  source 1..110: mol_type = other DNA
attggagaagagctctaggagcaacttattacattaattttcatcaattttgggggtcttttcctctggggcggtgtttggggaaggagaaggaagaagactggatatga

SEQ ID NO: 46312 - DNA, 110 bp, synthetic construct
  source 1..110: mol_type = other DNA
ttcacctttcttgttgctaacttgtgggactgcaggtctctacgttccaagggcattctcaattctgtcgcttagcttcttgttaagaaaaagggccttttgacaaggcg

SEQ ID NO: 46313 - DNA, 110 bp, synthetic construct
  source 1..110: mol_type = other DNA
ttctcaattctgtcgcttagcttcttgttaagaaaaagggccttttgacaaggcggcaggccacaggtgtatttgaaacgctgtctgcttcttgacctggaattcagtca

SEQ ID NO: 46314 - DNA, 110 bp, synthetic construct
  source 1..110: mol_type = other DNA
ctgattctagaagctagaagctcatgattctagagctagtcagtgactgagccaaacttgacactcgttctttctgctaacgaagttcaagcttttgaccaccaatgctg

SEQ ID NO: 46315 - DNA, 110 bp, synthetic construct
  source 1..110: mol_type = other DNA
ttcagagttgaaatggcagggccacactacagatatgtgggacccaggctgctgccagctttctgcttcatcatctcttgggtgtggttcttacgacttggtctcactgg

SEQ ID NO: 46316 - DNA, 110 bp, synthetic construct
  source 1..110: mol_type = other DNA
cctgaagccaaccaaccacatcttagtaaaaagttagaacttgataaagatatgattaaccatatgatgaggacaggttaacggaacccagaagtccactgggaagacag

SEQ ID NO: 46317 - DNA, 110 bp, synthetic construct
  source 1..110: mol_type = other DNA
ttaaccatatgatgaggacaggttaacggaacccagaagtccactgggaagacaggggatgggaaggacctggaaaagtaagttttagctctcttcctctttgcaaagga

SEQ ID NO: 46318 - DNA, 110 bp, synthetic construct
  source 1..110: mol_type = other DNA
gagcttctgcacaaaagcaccattgaccttcaatgccagatgttctggaggctctttcacccagtgccaggtccccaggcatggagactgacatggggttcagaattctc

SEQ ID NO: 46319 - DNA, 110 bp, synthetic construct
  source 1..110: mol_type = other DNA
agcaccattgaccttcaatgccagatgttctggaggctctttcacccagtgccaggtccccaggcatggagactgacatggggttcagaattctcactcttataggtgag

SEQ ID NO: 46320 - DNA, 110 bp, synthetic construct
  source 1..110: mol_type = other DNA
ctgatgcaaggaaagtcaggttgatttaaggataaattgtaaagacttcacgtcggggttagctgggtggtggcagtaaccacgtggtcctacctctaggacacttgtga

SEQ ID NO: 46321 - DNA, 110 bp, synthetic construct
  source 1..110: mol_type = other DNA
gggttagctgggtggtggcagtaaccacgtggtcctacctctaggacacttgtgaaagattttaacccgcaaatgatgttaatttcctctgtccatgtgattgaaagttc

SEQ ID NO: 46322 - DNA, 110 bp, synthetic construct
  source 1..110: mol_type = other DNA
ttttcctacccaatttgctttaacccacgcagctccatttgctgtgtgttttccacttcaatgaatgtgaaatgcttcatcattcgtcaggattttctctaaaggtttta

SEQ ID NO: 46323 - DNA, 110 bp, synthetic construct
  source 1..110: mol_type = other DNA
ctgggaacccccacatgctatgggtgtggccctaaaaaaaacaaacagaaacaaaaacacaaaaaaaaaaccctactactctttaataagtaattttagaggtaatagaa

SEQ ID NO: 46324 - DNA, 110 bp, synthetic construct; identical to SEQ ID NO: 46323
  source 1..110: mol_type = other DNA

SEQ ID NO: 46325 - DNA, 110 bp, synthetic construct
  source 1..110: mol_type = other DNA
aaagtctttcagcagcaaaatcaaactgggtctttagctttattcccgtttcttgcaagagaagagactttatacaactggacacggaggtttggtttttcctccctgat

SEQ ID NO: 46326 - DNA, 110 bp, synthetic construct
  source 1..110: mol_type = other DNA
ttgatggataatagtttgttcattttcactggtgtcagcattccactatatgattatattgcaagttatttatacacttaacgctgaaggaaattttggttgtttccagc

SEQ ID NO: 46327 - DNA, 110 bp, synthetic construct
  source 1..110: mol_type = other DNA
cagcattccactatatgattatattgcaagttatttatacacttaacgctgaaggaaattttggttgtttccagcttggttgtttttgttttcactataacaaagggtag

SEQ ID NO: 46328 - DNA, 110 bp, synthetic construct
  source 1..110: mol_type = other DNA
ctctctcctccaagatttcatctattgtcatggcttcaagtatttgctttatacggacaagtccaaagtctctatcaccaggactgatttttctgtttctttcagcccca

SEQ ID NO: 46329 - DNA, 110 bp, synthetic construct
  source 1..110: mol_type = other DNA
cagactgtttgtatgcaaacctcttcacatagctcataggaagtgctcaatatgtgcaagttagttattgttagcaggtgactcctatctctacgtagataatacacaag

SEQ ID NO: 46330 - DNA, 110 bp, synthetic construct
  source 1..110: mol_type = other DNA
tcattttgccagattattatggacaatgtgctttaacagctgggaggtccagtggggacacactcttggacacaaagctactatgttctgctgcaacaagtaaacttttg

SEQ ID NO: 46331 - DNA, 110 bp, synthetic construct
  source 1..110: mol_type = other DNA
ggacacactcttggacacaaagctactatgttctgctgcaacaagtaaacttttgcagagccaaattaccccacaggtagagaaaatacttgtgaagcctatgagtgaag

SEQ ID NO: 46332 - DNA, 110 bp, synthetic construct
  source 1..110: mol_type = other DNA
atggcaaaatgaacctatctagagaaaagaaacaaactcacagagatggagaacagacttgtggtagccaaggggagggggatggagtaggagggactgggacttgggga

SEQ ID NO: 46333 - DNA, 110 bp, synthetic construct
  source 1..110: mol_type = other DNA
tatctagagaaaagaaacaaactcacagagatggagaacagacttgtggtagccaaggggagggggatggagtaggagggactgggacttggggattagtagatgcaaac

SEQ ID NO: 46334 - DNA, 110 bp, synthetic construct
  source 1..110: mol_type = other DNA
atggcagtgtttcaataagacctcatttacagagactgaaatttcaattttatgtaaatttcaccaaaaccaaccatatccttagctcctggggcctacagaaatatgtg

SEQ ID NO: 46335 - DNA, 110 bp, synthetic construct
  source 1..110: mol_type = other DNA
aataaaatgcacagcagcagggatcttattgaaagtacttgggatgacttttaactcagtacagctgctcataatttactttcgtctatataaaggtgtccccacaccag

SEQ ID NO: 46336 - DNA, 110 bp, synthetic construct
  source 1..110: mol_type = other DNA
tcagtacagctgctcataatttactttcgtctatataaaggtgtccccacaccaggtggaatgcagcatggaactgtaggttaatctaaaacagaaacttcttcaaatcc

SEQ ID NO: 46337 - DNA, 110 bp, synthetic construct
  source 1..110: mol_type = other DNA
gtactctgaaacaaccgtcaggttgacatctcttagtgcttgttttatcagtcacactctcccctttttacctttcttttctgttggccgcagtacccccagatcagctg

SEQ ID NO: 46338 - DNA, 110 bp, synthetic construct
  source 1..110: mol_type = other DNA
actctcccctttttacctttcttttctgttggccgcagtacccccagatcagctgatttgcctcccacatggatggcttctcattctctctcgtcgcctctgcagatggt

SEQ ID NO: 46339 - DNA, 110 bp, synthetic construct
  source 1..110: mol_type = other DNA
gctggatgtgaaaagacacttgaagataaaggtatagaaaatggatttgcctggtggtattagtcattttcaggtatatgccatctgttttctatatgtgtcaataataa

SEQ ID NO: 46340 - DNA, 110 bp, synthetic construct
  source 1..110: mol_type = other DNA
ggtattagtcattttcaggtatatgccatctgttttctatatgtgtcaataataactaagtcaaagacccttctgcttgtggggtttcttgattttttttcactttaaac

SEQ ID NO: 46341 - DNA, 110 bp, synthetic construct
  source 1..110: mol_type = other DNA
gaatgagatcttgctgctgctgtttcctcagttgagagaagtgattgctagaacctggctagcccgtcaagatactggcgctgcttggtggctaggagctgtcattcgtg

SEQ ID NO: 46342 - DNA, 110 bp, synthetic construct
  source 1..110: mol_type = other DNA
tggctagcccgtcaagatactggcgctgcttggtggctaggagctgtcattcgtgggtggcctctgattagcttctccacctgccccagataatctctttcatgccgctc

SEQ ID NO: 46343 - DNA, 110 bp, synthetic construct
  source 1..110: mol_type = other DNA
ctcatttagcttattctcatttttctttttttcaaatctgacccattcaacgtatggccatagtttcagtcattttatttctccttgtagtgtctgcatcatagcaaaaa

SEQ ID NO: 46344 - DNA, 110 bp, synthetic construct
  source 1..110: mol_type = other DNA
ggccatagtttcagtcattttatttctccttgtagtgtctgcatcatagcaaaaatagcatactatactattgtcagttttctccatgacagtgcaaattcaatggctat

SEQ ID NO: 46345 - DNA, 110 bp, synthetic construct
  source 1..110: mol_type = other DNA
tttccccatgccattattcttctgaaaagagcttgaaaaattcatggcaagcataaatgtatgtttgttaagcaaatctacattacgtggtgaaagcaaataaaatttct

SEQ ID NO: 46346 - DNA, 110 bp, synthetic construct; identical to SEQ ID NO: 46345
  source 1..110: mol_type = other DNA

SEQ ID NO: 46347 - DNA, 110 bp, synthetic construct
  source 1..110: mol_type = other DNA
gcaaggctctcattcagatttgcaggagagatcaaaagcttttcagacaaacaaaagctagaatacaacaactccaaaccagtgctacagcaactactaaaggaacttct

SEQ ID NO: 46348 - DNA, 110 bp, synthetic construct
  source 1..110: mol_type = other DNA
aagcttttcagacaaacaaaagctagaatacaacaactccaaaccagtgctacagcaactactaaaggaacttctctacacagaaaggaaaaagccacaactagaaacaa

SEQ ID NO: 46349 - DNA, 110 bp, synthetic construct
  source 1..110: mol_type = other DNA
gttctcctagacacccatccaagggacccttttatgagtgtgcaggtttaaatccttctgccctctgacttctgagaaatccttctggttgcttaactccatggatactt

SEQ ID NO: 46350 - DNA, 110 bp, synthetic construct
  source 1..110: mol_type = other DNA
taccaatacaagcattttccttttctgcctccttttcttcacatttgggccattttaaatatgattgttccctggaagagatgacatagaaagtcatccacagatgctaa

SEQ ID NO: 46351 - DNA, 110 bp, synthetic construct
  source 1..110: mol_type = other DNA
taaatatgattgttccctggaagagatgacatagaaagtcatccacagatgctaacacatagttagcattatgcagacctgcaccatcctctccttcctcatccctgact

SEQ ID NO: 46352 - DNA, 110 bp, synthetic construct
  source 1..110: mol_type = other DNA
actgctccctatgagccaggtactgctttaaatgcttgaacacgcttaactcacccaattcttctcaataggcaggagctactctatctacaatttgtaaagaaactaaa

SEQ ID NO: 46353 - DNA, 110 bp, synthetic construct
  source 1..110: mol_type = other DNA
ttctgtgttctcatccagggtgctgtcacacacgcccagctttaacagtcatgatcatctatctggagagataggcaaagtctagttcctgagaaatttggtcctttttc

SEQ ID NO: 46354 - DNA, 110 bp, synthetic construct
  source 1..110: mol_type = other DNA
tcatacttgcctcttttgattattgtgttccgcatgacctttctacacctaaatgcagagcttagcttcctcaacccttaacttgctaatttaatcagcatgtatttatt

SEQ ID NO: 46355 - DNA, 110 bp, synthetic construct
  source 1..110: mol_type = other DNA
ggatgtgaaatgtacagtgggggaatacagtccgtagctacgtgttatctttggagagcgacagaccataactaggctacagcagtgatcattttgaaatgtacagaaag

SEQ ID NO: 46356 - DNA, 110 bp, synthetic construct
  source 1..110: mol_type = other DNA
gagcgacagaccataactaggctacagcagtgatcattttgaaatgtacagaaagagaactaacagtcatctgggtcaattacatttcaaaaacaaactcattaaaaaaa

SEQ ID NO: 46357 - DNA, 110 bp, synthetic construct
  source 1..110: mol_type = other DNA
ggtgggactgcagggagggtaaaccatgtctgacgcaacagggctgaagacagagcctctggagatggccaagctccaaggctgctcgggaagccatcgtatattcctgt

SEQ ID NO: 46358 - DNA, 110 bp, synthetic construct
  source 1..110: mol_type = other DNA
cctctggagatggccaagctccaaggctgctcgggaagccatcgtatattcctgtgcatttcaagggagagtgacttcctggcaaagaggaccagcagggctacacaaag

SEQ ID NO: 46359 - DNA, 110 bp, synthetic construct
  source 1..110: mol_type = other DNA
gtaggaaattccacggtttacctgtatcctgggtgattcttctgcattatttgagagccttgggtttttactttctctgatagcaagctactctaatttatgtgactcta

SEQ ID NO: 46360 - DNA, 110 bp, synthetic construct
  source 1..110: mol_type = other DNA
tagagcttggatttagctttcggaatcctagtcagtggtttttcacaatggtgtgctgtcaagaagctactaccctgggaacgttttgaaagaatgaaatgaaatctttt

SEQ ID NO: 46361 - DNA, 110 bp, synthetic construct
  source 1..110: mol_type = other DNA
ctgaggaaggagcaaaaatgaacgcaacgttattcttgcttttaaagagtttataatctgaaagacgaggtaagtatgcaaataacagtattcttaggcacaaactatgc

SEQ ID NO: 46362 - DNA, 110 bp, synthetic construct; identical to SEQ ID NO: 46361
  source 1..110: mol_type = other DNA

SEQ ID NO: 46363 - DNA, 110 bp, synthetic construct; identical to SEQ ID NO: 46361
  source 1..110: mol_type = other DNA

SEQ ID NO: 46364 - DNA, 110 bp, synthetic construct; identical to SEQ ID NO: 46361
  source 1..110: mol_type = other DNA

SEQ ID NO: 46365 - DNA, 110 bp, synthetic construct
  source 1..110: mol_type = other DNA
cattcagttaacaactctgtaacagatacgctctgctagaccttgtggattcttgtcctaaatttaatctttgccttctcaccatagctaaatcgtcgtgctctgcctgg

SEQ ID NO: 46366 - DNA, 110 bp, synthetic construct
  source 1..110: mol_type = other DNA
tcctaaatttaatctttgccttctcaccatagctaaatcgtcgtgctctgcctggactcttttgttctatactatggtccaaaaagttttcctggaataaacctagatca

SEQ ID NO: 46367 - DNA, 110 bp, synthetic construct
  source 1..110: mol_type = other DNA
attcgtcagctcagtgcagagaggggtatcttcaagtcaaatctgtcttattatgatagagttttgaggcgaacaatattagcgttcaccaatatcaccagttctcctct

SEQ ID NO: 46368 - DNA, 110 bp, synthetic construct
  source 1..110: mol_type = other DNA
atagagttttgaggcgaacaatattagcgttcaccaatatcaccagttctcctctccttttttgcacttaatgaaaaacggcatttgcactgagtggggctgtgtgactc

SEQ ID NO: 46369 - DNA, 110 bp, synthetic construct
  source 1..110: mol_type = other DNA
tgtccctgcctcatgatgctttataattctgcacctgacatgagcactcatgtgtgctaagcttctatcaagctcactcctcttactcttcaataagttgtttatacaat

SEQ ID NO: 46370 - DNA, 110 bp, synthetic construct
  source 1..110: mol_type = other DNA
ggctggctggtttaaaatggcctcagctgggaggatttcaatgtgcttcacatgtttgtatatcctcctggactcattcacatactgggtcccaggattccaagaataag

SEQ ID NO: 46371 - DNA, 110 bp, synthetic construct
  source 1..110: mol_type = other DNA
aaattctaattcttctgagctaaaactatggtgcatttaagctatttttcctcgcggggaatccttaaaaactttgggtcaagggagttcccatcgtggctcagcagaaa

SEQ ID NO: 46372 - DNA, 110 bp, synthetic construct
  source 1..110: mol_type = other DNA
aagtgttttccctacaataggtattctctgattaatatatgtgtcctttccttatttctatttgcaattttttttctactacgtaccaggcattacatcagaagatatga

SEQ ID NO: 46373 - DNA, 110 bp, synthetic construct; identical to SEQ ID NO: 46372
  source 1..110: mol_type = other DNA

SEQ ID NO: 46374 - DNA, 110 bp, synthetic construct
  source 1..110: mol_type = other DNA
tcacaagagacatcagtgtctttgagtgtgagtaaaacaacaacacctagtaaatttttaagaaataaagggttttttccttttccctgattaagagttgcctcaacaca

SEQ ID NO: 46375 - DNA, 110 bp, synthetic construct
  source 1..110: mol_type = other DNA
caatactgggtccaaaaaggtttgtcctaccaattatacattcatttcactgcgcttattcctctgtgacttgatcatatgcagctaaatgatctgcttttgaatggttg

SEQ ID NO: 46376 - DNA, 110 bp, synthetic construct
  source 1..110: mol_type = other DNA
tgaagagtattgtggaggcagtaagatggcctctgtttagtttttttgttgatttgtgtttttttgctttttagggccacacctccagcaaaatggaagtttccaggctg

SEQ ID NO: 46377 - DNA, 110 bp, synthetic construct
  source 1..110: mol_type = other DNA
ttattcagctatgaatatatctatttctttgacatagtcatagcaattcaagcatgagaatgaatacaaaataggcctcactaaacctgaagtgggatttttctgtgttt

SEQ ID NO: 46378 - DNA, 110 bp, synthetic construct; identical to SEQ ID NO: 46377
  source 1..110: mol_type = other DNA

SEQ ID NO: 46379 - DNA, 110 bp, synthetic construct
  source 1..110: mol_type = other DNA
attagtttctttgagagtagtaagaggaaagcatgggaaaatacttttctgctcgatggtggggctaagacataggtagcaaatctggctttagtgcatgttgggttaaa

SEQ ID NO: 46380 - DNA, 110 bp, synthetic construct
  source 1..110: mol_type = other DNA
atggtggggctaagacataggtagcaaatctggctttagtgcatgttgggttaaagctatcttgcaaagaatttacctgaaaggaacttcttttatatgtataatgattt

SEQ ID NO: 46381 - DNA, 110 bp, synthetic construct
  source 1..110: mol_type = other DNA
ttccttgtggggaggagtaaaattaggaacaacctatgtcaccatcttggcgatgtcagaaagagaaaagctcttaatctctctttagttttcttacctcttaaaaaaaa

SEQ ID NO: 46382 - DNA, 110 bp, synthetic construct
  source 1..110: mol_type = other DNA
atatctgcgacagggagttcagtatttattaatgctttctccattttaggcttagggaaagctgagttaaatacagcaaagcttgcggcactgtcttcacatccatttct

SEQ ID NO: 46383 - DNA, 110 bp, synthetic construct
  source 1..110: mol_type = other DNA
ggaaagctgagttaaatacagcaaagcttgcggcactgtcttcacatccatttcttagagacacaaaaagaagtctctatcatcccagatagactgaactaaacatcatc

SEQ ID NO: 46384 - DNA, 110 bp, synthetic construct
  source 1..110: mol_type = other DNA
ccaagccacagtgggaactccagaaattatatatcttcaaagcagcacagatcgttatatttatgaggagcttggaataaaaggatgcttatcatggaaaaaattttaaa

SEQ ID NO: 46385 - DNA, 110 bp, synthetic construct
  source 1..110: mol_type = other DNA
cctctgttttctttctttctttgtgtctattaacttaggtaaaacagctatctagtcctgaaggttttgtgtaagtatccctatgcagtctgtatgtgcccagtggcttt

SEQ ID NO: 46386 - DNA, 110 bp, synthetic construct
  source 1..110: mol_type = other DNA
tgtaaccctctgagccacaatgggaacgcccgaaatagactttaatatgaagatcacaagagacaataatggatactacataatgatcaaaggaacaatccaagaagaag

SEQ ID NO: 46387 - DNA, 110 bp, synthetic construct; identical to SEQ ID NO: 46386
  source 1..110: mol_type = other DNA

SEQ ID NO: 46388 - DNA, 110 bp, synthetic construct
  source 1..110: mol_type = other DNA
cacactagcttcagaatgagaaattcctggaagctacagttttgttcgaagagataacttttatgggttttacctctaggatcccatttaaactatcatggtaaagagtg

SEQ ID NO: 46389 - DNA, 110 bp, synthetic construct
  source 1..110: mol_type = other DNA
tcttcaagcaaaactgcccatggtggaagtagaggtcaacagaggaaccagggagtagaattagaaggcctctggcataatcgaaaccccccacaatggtggtttagaac

SEQ ID NO: 46390 - DNA, 110 bp, synthetic construct
  source 1..110: mol_type = other DNA
tagaattagaaggcctctggcataatcgaaaccccccacaatggtggtttagaacatggaagtaatgataaaaataatggagaaagttaaattaaggatatatttttact

SEQ ID NO: 46391 - DNA, 110 bp, synthetic construct; identical to SEQ ID NO: 46389
  source 1..110: mol_type = other DNA

SEQ ID NO: 46392 - DNA, 110 bp, synthetic construct; identical to SEQ ID NO: 46390
  source 1..110: mol_type = other DNA

SEQ ID NO: 46393 - DNA, 110 bp, synthetic construct
  source 1..110: mol_type = other DNA
aagcatcacggtgcttgaggctgcactgttagtttcatggtactctgtaataaagtttggcctgtgctttacttatttccagtaatcagctttgagtgctgtttcctttt

SEQ ID NO: 46394 - DNA, 110 bp, synthetic construct
  source 1..110: mol_type = other DNA
actgttcccacagtgggacctactttcaaggacacagcttggagagagcaatgggttgtagaatcatctggacagtacctctgactgaacatggttagggcttctgtaca

SEQ ID NO: 46395 - DNA, 110 bp, synthetic construct
  source 1..110: mol_type = other DNA
ttttgtactaggattggaggtaaaagaaaatctaatatattctgtgaaaaaagaagctcttggccaattggactgattgttccaatcacagcaacatatttagttccatg

SEQ ID NO: 46396 - DNA, 110 bp, synthetic construct
  source 1..110: mol_type = other DNA
ccctagccatcactgtgatttcagtctgatgagacctgattatggggcgtagcgagtccattgtgctgggctgaatgacagctctccagagacagccacacgttaacccc

SEQ ID NO: 46397 - DNA, 110 bp, synthetic construct
  source 1..110: mol_type = other DNA
tcaagagtgtttggggggggtgtgtgtttcacacataccatttccagtttttcaccttccagctaatttttcacccctgtcattctagggttctgcttgcagggtcacca

SEQ ID NO: 46398 - DNA, 110 bp, synthetic construct
  source 1..110: mol_type = other DNA
tgcataactggtcagtcatggctttttccatgttgtcttccatctggggcccagactgatagagcagcttctatgaagattactgcaggcatccaggtagaggcaaataa

SEQ ID NO: 46399 - DNA, 110 bp, synthetic construct
  source 1..110: mol_type = other DNA
ctgatagagcagcttctatgaagattactgcaggcatccaggtagaggcaaataaaacaggagcaacaatgtgaagatgcttaaagcttctgtctgtctggaagaatgta

SEQ ID NO: 46400 - DNA, 110 bp, synthetic construct
  source 1..110: mol_type = other DNA
tatactgttagtgggtttaacttgagaataaatggtgatgtgtggttgttcaaagcagtccgagtagaatataaaatactttacataaagtgagtaaagcagagctccat

SEQ ID NO: 46401 - DNA, 110 bp, synthetic construct; identical to SEQ ID NO: 46400
  source 1..110: mol_type = other DNA

SEQ ID NO: 46402 - DNA, 110 bp, synthetic construct
  source 1..110: mol_type = other DNA
ccaaagctactgtgaacctggagagagagaggtggaaacaggacaaattaaaacgttttagagttcacctttcttaccaatattctgctaattttcatagtaaaccctcc

SEQ ID NO: 46403 - DNA, 110 bp, synthetic construct
  source 1..110: mol_type = other DNA
ctgggaacctccgtacgccatgagagtggtcctaaaaggcaaaaaaaaagtacatgttaaaattttattttttttaaattatttttcaaatgtccttcgccttctctacc

SEQ ID NO: 46404 - DNA, 110 bp, synthetic construct
  source 1..110: mol_type = other DNA
atcaatccttggggatttttattcaaaaaaataaattattcattatgtctgaacgaggctttgaagtatgtaagttttttcagtttgggcacaagttgtcttcaaactgc

SEQ ID NO: 46405 - DNA, 110 bp, synthetic construct
  source 1..110: mol_type = other DNA
cctccagcaatattatgtacaggaaaatagcatcctcatgtttatgaataataggcagatttatattggtcatatagcttactcaaggtcgcagccaatcagcagaatca

SEQ ID NO: 46406 - DNA, 110 bp, synthetic construct
  source 1..110: mol_type = other DNA
gtaactgttcacttttctcacatttttcttttcagagaatggtgttatctcgtaggcagagattggttttaggcccacttatatattctgccctggcatgtttggaggca

SEQ ID NO: 46407 - DNA, 110 bp, synthetic construct
  source 1..110: mol_type = other DNA
gtcaattaagaatactgagccctgaaaagaaaaaagaagacgtgttgctcttacttgctacaaagaaacacgttaagagcaaaaattcccaaactttgcttttgttatga

SEQ ID NO: 46408 - DNA, 110 bp, synthetic construct
  source 1..110: mol_type = other DNA
aggatgccatgtaaagaccaagaaacaaactaagcttacttattattttacagaaaattcttcagggaaagacacaggaggctgaaaatagccccatctgacaaggcaga

SEQ ID NO: 46409 - DNA, 110 bp, synthetic construct
  source 1..110: mol_type = other DNA
acgaacatctattctgaaaaacatacatatttgagatcaaagtagttttttatttgaacagttgcttcagcttcttactctgtctagataatctctttgaagaatcatcc

SEQ ID NO: 46410 - DNA, 110 bp, synthetic construct
  source 1..110: mol_type = other DNA
tgtgccagactggcaccttggccccggattataaaggacaaccaatcccgagcttctccgtgattctgccaggatgtcctgccaccatcatcgtcatattccttacctcc

SEQ ID NO: 46411 - DNA, 110 bp, synthetic construct
  source 1..110: mol_type = other DNA
atagctgttggtgccaagccagctcccacctagttcgatgagatgtgattgggtgcattcattgtgataaagatgcagacaaataaagccagtaagatggagatcccgac

SEQ ID NO: 46412 - DNA, 110 bp, synthetic construct
  source 1..110: mol_type = other DNA
gaaagtgtctgtatcacctatactctgcaaaacagaacaagtgtacttgagctgccatttaccagaagcagatttggtgaaacactttttactataagaaggtattatat

SEQ ID NO: 46413 - DNA, 110 bp, synthetic construct
  source 1..110: mol_type = other DNA
atcagatcagttccaaaaacggctaccgggtttggaggttagagctctgctaagcctaagaagaaacgtgtgtgctgggggtaggtagggataggaatcccataatggtt

SEQ ID NO: 46414 - DNA, 110 bp, synthetic construct
  source 1..110: mol_type = other DNA
aactttattttagcaagaggcagttaatattacctgttgtatttatttctagagctcagccagggaagaagtgacattaaatttacttttagaagaaatggactatttgg

SEQ ID NO: 46415 - DNA, 110 bp, synthetic construct
  source 1..110: mol_type = other DNA
agcaaggctcgaacccactctcagctcagaccaagatgaaatcctctcagcatccctctatatctcccgaaattacctgtcatcaccaagctttctctcattttcagctt

SEQ ID NO: 46416 - DNA, 110 bp, synthetic construct
  source 1..110: mol_type = other DNA
ctctatatctcccgaaattacctgtcatcaccaagctttctctcattttcagctttcttatatcaaatgtatctgccatgcacctgtgagggctttccctgaagtcagca

SEQ ID NO: 46417 - DNA, 110 bp, synthetic construct
  source 1..110: mol_type = other DNA
acgaaaagaaacttttgacatgacatgccttataaatagacaaacctttcaagaaagcaccatctagttttttgtctaaacaatatcacctatgtggggggtgtttctca

SEQ ID NO: 46418 - DNA, 110 bp, synthetic construct
  source 1..110: mol_type = other DNA
agcaccatctagttttttgtctaaacaatatcacctatgtggggggtgtttctcaagactcaaccacatatgcatgaagcagcatatgtttacttcgaggtctgtcatta

SEQ ID NO: 46419 - DNA, 110 bp, synthetic construct
  source 1..110: mol_type = other DNA
ccaatacagataactagtcgaaagccttggccaaattgctttaactatctctacctccgttccctcacctgtaaaatgtaactgaggttgcagtgaaagaagctagtaca

SEQ ID NO: 46420 - DNA, 110 bp, synthetic construct
  source 1..110: mol_type = other DNA
tccgttccctcacctgtaaaatgtaactgaggttgcagtgaaagaagctagtacacaggatgtggtgaaatttaaaagagttagaacagcatttggcacagcaaaaacac

SEQ ID NO: 46421 - DNA, 110 bp, synthetic construct; identical to SEQ ID NO: 46419
  source 1..110: mol_type = other DNA

SEQ ID NO: 46422 - DNA, 110 bp, synthetic construct; identical to SEQ ID NO: 46420
  source 1..110: mol_type = other DNA

SEQ ID NO: 46423 - DNA, 110 bp, synthetic construct
  source 1..110: mol_type = other DNA
gaatctgcgcaaatgatctccaaatccaccctcttctgtctctgtctaccagaacgtaaggtagaatctataaatcacatgcactctcttgcaagagtgtggcacatatt

SEQ ID NO: 46424 - DNA, 110 bp, synthetic construct
  source 1..110: mol_type = other DNA
cagttactcatctggaggaaatgcaaaaatgaaactgcgtttgttatgagtcagctcttcagctgctcttaagccttatggtgaacatcttctatgaattgcccgtgtga

SEQ ID NO: 46425 - DNA, 110 bp, synthetic construct
  source 1..110: mol_type = other DNA
tcttcagctgctcttaagccttatggtgaacatcttctatgaattgcccgtgtgatgcctgatagagtcctgaactctatgtttttccgatggctagattggcctttcag

SEQ ID NO: 46426 - DNA, 110 bp, synthetic construct
  source 1..110: mol_type = other DNA
ctacttaagtcgttgcaatgtatcccagagagcctaaatagttttaaatgaaaggcactggaaacactttcaaaaatcagaataaataagtacatgtttgagtaaaataa

SEQ ID NO: 46427 - DNA, 110 bp, synthetic construct
  source 1..110: mol_type = other DNA
tcttttttttctttaaaagtgacacattcatcaggccttttttcctttaaaagttgctgctgtaattagtgaaaggagtcttgttttccatacagagacagcaaagccag

SEQ ID NO: 46428 - DNA, 110 bp, synthetic construct
  source 1..110: mol_type = other DNA
atgcttttctctgtccatattcttttgcatcttattatctatcttattttttttgctgtttcacttgacacattgttctcagcaaagagagaaagatgtcagatacaaca

SEQ ID NO: 46429 - DNA, 110 bp, synthetic construct
  source 1..110: mol_type = other DNA
ctgtttcacttgacacattgttctcagcaaagagagaaagatgtcagatacaacacattctttgtagattcttatcaatactgaaaagacattgagaattatttcctact

SEQ ID NO: 46430 - DNA, 110 bp, synthetic construct
  source 1..110: mol_type = other DNA
ctgtcctggagacaggttgacccgctcgggctcagagctgcagtggcgggaattcttttccgttatgcagagaagcggcatcttccgccctttcgcggcgagggaagccc

SEQ ID NO: 46431 - DNA, 110 bp, synthetic construct
  source 1..110: mol_type = other DNA
ttttccgttatgcagagaagcggcatcttccgccctttcgcggcgagggaagccctgcagctcgcgctccccggtgcggtgcattcctttccgcctttccattctctgcc

SEQ ID NO: 46432 - DNA, 110 bp, synthetic construct
  source 1..110: mol_type = other DNA
aatgtaatttcagattttagaaaaagaatgtggcacatgtaacaggtatctattgcttagtaacaaatgacccccacttaatgactgaaagcaatgctgatttattattt

SEQ ID NO: 46433 - DNA, 110 bp, synthetic construct
  source 1..110: mol_type = other DNA
cttagtaacaaatgacccccacttaatgactgaaagcaatgctgatttattatttcttagggctctgtggataagctagatgattcttctctgggtcttgcctgagctaa

SEQ ID NO: 46434 - DNA, 110 bp, synthetic construct
  source 1..110: mol_type = other DNA
ttgggcctgtcagatctattaaccaataaattctccttttgcccaatccagtttggattccattttctgatactcactacagaaagagttataatacagatgtttggttt

SEQ ID NO: 46435 - DNA, 110 bp, synthetic construct
  source 1..110: mol_type = other DNA
gattccattttctgatactcactacagaaagagttataatacagatgtttggttttcagtgtattcgtagtattttcttgagaaatcttagtttccaatttgtcctgtgt

SEQ ID NO: 46436 - DNA, 110 bp, synthetic construct
  source 1..110: mol_type = other DNA
atgctctgctgctgccaaatgctctgagcaccacctgcctgaggaccactgccgtttcccagggcctgcaaccaggagcagcctgtgccacttccctgcagttccttgcc

SEQ ID NO: 46437 - DNA, 110 bp, synthetic construct
  source 1..110: mol_type = other DNA
catcttctctgtcagacccagtcaatatagaaatataaatgctagatgtgtagaaaactgggagcagctccactcaattcacccaaaatacagacgcaaattcaatacaa

SEQ ID NO: 46438 - DNA, 110 bp, synthetic construct
  source 1..110: mol_type = other DNA
taaggatccagtgttgttgcaactgtgactcagatttgacccctggcccaggaactccgtatgctgttgggcagcgccaatctccccaaaaagaaaaataaataaataaa

SEQ ID NO: 46439 - DNA, 110 bp, synthetic construct
  source 1..110: mol_type = other DNA
tccgtatgctgttgggcagcgccaatctccccaaaaagaaaaataaataaataaagtgtgtcttaaaaaaataaataaaatggcaaattcatgaaagacaactgacaaaa

SEQ ID NO: 46440 - DNA, 110 bp, synthetic construct
  source 1..110: mol_type = other DNA
aaaatagcatagagacattgttcagcaattctaattttgctttatcattcttgcccttttttttttttctttttagggctgcgcttgtggcatatgtaaactcccaggct

SEQ ID NO: 46441 - DNA, 110 bp, synthetic construct
  source 1..110: mol_type = other DNA
cattgttcagcaattctaattttgctttatcattcttgcccttttttttttttctttttagggctgcgcttgtggcatatgtaaactcccaggctaggggtcgaatcgga

SEQ ID NO: 46442 - DNA, 110 bp, synthetic construct
  source 1..110: mol_type = other DNA
ataagctaaaatgaataaagaatttgggcaaaaactgaggtattgggggaggaggaagaaataaagcttttcaaaatctgatcaaagattctataggaaatgggagagat

SEQ ID NO: 46443 - DNA, 110 bp, synthetic construct
  source 1..110: mol_type = other DNA
aagaaataaagcttttcaaaatctgatcaaagattctataggaaatgggagagatacagagaagataggaggaaagcacaatttgaaaaagttcaacttgggagttcctg

SEQ ID NO: 46444 - DNA, 110 bp, synthetic construct
  source 1..110: mol_type = other DNA
tgcacatttccaatacaagcctacatgaatcaaacacttccactgttgagttcctccaattgttcgctatttctcaaaaacttctagatttacaagaaaagaaacactaa

SEQ ID NO: 46445 - DNA, 110 bp, synthetic construct
  source 1..110: mol_type = other DNA
tcaccagtttaataatattaaaagacaacagatccaaatcaagtttctgacaggtagaataagttcacctactcagacggctaaagctttttcactaacatttatggaaa

SEQ ID NO: 46446 - DNA, 110 bp, synthetic construct
  source 1..110: mol_type = other DNA
aatggaatataagctacatgccagtaaatcccataggaacacataatttgcttattttgttaatgtaactctagcgcctaaactgcaccacctacgtgttttgccatcaa

SEQ ID NO: 46447 - DNA, 110 bp, synthetic construct; identical to SEQ ID NO: 46446
  source 1..110: mol_type = other DNA

SEQ ID NO: 46448 - DNA, 110 bp, synthetic construct
  source 1..110: mol_type = other DNA
catgtagtatctatcactcctgtcatactctgtgacatgaagtcgagctatactctggtttaagaagacggtgctttcttacagatggatgtgaggcaggatatacagtg

SEQ ID NO: 46449 - DNA, 110 bp, synthetic construct
  source 1..110: mol_type = other DNA
tagatactccctttggtcctgagagctttgatagtactggccaaatttttgtcaagtacaaatatgctgactatcctcaatgtactggttatactgaatctttgtcgtgt

SEQ ID NO: 46450 - DNA, 110 bp, synthetic construct
  source 1..110: mol_type = other DNA
ttgccttccccacagtgctttacggattttggttcatttaatctgtggaggtatgtactatggttatcatatgatccctatttttcccaagaagagaactttatttaaga

SEQ ID NO: 46451 - DNA, 110 bp, synthetic construct
  source 1..110: mol_type = other DNA
ctgccttcttgtgcataatggtgcacatggggcttttgcaggcttcctgtttgaagtgactagtactttcccactggtgggtggagctgggctttttatctctggtggtc

SEQ ID NO: 46452 - DNA, 110 bp, synthetic construct
  source 1..110: mol_type = other DNA
ttagaaaagaggcttttgttctaacacttcttagttttttcagaaatcttctctcataattctgtcatggctatgcctggctaaaactccaccagtgtgatcgtgtgcgc

SEQ ID NO: 46453 - DNA, 110 bp, synthetic construct
  source 1..110: mol_type = other DNA
ataattctgtcatggctatgcctggctaaaactccaccagtgtgatcgtgtgcgccctgcccataaattcatatgttaaagtcttaatccacgtacgtgagagggtgacc

SEQ ID NO: 46454 - DNA, 110 bp, synthetic construct
  source 1..110: mol_type = other DNA
tgctcacctggttcaatgtaaaggaaatttaaaacactttataaactggttattgacttcttggacctcacaaagctcttacaaaacaccatttaaataaactaagtgta

SEQ ID NO: 46455 - DNA, 110 bp, synthetic construct; identical to SEQ ID NO: 46454
  source 1..110: mol_type = other DNA

SEQ ID NO: 46456 - DNA, 110 bp, synthetic construct
  source 1..110: mol_type = other DNA
gcaaacaccatggaaaacagtaaggtgtttcctcaaaaggctaaaattggaattactagatgatccagccattctattcctgggtatatatctgaagaaaatgaaaatac

SEQ ID NO: 46457 - DNA, 110 bp, synthetic construct
  source 1..110: mol_type = other DNA
gcctaagtagactattcttgttaggaaatttccacttcctccaagagcaagtactgtctacaccagccccagtaagagggggccattgcctgtgctgaggagctatgtaa

SEQ ID NO: 46458 - DNA, 110 bp, synthetic construct
  source 1..110: mol_type = other DNA
gtctacaccagccccagtaagagggggccattgcctgtgctgaggagctatgtaagcagtcctttataactcaggtgggaaggggaaagtagcctctgcagatacctacc

SEQ ID NO: 46459 - DNA, 110 bp, synthetic construct
  source 1..110: mol_type = other DNA
ctttttccaagtctggacatataagtgtggcagtatctacctgctgaaggctgatgttatccgctaaggaaattccaattaaatgttactgttacttagatatggatgga

SEQ ID NO: 46460 - DNA, 110 bp, synthetic construct
  source 1..110: mol_type = other DNA
tcttttttttttccatctgagagtcttctttttgcttccacaccccatgggctatgtctaggtcttcagaattgaaacaggaagaaagaggagcaaaggacaagaggagc

SEQ ID NO: 46461 - DNA, 110 bp, synthetic construct
  source 1..110: mol_type = other DNA
gcaagtccatcttttaatcctttattgactcaggtcaaggataagaccttagacggaaaatacaacgattattttaaacaaacagaaaaagccctatcttaccatgctac

SEQ ID NO: 46462 - DNA, 110 bp, synthetic construct
  source 1..110: mol_type = other DNA
tgaaaagtaccattgaaatcaatctcgatgatgtcgagaaaatcaatgaactactataagactctaagatacctgtggactgatacattttccaactggaagaatcaagt

SEQ ID NO: 46463 - DNA, 110 bp, synthetic construct
  source 1..110: mol_type = other DNA
tctttctaaagagcacaacaatcagggtaaatgtcatcttcattaatcatcctctcatataatagagtcaactgaaaaaaattgtatgaagtctaatttcctgaggagat

SEQ ID NO: 46464 - DNA, 110 bp, synthetic construct
  source 1..110: mol_type = other DNA
catataatagagtcaactgaaaaaaattgtatgaagtctaatttcctgaggagatgagggtgacctgtgaagctcaagcaactattagacctaaatgctaactaaagcaa

SEQ ID NO: 46465 - DNA, 110 bp, synthetic construct
  source 1..110: mol_type = other DNA
tttttcctctttcacccaaaactctctctgtgtgtttctattcagcattggtggacagaggccaagtttcagcaacaagaggaattaaagatatttgggtctattaataa

SEQ ID NO: 46466 - DNA, 110 bp, synthetic construct
  source 1..110: mol_type = other DNA
cagaggccaagtttcagcaacaagaggaattaaagatatttgggtctattaataagcatgttttatgccacattaagaaattttgtatgaaaaagcacctatttctcaga

SEQ ID NO: 46467 - DNA, 110 bp, synthetic construct
  source 1..110: mol_type = other DNA
tgcgctgtctttcttccatcgccaagtcctcttcccatctttcggcagcatccgagaagctctcaggaccattcactgcaaatgcgtccttctgtgaaccagggggcctc

SEQ ID NO: 46468 - DNA, 110 bp, synthetic construct
  source 1..110: mol_type = other DNA
ttaaaatatgggcactttctcttttggaggctacggccttttgctcatgcttatgaaaatggtgcatgacagaaaccccggactcacaggactgtggcttctcctattag

SEQ ID NO: 46469 - DNA, 110 bp, synthetic construct
  source 1..110: mol_type = other DNA
ctcgccactgttgatacctacatcccgttgttgtcttaggccttccttagcctatatgccaagtgcagggatgctggggctgggacatgagctctcttctcctctctcat

SEQ ID NO: 46470 - DNA, 110 bp, synthetic construct
  source 1..110: mol_type = other DNA
atgccaagtgcagggatgctggggctgggacatgagctctcttctcctctctcatcatcttggtgacctcatcctctcctctcgcaccatttcctgtccgggactccccc

SEQ ID NO: 46471 - DNA, 110 bp, synthetic construct
  source 1..110: mol_type = other DNA
tgggacattttggaagcccacagcaatccttccacttgacagaagaggaatcttaattccagagactataggtatcacagagtacattttcttgtccaagaaaatgcata

SEQ ID NO: 46472 - DNA, 110 bp, synthetic construct
  source 1..110: mol_type = other DNA
atccttccacttgacagaagaggaatcttaattccagagactataggtatcacagagtacattttcttgtccaagaaaatgcataccaagattttttttttttttttttt

SEQ ID NO: 46473 - DNA, 110 bp, synthetic construct
  source 1..110: mol_type = other DNA
atttgtcactggcaaggtgccactggctctcaaatccaaatgctctccaagaggataaagccagatgtaaataagtcctcaactgtatacttttattttttatttttttt

SEQ ID NO: 46474 - DNA, 110 bp, synthetic construct
  source 1..110: mol_type = other DNA
ccaaatgctctccaagaggataaagccagatgtaaataagtcctcaactgtatacttttattttttatttttttttggtagaaatcttcagcagtgaaggatatagaagg

SEQ ID NO: 46475 - DNA, 110 bp, synthetic construct
  source 1..110: mol_type = other DNA
gtcgaatatatgaacatggccagtcacatgagctgggaaagtaatggactggctagttgtaatggcaggacgggattgctgtccagcaaacttgaaattcgttgacttat

SEQ ID NO: 46476 - DNA, 110 bp, synthetic construct
  source 1..110: mol_type = other DNA
gttgtaatggcaggacgggattgctgtccagcaaacttgaaattcgttgacttattttcattccttagtatatccattcatcagctcatttaatcatttattaattcact

SEQ ID NO: 46477 - DNA, 110 bp, synthetic construct
  source 1..110: mol_type = other DNA
agaggccttgataaatggcagttgttgtcactattaccaccagctctgcgtatgtgcaaatgaaagttaatgacttcaaatggggtatttcgcttcctctttaaacaaaa

SEQ ID NO: 46478 - DNA, 110 bp, synthetic construct
  source 1..110: mol_type = other DNA
ccaggagctttcatgtgccacaagcgtggccaaaaaaaaaaccaattcaaacacacacatcttgaaagtggtgggtaataccaaacgcaggtagagattacataaagttg

SEQ ID NO: 46479 - DNA, 110 bp, synthetic construct
  source 1..110: mol_type = other DNA
tgtgtgagaaagaaacttccagaggctgataacaaaactgaaggactcaggacaagggaatgattggtatcagcaaaatgaatgaaaactgaccaaagtctagctgtatc

SEQ ID NO: 46480 - DNA, 110 bp, synthetic construct
  source 1..110: mol_type = other DNA
gggaatgattggtatcagcaaaatgaatgaaaactgaccaaagtctagctgtatcctaattcacctccgaggcataagaattttaaagagagtccttcaagtatcacgac

SEQ ID NO: 46481 - DNA, 110 bp, synthetic construct
  source 1..110: mol_type = other DNA
ttttcaactttgcaggaacacgtctgtgttaaataaagttaagggcgtctagatactgtgagccatccccaaactgaggctctgtggagtctgtcatgcattttcttttt

SEQ ID NO: 46482 - DNA, 110 bp, synthetic construct
  source 1..110: mol_type = other DNA
ctgtgagccatccccaaactgaggctctgtggagtctgtcatgcattttctttttagctctgcaaatcagggtttgattttagaaaaagaacaggtactaaaaaaacaga

SEQ ID NO: 46483 - DNA, 110 bp, synthetic construct
  source 1..110: mol_type = other DNA
ccttagcagacacccaaggcccaccccaaactgacttctacacacttctgggtttccgtctcgggccagtctcgtgaatacatgcttggcactggtcattctgaacaacc

SEQ ID NO: 46484 - DNA, 110 bp, synthetic construct
  source 1..110: mol_type = other DNA
ccgtctcgggccagtctcgtgaatacatgcttggcactggtcattctgaacaacctgcagttttctcaatatgtgagcttcaaggaaagtagacaattcactcacacaca

SEQ ID NO: 46485 - DNA, 110 bp, synthetic construct
  source 1..110: mol_type = other DNA
gctgacccatggatcagcttagtttcataacagggatatgtttttatacttggtactaaactgcagtacacaatttcagccattcaacattgtcaaaaaactatccaggt

SEQ ID NO: 46486 - DNA, 110 bp, synthetic construct
  source 1..110: mol_type = other DNA
ctaaactgcagtacacaatttcagccattcaacattgtcaaaaaactatccaggttaagggaattgcagatcacgaggccccagattgactcaaagggaataaaaaatag

SEQ ID NO: 46487 - DNA, 110 bp, synthetic construct
  source 1..110: mol_type = other DNA
aataaagtttaggaaatacaggttttggagtcaaaagtatcaatttcagttcaatgtttcatctcattaagttttccagtatctcctggtgtaagtctccccatttataa

SEQ ID NO: 46488 - DNA, 110 bp, synthetic construct
  source 1..110: mol_type = other DNA
atacaggttttggagtcaaaagtatcaatttcagttcaatgtttcatctcattaagttttccagtatctcctggtgtaagtctccccatttataaaattaagttgataaa

SEQ ID NO: 46489 - DNA, 110 bp, synthetic construct
  source 1..110: mol_type = other DNA
cttctgcttccatcggaattctgacaaatctctcacaaaaaatgccaatgatggactcccgcgggaatttttccattctcttcttacttggtattttaaatgccttcaac

SEQ ID NO: 46490 - DNA, 110 bp, synthetic construct
  source 1..110: mol_type = other DNA
ctcccgcgggaatttttccattctcttcttacttggtattttaaatgccttcaaccattggttattccataggccttgaaatagcctcttcctcgataatcttcctgttt

SEQ ID NO: 46491 - DNA, 110 bp, synthetic construct
  source 1..110: mol_type = other DNA
caaatgtcactgtctaaatcttaactcttcatagcttctcctatgtgcttcaatgacttgattatgaagtcctgaagatcaggaactaccaatgccttttaaatctttct

SEQ ID NO: 46492 - DNA, 110 bp, synthetic construct
  source 1..110: mol_type = other DNA
acttgattatgaagtcctgaagatcaggaactaccaatgccttttaaatctttctcccaagctttggtgtctagcatagtcgtatcacatagttgtgaactaacaagcag

SEQ ID NO: 46493 - DNA, 110 bp, synthetic construct
  source 1..110: mol_type = other DNA
ttaccccctgtccacgcggcatgtagaacaacagcaatatccccagcggtgtgttattataacacagttcttgcaccatttggaccatgcagaattgtgggggggtatgt

SEQ ID NO: 46494 - DNA, 110 bp, synthetic construct
  source 1..110: mol_type = other DNA
tctgcctcatttattgatgcacaccctaagcatcttcttatgaggaaactgaggcacacaaataaatgtcctgtgcaagatacacagctaatcagagtcaaagatgaatt

SEQ ID NO: 46495 - DNA, 110 bp, synthetic construct
  source 1..110: mol_type = other DNA
taccagtctctctacgtttgcatatgattgaaatttcctaaaataaaaagcttttaaaaacgagatgtgacatgatacttgtaagggttgtgtcgcaatagtgcactgag

SEQ ID NO: 46496 - DNA, 110 bp, synthetic construct
  source 1..110: mol_type = other DNA
cagaggaggtactttgtaatctgatttttaaaatgtaattaggagacaagtaaatggtggtgatggaagtgtgtcaggaagcggaaggacttgggtgaagagggcgcaag

SEQ ID NO: 46497 - DNA, 110 bp, synthetic construct
  source 1..110: mol_type = other DNA
ggtggtgatggaagtgtgtcaggaagcggaaggacttgggtgaagagggcgcaaggtgcatgaacagcttgatggagttcatgtcaaatcgtgcctgcagaaagatgttc

SEQ ID NO: 46498 - DNA, 110 bp, synthetic construct
  source 1..110: mol_type = other DNA
ttcccaagttgtccttttgtttaggcttctgcaggacctggcactgcattaggattggtaactggcattcttagctataggcaagtttttgctattgtttttttaagagc

SEQ ID NO: 46499 - DNA, 110 bp, synthetic construct
  source 1..110: mol_type = other DNA
tggtaactggcattcttagctataggcaagtttttgctattgtttttttaagagctgcccacagcatgtggacgttcctgggtcagggatcaaagtggtgccacagcagc

SEQ ID NO: 46500 - DNA, 110 bp, synthetic construct
  source 1..110: mol_type = other DNA
tttttccttgggctcttctttctcttcctttgtcatatgttgctaaaaggagctaatggacagttccgacattcggtttggagatcgatcagcctgagttcccaaggtca

SEQ ID NO: 46501 - DNA, 110 bp, synthetic construct
  source 1..110: mol_type = other DNA
atggacagttccgacattcggtttggagatcgatcagcctgagttcccaaggtcattaggagtattttatattttaaaattatggcggataagcaaagttaaccaattgt

SEQ ID NO: 46502 - DNA, 110 bp, synthetic construct; identical to SEQ ID NO: 46500
  source 1..110: mol_type = other DNA

SEQ ID NO: 46503 - DNA, 110 bp, synthetic construct; identical to SEQ ID NO: 46501
  source 1..110: mol_type = other DNA

SEQ ID NO: 46504 - DNA, 110 bp, synthetic construct
  source 1..110: mol_type = other DNA
tctacagcactccttggtgagtactcgttgggtgcctgttctgcaggtgcagagcacaagtctttcttcagagtctcaacaatacccccagctactgccctaaaacagta

SEQ ID NO: 46505 - DNA, 110 bp, synthetic construct
  source 1..110: mol_type = other DNA
acaagtctttcttcagagtctcaacaatacccccagctactgccctaaaacagtagggatagacatcatcttctgccttccaaatttattttagggaaatatctcctttt

SEQ ID NO: 46506 - DNA, 110 bp, synthetic construct
  source 1..110: mol_type = other DNA
agacaattccatgatgttatacctatgtatgttccatgtcccttgaccagggccgcccatcttgttatgggtccactgagcaagctctagtttgttgggaaggagactaa

SEQ ID NO: 46507 - DNA, 110 bp, synthetic construct
  source 1..110: mol_type = other DNA
tgtaatatatttgacagtaataacacaaaagaaatggatgggaacaaagcttgttggagtaaagaagtaacaccaggcagaatagagaaccagaagagtgaataagaaag

SEQ ID NO: 46508 - DNA, 110 bp, synthetic construct
  source 1..110: mol_type = other DNA
ggagtaaagaagtaacaccaggcagaatagagaaccagaagagtgaataagaaagttcatacgagaaactctgaatacatacacatgcttttatttctttagatttttaa

SEQ ID NO: 46509 - DNA, 110 bp, synthetic construct
  source 1..110: mol_type = other DNA
aggaaagataatctgttcaataaatgatgctgggaaaagtggacaactccacctagaagaattctttaaaccatacacaaaaataaactcaaaatgatttaaagacctag

SEQ ID NO: 46510 - DNA, 110 bp, synthetic construct
  source 1..110: mol_type = other DNA
tcttccaacacttgtctcttgagtttggctttcgatcagcaaacagccagtcccgagtttgctaacaatagtaaatattaagctactttattgattattcacatgccttt

SEQ ID NO: 46511 - DNA, 110 bp, synthetic construct
  source 1..110: mol_type = other DNA
tcaaattatatcatatttccaatccgctatggttctctaaaatgcagacacatgagaatcatactaaggaaagcccaagtatgtttgatttgggcttacttctgaaaaat

SEQ ID NO: 46512 - DNA, 110 bp, synthetic construct
  source 1..110: mol_type = other DNA
gaatcatactaaggaaagcccaagtatgtttgatttgggcttacttctgaaaaatcagtctcttttttctacgtcatattcatagctttagctaaattacatctgcagta

SEQ ID NO: 46513 - DNA, 110 bp, synthetic construct
  source 1..110: mol_type = other DNA
gagaaatgggtattagacagcaggagccactctcaggagggtggaaattagaagtatcaggcagagcttcaccagttatgtggacagagattcaagggtggactccaact

SEQ ID NO: 46514 - DNA, 110 bp, synthetic construct
  source 1..110: mol_type = other DNA
atcaggcagagcttcaccagttatgtggacagagattcaagggtggactccaactctatgaagggaattggagagatgcagggaatcctcagactgtgcaaatacgacag

SEQ ID NO: 46515 - DNA, 110 bp, synthetic construct
  source 1..110: mol_type = other DNA
tacactctcttaaaaggttttcccaaattctccacttcctcaatggccagtctcacatgtcctttgattattagaataacatccttcccgttgtgctgagaaggtaacat

SEQ ID NO: 46516 - DNA, 110 bp, synthetic construct
  source 1..110: mol_type = other DNA
catgtcctttgattattagaataacatccttcccgttgtgctgagaaggtaacatctggattgagcttcttccttttcagtgaaacctagtgccactacaccacacacac

SEQ ID NO: 46517 - DNA, 110 bp, synthetic construct
  source 1..110: mol_type = other DNA
tcagcagaaaacaaagttggtcctgttttctttcacatggactcttagggtgagctcatccagtctcatggcgttaagtacaattcagaatgtgcaaactcccaaatttc

SEQ ID NO: 46518 - DNA, 110 bp, synthetic construct
  source 1..110: mol_type = other DNA
tcatccagtctcatggcgttaagtacaattcagaatgtgcaaactcccaaatttcatcttcggctaataacacttcctcaaggaggactcacaactgcaactggttattc

SEQ ID NO: 46519 - DNA, 110 bp, synthetic construct; identical to SEQ ID NO: 46517
  source 1..110: mol_type = other DNA

SEQ ID NO: 46520 - DNA, 110 bp, synthetic construct; identical to SEQ ID NO: 46518
  source 1..110: mol_type = other DNA

SEQ ID NO: 46521 - DNA, 110 bp, synthetic construct
  source 1..110: mol_type = other DNA
tttagcaccatgtgaaaacacatgtaaaaaagatgactctaagaatgctattcatgtatgtgaataaggacagtgtcgcatcagtgacaataatgtgcttatcacacggt

SEQ ID NO: 46522 - DNA, 110 bp, synthetic construct
  source 1..110: mol_type = other DNA
gtatgtgaataaggacagtgtcgcatcagtgacaataatgtgcttatcacacggtggagcgtggagtaagttacataatgacacctgtgctttttagggccacgagtgtg

SEQ ID NO: 46523 - DNA, 110 bp, synthetic construct
  source 1..110: mol_type = other DNA
gcagtacagggcttaaaaataggaccttgacaccaggtgactggcttcaagtcctgatcttttcattcaaaacattaagacacatatgacgtgggagaacgacttagatt

SEQ ID NO: 46524 - DNA, 110 bp, synthetic construct
  source 1..110: mol_type = other DNA
gatcttttcattcaaaacattaagacacatatgacgtgggagaacgacttagattctctgggcctccatactccctcatgtaaaatgaggtactcatagtagcaacatca

SEQ ID NO: 46525 - DNA, 110 bp, synthetic construct
  source 1..110: mol_type = other DNA
ggaggagattaaatggaaaggatacttaaggtggtaacttcagccttggttctaggccatttcgtttgtcttattaccgtaacagcaggcggagggcagggcctgggaat

SEQ ID NO: 46526 - DNA, 110 bp, synthetic construct
  source 1..110: mol_type = other DNA
gccatttcgtttgtcttattaccgtaacagcaggcggagggcagggcctgggaattgagaagctactcacacttagtctcagcatccagtgggcaagggccttccttcca

SEQ ID NO: 46527 - DNA, 110 bp, synthetic construct
  source 1..110: mol_type = other DNA
tggaatatgatgagcaaagtctttggtttgcaagataacttttaaatgcaatcattctatggccaccaagcaaataaggtgaagcttatcagtgaagcagggagactcac

SEQ ID NO: 46528 - DNA, 110 bp, synthetic construct
  source 1..110: mol_type = other DNA
atttatataggcttttgtttgttccaggtttaacaacttaagcttcagaaacaatggacttttaaatagaggaatgatgagttccatatgaattaaaggctagcagtggt

SEQ ID NO: 46529 - DNA, 110 bp, synthetic construct
  source 1..110: mol_type = other DNA
ttgagatcctgctactgcccttgtaaggcaggaagtacagtcactattttaaagatacagaaaacatggttttaagcctaacgtaacttgcctgaaatacacagctagta

SEQ ID NO: 46530 - DNA, 110 bp, synthetic construct
  source 1..110: mol_type = other DNA
tacagaaaacatggttttaagcctaacgtaacttgcctgaaatacacagctagtaaataattgagcagctgctctcttgctgagtctgttcatgtgtacatatccatcgt

SEQ ID NO: 46531 - DNA, 110 bp, synthetic construct
  source 1..110: mol_type = other DNA
tcaaaaatcataagaaggcatttcctgctgctcagcagactctgcactattttgactccttgttgatttacagcttctatgcacaaaatatctaatttggtaattcttca

SEQ ID NO: 46532 - DNA, 110 bp, synthetic construct
  source 1..110: mol_type = other DNA
tgctgctcagcagactctgcactattttgactccttgttgatttacagcttctatgcacaaaatatctaatttggtaattcttcaaatatgcaataaaatataaagtaat

SEQ ID NO: 46533 - DNA, 110 bp, synthetic construct
  source 1..110: mol_type = other DNA
tggtaagaaaccaacaagcttttccaaaataaatatgttaaaaaaactttgcagtgatcacagccttaaagttaagggttatgtcataggaaatcccaataagccactgg

SEQ ID NO: 46534 - DNA, 110 bp, synthetic construct
  source 1..110: mol_type = other DNA
gatcacagccttaaagttaagggttatgtcataggaaatcccaataagccactggtagttaagaaaagatatctcaacagaggtggtttgtaacccacacttttcaaaca

SEQ ID NO: 46535 - DNA, 110 bp, synthetic construct
  source 1..110: mol_type = other DNA
ggaatgtaaagatacagagaagaacacagcttccagcttcctgcccacccccgaatatcatgatggatgggcaaacagagactttaaaacaacctgtgtaagagggatgc

SEQ ID NO: 46536 - DNA, 110 bp, synthetic construct
  source 1..110: mol_type = other DNA
tgtcagccatacatacctgccccacttttgaagttcacgtgtggtatataaccagtccttagaactaatcagttgctatcaatagcagctgcttatcctaaccaagatgt

SEQ ID NO: 46537 - DNA, 110 bp, synthetic construct
  source 1..110: mol_type = other DNA
tccttagaactaatcagttgctatcaatagcagctgcttatcctaaccaagatgtgacaccaaccaacttacatcctgttttctgaggtctaacaccccagtggcacaag

SEQ ID NO: 46538 - DNA, 110 bp, synthetic construct
  source 1..110: mol_type = other DNA
cctaatcctctagtcagcatcagccgcaaagcaatcattcagagctgccctccgtgcagcttttggctcctaccgtgctagggatagtgcatggccaataaatggatact

SEQ ID NO: 46539 - DNA, 110 bp, synthetic construct
  source 1..110: mol_type = other DNA
catcattttatgtattaatgtattgctttccttctacaagctttcgcagtcgcccttaggggagtggggagggaacaagacttccacgagcatttgtataaggccacggc

SEQ ID NO: 46540 - DNA, 110 bp, synthetic construct
  source 1..110: mol_type = other DNA
cacagctgattgaatttccatcgttcattgactgggccctttgtcaggcaatccatcctcgcttgtgtaatcacagcattcccggagttcaactctcttctgtcctgatg

SEQ ID NO: 46541 - DNA, 110 bp, synthetic construct
  source 1..110: mol_type = other DNA
tcctcgcttgtgtaatcacagcattcccggagttcaactctcttctgtcctgatggttcagcagcacgacagactgagaaaatgagatacagcacagcaccaagccactg

SEQ ID NO: 46542 - DNA, 110 bp, synthetic construct
  source 1..110: mol_type = other DNA
atacaacaagtatcgagatgaaggaaaattggagggcaaaacatacatgctgcaattttatctccactttttctcctgaatgatgctgaatgcaacaattaacctggctc

SEQ ID NO: 46543 - DNA, 110 bp, synthetic construct
  source 1..110: mol_type = other DNA
ttttatctccactttttctcctgaatgatgctgaatgcaacaattaacctggctctaacctccacccacacctcccgtcgactcagtgggagctcttcacagagctacaa

SEQ ID NO: 46544 - DNA, 110 bp, synthetic construct; identical to SEQ ID NO: 46542
  source 1..110: mol_type = other DNA

SEQ ID NO: 46545 - DNA, 110 bp, synthetic construct; identical to SEQ ID NO: 46543
  source 1..110: mol_type = other DNA

SEQ ID NO: 46546 - DNA, 110 bp, synthetic construct
  source 1..110: mol_type = other DNA
ggtggaaatttctgacatttccaatgctgaaagaaggctatctgtgagggagagggagctgaaaaggagaaagccttgtcactttatccggggaaaagatctccaacaac

SEQ ID NO: 46547 - DNA, 110 bp, synthetic construct
  source 1..110: mol_type = other DNA
tcaaggacgtctcaatgatgaaagccccctcccctctgtgttcttcctttcgcaggcgaatgctatcacttaggaggagctgcgtgatctacccactgcataatcgcatg

SEQ ID NO: 46548 - DNA, 110 bp, synthetic construct
  source 1..110: mol_type = other DNA
gcgaatgctatcacttaggaggagctgcgtgatctacccactgcataatcgcatgtggcctttttccctcgtcttatcaccaaatgaccatcttttctttcaggcaacag

SEQ ID NO: 46549 - DNA, 110 bp, synthetic construct
  source 1..110: mol_type = other DNA
accactatctcttaagacaatgctaagatctaaatgcaaaatctatcattcaggagggttttaaagaattcagggctatctctgaagaacttggctccagatggattacc

SEQ ID NO: 46550 - DNA, 110 bp, synthetic construct
  source 1..110: mol_type = other DNA
ggtcaggttatctgtggaagccatgcgatttcatccctgaaattctccttcagcgcattcccatggaagcatttttcttctgtcagcttctcttctttatcaccaactta

SEQ ID NO: 46551 - DNA, 110 bp, synthetic construct
  source 1..110: mol_type = other DNA
actttatatgtgtgccaaccaagcttctgaagcattttcagcaggcagttattagtgaagcagtgctcctgctctaggtggtcagctagtggcctgacggactcggcctc

SEQ ID NO: 46552 - DNA, 110 bp, synthetic construct
  source 1..110: mol_type = other DNA
attttaagtttacctaaaggtccttccctccagggtatttgagtttcaggatcagatacactggaccaccagattcctagctattgtcgtcactaaataaaggactcatt

SEQ ID NO: 46553 - DNA, 110 bp, synthetic construct
  source 1..110: mol_type = other DNA
tttttataaaatgtctgtgcataacactcaatggaagagaagcgggattttttcctaccatgctgtctttatcaccgtccacaacgctgaaggatgcaaatgaagaacca

SEQ ID NO: 46554 - DNA, 110 bp, synthetic construct
  source 1..110: mol_type = other DNA
catattaattttataaataattcaaacgacgttatgcttttaaaaccccttgtcatgtggtaagagtcagagaaacaaatttcctgggcagacgtgtttatcattgtcct

SEQ ID NO: 46555 - DNA, 110 bp, synthetic construct
  source 1..110: mol_type = other DNA
aaattgtacatggaacaacctgggatgcagtggaagacatgaagctggcagagtaagggaagcagagattagggcgttcaaatcccagcatttcattctctgttgcccat

SEQ ID NO: 46556 - DNA, 110 bp, synthetic construct
  source 1..110: mol_type = other DNA
cctgacagagaactggttccaagactagaagagattcctggagtctcctaggtttggcaagctcacaagatgagtttttgagattttgatgatgccactggctgcagttg

SEQ ID NO: 46557 - DNA, 110 bp, synthetic construct
  source 1..110: mol_type = other DNA
cgtcccaaattcaccaatgagaaaagctgcaggtcggagaggttaaataaggtctcccccagtgacacagttagcaggcgacagaatagggattctaagtgagtattaac

SEQ ID NO: 46558 - DNA, 110 bp, synthetic construct
  source 1..110: mol_type = other DNA
cgggcctgcgttttttcacaggctacagctcgaatgagtgttatcctatgagtgagagttttctccccaggaccattgtggggaggcagtactgtgactccagagtggga

SEQ ID NO: 46559 - DNA, 110 bp, synthetic construct
  source 1..110: mol_type = other DNA
tctaagaattaagatattttaaaattacgctagtaaaagtatatatttgctggacttgggaggctcttttgtgggtcacttaagacgcaggccatatcctagtcccaaat

SEQ ID NO: 46560 - DNA, 110 bp, synthetic construct; identical to SEQ ID NO: 46559
  source 1..110: mol_type = other DNA

SEQ ID NO: 46561 - DNA, 110 bp, synthetic construct
  source 1..110: mol_type = other DNA
ggctcgggaaatgcgtggcctaggttaccgggaacattcagtcgaaaggctcctggcaatcaccgcgcggcggctctgaagctggtctgcggggacaagcgagggctcat

SEQ ID NO: 46562 - DNA, 110 bp, synthetic construct
  source 1..110: mol_type = other DNA
gccagcaatgatggaaataagtaaaacccattaaaaaaatactacagaaaaagaatggaacaaatacagtagcaaaaaagttcattgtatgtgctatttactcctcagaa

SEQ ID NO: 46563 - DNA, 110 bp, synthetic construct
  source 1..110: mol_type = other DNA
tggaacaaatacagtagcaaaaaagttcattgtatgtgctatttactcctcagaacacaggaaatgtcagacatctatcacatcatgcaaaaggaaaagcacagatttca

SEQ ID NO: 46564 - DNA, 110 bp, synthetic construct
  source 1..110: mol_type = other DNA
cactgaagaacggacaactgttttccgtgctcacggagcttaccaatgggaacgtcaaatattagataatcacatgaatgagcataaatttatattctgatacatgtgct

SEQ ID NO: 46565 - DNA, 110 bp, synthetic construct
  source 1..110: mol_type = other DNA
gcctgggaaccttcatatgctgcggcgacactaagctatttagttgacaaggcagaataaagatttttaaataggcaaaactcaaaactttatactctgtgtactctttc

SEQ ID NO: 46566 - DNA, 110 bp, synthetic construct
  source 1..110: mol_type = other DNA
attctcacgatatcccttttcccttgctcaaggttactgagataataaatggtagagcttggttctaacgtaggtttatgtgattcgagagcccaaactgaacaccatgc

SEQ ID NO: 46567 - DNA, 110 bp, synthetic construct
  source 1..110: mol_type = other DNA
agcaacaacaacaacaacaacaacaacaacaaaagacaaaaagacaaaaaaaaaaaaaagggctccatactgacattgtttccggaggcaagttgaaagtttaggtgctt

SEQ ID NO: 46568 - DNA, 110 bp, synthetic construct
  source 1..110: mol_type = other DNA
aaaagggctccatactgacattgtttccggaggcaagttgaaagtttaggtgcttttatttctgccttattactatttctcttttgattagtgatctacatttgaaagtg

SEQ ID NO: 46569 - DNA, 110 bp, synthetic construct
  source 1..110: mol_type = other DNA
tctttactctgtcagcttcatttctaaacacaataaagatcgatggccgtgtacaactagaagcgcatactaacgtttctgtagctctttgcattgtattcaaatgtatt

SEQ ID NO: 46570 - DNA, 110 bp, synthetic construct
  source 1..110: mol_type = other DNA
atcatgttcaaaggcaaactcattgttaagtccctgggttatcaacctgttggattactttatgcagtagaataactgaactgaattggccatgaagaaccctgaatatt

SEQ ID NO: 46571 - DNA, 110 bp, synthetic construct
  source 1..110: mol_type = other DNA
aaatacaaacatgttaagagagagccacgttttcaggtatttgcagttgaaagcgtgtagtttctacctgaataatcttggagttgatgcaagtaattggactttttttt

SEQ ID NO: 46572 - DNA, 110 bp, synthetic construct
  source 1..110: mol_type = other DNA
gctgaacatccctgtgtcagtggggaagcaagaccgagaggagggttttatttaccgaggtcacatggtgatagaaacagaatcggctatcttactagtgcctgaaaact

SEQ ID NO: 46573 - DNA, 110 bp, synthetic construct
  source 1..110: mol_type = other DNA
cgaggtcacatggtgatagaaacagaatcggctatcttactagtgcctgaaaactgagctctctgaccacgagtaagattagtctgcaacactggtctgtttagagaaag

SEQ ID NO: 46574 - DNA, 110 bp, synthetic construct
  source 1..110: mol_type = other DNA
attaaggttttgtttttctgaaaatatccatccattccaactcagaaacaggaggctgaatttaagcaattacaaacgcaacggagtctaattttctgccattaatcctt

SEQ ID NO: 46575 - DNA, 110 bp, synthetic construct
  source 1..110: mol_type = other DNA
ctgaatttaagcaattacaaacgcaacggagtctaattttctgccattaatcctttttaatggtgaaagattaaagatgctacctgtttaacatcaaccaaatgatttct

SEQ ID NO: 46576 - DNA, 110 bp, synthetic construct; identical to SEQ ID NO: 46574
  source 1..110: mol_type = other DNA

SEQ ID NO: 46577 - DNA, 110 bp, synthetic construct; identical to SEQ ID NO: 46575
  source 1..110: mol_type = other DNA

SEQ ID NO: 46578 - DNA, 110 bp, synthetic construct
  source 1..110: mol_type = other DNA
ttttgacttttccctaagtcctgcctcacatactgaggatttcatgagctttcacaggatctctacatcaaaacagctcttgcggagccctgagctttacagttttctct

SEQ ID NO: 46579 - DNA, 110 bp, synthetic construct
  source 1..110: mol_type = other DNA
aggatctctacatcaaaacagctcttgcggagccctgagctttacagttttctcttttcatcttttgtttttttccccctgcctctggcatcaatgcaattgaacttggg

SEQ ID NO: 46580 - DNA, 110 bp, synthetic construct; identical to SEQ ID NO: 46578
  source 1..110: mol_type = other DNA

SEQ ID NO: 46581 - DNA, 110 bp, synthetic construct; identical to SEQ ID NO: 46579
  source 1..110: mol_type = other DNA

SEQ ID NO: 46582 - DNA, 110 bp, synthetic construct
  source 1..110: mol_type = other DNA
taggacttcaggaacacccctctccgttttctaaaggtcagcaccgtcacatgccacctttctttcagaagtgcattgccagtctccctttatactttgctcggacaatt

SEQ ID NO: 46583 - DNA, 110 bp, synthetic construct
  source 1..110: mol_type = other DNA
acctttctttcagaagtgcattgccagtctccctttatactttgctcggacaattcctaactcccagtcccaggaatctgacatgcagcctctgcgtcacatcagaatct

SEQ ID NO: 46584 - DNA, 110 bp, synthetic construct
  source 1..110: mol_type = other DNA
gcattctatggccattgcaaaaggggcaggtagtgacaccatgtttctgctaaactgcgtcagctgcctttttgaacccagtgttcctgcatgtcactcctggtccttct

SEQ ID NO: 46585 - DNA, 110 bp, synthetic construct
  source 1..110: mol_type = other DNA
tttcttcgataccaatgaagccacatggttttgtgcactaatggtgggctttattgtcatacagacctacctcaattttccttacaattccgtatcattttaaagactcc

SEQ ID NO: 46586 - DNA, 110 bp, synthetic construct
  source 1..110: mol_type = other DNA
gtcatacagacctacctcaattttccttacaattccgtatcattttaaagactccactgagtctgggttttgtcatttataaaaaaagagtaacaatactacccatcttg

SEQ ID NO: 46587 - DNA, 110 bp, synthetic construct
  source 1..110: mol_type = other DNA
tcccatatcaaataattttttaaatgctttctttaaaagagggtgtttactttgataaactggggtgaatctcacgatttaactagctcgtcatagcagaaaggtttctc

SEQ ID NO: 46588 - DNA, 110 bp, synthetic construct
  source 1..110: mol_type = other DNA
gtcatcactgtataaatttatttatatggctacggcctctgtaaattttgtaacataacccttggactgctgatggtaatttaaattagttgcgttttggataactcaag

SEQ ID NO: 46589 - DNA, 110 bp, synthetic construct
  source 1..110: mol_type = other DNA
agatgtcctactggtatattaaacccacaacccccaaatgaaatgctgcacatcttccctacagccttttcttattttgtgttccctggcttaggatgtgataagaaaac

SEQ ID NO: 46590 - DNA, 110 bp, synthetic construct
  source 1..110: mol_type = other DNA
ctatcttgcttttggcacagtgagcatgaagggaatggatactacttaaaatgctaacgtgttcagtctaatttaaagtgttcatatatctgtgataagatgaacaggaa

SEQ ID NO: 46591 - DNA, 110 bp, synthetic construct
  source 1..110: mol_type = other DNA
gcatatggctgagatacagaacactttttaagactctgcacccacccttcctctgttttaaacatgctgtctcaagcacgtatagcgggatgtgatcacatgagtttgtg

SEQ ID NO: 46592 - DNA, 110 bp, synthetic construct
  source 1..110: mol_type = other DNA
cttcaatgtcctaggcccagtttgagggctactgcagcagggctgagatctagcaggtacaatgaaatgtcatctgacaggatggctaggaaattctattttaaccaaat

SEQ ID NO: 46593 - DNA, 110 bp, synthetic construct
  source 1..110: mol_type = other DNA
ggtacaatgaaatgtcatctgacaggatggctaggaaattctattttaaccaaattattcaataaaccgaattaattatttcaccaaattcttatgcttgctgagaaaag

SEQ ID NO: 46594 - DNA, 110 bp, synthetic construct
  source 1..110: mol_type = other DNA
aatgctttgaggtcaatgtgtcatgtttttaccatagcatacagaccaaaattattagcctgtaccatgtgagtatctgataagcaaggtttactcttgtcttcaattaa

SEQ ID NO: 46595 - DNA, 110 bp, synthetic construct
  source 1..110: mol_type = other DNA
ttggattcgttaaccactgagccacgtcgggaactcccgtttcttttctatagctgagtagtattccaatgtgtacatatataccatatcttcttaatccaatcatctgt

SEQ ID NO: 46596 - DNA, 110 bp, synthetic construct; identical to SEQ ID NO: 46595
  source 1..110: mol_type = other DNA

SEQ ID NO: 46597 - DNA, 110 bp, synthetic construct
  source 1..110: mol_type = other DNA
atccaaacactatcacattttcaaatgcccatgtgatatcaacaaggctggagccaggtgatgtttttaaaaaacttagtcatgtattgcattgagtaaatatgtgtatt

SEQ ID NO: 46598 - DNA, 110 bp, synthetic construct
  source 1..110: mol_type = other DNA
tcgtcctccatccagatggctcccagttaaggatgagaaagaaatcacttttcctttgtgcttggatcaaagtagaatttgctatatatacaacacaaccttctccaggt

SEQ ID NO: 46599 - DNA, 110 bp, synthetic construct
  source 1..110: mol_type = other DNA
gcgttgagccatattgcaagatgttcctgtaacctttaaaagtaagatctcagcaacagagatatcatgtcttcattatgcagcagaaataaaactcgcagggaagtttt

SEQ ID NO: 46600 - DNA, 110 bp, synthetic construct
  source 1..110: mol_type = other DNA
agtactgctgttttctccctgcctttagtgctagtgcagcttgtgttatctgatgtccagtacactgcaaggtatgctggaaaggactcttgaccgcctccccaacttcc

SEQ ID NO: 46601 - DNA, 110 bp, synthetic construct
  source 1..110: mol_type = other DNA
aatcttacgacaggaatacaaggtgtctaatatttaaaaaaaaacaataaatgtcccatataaacatcctaaaacataaaagccttatgcctttctacaggctatcatac

SEQ ID NO: 46602 - DNA, 110 bp, synthetic construct
  source 1..110: mol_type = other DNA
aacagggaaaaaatgaagaagggcagaagctctgttccagatatcgttaagggtgtccatgcggaagaaagaattaaatttatcggctccagtgagcataatgagttcca

SEQ ID NO: 46603 - DNA, 110 bp, synthetic construct
  source 1..110: mol_type = other DNA
gtgggaagctgtggaaatccggcttctccaacatccttggtagctcttacagagtcttcgcaattgtggctaggttgtagtctggctgactaattcccgaggaactcatg

SEQ ID NO: 46604 - DNA, 110 bp, synthetic construct
  source 1..110: mol_type = other DNA
ctctcagggtctgaagctatcaatagattacgaaggactcagtgacttttcttcttgctactctggtagcactgctgtaatttccagggtcttttataatacacagattc

SEQ ID NO: 46605 - DNA, 110 bp, synthetic construct
  source 1..110: mol_type = other DNA
ttcttttccttttatgtcacatggcatctagacaaagatgaacaaagactacatagagttgcctggaagaagaaaaaaatgccttgttttattttgcagtatctgacatt

SEQ ID NO: 46606 - DNA, 110 bp, synthetic construct
  source 1..110: mol_type = other DNA
atacctaaactaaaaggaggcaaccaggtgatatggcatcaacggtgttaacattttaaacccttttatattcccaatcttacagtggggacaagaaatgatattagcat

SEQ ID NO: 46607 - DNA, 110 bp, synthetic construct
  source 1..110: mol_type = other DNA
ttaaacccttttatattcccaatcttacagtggggacaagaaatgatattagcatcaggaatcctgaaaaagaggaaggaaggagtgagggagagagggaaaggagagct

SEQ ID NO: 46608 - DNA, 110 bp, synthetic construct
  source 1..110: mol_type = other DNA
atgagaaaatatgtacaagcacttgctggtggctggcaaagagaaatgactagacacacatctgctgtgtgtgttggatttattatccacaagcatattactttgagtag

SEQ ID NO: 46609 - DNA, 110 bp, synthetic construct
  source 1..110: mol_type = other DNA
acacatctgctgtgtgtgttggatttattatccacaagcatattactttgagtagagtagtgggctccggaaaagttcctgattttgtttcaggaatggatacttccagc

SEQ ID NO: 46610 - DNA, 110 bp, synthetic construct
  source 1..110: mol_type = other DNA
cactggctcatgagttcgtacaaagttattctccaaataccatgggaatgattctctccaaggcctcgtctaatacaccaaagctgccatttcccaccaggaaaggagat

SEQ ID NO: 46611 - DNA, 110 bp, synthetic construct
  source 1..110: mol_type = other DNA
acttctaaatgcactatcacagccaatcctgagagccttggaattaaatgatacagaaaaggagaacataaaggagaattgacggacaatctgaagaattagggaggaag

SEQ ID NO: 46612 - DNA, 110 bp, synthetic construct
  source 1..110: mol_type = other DNA
gaaaaggagaacataaaggagaattgacggacaatctgaagaattagggaggaagagatgggcagagaggctctaagagagatgacaaagtgtgtgtgaagaagagctaa

SEQ ID NO: 46613 - DNA, 110 bp, synthetic construct
  source 1..110: mol_type = other DNA
tgatttggaaatttttcacccttttcaagtaaagtgatctgaaacggggccgaggtcttaggagacaagttttgctggagagattggacatgacacacggatccaatcaa

SEQ ID NO: 46614 - DNA, 110 bp, synthetic construct
  source 1..110: mol_type = other DNA
cccactgagccacaattcccagaacacatttttaatgacaaatcaccgcattcgcacatgattttaaaaataacttaaagagctcctgttgtggctcagtggttaacgaa

SEQ ID NO: 46615 - DNA, 110 bp, synthetic construct
  source 1..110: mol_type = other DNA
ctccaggccttccccacatcagctctgttttaaaaggaaggctctgattgatacaggcttcagaaaacacaccactgagcacgaacacaaaagcaacagcatgtggacag

SEQ ID NO: 46616 - DNA, 110 bp, synthetic construct
  source 1..110: mol_type = other DNA
ggcttcagaaaacacaccactgagcacgaacacaaaagcaacagcatgtggacagagctgcagtaaggaaaacaacccagaataaatgtactagatttgagtttttaagg

SEQ ID NO: 46617 - DNA, 110 bp, synthetic construct
  source 1..110: mol_type = other DNA
ttgtggctttgtcccatgagcgctctcgaaggcacagcataaagcatgtcagcacttacacagctccatttctcagggagagagtctacggcatccctcattcacacttc

SEQ ID NO: 46618 - DNA, 110 bp, synthetic construct
  source 1..110: mol_type = other DNA
tggttctccgttatgagcactgcagtgggaagcatccaaaaccatcgcacaacgttatgcatcgggaaggcccacagacagtgattactttattagaagccagttctaga

SEQ ID NO: 46619 - DNA, 110 bp, synthetic construct
  source 1..110: mol_type = other DNA
aaaagagaaaaaaagactctagatctcttgcatagttctgctggcaacagaggcatgaatggatttttgcaaagactccatcgacaggacataaaccataattttagtct

SEQ ID NO: 46620 - DNA, 110 bp, synthetic construct
  source 1..110: mol_type = other DNA
tgaatggatttttgcaaagactccatcgacaggacataaaccataattttagtctcaaattccccaagtaccattattgtcatatatcaagggaagcctgcagcagttta

SEQ ID NO: 46621 - DNA, 110 bp, synthetic construct
  source 1..110: mol_type = other DNA
acacatcttgtgacaagctccgtgctaagtgcaattttgtgagttatttcctctatctctaaaaatttcatgaagattctgcacttttattacagaaaggactctagata

SEQ ID NO: 46622 - DNA, 110 bp, synthetic construct
  source 1..110: mol_type = other DNA
agctcagtgccaggttgccaactagcctgagaaaggacttgggaacgggatgttatttgtgtcttcctcacaggggagcatgctgcttagatggaagccaaccagctttc

SEQ ID NO: 46623 - DNA, 110 bp, synthetic construct
  source 1..110: mol_type = other DNA
tttgtgtcttcctcacaggggagcatgctgcttagatggaagccaaccagctttcaactcgcaaagcaacaacaaagtcaccatacacaaagtcacaacagcaaaaccca

SEQ ID NO: 46624 - DNA, 110 bp, synthetic construct
  source 1..110: mol_type = other DNA
actcatccactggggccacagctctgtccaccgtccaaactcggaggaacgcatccagttttaaggctgcagtggtctcatccaggcctaagctccctccactgtgacac

SEQ ID NO: 46625 - DNA, 110 bp, synthetic construct
  source 1..110: mol_type = other DNA
gtgacgtggcttggggtcccgccctggcctgggaacgtctgcattaccaccgcgcagccaaaccacagcaacaaaaagtcaaagtgtgtgtacctgtgtatgttccaata

SEQ ID NO: 46626 - DNA, 110 bp, synthetic construct
  source 1..110: mol_type = other DNA
ttcagtactcctccacagactcatgaatagcaacataattctttttaatgtgtgtccacatctggagaaacctccgaagagcggtagttgcttattatttaaaataacaa

SEQ ID NO: 46627 - DNA, 110 bp, synthetic construct
  source 1..110: mol_type = other DNA
ccacatctggagaaacctccgaagagcggtagttgcttattatttaaaataacaatcgtcaaaatatcatccattggaaaaattagaaaacatgtcagaaagagacagtg

SEQ ID NO: 46628 - DNA, 110 bp, synthetic construct; identical to SEQ ID NO: 46626
  source 1..110: mol_type = other DNA

SEQ ID NO: 46629 - DNA, 110 bp, synthetic construct; identical to SEQ ID NO: 46627
  source 1..110: mol_type = other DNA

SEQ ID NO: 46630 - DNA, 110 bp, synthetic construct
  source 1..110: mol_type = other DNA
acaacgcaaacgaaatggcatacttaaagtaataagcctttcggggaaacagcgttcttggatgaccattcaaaacacatgtaactgtgggaacagaccactagcaaaaa

SEQ ID NO: 46631 - DNA, 110 bp, synthetic construct
  source 1..110: mol_type = other DNA
cccatgtccaaaataataagtaggacaacatactgtgtaggcaaacaaaaatatatgcttcctggaggcaggagagggaactgaaattttaaaaataaatctgagagtta

SEQ ID NO: 46632 - DNA, 110 bp, synthetic construct
  source 1..110: mol_type = other DNA
accatttcctttttacaaaggtggcatactaaggttagaggggaaatgagtttacttaatgctatggagctcttaaatggtagagcactgcctttgacccaagttgcttc

SEQ ID NO: 46633 - DNA, 110 bp, synthetic construct
  source 1..110: mol_type = other DNA
actaacatgcaatggcagaaacccagtaagagctatttaaaagtaaagtgaatctatcaaacctcagaatagaagtggatgcaccaaatgctgaagaggctgttctgtaa

SEQ ID NO: 46634 - DNA, 110 bp, synthetic construct
  source 1..110: mol_type = other DNA
tactaaaacccctccttgaaaatacaattaactcaagatcctctaaaacttaatcacaaccataatcactatgctggccaagatttattcaattgactaaaaatatgata

SEQ ID NO: 46635 - DNA, 110 bp, synthetic construct
  source 1..110: mol_type = other DNA
aaaattgtgatgtgggcaaggccttattatgtcactttaatcaatctttttatttgatcaggttctcacatttagtctgtacgtggacttggttatttagaaaatacagg

SEQ ID NO: 46636 - DNA, 110 bp, synthetic construct
  source 1..110: mol_type = other DNA
gatcaggttctcacatttagtctgtacgtggacttggttatttagaaaatacaggctcccttaggggagactcgaaacacagggctgtttcttgttataagagcaaaagg

SEQ ID NO: 46637 - DNA, 110 bp, synthetic construct
  source 1..110: mol_type = other DNA
aggttccgctgtgacccataagcttccctggaccttgtgcaaagcatgaagttccggagacatctccagattacctagtaatacacatgccagtggtacctgatgctaag

SEQ ID NO: 46638 - DNA, 110 bp, synthetic construct
  source 1..110: mol_type = other DNA
ctaggatgtatcacagtcgtctccagccaagtcactagagagtttgtgtaatataaaggtaatcaattaataattacaaatggctaaaaaatgttttctagtctctgcat

SEQ ID NO: 46639 - DNA, 110 bp, synthetic construct
  source 1..110: mol_type = other DNA
gaacggtcaacagtgtggcatactcaagggaaaattctctagcagctaagaggaagtcgaaaatgaaagaaggctatgaggggaggcagtctgttacggagccatcacct

SEQ ID NO: 46640 - DNA, 110 bp, synthetic construct
  source 1..110: mol_type = other DNA
ataattgccactgatgaggcattaagaaagaacaatgtccatcaccccccttgtagtaataaacatctctcttggttttggtctcatctcaattacaagcagaaacatat

SEQ ID NO: 46641 - DNA, 110 bp, synthetic construct
  source 1..110: mol_type = other DNA
cccccttgtagtaataaacatctctcttggttttggtctcatctcaattacaagcagaaacatatgacatcacaacctgttttttcggtttttttctttttttttttttt

SEQ ID NO: 46642 - DNA, 110 bp, synthetic construct
  source 1..110: mol_type = other DNA
aagctataaagtgtccatcttcttccactttataaaaaatattatttaattttttcactaagaaaccgatgatataggaagatgtcttggtagataggagcctcctactg

SEQ ID NO: 46643 - DNA, 110 bp, synthetic construct; identical to SEQ ID NO: 46642
  source 1..110: mol_type = other DNA

SEQ ID NO: 46644 - DNA, 110 bp, synthetic construct
  source 1..110: mol_type = other DNA
gaggaaggagtccttgatctgggctgaaaatacgaagtaggtgcagctcgagtcgtgagcagagtcagacagcgaagggtcccagaagttcagctgagttcacgttcgtc

SEQ ID NO: 46645 - DNA, 110 bp, synthetic construct
  source 1..110: mol_type = other DNA
ccagattcgtgcataaatagctttgggtgttttctaaaggattaattccaatattatggctgttcattcgtcctccaaggggcggctttggtactctcgggtctcagcta

SEQ ID NO: 46646 - DNA, 110 bp, synthetic construct
  source 1..110: mol_type = other DNA
atggctgttcattcgtcctccaaggggcggctttggtactctcgggtctcagctacgacgctaaattggttttagaagacatctgtggtaatgtccactacggtaaaaca

SEQ ID NO: 46647 - DNA, 110 bp, synthetic construct
  source 1..110: mol_type = other DNA
gcaataaggaaacaaaatctgcctgctctggtggaaggagctgaaaggtcacacggagaaaaatggatatatacattttacacaaggaacaacaaaagaattaggaaaga

SEQ ID NO: 46648 - DNA, 110 bp, synthetic construct
  source 1..110: mol_type = other DNA
acactgtggcacgacaccaacccggtcaccttatgtcgtcacttgtatctctgcctatttagccctctcgtctctaaatacatagctgaaaatcaacacccttcttaaaa

SEQ ID NO: 46649 - DNA, 110 bp, synthetic construct
  source 1..110: mol_type = other DNA
taatgtgctgcactctgcaaatgttttggagtacagactacattcaaagctccctgcgaggacttactttaacagcctagaggctacgatcatttcagacttgagagaca

SEQ ID NO: 46650 - DNA, 110 bp, synthetic construct
  source 1..110: mol_type = other DNA
aggctgaacagcttgtatctaacacagaataacacaagagccgggcacatggctggccctggggtgtctcagctgcattcacatgacgtttcggatgggaaggtttatag

SEQ ID NO: 46651 - DNA, 110 bp, synthetic construct
  source 1..110: mol_type = other DNA
tgcctttacagagcagagcagatgagcggcctcatcttatgtcccgtttttcacatgccgcaccctgtgcagcgcctcagcgcccgggcttcctgaagcttggtgttgcc

SEQ ID NO: 46652 - DNA, 110 bp, synthetic construct
  source 1..110: mol_type = other DNA
ttcagtattttctcggaaactttaacatgttcattctgccacatgaaatacctcaactggccagttcaaaacacactgaactgatgattaaaactctgctccgtttggac

SEQ ID NO: 46653 - DNA, 110 bp, synthetic construct
  source 1..110: mol_type = other DNA
cgcggctcagggactggtcacactccgtctgaatgctctcagcccccaaatcaggtctgggaggctggcagcttgtggttccggagtcagacgtgagtgactgagcctag

SEQ ID NO: 46654 - DNA, 110 bp, synthetic construct
  source 1..110: mol_type = other DNA
tctgggaggctggcagcttgtggttccggagtcagacgtgagtgactgagcctagatctgcatctttgaggtcagtgacctgagcgagtcacctacctgccgaacgtttg

SEQ ID NO: 46655 - DNA, 110 bp, synthetic construct
  source 1..110: mol_type = other DNA
atgccacagccacagcaaagccagatccgagccacagctgtgacctacaccacaactcatggcaagacctgatccttatttattaacccacggagcagggccagggatgg

SEQ ID NO: 46656 - DNA, 110 bp, synthetic construct; identical to SEQ ID NO: 46655
  source 1..110: mol_type = other DNA

SEQ ID NO: 46657 - DNA, 110 bp, synthetic construct
  source 1..110: mol_type = other DNA
tgcagaagacttggccaagaggtaagcttaagcaaacaaaagtaaaataaggattgggaccccgaaaagctgcactgtacgaataattaagtaccagaggtaagcttggc

SEQ ID NO: 46658 - DNA, 110 bp, synthetic construct
  source 1..110: mol_type = other DNA
gggaccccgaaaagctgcactgtacgaataattaagtaccagaggtaagcttggctctagcgtagtcttcagccacctgagtgatccagaaaatctaaagccttaaatta

SEQ ID NO: 46659 - DNA, 110 bp, synthetic construct
  source 1..110: mol_type = other DNA
tcacaaccacagataattttttggttctatgggtcaataattttcaactttggctttgccacaatctatgatgtcaccaattagtggcactttcattttatatatattga

SEQ ID NO: 46660 - DNA, 110 bp, synthetic construct; identical to SEQ ID NO: 46659
  source 1..110: mol_type = other DNA

SEQ ID NO: 46661 - DNA, 110 bp, synthetic construct
  source 1..110: mol_type = other DNA
acctaacaaaccttattctaaaattcttttttgtaatgtctttatttgtttgtttgttttgtctttttcccttttctagggctgtacctacagcaatatggaggttccca

SEQ ID NO: 46662 - DNA, 110 bp, synthetic construct; identical to SEQ ID NO: 46661
  source 1..110: mol_type = other DNA

SEQ ID NO: 46663 - DNA, 110 bp, synthetic construct
  source 1..110: mol_type = other DNA
aagccctgttacatccccactgaccaatcagaagagggacgacgagctggcgacgcgtcctgtgaccctctccctaccactgtcttcaaaacctttgccccaaagccgct

SEQ ID NO: 46664 - DNA, 110 bp, synthetic construct
  source 1..110: mol_type = other DNA
aagacctgaagacaattttatatataccagacacagagagcaacaagcaccaggaaaatgaacaccatcactcattaggaaggagttgcaaatcaaaatgaacccctcac

SEQ ID NO: 46665 - DNA, 110 bp, synthetic construct
  source 1..110: mol_type = other DNA
aaatgaacaccatcactcattaggaaggagttgcaaatcaaaatgaacccctcaccctctctgaatggccattattaggacctcttcaataaacgatcctagactggacg

SEQ ID NO: 46666 - DNA, 110 bp, synthetic construct
  source 1..110: mol_type = other DNA
cgacattggcagaggatgccaaccaggagaagggtgggtaccagggtttgcaagaaagagctggaaagtcaaagacaaccacgtctcacgttccctcaagagaagggcca

SEQ ID NO: 46667 - DNA, 110 bp, synthetic construct
  source 1..110: mol_type = other DNA
aagagctggaaagtcaaagacaaccacgtctcacgttccctcaagagaagggccacaaacaccgcctgcacgctctcaagggcaggcggctccagaacgtggttctgctg

SEQ ID NO: 46668 - DNA, 110 bp, synthetic construct; identical to SEQ ID NO: 46666
  source 1..110: mol_type = other DNA

SEQ ID NO: 46669 - DNA, 110 bp, synthetic construct; identical to SEQ ID NO: 46667
  source 1..110: mol_type = other DNA

SEQ ID NO: 46670 - DNA, 110 bp, synthetic construct
  source 1..110: mol_type = other DNA
cggtgtgtgcggagaccaaaaccaatggggcaagatgccaacatttgcggaatctaggagatgggtacatgtttctgcaacacttctgtaaacctaaatttgtcaaaagg

SEQ ID NO: 46671 - DNA, 110 bp, synthetic construct
  source 1..110: mol_type = other DNA
agtgggtccttaagcccctgagcaaggccaggaatcgaacccgcatcctcgtggacactctgttgggttcttcacccactccaccagcgcaggaactccatcggttggct

SEQ ID NO: 46672 - DNA, 110 bp, synthetic construct
  source 1..110: mol_type = other DNA
cactctgttgggttcttcacccactccaccagcgcaggaactccatcggttggcttttagtgggaagagaggtctcttcagtgatgggccgggcaggcgggcgtcttcat

SEQ ID NO: 46673 - DNA, 110 bp, synthetic construct
  source 1..110: mol_type = other DNA
cgcgcccccaccggcgcggcccggctccggcctttacgcacgtgtgctgcacatgcacacgtcttcctgggacacgctctcacacacacgtgctgcacctgacatgagtc

SEQ ID NO: 46674 - DNA, 110 bp, synthetic construct
  source 1..110: mol_type = other DNA
caaaattgtgaaggcttatctgtgacataagttaactaggaacgttttggtaaatgctgtcaaaatgcttcccgttaagcaaagtcagctgatacttctgcgacgacgtg

SEQ ID NO: 46675 - DNA, 110 bp, synthetic construct
  source 1..110: mol_type = other DNA
gctgtcaaaatgcttcccgttaagcaaagtcagctgatacttctgcgacgacgtggccatgggcaggacacctctccgcagcctcctgattcgcatcagttttctcggtg

SEQ ID NO: 46676 - DNA, 110 bp, synthetic construct
  source 1..110: mol_type = other DNA
ctgtgcccctagtgcctcccaaggaagcccagggacctcagacttaactctacgcaattcagctcctggcttttcagtcccaccttgtaccttcccaggctcttcccagc

SEQ ID NO: 46677 - DNA, 110 bp, synthetic construct
  source 1..110: mol_type = other DNA
gggctgcacctttggcatgtggaggtttccaggctaggggtccagtcagagccatagcagccgacttggaccatagccatagcagtgccagatccgagccgtatcccaga

SEQ ID NO: 46678 - DNA, 110 bp, synthetic construct; identical to SEQ ID NO: 46677
  source 1..110: mol_type = other DNA

SEQ ID NO: 46679 - DNA, 110 bp, synthetic construct
  source 1..110: mol_type = other DNA
gtgtagaagtagagccgactgcggccgctagtcttgtgacctgcagtcttgtcgggctgggctcgcttaccggttctcattgtttcttgtagattcttttaggggtttgt

SEQ ID NO: 46680 - DNA, 110 bp, synthetic construct
  source 1..110: mol_type = other DNA
cctgaccccgcagactggacgctgctggtgcgttgcctgcagacgcttcctccggggagtccccgtctctgcggccagaattcgctgtaactcagacacgtcttttcttc

SEQ ID NO: 46681 - DNA, 110 bp, synthetic construct
  source 1..110: mol_type = other DNA
caggcggtggaggtcaggacggaaccttcgctgaaaaacacccgcacacggggaacccggcgcttcaacccacttcttccagcgccagcttgctgcagcctccgtttaca

SEQ ID NO: 46682 - DNA, 110 bp, synthetic construct
  source 1..110: mol_type = other DNA
tctgggtctcagtggtcccacctgtaacagaggcgtgatgtttcgcgtttcatcgttaccatcacgtaacagaacagcttcacgggctgccggaaggattatgtgagctg

SEQ ID NO: 46683 - DNA, 110 bp, synthetic construct
  source 1..110: mol_type = other DNA
ctattctccagtggggtttatcagtgggtgtggaatacaggtctctgtgctgtgcagctgggccttgttagttatccagactgtagatgatagtttgcatctgctcatcc

SEQ ID NO: 46684 - DNA, 110 bp, synthetic construct
  source 1..110: mol_type = other DNA
agctgggccttgttagttatccagactgtagatgatagtttgcatctgctcatcccaagctccccgtccatcccactccctcccccatccccgttggcaaccacaggtct

SEQ ID NO: 46685 - DNA, 110 bp, synthetic construct
  source 1..110: mol_type = other DNA
gacagtgctgtgttttcttgtggcttcgtgagcttgctgaagctccagcgcccttgtggggcgtctgacaccctgcctgcccagccctgcagcttcctgggcctgcacct

SEQ ID NO: 46686 - DNA, 110 bp, synthetic construct
  source 1..110: mol_type = other DNA
agcaagtgacaggggagattcgatgccacagcagctgccaggcctggacaggagcacgcgctgagctgggaaccaggagaaatgaatgcgctgaggggagagcctgaggc

SEQ ID NO: 46687 - DNA, 110 bp, synthetic construct
  source 1..110: mol_type = other DNA
acgcgctgagctgggaaccaggagaaatgaatgcgctgaggggagagcctgaggcaaagagccccgacttcaaagccgaggactggacagtcagccaccacctgggggcc

SEQ ID NO: 46688 - DNA, 110 bp, synthetic construct
  source 1..110: mol_type = other DNA
aacttgttagagtctgtcttcggatcctgtcacacgcagtggagtgacttcactgaaacagagatgctcccatttcctcctctgtccttgttgctctgttgtcacatttt

SEQ ID NO: 46689 - DNA, 110 bp, synthetic construct
  source 1..110: mol_type = other DNA
gaaaggcttttggagcaaacgaaggttttctcgaggagggagaagccctgccttgggcggcagctgcagctcctggctgccaacagcacagccacgtgggccagttccta

SEQ ID NO: 46690 - DNA, 110 bp, synthetic construct
  source 1..110: mol_type = other DNA
ggcggcagctgcagctcctggctgccaacagcacagccacgtgggccagttcctacccagttcctgcaataaatctcctttggtgtgaaaacctcctaccggctgcgccc

SEQ ID NO: 46691 - DNA, 110 bp, synthetic construct
  source 1..110: mol_type = other DNA
cagcctcccctccgtaatcacccaaggccatcggtgtctctttaacagaaactcttccgaggacacgagaacgtaaaccctcgagaccaccagcaaccccgctccgtctc

SEQ ID NO: 46692 - DNA, 110 bp, synthetic construct
  source 1..110: mol_type = other DNA
tccgaggacacgagaacgtaaaccctcgagaccaccagcaaccccgctccgtctcagaaagcaaaccccaccctaaggggcctccgtcggcacgtcacctgctggaggat

SEQ ID NO: 46693 - DNA, 110 bp, synthetic construct
  source 1..110: mol_type = other DNA
ctcacacgaggaggaggccagcccacagcagcccccacagcacgtcagtgacctggggcagaactgagtccccagggactcactcggacgctgctctgggactttgcaga

SEQ ID NO: 46694 - DNA, 110 bp, synthetic construct
  source 1..110: mol_type = other DNA
gggcagaactgagtccccagggactcactcggacgctgctctgggactttgcagatgtgattcaaaatcccaagtggctgaggatggagtaaaccagagggggagttccc

SEQ ID NO: 46695 - DNA, 110 bp, synthetic construct
  source 1..110: mol_type = other DNA
gaaagatgaaagccatggccaagaccaaaccagttcttcctaattgacacgaccgcatcttgcgtttgtcacaatctaagggccgagagaggccccgcctgggtctggaa

SEQ ID NO: 46696 - DNA, 110 bp, synthetic construct
  source 1..110: mol_type = other DNA
gagttcggacctcaacatcctgtttggggggacacctttcaaccctaacagagggacagcacaacagctgcttcctaaaggagcctgtgccgggggtgcaggatggccac

SEQ ID NO: 46697 - DNA, 110 bp, synthetic construct
  source 1..110: mol_type = other DNA
aagtgtctaggggtggagttctggggttcagctccttgggctcaatggctgtgcggaacacctggagcaatttccttctcaccctgcagcgcagggcacttccagcgtgc

SEQ ID NO: 46698 - DNA, 110 bp, synthetic construct
  source 1..110: mol_type = other DNA
tggagatgagacccacccactgaataaatctgcatctttacttagaactgatatgtggatctatctgcacagctacaatttgagctctagggatcacaaaatctagcaga

SEQ ID NO: 46699 - DNA, 110 bp, synthetic construct
  source 1..110: mol_type = other DNA
aatattagtaagacagaaattacagtaaaacccgagtccccacggtggcaaagtgggttaaaggatctggcgttgttggagttgccgtggctcagtggttaacaaacgcc

SEQ ID NO: 46700 - DNA, 110 bp, synthetic construct
  source 1..110: mol_type = other DNA
ttaggactgataaacaaattcagcaaagtaacaggatacaagattgacacatacaggagttcctgctgtggcacaaggggacgggtggcatcttggaagctctgggacac

SEQ ID NO: 46701 - DNA, 110 bp, synthetic construct
  source 1..110: mol_type = other DNA
aagtaacaggatacaagattgacacatacaggagttcctgctgtggcacaaggggacgggtggcatcttggaagctctgggacacaggttcaacccccagcctggcagag

SEQ ID NO: 46702 - DNA, 110 bp, synthetic construct
  source 1..110: mol_type = other DNA
gagtggaatctgagctgctgcagccgtggcaagccagatcctttcctttaacccactgctttgggctggagattgaacctgcttgatggcagtgacccaaaccactgcag

SEQ ID NO: 46703 - DNA, 110 bp, synthetic construct
  source 1..110: mol_type = other DNA
ctgctttgggctggagattgaacctgcttgatggcagtgacccaaaccactgcagacagattcttaacccactgcgccatggtggaaactcctgtttcagtctttcagct

SEQ ID NO: 46704 - DNA, 110 bp, synthetic construct
  source 1..110: mol_type = other DNA
ggactcagttcactgcattagggccttggatgcctaattttaacacagagcttggtgcacaggagatattcagtagccgttgtgttgagtgaatgagtgagtgaatggat

SEQ ID NO: 46705 - DNA, 110 bp, synthetic construct
  source 1..110: mol_type = other DNA
tgcacaggagatattcagtagccgttgtgttgagtgaatgagtgagtgaatggatgaattccagagttctggctgtgtgccaggagatatcacactcttgtctgtgggag

SEQ ID NO: 46706 - DNA, 110 bp, synthetic construct
  source 1..110: mol_type = other DNA
tgagccaggacctaaagaggcaggacgcgagacatggacatgagccagccctggcatcaaaccaacaacttcccagctgtggaacggggcaggtctcagcctctctgagc

SEQ ID NO: 46707 - DNA, 110 bp, synthetic construct
  source 1..110: mol_type = other DNA
atcaaaccaacaacttcccagctgtggaacggggcaggtctcagcctctctgagcctcaattttctcgtatgcaaaatgggcacaatacttgtacatatgtctctgagag

SEQ ID NO: 46708 - DNA, 110 bp, synthetic construct
  source 1..110: mol_type = other DNA
ctgaggtccttttccatgttctatttggtaaccatttaaaatccacatatctatactcagctgatttccttaagccttagtgggtgtctgggctcctcgggctgctgagt

SEQ ID NO: 46709 - DNA, 110 bp, synthetic construct
  source 1..110: mol_type = other DNA
ctcagctgatttccttaagccttagtgggtgtctgggctcctcgggctgctgagtacagttgtataggttgtgcactgcacaatcctagacactagtcacatgatagtca

SEQ ID NO: 46710 - DNA, 110 bp, synthetic construct
  source 1..110: mol_type = other DNA
ccagcacatgtgtgcacatatacacatgcagacacaccctggatggtgagatgtgcccaccattgatctcccactcgtgagcgcgtggctggactgagaaggttctaagg

SEQ ID NO: 46711 - DNA, 110 bp, synthetic construct
  source 1..110: mol_type = other DNA
cccaccattgatctcccactcgtgagcgcgtggctggactgagaaggttctaaggcaggttggcttttggcaagtatctaatacaggtggcctctgagtcctatcattgt

SEQ ID NO: 46712 - DNA, 110 bp, synthetic construct
  source 1..110: mol_type = other DNA
gtggccccaggggcagcccccaccagaggccggagaaaggggccaatacccagctcttttgtttctcaggcagataattttgcttctttcacgtcctccaccagggtccc

SEQ ID NO: 46713 - DNA, 110 bp, synthetic construct
  source 1..110: mol_type = other DNA
cttttgtttctcaggcagataattttgcttctttcacgtcctccaccagggtccccaccaggacagcaccccagtggctcctcttcatcatgccccccaggctggctcct

SEQ ID NO: 46714 - DNA, 110 bp, synthetic construct
  source 1..110: mol_type = other DNA
tgatgaacgggcaatattacatatgtatgtaatacacgcacttgaccgctaagtttcctctcacttgccagcccctgtgaatgagacgtggatgcgggtatgttgtgttg

SEQ ID NO: 46715 - DNA, 110 bp, synthetic construct
  source 1..110: mol_type = other DNA
tcctctcacttgccagcccctgtgaatgagacgtggatgcgggtatgttgtgttgacagcgtcgtggggccgtccctggtgtctgcagggaggagcaaggtcatggacca

SEQ ID NO: 46716 - DNA, 110 bp, synthetic construct
  source 1..110: mol_type = other DNA
gttcaggacaggccaccaccgccagcgagtcactgaacctctgcgtgctgcagtttctgtatgtggcaggtgggatgagagccgccctagcccccggggttgtggcagtt

SEQ ID NO: 46717 - DNA, 110 bp, synthetic construct
  source 1..110: mol_type = other DNA
tctgtatgtggcaggtgggatgagagccgccctagcccccggggttgtggcagttcaacaccttagaattcggaagcaccgagcccagcgcccacacaaggctgacactc

SEQ ID NO: 46718 - DNA, 110 bp, synthetic construct
  source 1..110: mol_type = other DNA
aaaaaaaaaaaaaaaaaaaaaatctccataagcctcagtttccccatctgttaaatgggaaccacaccagaatgccatgtagtgttgttttaaagtggatgcagcgccat

SEQ ID NO: 46719 - DNA, 110 bp, synthetic construct
  source 1..110: mol_type = other DNA
tgggaaccacaccagaatgccatgtagtgttgttttaaagtggatgcagcgccatcttgccgtcgtcaagtgtcccgaaagttaatagatcaggtgtctgtccatctagc

SEQ ID NO: 46720 - DNA, 110 bp, synthetic construct
  source 1..110: mol_type = other DNA
ctgcgccacgacgggaactctaaacttgttaaaattactcttacgcctgctcttgtggtcctgctccgtgatcccagctgttacttcgatgtcatagcgtgtattagtga

SEQ ID NO: 46721 - DNA, 110 bp, synthetic construct; identical to SEQ ID NO: 46720
  source 1..110: mol_type = other DNA

SEQ ID NO: 46722 - DNA, 110 bp, synthetic construct
  source 1..110: mol_type = other DNA
cccactgcgctgtgataatctgatgtaagccaggcactgatttacacgcgccagacaaacaaacatacctgtagaccatcaagctggaatttcttccatactttcttctt

SEQ ID NO: 46723 - DNA, 110 bp, synthetic construct
  source 1..110: mol_type = other DNA
caaacaaacatacctgtagaccatcaagctggaatttcttccatactttcttcttatgcattaaggaactgcttttatttcgctcttgccggagggaagtgatatattta

SEQ ID NO: 46724 - DNA, 110 bp, synthetic construct
  source 1..110: mol_type = other DNA
agccagtttcccaacacggttccttattgtgagtgttgcttgtccttccttagtctgtgtcttgagttccgattttgactctgttactgagaagctgtggttgtgccgat

SEQ ID NO: 46725 - DNA, 110 bp, synthetic construct
  source 1..110: mol_type = other DNA
tgtgtcttgagttccgattttgactctgttactgagaagctgtggttgtgccgatgcccctgggtgaggggaggggcacagtcaggagggggtactatgcatccttcgta

SEQ ID NO: 46726 - DNA, 110 bp, synthetic construct
  source 1..110: mol_type = other DNA
acaccttaagtaggtcccgaggtcccatgcccagaaatacacatgcgtgaatgagcatactgctgggccttctggaaggttctaccccctggtacaccctagcagtgcag

SEQ ID NO: 46727 - DNA, 110 bp, synthetic construct
  source 1..110: mol_type = other DNA
catactgctgggccttctggaaggttctaccccctggtacaccctagcagtgcaggaatgtgtctgtcttggtgacagatcttttagagcccagtttccacagactgtgg

SEQ ID NO: 46728 - DNA, 110 bp, synthetic construct
  source 1..110: mol_type = other DNA
gtgtcgatctttgggttgtcactactcctgctgtgccgttctcactcgcgtgatatgaaagcacaaagcttgcgcaggctttacccttgcaagccgcctttgagaagagt

SEQ ID NO: 46729 - DNA, 110 bp, synthetic construct
  source 1..110: mol_type = other DNA
tgaaagcacaaagcttgcgcaggctttacccttgcaagccgcctttgagaagagtccccttgaagccggtagcccgggtcccctcactgggtgtcgtaaagccattcata

SEQ ID NO: 46730 - DNA, 110 bp, synthetic construct
  source 1..110: mol_type = other DNA
cagcatcgatactcgagaatgtgctgcggcccatcgcttcagctttaccaatccgtttgctctgctgtaaacgggaggcggctctgacccatctcccggcatctcgggac

SEQ ID NO: 46731 - DNA, 110 bp, synthetic construct
  source 1..110: mol_type = other DNA
tttgctctgctgtaaacgggaggcggctctgacccatctcccggcatctcgggacattaaagagtctgttccccagctgtccacctcttcttcggctgctcctgtgagcg

SEQ ID NO: 46732 - DNA, 110 bp, synthetic construct
  source 1..110: mol_type = other DNA
cttcccctcttgacaaaaactgaccctgtgaaactctccgtgaacctgaatgctcccaaaatatagatgcatcctggactccatcccctctagaaattctcttttgcttt

SEQ ID NO: 46733 - DNA, 110 bp, synthetic construct
  source 1..110: mol_type = other DNA
ccaaaatatagatgcatcctggactccatcccctctagaaattctcttttgcttttcctttgctctggagccctgtgcccacgtaacactacccagatctcccgaaatct

SEQ ID NO: 46734 - DNA, 110 bp, synthetic construct
  source 1..110: mol_type = other DNA
tgtctcatgtttacggctttaagccgttgtgagtttacctttgtgcatggtgtgagggcaggttccagcttcactgatttacatgctgctgtccagctttcttaccacca

SEQ ID NO: 46735 - DNA, 110 bp, synthetic construct
  source 1..110: mol_type = other DNA
gggcaggttccagcttcactgatttacatgctgctgtccagctttcttaccaccacttgctggagagcctgtcttttcccccaggcatagtcttgcctccttcgccagag

SEQ ID NO: 46736 - DNA, 110 bp, synthetic construct
  source 1..110: mol_type = other DNA
cagcggggccttggtgtcaggcggaggagctagaaagccccgggggagctggcctggccctagggtagatcagctggtgaccaagggacacatcgactcccttagcaaag

SEQ ID NO: 46737 - DNA, 110 bp, synthetic construct
  source 1..110: mol_type = other DNA
ggccctagggtagatcagctggtgaccaagggacacatcgactcccttagcaaagagaacaaactaaattgctagggacacgtccagcctcaagttcaaaaactgggcaa

SEQ ID NO: 46738 - DNA, 110 bp, synthetic construct
  source 1..110: mol_type = other DNA
ttgacgtaagctaaggtttccgcaactgaatctgctcccccgccaggcacaacactgaaacttattttaatggttttaggtgagaaatattcaataatggcttttagcct

SEQ ID NO: 46739 - DNA, 110 bp, synthetic construct
  source 1..110: mol_type = other DNA
tgaaacttattttaatggttttaggtgagaaatattcaataatggcttttagccttttctctgtgacaaacggtgaccgttcagcgtgagactgtcaagcttgaggcttg

SEQ ID NO: 46740 - DNA, 110 bp, synthetic construct
  source 1..110: mol_type = other DNA
gtccgcacgcagtagggacacaataaatatgggtggaaggaacagtctcttgactttaaggtgtggagagccccccaggaccgctgattggcgggggcaccttggcgcct

SEQ ID NO: 46741 - DNA, 110 bp, synthetic construct
  source 1..110: mol_type = other DNA
tctcttgactttaaggtgtggagagccccccaggaccgctgattggcgggggcaccttggcgcctccctccctcccccgggaggggtcaggtgcagctcctgcccacccc

SEQ ID NO: 46742 - DNA, 110 bp, synthetic construct
  source 1..110: mol_type = other DNA
ttgccatctttgtatcttctttggagatatttctgttcagatcttttgctaatttttttcatttgtttttgctttttagggctgcccctgaggcatatggaagttcctag

SEQ ID NO: 46743 - DNA, 110 bp, synthetic construct
  source 1..110: mol_type = other DNA
cttctttggagatatttctgttcagatcttttgctaatttttttcatttgtttttgctttttagggctgcccctgaggcatatggaagttcctaggatagaggtccagtt

SEQ ID NO: 46744 - DNA, 110 bp, synthetic construct
  source 1..110: mol_type = other DNA
aggcggtctagaaccgaccaggtcctgcctgggactgacgcaccttcggcacccatgctcagccgatagatgagggtttttttggggggcgggggctgctgtaagatgga

SEQ ID NO: 46745 - DNA, 110 bp, synthetic construct
  source 1..110: mol_type = other DNA
tgctcagccgatagatgagggtttttttggggggcgggggctgctgtaagatggagagccccccttatggggacccagcccttgcacagagcaccaggtcctgggggtcc

SEQ ID NO: 46746 - DNA, 110 bp, synthetic construct
  source 1..110: mol_type = other DNA
ggcgtcacctggcacagctgtccccccagctctgggctccattcctggatttcctaaaaacgccgccttggctgccacgcagaagagccaccaaaaaggggaatgggagc

SEQ ID NO: 46747 - DNA, 110 bp, synthetic construct
  source 1..110: mol_type = other DNA
aaaaacgccgccttggctgccacgcagaagagccaccaaaaaggggaatgggagcaaggatggggcccttttggaagccagggtagcagggcagagcacggaacattccg

SEQ ID NO: 46748 - DNA, 110 bp, synthetic construct
  source 1..110: mol_type = other DNA
cagtgctgagtgaacaagagacagagagatcctgtaggattctactcacaggagctccctagaggagtcagatccacagagacggagcatagaacagcgggtgtcggggg

SEQ ID NO: 46749 - DNA, 110 bp, synthetic construct
  source 1..110: mol_type = other DNA
tccctagaggagtcagatccacagagacggagcatagaacagcgggtgtcgggggctgcgggggcaggtcgcttgctgggggttggtgtttagtggggacagagtttcag

SEQ ID NO: 46750 - DNA, 110 bp, synthetic construct
  source 1..110: mol_type = other DNA
aagcaagaaaggaaccctcactcctcctggagcctctagaaggaattaaccctgccgacaccttgattttggacttctagactccagcaccctgagagaataaattcttg

SEQ ID NO: 46751 - DNA, 110 bp, synthetic construct
  source 1..110: mol_type = other DNA
cgacaccttgattttggacttctagactccagcaccctgagagaataaattcttgtggtttcaaagtttgtgatgatgtgtcatggcagccccagaacactgatatgggg

SEQ ID NO: 46752 - DNA, 110 bp, synthetic construct
  source 1..110: mol_type = other DNA
catcgcatggatgggccacatttggcttagccgtcatccgtggagagacgcttgggctgttgccactttgtgtttacgtaacgggtgccgacgtgagctgcggtggacac

SEQ ID NO: 46753 - DNA, 110 bp, synthetic construct
  source 1..110: mol_type = other DNA
gctgttgccactttgtgtttacgtaacgggtgccgacgtgagctgcggtggacacgtggttatgggcatctgtgtcttcaggtcgcgtgggcatctacctgggagtggca

SEQ ID NO: 46754 - DNA, 110 bp, synthetic construct
  source 1..110: mol_type = other DNA
atgccaccaaggcctgtatgcggagccgtgtccatcagggggaacactgagggctgtgggatcctggggggggagcttaggaggacatttggacaggagactaagagggc

SEQ ID NO: 46755 - DNA, 110 bp, synthetic construct
  source 1..110: mol_type = other DNA
gtgggatcctggggggggagcttaggaggacatttggacaggagactaagagggcattaaaccactcagggctgggaagtcagtcgggaactcacgacacacggttctga

SEQ ID NO: 46756 - DNA, 110 bp, synthetic construct
  source 1..110: mol_type = other DNA
gcccagggagaggactcaggacccagggaccagggtgctgaattctggtctggcctccggggtacagctgtgtgacgtggggagagtcgaacgacctctctgagcaaatt

SEQ ID NO: 46757 - DNA, 110 bp, synthetic construct
  source 1..110: mol_type = other DNA
tccggggtacagctgtgtgacgtggggagagtcgaacgacctctctgagcaaattttccctgtttccccgctctgggaacagagaacccgggcagccccagagacaataa

SEQ ID NO: 46758 - DNA, 110 bp, synthetic construct; identical to SEQ ID NO: 46756
  source 1..110: mol_type = other DNA

SEQ ID NO: 46759 - DNA, 110 bp, synthetic construct; identical to SEQ ID NO: 46757
  source 1..110: mol_type = other DNA

SEQ ID NO: 46760 - DNA, 110 bp, synthetic construct
  source 1..110: mol_type = other DNA
ctcctgggagtcagaacttcgaggcatgaacttttaggggaaacgcaatttactcaaaacacagggacacctccaaagtggaaggaggggtggggtgcacaggctcggct

SEQ ID NO: 46761 - DNA, 110 bp, synthetic construct
  source 1..110: mol_type = other DNA
aaaacacagggacacctccaaagtggaaggaggggtggggtgcacaggctcggctggctgcctgcctgggcgccctgggtgtgcaaattcccgacagtgtcgggggcagc

SEQ ID NO: 46762 - DNA, 110 bp, synthetic construct
  source 1..110: mol_type = other DNA
tagggctggggcaccgtgctgtgtggcagaaaccagcacggtaaatcaactccactttaaaaagagcctgtgtgtgtgaaagtcccttgcagattacactggggtgtcaa

SEQ ID NO: 46763 - DNA, 110 bp, synthetic construct
  source 1..110: mol_type = other DNA
tttaaaaagagcctgtgtgtgtgaaagtcccttgcagattacactggggtgtcaaagtgaggggttatcttggcaacaaggactctgactcctccctgtgcccgtcttta

SEQ ID NO: 46764 - DNA, 110 bp, synthetic construct
  source 1..110: mol_type = other DNA
tccttccccttagccacacacgtggcccagctccgggcgaggcccgccgggtggagctcccgctcgagacccacatcctggctgccaagggcaaaccggcttttcttcct

SEQ ID NO: 46765 - DNA, 110 bp, synthetic construct
  source 1..110: mol_type = other DNA
gctcccgctcgagacccacatcctggctgccaagggcaaaccggcttttcttcctcaaaacagcactgacaggcgtctccacgaaccagtgttcccatctcgcctgctcc

SEQ ID NO: 46766 - DNA, 110 bp, synthetic construct
  source 1..110: mol_type = other DNA
gcgctgtgaattttcagccacacgcccctatgagggagcttgacctttgggtctcaagtcctgcccctccctccacgtctaacgaacttggaagagtcaaaacgttcatt

SEQ ID NO: 46767 - DNA, 110 bp, synthetic construct
  source 1..110: mol_type = other DNA
aagtcctgcccctccctccacgtctaacgaacttggaagagtcaaaacgttcattcagggaaaagcagactggttttccttgtcctttcaagtttgaatcagttcattga

SEQ ID NO: 46768 - DNA, 110 bp, synthetic construct
  source 1..110: mol_type = other DNA
aggtgagctcgccatcctcagcgctgcgcttccagccatcacctcacttctcccgaatttccagaactctccactttgctccgtggatgatgcaaagcagggacaccaca

SEQ ID NO: 46769 - DNA, 110 bp, synthetic construct
  source 1..110: mol_type = other DNA
aatttccagaactctccactttgctccgtggatgatgcaaagcagggacaccacacttgcgagcttaggggataacgtgcagtggtgtaggtttagcctgtttcctactg

SEQ ID NO: 46770 - DNA, 110 bp, synthetic construct
  source 1..110: mol_type = other DNA
catgtgaagcgccatgtgtcctgggcttatgtgtcctgggcttccagccactttctaagcacccaacaaaatcagaccttctcacagagctagcgtttcacggaatcctg

SEQ ID NO: 46771 - DNA, 110 bp, synthetic construct
  source 1..110: mol_type = other DNA
taagcacccaacaaaatcagaccttctcacagagctagcgtttcacggaatcctgtttccccaccaaccttcatgggatcccacagagaaaaaacacatgacctaagaac

SEQ ID NO: 46772 - DNA, 110 bp, synthetic construct
  source 1..110: mol_type = other DNA
tgttcccaggagagggcagggcaacctgagcttcaagacaaggggcagaagggagctaccggcagacagtttctggtttctcgggtcttctgctgaaaatggggtattga

SEQ ID NO: 46773 - DNA, 110 bp, synthetic construct
  source 1..110: mol_type = other DNA
ctaccggcagacagtttctggtttctcgggtcttctgctgaaaatggggtattgattgaaaagcttttccaaacagaaagtagcccactcatgaaaagtctgttttctga

SEQ ID NO: 46774 - DNA, 110 bp, synthetic construct
  source 1..110: mol_type = other DNA
ctgagccacatcccgaacttcaggaagctccctgaatgtcacggtttttcctggggctgactctgttttggggcctgcctgttgcttactgccgacgtccctaatgaagc

SEQ ID NO: 46775 - DNA, 110 bp, synthetic construct
  source 1..110: mol_type = other DNA
gctgactctgttttggggcctgcctgttgcttactgccgacgtccctaatgaagcgggcgttgcccacagcctgactctgccacgttatgccagatcacataacgtggtc

SEQ ID NO: 46776 - DNA, 110 bp, synthetic construct
  source 1..110: mol_type = other DNA
ccgaagtgctctgttgccagcagttttattttagaaagaatccaggcatctgggaatgaatccagttttctgttggaagagagtttaaagccgatcggttacgagcactg

SEQ ID NO: 46777 - DNA, 110 bp, synthetic construct
  source 1..110: mol_type = other DNA
atgaatccagttttctgttggaagagagtttaaagccgatcggttacgagcactgatggtggagccagggtatcttgtcttgacttgtggccttgctgtgctgtgtgacc

SEQ ID NO: 46778 - DNA, 110 bp, synthetic construct
  source 1..110: mol_type = other DNA
gggttgttttcttccttagtgaaccttgtttgcgtaacatctcggggtgtctatataaggtaaggtcagcttcagccccgccgcccgccccgcaattgagcggtgctctg

SEQ ID NO: 46779 - DNA, 110 bp, synthetic construct
  source 1..110: mol_type = other DNA
taaggtaaggtcagcttcagccccgccgcccgccccgcaattgagcggtgctctggggcaatttcctgctgtttccctccccccgtctttggtcttgctctgaagttcat

SEQ ID NO: 46780 - DNA, 110 bp, synthetic construct
  source 1..110: mol_type = other DNA
atctctcagaggaggccgtggcctttcttcctctcagatgagaatggggccttaatataaaccctccagagcagggggcttaagtactcagaggtgtgagccacagagca

SEQ ID NO: 46781 - DNA, 110 bp, synthetic construct
  source 1..110: mol_type = other DNA
tataaaccctccagagcagggggcttaagtactcagaggtgtgagccacagagcagacctgcgggactgcatggcactgccccccattcagctcccaggcctcacacctg

SEQ ID NO: 46782 - DNA, 110 bp, synthetic construct
  source 1..110: mol_type = other DNA
atccagtgatgctgtgacctgcagtgtaggtcacagatgcagctccgatcctgtcttgctgggaccatagcgtaggctggcggctctcactccagttcaacccctagcct

SEQ ID NO: 46783 - DNA, 110 bp, synthetic construct; identical to SEQ ID NO: 46782
  source 1..110: mol_type = other DNA

SEQ ID NO: 46784 - DNA, 110 bp, synthetic construct
  source 1..110: mol_type = other DNA
taaatagtagtgtgtatatgttaacccccaaattctaatttatcccccccatgctctcactttggtaactgtaagtttgttttcaaaatctgtgtgtctattactgttgt

SEQ ID NO: 46785 - DNA, 110 bp, synthetic construct
  source 1..110: mol_type = other DNA
ccccaaattctaatttatcccccccatgctctcactttggtaactgtaagtttgttttcaaaatctgtgtgtctattactgttgtataaataagttcatttgtatcattt

SEQ ID NO: 46786 - DNA, 110 bp, synthetic construct
  source 1..110: mol_type = other DNA
ctgggtgctcgctacaggctggtccatcatcagaaagcctggttgaggatgtgaccattcagccaaagccacacgtggctacggcatgtcatcagctctctggtgctact

SEQ ID NO: 46787 - DNA, 110 bp, synthetic construct
  source 1..110: mol_type = other DNA
cattcagccaaagccacacgtggctacggcatgtcatcagctctctggtgctactgtttgtgaaaagtgccattaccttgtacgccaccgaggaaggaaaaaatgctgcc

SEQ ID NO: 46788 - DNA, 110 bp, synthetic construct
  source 1..110: mol_type = other DNA
tgggaagagatgtgtaatagcaccttgatagatggcatttctgccacacagatgccacagacacaaatgaccccgagagctgagagaatggtaggaatgctaccaaaatc

SEQ ID NO: 46789 - DNA, 110 bp, synthetic construct
  source 1..110: mol_type = other DNA
cacagacacaaatgaccccgagagctgagagaatggtaggaatgctaccaaaatcatcaggaactgattctcccaaggagaactgactttctttcttaacatacattata

SEQ ID NO: 46790 - DNA, 110 bp, synthetic construct
  source 1..110: mol_type = other DNA
atgagtgggatggttggatggatggatggatggatggataaaagaagatgtggttgctgactcaaaagggattccagcttgtaggggagggagacatgtaaccaaaattt

SEQ ID NO: 46791 - DNA, 110 bp, synthetic construct
  source 1..110: mol_type = other DNA
gctgactcaaaagggattccagcttgtaggggagggagacatgtaaccaaaatttacaggagcatttgatgagtgccttacttacggagtaaagggcatttgatccgcgg

SEQ ID NO: 46792 - DNA, 110 bp, synthetic construct
  source 1..110: mol_type = other DNA
tttccttaaataattaatttcttggcatactttaatcttcaaagccctcaacacctgcagctggtgctacggaaagcaattaaattcctaccacagcaaaatgaaattct

SEQ ID NO: 46793 - DNA, 110 bp, synthetic construct
  source 1..110: mol_type = other DNA
tgcagctggtgctacggaaagcaattaaattcctaccacagcaaaatgaaattctcccctcctggcttggagaacaaaacctgacagtatcgaagtgactgctgaccctc

SEQ ID NO: 46794 - DNA, 110 bp, synthetic construct
  source 1..110: mol_type = other DNA
ccatgagttatgaggggttcaaacaggatccatacctcccaccttttaaaaaatgtcttaaatagcagcctcctttctcccaatgaaatctttcaggtatgactcaggac

SEQ ID NO: 46795 - DNA, 110 bp, synthetic construct
  source 1..110: mol_type = other DNA
tcttaaatagcagcctcctttctcccaatgaaatctttcaggtatgactcaggacttaagatcataattgtaacaacaacgagcacttaaatgggacttgctttgcccta

SEQ ID NO: 46796 - DNA, 110 bp, synthetic construct
  source 1..110: mol_type = other DNA
gtgacttgaggatggatgagttaattcttcaacacaatgcaagtgggtcttgacccactggctctattttcatggcttttaagacgtaagaaattggtacctggaaggcc

SEQ ID NO: 46797 - DNA, 110 bp, synthetic construct
  source 1..110: mol_type = other DNA
cactggctctattttcatggcttttaagacgtaagaaattggtacctggaaggcccgtcagaaaacagactatgcaggcagcttgtatgagatggctatgaacctctgga

SEQ ID NO: 46798 - DNA, 110 bp, synthetic construct
  source 1..110: mol_type = other DNA
gcacacggccactccaggtactcggatctgattggtgagagatgtgcaaggtatgacctgtttcaagaagtcccacctctcctgctttggcattaagagacacaggcagc

SEQ ID NO: 46799 - DNA, 110 bp, synthetic construct
  source 1..110: mol_type = other DNA
acctgtttcaagaagtcccacctctcctgctttggcattaagagacacaggcagctcccctgggggccgcccaccacctacatacagtgagtctcgagggtttgcgtggt

SEQ ID NO: 46800 - DNA, 110 bp, synthetic construct
  source 1..110: mol_type = other DNA
ctggatattgtgccattttcatgtcctatctggtcaataaagagacacaattcaaatgtgcaagaatacccattcctggaacttagcagatgcctcctcctgctcattcg

SEQ ID NO: 46801 - DNA, 110 bp, synthetic construct
  source 1..110: mol_type = other DNA
atgtgcaagaatacccattcctggaacttagcagatgcctcctcctgctcattcgcaactcagccctatcaccctggagccctgaacttgagttagggccaggcccccca

SEQ ID NO: 46802 - DNA, 110 bp, synthetic construct
  source 1..110: mol_type = other DNA
aaaaaacaaccttcagttgtctcaatgaacaagaaacagaaaaatgaaggtgggagaggggctcggttggagccgccacatcgtcgcagaccagcgcaggtgcaaggagg

SEQ ID NO: 46803 - DNA, 110 bp, synthetic construct
  source 1..110: mol_type = other DNA
gaggggctcggttggagccgccacatcgtcgcagaccagcgcaggtgcaaggaggcaggacagcaccttaagaaagaccattggctctaaagtgcatcccggccccgccg

SEQ ID NO: 46804 - DNA, 110 bp, synthetic construct
  source 1..110: mol_type = other DNA
atgacggtctcctaaacacgtccacactctaaacagcagaacctatgagtatgtttccttatatggaaaaaggggcttcctagatgtagctgaggaccatgagttgcaaa

SEQ ID NO: 46805 - DNA, 110 bp, synthetic construct
  source 1..110: mol_type = other DNA
tccttatatggaaaaaggggcttcctagatgtagctgaggaccatgagttgcaaagatggtccatttgggtggacccaatgtcatcacaagggttcttataaaagagagg

SEQ ID NO: 46806 - DNA, 110 bp, synthetic construct
  source 1..110: mol_type = other DNA
gataaagccagtactgtcatcatgtgctgactggggtggctcgggcacaagtacttgctggagaaattctttgagctttgccagatgtttgaaaaatagtcataataaaa

SEQ ID NO: 46807 - DNA, 110 bp, synthetic construct
  source 1..110: mol_type = other DNA
tgctggagaaattctttgagctttgccagatgtttgaaaaatagtcataataaaatgtgcggtagaatgaggcttgttgttgttgtttttgctttttatggccgcacccc

SEQ ID NO: 46808 - DNA, 110 bp, synthetic construct
  source 1..110: mol_type = other DNA
gtttgctggtctgaaggggacactttgtctgtgaatcagggctggtatctgatactgtgggcacagcatgaaccctggagtcgcatggcccagcttcaacaaatcaagtg

SEQ ID NO: 46809 - DNA, 110 bp, synthetic construct
  source 1..110: mol_type = other DNA
tgtgggcacagcatgaaccctggagtcgcatggcccagcttcaacaaatcaagtggttctggaggccacttacctcgggcaaggcacttgatttttttgagcctcagctt

SEQ ID NO: 46810 - DNA, 110 bp, synthetic construct
  source 1..110: mol_type = other DNA
tgcctggcaaccacacctggctggtggcagccacaccagacagccccagatgaaacgtttccatcatcaaggagctctgtggcgcagggcaattatagtcaggtgcaagg

SEQ ID NO: 46811 - DNA, 110 bp, synthetic construct
  source 1..110: mol_type = other DNA
cgtttccatcatcaaggagctctgtggcgcagggcaattatagtcaggtgcaaggggacccacttttgtaaagatgattgatgactcctccctgcaaacattaggctatc

SEQ ID NO: 46812 - DNA, 110 bp, synthetic construct; identical to SEQ ID NO: 46810
  source 1..110: mol_type = other DNA

SEQ ID NO: 46813 - DNA, 110 bp, synthetic construct; identical to SEQ ID NO: 46811
  source 1..110: mol_type = other DNA

SEQ ID NO: 46814 - DNA, 110 bp, synthetic construct
  source 1..110: mol_type = other DNA
ctctctgtattttcttcataactcacatctcatttttcacagacagtcttcaacatactttatacaagttgctaagtcatgaaaacatgctgccgaatttggcaataatt

SEQ ID NO: 46815 - DNA, 110 bp, synthetic construct; identical to SEQ ID NO: 46814
  source 1..110: mol_type = other DNA

SEQ ID NO: 46816 - DNA, 110 bp, synthetic construct
  source 1..110: mol_type = other DNA
tcctttgatctacatggggttgtttccactttttggctactgtgaatatgccactctgaacattcaagggcacgttttcaagtggacgcatgctttcactctcttgggca

SEQ ID NO: 46817 - DNA, 110 bp, synthetic construct
  source 1..110: mol_type = other DNA
ctgaacattcaagggcacgttttcaagtggacgcatgctttcactctcttgggcagatagctggggtggagctgctggggcccgcagtgacgctgtgtaaggcgtcgtgg

SEQ ID NO: 46818 - DNA, 110 bp, synthetic construct
  source 1..110: mol_type = other DNA
tggtaataaatgaagtcgtgtctgccctcagggagtaccagtctgcaggcggcagaaatggatacctataatgttgatccaacgcatgctgggaagaatgatgtgattga

SEQ ID NO: 46819 - DNA, 110 bp, synthetic construct
  source 1..110: mol_type = other DNA
aaatggatacctataatgttgatccaacgcatgctgggaagaatgatgtgattgaggcaggaacaaaatgctggggaaagagacccagttaattctgactgggagattca

SEQ ID NO: 46820 - DNA, 110 bp, synthetic construct
  source 1..110: mol_type = other DNA
gcctgggactgcctggctacagatctttatgtgagagaaactatacctctatcttgtttaacatggcattatttccaggctgttatttgcagctgactctaattcctttt

SEQ ID NO: 46821 - DNA, 110 bp, synthetic construct
  source 1..110: mol_type = other DNA
gtttaacatggcattatttccaggctgttatttgcagctgactctaattccttttttaaacagatcagaaaatgcatttctctggaaatggaaaaccatgtaaaatagag

SEQ ID NO: 46822 - DNA, 110 bp, synthetic construct
  source 1..110: mol_type = other DNA
taaccctcagttctgatcactctgtggctctgctctaaatccttctgtggctccctattgctacctggacacagctctgtggaatgacaattgaaggcccttggaaattt

SEQ ID NO: 46823 - DNA, 110 bp, synthetic construct
  source 1..110: mol_type = other DNA
tattgctacctggacacagctctgtggaatgacaattgaaggcccttggaaatttgtccccttctacttgcatttcttttcttttcttttgctttttagggctgcgttca

SEQ ID NO: 46824 - DNA, 110 bp, synthetic construct
  source 1..110: mol_type = other DNA
caaatagaaccacctcacaaggatgctcaaggatacaatgaatcgacactcttctagctataagacgccagactcgtgcttgctgttattgtttccctctggtttggggt

SEQ ID NO: 46825 - DNA, 110 bp, synthetic construct
  source 1..110: mol_type = other DNA
agctataagacgccagactcgtgcttgctgttattgtttccctctggtttggggttgaaatatcaggagaaaggggtggagaattatgcgagagtgcagaggaagaaaaa

SEQ ID NO: 46826 - DNA, 110 bp, synthetic construct
  source 1..110: mol_type = other DNA
ctgctggcactgactgcactggatgaacatgcaggtaaaggagcccactgacacagggtagacaggccatatagccgggacaccaaggtagagagtggatctagatggaa

SEQ ID NO: 46827 - DNA, 110 bp, synthetic construct
  source 1..110: mol_type = other DNA
gggtagacaggccatatagccgggacaccaaggtagagagtggatctagatggaaaacatccagaacaggttgtcaaagtggcctgtctgataagatatttaaccagagg

SEQ ID NO: 46828 - DNA, 110 bp, synthetic construct
  source 1..110: mol_type = other DNA
gcttctggggaaaccaagaataagacacttcctccacaccttgattcaatggattcaactgagccactaaaaagcttcagtcgccaacttggcccaagcagaaacccctg

SEQ ID NO: 46829 - DNA, 110 bp, synthetic construct
  source 1..110: mol_type = other DNA
caactgagccactaaaaagcttcagtcgccaacttggcccaagcagaaacccctggctgaggtagagaagccttgttttctgaactctggctgaacattcacgttcccct

SEQ ID NO: 46830 - DNA, 110 bp, synthetic construct
  source 1..110: mol_type = other DNA
ggtccatgtacatggggtcttacaccacataggattgtcccctataaattctgagttaccctgatggccaggctttggtgggaaaaacagctcccatctatttataatta

SEQ ID NO: 46831 - DNA, 110 bp, synthetic construct
  source 1..110: mol_type = other DNA
ttaccctgatggccaggctttggtgggaaaaacagctcccatctatttataattatctgggtctagaatttaacccagtcttacatttcaaccccgaatatcttggcaga

SEQ ID NO: 46832 - DNA, 110 bp, synthetic construct
  source 1..110: mol_type = other DNA
aggcgcttgtattgccagacagggaaggagaatggcttgcctttggccccctggctgaagacgaaaggtttctctgtgcgccgcttctaaggtaaagagaaaaaagtccc

SEQ ID NO: 46833 - DNA, 110 bp, synthetic construct
  source 1..110: mol_type = other DNA
tgaagacgaaaggtttctctgtgcgccgcttctaaggtaaagagaaaaaagtcccacccatgtccccaaagtggttcttagtaaacggcaattatgaaacgaaataactg

SEQ ID NO: 46834 - DNA, 110 bp, synthetic construct
  source 1..110: mol_type = other DNA
tcgtgttatactgttttaattactagctgcccctttatcgggcttatttcaatagattattgccctgctgtgcaatagtgtatagagaaacagcagtatctcttgctggt

SEQ ID NO: 46835 - DNA, 110 bp, synthetic construct
  source 1..110: mol_type = other DNA
attattgccctgctgtgcaatagtgtatagagaaacagcagtatctcttgctggtatattgtggaaattaaaattctcaatactacttcagtaattaatttccaaagaga

SEQ ID NO: 46836 - DNA, 110 bp, synthetic construct
  source 1..110: mol_type = other DNA
tgctccaattccacattaggcagggggctggccaggattgaggtgggaaacctgggggctggcagctccccagcctctgtgatgatgtaggtcacatttacacttaaccc

SEQ ID NO: 46837 - DNA, 110 bp, synthetic construct
  source 1..110: mol_type = other DNA
gggctggcagctccccagcctctgtgatgatgtaggtcacatttacacttaacccccaccacaggactctgggttcctgcctgctcagggggaacctaggccccattcca

SEQ ID NO: 46838 - DNA, 110 bp, synthetic construct
  source 1..110: mol_type = other DNA
ggaggttccacttccgctgtaactgaacagctcctatttgaccaacacttctgtagataacagccataagctcttgacaacacataataaataactacctggaagacctg

SEQ ID NO: 46839 - DNA, 110 bp, synthetic construct
  source 1..110: mol_type = other DNA
gataacagccataagctcttgacaacacataataaataactacctggaagacctggatactgtatgaaagcaggaagaaaccggaggaggtgaacacttggaacaaggaa

SEQ ID NO: 46840 - DNA, 110 bp, synthetic construct
  source 1..110: mol_type = other DNA
tatgttccagaggtctcgagggctaagtaaaaagaatcatcaaaaggaaaaggaatgggctcaaggcccaagggaaacaggaatggaatagctgggtgaataagcacgag

SEQ ID NO: 46841 - DNA, 110 bp, synthetic construct
  source 1..110: mol_type = other DNA
tgggctcaaggcccaagggaaacaggaatggaatagctgggtgaataagcacgaggctcagaattaggaaagaatggagtgggaggaatgtttgaggagaaaagttcagt

SEQ ID NO: 46842 - DNA, 110 bp, synthetic construct
  source 1..110: mol_type = other DNA
atgaagacgcaataggacaatcaatgcacacataccttgcaaactctactttaagaatgccatttattttactctttgcaaaaagcaatttcgcctgctgatgacccgac

SEQ ID NO: 46843 - DNA, 110 bp, synthetic construct
  source 1..110: mol_type = other DNA
aatgccatttattttactctttgcaaaaagcaatttcgcctgctgatgacccgacagctaggacttcagagtcccatgaaatactagaaaagctgacctcagagagccca

SEQ ID NO: 46844 - DNA, 110 bp, synthetic construct
  source 1..110: mol_type = other DNA
ccaggccccttgtgcctacaattatatgttaacctttaaaacggctaattctgccctcacatcccagaccagtaaaccagccatcccatcggaattaagaagatggttga

SEQ ID NO: 46845 - DNA, 110 bp, synthetic construct
  source 1..110: mol_type = other DNA
ctcacatcccagaccagtaaaccagccatcccatcggaattaagaagatggttgatgatgtttctccaaggatcctgaactaagaattcaggaccgactgagactacagg

SEQ ID NO: 46846 - DNA, 110 bp, synthetic construct
  source 1..110: mol_type = other DNA
tctctctagatagtcagacctcagctacagacttggttctaagggtgaataagctgaagcacagcagtgcctgccgatgtgatgaccacaggccccaccggacactcgag

SEQ ID NO: 46847 - DNA, 110 bp, synthetic construct
  source 1..110: mol_type = other DNA
gaagcacagcagtgcctgccgatgtgatgaccacaggccccaccggacactcgagctgttaaatcgccagcaaggccagcatctgagtgagaagtgctgagggccaggac

SEQ ID NO: 46848 - DNA, 110 bp, synthetic construct
  source 1..110: mol_type = other DNA
gcttgtttttgaaaatggaaataatacctaacacttagtaagcaccttccaagttccaggcattggtctaagcacttgacacgtactagcttatttaatgctcagaacaa

SEQ ID NO: 46849 - DNA, 110 bp, synthetic construct
  source 1..110: mol_type = other DNA
ccaggcattggtctaagcacttgacacgtactagcttatttaatgctcagaacaaccctcagaagtatgtgctgttatcgttcctaccatttggaccaggaaaccgaggc

SEQ ID NO: 46850 - DNA, 110 bp, synthetic construct
  source 1..110: mol_type = other DNA
cccttcatgtcccgtccactcggacaactgtccatgaacaagggcagtcagaagctacaactgccacgcgggggcatgggttcgctaactgtagacaagaggcctcgtcc

SEQ ID NO: 46851 - DNA, 110 bp, synthetic construct
  source 1..110: mol_type = other DNA
tacaactgccacgcgggggcatgggttcgctaactgtagacaagaggcctcgtccccacccagctggcaaagggacgagtaagcctgttggaggtgagtttgcaaagcaa

SEQ ID NO: 46852 - DNA, 110 bp, synthetic construct
  source 1..110: mol_type = other DNA
taaggacttacttctccaaggacctactcaggggaactgtgtgaacagaattgagcccagctttcagaagagtctctggagtcttcttgcatcctgtgtcagatcactaa

SEQ ID NO: 46853 - DNA, 110 bp, synthetic construct
  source 1..110: mol_type = other DNA
cccagctttcagaagagtctctggagtcttcttgcatcctgtgtcagatcactaatctagcaacactcagacctgaagggggtgagcaaggagaggagagtctcttacat

SEQ ID NO: 46854 - DNA, 110 bp, synthetic construct
  source 1..110: mol_type = other DNA
cttggagaaggcaagagaggtgtcccaagaggagctatgccccagactctcgaagacccagaaactctcctgttctctgtgtgtcacagggactaacatatattcttcaa

SEQ ID NO: 46855 - DNA, 110 bp, synthetic construct
  source 1..110: mol_type = other DNA
acccagaaactctcctgttctctgtgtgtcacagggactaacatatattcttcaaaccaggcttgaggtgtatcatagtacagggagcacaggttcttagccactaatgt

SEQ ID NO: 46856 - DNA, 110 bp, synthetic construct
  source 1..110: mol_type = other DNA
cagcactggtctcatttctgtgcctggaacattgctaccacacaggtctgccatcacggagggactgaagacctcatggcaatgctgcagtgttgcaataaaaaggtgaa

SEQ ID NO: 46857 - DNA, 110 bp, synthetic construct
  source 1..110: mol_type = other DNA
acggagggactgaagacctcatggcaatgctgcagtgttgcaataaaaaggtgaaatcatccgaccaacccaattccaagcacgtttgtgtccagaagatgcctgccagg

SEQ ID NO: 46858 - DNA, 110 bp, synthetic construct
  source 1..110: mol_type = other DNA
aacctcttcttttgcttctaattctatagtctaaagctgtccaatacaactatggatgcctcaaatttgaccacggaggtaatgaaatatcttagaggccacattttttt

SEQ ID NO: 46859 - DNA, 110 bp, synthetic construct
  source 1..110: mol_type = other DNA
atgcctcaaatttgaccacggaggtaatgaaatatcttagaggccacatttttttaaaaggcaaaaagaaacaggtagaattgtctctaacaagaaattttatcaagctt

SEQ ID NO: 46860 - DNA, 110 bp, synthetic construct
  source 1..110: mol_type = other DNA
acttatccttcccctcatttcacaaataaagagaccaagactcagagagaacggtagcatgccaaagatccacaggcaggtactggaatctgacaccaggattctatgct

SEQ ID NO: 46861 - DNA, 110 bp, synthetic construct
  source 1..110: mol_type = other DNA
agcatgccaaagatccacaggcaggtactggaatctgacaccaggattctatgctcccaatcctagttcagaaatccctgtgtaaaatggaatagacgccaggctcccac

SEQ ID NO: 46862 - DNA, 110 bp, synthetic construct
  source 1..110: mol_type = other DNA
gcagtcactgtcaagaaggtgctctaggagttccagtcatggcgcaatggaaacaaaaccaagtagtatccatgagaatgtgagttcgatccctggcctggctcagtggg

SEQ ID NO: 46863 - DNA, 110 bp, synthetic construct; identical to SEQ ID NO: 46862
  source 1..110: mol_type = other DNA

SEQ ID NO: 46864 - DNA, 110 bp, synthetic construct
  source 1..110: mol_type = other DNA
tgctgcttttctgccacccatgggtctactgcgcctctgatctgtcagggaaacaaaagttcatgtaatccctgcttgtcctccagcctcagagaaagcaccacctgggg

SEQ ID NO: 46865 - DNA, 110 bp, synthetic construct
  source 1..110: mol_type = other DNA
aaagttcatgtaatccctgcttgtcctccagcctcagagaaagcaccacctggggagatgcttcaatttgtacaataaaaagcttctccgactcttatataagaaaaaat

SEQ ID NO: 46866 - DNA, 110 bp, synthetic construct
  source 1..110: mol_type = other DNA
gcatgctcaatgagcactgtgctcgcttgctctctctctgaatttgagactaggcagaccttccaaagcatagcaggaaatccaagcacatgccaagagttgcatgtggc

SEQ ID NO: 46867 - DNA, 110 bp, synthetic construct
  source 1..110: mol_type = other DNA
agaccttccaaagcatagcaggaaatccaagcacatgccaagagttgcatgtggcagacactgttggctgcctgtccaacaacggttcacccttcctaaaattttttcaa

SEQ ID NO: 46868 - DNA, 110 bp, synthetic construct
  source 1..110: mol_type = other DNA
accatcatgtctaccacactgcttaggccagagcaaggcacaggcctcccagaattcccagagatgggcaaacagataacactttttggtgggaggaattgcaatgtcac

SEQ ID NO: 46869 - DNA, 110 bp, synthetic construct
  source 1..110: mol_type = other DNA
tcccagagatgggcaaacagataacactttttggtgggaggaattgcaatgtcacatacaaggggtttgttgtggccatttttgcagcctactttatagttatttttcta

SEQ ID NO: 46870 - DNA, 110 bp, synthetic construct
  source 1..110: mol_type = other DNA
tttgatcaacattagactttccatccctggacaataggaagccacagcaatactaaccttgcttataattatgaatgacgagattggatcctgggattacagttgttaat

SEQ ID NO: 46871 - DNA, 110 bp, synthetic construct
  source 1..110: mol_type = other DNA
accttgcttataattatgaatgacgagattggatcctgggattacagttgttaatgtttgtctcctcccctgccacccagcagcctcctgctcagcctgtgatctattcc

SEQ ID NO: 46872 - DNA, 110 bp, synthetic construct
  source 1..110: mol_type = other DNA
gtgttgtgtcagttctcgatctttgttcttctaatattgtgttagctatcctaggtcttgtgcctctttgtatgaacttcagtatcagtcaatatccataaaataacttg

SEQ ID NO: 46873 - DNA, 110 bp, synthetic construct
  source 1..110: mol_type = other DNA
tcgatctttgttcttctaatattgtgttagctatcctaggtcttgtgcctctttgtatgaacttcagtatcagtcaatatccataaaataacttgctaaaattttaatag

SEQ ID NO: 46874 - DNA, 110 bp, synthetic construct
  source 1..110: mol_type = other DNA
gctagttatccatcatcaaagatattatataattactgactatattctccacactgtacatgtcatacccgtagcacattaactatgcaactagaagctagtacctctca

SEQ ID NO: 46875 - DNA, 110 bp, synthetic construct
  source 1..110: mol_type = other DNA
gtacatgtcatacccgtagcacattaactatgcaactagaagctagtacctctcattaatctcccatgcttattcctttctgccccccattccccttaattctggcaaac

SEQ ID NO: 46876 - DNA, 110 bp, synthetic construct
  source 1..110: mol_type = other DNA
atgaactaaaattatattaaactgtattatcaaagaccttcaacagggagaagggattcagttctattcttcagaagctcgaccaggaaaactacagccaaaatagagtg

SEQ ID NO: 46877 - DNA, 110 bp, synthetic construct
  source 1..110: mol_type = other DNA
attcagttctattcttcagaagctcgaccaggaaaactacagccaaaatagagtgttaaggcccctagaacagtgaaaatctcattataagcaaaaggattaaagggctt

SEQ ID NO: 46878 - DNA, 110 bp, synthetic construct
  source 1..110: mol_type = other DNA
caaacaaaagggacatacatggtttgtgtttttcccacacagtgggtgacagagagggagatcaaacccagagcatgctctaaggcagcttctttagcacgtccatatcc

SEQ ID NO: 46879 - DNA, 110 bp, synthetic construct
  source 1..110: mol_type = other DNA
gggagatcaaacccagagcatgctctaaggcagcttctttagcacgtccatatccaatgacaaactaatggaaaactacaacctcagagctgggaaagattttgaccctt

SEQ ID NO: 46880 - DNA, 110 bp, synthetic construct
  source 1..110: mol_type = other DNA
tgacgctctcatgttccagctttcctcccatcaataccatagcacctatgattagcactatggagtaatagctaatgtttgttgtgtgcctcttgcttcccaggtgaatt

SEQ ID NO: 46881 - DNA, 110 bp, synthetic construct
  source 1..110: mol_type = other DNA
cactatggagtaatagctaatgtttgttgtgtgcctcttgcttcccaggtgaattgtaagtacttaatctagattaaattatgtactatgataatcactctgtaagatag

SEQ ID NO: 46882 - DNA, 110 bp, synthetic construct
  source 1..110: mol_type = other DNA
tgatttatttccatccacactcgctgtttgccttctctcctgaaggtcaaggcctgcgggttggggtgggtgataacctccccgcaaacgattctgcatttgatgtacta

SEQ ID NO: 46883 - DNA, 110 bp, synthetic construct
  source 1..110: mol_type = other DNA
gcgggttggggtgggtgataacctccccgcaaacgattctgcatttgatgtactaaccctggcaggacgttctgggttaggctaacacagggtagtcctaattaaagccc

SEQ ID NO: 46884 - DNA, 110 bp, synthetic construct
  source 1..110: mol_type = other DNA
tgagccacagtggaaactcccacatcaggttttttttttttttttttttttgtacgctctcccatttggtcttgtgggcctgtgagctcatcagctccactttatagatg

SEQ ID NO: 46885 - DNA, 110 bp, synthetic construct
  source 1..110: mol_type = other DNA
gctctcccatttggtcttgtgggcctgtgagctcatcagctccactttatagatgcagcacccaactcagaggatgaccttgctcaagtggtggggctcccggttgcctg

SEQ ID NO: 46886 - DNA, 110 bp, synthetic construct
  source 1..110: mol_type = other DNA
tgactcagcccaggatgaggctgtgtggctctagagaggtcacttaacctctctgggcctccatttcctcacttgcaataacaagaacttgcaataatgagctctaccct

SEQ ID NO: 46887 - DNA, 110 bp, synthetic construct
  source 1..110: mol_type = other DNA
ggcctccatttcctcacttgcaataacaagaacttgcaataatgagctctaccctcaggcgctacagtgaaggactcgatcaggtgaggccctgaaggcagcccagtgtc

SEQ ID NO: 46888 - DNA, 110 bp, synthetic construct
  source 1..110: mol_type = other DNA
cagaacgtaacccagcagtggtgcctcaccccaagatgaatacggaggagtcctttttgaattcgtcgagaatctatgaaaatagaaagaatacatgcatgaaataagaa

SEQ ID NO: 46889 - DNA, 110 bp, synthetic construct
  source 1..110: mol_type = other DNA
aggagtcctttttgaattcgtcgagaatctatgaaaatagaaagaatacatgcatgaaataagaacatgagaactagtcaagccagttaatgcaaataaataggttttac

SEQ ID NO: 46890 - DNA, 110 bp, synthetic construct
  source 1..110: mol_type = other DNA
caagatgccccatttctggcccgggatggggttagggccaagcacgtggcctaagctgcgcccatcagcctcctcctgggccttatttggccaaagcttttcatcaactg

SEQ ID NO: 46891 - DNA, 110 bp, synthetic construct
  source 1..110: mol_type = other DNA
ctgcgcccatcagcctcctcctgggccttatttggccaaagcttttcatcaactgtttcctgctgctgctgctgctgccagagtggcaaaccctgagtctggaggtagca

SEQ ID NO: 46892 - DNA, 110 bp, synthetic construct
  source 1..110: mol_type = other DNA
ggggggtgtcccgggaaaggactgaaagggcagaggtcacaagacggcaacccccgagatgagcccagccctgggatgtgtgctacttcttttcagccctgatggtaaca

SEQ ID NO: 46893 - DNA, 110 bp, synthetic construct
  source 1..110: mol_type = other DNA
gagatgagcccagccctgggatgtgtgctacttcttttcagccctgatggtaacaatgactattgaatctgaacacccaccatgcctgtcacaaaggtggcacatgagga

SEQ ID NO: 46894 - DNA, 110 bp, synthetic construct
  source 1..110: mol_type = other DNA
gctgcggcgcagtccagcagctgcagctgcctgggaaccctcgtctgggaacttccatgtgctgcgggtgcacccccacatgttcacaaaaaggaaaaagaaagtaaaga

SEQ ID NO: 46895 - DNA, 110 bp, synthetic construct
  source 1..110: mol_type = other DNA
catgtgctgcgggtgcacccccacatgttcacaaaaaggaaaaagaaagtaaagacacaaatcaggaagtctgagaggatggtctctcagcccccaggcttcttcctgca

SEQ ID NO: 46896 - DNA, 110 bp, synthetic construct
  source 1..110: mol_type = other DNA
aaagaaggtaagacctggggacacctgaggtgccatcaaatcctaagggacgttcacaggggagagctaggacccaaaacgcaagctacaggagcaaaagtctggggttc

SEQ ID NO: 46897 - DNA, 110 bp, synthetic construct
  source 1..110: mol_type = other DNA
acaggggagagctaggacccaaaacgcaagctacaggagcaaaagtctggggttcacataagcgggctattcatcaccgtcagtgaccccacccctgccccctccacgga

SEQ ID NO: 46898 - DNA, 110 bp, synthetic construct
  source 1..110: mol_type = other DNA
ccagagagcagagcaaatgctgcagagccaagcaacgatgaagcagagactcagtgcaaccccggtaacggtgatgagccccaggggacagccctgcccccacaagatgg

SEQ ID NO: 46899 - DNA, 110 bp, synthetic construct
  source 1..110: mol_type = other DNA
gcaaccccggtaacggtgatgagccccaggggacagccctgcccccacaagatggagggaccctgctgcctgttccccacagataggcacaacgcatgggtcagacgtga

SEQ ID NO: 46900 - DNA, 110 bp, synthetic construct
  source 1..110: mol_type = other DNA
aggacacgctttgggataagagaaatcagggctttcctagacaagccttgataaataaacgttccgcagatctcagggtcccggcttccagtctggcaggagcgtctgcc

SEQ ID NO: 46901 - DNA, 110 bp, synthetic construct
  source 1..110: mol_type = other DNA
taaacgttccgcagatctcagggtcccggcttccagtctggcaggagcgtctgcctgggtgtgcccagggagctggcccaggggacccgccaagcagaccaggctttgtt

SEQ ID NO: 46902 - DNA, 110 bp, synthetic construct
  source 1..110: mol_type = other DNA
ccaaggacagggaccccgccaccttagcttctgtctggagtaactgtcttggcccagaaccgtctatggggcaactgctcccggccagcttcccagtgatgccctagaag

SEQ ID NO: 46903 - DNA, 110 bp, synthetic construct
  source 1..110: mol_type = other DNA
agaaccgtctatggggcaactgctcccggccagcttcccagtgatgccctagaaggacccatgagatgggcgtcactataatcccattttacagcagagagaaccaaggc

SEQ ID NO: 46904 - DNA, 110 bp, synthetic construct; identical to SEQ ID NO: 46902
  source 1..110: mol_type = other DNA

SEQ ID NO: 46905 - DNA, 110 bp, synthetic construct; identical to SEQ ID NO: 46903
  source 1..110: mol_type = other DNA

SEQ ID NO: 46906 - DNA, 110 bp, synthetic construct
  source 1..110: mol_type = other DNA
agaatgtgggagtgcctggcgtaaaggtacatcctcagagttcccgtcatgatgcagcggaaatgaatccaactaggaaccacgaggttgccgtttcaatctgtggcctg

SEQ ID NO: 46907 - DNA, 110 bp, synthetic construct; identical to SEQ ID NO: 46906
  source 1..110: mol_type = other DNA

SEQ ID NO: 46908 - DNA, 110 bp, synthetic construct
  source 1..110: mol_type = other DNA
ggaactccagcattgttaggtttagatatatattggatataggatatcactgtatatcagatattattgattggatgttggagtcacagtagcttgtgaaaatcatagta

SEQ ID NO: 46909 - DNA, 110 bp, synthetic construct
  source 1..110: mol_type = other DNA
atcagatattattgattggatgttggagtcacagtagcttgtgaaaatcatagtatgaatctcatttaaatggctaaaaccactcctcatgctaacttattggatatttg

SEQ ID NO: 46910 - DNA, 110 bp, synthetic construct
  source 1..110: mol_type = other DNA
gttgtgggttacatggaccttgggagactggtctgaaagaccagctgctttagtgatcctacgggaagatgtttccaggatatctttgagatcacaactctaaacagttt

SEQ ID NO: 46911 - DNA, 110 bp, synthetic construct
  source 1..110: mol_type = other DNA
atcctacgggaagatgtttccaggatatctttgagatcacaactctaaacagttttcaaggtgaaggagaaatataaaactgccagaatttggattaaaaacaaagagaa

SEQ ID NO: 46912 - DNA, 110 bp, synthetic construct
  source 1..110: mol_type = other DNA
gacgctcttcccatggctgaccgaagggaacattcaagaagatgatgggttctgccggcctccaattccatcctggaagcagcggtgggctctggcaggagggaagagca

SEQ ID NO: 46913 - DNA, 110 bp, synthetic construct
  source 1..110: mol_type = other DNA
cggcctccaattccatcctggaagcagcggtgggctctggcaggagggaagagcagtgagcaaggacctttctctctaagggtcccctccgccctctgccatcccacggt

SEQ ID NO: 46914 - DNA, 110 bp, synthetic construct
  source 1..110: mol_type = other DNA
ccaatcttctccttaatggctagtgccgctttttgtgttctaaaatctttacaatcaaggtgataccctcctatgctttcttatagaagctcttttgtttctctttcaca

SEQ ID NO: 46915 - DNA, 110 bp, synthetic construct
  source 1..110: mol_type = other DNA
caaggtgataccctcctatgctttcttatagaagctcttttgtttctctttcacatttagatctgtgatgcacatgcatttttcttaaatccagctccaaattcagttct

SEQ ID NO: 46916 - DNA, 110 bp, synthetic construct
  source 1..110: mol_type = other DNA
tagactcacggataccttctccagggtctccagggtcagcgggttgattctcctgatgtaattggtctctgtggtcgcatagcagtcttctccacacttcatgatgttga

SEQ ID NO: 46917 - DNA, 110 bp, synthetic construct
  source 1..110: mol_type = other DNA
atgtaattggtctctgtggtcgcatagcagtcttctccacacttcatgatgttgatcaagcagttgtctgtgaaatcagggatggtgtgggacaggtaggagaacgccct

SEQ ID NO: 46918 - DNA, 110 bp, synthetic construct
  source 1..110: mol_type = other DNA
ctgacttgcaccataaccataagtaagtctccgccttcaagtctcagcttctgtatctgaaaaatgatgtattcaatgtgcctaccccagaggggacccaaggtcccatg

SEQ ID NO: 46919 - DNA, 110 bp, synthetic construct
  source 1..110: mol_type = other DNA
tggatagagtcagattgtggccagtgggtcacccaagtactttgacctgtttcgggatggtggagcaatttctgaaaccaaacgttgaagcacagtaaaatgggatgttt

SEQ ID NO: 46920 - DNA, 110 bp, synthetic construct
  source 1..110: mol_type = other DNA
gatggtggagcaatttctgaaaccaaacgttgaagcacagtaaaatgggatgtttgattgagcttcttgaagtataaccagcactgttaagacattggccaaaagtagat

SEQ ID NO: 46921 - DNA, 110 bp, synthetic construct
  source 1..110: mol_type = other DNA
gattacttttgtgctgaagggggatgcttttctctggggactgtcccatgtttccaggttgataattcagtgatagctaattgtttccaggaagccagggtcaggagtaa

SEQ ID NO: 46922 - DNA, 110 bp, synthetic construct
  source 1..110: mol_type = other DNA
aggttgataattcagtgatagctaattgtttccaggaagccagggtcaggagtaaattccttctaaccatttagtgcacttacctgtttgtcattatatgtggattgggg

SEQ ID NO: 46923 - DNA, 110 bp, synthetic construct
  source 1..110: mol_type = other DNA
agaggtccctctggtttagtgtttttcaggagactgggtgtgggaattcctcttggtcccctcatcgcttggatgctgctgaattccttgtttggagcttcacctggaag

SEQ ID NO: 46924 - DNA, 110 bp, synthetic construct
  source 1..110: mol_type = other DNA
gtcccctcatcgcttggatgctgctgaattccttgtttggagcttcacctggaagctggcttgcactgcacacctctgagttaatttcttgctctggcagctcttcctta

SEQ ID NO: 46925 - DNA, 110 bp, synthetic construct
  source 1..110: mol_type = other DNA
ccaggtggaaggacgtcaagtctgacacctgaggatgcgtagagttttgtcaggtgaaggggagacaaagaatgttctggaccgtgggagctgcggtttattaagatttg

SEQ ID NO: 46926 - DNA, 110 bp, synthetic construct
  source 1..110: mol_type = other DNA
gaaggggagacaaagaatgttctggaccgtgggagctgcggtttattaagatttgtagaagatttgtagcatgtacgtcacatgtcatcagtttcttcatcaaacattca

SEQ ID NO: 46927 - DNA, 110 bp, synthetic construct
  source 1..110: mol_type = other DNA
ggctgcagttgctcagctgcccctcttttgagcatggcgttttggggtccctccctcctgcaccttccacggagccagaccgaagcatgggattcagagtccggggctgt

SEQ ID NO: 46928 - DNA, 110 bp, synthetic construct
  source 1..110: mol_type = other DNA
tcctgcaccttccacggagccagaccgaagcatgggattcagagtccggggctgtggtttatctcacaggcctcccttcacctgttcctacaccaggagaccttgttgct

SEQ ID NO: 46929 - DNA, 110 bp, synthetic construct
  source 1..110: mol_type = other DNA
acaccctctccagcatttattgtcagtgaactttttgatgatggccattcagactcctaggagatatacaagattaatagatgagattatatgtaagtatcattataaag

SEQ ID NO: 46930 - DNA, 110 bp, synthetic construct; identical to SEQ ID NO: 46929
  source 1..110: mol_type = other DNA

SEQ ID NO: 46931 - DNA, 110 bp, synthetic construct
  source 1..110: mol_type = other DNA
tggtccagacaaggttggagaccgtggctccaagaggctgccccccacccccgctgactctggatcctgtaaatgagtcacaagagagcccatcatccctcatcctctga

SEQ ID NO: 46932 - DNA, 110 bp, synthetic construct
  source 1..110: mol_type = other DNA
gactctggatcctgtaaatgagtcacaagagagcccatcatccctcatcctctgagctccgtatggtttctcataatgcagtctcatgaagcggggagaaggctggcaga

SEQ ID NO: 46933 - DNA, 110 bp, synthetic construct
  source 1..110: mol_type = other DNA
gacggggcgcaggccgtgtgtgccctggtccccgcggcaggacctccccgcccggaggcagagcgctaaggctcccctggtcattaagattcagtgggaaggagcggagt

SEQ ID NO: 46934 - DNA, 110 bp, synthetic construct
  source 1..110: mol_type = other DNA
aggcagagcgctaaggctcccctggtcattaagattcagtgggaaggagcggagtctctctgcctcgaagaagcctgttgagaatcggctatatgggctcggatctgggc

SEQ ID NO: 46935 - DNA, 110 bp, synthetic construct
  source 1..110: mol_type = other DNA
gcaggcctgcagcagcagggtcaccaccagggtgcaggttggaagtgcagactcttaggctcgccctggaccagctgaacgaacatctgcactttgagatggtccctggg

SEQ ID NO: 46936 - DNA, 110 bp, synthetic construct
  source 1..110: mol_type = other DNA
taggctcgccctggaccagctgaacgaacatctgcactttgagatggtccctgggtgatgcaaacgcacagtcaagacagaagcaccgactcgctcctgtcccggacatc

SEQ ID NO: 46937 - DNA, 110 bp, synthetic construct
  source 1..110: mol_type = other DNA
gaggagcccaggcaggtggtacctatgcactacatcatctgagaaagtctgctggcccgagagtcgcctagtgaccagcaaaaacttctagaagggcagcttattgccaa

SEQ ID NO: 46938 - DNA, 110 bp, synthetic construct
  source 1..110: mol_type = other DNA
cccgagagtcgcctagtgaccagcaaaaacttctagaagggcagcttattgccaaccacaagatttatgctcctggagcagtggtgaggctggcaagtgccaagtatgtt

SEQ ID NO: 46939 - DNA, 110 bp, synthetic construct
  source 1..110: mol_type = other DNA
cacacagggtctctaaggggccctctagggactggaatcctgatttcacaaggttgatcggatgctttgccaaaggctttgggttccaaagggcttcatcctgcggctaa

SEQ ID NO: 46940 - DNA, 110 bp, synthetic construct
  source 1..110: mol_type = other DNA
gatcggatgctttgccaaaggctttgggttccaaagggcttcatcctgcggctaagagctgcggctttaaggcacatgtttgtttgtggaggcaagtatgtaacttgggg

SEQ ID NO: 46941 - DNA, 110 bp, synthetic construct
  source 1..110: mol_type = other DNA
gcccatcgcaatctgtcacgtctcaacattgtaactacacacacacgcatgtatatatgactgagcacaacagtaactaagactggagaggcaggactgccaaagttaag

SEQ ID NO: 46942 - DNA, 110 bp, synthetic construct
  source 1..110: mol_type = other DNA
tatgactgagcacaacagtaactaagactggagaggcaggactgccaaagttaaggccagcacgtcttccttcactctctcaccaaagggatgaatttagacaagttgtt

SEQ ID NO: 46943 - DNA, 110 bp, synthetic construct
  source 1..110: mol_type = other DNA
tcttcaagataagttagacatcgtacagaaggcacatggatgtgacctaaagggtgttggtggtacatgaatatttgtacactagcgagctgcctccacaaagattcatc

SEQ ID NO: 46944 - DNA, 110 bp, synthetic construct
  source 1..110: mol_type = other DNA
gttggtggtacatgaatatttgtacactagcgagctgcctccacaaagattcatctcggctctgggttcagcactgcagggcttttcattctatttaggctcctcctgaa

SEQ ID NO: 46945 - DNA, 110 bp, synthetic construct
  source 1..110: mol_type = other DNA
gtcaccttaggcacgccgagtccaagttcctttgatacatcacagaggagatggcaaaaacagggttggaggtagaattctgactttcagaggagcctgaccacagctgg

SEQ ID NO: 46946 - DNA, 110 bp, synthetic construct
  source 1..110: mol_type = other DNA
aaaaacagggttggaggtagaattctgactttcagaggagcctgaccacagctgggagatgtgtacacagacagaaattgaaggtgtgcactgagacaaagtttcctggg

SEQ ID NO: 46947 - DNA, 110 bp, synthetic construct
  source 1..110: mol_type = other DNA
atttcctcttctcgcagaggttatgattgaaccatttgaggaaggaaaactggcccttactgaaaatgttcaacgtgccaaacgctattccatataagttttaaaaaacc

SEQ ID NO: 46948 - DNA, 110 bp, synthetic construct
  source 1..110: mol_type = other DNA
cttactgaaaatgttcaacgtgccaaacgctattccatataagttttaaaaaaccttagtattgacacagaaacttgtattgatgttcccagatcatcagtgtacaggtt

SEQ ID NO: 46949 - DNA, 110 bp, synthetic construct
  source 1..110: mol_type = other DNA
ttgtagttcacagccccaactaaccacctttgagccatatttcaggtcacagaatcctttcatatcctgatcgtacacggcatattagagctctcaaaagccccaaaggg

SEQ ID NO: 46950 - DNA, 110 bp, synthetic construct
  source 1..110: mol_type = other DNA
cctttcatatcctgatcgtacacggcatattagagctctcaaaagccccaaaggggaggctcccaagcatagagtcacttctgccacattctgtccattctatgggtgaa

SEQ ID NO: 46951 - DNA, 110 bp, synthetic construct
  source 1..110: mol_type = other DNA
aaaatgttggctggaaaacatgtgtaaagagaaggctctctggcaagggggtggccctccggagaggattttctttttcctgtcctgtgagatgcttgccttgactctaa

SEQ ID NO: 46952 - DNA, 110 bp, synthetic construct
  source 1..110: mol_type = other DNA
cctccggagaggattttctttttcctgtcctgtgagatgcttgccttgactctaagcccgaaatgcccgagtcagctcagccgacgtccacgtcgtgaccaaagaagatg

SEQ ID NO: 46953 - DNA, 110 bp, synthetic construct
  source 1..110: mol_type = other DNA
aaactgccaaaagagcaaaaatgacaatttcatatggtgtaaccagtctgttggcagggaaaccatggggctcttgatctttgtcgtctcacagaatctcacatccccta

SEQ ID NO: 46954 - DNA, 110 bp, synthetic construct
  source 1..110: mol_type = other DNA
agggaaaccatggggctcttgatctttgtcgtctcacagaatctcacatcccctatgtgaggtacatactcttacgatcctcattccatagctgaagaaattgcagctca

SEQ ID NO: 46955 - DNA, 110 bp, synthetic construct
  source 1..110: mol_type = other DNA
atgagaagtggctggctctgattataaggcaaggatctgattcctgcctcaatgatgactgaataaccactagttaggagtcatgaaaaggctcgaatgcatgcagtggg

SEQ ID NO: 46956 - DNA, 110 bp, synthetic construct
  source 1..110: mol_type = other DNA
tgactgaataaccactagttaggagtcatgaaaaggctcgaatgcatgcagtggggatggggagaggtccattggttgccagagatggaggccaaggcagcgagaggtgg

SEQ ID NO: 46957 - DNA, 110 bp, synthetic construct
  source 1..110: mol_type = other DNA
tttattcagattttcaagttagcattctttagcggttattattattataatccatgacctcatggatcctaggaaatacctacgtgttacacatttgtttctgtccctcg

SEQ ID NO: 46958 - DNA, 110 bp, synthetic construct
  source 1..110: mol_type = other DNA
gacctcatggatcctaggaaatacctacgtgttacacatttgtttctgtccctcgtacctgctcatcttacctgagtttgtataaaatcttcctactttgtcgaaagtcc

SEQ ID NO: 46959 - DNA, 110 bp, synthetic construct
  source 1..110: mol_type = other DNA
gtcatgttggccgtgacagtctgatgtggcaggagccagggtgcgcgatgtgcagtggaaagaggttggaggttggtgtgcacagtggccaatgtagaaccgcatagcaa

SEQ ID NO: 46960 - DNA, 110 bp, synthetic construct
  source 1..110: mol_type = other DNA
tggaaagaggttggaggttggtgtgcacagtggccaatgtagaaccgcatagcaattccagcatcttctctgccctccctatgaaaagcaaatcatgcactggtcatgtt

SEQ ID NO: 46961 - DNA, 110 bp, synthetic construct
  source 1..110: mol_type = other DNA
ttcttgccaaaaaaaattgaatttatttacaactatggataagggactttcgattgtcctcaatccgtttattacccagtcaaacccctcttttgagggaaggacacttg

SEQ ID NO: 46962 - DNA, 110 bp, synthetic construct
  source 1..110: mol_type = other DNA
gtcctcaatccgtttattacccagtcaaacccctcttttgagggaaggacacttgacccttgtcccctgccttaaaggtacctagattttctgcgcagctcgaggtggag

SEQ ID NO: 46963 - DNA, 110 bp, synthetic construct
  source 1..110: mol_type = other DNA
ggcccgcaccagcttctctgtagctctgtgaccttggatgggttacttagctatctctgaagtgaagttgtttcctctaaaagataggggtttacaaagagcactgcctt

SEQ ID NO: 46964 - DNA, 110 bp, synthetic construct
  source 1..110: mol_type = other DNA
tctgaagtgaagttgtttcctctaaaagataggggtttacaaagagcactgccttgaaaagggaatcacagtctggatagctgtaattacagtgtttcctacccatctac

SEQ ID NO: 46965 - DNA, 110 bp, synthetic construct
  source 1..110: mol_type = other DNA
tgctgctttttctagcaataagggaactaaaggtcagagaggtggatctagctgcaaatgacaaggtcactcaccagcagagtctggactcaaagaccggcctgtcctgt

SEQ ID NO: 46966 - DNA, 110 bp, synthetic construct
  source 1..110: mol_type = other DNA
aaatgacaaggtcactcaccagcagagtctggactcaaagaccggcctgtcctgttttgagtactgagttcttggtgtctccccacattcatctcagccttggcatcgct

SEQ ID NO: 46967 - DNA, 110 bp, synthetic construct; identical to SEQ ID NO: 46965
  source 1..110: mol_type = other DNA

SEQ ID NO: 46968 - DNA, 110 bp, synthetic construct; identical to SEQ ID NO: 46966
  source 1..110: mol_type = other DNA

SEQ ID NO: 46969 - DNA, 110 bp, synthetic construct
  source 1..110: mol_type = other DNA
gcagctcatcatcctcagttgccacatcctggccaggtgggtaaggtttaaaaaccactgtgtttctggaatgggtcttggctttcaaagtaccccccgaggatttagaa

SEQ ID NO: 46970 - DNA, 110 bp, synthetic construct
  source 1..110: mol_type = other DNA
cactgtgtttctggaatgggtcttggctttcaaagtaccccccgaggatttagaaattgtagctctgagccctcctcttagcaataccggcttttacctaagctccatct

SEQ ID NO: 46971 - DNA, 110 bp, synthetic construct
  source 1..110: mol_type = other DNA
gcagctaaagcctcaaggtcaaccacgagcacggctgtggctccggattcttcgtcacggctgttttcaggggcacacggagtgtgcatgtactgaactggttcccagca

SEQ ID NO: 46972 - DNA, 110 bp, synthetic construct
  source 1..110: mol_type = other DNA
cacggctgttttcaggggcacacggagtgtgcatgtactgaactggttcccagcacttctgaggttctggttataatgatctgttttacaagcaaccccccgatttcctt

SEQ ID NO: 46973 - DNA, 110 bp, synthetic construct
  source 1..110: mol_type = other DNA
tatgcattttaaaaacttgatgagggaaggggttcatgaaatgcaacttcctagacctgcctccagaggcttttgaaccttcctccacccggagtcaggcccgggcatct

SEQ ID NO: 46974 - DNA, 110 bp, synthetic construct
  source 1..110: mol_type = other DNA
cctgcctccagaggcttttgaaccttcctccacccggagtcaggcccgggcatctgcccttgaggagacacccccggacaaccctgatgtagggatcttgggaagtacat

SEQ ID NO: 46975 - DNA, 110 bp, synthetic construct
  source 1..110: mol_type = other DNA
tcttatccaaagcccttgagttttttaggaccctgtgtcacctcagtagttgctgttgcccatccccacactgaagccaaatagttctctgggcatgcatgagagaggga

SEQ ID NO: 46976 - DNA, 110 bp, synthetic construct
  source 1..110: mol_type = other DNA
ttgcccatccccacactgaagccaaatagttctctgggcatgcatgagagagggagcttccgggcggggaccaccatggtacggtgatcttgggttgctcccccattggt

SEQ ID NO: 46977 - DNA, 110 bp, synthetic construct
  source 1..110: mol_type = other DNA
gacaccgtggtcttgcttttgagcaattgccatgcttcatcttctttaaagcttcgtgcagatgggtaaactgaggcaccccggagcagtgaagccctgtatgtctctgg

SEQ ID NO: 46978 - DNA, 110 bp, synthetic construct
  source 1..110: mol_type = other DNA
gtgcagatgggtaaactgaggcaccccggagcagtgaagccctgtatgtctctggctccggaacccttggttctacccgctttctggtggtgttgcacaagtttaagatg

SEQ ID NO: 46979 - DNA, 110 bp, synthetic construct
  source 1..110: mol_type = other DNA
acttaaacagaaaattctctcccttccgttcaagagagtcggctacagtctggcagagttgcagctttgggagggtagtaaggtaaaaccattgctaaggacagtggtct

SEQ ID NO: 46980 - DNA, 110 bp, synthetic construct
  source 1..110: mol_type = other DNA
gagttgcagctttgggagggtagtaaggtaaaaccattgctaaggacagtggtctttgttccagtcatttcagtacttaccttctctgccaaaaacaagttcaaccaaat

SEQ ID NO: 46981 - DNA, 110 bp, synthetic construct
  source 1..110: mol_type = other DNA
aattcctctccttctcgttttaattctttccctccttagcacctgcttgttgtcagcttttaacttcatctgttcagtcatcatctgctcattctttcaaaaaatgtatt

SEQ ID NO: 46982 - DNA, 110 bp, synthetic construct
  source 1..110: mol_type = other DNA
gcttttaacttcatctgttcagtcatcatctgctcattctttcaaaaaatgtattgagcacctcagcccctgccatggtcagactcagagtctaaccggtgagggagaca

SEQ ID NO: 46983 - DNA, 110 bp, synthetic construct
  source 1..110: mol_type = other DNA
caaccacattagttcaagataaggaaaaccagggtgggtgtgtcagggcaggggttttcggttcaacataaagcagaaccttgtaaccattacaggcctcatgccaccct

SEQ ID NO: 46984 - DNA, 110 bp, synthetic construct
  source 1..110: mol_type = other DNA
tttcggttcaacataaagcagaaccttgtaaccattacaggcctcatgccaccctgtccagtaaaaacagaacacgtgccacgtatgtaattgaaaattgtccagtagct

SEQ ID NO: 46985 - DNA, 110 bp, synthetic construct
  source 1..110: mol_type = other DNA
tccgtttctcagaagtaaaacaagccaagtcacacatttctatgaattctttcagaaagccgacgattagtaataatagcagtcgcggtgtctatggatggagcacaggt

SEQ ID NO: 46986 - DNA, 110 bp, synthetic construct
  source 1..110: mol_type = other DNA
aaagccgacgattagtaataatagcagtcgcggtgtctatggatggagcacaggtgccagactcatcccagatctggccccgcagtggaccccctgggtggccaggccgt

SEQ ID NO: 46987 - DNA, 110 bp, synthetic construct
  source 1..110: mol_type = other DNA
caggccttgactgtgtctagaagtgacaaggaaagccagggagaggctatcatactggtggtcttctgctgcctggagaacccaggactgtaaggactcattccacgtgg

SEQ ID NO: 46988 - DNA, 110 bp, synthetic construct
  source 1..110: mol_type = other DNA
tggtggtcttctgctgcctggagaacccaggactgtaaggactcattccacgtggccttttgagcatctaaaatcaagccttgtgtggaagaaaagaagaaagagatgtg

SEQ ID NO: 46989 - DNA, 110 bp, synthetic construct
  source 1..110: mol_type = other DNA
tgatgcctaaaaacaatagtgatgtccttagctccggagttccaggcccgtaccacctggtccttgtcccatcccggtgtcctctgtatgatttttggcatctttacccc

SEQ ID NO: 46990 - DNA, 110 bp, synthetic construct
  source 1..110: mol_type = other DNA
cctggtccttgtcccatcccggtgtcctctgtatgatttttggcatctttaccccccatggcccctcgtcacccggggccatcagacagattcagaagtcactgctcttg

SEQ ID NO: 46991 - DNA, 110 bp, synthetic construct
  source 1..110: mol_type = other DNA
ggttgccggagctgcaggcccacgtggaaggacaggtcacagcccgtggggagcggatcaccgtcccttttccttcttgctccgtttctggaagcttcagctgcggacgc

SEQ ID NO: 46992 - DNA, 110 bp, synthetic construct
  source 1..110: mol_type = other DNA
gatcaccgtcccttttccttcttgctccgtttctggaagcttcagctgcggacgcaagatcaggttctgcgctccacgggcactggagcggtctgagcagatggcctgcg

SEQ ID NO: 46993 - DNA, 110 bp, synthetic construct
  source 1..110: mol_type = other DNA
attaaccccctcggggtcccatttagttccaatgatattttgtgattttattaactaaaagtaaatagggatgctgtctgctgtggatcttgggtttagaatttttggtc

SEQ ID NO: 46994 - DNA, 110 bp, synthetic construct
  source 1..110: mol_type = other DNA
taaaagtaaatagggatgctgtctgctgtggatcttgggtttagaatttttggtctctggagcacaggggttcattgtaaccatccgtgtcctttgtccccctgaatagt

SEQ ID NO: 46995 - DNA, 110 bp, synthetic construct
  source 1..110: mol_type = other DNA
cacgagagaaaggaaagatggttctaatcatacttcatctccgttccctccctgagcatctgacctgcatgtaactcacagtcggcacaggaaggcagcagagctggtgt

SEQ ID NO: 46996 - DNA, 110 bp, synthetic construct
  source 1..110: mol_type = other DNA
gcatctgacctgcatgtaactcacagtcggcacaggaaggcagcagagctggtgtacccattttacagaagaagaaactgaggctccttcaagttcactaagcttcccca

SEQ ID NO: 46997 - DNA, 110 bp, synthetic construct
  source 1..110: mol_type = other DNA
gtgtctttgccttgtggaagtgttccccccatctctgctttcctgttcacctgggcttctctctgtcttcatagctgtgtccacatttcccatgttgataaggacccagt

SEQ ID NO: 46998 - DNA, 110 bp, synthetic construct
  source 1..110: mol_type = other DNA
cttctctctgtcttcatagctgtgtccacatttcccatgttgataaggacccagtcatattggcttaggggccaccccactccagtatggccatatctctaattacaact

SEQ ID NO: 46999 - DNA, 110 bp, synthetic construct; identical to SEQ ID NO: 46997
  source 1..110: mol_type = other DNA

SEQ ID NO: 47000 - DNA, 110 bp, synthetic construct; identical to SEQ ID NO: 46998
  source 1..110: mol_type = other DNA

SEQ ID NO: 47001 - DNA, 110 bp, synthetic construct
  source 1..110: mol_type = other DNA
gggcctttgttccatgaagcagacattctgttacaacaaccaacttccaagttagaatttgatccggacgtgctaaggaggcactgtagagctctcgaattctcctcctc

SEQ ID NO: 47002 - DNA, 110 bp, synthetic construct
  source 1..110: mol_type = other DNA
aatttgatccggacgtgctaaggaggcactgtagagctctcgaattctcctcctccatgggctcaattcccaaaagcctggggctcatctttgcctcctgggagaagatg

SEQ ID NO: 47003 - DNA, 110 bp, synthetic construct
  source 1..110: mol_type = other DNA
tggcacctcctgtccatctcgggaccagcaatagccactgctgggtcattttggcttgttcgcgtgttctttttgtccctctgttttttacagacttatcaccagcagag

SEQ ID NO: 47004 - DNA, 110 bp, synthetic construct
  source 1..110: mol_type = other DNA
ttgttcgcgtgttctttttgtccctctgttttttacagacttatcaccagcagagtccctcccagtcttccgatgctcagtgggcagggagtgtgggcactaagttagaa

SEQ ID NO: 47005 - DNA, 110 bp, synthetic construct
  source 1..110: mol_type = other DNA
ccacggtatatctcttcctctaaactttgaccccaggcttcctgccatcctccatgaaatccatgcttgcctgggcatgtgccctagcgccaaggcacgggggtcaccct

SEQ ID NO: 47006 - DNA, 110 bp, synthetic construct
  source 1..110: mol_type = other DNA
gaaatccatgcttgcctgggcatgtgccctagcgccaaggcacgggggtcacccttagttatatcttagactctcctggcagctgtgtattttaaatttcttcctaaggt

SEQ ID NO: 47007 - DNA, 110 bp, synthetic construct
  source 1..110: mol_type = other DNA
tgtggaggccagaagttggaaatcgaggagttggcaggactgtgatgcctttgaaggctctggggaaggacccttccttgccgttccagccttgggtggttgtcatgaat

SEQ ID NO: 47008 - DNA, 110 bp, synthetic construct
  source 1..110: mol_type = other DNA
ggctctggggaaggacccttccttgccgttccagccttgggtggttgtcatgaatgccctggcgtgtgactgcgtcaccccactctctgcctccgttgccccatggcctt

SEQ ID NO: 47009 - DNA, 110 bp, synthetic construct
  source 1..110: mol_type = other DNA
ttttcactaatagcaacattttctcgtgtcattagcattcttcttcagcatgataatagctcgtatttattgagcgcataaaggatgccagatcctgttctgcacatgcg

SEQ ID NO: 47010 - DNA, 110 bp, synthetic construct
  source 1..110: mol_type = other DNA
atagctcgtatttattgagcgcataaaggatgccagatcctgttctgcacatgcgttacagcaacacaaacagtgcagcaagatagacctgattatagtgcattcgtttt

SEQ ID NO: 47011 - DNA, 110 bp, synthetic construct
  source 1..110: mol_type = other DNA
gaattcagccaaactagtttggatacatggaaagatacagaaagtgaacacacccggtaaatagagccgttttagatgtttgttttttttttaatgtaaatgtctcaaaa

SEQ ID NO: 47012 - DNA, 110 bp, synthetic construct
  source 1..110: mol_type = other DNA
ggtaaatagagccgttttagatgtttgttttttttttaatgtaaatgtctcaaaatggcacctgctggggagcaggatgggcagccctttggggaaccaaagccctgggc

SEQ ID NO: 47013 - DNA, 110 bp, synthetic construct
  source 1..110: mol_type = other DNA
ggattgctgggtactttcactcactggacaacgctgtgtgcagaggcagctatgtgctcgacgcagcctctctgtgcgctgcgaaacagcagcgagccagtcaaacaaaa

SEQ ID NO: 47014 - DNA, 110 bp, synthetic construct
  source 1..110: mol_type = other DNA
gctcgacgcagcctctctgtgcgctgcgaaacagcagcgagccagtcaaacaaaaccagggcccgcatctcgaggaatcacctgcctcgggtagagcgaccacaaaagta

SEQ ID NO: 47015 - DNA, 110 bp, synthetic construct
  source 1..110: mol_type = other DNA
ccgcggcttgcttgctgctgtgtaatcacgttgtacatttgctagtggccctagaatgtagtctccagagaaactgcagcccgagctgtggctgccttccccaatctagt

SEQ ID NO: 47016 - DNA, 110 bp, synthetic construct
  source 1..110: mol_type = other DNA
atgtagtctccagagaaactgcagcccgagctgtggctgccttccccaatctagtcctcaagtctaaacccagggcttggcaaagggaggcagcagccctcccaacgccc

SEQ ID NO: 47017 - DNA, 110 bp, synthetic construct
  source 1..110: mol_type = other DNA
ccttcacaggttgtagctaaaagaataaaattagattgaaatattaaataacctggctagccagagacattttgccagatgccagcacttgtgtcctagatatgaaaaga

SEQ ID NO: 47018 - DNA, 110 bp, synthetic construct
  source 1..110: mol_type = other DNA
gctagccagagacattttgccagatgccagcacttgtgtcctagatatgaaaagaccactacaataatgagaagcaatgttggatttaaaaaaaaaaaaaaaaaaaaaaa

SEQ ID NO: 47019 - DNA, 110 bp, synthetic construct
  source 1..110: mol_type = other DNA
acagcattaatttagaataacataatgcctggaaatgaagcaagttaggtctcgttgagctatgaaccgcttgccttgtgctacgtaacagaggctgggcgacagcggga

SEQ ID NO: 47020 - DNA, 110 bp, synthetic construct
  source 1..110: mol_type = other DNA
tgagctatgaaccgcttgccttgtgctacgtaacagaggctgggcgacagcgggaggctggcctgtagataaccattactctcagccaacgtgttcactggggtctctct

SEQ ID NO: 47021 - DNA, 110 bp, synthetic construct
  source 1..110: mol_type = other DNA
gacccgcctcgactttcttacacctgaaaaccgtaacatgaaactgtcccacgtcgcagaggcggcagctgaggatcaagaaaatactcgcacctcctcacccctgctag

SEQ ID NO: 47022 - DNA, 110 bp, synthetic construct
  source 1..110: mol_type = other DNA
gcagaggcggcagctgaggatcaagaaaatactcgcacctcctcacccctgctaggagatgcgaggaaaagggcaacaacaggtgttggggaggctatggagatactgga

SEQ ID NO: 47023 - DNA, 110 bp, synthetic construct; identical to SEQ ID NO: 47021
  source 1..110: mol_type = other DNA

SEQ ID NO: 47024 - DNA, 110 bp, synthetic construct; identical to SEQ ID NO: 47022
  source 1..110: mol_type = other DNA

SEQ ID NO: 47025 - DNA, 110 bp, synthetic construct
  source 1..110: mol_type = other DNA
gcctatgttcttgctcagggtctccactttctctacggaactttcagaaatcacgcgtttctatctggtcctgaatccccatagggattggcatcaaggttttttcattc

SEQ ID NO: 47026 - DNA, 110 bp, synthetic construct
  source 1..110: mol_type = other DNA
cgtttctatctggtcctgaatccccatagggattggcatcaaggttttttcattcttgctcctgtcaactcttgttctctccccaagcccaacctcatattcattcttct

SEQ ID NO: 47027 - DNA, 110 bp, synthetic construct
  source 1..110: mol_type = other DNA
aagaccaagagctgttataaaagaagacgccctcaatgtcacttcattttcttttattcttattatcacatttaaatctctctgtagaagtggtcttgataggtaacttt

SEQ ID NO: 47028 - DNA, 110 bp, synthetic construct
  source 1..110: mol_type = other DNA
attcttattatcacatttaaatctctctgtagaagtggtcttgataggtaactttattacacatttcgagactattcgttctgaacagaacttcctccaaggaattaaca

SEQ ID NO: 47029 - DNA, 110 bp, synthetic construct
  source 1..110: mol_type = other DNA
gggattaaatactgacttagaagaacctccccaatagctctctgcattgcctaaaaaagctgagttggagccagggtaaagatggagagtagaaaggtcaacccactatt

SEQ ID NO: 47030 - DNA, 110 bp, synthetic construct
  source 1..110: mol_type = other DNA
aaagctgagttggagccagggtaaagatggagagtagaaaggtcaacccactattctcagagagacattcctcctgagtgaatctgtaggccacttgcctactaaatacc

SEQ ID NO: 47031 - DNA, 110 bp, synthetic construct
  source 1..110: mol_type = other DNA
gggtcccaggattgaggagcacgcgtcagccctcagaccatcgaacgtgacacttctactgagctatttatacacggagccacacccactcaagagacaggccgagtgcg

SEQ ID NO: 47032 - DNA, 110 bp, synthetic construct
  source 1..110: mol_type = other DNA
ctactgagctatttatacacggagccacacccactcaagagacaggccgagtgcgagcagcagctgtgggacctgccacagtggcgacgccaggccaacaagccctctgc

SEQ ID NO: 47033 - DNA, 110 bp, synthetic construct
  source 1..110: mol_type = other DNA
cttccagctctgagaggcagagccccgcaaggtccacgcagcacggtgggtccctcacgaaggtgtgctgggtggatgaattggagccaaggggaggttgagataaatta

SEQ ID NO: 47034 - DNA, 110 bp, synthetic construct
  source 1..110: mol_type = other DNA
cacgaaggtgtgctgggtggatgaattggagccaaggggaggttgagataaattagccgcgcgtctttgactgaccactaggtggcaggagcatcatgccaagtccgagc

SEQ ID NO: 47035 - DNA, 110 bp, synthetic construct
  source 1..110: mol_type = other DNA
gctggtccactcctgaacttagtaaacatttaaaaaaccatattgatatggttactagtcacacattgaaaatatcctctcgttaaatcgtccttcattccctaaaacgg

SEQ ID NO: 47036 - DNA, 110 bp, synthetic construct
  source 1..110: mol_type = other DNA
tagtcacacattgaaaatatcctctcgttaaatcgtccttcattccctaaaacggccgtcatacctagaccacatcctagttacaaaacccatgcattgaaaatatactc

SEQ ID NO: 47037 - DNA, 110 bp, synthetic construct
  source 1..110: mol_type = other DNA
tgtgtggacagtgtgggtttttttgcaatccctgggggctatacttttccatctcgggattgaaatccaaggaatctctcaagtactccagtatgataaataagtccttg

SEQ ID NO: 47038 - DNA, 110 bp, synthetic construct
  source 1..110: mol_type = other DNA
gggattgaaatccaaggaatctctcaagtactccagtatgataaataagtccttggaatagctttgtcagtggtaatcttggagccgttgccctggaagatccagctttt

SEQ ID NO: 47039 - DNA, 110 bp, synthetic construct
  source 1..110: mol_type = other DNA
caaaaattaagtaggctgctgtttatttcccagacgtaaaatgtgtgatcttggccaagttaattactttctctagacctcgatttccttatgtatttaaaaaacggagc

SEQ ID NO: 47040 - DNA, 110 bp, synthetic construct
  source 1..110: mol_type = other DNA
caagttaattactttctctagacctcgatttccttatgtatttaaaaaacggagctcttaagaaactcacggatttgagaacagacttggagttgccgagggggaggggg

SEQ ID NO: 47041 - DNA, 110 bp, synthetic construct
  source 1..110: mol_type = other DNA
ttctgtcccccaattcttccttcatccatgccttttctttccaaccactggtctcaaatggactttaagttcctacatattaggaacttgctcacagctagtggtgttcc

SEQ ID NO: 47042 - DNA, 110 bp, synthetic construct
  source 1..110: mol_type = other DNA
aaatggactttaagttcctacatattaggaacttgctcacagctagtggtgttccagtaagccaaccaactctgaaaaaatacaagcaggcctagatctacatacataat

SEQ ID NO: 47043 - DNA, 110 bp, synthetic construct
  source 1..110: mol_type = other DNA
tatcctcacattccatctgaactttttgaatgttctggagttttcattttgaaaaatcttaaaccctgttagagtgcatctccaatttgattgttcatcagaagctccag

SEQ ID NO: 47044 - DNA, 110 bp, synthetic construct
  source 1..110: mol_type = other DNA
atcttaaaccctgttagagtgcatctccaatttgattgttcatcagaagctccaggggtacttgttaaaaatcagtttgctggaccccatctttgcattcctgactcagc

SEQ ID NO: 47045 - DNA, 110 bp, synthetic construct
  source 1..110: mol_type = other DNA
caaccctgggaacaagactcaaaagccagcatcctgctgccagcacagtttgatgggagattaccagcccaggaaccagagctggtaatctctgggttcaagctctggtt

SEQ ID NO: 47046 - DNA, 110 bp, synthetic construct
  source 1..110: mol_type = other DNA
ggagattaccagcccaggaaccagagctggtaatctctgggttcaagctctggttctgtcttttgcagcctatgcaactgagggaggaaaataacatttcttgagcaccc

SEQ ID NO: 47047 - DNA, 110 bp, synthetic construct
  source 1..110: mol_type = other DNA
aatcacacttgatatgagaagaggaactgagaaaagatagtttgaagcccagggaacctcagctgtggtttgaagaagaaccatgggtatattaccaagatgaccaaagt

SEQ ID NO: 47048 - DNA, 110 bp, synthetic construct
  source 1..110: mol_type = other DNA
acctcagctgtggtttgaagaagaaccatgggtatattaccaagatgaccaaagtatttataataccgaatgttctagagaaaaaagttcttaggggaacattcaagagt

SEQ ID NO: 47049 - DNA, 110 bp, synthetic construct
  source 1..110: mol_type = other DNA
atgtttgtctctttgacttttgatttggggatagtgcttgaaatcagtgtttttctccttccatattgagacagctagtgccgtctctcctgattgtaggcatatgggcc

SEQ ID NO: 47050 - DNA, 110 bp, synthetic construct
  source 1..110: mol_type = other DNA
tccttccatattgagacagctagtgccgtctctcctgattgtaggcatatgggcctctcatattccttcatttcagctactctggatgatgactgccaacccccagaagc

SEQ ID NO: 47051 - DNA, 110 bp, synthetic construct
  source 1..110: mol_type = other DNA
cagatcttggcaaaaggtttacacgggctaaacaaataatgggaccccctcatacggctgttttcacacctgttgagatgatataagcaaaataggatagtcagtgctcg

SEQ ID NO: 47052 - DNA, 110 bp, synthetic construct
  source 1..110: mol_type = other DNA
ggctgttttcacacctgttgagatgatataagcaaaataggatagtcagtgctcggcacacaataatggcttcacaaatggcagtgtcacaccgtggtttatgcgatctt

SEQ ID NO: 47053 - DNA, 110 bp, synthetic construct
  source 1..110: mol_type = other DNA
tcgttagccactgagccatgaaggaaactcctgggctgcacactcttttaaacataaccttcaaatctgtgtcattctttggcttagaaaagaattcaagactatttttt

SEQ ID NO: 47054 - DNA, 110 bp, synthetic construct; identical to SEQ ID NO: 47053
  source 1..110: mol_type = other DNA

SEQ ID NO: 47055 - DNA, 110 bp, synthetic construct
  source 1..110: mol_type = other DNA
agtaaactcactcctttaagaaccctgataatggggtgaactggcatcctaagcagacagagaagttcaccctcggggaccccgccttctggagacaaggatgctgtttt

SEQ ID NO: 47056 - DNA, 110 bp, synthetic construct
  source 1..110: mol_type = other DNA
gacagagaagttcaccctcggggaccccgccttctggagacaaggatgctgttttcctctctgactttcatgttggaatttaagttcttttgaagacagatgtatccaat

SEQ ID NO: 47057 - DNA, 110 bp, synthetic construct
  source 1..110: mol_type = other DNA
tagatgttctaatattctatttcctaactcattattttaaagcaccatagcattctggtaaattccacccatcatcactctagtaaaatcactctgcattcgtgtataca

SEQ ID NO: 47058 - DNA, 110 bp, synthetic construct
  source 1..110: mol_type = other DNA
tggtaaattccacccatcatcactctagtaaaatcactctgcattcgtgtatacagtccttggagccttccttcccgaggggacgtaactagtatttattagactgtaaa

SEQ ID NO: 47059 - DNA, 110 bp, synthetic construct
  source 1..110: mol_type = other DNA
aagaatttaaaaagcaacatactaagcaacccatgaaaccccaaatgcaaattacacggtagcaagacaccaagtcaaaaggaaggaacagaggccaagtggtcgccctg

SEQ ID NO: 47060 - DNA, 110 bp, synthetic construct
  source 1..110: mol_type = other DNA
acggtagcaagacaccaagtcaaaaggaaggaacagaggccaagtggtcgccctgttttggaggaggaggagataccccggggagcccagtgggtttgtgtctggattga

SEQ ID NO: 47061 - DNA, 110 bp, synthetic construct
  source 1..110: mol_type = other DNA
ctctcccaccagacagaggacaccagcctcaggacaaccacagccccatactcttctgtggcaggacccagcccactgatgagcagtccaacaccagctctgagacattt

SEQ ID NO: 47062 - DNA, 110 bp, synthetic construct
  source 1..110: mol_type = other DNA
ctgtggcaggacccagcccactgatgagcagtccaacaccagctctgagacattttggctgccagctgccctgggatccactcccactcaccagcaggccaacacaagct

SEQ ID NO: 47063 - DNA, 110 bp, synthetic construct
  source 1..110: mol_type = other DNA
tgccgtgggtggtgtggggtgtgggatgtgttgagggtgacggtgactgaaggctttcacagaggaagggaacaaagctccaagtatgaacatttgttcccctgtggggt

SEQ ID NO: 47064 - DNA, 110 bp, synthetic construct
  source 1..110: mol_type = other DNA
ttcacagaggaagggaacaaagctccaagtatgaacatttgttcccctgtggggtagaccttaaatatcatttgaagagaaatccttgagaatccagtgaaatgactggg

SEQ ID NO: 47065 - DNA, 110 bp, synthetic construct
  source 1..110: mol_type = other DNA
cacctcctgatggctgacggagaggtttgccaaagtcccttttcccagaaacgttgtgctcacgtcaggattctcgccagccaagtgcctacagagctactgagtgttct

SEQ ID NO: 47066 - DNA, 110 bp, synthetic construct
  source 1..110: mol_type = other DNA
gtgctcacgtcaggattctcgccagccaagtgcctacagagctactgagtgttctttccattagtaaaagaacagccgagcccacctccagccaggcctctctggttcta

SEQ ID NO: 47067 - DNA, 110 bp, synthetic construct
  source 1..110: mol_type = other DNA
ttaatcctagcatgcatataaagtagtttcagaattgctagcctgtattcctatgagaaacaaagcttgccattagagtacaatgtttgcatggcagttctttttgtctt

SEQ ID NO: 47068 - DNA, 110 bp, synthetic construct
  source 1..110: mol_type = other DNA
agaaacaaagcttgccattagagtacaatgtttgcatggcagttctttttgtctttaatcttcaatggccagtcacaacactgttttccaaagttatgtaggtcagttca

SEQ ID NO: 47069 - DNA, 110 bp, synthetic construct
  source 1..110: mol_type = other DNA
attgaacctgcaacctcaggaatactagttgggttcattaccactgagccacacagggaactccctgtagttgaatttttaaccaaggccatgtttaacaactggctcct

SEQ ID NO: 47070 - DNA, 110 bp, synthetic construct
  source 1..110: mol_type = other DNA
gggaactccctgtagttgaatttttaaccaaggccatgtttaacaactggctcctatcatttctgaaaacttgctcttatgggctggtctgaccactctgtcagctggaa

SEQ ID NO: 47071 - DNA, 110 bp, synthetic construct
  source 1..110: mol_type = other DNA
actctggcagactccccagaatacctcaagtggggctcttcctcacagttatacaaagcaccagggtttctcttctgcacagcgctcagctacaaagcctcttccccttg

SEQ ID NO: 47072 - DNA, 110 bp, synthetic construct
  source 1..110: mol_type = other DNA
aagcaccagggtttctcttctgcacagcgctcagctacaaagcctcttccccttgcattgctttcgaattcctgttgttgggtgtacgaatgtggggagtagattttccc

SEQ ID NO: 47073 - DNA, 110 bp, synthetic construct
  source 1..110: mol_type = other DNA
ctgccaaagttggctaaaagtatcaacttaggagttcttcttgtggctcagcagtagcaaacccaactagtatccatggggacacgggttcaatccctagcttccctcag

SEQ ID NO: 47074 - DNA, 110 bp, synthetic construct; identical to SEQ ID NO: 47073
  source 1..110: mol_type = other DNA

SEQ ID NO: 47075 - DNA, 110 bp, synthetic construct
  source 1..110: mol_type = other DNA
ggatatgaagtcttataatgttaaaataataagagaatggtatattggcagagggttagtcaaacagaccaatgaaacagaacagagaatctagaaactgattctgttca

SEQ ID NO: 47076 - DNA, 110 bp, synthetic construct
  source 1..110: mol_type = other DNA
ttagtcaaacagaccaatgaaacagaacagagaatctagaaactgattctgttcaacatgtatggacagtgaatagtgacaatgtgtgcaatgcagagaaggaaaaaaag

SEQ ID NO: 47077 - DNA, 110 bp, synthetic construct
  source 1..110: mol_type = other DNA
catgattgaaggacttcttggctgcttccagtttgggacagttattaataaagcttctataaacagtcacgtgcagtattccgtgtggacacaagttttcagctcgtatc

SEQ ID NO: 47078 - DNA, 110 bp, synthetic construct
  source 1..110: mol_type = other DNA
tctataaacagtcacgtgcagtattccgtgtggacacaagttttcagctcgtatctgtaaatatctcagagtgagattgctacatcattaggaagactaggcttaacttt

SEQ ID NO: 47079 - DNA, 110 bp, synthetic construct
  source 1..110: mol_type = other DNA
tcttgggtggatacctagaatggaattgctgggctgtatgatatattcatctttaagttttttgcaaaatgtcctactgtttatcaaagtagctgaataattgtacattt

SEQ ID NO: 47080 - DNA, 110 bp, synthetic construct
  source 1..110: mol_type = other DNA
agttttttgcaaaatgtcctactgtttatcaaagtagctgaataattgtacatttcaccagtcatctttgagggttctagtctctccacacgattgccaatgcttatatt

SEQ ID NO: 47081 - DNA, 110 bp, synthetic construct
  source 1..110: mol_type = other DNA
cctgttctcattgctatctatgtgtaagaggagctgggaaacattaaaacatatctgtgtcctggccccacacaagaccaatgaaagtcaagttttctggtcttgggctg

SEQ ID NO: 47082 - DNA, 110 bp, synthetic construct
  source 1..110: mol_type = other DNA
tgtgtcctggccccacacaagaccaatgaaagtcaagttttctggtcttgggctgggcatccctgtttatttttcacagctgcccagatgtttctagtacacagtcagtg

SEQ ID NO: 47083 - DNA, 110 bp, synthetic construct
  source 1..110: mol_type = other DNA
ccccccttttccaaaggttccctttctgtggtttcagttaccccagtggtcaaccacaacctgaaaatggaaacgttctacatagtttctaagttttaaactgtgcgata

SEQ ID NO: 47084 - DNA, 110 bp, synthetic construct
  source 1..110: mol_type = other DNA
acaacctgaaaatggaaacgttctacatagtttctaagttttaaactgtgcgatattctcagaagccgatgaaatctcacaccatcccatgctctcccaccaggaacatg

SEQ ID NO: 47085 - DNA, 110 bp, synthetic construct
  source 1..110: mol_type = other DNA
cttggacagaagctcccactggggcacagtgggaacgaatctgactagtatccacgaagatgcaggtttgacccctgtcctctctcagtgagtgggttaaggatccggcg

SEQ ID NO: 47086 - DNA, 110 bp, synthetic construct; identical to SEQ ID NO: 47085
  source 1..110: mol_type = other DNA

SEQ ID NO: 47087 - DNA, 110 bp, synthetic construct
  source 1..110: mol_type = other DNA
aatttgaatgcttttaatacttagccatctaacacttcaaacataatccagaataaatgcatcatctccctccctttcacttcagttccccacctacctcacttcaatat

SEQ ID NO: 47088 - DNA, 110 bp, synthetic construct
  source 1..110: mol_type = other DNA
aatgcatcatctccctccctttcacttcagttccccacctacctcacttcaatatgggaaaattttcattaaattaagattcccagagaaacaagttccctggagagtat

SEQ ID NO: 47089 - DNA, 110 bp, synthetic construct
  source 1..110: mol_type = other DNA
cagagcgtgtggcagagcaagaggttggcagcaagatcagtgtctggagggcaagtcacggggtgaatgtaactagataaagctggccaggagtttggaaggaaaaaggc

SEQ ID NO: 47090 - DNA, 110 bp, synthetic construct
  source 1..110: mol_type = other DNA
tcacggggtgaatgtaactagataaagctggccaggagtttggaaggaaaaaggctctggagtggttgtcttcctgtggtccttacgtgccaggccctggaggagagcaa

SEQ ID NO: 47091 - DNA, 110 bp, synthetic construct
  source 1..110: mol_type = other DNA
gaggttttagggaatgggtagtgtgtttgggtggggaatgggtagacagccaaaaatgtatcttaacactgaagaagttggacaatattgctagaaaccaggggcacaat

SEQ ID NO: 47092 - DNA, 110 bp, synthetic construct
  source 1..110: mol_type = other DNA
acagccaaaaatgtatcttaacactgaagaagttggacaatattgctagaaaccaggggcacaatcaactgctattttttactttttaaaaaggaagttttatatgtaac

SEQ ID NO: 47093 - DNA, 110 bp, synthetic construct
  source 1..110: mol_type = other DNA
ctgtagttccaactggacccctagcccgggaacctctatatgccacaggagaggccctaaaaaacaaaaaataaaatcagtggaataaagacaggtcatggggccaagtg

SEQ ID NO: 47094 - DNA, 110 bp, synthetic construct; identical to SEQ ID NO: 47093
  source 1..110: mol_type = other DNA

SEQ ID NO: 47095 - DNA, 110 bp, synthetic construct
  source 1..110: mol_type = other DNA
tagtccgatttgtttctgctgagccacagcaggaactccgggggtgaatttttgaattgagtggctagagaaggttttactcatcaggtgaggtctgagtcaagatgtta

SEQ ID NO: 47096 - DNA, 110 bp, synthetic construct
  source 1..110: mol_type = other DNA
attgagtggctagagaaggttttactcatcaggtgaggtctgagtcaagatgttaggcaccgaatgtctataatcataactccaagactccataatcagactcctgctgg

SEQ ID NO: 47097 - DNA, 110 bp, synthetic construct
  source 1..110: mol_type = other DNA
gtccatggtgcctctggctttgtgggcagaggaaaagggtctccccctcagggagtagccgtgccgtcatcaagcctacagcctttccgagaagacctaagctgctccag

SEQ ID NO: 47098 - DNA, 110 bp, synthetic construct
  source 1..110: mol_type = other DNA
tagccgtgccgtcatcaagcctacagcctttccgagaagacctaagctgctccagtagcatggagagtgcaaggactaagttcttcccaacaggagttcccagggccttc

SEQ ID NO: 47099 - DNA, 110 bp, synthetic construct
  source 1..110: mol_type = other DNA
gaaatggaactccatttctcaaaatacaaaagtgtacatcaactgtgtttaaactacagggctggacccattaatagatggtgaaatcaacctagtggataaagcccaga

SEQ ID NO: 47100 - DNA, 110 bp, synthetic construct; identical to SEQ ID NO: 47099
  source 1..110: mol_type = other DNA

SEQ ID NO: 47101 - DNA, 110 bp, synthetic construct
  source 1..110: mol_type = other DNA
gttcctagtgggattcattttctctgcgccacgacaggaactcctttttttttaactcttaagtaacaaatttccagtctaaagatggagattgctattgctcagctcac

SEQ ID NO: 47102 - DNA, 110 bp, synthetic construct; identical to SEQ ID NO: 47101
  source 1..110: mol_type = other DNA

SEQ ID NO: 47103 - DNA, 110 bp, synthetic construct
  source 1..110: mol_type = other DNA
tccaggtaaatagtccagaacctcagttttcatgttcattattgggccctacttatttttctcctttcttttcaatatagaccgacccttaaaggtactgcaaagatgcc

SEQ ID NO: 47104 - DNA, 110 bp, synthetic construct
  source 1..110: mol_type = other DNA
tttttctcctttcttttcaatatagaccgacccttaaaggtactgcaaagatgcccttaactgtctgttgacctccttctgtaaatttgtcaccaaaaaggcagatactg

SEQ ID NO: 47105 - DNA, 110 bp, synthetic construct
  source 1..110: mol_type = other DNA
ttggtgtgagctgtggtgtaggttgaaaacacagcttggattctgcgtggctgtggctgtggtgtagttccagtttgacccctagcctgggaacctccacaggccgtgag

SEQ ID NO: 47106 - DNA, 110 bp, synthetic construct; identical to SEQ ID NO: 47105
  source 1..110: mol_type = other DNA

SEQ ID NO: 47107 - DNA, 110 bp, synthetic construct
  source 1..110: mol_type = other DNA
ctgtgacctacaccacatctcccggcagtgctggatccttaacccattgatggagacccagggatgaaccggcatcctaatgaatcctagtcggattcattaactgctga

SEQ ID NO: 47108 - DNA, 110 bp, synthetic construct
  source 1..110: mol_type = other DNA
acccagggatgaaccggcatcctaatgaatcctagtcggattcattaactgctgagccagaaaggggactccttgtgtcagtgctgtagcaagggtttgaatcctggtcc

SEQ ID NO: 47109 - DNA, 110 bp, synthetic construct
  source 1..110: mol_type = other DNA
cccaatgtcagaagagctgtgccttgctcactgagcaccaaggagcaggggagaagctcccaagctgccagggcctccagcaccttgttaatatacacctcacactcaca

SEQ ID NO: 47110 - DNA, 110 bp, synthetic construct
  source 1..110: mol_type = other DNA
gctcccaagctgccagggcctccagcaccttgttaatatacacctcacactcacagggacagcctttcctttctgaccagaggctccaggagagtgacacactccaggca

SEQ ID NO: 47111 - DNA, 110 bp, synthetic construct
  source 1..110: mol_type = other DNA
cagatgtaatccaggcttgatactcagtggagccccctaaacagccaggttgtgttcttcggaatgagcattgaggagagccaaggtgctcagctttccaggcagggaac

SEQ ID NO: 47112 - DNA, 110 bp, synthetic construct
  source 1..110: mol_type = other DNA
tcttcggaatgagcattgaggagagccaaggtgctcagctttccaggcagggaacactgcatgtcttggctcatgctgctctgaaacagctccctgggtaagaaacggta

SEQ ID NO: 47113 - DNA, 110 bp, synthetic construct
  source 1..110: mol_type = other DNA
ttcacctatccaaagataatcactgatgctagtttctatgggtccttccagagattgtatgtacacactcaagcttatatatatatttattattcattcaacaaacatcc

SEQ ID NO: 47114 - DNA, 110 bp, synthetic construct
  source 1..110: mol_type = other DNA
tgtatgtacacactcaagcttatatatatatttattattcattcaacaaacatccctgagcatttactatgggccaggcacaggagatggggcaaagaacaaaaggaagt

SEQ ID NO: 47115 - DNA, 110 bp, synthetic construct
  source 1..110: mol_type = other DNA
agattcatttctgctgagccacaacacaaacgcccctgggtctgatttctgaagcctgagcttcagttcccagcccctatctactttgggggacaaggctgctgaacagt

SEQ ID NO: 47116 - DNA, 110 bp, synthetic construct; identical to SEQ ID NO: 47115
  source 1..110: mol_type = other DNA

SEQ ID NO: 47117 - DNA, 110 bp, synthetic construct
  source 1..110: mol_type = other DNA
ttcattgaacccaatgccttttcatttggtgatgtctaaatggcccagccaggaggtggcagaggtttcagtcactgcacacacattccgatgtcttcagaggagacagc

SEQ ID NO: 47118 - DNA, 110 bp, synthetic construct
  source 1..110: mol_type = other DNA
gtggcagaggtttcagtcactgcacacacattccgatgtcttcagaggagacagccccggaggtaaggtgaggctaatgatttcagagcctttgcaccatttacagagaa

SEQ ID NO: 47119 - DNA, 110 bp, synthetic construct
  source 1..110: mol_type = other DNA
caactgctgccatcctgcccgctcagcctctggggagggggcgggaggtggaacatggagggggagccgcagtcattcgctctgccagaagctgagctactgacacttgt

SEQ ID NO: 47120 - DNA, 110 bp, synthetic construct
  source 1..110: mol_type = other DNA
tggagggggagccgcagtcattcgctctgccagaagctgagctactgacacttgtctccagggctcaaaggaagagctttagggctgcagattcagcaaaggctcaggtt

SEQ ID NO: 47121 - DNA, 110 bp, synthetic construct
  source 1..110: mol_type = other DNA
atcaatcgggaacctggttggggaagaagacagcagatgagatgactagggtgacccggtacaacctgccgaagaaggcgagctgagtggattagcagaaacactatgag

SEQ ID NO: 47122 - DNA, 110 bp, synthetic construct
  source 1..110: mol_type = other DNA
ctagggtgacccggtacaacctgccgaagaaggcgagctgagtggattagcagaaacactatgaggaaaaggcggagttcccatcgtggcacagtggaaacaaatccgac

SEQ ID NO: 47123 - DNA, 110 bp, synthetic construct; identical to SEQ ID NO: 47121
  source 1..110: mol_type = other DNA

SEQ ID NO: 47124 - DNA, 110 bp, synthetic construct; identical to SEQ ID NO: 47122
  source 1..110: mol_type = other DNA

SEQ ID NO: 47125 - DNA, 110 bp, synthetic construct
  source 1..110: mol_type = other DNA
taaagatgacctcatttaccttcatgttcctcttccgctgagggaacaccactctgcacacagaggagggaggagaggggacagccgtctgaacgcctccacttgctgtt

SEQ ID NO: 47126 - DNA, 110 bp, synthetic construct
  source 1..110: mol_type = other DNA
gcacacagaggagggaggagaggggacagccgtctgaacgcctccacttgctgttcccatgaacccaagcctccctgttcagcagacggcccaggcggtctggacacaga

SEQ ID NO: 47127 - DNA, 110 bp, synthetic construct
  source 1..110: mol_type = other DNA
tactgcatagtatggaggaccagtttgtttatccatctccttgttggtggataccttggctttttccagcttttaataccatgaataaagttgctaagaacaagtgtgta

SEQ ID NO: 47128 - DNA, 110 bp, synthetic construct
  source 1..110: mol_type = other DNA
ttggctttttccagcttttaataccatgaataaagttgctaagaacaagtgtgtacaagtctttctgtggacatatgttttcatttctctcaggtaaattcctgggaagg

SEQ ID NO: 47129 - DNA, 110 bp, synthetic construct
  source 1..110: mol_type = other DNA
gaagctcagacttgagagatggtgtgtagccctcccactagtcccagaggctaattggatcccctggtcagataaatgagcttgtccgtcacagccagagaggagattct

SEQ ID NO: 47130 - DNA, 110 bp, synthetic construct
  source 1..110: mol_type = other DNA
tggatcccctggtcagataaatgagcttgtccgtcacagccagagaggagattctggatggatgggctatgcaaagcttgggcctgggggagcttgtgggcgtcagcccg

SEQ ID NO: 47131 - DNA, 110 bp, synthetic construct
  source 1..110: mol_type = other DNA
gactctggggaagagaacctgctttacatggtatattaagatggggttcatggtagctgtggaaacaacactcagcagagctgaaccttgaaagcagtgggtgctgccat

SEQ ID NO: 47132 - DNA, 110 bp, synthetic construct
  source 1..110: mol_type = other DNA
gctgtggaaacaacactcagcagagctgaaccttgaaagcagtgggtgctgccatggtaactcagtgctgttggcgatccctgagaaaccacatcctttcttcagatcaa

SEQ ID NO: 47133 - DNA, 110 bp, synthetic construct
  source 1..110: mol_type = other DNA
ctataaattatgtatcgggactaattaaaaatttttttggctggaaagggaattgttggatgcaaatttgaattcacacagacgtggttaaagtgcagatcaggagggaa

SEQ ID NO: 47134 - DNA, 110 bp, synthetic construct
  source 1..110: mol_type = other DNA
ttggatgcaaatttgaattcacacagacgtggttaaagtgcagatcaggagggaaaattgggacttggagaaaacttttccaaacacaaaggaaaaattaaagagggagt

SEQ ID NO: 47135 - DNA, 110 bp, synthetic construct
  source 1..110: mol_type = other DNA
tatttgcaaccactgactgagagctcatgttcccagcagtgtacgaattgttgctatacattatctagttcaatctttacaatcctgtgaagtaggattatacccattta

SEQ ID NO: 47136 - DNA, 110 bp, synthetic construct
  source 1..110: mol_type = other DNA
caggctgcagtcatctcaaggctcaggtgggaaagcatctgcttccaagttcatgcccgtggttgctggcagggtttagctccttgcaggcacttggccagatgccacct

SEQ ID NO: 47137 - DNA, 110 bp, synthetic construct
  source 1..110: mol_type = other DNA
ctaatttgaataaatttctgacacttgccactaagagttatattcaaaatatttaacagccagccatttgaaccagattccccgagcaatcagggcagacatcagctaga

SEQ ID NO: 47138 - DNA, 110 bp, synthetic construct
  source 1..110: mol_type = other DNA
acagccagccatttgaaccagattccccgagcaatcagggcagacatcagctagaagcaactggtgtgactatatcagggtatcctggctgaagatcagcccagtttgca

SEQ ID NO: 47139 - DNA, 110 bp, synthetic construct
  source 1..110: mol_type = other DNA
ctggaaatattcttttagaaggaagacattcccctaacctactttttttccctctgtgacctggccctacggcttggcatgggtagctaatggccatgtcgcatgaggtg

SEQ ID NO: 47140 - DNA, 110 bp, synthetic construct
  source 1..110: mol_type = other DNA
gtgacctggccctacggcttggcatgggtagctaatggccatgtcgcatgaggtgacttaaggctggccatgcactcgaggtggcaaagcagacagacctgagtcagccc

SEQ ID NO: 47141 - DNA, 110 bp, synthetic construct
  source 1..110: mol_type = other DNA
gaagggagcggggcttctgactttttctttgatgttctccaaaataacaccaggtgctctgagcagctctgccaattacctcagcccagtggatactggctgcaaagttg

SEQ ID NO: 47142 - DNA, 110 bp, synthetic construct
  source 1..110: mol_type = other DNA
gctctgagcagctctgccaattacctcagcccagtggatactggctgcaaagttgtctgccatctgttctcctacatctcgccatctcacagcagccctcccgcccttct

SEQ ID NO: 47143 - DNA, 110 bp, synthetic construct
  source 1..110: mol_type = other DNA
atggtgctttaaaggattttctccaggttttttcaagatggcaaatcccataagctggtaattgacaggctgggttctgttctgagtccctctcttgtgcatggaggagg

SEQ ID NO: 47144 - DNA, 110 bp, synthetic construct
  source 1..110: mol_type = other DNA
tggtaattgacaggctgggttctgttctgagtccctctcttgtgcatggaggaggaataacctgcatttgcatagaacttgtcagggtgctgcttttgtgagggtcaatt

SEQ ID NO: 47145 - DNA, 110 bp, synthetic construct
  source 1..110: mol_type = other DNA
cttcgcttcccagttttcatcaatgtgaaactgcccaggtagagttgaaggactcacagctcacctggagccaggctgtcagaagcatggctgccagcacttggtctccc

SEQ ID NO: 47146 - DNA, 110 bp, synthetic construct
  source 1..110: mol_type = other DNA
acagctcacctggagccaggctgtcagaagcatggctgccagcacttggtctccctctgagagaagcagtggtgctgaggaaaaacagtgagacaagtgtgagacaagcc

SEQ ID NO: 47147 - DNA, 110 bp, synthetic construct
  source 1..110: mol_type = other DNA
tttccttttcttcagggagctgcctctcccactgagtccagactctgcagagacacaccctgaagtgttccctggctattccgatcagccccatcatgggtggcttggat

SEQ ID NO: 47148 - DNA, 110 bp, synthetic construct
  source 1..110: mol_type = other DNA
caccctgaagtgttccctggctattccgatcagccccatcatgggtggcttggatccaggatatgtctagatctcagcaacaagagattacaaaagcatattttccttct

SEQ ID NO: 47149 - DNA, 110 bp, synthetic construct
  source 1..110: mol_type = other DNA
tgacaagcagaggatattccatgcgggagagggagccagaagatgaccaggagaaggtgcagggatttcccctgatccacacactttagggaccatctccctggtgggga

SEQ ID NO: 47150 - DNA, 110 bp, synthetic construct
  source 1..110: mol_type = other DNA
ggtgcagggatttcccctgatccacacactttagggaccatctccctggtggggatgctgaacgaaacctcaccagagttagaagagaagtgggaaagtaggagaggaac

SEQ ID NO: 47151 - DNA, 110 bp, synthetic construct
  source 1..110: mol_type = other DNA
tagttattagataaatgcaagtcaaaaaccacaagctaccatgtcacatccattaggacagctaaaatcaaaatcacagatacgtgttgcataaaaagtattagcaggag

SEQ ID NO: 47152 - DNA, 110 bp, synthetic construct
  source 1..110: mol_type = other DNA
ctaccatgtcacatccattaggacagctaaaatcaaaatcacagatacgtgttgcataaaaagtattagcaggagtttccgtcatggtgcagtggttaatgaatccgact

SEQ ID NO: 47153 - DNA, 110 bp, synthetic construct
  source 1..110: mol_type = other DNA
tcaaaactacaacgaggtagcatctcacaacagtcagaatggccaccattaaaaagtctaaaaaactgctggagagggtgtgaagaaaaggaagccctcctatactgttg

SEQ ID NO: 47154 - DNA, 110 bp, synthetic construct; identical to SEQ ID NO: 47153
  source 1..110: mol_type = other DNA

SEQ ID NO: 47155 - DNA, 110 bp, synthetic construct
  source 1..110: mol_type = other DNA
cattgtgataaaacactcggccgatggatcactccgtattttcatcctccagcacacagaacacagtaccaccgttaagtgaacgtatgcccagcttatctgtacctgtt

SEQ ID NO: 47156 - DNA, 110 bp, synthetic construct
  source 1..110: mol_type = other DNA
acagaacacagtaccaccgttaagtgaacgtatgcccagcttatctgtacctgttttatttatcaaataaccaagaacaacttcagtgtgcccttaagtattccttactg

SEQ ID NO: 47157 - DNA, 110 bp, synthetic construct
  source 1..110: mol_type = other DNA
tgctgcagccccagttcaatccctggtctgggaactgagattccatattaagctgctacatgcctcagccacacacatgcacatgtgtgcacacacacacacacacacac

SEQ ID NO: 47158 - DNA, 110 bp, synthetic construct
  source 1..110: mol_type = other DNA
ctacatgcctcagccacacacatgcacatgtgtgcacacacacacacacacacacacacaaagttacaacgcagtcccccagaaagaaattccaggagctctttttgtgg

SEQ ID NO: 47159 - DNA, 110 bp, synthetic construct
  source 1..110: mol_type = other DNA
ggaaatccagaacatattcacccaacatatcccacttattctgtaaaacgttctgaggattggagtggagtcttggtggacgcgacaacccaaggttctttcaggagctg

SEQ ID NO: 47160 - DNA, 110 bp, synthetic construct
  source 1..110: mol_type = other DNA
aggattggagtggagtcttggtggacgcgacaacccaaggttctttcaggagctggtgattaatcaagttgctggccctcgtgtccccacacacatgcacgcagctcccc

SEQ ID NO: 47161 - DNA, 110 bp, synthetic construct
  source 1..110: mol_type = other DNA
tagtccctccctgaggggtctgcttttgaactgcacctgttcacagccctcttaacagtcaccactgcagaatctgcaaagtccaaccagctccacaataccacaatgtt

SEQ ID NO: 47162 - DNA, 110 bp, synthetic construct
  source 1..110: mol_type = other DNA
cagtcaccactgcagaatctgcaaagtccaaccagctccacaataccacaatgttcactcgatcagctctggaaaatacatttctgtagttgaggatatgatactctctc

SEQ ID NO: 47163 - DNA, 110 bp, synthetic construct
  source 1..110: mol_type = other DNA
tgagtctctacactccacttaggatttctctcgagcagtcaggaatattcaacgggatcttgtatgcagagctatgtgagacccgtgctgactgcaccaggtgtcagtgg

SEQ ID NO: 47164 - DNA, 110 bp, synthetic construct
  source 1..110: mol_type = other DNA
gatcttgtatgcagagctatgtgagacccgtgctgactgcaccaggtgtcagtggagggagaggattatactgcggatcccacgtagagggcagcgtcagcgccttcaca

SEQ ID NO: 47165 - DNA, 110 bp, synthetic construct
  source 1..110: mol_type = other DNA
aacttctctatcattccgagcaatacagatatggttttgatgcttaaagaacttacagatagctgaaccaatgagctactcactgacaacaaaaccatccatctgtcctc

SEQ ID NO: 47166 - DNA, 110 bp, synthetic construct
  source 1..110: mol_type = other DNA
cagatagctgaaccaatgagctactcactgacaacaaaaccatccatctgtcctccaccctccatgatctagccatcctctatccactcattcatcaatttgttgattca

SEQ ID NO: 47167 - DNA, 110 bp, synthetic construct
  source 1..110: mol_type = other DNA
cagaaagcatctattacaatgcttggtaggcctggtatattggcacatctctacctttaaactattctcatctctgatacacaacaaattaagacttgtgcaaaaaaaaa

SEQ ID NO: 47168 - DNA, 110 bp, synthetic construct; identical to SEQ ID NO: 47167
  source 1..110: mol_type = other DNA

SEQ ID NO: 47169 - DNA, 110 bp, synthetic construct
  source 1..110: mol_type = other DNA
tagcattagtacattagaaaatctgtagacaaccaactgtgtatagaagaaactgtcaactttggacaactgtgtctattatgatatggttttcataaactcctaatcaa

SEQ ID NO: 47170 - DNA, 110 bp, synthetic construct; identical to SEQ ID NO: 47169
  source 1..110: mol_type = other DNA

SEQ ID NO: 47171 - DNA, 110 bp, synthetic construct
  source 1..110: mol_type = other DNA
aatatgtaggccagagcaatatttctagttatggactatgttgtctacggaacttgaaaaggtctaataggtattgtacttcctaaaaataatgatagcttttccttttc

SEQ ID NO: 47172 - DNA, 110 bp, synthetic construct
  source 1..110: mol_type = other DNA
gaaaaggtctaataggtattgtacttcctaaaaataatgatagcttttccttttcctttccagcttaaatcttatttttttctcttgcctaactgtatcagctactgtct

SEQ ID NO: 47173 - DNA, 110 bp, synthetic construct; identical to SEQ ID NO: 47171
  source 1..110: mol_type = other DNA

SEQ ID NO: 47174 - DNA, 110 bp, synthetic construct; identical to SEQ ID NO: 47172
  source 1..110: mol_type = other DNA

SEQ ID NO: 47175 - DNA, 110 bp, synthetic construct
  source 1..110: mol_type = other DNA
acaccctttggagctctgtttccaataggccaagcggaatgaagtgctgtgggtgcagtttccatatgggagggccagagctacaattgttcccagcggagaatattttt

SEQ ID NO: 47176 - DNA, 110 bp, synthetic construct
  source 1..110: mol_type = other DNA
cagtttccatatgggagggccagagctacaattgttcccagcggagaatatttttcaagcctcttcatcggtaaaaagggggcccatggaagacatagatatgagatgca

SEQ ID NO: 47177 - DNA, 110 bp, synthetic construct
  source 1..110: mol_type = other DNA
ccagacacacaatcctagacgaacagcagaggacactcttcagagaacttgtctgcgaaacaacactggaaacttcaagttctagtaagaattgtaaaactctgagctca

SEQ ID NO: 47178 - DNA, 110 bp, synthetic construct; identical to SEQ ID NO: 47177
  source 1..110: mol_type = other DNA

SEQ ID NO: 47179 - DNA, 110 bp, synthetic construct
  source 1..110: mol_type = other DNA
acaacggagtttgggaatgagtgcggttacacgtttctccttattggcttcctgaacaccctggttcggtctgatccctgggggagaactgccagcgcaaggcatacgaa

SEQ ID NO: 47180 - DNA, 110 bp, synthetic construct
  source 1..110: mol_type = other DNA
acaccctggttcggtctgatccctgggggagaactgccagcgcaaggcatacgaagtgatcaatgcagagccagactctgtgcaaagggtctcagacgagagaggagaat

SEQ ID NO: 47181 - DNA, 110 bp, synthetic construct
  source 1..110: mol_type = other DNA
atgttccaggaacatgtggtcttcctgtattttccatagcttttccctcaggatttgacagtgatcagtcggtgacatttctgctacattcacgtatttgacgtgcaaag

SEQ ID NO: 47182 - DNA, 110 bp, synthetic construct
  source 1..110: mol_type = other DNA
tgacagtgatcagtcggtgacatttctgctacattcacgtatttgacgtgcaaagggccatctctcattctgtaaggactacatgtctctttgtccctgatttaactctt

SEQ ID NO: 47183 - DNA, 110 bp, synthetic construct
  source 1..110: mol_type = other DNA
tattgatgcacgaagacaatagtgagaagatcccctagggggtggaatgagggaaatgaaggaaaggaacaggggttttaactttgaactctttgtgagcagtcacctta

SEQ ID NO: 47184 - DNA, 110 bp, synthetic construct
  source 1..110: mol_type = other DNA
atgaaggaaaggaacaggggttttaactttgaactctttgtgagcagtcaccttaaagagacagactgacactcaggccaacatgaacatgcctaccggttgtgtcaaca

SEQ ID NO: 47185 - DNA, 110 bp, synthetic construct
  source 1..110: mol_type = other DNA
tggagcaacccaaagctaggaccccaaaccctgtacgctctcccttaggatgtgccagcatgcagcttcttctcaggggaccgtactgaaattagcactgactacattat

SEQ ID NO: 47186 - DNA, 110 bp, synthetic construct
  source 1..110: mol_type = other DNA
cagcatgcagcttcttctcaggggaccgtactgaaattagcactgactacattatttctggggcccagactaattcctacgtattattagcaataatgacaatgcgtgcc

SEQ ID NO: 47187 - DNA, 110 bp, synthetic construct
  source 1..110: mol_type = other DNA
acggccagagcatcccggaggctggtctgcgcagaccacggcctgagcatcccagaggcttcagagctctgtgtacagacacgtgctctgtctctttctctccttgtcac

SEQ ID NO: 47188 - DNA, 110 bp, synthetic construct
  source 1..110: mol_type = other DNA
aggcttcagagctctgtgtacagacacgtgctctgtctctttctctccttgtcactccccaaaccatactcacacaactacacatccccacactcaaagatacacatatg

SEQ ID NO: 47189 - DNA, 110 bp, synthetic construct
  source 1..110: mol_type = other DNA
ctcatcatttgtcaatcacccgacacttgggtggccctttccttcagtcacccaacctggggtagcagttatccccatcagtgtccaacagagagagccacagaagctca

SEQ ID NO: 47190 - DNA, 110 bp, synthetic construct
  source 1..110: mol_type = other DNA
cctggggtagcagttatccccatcagtgtccaacagagagagccacagaagctcatgagatccaggaggacagagtattcttccaaagccagtgctaggagagtgaggct

SEQ ID NO: 47191 - DNA, 110 bp, synthetic construct
  source 1..110: mol_type = other DNA
ctgtgtctggtaggtggaaagtgaatgggaattatgacactgggaacagtctcaacatgtctggaacgacaggaattagtgtgtaaatccaccagcttctttttcccttg

SEQ ID NO: 47192 - DNA, 110 bp, synthetic construct
  source 1..110: mol_type = other DNA
catgtctggaacgacaggaattagtgtgtaaatccaccagcttctttttcccttgagggaaagggtgggagaactgtgacatgggttctaaactcttccctgagttttgc

SEQ ID NO: 47193 - DNA, 110 bp, synthetic construct
  source 1..110: mol_type = other DNA
ctccagtccgggaaaccatgctggctgtcctcgaacggtccaggaaagaccaggacgctagacaggagctctgcctctaatgcaggagagggaggtggggttcttctcag

SEQ ID NO: 47194 - DNA, 110 bp, synthetic construct
  source 1..110: mol_type = other DNA
cgctagacaggagctctgcctctaatgcaggagagggaggtggggttcttctcaggagtcaggacctttcacctcttctgcagggatggcctacagccttctgtaaattc

SEQ ID NO: 47195 - DNA, 110 bp, synthetic construct
  source 1..110: mol_type = other DNA
caggctgatggagatcacctgtgtgcataaggcagtcctgaatctactccaaggaatagaatatgagttctcaaagttcttggaggattttaagttcatctagtgtcaga

SEQ ID NO: 47196 - DNA, 110 bp, synthetic construct
  source 1..110: mol_type = other DNA
atagaatatgagttctcaaagttcttggaggattttaagttcatctagtgtcagagtcttcttgaccagaagttctcaaagttgacttcccattaaaatcactgggggct

SEQ ID NO: 47197 - DNA, 110 bp, synthetic construct
  source 1..110: mol_type = other DNA
aaataatttatgtgggtagagtttggaatagtattggcctttggtggagggactggctgggagcatgagggagctttctggacgctggatgtgatcaacgaattgatatg

SEQ ID NO: 47198 - DNA, 110 bp, synthetic construct
  source 1..110: mol_type = other DNA
gctgggagcatgagggagctttctggacgctggatgtgatcaacgaattgatatgggtttggttacacaagtatgtacacgtataaaaataaatctttacactcaagacc

SEQ ID NO: 47199 - DNA, 110 bp, synthetic construct
  source 1..110: mol_type = other DNA
tccaaggtactaaggagtgaccctgaatagggattcagaaggagtctccaaactcagcttggacccacagcacatggtgcatataatttaatgctttaaaaataaggtcc

SEQ ID NO: 47200 - DNA, 110 bp, synthetic construct
  source 1..110: mol_type = other DNA
agcttggacccacagcacatggtgcatataatttaatgctttaaaaataaggtcccacaggagttcgtgtcatggctcagcagtaacgaacccgactagtatctatgagg

SEQ ID NO: 47201 - DNA, 110 bp, synthetic construct
  source 1..110: mol_type = other DNA
tttattttccacagttccagagcctcgatgtccataatccaggtgccaacctcatcaggtttgggtgagggtcctcttcctggtgggtgactgcctacttctgatgtacc

SEQ ID NO: 47202 - DNA, 110 bp, synthetic construct
  source 1..110: mol_type = other DNA
aagttatttgaacttcaagaaaagtgatgcagatggacagaaggtactagaagcagtaagacctaggtacagagctccaggcttagcatcagcaagtttggagattatcc

SEQ ID NO: 47203 - DNA, 110 bp, synthetic construct
  source 1..110: mol_type = other DNA
caaatatgttaaatgtgtcaggcaaggcataagaaggactgaaaaagcaggacaacagctactcaaagacaactcctcctaaaatagcccactgtccatcccctacctcg

SEQ ID NO: 47204 - DNA, 110 bp, synthetic construct
  source 1..110: mol_type = other DNA
ctttacctttcaccacagtcagcgaagttctcctgtttcttacgtcacagctcttcctttggtctgattaaatcttcagttttaccttctccactaagtctgtacatgtg

SEQ ID NO: 47205 - DNA, 110 bp, synthetic construct
  source 1..110: mol_type = other DNA
agggtggtactgtctgatacactgtacggtatctagtgacatccctggcctctcttccctagatgccaggagcactagcccccaagttgtgacaacccaaaatgtcccca

SEQ ID NO: 47206 - DNA, 110 bp, synthetic construct
  source 1..110: mol_type = other DNA
ctacatgcaaaatatcatggtaaattatggtcctgcaatgtacatatattctgatattcagcattttggcttatccaaaccaccttatctagcttattgaaaattccaga

SEQ ID NO: 47207 - DNA, 110 bp, synthetic construct
  source 1..110: mol_type = other DNA
attcagcattttggcttatccaaaccaccttatctagcttattgaaaattccagaaaaatgactgtcacctataggatcccacaattagccataccaaactggccaaatg

SEQ ID NO: 47208 - DNA, 110 bp, synthetic construct
  source 1..110: mol_type = other DNA
cgcaggggcccttgtttattattatttttaaatgttgatagaggctttttttatatccaccagcttgcatttggggattggtgggaaatgctagccaaaagcaaagactg

SEQ ID NO: 47209 - DNA, 110 bp, synthetic construct
  source 1..110: mol_type = other DNA
tccaccagcttgcatttggggattggtgggaaatgctagccaaaagcaaagactgctgtgtccactgacttaaatgtgcgactgcacacacacacagacacatatgcatc

SEQ ID NO: 47210 - DNA, 110 bp, synthetic construct
  source 1..110: mol_type = other DNA
ccctggcctcgctcagttggtcagggatccagcattgccatgaggtgtagtgtacgttgcagacacagcttggatcccacctcactgtgtggctgtggtgtaggccagtg

SEQ ID NO: 47211 - DNA, 110 bp, synthetic construct
  source 1..110: mol_type = other DNA
tgccatgaggtgtagtgtacgttgcagacacagcttggatcccacctcactgtgtggctgtggtgtaggccagtggctacaattccaattccacccctaacctaggaact

SEQ ID NO: 47212 - DNA, 110 bp, synthetic construct
  source 1..110: mol_type = other DNA
tgcttctggagtgatggcagcaacagtagcaacaacggttatgacaaaggcatcacaaaaggacccgatcaattctatgtaaacatcgttcccatttcattcttcagatt

SEQ ID NO: 47213 - DNA, 110 bp, synthetic construct
  source 1..110: mol_type = other DNA
caaaaggacccgatcaattctatgtaaacatcgttcccatttcattcttcagattttctaacacctttgccaacaaatattctaaatcttgtgtttcaaataccccatgt

SEQ ID NO: 47214 - DNA, 110 bp, synthetic construct
  source 1..110: mol_type = other DNA
gttcaggctctagggaaggtgaaacaagcagaggttggagcaacacacttggaagatagaaagagccatgaaccaaggaatgccatctttttctttaagctggaagtgtc

SEQ ID NO: 47215 - DNA, 110 bp, synthetic construct
  source 1..110: mol_type = other DNA
atagaaagagccatgaaccaaggaatgccatctttttctttaagctggaagtgtcaggaaaccaagcctccagagggaacacaattccatcaacacctttagttccatga

SEQ ID NO: 47216 - DNA, 110 bp, synthetic construct
  source 1..110: mol_type = other DNA
tgaaggttcgtaatagattttcaaaagttaaatttttcaatcggcctccagaaagattcaatagattttcagtctgtttccaggcacaaaaattgaaactttgggatgcc

SEQ ID NO: 47217 - DNA, 110 bp, synthetic construct
  source 1..110: mol_type = other DNA
attcaatagattttcagtctgtttccaggcacaaaaattgaaactttgggatgccatcaaaatttactaccaatcctaattaaacacccacaaaatcacgttaataataa

SEQ ID NO: 47218 - DNA, 110 bp, synthetic construct
  source 1..110: mol_type = other DNA
gcagcttcaaacaccaccgctggttgcccagggcaaggcccaggtgtgagtcacaggggaacagaccaaatttaaagcccaggaggctgatgaggccatgacaagaagag

SEQ ID NO: 47219 - DNA, 110 bp, synthetic construct
  source 1..110: mol_type = other DNA
ggggaacagaccaaatttaaagcccaggaggctgatgaggccatgacaagaagaggtgtaaattaacaagtggatgtaggactaagccatctcgaggcatcacaatgttt

SEQ ID NO: 47220 - DNA, 110 bp, synthetic construct
  source 1..110: mol_type = other DNA
tgccatttagagatgcagaactcaatcccagaaaagagctccaagaattcaaagtcactgactcggagttcccgtcatggcacagcggaaacgaatccaaccagcaacca

SEQ ID NO: 47221 - DNA, 110 bp, synthetic construct
  source 1..110: mol_type = other DNA
cagaactcaatcccagaaaagagctccaagaattcaaagtcactgactcggagttcccgtcatggcacagcggaaacgaatccaaccagcaaccatgaggttgcgagttt

SEQ ID NO: 47222 - DNA, 110 bp, synthetic construct
  source 1..110: mol_type = other DNA
acctaaaatgcaatacttacatatccagttaaaaggagccagtcaggttgttcccttggttttgcaatgaaacaagcaaatcgatcttttcaatgttctggttggtgttc

SEQ ID NO: 47223 - DNA, 110 bp, synthetic construct
  source 1..110: mol_type = other DNA
ttggttttgcaatgaaacaagcaaatcgatcttttcaatgttctggttggtgttcagagaggatgtcagcggagaattctctggcatttgctgagaaagaagtgttgtga

SEQ ID NO: 47224 - DNA, 110 bp, synthetic construct
  source 1..110: mol_type = other DNA
cagcaaatgctatagattaaaaaaaaatcacagaagtctaaattaatgtgtttttccctaaatacctagtcttttggccaggaaacattgagtaactggtaatatacttc

SEQ ID NO: 47225 - DNA, 110 bp, synthetic construct; identical to SEQ ID NO: 47224
  source 1..110: mol_type = other DNA

SEQ ID NO: 47226 - DNA, 110 bp, synthetic construct; identical to SEQ ID NO: 47224
  source 1..110: mol_type = other DNA

SEQ ID NO: 47227 - DNA, 110 bp, synthetic construct; identical to SEQ ID NO: 47224
  source 1..110: mol_type = other DNA

SEQ ID NO: 47228 - DNA, 110 bp, synthetic construct
  source 1..110: mol_type = other DNA
tctaaatcgctccattctggattaagcaaaaactttctctatggtctgggtcccatcagtttttagacttttggaaagtcctgtgggccatagccagcctaaatgctcta

SEQ ID NO: 47229 - DNA, 110 bp, synthetic construct
  source 1..110: mol_type = other DNA
tcagtttttagacttttggaaagtcctgtgggccatagccagcctaaatgctctaaaatgctggtttcatccacactgggaatgtcaatttttccccccaagactaaatc

SEQ ID NO: 47230 - DNA, 110 bp, synthetic construct
  source 1..110: mol_type = other DNA
tggttaagccaggcaggggccaaactacctatgggaacttctaaatgatcacagaagttcaccaaatctcaccagctgaaagcggttccttttccacctctcttaaagtc

SEQ ID NO: 47231 - DNA, 110 bp, synthetic construct
  source 1..110: mol_type = other DNA
agttcaccaaatctcaccagctgaaagcggttccttttccacctctcttaaagtccaaggctcatcggtttgcattatctgcgacacctctagtgcatttttgagcctat

SEQ ID NO: 47232 - DNA, 110 bp, synthetic construct
  source 1..110: mol_type = other DNA
gcacaagactcaatttctttgactacatcccgaggggtggagattctttaagaatcccaaagtctgggagttcccattgtggcgcagcggaaacaactctgactagtatc

SEQ ID NO: 47233 - DNA, 110 bp, synthetic construct
  source 1..110: mol_type = other DNA
tctttgactacatcccgaggggtggagattctttaagaatcccaaagtctgggagttcccattgtggcgcagcggaaacaactctgactagtatccatgaggacgagggt

SEQ ID NO: 47234 - DNA, 110 bp, synthetic construct
  source 1..110: mol_type = other DNA
gaaaggaattcagataagaaaagacgttgagccaaattaggatcatggccgtgtagacaaagagaaatgagtagattcaagagataatgaagaggtagactcagttaagg

SEQ ID NO: 47235 - DNA, 110 bp, synthetic construct
  source 1..110: mol_type = other DNA
gacaaagagaaatgagtagattcaagagataatgaagaggtagactcagttaaggtttacaggttgaaaggagtataaaagcaggtggtgcgaagagtttctagcttgga

SEQ ID NO: 47236 - DNA, 110 bp, synthetic construct
  source 1..110: mol_type = other DNA
tatataagacatgtagcttgtgttacagatgtaatcaaacatatgagaatgcctggtgaatagatgtccaataaatattccttgaatgaatgaacacacctcaggacaaa

SEQ ID NO: 47237 - DNA, 110 bp, synthetic construct; identical to SEQ ID NO: 47236
  source 1..110: mol_type = other DNA

SEQ ID NO: 47238 - DNA, 110 bp, synthetic construct
  source 1..110: mol_type = other DNA
cactgctgtgttcttgcctggaacaaggcctatctgacatagtagctgttcaaaataagcagctgttgaatgagtgaataaccgggttatctgcagccattaaactatgt

SEQ ID NO: 47239 - DNA, 110 bp, synthetic construct
  source 1..110: mol_type = other DNA
taagcagctgttgaatgagtgaataaccgggttatctgcagccattaaactatgttgaacattatttaatgacttgttcactaaatatattctaaagcgaacagagtatg

SEQ ID NO: 47240 - DNA, 110 bp, synthetic construct
  source 1..110: mol_type = other DNA
agctctaggaacttgggcagatatatatatatattcttcccctgagctttattttagctacctataaagtggatgatcattcattcattaataataattcgaccactgtg

SEQ ID NO: 47241 - DNA, 110 bp, synthetic construct
  source 1..110: mol_type = other DNA
agctacctataaagtggatgatcattcattcattaataataattcgaccactgtggtcaggcagcctccaaagtgcctccgacaattccaagtcctgggattcacaccct

SEQ ID NO: 47242 - DNA, 110 bp, synthetic construct
  source 1..110: mol_type = other DNA
tgtgtgggggatgtgcagggcatcatagctggctggctccaggatggaggtggtcctgtgtcctgcgtgtttgagtccagacctacccacatggacacttgctgcctgaa

SEQ ID NO: 47243 - DNA, 110 bp, synthetic construct
  source 1..110: mol_type = other DNA
taagttggggtgagcactcagggagactgcgagagaaataccccagtgtctagggcattcatgctgcttaacaaaatcaagctgcctgggcccagagccaatgttgcttc

SEQ ID NO: 47244 - DNA, 110 bp, synthetic construct
  source 1..110: mol_type = other DNA
tgcagtgcatgtggacatcgtcatccaggtcattttcctgaagcttatttctcgagggaactcaggttgagaaaggctgccctagaggatgattaaaggaatctgggtcc

SEQ ID NO: 47245 - DNA, 110 bp, synthetic construct
  source 1..110: mol_type = other DNA
tgacctataggtgagaaaactggggctcagactgctgaggggaattccctaagaccactaggaagttcatcagttaagccagaacttgaacccccccaccccacccccaa

SEQ ID NO: 47246 - DNA, 110 bp, synthetic construct
  source 1..110: mol_type = other DNA
cactaggaagttcatcagttaagccagaacttgaacccccccaccccacccccaaatgttctcactgccaagtcctactctttctattctgatgcaggctcctcttgcaa

SEQ ID NO: 47247 - DNA, 110 bp, synthetic construct
  source 1..110: mol_type = other DNA
agttcatcttaacaaacatttatggaaaaaggccctttgcaagacgttggtgtaataacggccaatagctggaaaactcctaccctgtggcagcttctgttctacacgca

SEQ ID NO: 47248 - DNA, 110 bp, synthetic construct
  source 1..110: mol_type = other DNA
taacggccaatagctggaaaactcctaccctgtggcagcttctgttctacacgcattaacttatttaaccctcacaacacccttaggagctaggtgctattattaatgat

SEQ ID NO: 47249 - DNA, 110 bp, synthetic construct
  source 1..110: mol_type = other DNA
atttggcgaaaacactagtgggagaacacactgcaggcgccgagctgctcaattcattcccacatctttggaggaaaagcacggctaaaagtgcctgcggaccatgaaca

SEQ ID NO: 47250 - DNA, 110 bp, synthetic construct
  source 1..110: mol_type = other DNA
attcccacatctttggaggaaaagcacggctaaaagtgcctgcggaccatgaacaattagtgaagttttctccaaaaagtggctttgatcccaatgctgttgatacaaac

SEQ ID NO: 47251 - DNA, 110 bp, synthetic construct
  source 1..110: mol_type = other DNA
ttacttcacataatactcaatatggtgcctcaatatgcatagtaagcacccagcaagtggcagatattagccatgagcagtcatctggtcagtcaatggcaaactggcaa

SEQ ID NO: 47252 - DNA, 110 bp, synthetic construct
  source 1..110: mol_type = other DNA
agtggcagatattagccatgagcagtcatctggtcagtcaatggcaaactggcaagagacttcctaggtttacaaagctagttattggaagagctggaacttggaatgat

SEQ ID NO: 47253 - DNA, 110 bp, synthetic construct
  source 1..110: mol_type = other DNA
gctgtgcctgaagtctggggagaccctgccccagatgtaaatagagcaacttggacaaacttgtattttgctatttttcacatgagctgacttcatgctacatccctttt

SEQ ID NO: 47254 - DNA, 110 bp, synthetic construct
  source 1..110: mol_type = other DNA
caaacttgtattttgctatttttcacatgagctgacttcatgctacatccctttttctgtgaaatatgtgagttgtaataaaagttgtcgatttcattctggctgttttg

SEQ ID NO: 47255 - DNA, 110 bp, synthetic construct
  source 1..110: mol_type = other DNA
atcctaaaagggagttctaagttcccagctgacagacagacacttgggaaaatagtttggagttagcatgaactgacaaggcgcccctcgccttttacctagggccttag

SEQ ID NO: 47256 - DNA, 110 bp, synthetic construct
  source 1..110: mol_type = other DNA
tttggagttagcatgaactgacaaggcgcccctcgccttttacctagggccttagtttgaatttttaggacactattttgcccccaacttcactgttgctaatggcccta

SEQ ID NO: 47257 - DNA, 110 bp, synthetic construct
  source 1..110: mol_type = other DNA
gccagtgggttgtgctggacctttttcaactaacattcacctggcgccccctggtggaataaagctgaacatgccatgctgctgctgttaaggcctcgcagtctgatgaa

SEQ ID NO: 47258 - DNA, 110 bp, synthetic construct
  source 1..110: mol_type = other DNA
ggaataaagctgaacatgccatgctgctgctgttaaggcctcgcagtctgatgaaagttatacacaactgcagtgtcctatgatacgtggtatagggtggggtgggaaga

SEQ ID NO: 47259 - DNA, 110 bp, synthetic construct
  source 1..110: mol_type = other DNA
tagagaaaagagccagagccttttggagatggacttggtgatcctgccctctttgtgcatatggggcccatgtctttcctaaggttctatatacaggtaattttcatcat

SEQ ID NO: 47260 - DNA, 110 bp, synthetic construct
  source 1..110: mol_type = other DNA
tgcatatggggcccatgtctttcctaaggttctatatacaggtaattttcatcatcgctaaagcggggctgctccttccgaggacacattcattaagtgagttgaaagag

SEQ ID NO: 47261 - DNA, 110 bp, synthetic construct
  source 1..110: mol_type = other DNA
ctaacatgggattagtcagaagacctgtgttcttctggtctcagttcaagctcattgccgcagagtgttctgggtacagagctgagctctgtggactggagttgcttctc

SEQ ID NO: 47262 - DNA, 110 bp, synthetic construct
  source 1..110: mol_type = other DNA
tgccgcagagtgttctgggtacagagctgagctctgtggactggagttgcttctctgtcttctcaggatcctcatagagttgttgggaatcttaggagataagggcctta

SEQ ID NO: 47263 - DNA, 110 bp, synthetic construct
  source 1..110: mol_type = other DNA
agtttgtgattccctcctgccactttgcaaccacatcccacctgctctagaatgctctcttagaagggctctttggggaacatcagctataccgagtgttccccaaacag

SEQ ID NO: 47264 - DNA, 110 bp, synthetic construct
  source 1..110: mol_type = other DNA
tctcttagaagggctctttggggaacatcagctataccgagtgttccccaaacagccttctcatgtctgtgctcgtagaggctgctgtttctccacattatctccggaca

SEQ ID NO: 47265 - DNA, 110 bp, synthetic construct
  source 1..110: mol_type = other DNA
tgggaaagatcatgggtgggggggcaggaggagaaagcaggtaaccaaaggcctttggaggcaccagagaagggtccaagacgcacagagttccccctcttgggagctgg

SEQ ID NO: 47266 - DNA, 110 bp, synthetic construct
  source 1..110: mol_type = other DNA
tggaggcaccagagaagggtccaagacgcacagagttccccctcttgggagctggcttgcgaggagaagcccctgagagagctgctgaactgcagctctggtcatgcctg

SEQ ID NO: 47267 - DNA, 110 bp, synthetic construct
  source 1..110: mol_type = other DNA
ttttatagaagggacttgagaagctgaggattggggtaatgggggggtgtcctggactcaatcccttgttctataggcagaaaaataaaagtcctttaaaaggagctagc

SEQ ID NO: 47268 - DNA, 110 bp, synthetic construct
  source 1..110: mol_type = other DNA
actcaatcccttgttctataggcagaaaaataaaagtcctttaaaaggagctagctcattgattactcaagagggaatcacagaaattggattgccttttccctagggaa

SEQ ID NO: 47269 - DNA, 110 bp, synthetic construct
  source 1..110: mol_type = other DNA
tggcctttatgtgcttcctttgaaggcatcacgttgggtggtttccgtttcgacagaggccagttcagaacttgcccaacgacggtcctcctcaggaagctgtgaaccag

SEQ ID NO: 47270 - DNA, 110 bp, synthetic construct
  source 1..110: mol_type = other DNA
gaggccagttcagaacttgcccaacgacggtcctcctcaggaagctgtgaaccaggaccccaacaataacttccaggtgagaagcctccagtgagcttggcaggagatgc

SEQ ID NO: 47271 - DNA, 110 bp, synthetic construct
  source 1..110: mol_type = other DNA
tgccatccactgccctgaaagccaggcggaagtgatgaggcagccaagtacttggtcatacgtggggcttgtcccctttagaataagcatgattgtgtaacctccatgct

SEQ ID NO: 47272 - DNA, 110 bp, synthetic construct
  source 1..110: mol_type = other DNA
tcatacgtggggcttgtcccctttagaataagcatgattgtgtaacctccatgctgtcaggggtttcctagatccttgagagctgggcgacattgtcgtgaacggccatt

SEQ ID NO: 47273 - DNA, 110 bp, synthetic construct
  source 1..110: mol_type = other DNA
gcaggcagattttatgcagattggagctttcaggcaaattcccctgtgactttctcaatcccgtgaacacctggtaggacccatggcctgtgagggtctgcattcacccg

SEQ ID NO: 47274 - DNA, 110 bp, synthetic construct
  source 1..110: mol_type = other DNA
caatcccgtgaacacctggtaggacccatggcctgtgagggtctgcattcacccgccagtctcccagggcccgaggagtgtgcggttaaatggcagataaaaactaccag

SEQ ID NO: 47275 - DNA, 110 bp, synthetic construct
  source 1..110: mol_type = other DNA
aggctctgcattgcaaagccactcccttctgtcccctctctccttctcttgggctctttcatcattttacctggcacaaccgagggcttccagcacttccctagtatctt

SEQ ID NO: 47276 - DNA, 110 bp, synthetic construct
  source 1..110: mol_type = other DNA
ctttcatcattttacctggcacaaccgagggcttccagcacttccctagtatcttatcaaccttgggggagttattggaccccctcaaagcctcaatttcctcatctgac

SEQ ID NO: 47277 - DNA, 110 bp, synthetic construct
  source 1..110: mol_type = other DNA
gctctggcatccaagtcattcggtaacaggacttgcaggggcgaggatggtgggaggtgggggccacagcagcctctacaatgcaaaggaactttctgtaggaggaggca

SEQ ID NO: 47278 - DNA, 110 bp, synthetic construct
  source 1..110: mol_type = other DNA
ggtgggggccacagcagcctctacaatgcaaaggaactttctgtaggaggaggcaggacctgggttgagggttatctatttacttatttattgcttttttagggccgcac

SEQ ID NO: 47279 - DNA, 110 bp, synthetic construct
  source 1..110: mol_type = other DNA
gccaaggccaggcctgagagcggtggcctcagccagagctggataccccctctggacacatccagagcttcctgaaaaagaccttgcagtggctggtttggtgaagatcc

SEQ ID NO: 47280 - DNA, 110 bp, synthetic construct
  source 1..110: mol_type = other DNA
ccccctctggacacatccagagcttcctgaaaaagaccttgcagtggctggtttggtgaagatcctccaacgagggggttccatcatggctcagcggaaacgaatctgac

SEQ ID NO: 47281 - DNA, 110 bp, synthetic construct
  source 1..110: mol_type = other DNA
aaataaaaattattttagtacagggtacgtgagttttacggaagataatttcattggttttcttagtactcttaattaggacagtttttattccagagcccctacctccc

SEQ ID NO: 47282 - DNA, 110 bp, synthetic construct; identical to SEQ ID NO: 47281
  source 1..110: mol_type = other DNA

SEQ ID NO: 47283 - DNA, 110 bp, synthetic construct
  source 1..110: mol_type = other DNA
cagaatgaatctttcctgtttttcttgcccatccatcacggctgtaccttcagcagcacagttctccctgttgcttttgcatgtcaagctgagtgaaagtctaatgcaag

SEQ ID NO: 47284 - DNA, 110 bp, synthetic construct
  source 1..110: mol_type = other DNA
gcacagttctccctgttgcttttgcatgtcaagctgagtgaaagtctaatgcaaggcttctaatctgaggtgtctagacttccagggttactatgaggggctctcataaa

SEQ ID NO: 47285 - DNA, 110 bp, synthetic construct
  source 1..110: mol_type = other DNA
ctggttaatgttttccacggacacttggcccttgtcgccagttaacgcttgaagcttgtccaccagatctttcagggcctccaccggggatgacttatcccagaccactg

SEQ ID NO: 47286 - DNA, 110 bp, synthetic construct
  source 1..110: mol_type = other DNA
ttgtccaccagatctttcagggcctccaccggggatgacttatcccagaccactgccaccgactggccagccgagatcccaaaatctgccatttctgccatgcggtggac

SEQ ID NO: 47287 - DNA, 110 bp, synthetic construct
  source 1..110: mol_type = other DNA
tgtgacatgtgtggattctggtaaccactaccaccatcaagacacaaaactgttccatcaccacaaagctccttagtgctgctcctttacagaacaacccccaaccccac

SEQ ID NO: 47288 - DNA, 110 bp, synthetic construct
  source 1..110: mol_type = other DNA
catcaccacaaagctccttagtgctgctcctttacagaacaacccccaaccccaccaaccgttggcaaccactaatctcttctccacctctataattctgttatttcaag

SEQ ID NO: 47289 - DNA, 110 bp, synthetic construct
  source 1..110: mol_type = other DNA
aacggagcctgatttcctttgctgagtgagttgtgtgcctcctcgccccccaccagcgtcagccgtgttccaccccagcttgcaccttgaatcagtggcccagggttggt

SEQ ID NO: 47290 - DNA, 110 bp, synthetic construct
  source 1..110: mol_type = other DNA
gcgtcagccgtgttccaccccagcttgcaccttgaatcagtggcccagggttggtccataaagactgttaattcatttattcaacacgcatttattcggcatttactatg

SEQ ID NO: 47291 - DNA, 110 bp, synthetic construct
  source 1..110: mol_type = other DNA
ggcaggaagccttgggtctagatagagagaaacccagagagggcagttacttgccagagatcacacagctactgtgggagacatacataggagtccagttttgtttgttg

SEQ ID NO: 47292 - DNA, 110 bp, synthetic construct
  source 1..110: mol_type = other DNA
agagatcacacagctactgtgggagacatacataggagtccagttttgtttgttggtttgtttgtttttgtttttttgctttttaaagctgcacctgcagcatatggagg

SEQ ID NO: 47293 - DNA, 110 bp, synthetic construct
  source 1..110: mol_type = other DNA
cctaaaaagcaaaaataaataaataactaaaaaaatttaaaaatcaaacactggagaacagtgtaacaacatgaaaagtagatgtttccctgcccagctcacgcacagtt

SEQ ID NO: 47294 - DNA, 110 bp, synthetic construct
  source 1..110: mol_type = other DNA
gaacagtgtaacaacatgaaaagtagatgtttccctgcccagctcacgcacagttcctggggctcagtcggaaaggaaaagtgttgagatccacacccctccccccagca

SEQ ID NO: 47295 - DNA, 110 bp, synthetic construct
  source 1..110: mol_type = other DNA
tccgggaaactcccctcccctctctgtgccccgagtcctcatctgtacaatgagctcaaaggctcctccaaagtctggagttcccacgagcacgtgcactcaggggacac

SEQ ID NO: 47296 - DNA, 110 bp, synthetic construct
  source 1..110: mol_type = other DNA
tcaaaggctcctccaaagtctggagttcccacgagcacgtgcactcaggggacacgttagaaaccaggtaaagccatgctcagaggggctgcaaagggctcacaggtaga

SEQ ID NO: 47297 - DNA, 110 bp, synthetic construct
  source 1..110: mol_type = other DNA
gtcctcaggtttcacagcaatgggccttggagggtctcttttcttccctatgctggatcctcgctgggatctttgtctgtgaggtcaatcaagccgtcaggtctgggctg

SEQ ID NO: 47298 - DNA, 110 bp, synthetic construct
  source 1..110: mol_type = other DNA
gatcctcgctgggatctttgtctgtgaggtcaatcaagccgtcaggtctgggctgtgtggggtgtccctccttccccagagtggggctctctctcagcctcactggcttt

SEQ ID NO: 47299 - DNA, 110 bp, synthetic construct; identical to SEQ ID NO: 47297
  source 1..110: mol_type = other DNA

SEQ ID NO: 47300 - DNA, 110 bp, synthetic construct; identical to SEQ ID NO: 47298
  source 1..110: mol_type = other DNA

SEQ ID NO: 47301 - DNA, 110 bp, synthetic construct
  source 1..110: mol_type = other DNA
gcgcgtgcacacacacacacaaagactgaaagaaggaaacattttaaatgactacctaatattcctctaaatggctctgcccggactgagctgaccattccatgggatca

SEQ ID NO: 47302 - DNA, 110 bp, synthetic construct
  source 1..110: mol_type = other DNA
ctaatattcctctaaatggctctgcccggactgagctgaccattccatgggatcagataggagagtacctgccattcttttcacgtttatgaatagcattgcttccttat

SEQ ID NO: 47303 - DNA, 110 bp, synthetic construct
  source 1..110: mol_type = other DNA
ttacagctagtctttgtttctgactgcagcctccttcttggaggtttgtgcagaaacagaaactatgcatgcaggtgacgccaagagacactggctcaggggtccgccct

SEQ ID NO: 47304 - DNA, 110 bp, synthetic construct
  source 1..110: mol_type = other DNA
acagaaactatgcatgcaggtgacgccaagagacactggctcaggggtccgccctgccatacccacatgcggttgcctggcacttcccaaaggatgcagagagagcttac

SEQ ID NO: 47305 - DNA, 110 bp, synthetic construct
  source 1..110: mol_type = other DNA
ctggtttcagaagtagacaaggtcatggaggagtttgacctcaccaccttctaccaggtaagcagcagcgtcttttctcctctattgatgcatctctaatgggcagtaaa

SEQ ID NO: 47306 - DNA, 110 bp, synthetic construct
  source 1..110: mol_type = other DNA
aggtaagcagcagcgtcttttctcctctattgatgcatctctaatgggcagtaaaccagccttaaagaaacccctgttagaggcaaaccaaagagccccacgggacatcc

SEQ ID NO: 47307 - DNA, 110 bp, synthetic construct
  source 1..110: mol_type = other DNA
aaaactggtgtcatctgtgagacatttgtatactgtggacatttgtatacgctctgatccagtagcttggctcctagaaatacactcaacaaaaatgctcacatacattc

SEQ ID NO: 47308 - DNA, 110 bp, synthetic construct
  source 1..110: mol_type = other DNA
gatccagtagcttggctcctagaaatacactcaacaaaaatgctcacatacattcatgaaaaggcatgtataagacaattcaaagaagcgctatgatattgtcatggata

SEQ ID NO: 47309 - DNA, 110 bp, synthetic construct
  source 1..110: mol_type = other DNA
actccggcgcctaagcccctgaccatgaccctgccttcttcccgggggggtactatcaactcagaataagacaagacgggaggtcatggtggccagtcccctgcttcagg

SEQ ID NO: 47310 - DNA, 110 bp, synthetic construct
  source 1..110: mol_type = other DNA
tcaactcagaataagacaagacgggaggtcatggtggccagtcccctgcttcaggaaggccagggctccaatgaagggctacttcccttgtgggcctgtcatgctgttta

SEQ ID NO: 47311 - DNA, 110 bp, synthetic construct
  source 1..110: mol_type = other DNA
gagctgtctctgctggcctacaccggaatccgagccatgtctacaatctacatgcagttcacagccacactgcatccttcacccactgaacaaagccagggatcgaacct

SEQ ID NO: 47312 - DNA, 110 bp, synthetic construct; identical to SEQ ID NO: 47311
  source 1..110: mol_type = other DNA

SEQ ID NO: 47313 - DNA, 110 bp, synthetic construct
  source 1..110: mol_type = other DNA
gcaaatgatgagctaaaagctatggattcaggggcaagagacgagagaggggagagaaagatggtgtgatttgttgatggaaaggggtggtgaggaggcattttgatgct

SEQ ID NO: 47314 - DNA, 110 bp, synthetic construct
  source 1..110: mol_type = other DNA
gaaagatggtgtgatttgttgatggaaaggggtggtgaggaggcattttgatgcttgaagaaaaactagagaccaaaaccagtatgaaaagccagcatcagagttcccat

SEQ ID NO: 47315 - DNA, 110 bp, synthetic construct
  source 1..110: mol_type = other DNA
gttgaggttagtcactgaggtgctgtgtgcatatgtgaccgactcccaataaaacctgcaccccaaggctcaggtgagcatcccccgttggtacccagcttgtgtggtca

SEQ ID NO: 47316 - DNA, 110 bp, synthetic construct
  source 1..110: mol_type = other DNA
ctgcaccccaaggctcaggtgagcatcccccgttggtacccagcttgtgtggtcacccatcagtgctggaagccttgtcccaggcgacaaccctgggagggggcaccggc

SEQ ID NO: 47317 - DNA, 110 bp, synthetic construct
  source 1..110: mol_type = other DNA
agctcctgtttccatggcagcggttgcccggacaaccatgtcctctttagtttgatgccaaattccctgtgaaaactgaaatccttctttgcttttcttcctccaaacaa

SEQ ID NO: 47318 - DNA, 110 bp, synthetic construct
  source 1..110: mol_type = other DNA
tgccaaattccctgtgaaaactgaaatccttctttgcttttcttcctccaaacaatggtttctgactttggtcagctgtttctcccctggaaggcccagagtggctattt

SEQ ID NO: 47319 - DNA, 110 bp, synthetic construct
  source 1..110: mol_type = other DNA
ggatggcgtgaaggtgctgctccagttctgtaatgcacttatcataaatctgagctacatcatctgcccaagcatgctgttttagagggggatacaatcaaaaaagagaa

SEQ ID NO: 47320 - DNA, 110 bp, synthetic construct
  source 1..110: mol_type = other DNA
tacatcatctgcccaagcatgctgttttagagggggatacaatcaaaaaagagaaaaaattttaatgatcttctaccagcacatgtagcaaatgaaaagtctactgatat

SEQ ID NO: 47321 - DNA, 110 bp, synthetic construct
  source 1..110: mol_type = other DNA
ctgagacccttgaacaaagcaaatgacttttttatcactgaaaactggaactatctgcactgaaaaacagattttaggtaacaaattaacattaaaaaccccttggtcct

SEQ ID NO: 47322 - DNA, 110 bp, synthetic construct
  source 1..110: mol_type = other DNA
tgcactgaaaaacagattttaggtaacaaattaacattaaaaaccccttggtcctgaaattaaattgaagtatcagtgtgaacccatagtacattttctttttggctttg

SEQ ID NO: 47323 - DNA, 110 bp, synthetic construct
  source 1..110: mol_type = other DNA
gaagctgccaggaaggatcgattcagcttcctcctccccagcccccagctgccttttctctgattccatccccagggacatctcccctaactctagtcaccagaagtgtc

SEQ ID NO: 47324 - DNA, 110 bp, synthetic construct
  source 1..110: mol_type = other DNA
ttctctgattccatccccagggacatctcccctaactctagtcaccagaagtgtctaatgaatgaattgggagactaatccaaacaaagactcaagtaatgcataagaaa

SEQ ID NO: 47325 - DNA, 110 bp, synthetic construct
  source 1..110: mol_type = other DNA
ctccttcagcatgcagaagttcccaggcccagggatcgaacctgtgccacagtagtgatcccaatcttagcagtgactatgctgggtccttaagctgctgagccaccagg

SEQ ID NO: 47326 - DNA, 110 bp, synthetic construct
  source 1..110: mol_type = other DNA
tgatcccaatcttagcagtgactatgctgggtccttaagctgctgagccaccagggaatccacattgattgaattttgaatgttaaactaaccatacattccttggacaa

SEQ ID NO: 47327 - DNA, 110 bp, synthetic construct
  source 1..110: mol_type = other DNA
aacttcaagaataaatcctgcactcaaacatgttggcacttaaccccgcaccatctgagggcagcagctaaaatccacatctttcccttagagcggatacttcatttgga

SEQ ID NO: 47328 - DNA, 110 bp, synthetic construct
  source 1..110: mol_type = other DNA
tgagggcagcagctaaaatccacatctttcccttagagcggatacttcatttggaatggtcagaaacatgtgaatcctgaggtcaggtgcaatcaacacctgttcaaaaa

SEQ ID NO: 47329 - DNA, 110 bp, synthetic construct
  source 1..110: mol_type = other DNA
cttatccccactcactcattcatgcctccaacaaatacatgtggctcttcctcaaggtgccaaactacctcctagacaggggacttgtctcttttactagagcagctcct

SEQ ID NO: 47330 - DNA, 110 bp, synthetic construct
  source 1..110: mol_type = other DNA
ggtgccaaactacctcctagacaggggacttgtctcttttactagagcagctcctcatttattggaggaaaacaataaatggaaccagggtaaataatggaacctccgca

SEQ ID NO: 47331 - DNA, 110 bp, synthetic construct
  source 1..110: mol_type = other DNA
ctccacgaatcccttcttaactgtccagagattcagtttgggatagctcatggccctcataatgttcacccatcatagctcttgccacagtgcattttaatggatacatt

SEQ ID NO: 47332 - DNA, 110 bp, synthetic construct
  source 1..110: mol_type = other DNA
ctcataatgttcacccatcatagctcttgccacagtgcattttaatggatacatttctgccctcaaattctacgactcctgtgagcaaagaccatatcttatttaccagt

SEQ ID NO: 47333 - DNA, 110 bp, synthetic construct
  source 1..110: mol_type = other DNA
ggattattctcatcctttgtgcctggagtatagtagacaccaataaaaaccgtctgaataaaggaaagaaagagaggcagatgagttactggcccatttagcataatttt

SEQ ID NO: 47334 - DNA, 110 bp, synthetic construct
  source 1..110: mol_type = other DNA
gaataaaggaaagaaagagaggcagatgagttactggcccatttagcataatttttatattgaattgcctcaaagtctctctttcctgctgtactttgagatgttactga

SEQ ID NO: 47335 - DNA, 110 bp, synthetic construct
  source 1..110: mol_type = other DNA
tagttagatttgtttccactgcaccaccgtgggaactccagagggagctaattagctgtcattcagttttgtcattaccttggctcaagcgtaggatatgtaaataatta

SEQ ID NO: 47336 - DNA, 110 bp, synthetic construct; identical to SEQ ID NO: 47335
  source 1..110: mol_type = other DNA

SEQ ID NO: 47337 - DNA, 110 bp, synthetic construct
  source 1..110: mol_type = other DNA
caagaaaattgatgtcaaagtttctgccactgaagcctcccacagtttctttgttagagacttactatggaatagaaaaaccgtgtcaccaaaaatggcccctggctgtg

SEQ ID NO: 47338 - DNA, 110 bp, synthetic construct
  source 1..110: mol_type = other DNA
agagacttactatggaatagaaaaaccgtgtcaccaaaaatggcccctggctgtggtctcatagatcagtacaggcatgaagtgtaattgttcctccaatagctatcaag

SEQ ID NO: 47339 - DNA, 110 bp, synthetic construct
  source 1..110: mol_type = other DNA
tggtgcaaaagggagacttggcgagtacttgagcacaggatcttcctttctctcctgttcttgggaatccttccagattcttgggaagaatcccaggctcccctgcagat

SEQ ID NO: 47340 - DNA, 110 bp, synthetic construct
  source 1..110: mol_type = other DNA
tgttcttgggaatccttccagattcttgggaagaatcccaggctcccctgcagataactgctgacctactagggactccaggagggattagcagagcaggcccagatcag

SEQ ID NO: 47341 - DNA, 110 bp, synthetic construct
  source 1..110: mol_type = other DNA
tcacccccccacatctgccacttttaacaagaccttaccctcagactgccagtccagctgagcttcagtctctctttgtgtccaggtctcagtccacttgggaagtgtga

SEQ ID NO: 47342 - DNA, 110 bp, synthetic construct
  source 1..110: mol_type = other DNA
agctgagcttcagtctctctttgtgtccaggtctcagtccacttgggaagtgtgaggaatactttgtaattctggggggggaagaatgagtagcctttgccaaattggag

SEQ ID NO: 47343 - DNA, 110 bp, synthetic construct
  source 1..110: mol_type = other DNA
tttacttttcttagaagctacttaaaaggcgtctacacccctttctcctcttccttacctggttgtgcctcaacttcctgtcgtctgcttcctcagccttcattcttgcc

SEQ ID NO: 47344 - DNA, 110 bp, synthetic construct
  source 1..110: mol_type = other DNA
tacctggttgtgcctcaacttcctgtcgtctgcttcctcagccttcattcttgccctgaaactgccctgcataatgttatcatctcctcttggtatagttaagtgaataa

SEQ ID NO: 47345 - DNA, 110 bp, synthetic construct
  source 1..110: mol_type = other DNA
cttttttctgtcgacagtatcttttcccctatattttattcagaggaggcatttgaatgtttttcccagtcagaattcagaatgggagagtgaaataagttccagctgaa

SEQ ID NO: 47346 - DNA, 110 bp, synthetic construct
  source 1..110: mol_type = other DNA
aatgtttttcccagtcagaattcagaatgggagagtgaaataagttccagctgaatcactgatgctcaattgtttcggcgtttttctaaggccctgtaatgagcccactc

SEQ ID NO: 47347 - DNA, 110 bp, synthetic construct
  source 1..110: mol_type = other DNA
ttttttaaggtgaggttgtgattagatattctggaaggcccacaaaactcacttaacttctaagggggctcaactattttatgcactggagtatatagttctgttatcct

SEQ ID NO: 47348 - DNA, 110 bp, synthetic construct
  source 1..110: mol_type = other DNA
acttctaagggggctcaactattttatgcactggagtatatagttctgttatcctaaagtatcacccctgcatatttttgagttacagtggatggtttcaaatcttccca

SEQ ID NO: 47349 - DNA, 110 bp, synthetic construct
  source 1..110: mol_type = other DNA
ctctcggaatcgtaacacggtgtccatacatattcagggcagattttgcctcaaatgtcagcatattgcactgcaagttcatatctgattttctgtctattcttatatgt

SEQ ID NO: 47350 - DNA, 110 bp, synthetic construct
  source 1..110: mol_type = other DNA
tgtcagcatattgcactgcaagttcatatctgattttctgtctattcttatatgtacatctctttaggaattgctgattttcagccacatttctcccccttactgggtaa

SEQ ID NO: 47351 - DNA, 110 bp, synthetic construct
  source 1..110: mol_type = other DNA
attactggggggaatgtaaattggcacagccactgcagacaatggtaggaagatccctcaaaatactaaaaattgaactaccatgtgacccagtaatcccacttctggca

SEQ ID NO: 47352 - DNA, 110 bp, synthetic construct
  source 1..110: mol_type = other DNA
cctcaaaatactaaaaattgaactaccatgtgacccagtaatcccacttctggcagtatatccaaaggaaatgaaatcattgtctgaagaggtatctgtactgcccccat

SEQ ID NO: 47353 - DNA, 110 bp, synthetic construct
  source 1..110: mol_type = other DNA
aacattatttaaaaacatttatttttctccacagctaaactcattgtttcactccctaaaacttttcttgtaactctaagatggggtaagaatgtaaccatcaagggaaa

SEQ ID NO: 47354 - DNA, 110 bp, synthetic construct
  source 1..110: mol_type = other DNA
gattgaactccagaacaagagatagcttctgtagtgttttcacctcacaaagcgtgttgaagtatgtcgaaggaagagagaatctctgtggtcgtggagcgtggcccact

SEQ ID NO: 47355 - DNA, 110 bp, synthetic construct
  source 1..110: mol_type = other DNA
ggtagagactggatgcaaaggaggccatattattacaagcaattggaaacttattctttttgttttcagataattattccatttattttgtttgttaatctatcaaagcc

SEQ ID NO: 47356 - DNA, 110 bp, synthetic construct
  source 1..110: mol_type = other DNA
atttctatttgcaaagaaaacatatgacagaaagatttctttgcaactcctcagtgtcacccatcaaagtcactggtatgttttcaaaggaaatagcctttctcttttcc

SEQ ID NO: 47357 - DNA, 110 bp, synthetic construct
  source 1..110: mol_type = other DNA
tctggtcaccaaagaagtaagaaaaaaacaactgacgttttcctagactctttattgcccaatagcctgtttctatgggacattttattgttactctttttgttgttaaa

SEQ ID NO: 47358 - DNA, 110 bp, synthetic construct
  source 1..110: mol_type = other DNA
tgtcaagtcttttagaaatatcttcttccattcagaggcttgccttttgttttgttgctgatttcctttgccaagaaacagttttgaaattgatgtgatcacatttgttc

SEQ ID NO: 47359 - DNA, 110 bp, synthetic construct
  source 1..110: mol_type = other DNA
aaagggtgaatcaatccatggatatccagtgtcttctggaaaaaggagtggtgatagacatgattgcctttagagctggattgacctgtgttcacattactttctcggtg

SEQ ID NO: 47360 - DNA, 110 bp, synthetic construct
  source 1..110: mol_type = other DNA
agacatgattgcctttagagctggattgacctgtgttcacattactttctcggtgttcctactgtggctcagtgggttaagaaaactcaaccagtatccatgaggatttg

SEQ ID NO: 47361 - DNA, 110 bp, synthetic construct; identical to SEQ ID NO: 47359
  source 1..110: mol_type = other DNA

SEQ ID NO: 47362 - DNA, 110 bp, synthetic construct; identical to SEQ ID NO: 47360
  source 1..110: mol_type = other DNA

SEQ ID NO: 47363 - DNA, 110 bp, synthetic construct
  source 1..110: mol_type = other DNA
atttacgtttctactctccattaaattgcttatttgttccatatgtagctgtagtagctatctcagaacatgccagttgggtggattgactattcctagacactctgttc

SEQ ID NO: 47364 - DNA, 110 bp, synthetic construct
  source 1..110: mol_type = other DNA
agctatctcagaacatgccagttgggtggattgactattcctagacactctgttctcacaaacagtatctgctctgtagaacactcatccctgaagtttttcagttgact

SEQ ID NO: 47365 - DNA, 110 bp, synthetic construct
  source 1..110: mol_type = other DNA
tgtagcctctggcctacaccacagccgcaggatgctagatcagagccgtgtctgtggcttccactgtagttcatggaaacaccggatccttaaccaactgagggaggcca

SEQ ID NO: 47366 - DNA, 110 bp, synthetic construct
  source 1..110: mol_type = other DNA
acaccacagccgcaggatgctagatcagagccgtgtctgtggcttccactgtagttcatggaaacaccggatccttaaccaactgagggaggccagggatcaaacccatg

SEQ ID NO: 47367 - DNA, 110 bp, synthetic construct
  source 1..110: mol_type = other DNA
ggcaccagtgctgggatgcctcaggccaaagattaagtaggcagagacacagctccaccaatcatcagacagtctgcctaaagactaaggagcccacagctttttcagaa

SEQ ID NO: 47368 - DNA, 110 bp, synthetic construct
  source 1..110: mol_type = other DNA
aaaaaaaactacccctacttttttttcaacacatttgatcaattttttgtcttattttatgtatttaaagccacacctggggcatatgggaatttcccaggctaggggtc

SEQ ID NO: 47369 - DNA, 110 bp, synthetic construct; identical to SEQ ID NO: 47368
  source 1..110: mol_type = other DNA

SEQ ID NO: 47370 - DNA, 110 bp, synthetic construct
  source 1..110: mol_type = other DNA
cacataatactggatgttaattttaggctttgccccacaccccccaaatgccaatctccatcccctcagctcagtgagattgttaggctatgacagattgttccctcgta

SEQ ID NO: 47371 - DNA, 110 bp, synthetic construct
  source 1..110: mol_type = other DNA
gtggtttttctgtcatgccttctgtatccaaccacatgagcctacatttgtccctcaaaattgagctgttgagctcctatcatgttctatgttctctctcagtgacacag

SEQ ID NO: 47372 - DNA, 110 bp, synthetic construct
  source 1..110: mol_type = other DNA
ctttccccagtcacccaagcttctgtttatcaggcttagactcctctgttttccagctattctaaatttggatttcttacagtgaagatttacaaagttttgatgagaaa

SEQ ID NO: 47373 - DNA, 110 bp, synthetic construct
  source 1..110: mol_type = other DNA
caatcttcctggttctcttattgcagaacctaggactggtctgtgcagttgggtgagcctcagagttctaatcatttggggccttttgtttgaagaccttgaactagcta

SEQ ID NO: 47374 - DNA, 110 bp, synthetic construct
  source 1..110: mol_type = other DNA
gcctaggcagtgaaagaccaataaaaaccctggccatctgagcttgggagagcttcctggttggtgaaaacatcaatatgctggaagagtgaggtgttctggttccacag

SEQ ID NO: 47375 - DNA, 110 bp, synthetic construct
  source 1..110: mol_type = other DNA
cctggttggtgaaaacatcaatatgctggaagagtgaggtgttctggttccacagggatatggcatggtagctacatgtttttggatcctcccagactgctactctgcat

SEQ ID NO: 47376 - DNA, 110 bp, synthetic construct
  source 1..110: mol_type = other DNA
tgtgagcccttattgaattcatctgtgtgtttggcaaatcaaagctactatattgattatctgcaacgtagcgctgaaaagaaactatgtttttagtggaattggaccaa

SEQ ID NO: 47377 - DNA, 110 bp, synthetic construct
  source 1..110: mol_type = other DNA
attatctgcaacgtagcgctgaaaagaaactatgtttttagtggaattggaccaagagtgagtgccaaatgtagatgtgagtcacggaacaggaagacgttatatgacca

SEQ ID NO: 47378 - DNA, 110 bp, synthetic construct
  source 1..110: mol_type = other DNA
aattcataccctctcacatttactatattttttcatccataaggagacgttcacggtttcacatgtataagtttcttatataattctagccagcttcactcacaactttc

SEQ ID NO: 47379 - DNA, 110 bp, synthetic construct
  source 1..110: mol_type = other DNA
cttcttctaaagatgccagttatattggattaagggcttattgtattccagtagatctcattttagctagtctttcatgaccctatttccaaataagatcatatttggag

SEQ ID NO: 47380 - DNA, 110 bp, synthetic construct
  source 1..110: mol_type = other DNA
gggttcctctgcaagttccattgcataggcatgcttgactaagtcatttgccactggtgtttgattctatgttcagctcctcctcaagtgatcatgggtgtgtgtgctga

SEQ ID NO: 47381 - DNA, 110 bp, synthetic construct
  source 1..110: mol_type = other DNA
cacaccctgaattagaatatcagcttcaactttgcacatagcaacaacaacaacaaaaaaagttactaaaatttatcaatgtgttccacacccccctctcaaagtcatct

SEQ ID NO: 47382 - DNA, 110 bp, synthetic construct
  source 1..110: mol_type = other DNA
aagtaaaactgaatagaggaaagagggagaaaatggtgtaatgtgagaggaggagactagacagattgtttcctttggtccaaggagagctagttttgtctcagtgagtg

SEQ ID NO: 47383 - DNA, 110 bp, synthetic construct
  source 1..110: mol_type = other DNA
actagacagattgtttcctttggtccaaggagagctagttttgtctcagtgagtgatgaatgccagtgagagtgacccaaagtctagattaaaggacagatgttctttga

SEQ ID NO: 47384 - DNA, 110 bp, synthetic construct
  source 1..110: mol_type = other DNA
aggatactcaatgtttaatgcaacgggcttgggaaacactgcattagataagcgtttcacacacaggccttcctaatatcagctctaagattgggtggcctgttcagtgc

SEQ ID NO: 47385 - DNA, 110 bp, synthetic construct
  source 1..110: mol_type = other DNA
ttgtcttgactttttagtgatttgtgtgcccaggtctgtctgatgaaattacactgacttaactactcaactgacaccttatttcacaaactacctgttgaacttaatcg

SEQ ID NO: 47386 - DNA, 110 bp, synthetic construct
  source 1..110: mol_type = other DNA
tgatgtaaagccacagttcagaacaaatggagtgggcaccagacttttcaaaattgaacttcccccctcctccagagaagcagtaatttctatcctgattactttgaaga

SEQ ID NO: 47387 - DNA, 110 bp, synthetic construct
  source 1..110: mol_type = other DNA
gctacagggcttttgtttgtttagatttttaacctgtcgagagatactgtactatttactttctatgtataaactcatataagcatcttgagccttagcagtggggctaa

SEQ ID NO: 47388 - DNA, 110 bp, synthetic construct
  source 1..110: mol_type = other DNA
ctatacataaggatactcagtgagatccttaacccactgagcagtaccagggaccaaaccctcatcctgatggacactagctaggtttgtttctgctgagccacagtgag

SEQ ID NO: 47389 - DNA, 110 bp, synthetic construct
  source 1..110: mol_type = other DNA
aaaccctcatcctgatggacactagctaggtttgtttctgctgagccacagtgagaactcctgaagaaatcttattttccagtagtatggtcccccattatccctatctg

SEQ ID NO: 47390 - DNA, 110 bp, synthetic construct
  source 1..110: mol_type = other DNA
accctttttcctacattccctctcttttctggttagaatggtatgtgtgtgcccttgtcccgtaacccacagacatgtgcatcatggaattagatttttgaattgaacca

SEQ ID NO: 47391 - DNA, 110 bp, synthetic construct
  source 1..110: mol_type = other DNA
tgtcccgtaacccacagacatgtgcatcatggaattagatttttgaattgaaccaattagtatcatattagaaaaagcttagagcttctgactatttcacacatcccata

SEQ ID NO: 47392 - DNA, 110 bp, synthetic construct
  source 1..110: mol_type = other DNA
tatacaaatatcttattgatttctaaaatgttctatgggcttatatttttcttttctccttcttatacagattttaagctatcgcccatgactcacctcctggtgttcat

SEQ ID NO: 47393 - DNA, 110 bp, synthetic construct
  source 1..110: mol_type = other DNA
ctccttcttatacagattttaagctatcgcccatgactcacctcctggtgttcatggcttgtgtaatcctctcctagagtgcagacagggcctgcgacttgcttctaaca

SEQ ID NO: 47394 - DNA, 110 bp, synthetic construct
  source 1..110: mol_type = other DNA
gtgatactccaatattcatgttcttgatccctacccgacgcctaattttacttgccttaatattagctagcctaaaggagaacttacggactgaaatccagttgagtggt

SEQ ID NO: 47395 - DNA, 110 bp, synthetic construct
  source 1..110: mol_type = other DNA
aaaaatgactcctcatgaagataagaatcatatctgaccagctaaattctaaacaattagcggtaccacttcagacccatcctggactcaaatcatttctaatgaagatt

SEQ ID NO: 47396 - DNA, 110 bp, synthetic construct
  source 1..110: mol_type = other DNA
tgtgggctttatcctgcctattacacctgttcttttctctctccctggtcctcaaaggaatattcatgttggaaagacaggaagcttgtttccctgctgcatttcagctg

SEQ ID NO: 47397 - DNA, 110 bp, synthetic construct
  source 1..110: mol_type = other DNA
aaagaaaccaggacaggtgcctaatattggaaatgcgtgagaaacgtcctctggtagataacttctaaaacggcacctgctgatttccattttctgatgttcgcagctta

SEQ ID NO: 47398 - DNA, 110 bp, synthetic construct
  source 1..110: mol_type = other DNA
agataacttctaaaacggcacctgctgatttccattttctgatgttcgcagcttaatgcaacccctccaactgcgtgtgggaacacgctagtgacttgcctctgataaag

SEQ ID NO: 47399 - DNA, 110 bp, synthetic construct
  source 1..110: mol_type = other DNA
agcctcctctgcttcctactctggagcctaccatgagatgcagcttgctaccattggatctaggtgcttggctcttgtaaaaccagggccccaaagatagaagcttggct

SEQ ID NO: 47400 - DNA, 110 bp, synthetic construct
  source 1..110: mol_type = other DNA
ggatctaggtgcttggctcttgtaaaaccagggccccaaagatagaagcttggctgagagctgtggaaggaagctgtgacctcggcgtgcctgctgcctggacactgatc

SEQ ID NO: 47401 - DNA, 110 bp, synthetic construct
  source 1..110: mol_type = other DNA
cagccacactctcttcaacatgaaccacatctcagccttggatggtggtgggagaactctcttctgaaatcttacttctttctttgctcactatccctcacatatttgtg

SEQ ID NO: 47402 - DNA, 110 bp, synthetic construct
  source 1..110: mol_type = other DNA
tctctgttcacagatcccactaaggcaatctttgcagagactgatttcccagactcaacacttagctgctgtgttcaaagcacttccaataggctgctttcaaaccagca

SEQ ID NO: 47403 - DNA, 110 bp, synthetic construct
  source 1..110: mol_type = other DNA
taaccacggagccacgatggaaactcctcattccagcttttatttgtacttccttaatggctaatcagtatcttttcatgtgcatagttgctattcatatagcttcttca

SEQ ID NO: 47404 - DNA, 110 bp, synthetic construct
  source 1..110: mol_type = other DNA
aatggctaatcagtatcttttcatgtgcatagttgctattcatatagcttcttcagtgaactatctgttcacatatttcgcctatttaaattagttttctccctgtcaag

SEQ ID NO: 47405 - DNA, 110 bp, synthetic construct
  source 1..110: mol_type = other DNA
gaatcttagcatttcaaccaattttggaggagaacactgtacaaaattcagtttcagttatagaaccagttctataatatcccaagaagtagaaatgtgtgatgtctcct

SEQ ID NO: 47406 - DNA, 110 bp, synthetic construct
  source 1..110: mol_type = other DNA
agttatagaaccagttctataatatcccaagaagtagaaatgtgtgatgtctccttgaaggtcttcggggcctgacaatgtcctagagagctcctcattattttattgac

SEQ ID NO: 47407 - DNA, 110 bp, synthetic construct
  source 1..110: mol_type = other DNA
ttaaatatgccatctatgtataatacagttagatatatttttcacagtctgccttaaaccctggacactatccaacaacctggatgagttttgttttagctctaagaaca

SEQ ID NO: 47408 - DNA, 110 bp, synthetic construct; identical to SEQ ID NO: 47407
  source 1..110: mol_type = other DNA

SEQ ID NO: 47409 - DNA, 110 bp, synthetic construct
  source 1..110: mol_type = other DNA
gctccataaaggaactctccctttattattattttaaaatatttcatatttcgaaaaatttagatcttgctaatgtgttggaccatacgtaacgccaaaatagtactgga

SEQ ID NO: 47410 - DNA, 110 bp, synthetic construct; identical to SEQ ID NO: 47409
  source 1..110: mol_type = other DNA

SEQ ID NO: 47411 - DNA, 110 bp, synthetic construct
  source 1..110: mol_type = other DNA
caggcagtgttggcggtgatctttaattgccaatagtcactgcatcctagtagagtataggcgtcttccaagagaaacacttctgctacaaaacagctaggtttactgtt

SEQ ID NO: 47412 - DNA, 110 bp, synthetic construct
  source 1..110: mol_type = other DNA
tataggcgtcttccaagagaaacacttctgctacaaaacagctaggtttactgttctttgaccttctggaatttccttggtgtctgtcatattccaaacttgagcttgga

SEQ ID NO: 47413 - DNA, 110 bp, synthetic construct
  source 1..110: mol_type = other DNA
tcaagccacctcttcattttatacgtaatttccccattgttgtggacagtccggagtcacatattagctcacgtttgtcgtcctataaaggtttttgtgccagtcaagtt

SEQ ID NO: 47414 - DNA, 110 bp, synthetic construct
  source 1..110: mol_type = other DNA
gtcacatattagctcacgtttgtcgtcctataaaggtttttgtgccagtcaagttacttgctgggttcagtctactttgtgagcactgagtgctgacctgacccaggctg

SEQ ID NO: 47415 - DNA, 110 bp, synthetic construct
  source 1..110: mol_type = other DNA
cattaaaattcctgggacaggattaggcctgcctaactttttccattaaatctattcccatataccactcagacttcctaggcagaggttctccaaagaagacggaaaat

SEQ ID NO: 47416 - DNA, 110 bp, synthetic construct
  source 1..110: mol_type = other DNA
tcccatataccactcagacttcctaggcagaggttctccaaagaagacggaaaattacctaaatatatattcagccatgaaagaaggagaagatatattactctccattc

SEQ ID NO: 47417 - DNA, 110 bp, synthetic construct
  source 1..110: mol_type = other DNA
gctcccaaaggggacaaataaaaacatacattctttttcatagaagccagactatggtagattgaagatggctgtaatttatttgcatgggctctataaacataatgcac

SEQ ID NO: 47418 - DNA, 110 bp, synthetic construct
  source 1..110: mol_type = other DNA
ggtagattgaagatggctgtaatttatttgcatgggctctataaacataatgcacttatgaatctttgaatgatactgcctaaatggtaaggttaagccagtcagagccc

SEQ ID NO: 47419 - DNA, 110 bp, synthetic construct
  source 1..110: mol_type = other DNA
tgccacacacctgaaagttagaactagtatcacatggggtattttgtgtgttctgtaatggtggcatgtgaagcatatggaagttcccaagctaggagtcaaattttagc

SEQ ID NO: 47420 - DNA, 110 bp, synthetic construct
  source 1..110: mol_type = other DNA
ggggtattttgtgtgttctgtaatggtggcatgtgaagcatatggaagttcccaagctaggagtcaaattttagctgtagcttcaggcctattctgcagccacagcaata

SEQ ID NO: 47421 - DNA, 110 bp, synthetic construct
  source 1..110: mol_type = other DNA
ctatgctgcagttgtggctggcaatgctggatcctttaacctgctatgccaggctggggatcgaaccaacaccaccacagcaacctgagccactgcaatcagattcttaa

SEQ ID NO: 47422 - DNA, 110 bp, synthetic construct
  source 1..110: mol_type = other DNA
ggggatcgaaccaacaccaccacagcaacctgagccactgcaatcagattcttaacccactgtgctgcagcagagacgcctgacagtttttagactcacctctacttttg

SEQ ID NO: 47423 - DNA, 110 bp, synthetic construct
  source 1..110: mol_type = other DNA
atgatgcctttcaaagagatcgaatgagtggaaatcaggtttagccatattgtcatggcaactaaacacctggggttttctgcgacagatctgatttcaaatatcctatc

SEQ ID NO: 47424 - DNA, 110 bp, synthetic construct
  source 1..110: mol_type = other DNA
aatcccactagaagcctaccagatttctgaaggttttatatcagcagaaacacggccagcttggatttacagggacagagacagagaaaggatggcctgaacgaaggttt

SEQ ID NO: 47425 - DNA, 110 bp, synthetic construct
  source 1..110: mol_type = other DNA
ggctaagagctttattgaaattctacagaagccttacagaaactgtgagcttcggactcgttatctggtacctgcatttggccatcctgacactctataattgaaattca

SEQ ID NO: 47426 - DNA, 110 bp, synthetic construct
  source 1..110: mol_type = other DNA
tgatatggaccagtctggattgtagacatcatccttgttcagccaccacccttatcatcaggggtccagcttcttctggacacatattattacctgggatgtggctagaa

SEQ ID NO: 47427 - DNA, 110 bp, synthetic construct
  source 1..110: mol_type = other DNA
acctagaaaccaaaaaacccctgggaggagctttgtaagtccttagatgaactgcaggcatgcatcaaacctttgataatccaagcatttttctgcatgtaagcattctt

SEQ ID NO: 47428 - DNA, 110 bp, synthetic construct
  source 1..110: mol_type = other DNA
tttctcttcattaaagacttaggttttgtgatagtcactatatagtagtactttcaagaagaataaaatcgagtttctgtttcctcataagtttgctgtcagactgaaag

SEQ ID NO: 47429 - DNA, 110 bp, synthetic construct
  source 1..110: mol_type = other DNA
aatatttttttcacctgctccttcaccttcaccataaaagttaccagtagcttatctttgcatgtttaggctatctaacaaaatcccaccaactggatggcttataaata

SEQ ID NO: 47430 - DNA, 110 bp, synthetic construct
  source 1..110: mol_type = other DNA
ttattgaggactctgaaaacttcaccagccagtgtggtcaactgcctaaaagagtctttcctctatttctgaaatggctggcaggctgcttcttatattgtgtttaggaa

SEQ ID NO: 47431 - DNA, 110 bp, synthetic construct
  source 1..110: mol_type = other DNA
agctctccccatcttagcatctcctcccttaggagttcaaaccagctaagaaaggagtcctgatccctggggagttctgggagaagctgagccaacacccatacagcgac

SEQ ID NO: 47432 - DNA, 110 bp, synthetic construct
  source 1..110: mol_type = other DNA
atctcacatggaaacatttctcatagtgtgacttttccatatagatttgtttcatatttattgggaacttaatgtatgccaggggctgccctagcctttggaaacacagt

SEQ ID NO: 47433 - DNA, 110 bp, synthetic construct
  source 1..110: mol_type = other DNA
atttattgggaacttaatgtatgccaggggctgccctagcctttggaaacacagtaatacgtgcgtgtgtgtattcaaaattcctccctcagtcttaagcgaaaaaaata

SEQ ID NO: 47434 - DNA, 110 bp, synthetic construct
  source 1..110: mol_type = other DNA
gatgttgttcctgtaagcatttctatctctgtgtccaaaatttctttcttttattttttatttttttaatatatgtaaggacaccagtcgtcttgtgttagggcccacct

SEQ ID NO: 47435 - DNA, 110 bp, synthetic construct
  source 1..110: mol_type = other DNA
ttttatttttttaatatatgtaaggacaccagtcgtcttgtgttagggcccacctaatgaacccatcttaactaattatatctatgctcaccctgtttccaatgaggtga

SEQ ID NO: 47436 - DNA, 110 bp, synthetic construct
  source 1..110: mol_type = other DNA
tggagatggaggtggcaggggctgtgagatgagatttgtggtgagaggaaactacatgggtggacagctgtgcataaggaagaatggttcacttaagaaacagtgagttc

SEQ ID NO: 47437 - DNA, 110 bp, synthetic construct
  source 1..110: mol_type = other DNA
atgggtggacagctgtgcataaggaagaatggttcacttaagaaacagtgagttcctttcgtggcgcagcagaatcgaatctgactaggaaccatgaagttggcgggttt

SEQ ID NO: 47438 - DNA, 110 bp, synthetic construct
  source 1..110: mol_type = other DNA
aatgtggaataagccaggtcgatgttttcttttcatggtccgtagatgagttaggcatctgtttccagtgatggaacatcctgtagcttatattaaggttcagatacgtc

SEQ ID NO: 47439 - DNA, 110 bp, synthetic construct
  source 1..110: mol_type = other DNA
catctgtttccagtgatggaacatcctgtagcttatattaaggttcagatacgtcaacacagttatgtcattctcagatacaccgtagtcatcttgataaactcatacct

SEQ ID NO: 47440 - DNA, 110 bp, synthetic construct
  source 1..110: mol_type = other DNA
cttttaattattcacagggcccacagattatgtggctggccctgcatgtcatctatggagttttccactatgtgagataatggattattttaagatgctacacgttagat

SEQ ID NO: 47441 - DNA, 110 bp, synthetic construct
  source 1..110: mol_type = other DNA
tggagttttccactatgtgagataatggattattttaagatgctacacgttagattttctctagtggcctgatggatcgacccatgtgttctgctcagtcctgggctagc

SEQ ID NO: 47442 - DNA, 110 bp, synthetic construct
  source 1..110: mol_type = other DNA
tagttgtgaggagtcaggtattttgtatgatatcccttcattggaatctgatgtttttttcccgtgatagtctcaagttgcaggtttctgcgaggaaagctatagtgata

SEQ ID NO: 47443 - DNA, 110 bp, synthetic construct
  source 1..110: mol_type = other DNA
tttttcccgtgatagtctcaagttgcaggtttctgcgaggaaagctatagtgataaagtgccatttccatcatatcctatgaagggtacttactaccaacatgatttatg

SEQ ID NO: 47444 - DNA, 110 bp, synthetic construct
  source 1..110: mol_type = other DNA
gtgtccaatcttgtcaaatgtggccgatcttgtcaaatgtgccccaggtagggaggttaggggcacagagtcatccctggccgaaaaccactcacctggatgaatcaaaa

SEQ ID NO: 47445 - DNA, 110 bp, synthetic construct
  source 1..110: mol_type = other DNA
gttaggggcacagagtcatccctggccgaaaaccactcacctggatgaatcaaaaggatgagagttgcagaaacagtaaatgagagtgagctctggagctggcagctggg

SEQ ID NO: 47446 - DNA, 110 bp, synthetic construct
  source 1..110: mol_type = other DNA
tcgatgacacgcacattctgcgtggctgctcaaatattaatccacaatatactttaatggtacagaacaccagtgagcatgggagggacacgaagggctttggataccct

SEQ ID NO: 47447 - DNA, 110 bp, synthetic construct
  source 1..110: mol_type = other DNA
aatggtacagaacaccagtgagcatgggagggacacgaagggctttggataccctgaaaaatggtgttgtcactccaagattttatggcctcatcttgagcagagcttca

SEQ ID NO: 47448 - DNA, 110 bp, synthetic construct
  source 1..110: mol_type = other DNA
gtagaaagacctactgagacctattcactggctgaaaattaagggaagatagcaggtcaacagctgctatctctctgtgatctatttccatttattttcatttttatacc

SEQ ID NO: 47449 - DNA, 110 bp, synthetic construct
  source 1..110: mol_type = other DNA
cactggctgaaaattaagggaagatagcaggtcaacagctgctatctctctgtgatctatttccatttattttcatttttatacctttctgaatttctgaggcttctaaa

SEQ ID NO: 47450 - DNA, 110 bp, synthetic construct
  source 1..110: mol_type = other DNA
cttcaaattgttctgctcccgggtaagtagcagagaactactattgccacagaacaattgtcccaggcaatgaaaattcatcctaggtgttaattagctcaatatttatc

SEQ ID NO: 47451 - DNA, 110 bp, synthetic construct
  source 1..110: mol_type = other DNA
aattgtcccaggcaatgaaaattcatcctaggtgttaattagctcaatatttatctcatcgaatatgcaaattaagacactgcggtctcattagcgtcatctgtgtttcc

SEQ ID NO: 47452 - DNA, 110 bp, synthetic construct
  source 1..110: mol_type = other DNA
aacatatggatgtcagcatctttcagaatttaggaagagaattggagttggagggtagggtgcagttttctatcactgctctgacaaattaccacagatttggtagcttc

SEQ ID NO: 47453 - DNA, 110 bp, synthetic construct
  source 1..110: mol_type = other DNA
tagggtgcagttttctatcactgctctgacaaattaccacagatttggtagcttcaaacaacacaaatttatcatcttacagttctagaaattagagatccaacacaggt

SEQ ID NO: 47454 - DNA, 110 bp, synthetic construct
  source 1..110: mol_type = other DNA
cgaacccgcatcctcacggatcctagtcggatttgttaactgctaagccacggagggaactcccacgacattttagaacaaacccttctttactcaacatgttcagcaat

SEQ ID NO: 47455 - DNA, 110 bp, synthetic construct; identical to SEQ ID NO: 47454
  source 1..110: mol_type = other DNA

SEQ ID NO: 47456 - DNA, 110 bp, synthetic construct
  source 1..110: mol_type = other DNA
aaacactgaaggctctgtctggtctgactcaggagagtcttaccagctccccaaaggaaagagataagaagttaacatcatactcatcctgtatattattttacttcaaa

SEQ ID NO: 47457 - DNA, 110 bp, synthetic construct
  source 1..110: mol_type = other DNA
gctccccaaaggaaagagataagaagttaacatcatactcatcctgtatattattttacttcaaagaagaatagccactgaagtactatttggtaaatccaacatatttc

SEQ ID NO: 47458 - DNA, 110 bp, synthetic construct
  source 1..110: mol_type = other DNA
attcaagagtaagtgctgttggaaacgaggcaaggcctccactgtgccagcggggccccacagccccaggaccgagagaggggtgaatcttggagagatcttggaaaagg

SEQ ID NO: 47459 - DNA, 110 bp, synthetic construct
  source 1..110: mol_type = other DNA
ccccacagccccaggaccgagagaggggtgaatcttggagagatcttggaaaaggaagaacaagaggggagggtgtaccattcacacatatcccatcagtctgattgtcc

SEQ ID NO: 47460 - DNA, 110 bp, synthetic construct
  source 1..110: mol_type = other DNA
tattttttttataattaagtaaataaaaatcttgaaatatttctatttctagagctgagcaagctcatgtgaaacacaaccatcagtaccaccagcagaggaactcaggg

SEQ ID NO: 47461 - DNA, 110 bp, synthetic construct
  source 1..110: mol_type = other DNA
tgagcaagctcatgtgaaacacaaccatcagtaccaccagcagaggaactcagggtgcaaggccacatttgcagttaggatctcaaagacacaccacaggaaagtgactg

SEQ ID NO: 47462 - DNA, 110 bp, synthetic construct
  source 1..110: mol_type = other DNA
cttgagtggaaaataaaccttcattgttgtgaaccgctgagattgcgggttgttcgtcaccaaagtgcaatttagcctaaagggactgaagcactctgtgtaagctccat

SEQ ID NO: 47463 - DNA, 110 bp, synthetic construct
  source 1..110: mol_type = other DNA
gtcaccaaagtgcaatttagcctaaagggactgaagcactctgtgtaagctccataatcactttgtaacctctatgcataatacagatacatggctggcagtcaatgcat

SEQ ID NO: 47464 - DNA, 110 bp, synthetic construct
  source 1..110: mol_type = other DNA
tcacagtaactggaaaaaactttatccatgtaggaatttcttaacaagattagaaacccttgaacgctcaggttcctcctatttgaaatgctgcccaaggttggggaaag

SEQ ID NO: 47465 - DNA, 110 bp, synthetic construct
  source 1..110: mol_type = other DNA
acccttgaacgctcaggttcctcctatttgaaatgctgcccaaggttggggaaaggacttcacgccctctcaaccctcccacacggaacccctaccctggcctctcaaac

SEQ ID NO: 47466 - DNA, 110 bp, synthetic construct
  source 1..110: mol_type = other DNA
tcattaagagactgtatcccttttcttgtagtcccaggactccctacctctgacactctggacactaggacactagatttctcaggaggaatgtcccctgccttctgccc

SEQ ID NO: 47467 - DNA, 110 bp, synthetic construct
  source 1..110: mol_type = other DNA
ctctggacactaggacactagatttctcaggaggaatgtcccctgccttctgcccactgtgcctaagcctaactgtacaacttccagaagttgtgcttgaaggatagaca

SEQ ID NO: 47468 - DNA, 110 bp, synthetic construct
  source 1..110: mol_type = other DNA
tgttcaaaattctattctaggtcccttgtaattccacatgaattgtagaatctgtttggcagtttctcccaagaaatcagccaagctttatataggggtggcattgaatc

SEQ ID NO: 47469 - DNA, 110 bp, synthetic construct
  source 1..110: mol_type = other DNA
ttggcagtttctcccaagaaatcagccaagctttatataggggtggcattgaatctatagatcaatcttgggagtatttaccattttaacactattaagtcctttcatcc

SEQ ID NO: 47470 - DNA, 110 bp, synthetic construct
  source 1..110: mol_type = other DNA
aagggtagattgaaatattaggacagcccagcagggggagtgattcttagcagcaggtgggatcagaatagctgcgccttattatttctgctccagtgacaatgccaggt

SEQ ID NO: 47471 - DNA, 110 bp, synthetic construct
  source 1..110: mol_type = other DNA
ggtgggatcagaatagctgcgccttattatttctgctccagtgacaatgccaggtgctcctgcacccagaaacccacagccctttccaggatgaagccctgattgtcagg

SEQ ID NO: 47472 - DNA, 110 bp, synthetic construct
  source 1..110: mol_type = other DNA
aaggcctgggccttggactgaggccaggagcggtgggctcagcgagctagaaggctcacaggccaaagctggacctgcctctggttcatggtgtgaccttgagaaattca

SEQ ID NO: 47473 - DNA, 110 bp, synthetic construct
  source 1..110: mol_type = other DNA
tcacaggccaaagctggacctgcctctggttcatggtgtgaccttgagaaattcatgtctttctgtttctatttcggtaagggcagagtcaaaatcattgacttgtttgt

SEQ ID NO: 47474 - DNA, 110 bp, synthetic construct; identical to SEQ ID NO: 47472
  source 1..110: mol_type = other DNA

SEQ ID NO: 47475 - DNA, 110 bp, synthetic construct; identical to SEQ ID NO: 47473
  source 1..110: mol_type = other DNA

SEQ ID NO: 47476 - DNA, 110 bp, synthetic construct
  source 1..110: mol_type = other DNA
ccaccagcgaggttctccaagaaggcaaggtctcaggtaatggcttcctcctgtctaactccctctggagcaaactggagctgtgcagttagcttcctccaccttcactg

SEQ ID NO: 47477 - DNA, 110 bp, synthetic construct
  source 1..110: mol_type = other DNA
aactattaatagatacttgggatcagtactggattattttccagcccctcaagctaaacatattaaaacccccaatgaatccctttcctccaagccctgaacagctctta

SEQ ID NO: 47478 - DNA, 110 bp, synthetic construct
  source 1..110: mol_type = other DNA
cccaggccagggctctaggggaccagcaggctctagggaagggtgggcaggcactcacctccaagatggggcacatggcatcagccgtggtcccgcccagtagggtgcag

SEQ ID NO: 47479 - DNA, 110 bp, synthetic construct
  source 1..110: mol_type = other DNA
cacctccaagatggggcacatggcatcagccgtggtcccgcccagtagggtgcagaacttgtagaaggactccaggtaggcctgtgcagggcatggggcttgctcagccc

SEQ ID NO: 47480 - DNA, 110 bp, synthetic construct
  source 1..110: mol_type = other DNA
actcaacacgcacatggatgacctgcacctggacctcagtgcttgtgaggtgagcccggcagacagtgggctcacacattgggcgggggggctgtgaagcagcagtgcta

SEQ ID NO: 47481 - DNA, 110 bp, synthetic construct
  source 1..110: mol_type = other DNA
ccggcagacagtgggctcacacattgggcgggggggctgtgaagcagcagtgctaggccatcagccctcgatcttccttgcttgtggccagatggcctgagcacacccca

SEQ ID NO: 47482 - DNA, 110 bp, synthetic construct
  source 1..110: mol_type = other DNA
gctgctcagctgccacgcggtgtgcatacctgagttgtgagcaaccaaaggaactttcagctctgacaggtctctgcctcattttctttgtgcttgcttaagggggagga

SEQ ID NO: 47483 - DNA, 110 bp, synthetic construct
  source 1..110: mol_type = other DNA
ttcagctctgacaggtctctgcctcattttctttgtgcttgcttaagggggaggaaggtgctgggtggctgggcagtccccacttctccatctcttcgtgtccctgttct

SEQ ID NO: 47484 - DNA, 110 bp, synthetic construct
  source 1..110: mol_type = other DNA
tgcagctgccgacctacaccacagccacacaggatccaagccgcatctgtgatctacaccacagccatagccatgcaggatctgagccacatctgcgacctataccacag

SEQ ID NO: 47485 - DNA, 110 bp, synthetic construct; identical to SEQ ID NO: 47484
  source 1..110: mol_type = other DNA

SEQ ID NO: 47486 - DNA, 110 bp, synthetic construct
  source 1..110: mol_type = other DNA
tctacaattaacataaattactttcatagtcatagaaaaatcattttcaagagcctgctgatggctgcatattgaggaggttgctggctctcacacatccattctccctt

SEQ ID NO: 47487 - DNA, 110 bp, synthetic construct
  source 1..110: mol_type = other DNA
tgctgatggctgcatattgaggaggttgctggctctcacacatccattctcccttgattgttccaaggcaacatttcagtgccagggacacctggctttcatggccatct

SEQ ID NO: 47488 - DNA, 110 bp, synthetic construct
  source 1..110: mol_type = other DNA
tatattaactaaaataaaattaaaattaattcttcacatcagtcatatttcaagtgcacatagtcagttgtggctgcctatcggacagtgcagatgtaaaacatttctgt

SEQ ID NO: 47489 - DNA, 110 bp, synthetic construct
  source 1..110: mol_type = other DNA
gcacatagtcagttgtggctgcctatcggacagtgcagatgtaaaacatttctgttactgcagcaagtcctattggagagcactgctctagaggcttttttgggaaaagg

SEQ ID NO: 47490 - DNA, 110 bp, synthetic construct
  source 1..110: mol_type = other DNA
tagattggctggcccttcacagtggcttctgcagccgcaagccatggggttttcttaaactgtgagcccaaagctactctggcaagtggtccagtcgccttgcatttcag

SEQ ID NO: 47491 - DNA, 110 bp, synthetic construct
  source 1..110: mol_type = other DNA
taaactgtgagcccaaagctactctggcaagtggtccagtcgccttgcatttcagcctcagtactggagccctgagtacacagacctgcagggacacctggaccaggctt

SEQ ID NO: 47492 - DNA, 110 bp, synthetic construct
  source 1..110: mol_type = other DNA
agtgacaatacaggatccttaacccgtgcaagagaactcctgttattgatattttttatgttcagtgtccctatgttgaggtcacaaatatattttccttctaagagtct

SEQ ID NO: 47493 - DNA, 110 bp, synthetic construct; identical to SEQ ID NO: 47492
  source 1..110: mol_type = other DNA

SEQ ID NO: 47494 - DNA, 110 bp, synthetic construct
  source 1..110: mol_type = other DNA
cagcatcttcgacctatgcctaagtgtgcggcagtgctggatcagatccttaacccactgagcaaggccagtgttctgacccacatcctactggatatagtcaggttctc

SEQ ID NO: 47495 - DNA, 110 bp, synthetic construct
  source 1..110: mol_type = other DNA
cactgagcaaggccagtgttctgacccacatcctactggatatagtcaggttctcaacccgctgagccacaatgggaactctgacattttgtttattttgttaggtatta

SEQ ID NO: 47496 - DNA, 110 bp, synthetic construct
  source 1..110: mol_type = other DNA
gtggagcacccatctaattactcatccttttattttcctggcaaattcctatctatccttcaagacacagctctagtaattcatcctccaggcagccttccttgatgtct

SEQ ID NO: 47497 - DNA, 110 bp, synthetic construct
  source 1..110: mol_type = other DNA
tccttcaagacacagctctagtaattcatcctccaggcagccttccttgatgtctaggccaggttagaagcattgttctgggccccttatcccaggattctgtcatgatt

SEQ ID NO: 47498 - DNA, 110 bp, synthetic construct
  source 1..110: mol_type = other DNA
gcttccccaacaccagctctgtctcctgagtagtcctaggaccctgggcctcctccctacccacctcctctctccagctcacggttctgcctccctaaccctttgcatcc

SEQ ID NO: 47499 - DNA, 110 bp, synthetic construct
  source 1..110: mol_type = other DNA
cctacccacctcctctctccagctcacggttctgcctccctaaccctttgcatccattcccatgatcgtgttcggtttaggcctcaccctctccccagacactgcaacag

SEQ ID NO: 47500 - DNA, 110 bp, synthetic construct; identical to SEQ ID NO: 47498
  source 1..110: mol_type = other DNA

SEQ ID NO: 47501 - DNA, 110 bp, synthetic construct; identical to SEQ ID NO: 47499
  source 1..110: mol_type = other DNA

SEQ ID NO: 47502 - DNA, 110 bp, synthetic construct
  source 1..110: mol_type = other DNA
catttccgctgcaccacaacaggaactcccgtcagtcatgttttaactggtagtaaatcttttgtttgatttatctgaaaatcgtttgttcttcttccggttgccccatc

SEQ ID NO: 47503 - DNA, 110 bp, synthetic construct
  source 1..110: mol_type = other DNA
aatcttttgtttgatttatctgaaaatcgtttgttcttcttccggttgccccatcttataagaatttatgagccccttctgataacagtagcagctaagtaaaaagaaac

SEQ ID NO: 47504 - DNA, 110 bp, synthetic construct
  source 1..110: mol_type = other DNA
actgaagctatggaaatggatgaaatcctttggtagggaagatgaaagagaaagccaaaatcctttaggaaatatcaacatttaagggacaagtagaggaagagtagccc

SEQ ID NO: 47505 - DNA, 110 bp, synthetic construct
  source 1..110: mol_type = other DNA
tgatggcggtgatttttttcccccagggcttttggccctgtgtctgtctgtttcgggaaatgtctatgcaggtcttctgccatgtttgccttgggctttgggttttgttt

SEQ ID NO: 47506 - DNA, 110 bp, synthetic construct
  source 1..110: mol_type = other DNA
ccattcaccagcaccaacctccatccagataccaaagcactcaaaagtcagggtcttcagaattgccagctcaagagattcaaaacagatggtgtcttggtccagagtct

SEQ ID NO: 47507 - DNA, 110 bp, synthetic construct
  source 1..110: mol_type = other DNA
cttcaattttctccttccggcgcgcccccggcgggctccgcgcctcctcactatccacactctagctctgcgggatgcgcctttctagttcccacaggctccttcctcgc

SEQ ID NO: 47508 - DNA, 110 bp, synthetic construct
  source 1..110: mol_type = other DNA
ggatggagacgcagtggacagggagggaggcttactctggatgggaactggctccttgggggcttctaccagacagccgaggactcccctgggtgggccaggtcagaggg

SEQ ID NO: 47509 - DNA, 110 bp, synthetic construct
  source 1..110: mol_type = other DNA
gtgggtctcccagctagcggcacgcgctgtctcccttgctctctcgcttcctctccatcttgccttcatggttgctctcctgctgctgcgcccatagcagccgaggtcaa

SEQ ID NO: 47510 - DNA, 110 bp, synthetic construct
  source 1..110: mol_type = other DNA
catcttgccttcatggttgctctcctgctgctgcgcccatagcagccgaggtcaagtggcctgaggtaacgcgaggagacggtcgttctgaggaaacctgcgttcccagt

SEQ ID NO: 47511 - DNA, 110 bp, synthetic construct
  source 1..110: mol_type = other DNA
cagctgcagctcagattcagtccctggtcagggaacttccatatgctgcagctgtggccattaaaaaaaaaaaatcttttttaaaatatatattttatgtggggaagtgt

SEQ ID NO: 47512 - DNA, 110 bp, synthetic construct; identical to SEQ ID NO: 47511
  source 1..110: mol_type = other DNA

SEQ ID NO: 47513 - DNA, 110 bp, synthetic construct
  source 1..110: mol_type = other DNA
aactgcagctgcggcctatgctgtagcttgtgctaatgccagatccttgacccactgagcaagggccagtaatggaacctgcatcctcaaggacaccatgtcacgttcct

SEQ ID NO: 47514 - DNA, 110 bp, synthetic construct
  source 1..110: mol_type = other DNA
ctatgctgtagcttgtgctaatgccagatccttgacccactgagcaagggccagtaatggaacctgcatcctcaaggacaccatgtcacgttcctaacccactgagccac

SEQ ID NO: 47515 - DNA, 110 bp, synthetic construct
  source 1..110: mol_type = other DNA
aagagggattcaacagctgcctttaactggctcttttattcattctagcctgaatgtcaactcaccagcctgagcttgttaaaactatgtcattgtgccttccttcctct

SEQ ID NO: 47516 - DNA, 110 bp, synthetic construct
  source 1..110: mol_type = other DNA
gtcaactcaccagcctgagcttgttaaaactatgtcattgtgccttccttcctctggcagtctttgtatcacaatatgaagctttgggaatgaagtcaaggggaagtgca

SEQ ID NO: 47517 - DNA, 110 bp, synthetic construct
  source 1..110: mol_type = other DNA
gagggatgagtggatgaagggttatgttagactctcaactgaggcaggtgctcagaaatcgtgaaattgagccacttgggttataattgtggtggtttctgaattaaatg

SEQ ID NO: 47518 - DNA, 110 bp, synthetic construct
  source 1..110: mol_type = other DNA
aaatcgtgaaattgagccacttgggttataattgtggtggtttctgaattaaatgagacagattaggacagcttttctccaagtcttggttctaaagaaggccattccca

SEQ ID NO: 47519 - DNA, 110 bp, synthetic construct
  source 1..110: mol_type = other DNA
tatacccactttggtaagaggttttatcatgaagggatgttggacgttttctgcatccattgagaggctcatgtggttttttacttttcttctgttaatgtggtgtatga

SEQ ID NO: 47520 - DNA, 110 bp, synthetic construct; identical to SEQ ID NO: 47519
  source 1..110: mol_type = other DNA

SEQ ID NO: 47521 - DNA, 110 bp, synthetic construct
  source 1..110: mol_type = other DNA
tctctgaattcagtttcccatctgcaagagaataccaggctggcttatctgagatcagattccatgacaccaagggtgtttccttctatttttctttctatttacggcca

SEQ ID NO: 47522 - DNA, 110 bp, synthetic construct
  source 1..110: mol_type = other DNA
tatctgagatcagattccatgacaccaagggtgtttccttctatttttctttctatttacggccacgcctgaggcatatggaagttcctaggctaggggtagaatcagag

SEQ ID NO: 47523 - DNA, 110 bp, synthetic construct
  source 1..110: mol_type = other DNA
aggatctgagtcgcctttgagaagggagtgggaaaggactgggcaggaagcttcagtactagctctgtcatctatgaccatcagcttttaactacctggcccgactttct

SEQ ID NO: 47524 - DNA, 110 bp, synthetic construct
  source 1..110: mol_type = other DNA
gtactagctctgtcatctatgaccatcagcttttaactacctggcccgactttctccatcagcaaaatgggcctgtcctgttcagtgcctaggatggcagactgatggct

SEQ ID NO: 47525 - DNA, 110 bp, synthetic construct
  source 1..110: mol_type = other DNA
agcaggacaaaggataatcgtcaaatggacaacaatacaaacctcaaattcagagacaaaagcaaattttgtgtaatgaagaatgcaggtagctgcaagtaatggaaaac

SEQ ID NO: 47526 - DNA, 110 bp, synthetic construct
  source 1..110: mol_type = other DNA
acaaaagcaaattttgtgtaatgaagaatgcaggtagctgcaagtaatggaaaactcaaccaacagtggcttcaaccaaaggacatttattgcatttaaggacatttatt

SEQ ID NO: 47527 - DNA, 110 bp, synthetic construct
  source 1..110: mol_type = other DNA
cacaattagtgacagtatagcatgagggctgaaggtctagatataggcaacctatatagtaaagggcaggaatgtggaaagtctatatagtattgcctaatatacaagct

SEQ ID NO: 47528 - DNA, 110 bp, synthetic construct
  source 1..110: mol_type = other DNA
atagtaaagggcaggaatgtggaaagtctatatagtattgcctaatatacaagctgcttatctagtagcgccaacactttccagccataattatctcaaataaatttctt

SEQ ID NO: 47529 - DNA, 110 bp, synthetic construct
  source 1..110: mol_type = other DNA
agtttgtcggctgtcatgtcttcgtggtagtgaccctcataatgtcctgacgaagaaagcaccagtatgcatgggcctcaatgctctgagaataagccctctgagaggct

SEQ ID NO: 47530 - DNA, 110 bp, synthetic construct
  source 1..110: mol_type = other DNA
aaagcaccagtatgcatgggcctcaatgctctgagaataagccctctgagaggctcagaaggagctgagatgaggtgagagaacccagcaagtgtgcctgaccgggtcct

SEQ ID NO: 47531 - DNA, 110 bp, synthetic construct
  source 1..110: mol_type = other DNA
tcctactcacatattggatgactttggaatatgtcctttcttttcttagttgctccatttgtcaaatgaggagtttggacaaaatcagtgaaggtaaatagacctgtgct

SEQ ID NO: 47532 - DNA, 110 bp, synthetic construct
  source 1..110: mol_type = other DNA
catttgtcaaatgaggagtttggacaaaatcagtgaaggtaaatagacctgtgctagtttggctcaattagtacacactgcatggagcctggcagggggaaggattctga

SEQ ID NO: 47533 - DNA, 110 bp, synthetic construct
  source 1..110: mol_type = other DNA
tctccacaaactacccagagcaactccagcctgcctggctgaaccctgagggagatggagactgaaccggggaacagcctgacagaggagcagaaactgaattcaatttt

SEQ ID NO: 47534 - DNA, 110 bp, synthetic construct
  source 1..110: mol_type = other DNA
tggagactgaaccggggaacagcctgacagaggagcagaaactgaattcaattttggaaaactaaggtaccttcccaagcctcttggcccacctgagtgtacagacagga

SEQ ID NO: 47535 - DNA, 110 bp, synthetic construct
  source 1..110: mol_type = other DNA
ccatcaggagccaaagggcagagggtagcttgtcgggaagtctcagcgctttgccttcctggactctttagagggcaacctgcaggatgacagtgtcagagggagaaatt

SEQ ID NO: 47536 - DNA, 110 bp, synthetic construct
  source 1..110: mol_type = other DNA
ttcctggactctttagagggcaacctgcaggatgacagtgtcagagggagaaattccttcatccgtctatgcaccaggtatttactgaatatctactatgtgcgaggcct

SEQ ID NO: 47537 - DNA, 110 bp, synthetic construct
  source 1..110: mol_type = other DNA
tcccaccagccccctgggagatctccttatgtctctcctgggaagcagcggtctcctggaggatgcagctgaaatagcaattgcgtagataccggtaggacagtccatct

SEQ ID NO: 47538 - DNA, 110 bp, synthetic construct
  source 1..110: mol_type = other DNA
ctggaggatgcagctgaaatagcaattgcgtagataccggtaggacagtccatcttagaacacgttctcaagcatgtggggtggatggacaaggttgagagggactctga

SEQ ID NO: 47539 - DNA, 110 bp, synthetic construct
  source 1..110: mol_type = other DNA
gatatcaactcagcaaatgaacccagaataaagcaagaatgacagaagcatcagttagttccacttacaaggaggctacaagacagtgggcaaacgtaaacttaggagac

SEQ ID NO: 47540 - DNA, 110 bp, synthetic construct
  source 1..110: mol_type = other DNA
tagttccacttacaaggaggctacaagacagtgggcaaacgtaaacttaggagacttgcttttttattcaaagtgtggcccagagaccagcagcattaacatcctctaag

SEQ ID NO: 47541 - DNA, 110 bp, synthetic construct
  source 1..110: mol_type = other DNA
ccatttttctctgctgaatggtctccacagatctctcatctcaaacgcgcatgggattgaaccatctgcaagtctagctagtgttagggtctctccatcctacacctcta

SEQ ID NO: 47542 - DNA, 110 bp, synthetic construct
  source 1..110: mol_type = other DNA
aggtgagcagcaggtctttcccaaggagctaagattctctgctagaagcttccctctggaaaaaaataaaaaaggagttctcgttgtgacttaggggaaatgaaagcaac

SEQ ID NO: 47543 - DNA, 110 bp, synthetic construct
  source 1..110: mol_type = other DNA
tttggccaacataagtgtaattcattttttcaccagacaaaatggatagaaaatgaattccattaagagctgagcttttaggttgccaaaccaacaagtcagtttaggga

SEQ ID NO: 47544 - DNA, 110 bp, synthetic construct
  source 1..110: mol_type = other DNA
aattccattaagagctgagcttttaggttgccaaaccaacaagtcagtttagggaagacagcaaactcacagtttttcttcttctctcgtagtttatgttttatttaaat

SEQ ID NO: 47545 - DNA, 110 bp, synthetic construct
  source 1..110: mol_type = other DNA
attgggtttgctaagaacatcaggagcggataatcacaaacccagactgcgagggggctcctgggcgtcagtcgtgatccccgccaagactgggcaacgaggatttaata

SEQ ID NO: 47546 - DNA, 110 bp, synthetic construct
  source 1..110: mol_type = other DNA
ggctcctgggcgtcagtcgtgatccccgccaagactgggcaacgaggatttaatagcaattagctgttcattgttaacactcgggggtcaacaagatgctttgtagtacg

SEQ ID NO: 47547 - DNA, 110 bp, synthetic construct
  source 1..110: mol_type = other DNA
taagtatgtaataaacggcagctcaggaagagcccaacaattcgaccctgctgctgcctccaccaagcagaaaaaccaagcatcctagttccagttgctcacacttacag

SEQ ID NO: 47548 - DNA, 110 bp, synthetic construct
  source 1..110: mol_type = other DNA
gcctccaccaagcagaaaaaccaagcatcctagttccagttgctcacacttacagcgagaaaactcacaaaatcagccttaagtaactcaactctcccttccaaagctcc

SEQ ID NO: 47549 - DNA, 110 bp, synthetic construct
  source 1..110: mol_type = other DNA
ggcctcactgataagacagacactttttacatcagatttactttgcttcctcggcaggtgtgaagctcgagaaagagcacaaatgagacccaatcatgctaatgttccaa

SEQ ID NO: 47550 - DNA, 110 bp, synthetic construct
  source 1..110: mol_type = other DNA
aggtgtgaagctcgagaaagagcacaaatgagacccaatcatgctaatgttccaagatgccacgaaaacctaaaggaggtacatcaagaaggaaaaacacatttgtcaaa

SEQ ID NO: 47551 - DNA, 110 bp, synthetic construct
  source 1..110: mol_type = other DNA
ctggccttgggtacagagccctgacatggagtctgtttcagctgcctgggccttgggccttggaggccaagcctctggagccgggcagaggcctctgattaacacgagta

SEQ ID NO: 47552 - DNA, 110 bp, synthetic construct
  source 1..110: mol_type = other DNA
ggccttggaggccaagcctctggagccgggcagaggcctctgattaacacgagtatctttacacggtcgacagcctcagagcccctcagctagtatctgacgagctccat

SEQ ID NO: 47553 - DNA, 110 bp, synthetic construct
  source 1..110: mol_type = other DNA
aagccactttcctcattcacaggcctccagggatggtaacatataatttggtattgtctcaatgtccactggacgtgcagcccgggacgtgtctcagcctctagaaacat

SEQ ID NO: 47554 - DNA, 110 bp, synthetic construct
  source 1..110: mol_type = other DNA
gtctcaatgtccactggacgtgcagcccgggacgtgtctcagcctctagaaacatccctcctttctcccctgagggctgttttgagaagttgatcaaaggtctgttctga

SEQ ID NO: 47555 - DNA, 110 bp, synthetic construct
  source 1..110: mol_type = other DNA
agcaggatagggcacaggtgaatactaaactgtgtgctttaagccactaagcatcatgtgcttttacagcaatagttagacctctgactaacacatgcttatggggctcc

SEQ ID NO: 47556 - DNA, 110 bp, synthetic construct
  source 1..110: mol_type = other DNA
atgtgcttttacagcaatagttagacctctgactaacacatgcttatggggctccccattacatcagtgtttctcagctccatcagccaaaatcttgaaggtctctactt

SEQ ID NO: 47557 - DNA, 110 bp, synthetic construct
  source 1..110: mol_type = other DNA
cagcagagacggaggaaagcaacagtctagctctagattccacacatcggccgtcagggatcttggtcatatgagaatagcacggtctctgaacaggccagggaatcgcc

SEQ ID NO: 47558 - DNA, 110 bp, synthetic construct
  source 1..110: mol_type = other DNA
agggatcttggtcatatgagaatagcacggtctctgaacaggccagggaatcgcccacatgccagagtgccaccgtctgcccagcactcctgttgggtcctttctgctct

SEQ ID NO: 47559 - DNA, 110 bp, synthetic construct
  source 1..110: mol_type = other DNA
cacggcggcaatgcccaggggaggctgggtctcgtgggatgggtgcggttctaagccacaagcatgacggagctctgagtttcaagaggggtgttgcctcttagatgtga

SEQ ID NO: 47560 - DNA, 110 bp, synthetic construct
  source 1..110: mol_type = other DNA
ccacaagcatgacggagctctgagtttcaagaggggtgttgcctcttagatgtgagaaatcatggacggggacctgagagtttccgagggatgtggcacgttgggaatgg

SEQ ID NO: 47561 - DNA, 110 bp, synthetic construct
  source 1..110: mol_type = other DNA
cgggccctctttccaagcctgatgggggagagggcgcctaacgaagagacatcctcttctctggggaattattaatggtgagcggattccccacgggaaaacatacttca

SEQ ID NO: 47562 - DNA, 110 bp, synthetic construct
  source 1..110: mol_type = other DNA
cttctctggggaattattaatggtgagcggattccccacgggaaaacatacttcaactttacacctattttctcgggtggttaattgctctaccggcatcctgtgcactc

SEQ ID NO: 47563 - DNA, 110 bp, synthetic construct
  source 1..110: mol_type = other DNA
agggactcctttattctcataaagaggaaaaaggcaggttaatcatctattgactcctctgtcttattactggcataaagctcgggcttcgggaaatttccgctttttag

SEQ ID NO: 47564 - DNA, 110 bp, synthetic construct
  source 1..110: mol_type = other DNA
cctctgtcttattactggcataaagctcgggcttcgggaaatttccgctttttagttacctaacaaacatacatcggcaggaggtgcagataaagatcgaaagattaagc

SEQ ID NO: 47565 - DNA, 110 bp, synthetic construct
  source 1..110: mol_type = other DNA
caatacccattgaagagaacaaaagttttgttacttgattaaggataattaccagaaatctcagcaaatctcagactcgtaaaacattagaactattattactaccaaca

SEQ ID NO: 47566 - DNA, 110 bp, synthetic construct; identical to SEQ ID NO: 47565
  source 1..110: mol_type = other DNA

SEQ ID NO: 47567 - DNA, 110 bp, synthetic construct
  source 1..110: mol_type = other DNA
tttcggtgcatcatgatagtctattgtatactgtatttccccaagtccggtgttactcatctctgtaacctcagggcctacacgagtgcctggcaccaggcaggcacgag

SEQ ID NO: 47568 - DNA, 110 bp, synthetic construct
  source 1..110: mol_type = other DNA
ctcatctctgtaacctcagggcctacacgagtgcctggcaccaggcaggcacgagacaaatatctgctgaatgactgcatgacagacagctcgctcacagcacccataac

SEQ ID NO: 47569 - DNA, 110 bp, synthetic construct
  source 1..110: mol_type = other DNA
agctgaagggtctgaggcctagaccctcagaaccgagttggcaactttgatgtggatgagggtgaaaaatgacccacgtgtgcgtcagagaaggcaagaagggagggagg

SEQ ID NO: 47570 - DNA, 110 bp, synthetic construct
  source 1..110: mol_type = other DNA
atgagggtgaaaaatgacccacgtgtgcgtcagagaaggcaagaagggagggagggaaggagagagggagggaggaaggaagaaggagggaggaaaagaggaaaagaaag

SEQ ID NO: 47571 - DNA, 110 bp, synthetic construct
  source 1..110: mol_type = other DNA
ggttctctccagatacttggcaagttcctattatatacaaggcactaagtgctgcatgcagtacaagaatatatataatcccagctctgaagaagctcactctagtagat

SEQ ID NO: 47572 - DNA, 110 bp, synthetic construct
  source 1..110: mol_type = other DNA
atgcagtacaagaatatatataatcccagctctgaagaagctcactctagtagataagactgctatatcaatcgccacagtccagagggaaaaagagaattgtggcaacc

SEQ ID NO: 47573 - DNA, 110 bp, synthetic construct
  source 1..110: mol_type = other DNA
cataatcaccagagcacaccttacctcacctattctttccaggcaagaagggcatctgatttacctatggagtctccataccgcctaggatagcttcctgaactgccctt

SEQ ID NO: 47574 - DNA, 110 bp, synthetic construct
  source 1..110: mol_type = other DNA
ctgatttacctatggagtctccataccgcctaggatagcttcctgaactgcccttagcaactgttccacaatcacattcaaggatgcagaaaatagtatattgtctgaaa

SEQ ID NO: 47575 - DNA, 110 bp, synthetic construct
  source 1..110: mol_type = other DNA
gaccattaactagaagatattgaaaaagttatccaaaaattccccaacatcatatgaagagctttacaagttaatttagcttaaacttccaaggacaaataataccgatg

SEQ ID NO: 47576 - DNA, 110 bp, synthetic construct
  source 1..110: mol_type = other DNA
gaagagctttacaagttaatttagcttaaacttccaaggacaaataataccgatgttctgtaaacggctctagagcacagaagggggtaaatggtgcaattaattttgtg

SEQ ID NO: 47577 - DNA, 110 bp, synthetic construct
  source 1..110: mol_type = other DNA
gagcatttgcaaaatggaggtgagtaaatgagttgcacaaggtgacgtaagccagcaagaggaagcctcagtaatcctgccgtgtttccttttaggcggaaccataatca

SEQ ID NO: 47578 - DNA, 110 bp, synthetic construct
  source 1..110: mol_type = other DNA
caagaggaagcctcagtaatcctgccgtgtttccttttaggcggaaccataatcacatctggcaagtattgatgtatgcaaggagagttttctacaagattgatacagca

SEQ ID NO: 47579 - DNA, 110 bp, synthetic construct
  source 1..110: mol_type = other DNA
gacacctccaaactctactttggcctttatatgggggaggtaggactcctctggtggctcagggggttaaggatccaatgttatcactgctgtggcttgcatttgatccc

SEQ ID NO: 47580 - DNA, 110 bp, synthetic construct
  source 1..110: mol_type = other DNA
ggctcagggggttaaggatccaatgttatcactgctgtggcttgcatttgatccctggccctggaacttggcaggcatggccagaaaagaaattggggggtgtggggggg

SEQ ID NO: 47581 - DNA, 110 bp, synthetic construct
  source 1..110: mol_type = other DNA
taaaacacacattaaacaaaaatcaattccaattaaatgcattccgatcttttcatattatagttgtagagctaattgctccaaattgtcatatgctgtagggcagagag

SEQ ID NO: 47582 - DNA, 110 bp, synthetic construct
  source 1..110: mol_type = other DNA
tattatagttgtagagctaattgctccaaattgtcatatgctgtagggcagagaggcatcattaaagtactaaaaactctttccatgaaatggattggtgtcagagagag

SEQ ID NO: 47583 - DNA, 110 bp, synthetic construct
  source 1..110: mol_type = other DNA
ccttctttaaaatgatgaatgcttttttaaggcaaatccatcattggtcacttgagggaggaaatgtcaagaaaagttatggcttgttagcttttacttcttgacattat

SEQ ID NO: 47584 - DNA, 110 bp, synthetic construct
  source 1..110: mol_type = other DNA
gggaggaaatgtcaagaaaagttatggcttgttagcttttacttcttgacattatacaagaaagtaattgaagtacaacaaatgccatgttgttttacctcatctattta

SEQ ID NO: 47585 - DNA, 110 bp, synthetic construct
  source 1..110: mol_type = other DNA
tcatggttcctagttgggattcattaaccactgcaccacgatgggaattctgaagtttttgaccactttcctccagtacccctgtccccaccctctgctgctggtaccca

SEQ ID NO: 47586 - DNA, 110 bp, synthetic construct
  source 1..110: mol_type = other DNA
ccacgatgggaattctgaagtttttgaccactttcctccagtacccctgtccccaccctctgctgctggtacccacaagtctgatgtctttttctataagattgtttgtt

SEQ ID NO: 47587 - DNA, 110 bp, synthetic construct
  source 1..110: mol_type = other DNA
tcctccaggagctgtttggcaatgtctggagacatctttgctcgtcacagttagaaaccagagcgttccccttgtggctcagtgggttaagaacacaatatagtgtctgt

SEQ ID NO: 47588 - DNA, 110 bp, synthetic construct
  source 1..110: mol_type = other DNA
ttggcaatgtctggagacatctttgctcgtcacagttagaaaccagagcgttccccttgtggctcagtgggttaagaacacaatatagtgtctgtgaggatgtgggtttg

SEQ ID NO: 47589 - DNA, 110 bp, synthetic construct
  source 1..110: mol_type = other DNA
ggacgccaaagtgagttactaaataattattcaaagctaagtaccgaaatcccccaacacactccaggattcaatttttatcggttcagattagaatgtttcaaatcatt

SEQ ID NO: 47590 - DNA, 110 bp, synthetic construct
  source 1..110: mol_type = other DNA
aacacactccaggattcaatttttatcggttcagattagaatgtttcaaatcatttctgagcactgaggtttgacggatgcttttgctgtttctttgagcttttgcattg

SEQ ID NO: 47591 - DNA, 110 bp, synthetic construct
  source 1..110: mol_type = other DNA
aactcactcagcgaggccagggatcgaacctggatcctcacagacactgtgtcaggttcttaagcctcacagacactgtgtcgcttgagccacagtgggaactcctaaac

SEQ ID NO: 47592 - DNA, 110 bp, synthetic construct
  source 1..110: mol_type = other DNA
gttcttaagcctcacagacactgtgtcgcttgagccacagtgggaactcctaaactctttacatgtattacattgtattcacaatgatctcatgaggtagacagtactat

SEQ ID NO: 47593 - DNA, 110 bp, synthetic construct
  source 1..110: mol_type = other DNA
ctcaatgacacgcaagcgcccacatgcaattcctgctctcgcagccagtggggtttctactacgcatatttgtattcctgatactcaaggtctgattacaacttcaggtt

SEQ ID NO: 47594 - DNA, 110 bp, synthetic construct
  source 1..110: mol_type = other DNA
tctactacgcatatttgtattcctgatactcaaggtctgattacaacttcaggtttagtctctctgtaactttgattatacttcgcttcatcctctgtaatcaagctccg

SEQ ID NO: 47595 - DNA, 110 bp, synthetic construct
  source 1..110: mol_type = other DNA
acatgaacctcatgcccagaagtcttttcttcactcatccctccagtatttacgccgtggctactctgtatggtatggcgtgaaaagacacttcagaaatagttttgact

SEQ ID NO: 47596 - DNA, 110 bp, synthetic construct
  source 1..110: mol_type = other DNA
cgtggctactctgtatggtatggcgtgaaaagacacttcagaaatagttttgactttctaaactgtgactcccaagagcagtgactatgtctgtcttgtctgatgctctg

SEQ ID NO: 47597 - DNA, 110 bp, synthetic construct
  source 1..110: mol_type = other DNA
gatgagaaatacataatgcctaccttcccaaggggagtagggaaaatatttatgtgtcaagcatggtagaaactgttgtatgtacatcaagtcagctgtgccaactcaga

SEQ ID NO: 47598 - DNA, 110 bp, synthetic construct
  source 1..110: mol_type = other DNA
gtcaagcatggtagaaactgttgtatgtacatcaagtcagctgtgccaactcagaacacggaagtcataaaataatttattttgcagctcaaaaaaaatcagactcttaa

SEQ ID NO: 47599 - DNA, 110 bp, synthetic construct
  source 1..110: mol_type = other DNA
atgtgtaatgttcccttctgccctaacgtgtgtgtgaaccacaaaagcgtcagcattttatgaagcatgtggataatgtaagcgtttgagctgtttcactaacatatcaa

SEQ ID NO: 47600 - DNA, 110 bp, synthetic construct
  source 1..110: mol_type = other DNA
ttttatgaagcatgtggataatgtaagcgtttgagctgtttcactaacatatcaataaagtggcaatttgttatatagccaaatctaatgtcgctggtgctccaactaac

SEQ ID NO: 47601 - DNA, 110 bp, synthetic construct
  source 1..110: mol_type = other DNA
ggttcttttttatatttttacatcttgcatttatctgctgaaattttctttctttccttcttcgattttttttttttcccagccgcagtcatggcaaatggaagttcctg

SEQ ID NO: 47602 - DNA, 110 bp, synthetic construct
  source 1..110: mol_type = other DNA
ccttcttcgattttttttttttcccagccgcagtcatggcaaatggaagttcctgggccaggaattgaatccaagctttagctgcctcctacgccacagtgtagatcctt

SEQ ID NO: 47603 - DNA, 110 bp, synthetic construct
  source 1..110: mol_type = other DNA
ttcagggttggtttgaagatgaaagccaacctgtgtacatgagttctttattcctttgctaaataaattcctctgtgaacgatgggaaataaaaagctctaccgggggag

SEQ ID NO: 47604 - DNA, 110 bp, synthetic construct
  source 1..110: mol_type = other DNA
ttgctaaataaattcctctgtgaacgatgggaaataaaaagctctaccgggggaggcagcaccatcaaagacggccactccctcccccccacccccatctgtgtagagct

SEQ ID NO: 47605 - DNA, 110 bp, synthetic construct
  source 1..110: mol_type = other DNA
tctgcagtatttctttgtggtgtgagagagactgatgggagccattatccacccagctgcagagggactggccttcgtgctgctggaaagcctgtggtctccacttcctt

SEQ ID NO: 47606 - DNA, 110 bp, synthetic construct
  source 1..110: mol_type = other DNA
gctgcagagggactggccttcgtgctgctggaaagcctgtggtctccacttccttttgcttttcttcttcccatgctcttccttcccttctcttcttctttctttctctc

SEQ ID NO: 47607 - DNA, 110 bp, synthetic construct
  source 1..110: mol_type = other DNA
cttttttaagtcaaggatggttctgacttttcttccaatcggtgatgttttcaagaagtgccccgacctcctattcagaaaggactgaatcagtaccgattaaggaaatg

SEQ ID NO: 47608 - DNA, 110 bp, synthetic construct
  source 1..110: mol_type = other DNA
aagtgccccgacctcctattcagaaaggactgaatcagtaccgattaaggaaatgaccgctgaatcagttgacttcaaaaaaaagagtccctgcctattagactcattgc

SEQ ID NO: 47609 - DNA, 110 bp, synthetic construct
  source 1..110: mol_type = other DNA
ctgcttaatgtctttgagcctcagtgtctaagagtagcagtttccatgtgttgtggtgatggtcacgcaaagagatcacacacgccctcggcatcattatgactggcaca

SEQ ID NO: 47610 - DNA, 110 bp, synthetic construct
  source 1..110: mol_type = other DNA
gtgatggtcacgcaaagagatcacacacgccctcggcatcattatgactggcacatgagagctgcccaatagattgaagcaggtattattaactcttctctggctgaact

SEQ ID NO: 47611 - DNA, 110 bp, synthetic construct
  source 1..110: mol_type = other DNA
tgtgtggctttggcaattgtctttccctctctgggcctcattttaggaaatgaggtcaaaagaaggagtcttaagtacaggctgtcttaaacagactgtttgttccatta

SEQ ID NO: 47612 - DNA, 110 bp, synthetic construct
  source 1..110: mol_type = other DNA
tcaaaagaaggagtcttaagtacaggctgtcttaaacagactgtttgttccattaggagctgtgaactggaggttcgtgggaggattcagtttgcagatggatttcattt

SEQ ID NO: 47613 - DNA, 110 bp, synthetic construct
  source 1..110: mol_type = other DNA
tgttgaggcatgctatgtgtgggcaataaacaatgtcccctagcttcatccgcagtggttccccaggaaggcttgggccttcaaaataaacatccatgagctgaaacatg

SEQ ID NO: 47614 - DNA, 110 bp, synthetic construct
  source 1..110: mol_type = other DNA
tggttccccaggaaggcttgggccttcaaaataaacatccatgagctgaaacatgaagacaaagaatttaggtttaaaattaaaagtagtttctgaatggaggcctttct

SEQ ID NO: 47615 - DNA, 110 bp, synthetic construct
  source 1..110: mol_type = other DNA
caggtatgttcacctgtgaaaagcagctgatgctacaggctttctgaggctgggaggatcctctgccggttgagtgctgacatctagcgcggtgcccagcacagggcccc

SEQ ID NO: 47616 - DNA, 110 bp, synthetic construct
  source 1..110: mol_type = other DNA
ggatcctctgccggttgagtgctgacatctagcgcggtgcccagcacagggcccctgctctccagaagccagccaccggcactcactctgcttcgcctgcccttgtctgg

SEQ ID NO: 47617 - DNA, 110 bp, synthetic construct
  source 1..110: mol_type = other DNA
caattcttccttctccctgaatgaaatgtgactgtgatggctggaggtccagcagccctctctgcagccatgggcacaaaagctgcagagaaaggaggtcagagaagaaa

SEQ ID NO: 47618 - DNA, 110 bp, synthetic construct
  source 1..110: mol_type = other DNA
ccctctctgcagccatgggcacaaaagctgcagagaaaggaggtcagagaagaaagcagagaaaggaggtcagagaagcctgggtggccgggtgctattgagttgcagag

SEQ ID NO: 47619 - DNA, 110 bp, synthetic construct
  source 1..110: mol_type = other DNA
tgaaagaccaggctgcaggtcctgacactaaggaccagggattctctgtaactgctcagcctccatgtccacatctgtaaaacagggagctgatatctaacttataagtt

SEQ ID NO: 47620 - DNA, 110 bp, synthetic construct
  source 1..110: mol_type = other DNA
tcagcctccatgtccacatctgtaaaacagggagctgatatctaacttataagtttattaaggaaggaggaggaaaggatgactggaaagcaggggcccatttgaccaat

SEQ ID NO: 47621 - DNA, 110 bp, synthetic construct
  source 1..110: mol_type = other DNA
cgcaagcaagctcctctccacccccatcgctgctctcattttattacaggcactcagtataacccaccatcaagaggagggaaacatatgggccctcgtttgaacttctg

SEQ ID NO: 47622 - DNA, 110 bp, synthetic construct
  source 1..110: mol_type = other DNA
agtataacccaccatcaagaggagggaaacatatgggccctcgtttgaacttctgtaatgaatccttccaatgtactattcccttcaaaagttatttttgatttttattg

SEQ ID NO: 47623 - DNA, 110 bp, synthetic construct
  source 1..110: mol_type = other DNA
aaacatgaggcttaagttgtatatggtatatgttcctgagcttccataaactctgtagggggtaaggctatctcttccccccgcccccgtccgcacacgggcagtgttaa

SEQ ID NO: 47624 - DNA, 110 bp, synthetic construct
  source 1..110: mol_type = other DNA
tagggggtaaggctatctcttccccccgcccccgtccgcacacgggcagtgttaaccattcagagacataggcagcacatgtagaactggcccggctgacttatgtgatg

SEQ ID NO: 47625 - DNA, 110 bp, synthetic construct
  source 1..110: mol_type = other DNA
caaatgtggcttggacctggggacttccatatgccacaagtgcagctgttaaaaaaaataattaattaaaaaataaaaaggaagaaagataatgcccagtgttaatgagt

SEQ ID NO: 47626 - DNA, 110 bp, synthetic construct
  source 1..110: mol_type = other DNA
cctggggacttccatatgccacaagtgcagctgttaaaaaaaataattaattaaaaaataaaaaggaagaaagataatgcccagtgttaatgagtggataataaaattag

SEQ ID NO: 47627 - DNA, 110 bp, synthetic construct
  source 1..110: mol_type = other DNA
gtatgtatgtatgtttctctctctctctcaaaaaggtagttttcaaccattctcataggatggtagggctgagagcggtggtgaactgtagagtcaagcttgttcactcc

SEQ ID NO: 47628 - DNA, 110 bp, synthetic construct
  source 1..110: mol_type = other DNA
taggatggtagggctgagagcggtggtgaactgtagagtcaagcttgttcactcctcatgaaactgatgctcaagagagggtatgatgtaaccaaggccatacagtccat

SEQ ID NO: 47629 - DNA, 110 bp, synthetic construct
  source 1..110: mol_type = other DNA
tggctttgcttcccactgctttctgtgggtgagtactggtggctctgctctttttatctctcagtgtctttctgggaccaacagactagctggttctttctagaatgatg

SEQ ID NO: 47630 - DNA, 110 bp, synthetic construct
  source 1..110: mol_type = other DNA
atctctcagtgtctttctgggaccaacagactagctggttctttctagaatgatggtgggagtgtcaacagggccggaggaaacatgtgtgacttctcaagacctgggct

SEQ ID NO: 47631 - DNA, 110 bp, synthetic construct
  source 1..110: mol_type = other DNA
tgccaaacgaactcatggaaaacatattcttatctaaaggatatcttttggtatcttgtcatgagctttttagggggagtctaccgtaaactgtgaaagtcattttgatg

SEQ ID NO: 47632 - DNA, 110 bp, synthetic construct
  source 1..110: mol_type = other DNA
ttgtcatgagctttttagggggagtctaccgtaaactgtgaaagtcattttgatgacagaaggtttggcgaggtcttttaaaataagaaaactgatttccaggcagtaaa

SEQ ID NO: 47633 - DNA, 110 bp, synthetic construct
  source 1..110: mol_type = other DNA
agtagtataagggtaaatacctaataagagcaaaacaaaaggagattattctcattcaatacccactaaggaccatgccctccgccaggcatcttacatctttttcccca

SEQ ID NO: 47634 - DNA, 110 bp, synthetic construct
  source 1..110: mol_type = other DNA
tcaatacccactaaggaccatgccctccgccaggcatcttacatctttttccccataaatcttagcaatgacattgcagcgatgatattatcatatctattttatagata

SEQ ID NO: 47635 - DNA, 110 bp, synthetic construct
  source 1..110: mol_type = other DNA
gcaaccctaattaagtcacccacaatgacgttgcaggcatcgtcagcagactgggtgaaggatgagtgtggacttggtttaaacagagggcgggccttttccctgggagt

SEQ ID NO: 47636 - DNA, 110 bp, synthetic construct
  source 1..110: mol_type = other DNA
tgaaggatgagtgtggacttggtttaaacagagggcgggccttttccctgggagtaaaatagtaaagcccttgcccacaaggtccagaaaggagatcctcaatcgcccat

SEQ ID NO: 47637 - DNA, 110 bp, synthetic construct
  source 1..110: mol_type = other DNA
ataaaattcttggcaaaatcctttcctaccctctctcggttctcctagtttaatatgatttgtaaaggctcaactaaagaccatgtgctttttattataagcaacctcaa

SEQ ID NO: 47638 - DNA, 110 bp, synthetic construct
  source 1..110: mol_type = other DNA
tgatttgtaaaggctcaactaaagaccatgtgctttttattataagcaacctcaaattatattacatgaggaataaattccaactcaactaggctatgagagattagcta

SEQ ID NO: 47639 - DNA, 110 bp, synthetic construct
  source 1..110: mol_type = other DNA
aataacaataccagttaacacttaggttgtgctaattatataccagcctctagtctcaattcttcatacatattaactcttttaaccctcaagagctctatgaaataagg

SEQ ID NO: 47640 - DNA, 110 bp, synthetic construct
  source 1..110: mol_type = other DNA
tcaattcttcatacatattaactcttttaaccctcaagagctctatgaaataaggactattattatctccatttaacagatgagaaactgttggaagctgatgaggttgc

SEQ ID NO: 47641 - DNA, 110 bp, synthetic construct
  source 1..110: mol_type = other DNA
tctgggtgctgggttcggaaactggggtcatccgattcagattcgttcacacccgggagaggaagctgtagaagccccagactggggagggaagctgccatttctggcga

SEQ ID NO: 47642 - DNA, 110 bp, synthetic construct
  source 1..110: mol_type = other DNA
ggagaggaagctgtagaagccccagactggggagggaagctgccatttctggcgaggaggggctggctgagcagctgcccagagccggcctgagagaagctggccgcgtt

SEQ ID NO: 47643 - DNA, 110 bp, synthetic construct
  source 1..110: mol_type = other DNA
tccaagcatgagaggcagctccattccacctgtcactcctgcctcccccgctcctctggaccccgggctccatctcaggcggggctctcagggacccaacaagaaagcag

SEQ ID NO: 47644 - DNA, 110 bp, synthetic construct
  source 1..110: mol_type = other DNA
ctggaccccgggctccatctcaggcggggctctcagggacccaacaagaaagcagcctcgctgggtgagtctgcagctcttctcagggccttggctcccgtaacccccgc

SEQ ID NO: 47645 - DNA, 110 bp, synthetic construct
  source 1..110: mol_type = other DNA
gtggctccctgagggggcccgggagggtttcagtttgagggaatgatgtgctgagcgctggagcagaagtctctaataaatggctggcgtgggtctctggacatcaaaca

SEQ ID NO: 47646 - DNA, 110 bp, synthetic construct
  source 1..110: mol_type = other DNA
cgctggagcagaagtctctaataaatggctggcgtgggtctctggacatcaaacagttcttagaaataatattttgaggagttaagtgtcagcgaatggagacacatgga

SEQ ID NO: 47647 - DNA, 110 bp, synthetic construct
  source 1..110: mol_type = other DNA
gccttcaggagctcctggtctcacagcaaaagccccaccgaagcttccattcattcctttcgccctttattcactcactggttcatgtgaacattgaaagagagctgggt

SEQ ID NO: 47648 - DNA, 110 bp, synthetic construct
  source 1..110: mol_type = other DNA
cctttcgccctttattcactcactggttcatgtgaacattgaaagagagctgggttgtttcagattttctcatctcctttccctttttttttttttttttttttttgtct

SEQ ID NO: 47649 - DNA, 110 bp, synthetic construct
  source 1..110: mol_type = other DNA
ctacaagatgaacaaggaaggtaattgccttgctcttccgacactcccattccttccaggagtgagtcctgacaaccaggggcgatgtggcccatccctccccctgggac

SEQ ID NO: 47650 - DNA, 110 bp, synthetic construct
  source 1..110: mol_type = other DNA
ccaggagtgagtcctgacaaccaggggcgatgtggcccatccctccccctgggacatttggggttgtcccaactgggaagagggtgttgcgggcatcagctcgggcgtgg

SEQ ID NO: 47651 - DNA, 110 bp, synthetic construct
  source 1..110: mol_type = other DNA
gctgaatgcaaattagcataatttcattaccgagggacccgtgaaaaggttcaattatagagcaatctcattaataccagggcttgttaaactaatagaaagagacaggc

SEQ ID NO: 47652 - DNA, 110 bp, synthetic construct
  source 1..110: mol_type = other DNA
tatagagcaatctcattaataccagggcttgttaaactaatagaaagagacaggccctgcagctccgagaggtagacatgtgctcggaatgcaattactactggaacccc

SEQ ID NO: 47653 - DNA, 110 bp, synthetic construct
  source 1..110: mol_type = other DNA
ctgcagtatatggaagttcctggactacgggttgaattggagcagcagctgccggcctctgccacagccacagccctgctggatcctggcagtatctgtgactgacactg

SEQ ID NO: 47654 - DNA, 110 bp, synthetic construct; identical to SEQ ID NO: 47653
  source 1..110: mol_type = other DNA

SEQ ID NO: 47655 - DNA, 110 bp, synthetic construct
  source 1..110: mol_type = other DNA
gccaggcgctgctcctgggcttagggtccgtggtcacttaccccacaccactaaagggagtgaagggggcagctatggcttggtaaatgattccttttcccacttgcaca

SEQ ID NO: 47656 - DNA, 110 bp, synthetic construct
  source 1..110: mol_type = other DNA
gggagtgaagggggcagctatggcttggtaaatgattccttttcccacttgcacaaaacggagtttttgcaagccttaacccacatgcaaatgctttctgccttttgctg

SEQ ID NO: 47657 - DNA, 110 bp, synthetic construct; identical to SEQ ID NO: 47655
  source 1..110: mol_type = other DNA

SEQ ID NO: 47658 - DNA, 110 bp, synthetic construct; identical to SEQ ID NO: 47656
  source 1..110: mol_type = other DNA

SEQ ID NO: 47659 - DNA, 110 bp, synthetic construct
  source 1..110: mol_type = other DNA
aatcctcaccagccacacacacccacccccacacgacccctgcacccccagaatcctacctaccccaggaactgcagggaggcgttggctctgagtccctgggccagcac

SEQ ID NO: 47660 - DNA, 110 bp, synthetic construct
  source 1..110: mol_type = other DNA
ctacctaccccaggaactgcagggaggcgttggctctgagtccctgggccagcacctgggctcccacggcagtgaagtggttgtttcccagcctggaagggaagacagag

SEQ ID NO: 47661 - DNA, 110 bp, synthetic construct
  source 1..110: mol_type = other DNA
ccctgtacccatgtcccagggattccaacctgagcttgcgtcctggacttgagggtggctttgcaggaaggtggatggcaggcagggagtgggatggtggggcttagcag

SEQ ID NO: 47662 - DNA, 110 bp, synthetic construct
  source 1..110: mol_type = other DNA
tggctttgcaggaaggtggatggcaggcagggagtgggatggtggggcttagcagagaggggtattactagtagtatttttaaggccgcatcgtcagtatgaggctgtgg

SEQ ID NO: 47663 - DNA, 110 bp, synthetic construct
  source 1..110: mol_type = other DNA
gggtctggagcagctgcttttgggtccctgtgagctgatgaacaagcagaaagaagcaggagtagggacagtcagagagaagaagagatggtaaaccaggcagagagaga

SEQ ID NO: 47664 - DNA, 110 bp, synthetic construct
  source 1..110: mol_type = other DNA
gcaggagtagggacagtcagagagaagaagagatggtaaaccaggcagagagagaggtgaaggtaggcagataaactgtcttggtccctgatacagcctgttcccacctt

SEQ ID NO: 47665 - DNA, 110 bp, synthetic construct
  source 1..110: mol_type = other DNA
atcagagagattctgtcctgatacaaatacagtttgagcacctggaactacctgtgcctgaaacccattcttctggatggttccatttgaatagggattctgtgattata

SEQ ID NO: 47666 - DNA, 110 bp, synthetic construct
  source 1..110: mol_type = other DNA
gcctgaaacccattcttctggatggttccatttgaatagggattctgtgattataaacctaaagaaacttgattgatgcccctaggactcaaggctcctaacaatcaaac

SEQ ID NO: 47667 - DNA, 110 bp, synthetic construct
  source 1..110: mol_type = other DNA
cagatttgttgactaccaatgttccaggccctgttctaaacccttgacacatattaactcatttatgcctcatgacaagcctatgagctaagtacaattattagtcccat

SEQ ID NO: 47668 - DNA, 110 bp, synthetic construct
  source 1..110: mol_type = other DNA
ttctcatggacggtgtgaggcagggatcacgcttcttttttccagatggatatgtaattatctcagcagctttcagtgaagctaccaccctggcctcaagagtttcagtg

SEQ ID NO: 47669 - DNA, 110 bp, synthetic construct
  source 1..110: mol_type = other DNA
ctctttgcctggcaacctctcatccaaaacttagcttaggagtttcctggtcctcagcgggttaaggatctggcattgtcactgctgtgctacaggttctgtccttgggc

SEQ ID NO: 47670 - DNA, 110 bp, synthetic construct
  source 1..110: mol_type = other DNA
ctgaaggaagcagcgggcaggtttgggcccacctggaagccacctgtgagaggtgtggctgggaggggcagtggttaccttgataggcggaccggctccgcttttaaaac

SEQ ID NO: 47671 - DNA, 110 bp, synthetic construct
  source 1..110: mol_type = other DNA
tggctgggaggggcagtggttaccttgataggcggaccggctccgcttttaaaaccgtgtctctttatttgtccatctgttcagtcactcattcattcagccgatgagtg

SEQ ID NO: 47672 - DNA, 110 bp, synthetic construct
  source 1..110: mol_type = other DNA
tgctgagccacgacaggaacttctacttgatggctatttactgaatgcctcccagagccaggccagcaggtaaagatacaacggtgaacccagctgattagctcctagcc

SEQ ID NO: 47673 - DNA, 110 bp, synthetic construct
  source 1..110: mol_type = other DNA
agccaggccagcaggtaaagatacaacggtgaacccagctgattagctcctagcccccatccctacagcttagatgctcatgaggaagacagtgacaagcatggcaaggg

SEQ ID NO: 47674 - DNA, 110 bp, synthetic construct
  source 1..110: mol_type = other DNA
tcttctggccccagggcctttaccaagtgtccctagagcaggctctcttgtcctcctctagtccaggggcaatgtgggcagagaacatccgggatgcacagatgcccagc

SEQ ID NO: 47675 - DNA, 110 bp, synthetic construct
  source 1..110: mol_type = other DNA
ctctagtccaggggcaatgtgggcagagaacatccgggatgcacagatgcccagccacagccaccagcatggctggccttgatcccaggaaggatgtgcagggatggttg

SEQ ID NO: 47676 - DNA, 110 bp, synthetic construct
  source 1..110: mol_type = other DNA
gagtaatgctgctatgagcatgggtatatgactctgcttccagttcctttgaatgcatccccagaagcagagctgctgcatcatggggtaatactcttttctatagtggc

SEQ ID NO: 47677 - DNA, 110 bp, synthetic construct
  source 1..110: mol_type = other DNA
catccccagaagcagagctgctgcatcatggggtaatactcttttctatagtggctggaccattttatattcccgcaaatggtgcacaagggttcccctttctctacatc

SEQ ID NO: 47678 - DNA, 110 bp, synthetic construct
  source 1..110: mol_type = other DNA
actagagcgcctaacctgtaaagggcagatctgcctgtgagacagttgccctgggctcttcatcgcagaaggaatccagaagagtggaaagggggctcagctcagtgccc

SEQ ID NO: 47679 - DNA, 110 bp, synthetic construct
  source 1..110: mol_type = other DNA
ctcttcatcgcagaaggaatccagaagagtggaaagggggctcagctcagtgcccaggtcccgcctgggtcacatggacgtgtctaaggagggccaggcctcctggtttg

SEQ ID NO: 47680 - DNA, 110 bp, synthetic construct
  source 1..110: mol_type = other DNA
acaggttgacctggaattggcttcaggcgatgcatttctaactttgaagtgcacatggatcacttgggatcttgtgcaagtgtaggttataattttgcaggtctgggagg

SEQ ID NO: 47681 - DNA, 110 bp, synthetic construct
  source 1..110: mol_type = other DNA
tggatcacttgggatcttgtgcaagtgtaggttataattttgcaggtctgggagggagtgggcctgagtttctgaatttgttcccagctcccaggggatggagatgctgc

SEQ ID NO: 47682 - DNA, 110 bp, synthetic construct
  source 1..110: mol_type = other DNA
ctgcctgcaggcctggagcagctgaccgaggtccggttttgtaacaaccagactgcgtgcatcctccttgctccccggagacgtcagagttgacagcctggctgaggggg

SEQ ID NO: 47683 - DNA, 110 bp, synthetic construct
  source 1..110: mol_type = other DNA
cgtgcatcctccttgctccccggagacgtcagagttgacagcctggctgagggggtgtctctgagcctgggtcttggtgtcggtgtatctaatctgctgttgctgagagt

SEQ ID NO: 47684 - DNA, 110 bp, synthetic construct
  source 1..110: mol_type = other DNA
aaaagagccccacacaatgtgacccccaaaaaagagctgcggctgtgggttgagggtggtcctggccatacctcatgtcccagcctgagctggaggccactttgtcaatc

SEQ ID NO: 47685 - DNA, 110 bp, synthetic construct; identical to SEQ ID NO: 47684
  source 1..110: mol_type = other DNA

SEQ ID NO: 47686 - DNA, 110 bp, synthetic construct
  source 1..110: mol_type = other DNA
gtgccatgtgcctgggtgcaggtgtgcggacctagagactggtctctgcgcacagtgttaccaggtgccctagggacccagccgaggctcggaagacaccctaagtgaag

SEQ ID NO: 47687 - DNA, 110 bp, synthetic construct
  source 1..110: mol_type = other DNA
tgttaccaggtgccctagggacccagccgaggctcggaagacaccctaagtgaagaggggactctctctccctcctctgaaggtgggagctctttggggagcataaaagc

SEQ ID NO: 47688 - DNA, 110 bp, synthetic construct
  source 1..110: mol_type = other DNA
atttattcttttcgacagtttaaaatatccctcttttaccctattgtttcttttgacttaaatccacctcatcagtttgcatttcttgttatgtctttgcatagcctttt

SEQ ID NO: 47689 - DNA, 110 bp, synthetic construct; identical to SEQ ID NO: 47688
  source 1..110: mol_type = other DNA

SEQ ID NO: 47690 - DNA, 110 bp, synthetic construct
  source 1..110: mol_type = other DNA
ctacctgaactctgattgtatcagcaacctccggctacttccctgccacgcaccctgtaatataagcctgtaattttcaccatgtagccagggcaggctttatgggttgg

SEQ ID NO: 47691 - DNA, 110 bp, synthetic construct
  source 1..110: mol_type = other DNA
catttcccaggggcccccaagagccatgtctgtgttgtggcttttgcaacttaactggctgaagtcagagtgcttggaggctcaggaatggaccaaatgccttgaggcaa

SEQ ID NO: 47692 - DNA, 110 bp, synthetic construct
  source 1..110: mol_type = other DNA
tggctgaagtcagagtgcttggaggctcaggaatggaccaaatgccttgaggcaagtgggagcctgcaagcagagccctcaaccctgctgacaaagtaaggcattattaa

SEQ ID NO: 47693 - DNA, 110 bp, synthetic construct
  source 1..110: mol_type = other DNA
acagctttgcgctagggctacacggggtgatggtgagcagagcatcagctccatttcagtacacgttcccatcagccaggtatcttgtctcaggtcatgatctgcacagt

SEQ ID NO: 47694 - DNA, 110 bp, synthetic construct
  source 1..110: mol_type = other DNA
tcagtacacgttcccatcagccaggtatcttgtctcaggtcatgatctgcacagtcacaccatacgtagggcccagtctaaatcgatgcaaataaaggagaaagaatatc

SEQ ID NO: 47695 - DNA, 110 bp, synthetic construct
  source 1..110: mol_type = other DNA
agacaagattcatctcatgatcacactataataacttaaaacacatctaattgcttattattaaatacgtggaaataagtgataagacctcatgtggcaatttgctctgt

SEQ ID NO: 47696 - DNA, 110 bp, synthetic construct; identical to SEQ ID NO: 47695
  source 1..110: mol_type = other DNA

SEQ ID NO: 47697 - DNA, 110 bp, synthetic construct
  source 1..110: mol_type = other DNA
aacacatatgaataaagtcccccatactcttaagagacaacactcagccaagcatcacccatcacctcaagttgggaatctgcgttgatggggccagaaagaaggcaact

SEQ ID NO: 47698 - DNA, 110 bp, synthetic construct
  source 1..110: mol_type = other DNA
cacccatcacctcaagttgggaatctgcgttgatggggccagaaagaaggcaactcagagttctcagcaatcccctccagggaggtacctagccaggccgggtgaaggtg

SEQ ID NO: 47699 - DNA, 110 bp, synthetic construct
  source 1..110: mol_type = other DNA
caatgccagatccccaacccactgaccaaggccaggggtcaaaactgcatcctcggagttcccatcttggcttagtggttaatgaacctgactaatattcatccggatgt

SEQ ID NO: 47700 - DNA, 110 bp, synthetic construct; identical to SEQ ID NO: 47699
  source 1..110: mol_type = other DNA

SEQ ID NO: 47701 - DNA, 110 bp, synthetic construct
  source 1..110: mol_type = other DNA
acccagtggttctaacatgagagaagatgggactgaagatgcaggatttactttcattgcatcatagatgacccctgaagcaatgaagacagattatgctgatctcaata

SEQ ID NO: 47702 - DNA, 110 bp, synthetic construct
  source 1..110: mol_type = other DNA
attgcatcatagatgacccctgaagcaatgaagacagattatgctgatctcaataaacatcacagggattttctctttcctttctttctgtctttctaatattcctgggt

SEQ ID NO: 47703 - DNA, 110 bp, synthetic construct
  source 1..110: mol_type = other DNA
caggaggagtctccttgctacgggctttccaggaaacgcccctgccctgagataaaggcatccgtgtggtcctcagttctgcaactctaagacttagaggagaagttcgt

SEQ ID NO: 47704 - DNA, 110 bp, synthetic construct
  source 1..110: mol_type = other DNA
aggcatccgtgtggtcctcagttctgcaactctaagacttagaggagaagttcgtggatccttccatggatgaacctcgggtgacccaggagcctcctaaattggatgca

SEQ ID NO: 47705 - DNA, 110 bp, synthetic construct
  source 1..110: mol_type = other DNA
aagaagcacccaaaaacacgctcgacattagtcatcaggcaactgtaaatcaaaaccgcaaggagataccgcttcacatccataagggcagctataattattttttttta

SEQ ID NO: 47706 - DNA, 110 bp, synthetic construct
  source 1..110: mol_type = other DNA
ccgcaaggagataccgcttcacatccataagggcagctataattatttttttttaacctgaaaataaaagttggtgaggatatagagacattggagcccttgtacattgc

SEQ ID NO: 47707 - DNA, 110 bp, synthetic construct
  source 1..110: mol_type = other DNA
ttgaaatggaaaggttgtctgtatcttctgggtgggctcgatttgatcatctgagtccttcaaagtagacgtaagtacagaacagtaagggctggagaatgagatgggtg

SEQ ID NO: 47708 - DNA, 110 bp, synthetic construct
  source 1..110: mol_type = other DNA
tccttcaaagtagacgtaagtacagaacagtaagggctggagaatgagatgggtgaaaatgaaggaaggatgtgaagggttcaaacactcgctcagcagcctgaaggcgc

SEQ ID NO: 47709 - DNA, 110 bp, synthetic construct
  source 1..110: mol_type = other DNA
gagctcttatgggctttaacacaagctattaaaattatatttacaatttgtaatataaaaagtttgttataggaattcccgtcgtgattcagtggaaacgaaatcagact

SEQ ID NO: 47710 - DNA, 110 bp, synthetic construct; identical to SEQ ID NO: 47709
  source 1..110: mol_type = other DNA

SEQ ID NO: 47711 - DNA, 110 bp, synthetic construct
  source 1..110: mol_type = other DNA
taagtaaacatttttatagttagattccaaatctttaaagttcagaatggtaagtaggaggcataggtacatacgaaggccgcagaattgaaaaaggagaccaatcctac

SEQ ID NO: 47712 - DNA, 110 bp, synthetic construct
  source 1..110: mol_type = other DNA
aggaggcataggtacatacgaaggccgcagaattgaaaaaggagaccaatcctactgtacagcacagataactacatccaattcttgtgatggaacatgatgaaagataa

SEQ ID NO: 47713 - DNA, 110 bp, synthetic construct
  source 1..110: mol_type = other DNA
ctttccctggtgcccatttgcaacattgaaataatcgttgttttgcgctttcttttctgcaggaacataaagccagctgataaatgcaagagaagggggccatcaatata

SEQ ID NO: 47714 - DNA, 110 bp, synthetic construct
  source 1..110: mol_type = other DNA
tctgcaggaacataaagccagctgataaatgcaagagaagggggccatcaatatagacactgcaggacgattttatagatcctcggcacaaatacggcattctctatgtt

SEQ ID NO: 47715 - DNA, 110 bp, synthetic construct
  source 1..110: mol_type = other DNA
tcatgtggattttatagtcagcaaaaataagaggctccatgctatataaacacccacatcctcttaaactctaaacatataacgagctcattttcctctgttcactctca

SEQ ID NO: 47716 - DNA, 110 bp, synthetic construct
  source 1..110: mol_type = other DNA
acatcctcttaaactctaaacatataacgagctcattttcctctgttcactctcaatgttgaaaaaccttaagatgctttggtcaaaaagccttataccaaaagccctgt

SEQ ID NO: 47717 - DNA, 110 bp, synthetic construct
  source 1..110: mol_type = other DNA
aaattgcacttcggagacaggctgtgtaaggcaaacagacccgcagtgaaagcttcctggctagacttccaagcccaggactaataaataaccctgaaatatacaatctg

SEQ ID NO: 47718 - DNA, 110 bp, synthetic construct
  source 1..110: mol_type = other DNA
aactcaattcctctttttctcccatcccacatctaattcatgagcaaatcatgctggctttgctttcataatccatccatggtaccaacaggtttcatcacacctagtgc

SEQ ID NO: 47719 - DNA, 110 bp, synthetic construct
  source 1..110: mol_type = other DNA
tggctacagttccaattcaacctctagtctgggaacctccatatgctgcaggttcccagatgaggtgggacaaaaagacaagaaaaaaaaaaaagggcagactctaagaa

SEQ ID NO: 47720 - DNA, 110 bp, synthetic construct; identical to SEQ ID NO: 47719
  source 1..110: mol_type = other DNA

SEQ ID NO: 47721 - DNA, 110 bp, synthetic construct
  source 1..110: mol_type = other DNA
tgagtaaaaacatttaggcaattagtacatatctattacttttcctgatatttaaagtgaacctggtgatcccaaataattcttctattttctaccaggaagggcatatt

SEQ ID NO: 47722 - DNA, 110 bp, synthetic construct; identical to SEQ ID NO: 47721
  source 1..110: mol_type = other DNA

SEQ ID NO: 47723 - DNA, 110 bp, synthetic construct
  source 1..110: mol_type = other DNA
taccaagggattttttctccacatccccactagcatttgttatctgtcactttgatgatagtcattctaacaggtatgaggtggctatctcattgtggttttgattgtca

SEQ ID NO: 47724 - DNA, 110 bp, synthetic construct
  source 1..110: mol_type = other DNA
gtcactttgatgatagtcattctaacaggtatgaggtggctatctcattgtggttttgattgtcattttaacatgacctgaaaatttctttaatatcacaaatacttttt

SEQ ID NO: 47725 - DNA, 110 bp, synthetic construct
  source 1..110: mol_type = other DNA
tgcagaattgtatcaacagaaagagactagcagtgcttttccctaatacatggggtgaacattaataaatatataaagcaagaagttcccatcatggctcagtggttaac

SEQ ID NO: 47726 - DNA, 110 bp, synthetic construct; identical to SEQ ID NO: 47725
  source 1..110: mol_type = other DNA

SEQ ID NO: 47727 - DNA, 110 bp, synthetic construct
  source 1..110: mol_type = other DNA
aaacccatgttagccaagcttttaaaatgttcttcataagtctaagaaactccttccctcccttccaaataagtgaacatcaaaaagcaagtagaatcccaaagtaagag

SEQ ID NO: 47728 - DNA, 110 bp, synthetic construct
  source 1..110: mol_type = other DNA
ccctcccttccaaataagtgaacatcaaaaagcaagtagaatcccaaagtaagagggatacatcctggtcattttttatatgccatagagtttgaaatagagttctcaag

SEQ ID NO: 47729 - DNA, 110 bp, synthetic construct
  source 1..110: mol_type = other DNA
atgttaatgataattaaaaatacaaccggtgactttatactatatttctttatcttgatactaagcttcaaagcaacctcaatatcactcattaaggagcagcaggtgaa

SEQ ID NO: 47730 - DNA, 110 bp, synthetic construct; identical to SEQ ID NO: 47729
  source 1..110: mol_type = other DNA

SEQ ID NO: 47731 - DNA, 110 bp, synthetic construct
  source 1..110: mol_type = other DNA
gttaaatgacatgaatggatggaaatgagaaagtggagttcaggatgaacaagtgagtggtttgtgatggcaacaacaaaagaatgagttcatgactgtagagagctgga

SEQ ID NO: 47732 - DNA, 110 bp, synthetic construct
  source 1..110: mol_type = other DNA
agtggtttgtgatggcaacaacaaaagaatgagttcatgactgtagagagctggaggggctggagcggtggggcagcgggagtctgagagtaatcagggccattttgccc

SEQ ID NO: 47733 - DNA, 110 bp, synthetic construct
  source 1..110: mol_type = other DNA
actacagccacagggctgtcgctagagctgataccctgcggtgcagggctgctgggcagctgccatacaagtatgagagtctctggctccatacatgttgctgcagatgg

SEQ ID NO: 47734 - DNA, 110 bp, synthetic construct; identical to SEQ ID NO: 47733
  source 1..110: mol_type = other DNA

SEQ ID NO: 47735 - DNA, 110 bp, synthetic construct
  source 1..110: mol_type = other DNA
aacaacctctccattttttagtgggggaaggaaaaaagggataagaatattaaacctagattaattttcaaattacatttgagagcctgataaataagcaaaatctagga

SEQ ID NO: 47736 - DNA, 110 bp, synthetic construct; identical to SEQ ID NO: 47735
  source 1..110: mol_type = other DNA

SEQ ID NO: 47737 - DNA, 110 bp, synthetic construct
  source 1..110: mol_type = other DNA
atcgaacccacagcctcatggttcctgattggatttgtttactctgtgccacaatgggaactcacagtagtgcttttttttttttaatatgatttttatttattccatta

SEQ ID NO: 47738 - DNA, 110 bp, synthetic construct; identical to SEQ ID NO: 47737
  source 1..110: mol_type = other DNA

SEQ ID NO: 47739 - DNA, 110 bp, synthetic construct
  source 1..110: mol_type = other DNA
gtatatatgttgtatataatatataatgcacatgaacacatacaaaaaattcttgaaattccattgtggtgaggtggattaaggatctggtgttgttactgcagcggctc

SEQ ID NO: 47740 - DNA, 110 bp, synthetic construct; identical to SEQ ID NO: 47739
  source 1..110: mol_type = other DNA

SEQ ID NO: 47741 - DNA, 110 bp, synthetic construct
  source 1..110: mol_type = other DNA
ttcccctagaagtggctcaggtctgtgatgctctcaaggctcctaaacttctttgccatctccatgcttgccccttttcacctagacttctctggcaattcatcccaaag

SEQ ID NO: 47742 - DNA, 110 bp, synthetic construct
  source 1..110: mol_type = other DNA
ccatctccatgcttgccccttttcacctagacttctctggcaattcatcccaaagctcttctattttaattctgggtaaaatatctactcttcttcagcctaggaaggtc

SEQ ID NO: 47743 - DNA, 110 bp, synthetic construct
  source 1..110: mol_type = other DNA
ctgattttgtgtttctttgaccaataagataatttctggccctgaaacttgagggtatttttattcttttactctctaatcccacacctgaatgaggtaaaatgagcagg

SEQ ID NO: 47744 - DNA, 110 bp, synthetic construct
  source 1..110: mol_type = other DNA
tatttttattcttttactctctaatcccacacctgaatgaggtaaaatgagcaggcagataagagctgtactgaaaaactggaccctataaagagtcagtgatattaagc

SEQ ID NO: 47745 - DNA, 110 bp, synthetic construct
  source 1..110: mol_type = other DNA
ttagatagcctatttactgatggttggggctgtgatcccacctggattatcatttggcctggggatattcaatactgatgggtgaggctagattttcccaaaatgaccag

SEQ ID NO: 47746 - DNA, 110 bp, synthetic construct
  source 1..110: mol_type = other DNA
ggggctgtgatcccacctggattatcatttggcctggggatattcaatactgatgggtgaggctagattttcccaaaatgaccagctccagaggaacacacactgatgaa

SEQ ID NO: 47747 - DNA, 110 bp, synthetic construct
  source 1..110: mol_type = other DNA
tgtttttgaatgataattttgtcaaatagagaatttttcttggtcgatatcctttcagctctttgaatatgtaattctgtggttgctttctggcctctatggtttttgat

SEQ ID NO: 47748 - DNA, 110 bp, synthetic construct
  source 1..110: mol_type = other DNA
cagctctttgaatatgtaattctgtggttgctttctggcctctatggtttttgatgagaaatcaactgttaatcttattgaagatcacttgtatgtgacaagtcatcacc

SEQ ID NO: 47749 - DNA, 110 bp, synthetic construct
  source 1..110: mol_type = other DNA
cactgagtaaggccagggattgaacctgcatctttggggagactatgttgggtctttaacacagccacaatgggaatttcccgttgcctgttttaaaattatatcttttt

SEQ ID NO: 47750 - DNA, 110 bp, synthetic construct
  source 1..110: mol_type = other DNA
gggattgaacctgcatctttggggagactatgttgggtctttaacacagccacaatgggaatttcccgttgcctgttttaaaattatatctttttttttttttttttttt

SEQ ID NO: 47751 - DNA, 110 bp, synthetic construct
  source 1..110: mol_type = other DNA
gtggaagctgaatattccagcactgattctaaaaaggacatattggctttagcatttctgataagttttagtggctgggctgagtatgcccggactgctcttccagcaaa

SEQ ID NO: 47752 - DNA, 110 bp, synthetic construct
  source 1..110: mol_type = other DNA
ttctgataagttttagtggctgggctgagtatgcccggactgctcttccagcaaaagagagaagtctagatgagcattctctcctgagccatccctacctactcttccat

SEQ ID NO: 47753 - DNA, 110 bp, synthetic construct
  source 1..110: mol_type = other DNA
acttccttatggacaaccagcctaaatttacccttgatgtgtttgtgggggagggtgagcatgtcttcttactcttccaccaccttgcctccccataaatttacccttca

SEQ ID NO: 47754 - DNA, 110 bp, synthetic construct
  source 1..110: mol_type = other DNA
tgagcatgtcttcttactcttccaccaccttgcctccccataaatttacccttcatatcagctatcctagcttaattcttaccttggtcctgttgactattctactctaa

SEQ ID NO: 47755 - DNA, 110 bp, synthetic construct
  source 1..110: mol_type = other DNA
ccagaatgcagctctcagaacctcgtttggagccgtgggtgagatggggcctcggtgctgaattccctacctggctcagggaggattgctcgtgcatgcgtcctgaaggc

SEQ ID NO: 47756 - DNA, 110 bp, synthetic construct
  source 1..110: mol_type = other DNA
tgctgaattccctacctggctcagggaggattgctcgtgcatgcgtcctgaaggcattttccggccaactcttgctttgactcgaaggaaacacgtttggagttggtttc

SEQ ID NO: 47757 - DNA, 110 bp, synthetic construct
  source 1..110: mol_type = other DNA
attttgcctggaggctgcttccagatgcttcttttgtgggctttgtgagatagctatcaggccctgatcacccttgctcactatcggctgctgtttcccacttgtgcaaa

SEQ ID NO: 47758 - DNA, 110 bp, synthetic construct
  source 1..110: mol_type = other DNA
atcaggccctgatcacccttgctcactatcggctgctgtttcccacttgtgcaaaaaaaggcattttcaagcccaatcaggctcatgcacacaagggaatattttgaata

SEQ ID NO: 47759 - DNA, 110 bp, synthetic construct
  source 1..110: mol_type = other DNA
gtgagataaccatcaggccctgatctccctgtcacgctgtaacttgctgtttaccctcttgtgccaagaagatattttcaggcccaatcaggattatgtgcacaagagaa

SEQ ID NO: 47760 - DNA, 110 bp, synthetic construct
  source 1..110: mol_type = other DNA
ctcttgtgccaagaagatattttcaggcccaatcaggattatgtgcacaagagaacatttttagactggttttcaagcaatggaaaccccctgcacaccagtagggccaa

SEQ ID NO: 47761 - DNA, 110 bp, synthetic construct
  source 1..110: mol_type = other DNA
gaggcctagttgggaaacaggtaagggttgtgttagggagcaaacccatatttggtttggtgttcctacatggagtagaataaactttgcagggatgaagatcccagcct

SEQ ID NO: 47762 - DNA, 110 bp, synthetic construct
  source 1..110: mol_type = other DNA
tttggtgttcctacatggagtagaataaactttgcagggatgaagatcccagcctctcgctttgtggagtatgtaagattgccattaggtgctgattactgtatcttgct

SEQ ID NO: 47763 - DNA, 110 bp, synthetic construct
  source 1..110: mol_type = other DNA
tcatgacaaatcatacttttccactagggagaacatgttggagactatttccagctctctgcaaacaacctgtgcacacagagatttgggcagcccatcggttcattctc

SEQ ID NO: 47764 - DNA, 110 bp, synthetic construct
  source 1..110: mol_type = other DNA
tctctgcaaacaacctgtgcacacagagatttgggcagcccatcggttcattctccctaggcataggagaggcctgggtgggaaaaaggcacaggttgctttcccaagca

SEQ ID NO: 47765 - DNA, 110 bp, synthetic construct
  source 1..110: mol_type = other DNA
cttcatagaagaacaatgttagaaaaactgttttactagctcactcaaaagggcctctgatttcttttggaaagtgttcattgtataagggtgtctcagctgctgatatc

SEQ ID NO: 47766 - DNA, 110 bp, synthetic construct
  source 1..110: mol_type = other DNA
tctgatttcttttggaaagtgttcattgtataagggtgtctcagctgctgatatcagttaagtatttgtattgaggagagtggctatcaatactatacttgcactagggt

SEQ ID NO: 47767 - DNA, 110 bp, synthetic construct; identical to SEQ ID NO: 47765
  source 1..110: mol_type = other DNA

SEQ ID NO: 47768 - DNA, 110 bp, synthetic construct; identical to SEQ ID NO: 47766
  source 1..110: mol_type = other DNA

SEQ ID NO: 47769 - DNA, 110 bp, synthetic construct
  source 1..110: mol_type = other DNA
aagacttgagaaatagaagtcagtggtgtaagttccagtccaaattccaggagtctagagaccaaagagaagccaatgctcacatctgagggcaggaaaagacctctctc

SEQ ID NO: 47770 - DNA, 110 bp, synthetic construct
  source 1..110: mol_type = other DNA
taaaagttaaatttgaattatcatgtgtgattttttctaaaatacgtgggggacgaaacagctactaaaacatttctatgtctgcattgccacagataggcatgttggct

SEQ ID NO: 47771 - DNA, 110 bp, synthetic construct
  source 1..110: mol_type = other DNA
agctcttcctacatgtatcttaggaactgatgccatcttcctgctgttggggacatggctcagagggtcagtgttggaaaatgaaacacatgaacatggggagatctcaa

SEQ ID NO: 47772 - DNA, 110 bp, synthetic construct
  source 1..110: mol_type = other DNA
tatgcaaagcaagtttctcccacagtgccgctgctgctagtacctgggctctaagtgcaggatgtgggcagtgggcttctccagttggagagcatggcggccccaccaca

SEQ ID NO: 47773 - DNA, 110 bp, synthetic construct
  source 1..110: mol_type = other DNA
aagaggagaattgggcagagggaatcactgggccaggatgtaggaccaatgaggggcctcagcccgctctgcagggaggagctctatcactgcaggtctgcaaggatagt

SEQ ID NO: 47774 - DNA, 110 bp, synthetic construct
  source 1..110: mol_type = other DNA
acactcaccaatcagcatatggcatgaatacacgtgaacggtgctcaggagataatagagatggcagaaatggcatgtggctatgttcacaccagatgctaaagccactg

SEQ ID NO: 47775 - DNA, 110 bp, synthetic construct
  source 1..110: mol_type = other DNA
tagagatggcagaaatggcatgtggctatgttcacaccagatgctaaagccactgctgtcttcctgtcaatggttggggcttccttccaggagcagttgcctatatctct

SEQ ID NO: 47776 - DNA, 110 bp, synthetic construct
  source 1..110: mol_type = other DNA
gaaatcattaataggagacttgcctaaaaaaaaaaaaataggtctcagaaggcagtgagaaaacaaagcttgaagataaatagtactggcagcaacaaccttaaagacct

SEQ ID NO: 47777 - DNA, 110 bp, synthetic construct
  source 1..110: mol_type = other DNA
tgagaaaacaaagcttgaagataaatagtactggcagcaacaaccttaaagacctcagcctagtaatgtggagatgacaaggaattcacggcaaaaaagactagtgattt

SEQ ID NO: 47778 - DNA, 110 bp, synthetic construct; identical to SEQ ID NO: 47776
  source 1..110: mol_type = other DNA

SEQ ID NO: 47779 - DNA, 110 bp, synthetic construct; identical to SEQ ID NO: 47777
  source 1..110: mol_type = other DNA

SEQ ID NO: 47780 - DNA, 110 bp, synthetic construct
  source 1..110: mol_type = other DNA
aagtgttcaatagaattggactgaataaacagcttgacagagctgctatacactagtgaaactaaagggatggagcttaagattccccatcaacctctgaagacacatta

SEQ ID NO: 47781 - DNA, 110 bp, synthetic construct
  source 1..110: mol_type = other DNA
gtgaaactaaagggatggagcttaagattccccatcaacctctgaagacacattaccggaaaaggcccaataagttttaaaatgacactacaggcagtgaaagaaaccaa

SEQ ID NO: 47782 - DNA, 110 bp, synthetic construct
  source 1..110: mol_type = other DNA
ctgcaataagtatagggaccgctgcagtggggctttccaagggaggacagagattgcaattaactccaacaatagcctgggcaagcagtagtgaataaccaagcaggagc

SEQ ID NO: 47783 - DNA, 110 bp, synthetic construct
  source 1..110: mol_type = other DNA
gcaattaactccaacaatagcctgggcaagcagtagtgaataaccaagcaggagctgaggggtcagtggattggagaattagtaagaggaaacatctcatgaggggggat

SEQ ID NO: 47784 - DNA, 110 bp, synthetic construct; identical to SEQ ID NO: 47782
  source 1..110: mol_type = other DNA

SEQ ID NO: 47785 - DNA, 110 bp, synthetic construct; identical to SEQ ID NO: 47783
  source 1..110: mol_type = other DNA

SEQ ID NO: 47786 - DNA, 110 bp, synthetic construct
  source 1..110: mol_type = other DNA
gaggacactttctgctcaatagccaggtcttcaatctgtgcataggaggaaaagacattaacaggtagatcctgagagatgggagaaaggataattgatggagcaagatt

SEQ ID NO: 47787 - DNA, 110 bp, synthetic construct
  source 1..110: mol_type = other DNA
cattaacaggtagatcctgagagatgggagaaaggataattgatggagcaagattccagaatatgggaaggataaaggaaaaatgggtaccaaagaaatgaaggttcaag

SEQ ID NO: 47788 - DNA, 110 bp, synthetic construct
  source 1..110: mol_type = other DNA
taaatggtcctgggactgtgattagcagtcatcctgtccctcccacaccaagcattctagatttccctcactcttggccagcccttcagcttgtctaagttgtgtgcctg

SEQ ID NO: 47789 - DNA, 110 bp, synthetic construct
  source 1..110: mol_type = other DNA
tctagatttccctcactcttggccagcccttcagcttgtctaagttgtgtgcctggtaaaagtgaccacaccagcactcctgagagagctaagtccttatctgtctttgg

SEQ ID NO: 47790 - DNA, 110 bp, synthetic construct
  source 1..110: mol_type = other DNA
tggggtgacctggacctgggggctgcttctgcagcccttggaaataaggatataagcctttggatatagtctagcccttggccaaactaaagctgccgtggctagtagag

SEQ ID NO: 47791 - DNA, 110 bp, synthetic construct
  source 1..110: mol_type = other DNA
gcctttggatatagtctagcccttggccaaactaaagctgccgtggctagtagagttcattgtctttcttttcaattataaggacattttctaagtagaacaattaaaac

SEQ ID NO: 47792 - DNA, 110 bp, synthetic construct
  source 1..110: mol_type = other DNA
tttacgtattctacaaaatatgtaacattgaaaacaggcctgcagattgtacaaaatactagttatcttatatcatatgtcacctaatagttatgaagcgggttttgtac

SEQ ID NO: 47793 - DNA, 110 bp, synthetic construct
  source 1..110: mol_type = other DNA
ctgatgcaggggttcagaaatgctggggcatattccaggcacagcaagaagcagaagccttggagttcccattgtggctcagaggttaacgaatccgactaggaacaatg

SEQ ID NO: 47794 - DNA, 110 bp, synthetic construct; identical to SEQ ID NO: 47793
  source 1..110: mol_type = other DNA

SEQ ID NO: 47795 - DNA, 110 bp, synthetic construct
  source 1..110: mol_type = other DNA
ggggcctccaagggaggcagagggggctgttctcactggaagatggagtccagtctacaacctggattggcctgagagcttgcgagaaagaagcaggcaccccgttcagc

SEQ ID NO: 47796 - DNA, 110 bp, synthetic construct
  source 1..110: mol_type = other DNA
tacaacctggattggcctgagagcttgcgagaaagaagcaggcaccccgttcagctctgagaattgcatggggcacgctcaagcagccagacggtgccagtgcttcagag

SEQ ID NO: 47797 - DNA, 110 bp, synthetic construct
  source 1..110: mol_type = other DNA
tctggagagggtttggggccgggggtcgggggggggctgtgggaaggggccagacatcggctggacgtgggcaggctggtcagtaggctgcacccctgagaggccctctt

SEQ ID NO: 47798 - DNA, 110 bp, synthetic construct
  source 1..110: mol_type = other DNA
atcggctggacgtgggcaggctggtcagtaggctgcacccctgagaggccctcttccttcttctggtttcttttccgatctgtggttatcagggttctaggcccgtgagc

SEQ ID NO: 47799 - DNA, 110 bp, synthetic construct
  source 1..110: mol_type = other DNA
gtgttgcccataatgaatgtaccctttctctccatttctgcatagtattagaaattgcgtttttattatatgagacattggatgcatgccaacaagtttttcttttaact

SEQ ID NO: 47800 - DNA, 110 bp, synthetic construct
  source 1..110: mol_type = other DNA
tgcgtttttattatatgagacattggatgcatgccaacaagtttttcttttaacttgatatttggggctctgatctttgttagagctacagtggcatggatcttgtacag

SEQ ID NO: 47801 - DNA, 110 bp, synthetic construct
  source 1..110: mol_type = other DNA
gctggacatggcagttagagcaacgcctaattaggtggcttgcaaaagtttctggggcttcctggtgaggtcgaaggggtccaacaactcctgtttcactttgacggtca

SEQ ID NO: 47802 - DNA, 110 bp, synthetic construct
  source 1..110: mol_type = other DNA
ggcttcctggtgaggtcgaaggggtccaacaactcctgtttcactttgacggtcattgctgttgaaagacctagttctgatatcgacctctccttctagggacacgccca

SEQ ID NO: 47803 - DNA, 110 bp, synthetic construct
  source 1..110: mol_type = other DNA
ttctcagatactttcttggccgtatgaggtcaaatccaagactatttattgcaatgcttttgtaggaacgaaaaattgaaaccaatctacacgtccattcatccaggagc

SEQ ID NO: 47804 - DNA, 110 bp, synthetic construct
  source 1..110: mol_type = other DNA
gcttttgtaggaacgaaaaattgaaaccaatctacacgtccattcatccaggagcagccaaataaacctggatgcggccatactgaagagtgcgtgtagcaattagcaag

SEQ ID NO: 47805 - DNA, 110 bp, synthetic construct
  source 1..110: mol_type = other DNA
cacgaccttcttacgtgtcagagatcaaaatgcctcttagagactgtatcactgctatcttttaagcatttttctcaccgacggaatttcatgtaagctgtatttctagt

SEQ ID NO: 47806 - DNA, 110 bp, synthetic construct
  source 1..110: mol_type = other DNA
tatcttttaagcatttttctcaccgacggaatttcatgtaagctgtatttctagtcaaatatcagttcttatttgattgctgtcattttactttcaaggcaaagatgttg

SEQ ID NO: 47807 - DNA, 110 bp, synthetic construct
  source 1..110: mol_type = other DNA
aagttcatttcttgctcacaatccagtgtgcgttagacagctctcctggaaaatttttcccagcagggatacagcgagtcaggctcctcccctgttaatgtcgtgactgt

SEQ ID NO: 47808 - DNA, 110 bp, synthetic construct
  source 1..110: mol_type = other DNA
tttcccagcagggatacagcgagtcaggctcctcccctgttaatgtcgtgactgtctcgaaatatttctcaggcagccaggaggatggagggaagagagagcgacctagg

SEQ ID NO: 47809 - DNA, 110 bp, synthetic construct
  source 1..110: mol_type = other DNA
cttccggtgggcacccggggcttgaatgatagattttaatgccaaaagaaaaaagaaagaaaagagaagctgtcttcaagtgttaaatgctatgtgcataaatgttatca

SEQ ID NO: 47810 - DNA, 110 bp, synthetic construct
  source 1..110: mol_type = other DNA
aaagaaaagagaagctgtcttcaagtgttaaatgctatgtgcataaatgttatcaaaacggtgaagaatagcccacatgtgctttaagcgaaaatcacctttcccaagtt

SEQ ID NO: 47811 - DNA, 110 bp, synthetic construct
  source 1..110: mol_type = other DNA
caactccagatacgccactttctatcgagtctctaatacgttttccaatttctccaggatattttagcctccgaaaaggcaaggatgaacttcctaatctgtgaatattt

SEQ ID NO: 47812 - DNA, 110 bp, synthetic construct
  source 1..110: mol_type = other DNA
aggatattttagcctccgaaaaggcaaggatgaacttcctaatctgtgaatatttttgtgactgaaatgagccccccaaattgatgtctggatagttaagtggggggggt

SEQ ID NO: 47813 - DNA, 110 bp, synthetic construct
  source 1..110: mol_type = other DNA
gtttgagcctgacagcaaaatggaagaggaataaaactgaacagggaaagacagaattgcctctacatagtagacttaaagcttgagctcagtatgaggttaaagatcaa

SEQ ID NO: 47814 - DNA, 110 bp, synthetic construct
  source 1..110: mol_type = other DNA
attgcctctacatagtagacttaaagcttgagctcagtatgaggttaaagatcaaagatcactcgaggtattaggttctcagccttaaccaaggcttagacgagagggag

SEQ ID NO: 47815 - DNA, 110 bp, synthetic construct
  source 1..110: mol_type = other DNA
tggaggaatgaatcaacaagttgttagctgccagttgaaaagcaaaatattgagtccaagtagcttgataatattccttctctttctctatgcgccaaagcccttgtcct

SEQ ID NO: 47816 - DNA, 110 bp, synthetic construct
  source 1..110: mol_type = other DNA
ccaagtagcttgataatattccttctctttctctatgcgccaaagcccttgtcctacatttgggaggaaggcttgtcgtacttgggggattaagaactagagggggtttt

SEQ ID NO: 47817 - DNA, 110 bp, synthetic construct
  source 1..110: mol_type = other DNA
tgggctgcctgtgatgcttggtgtctggagcgtcctggatgcctggtctgggaaaagcctttacacgaggcaggtagtgagacctcacccctgatggaaactcacactcc

SEQ ID NO: 47818 - DNA, 110 bp, synthetic construct
  source 1..110: mol_type = other DNA
agcctttacacgaggcaggtagtgagacctcacccctgatggaaactcacactcctccaagagccttggcatgagcagcagctccccatctgcaaagcggtccacacaca

SEQ ID NO: 47819 - DNA, 110 bp, synthetic construct
  source 1..110: mol_type = other DNA
gtctctgagcttgcactatggccaagccgaggtctctgagcccagccaaaggcctgcccacccctctctatgctgtgggcctttgggaaggctgccccctgcatctgctg

SEQ ID NO: 47820 - DNA, 110 bp, synthetic construct
  source 1..110: mol_type = other DNA
gcccacccctctctatgctgtgggcctttgggaaggctgccccctgcatctgctggggaaacttgtctggagttagagtcccaggaccaggtcttcagagcctcggcggt

SEQ ID NO: 47821 - DNA, 110 bp, synthetic construct; identical to SEQ ID NO: 47819
  source 1..110: mol_type = other DNA

SEQ ID NO: 47822 - DNA, 110 bp, synthetic construct; identical to SEQ ID NO: 47820
  source 1..110: mol_type = other DNA

SEQ ID NO: 47823 - DNA, 110 bp, synthetic construct
  source 1..110: mol_type = other DNA
gaaagaggccatcggccccatcagaaagggacaatgtagctcctgaccctaccagaccagacacatctctcgttgtcccagtgctgagggcactcagaaagcaagtgctg

SEQ ID NO: 47824 - DNA, 110 bp, synthetic construct
  source 1..110: mol_type = other DNA
atccttaggaatgattgcgcatgtgcagaaatgaattttcaagcccttctaatgctccagtgtgtacagtggctgcaagctatacgcaaaaccaagggtccaacagcaaa

SEQ ID NO: 47825 - DNA, 110 bp, synthetic construct
  source 1..110: mol_type = other DNA
tccagtgtgtacagtggctgcaagctatacgcaaaaccaagggtccaacagcaaaggatgggggggtggctaaactactgggtgaattaatacaagaaaacgctgtgtag

SEQ ID NO: 47826 - DNA, 110 bp, synthetic construct; identical to SEQ ID NO: 47824
  source 1..110: mol_type = other DNA

SEQ ID NO: 47827 - DNA, 110 bp, synthetic construct; identical to SEQ ID NO: 47825
  source 1..110: mol_type = other DNA

SEQ ID NO: 47828 - DNA, 110 bp, synthetic construct
  source 1..110: mol_type = other DNA
aaaagaatgctgggtttttaatgaaagtccaagaagcataaagcatctggagagtgaagctgtggacatggcgggcaggcaaggtgctccttatcccccactcatttagc

SEQ ID NO: 47829 - DNA, 110 bp, synthetic construct
  source 1..110: mol_type = other DNA
gaagctgtggacatggcgggcaggcaaggtgctccttatcccccactcatttagcccatgttgacagggatgacttttttgggtaataaataaaatagatcaacacctaa

SEQ ID NO: 47830 - DNA, 110 bp, synthetic construct
  source 1..110: mol_type = other DNA
ttcatctcctttccggagcccagaaaccctcttacacgcactcccctcttccatagttgccaagcacatcctctgatcctgaagataagcaacctaatccatttaaattc

SEQ ID NO: 47831 - DNA, 110 bp, synthetic construct
  source 1..110: mol_type = other DNA
tagaaaggctttccactgcccaaaagatctccaaaaagcacacattttcagtttgctataatgtcccccaaatgggggcctctgagcacctcttaccccagcacgatgtc

SEQ ID NO: 47832 - DNA, 110 bp, synthetic construct
  source 1..110: mol_type = other DNA
caccatccacctgaaccagcaccactcttggcgctttgggtgtgatcctcccaactggttccttctcaggaagcttgacacctggggtgcccagagcctgattcgtgggc

SEQ ID NO: 47833 - DNA, 110 bp, synthetic construct
  source 1..110: mol_type = other DNA
agacaacagggactcactgacttgtcctctccttggaccacgagcagctcccatccaagccttgctcactgccaagctgagaaagcccagctgaacgggacggaagccca

SEQ ID NO: 47834 - DNA, 110 bp, synthetic construct
  source 1..110: mol_type = other DNA
ggggcaagtgcttcccccaaaagctcaaaggccctcgcctcctcccatggagcctccagggctgttttctgggctgcttggagcccagatttcagagatgaaattcagtt

SEQ ID NO: 47835 - DNA, 110 bp, synthetic construct
  source 1..110: mol_type = other DNA
agatttttgattccgcatttaatagatttacaggaaatctccaggcagtgcagacaaggggctgagtctgtctctcagctggctcaaggcccatcatttgcagggtaact

SEQ ID NO: 47836 - DNA, 110 bp, synthetic construct
  source 1..110: mol_type = other DNA
aaaagaatacataaaatgcctctgcgtctccatcagaagtgttgtacatcttcatatttagtaagaagctatttgctatttcagaatcttcttttcatgttcttttgttt

SEQ ID NO: 47837 - DNA, 110 bp, synthetic construct
  source 1..110: mol_type = other DNA
atgcctctgcgtctccatcagaagtgttgtacatcttcatatttagtaagaagctatttgctatttcagaatcttcttttcatgttcttttgtttttactagtttttttt

SEQ ID NO: 47838 - DNA, 110 bp, synthetic construct
  source 1..110: mol_type = other DNA
aatccataatgacaagagaacagaaaattgtccatcggtgggggagagctttgaaaaaattctaagatgaggtcaagcagatgtaggcatgataataacgacccaccaca

SEQ ID NO: 47839 - DNA, 110 bp, synthetic construct
  source 1..110: mol_type = other DNA
aaaattctaagatgaggtcaagcagatgtaggcatgataataacgacccaccacaggctgctcatcttttctacagaatcccagagaggcacaagagagaagatgcaagg

SEQ ID NO: 47840 - DNA, 110 bp, synthetic construct
  source 1..110: mol_type = other DNA
gtttttttttttcgctttggtttggtttggtttttccccagaagagtgagtgttcaaccaattatcataaggtatctttgcccgccctcagggaaaatcatgtggatttg

SEQ ID NO: 47841 - DNA, 110 bp, synthetic construct
  source 1..110: mol_type = other DNA
aaccaattatcataaggtatctttgcccgccctcagggaaaatcatgtggatttgtctaaacagttttttccccccaattctttaagaccttcagctcctagtgccccca

SEQ ID NO: 47842 - DNA, 110 bp, synthetic construct
  source 1..110: mol_type = other DNA
aatttttacagaaaaggccacttggattgggactgagattacactgaaactgcagatcaatttggtgagagctgatgtcttagaacagggtcttctaaccctgaaacagg

SEQ ID NO: 47843 - DNA, 110 bp, synthetic construct
  source 1..110: mol_type = other DNA
atcaatttggtgagagctgatgtcttagaacagggtcttctaaccctgaaacaggccatgtttctccatttacctaaaaccatttctctcagtacttcattatagttttc

SEQ ID NO: 47844 - DNA, 110 bp, synthetic construct
  source 1..110: mol_type = other DNA
tgagctatggtgttggctgcagatgaggtttggatcccatgttgatgcagctatggtgtaggctggcggttgcagctccaatttgaccccttgcctaggaacttccacat

SEQ ID NO: 47845 - DNA, 110 bp, synthetic construct; identical to SEQ ID NO: 47844
  source 1..110: mol_type = other DNA

SEQ ID NO: 47846 - DNA, 110 bp, synthetic construct
  source 1..110: mol_type = other DNA
tctcccccatccctcacctacagaccattcagctttcaaagtggtctttctgtaacataaatctcacatgtctggtcctgcatgaaacacttcgatagatccctcggttc

SEQ ID NO: 47847 - DNA, 110 bp, synthetic construct
  source 1..110: mol_type = other DNA
gcaatgcccctttggccagtagggattgaggaaattgtgtgcagctctgccctcagagtggcccgtttgccatcagccactgtggtgttgagggggactttgctggggat

SEQ ID NO: 47848 - DNA, 110 bp, synthetic construct
  source 1..110: mol_type = other DNA
ggggagcgggggccgggggaggtggccattctttccgggagctcaggcttggccgttgctgctggtcctggatccacatctggggtcctaaccctaaccttaaccctaac

SEQ ID NO: 47849 - DNA, 110 bp, synthetic construct
  source 1..110: mol_type = other DNA
ctgaggaatcaaataaaacgtgtttgcaaattataaatcactcgaggaggctatttcagacgggtcggaacctgaggctgaagttcacagcggctccttctgggacaggc

SEQ ID NO: 47850 - DNA, 110 bp, synthetic construct
  source 1..110: mol_type = other DNA
ttctggcaaacatgtttctctatttgccttctcatgattggtgcccccagcaggcagctggctgggggctgcccaattagatttaaggaaagtacaacatcctctaacat

SEQ ID NO: 47851 - DNA, 110 bp, synthetic construct
  source 1..110: mol_type = other DNA
cccagccccaggctcaggttccaacacaaacgctgcctctgagcctcagcggggcggggcaggggcgtccatgcacaccccgtgtggggctgaatcagccttggagtctc

SEQ ID NO: 47852 - DNA, 110 bp, synthetic construct
  source 1..110: mol_type = other DNA
ggggcaggggcgtccatgcacaccccgtgtggggctgaatcagccttggagtctctgtggggagcaaaggtttctggggtgaggatgtggctggcacagcctcacaggct

SEQ ID NO: 47853 - DNA, 110 bp, synthetic construct; identical to SEQ ID NO: 47851
  source 1..110: mol_type = other DNA

SEQ ID NO: 47854 - DNA, 110 bp, synthetic construct; identical to SEQ ID NO: 47852
  source 1..110: mol_type = other DNA

SEQ ID NO: 47855 - DNA, 110 bp, synthetic construct
  source 1..110: mol_type = other DNA
tgatgtgtctgtgactgcaaatctcctccaagccccagctggatgataacaccaagttgtgggtcagtgatctgaattcacatagatctgaacacagaacatctgattct

SEQ ID NO: 47856 - DNA, 110 bp, synthetic construct
  source 1..110: mol_type = other DNA
gttgtgggtcagtgatctgaattcacatagatctgaacacagaacatctgattctgtttttcatctgattttcacttggagaatggagtttcttgaggaaggtgggaatt

SEQ ID NO: 47857 - DNA, 110 bp, synthetic construct
  source 1..110: mol_type = other DNA
caccctgggctagaaagtgtttccctccatggtttttctaagggtcacagatacaggagaccctaacaggaagctggtatctcggccacaggtggtgaccaaatgtccct

SEQ ID NO: 47858 - DNA, 110 bp, synthetic construct
  source 1..110: mol_type = other DNA
ggagaccctaacaggaagctggtatctcggccacaggtggtgaccaaatgtcccttcatcccttgggcttgaaagggacacatctaagaaagggtggaggggagttccca

SEQ ID NO: 47859 - DNA, 110 bp, synthetic construct
  source 1..110: mol_type = other DNA
aaggatcaaatggaaggaaacctgtaggcatgagacagagaagctagtgctcacctcccacctggagaaagagctcaggtgagttcaccttgttgcctttcaagggctgg

SEQ ID NO: 47860 - DNA, 110 bp, synthetic construct
  source 1..110: mol_type = other DNA
tcccacctggagaaagagctcaggtgagttcaccttgttgcctttcaagggctggagtctactgatgctatgcggctctttgcctttgttcagctaagccagctcacttt

SEQ ID NO: 47861 - DNA, 110 bp, synthetic construct
  source 1..110: mol_type = other DNA
tttgttacattgttgtttcttgctccctgctatgtttttatgggagatgataggggtctgcagtaaatggtagggatggaggtgaagaggcatggatagatgagagatga

SEQ ID NO: 47862 - DNA, 110 bp, synthetic construct
  source 1..110: mol_type = other DNA
aaatggaagccatttttattaccatcatcgttattattatagccccaagaagaagaggacgggtctgaaataaagaactagctggagagacagaggagaaggaaagcagg

SEQ ID NO: 47863 - DNA, 110 bp, synthetic construct
  source 1..110: mol_type = other DNA
acaagatagaaattaaagagaaaggcaaaaaataagaaaggcttctggaaatcaacaattcaaagactcagtagaagagttttgttttgtttagtttttgctctttgggg

SEQ ID NO: 47864 - DNA, 110 bp, synthetic construct
  source 1..110: mol_type = other DNA
tggctgtgacagcaatggccacctcttcacagctgagacgaagaccaattattggcatcttggtctctactctttgcctttcaggccttcgtcctttgcagcacatgata

SEQ ID NO: 47865 - DNA, 110 bp, synthetic construct
  source 1..110: mol_type = other DNA
gtgaaaagacatgccaaaaaatgagtacatgcaggagtttccactgtggcgcagtgggttaagaatacaactgtagcagcttgggtcactttggaggtgtgggttcaatc

SEQ ID NO: 47866 - DNA, 110 bp, synthetic construct
  source 1..110: mol_type = other DNA
gtggcgcagtgggttaagaatacaactgtagcagcttgggtcactttggaggtgtgggttcaatccctggcccggcgcagtgggttaaaggatccagtgctgccacagct

SEQ ID NO: 47867 - DNA, 110 bp, synthetic construct
  source 1..110: mol_type = other DNA
catccaatccataagaaagccctgcaggtcccacctccagatattgcaagtctgtccctttctttctgtgtccactgtcactaccctggttcagggaatcattcctctcc

SEQ ID NO: 47868 - DNA, 110 bp, synthetic construct
  source 1..110: mol_type = other DNA
gacagttgacaccacttgcgctggccagctgaggcatgtttggatttggcacagggaggatgttttttttggaagcatctctggtcagggagcaggctggggtggtgtca

SEQ ID NO: 47869 - DNA, 110 bp, synthetic construct
  source 1..110: mol_type = other DNA
gccgtagttcgcctctgcacctgagcgccgcccgtcatggcggcctgtcggaagccggttcttctgggacttcgagatgctgctgtgcagggccacccgacggggccggg

SEQ ID NO: 47870 - DNA, 110 bp, synthetic construct
  source 1..110: mol_type = other DNA
cttagaagaaaagtacagataatttaaggtgttcttttatagtttgatgtgtgtaggtgtgggttttctcttatttgtcctgcttggggttcgtattggctcctgaattt

SEQ ID NO: 47871 - DNA, 110 bp, synthetic construct; identical to SEQ ID NO: 47870
  source 1..110: mol_type = other DNA

SEQ ID NO: 47872 - DNA, 110 bp, synthetic construct
  source 1..110: mol_type = other DNA
taggttatccaatttgttggccttcttttattttccttctagcaattgaaatatattattccattctctcctggcttgtaacgtatctgctgattagtttgctaatggcc

SEQ ID NO: 47873 - DNA, 110 bp, synthetic construct
  source 1..110: mol_type = other DNA
ttattccattctctcctggcttgtaacgtatctgctgattagtttgctaatggccttaaatgggttcccttgtaggtgaggattctaaattctcctcatatgcctaacag

SEQ ID NO: 47874 - DNA, 110 bp, synthetic construct
  source 1..110: mol_type = other DNA
ctgaagggcagaaaactagcaagggagtgttgctggaatgtgagcctgggctgattctccccaggaacttgatgttaagcacgatactatgatggcttctaacatttata

SEQ ID NO: 47875 - DNA, 110 bp, synthetic construct
  source 1..110: mol_type = other DNA
tctccccaggaacttgatgttaagcacgatactatgatggcttctaacatttataattgaccacaggtgtataggtttatattaatcgtaaacagtttatgacacactct

SEQ ID NO: 47876 - DNA, 110 bp, synthetic construct
  source 1..110: mol_type = other DNA
atttactgccctaccatgaaaacaaacaaaggtatttttgcaacacaattccactattctctatcctcccctctaatctttcctattgatcttgctctcagcatagatag

SEQ ID NO: 47877 - DNA, 110 bp, synthetic construct; identical to SEQ ID NO: 47876
  source 1..110: mol_type = other DNA

SEQ ID NO: 47878 - DNA, 110 bp, synthetic construct
  source 1..110: mol_type = other DNA
tttgaaaataaacttatggttaccaaaggggattgttgggggtgggaagggatggaatacaggtttgagactggcatatatatactgaggtatatggaatgattggccaa

SEQ ID NO: 47879 - DNA, 110 bp, synthetic construct; identical to SEQ ID NO: 47878
  source 1..110: mol_type = other DNA

SEQ ID NO: 47880 - DNA, 110 bp, synthetic construct
  source 1..110: mol_type = other DNA
tccggcctgggaatttccatatgccacaggtgtggctgtaaaaagaaagaaagaaaagctttaaacaggagttctcttgtggcgcagcaagttaaggatccagcattgtc

SEQ ID NO: 47881 - DNA, 110 bp, synthetic construct
  source 1..110: mol_type = other DNA
tccatatgccacaggtgtggctgtaaaaagaaagaaagaaaagctttaaacaggagttctcttgtggcgcagcaagttaaggatccagcattgtcactgcagcagctcag

SEQ ID NO: 47882 - DNA, 110 bp, synthetic construct
  source 1..110: mol_type = other DNA
gtcaattgatagtaactttatttacatatggaaaatctcattatcttgtaatatattcatgggagtaacaccagggggcaaaggataataggttccaaaattctgcttac

SEQ ID NO: 47883 - DNA, 110 bp, synthetic construct
  source 1..110: mol_type = other DNA
ttcatgggagtaacaccagggggcaaaggataataggttccaaaattctgcttaccatggtttccttttatctataaatttatctgtatctatatatctatgggtttgca

SEQ ID NO: 47884 - DNA, 110 bp, synthetic construct
  source 1..110: mol_type = other DNA
agggaggcagggttttctggaaacctatgctccggcttgaaagacaggtgcatttcagagggctcctgggaaggggaggtcagccatgggcctttagggggaagcctgtc

SEQ ID NO: 47885 - DNA, 110 bp, synthetic construct
  source 1..110: mol_type = other DNA
cagagggctcctgggaaggggaggtcagccatgggcctttagggggaagcctgtcagacctcagaagcccgtagttgtctctccccagactcactccgaagccagcggca

SEQ ID NO: 47886 - DNA, 110 bp, synthetic construct
  source 1..110: mol_type = other DNA
gggcacggaggcgcgtcgaggggaaggggctgcatcacacgcacagacccgtccctaagggggcccctggtgaggactgtgggaatttcagtaggagctgagaccctaca

SEQ ID NO: 47887 - DNA, 110 bp, synthetic construct
  source 1..110: mol_type = other DNA
taagggggcccctggtgaggactgtgggaatttcagtaggagctgagaccctacagatcagacgtgttcaaccacggagttagtgggttgtgaaatgtcctaaggagtcc

SEQ ID NO: 47888 - DNA, 110 bp, synthetic construct
  source 1..110: mol_type = other DNA
tgaagccacaggtcccaccaagaaacccttctccagattatagctgatcaaacaaattacgtcatcaatcactgtccatttacggctgggagtgctgcactagacacttt

SEQ ID NO: 47889 - DNA, 110 bp, synthetic construct
  source 1..110: mol_type = other DNA
attacgtcatcaatcactgtccatttacggctgggagtgctgcactagacacttttactgcatgagctcattaaacctgcaccacagcccgtacgtgtgtgcgtgtgtgt

SEQ ID NO: 47890 - DNA, 110 bp, synthetic construct
  source 1..110: mol_type = other DNA
ggtaggggagagggaccgcccgatcactgggatgaggacttggtaacacgccgagacttctaggtggtggggtaatggggaggggacactcgaaggctggatcagacgat

SEQ ID NO: 47891 - DNA, 110 bp, synthetic construct
  source 1..110: mol_type = other DNA
acttctaggtggtggggtaatggggaggggacactcgaaggctggatcagacgattcctagagggagagatcaagaaacagtgcccaggcctcggatgggtgcggtattg

SEQ ID NO: 47892 - DNA, 110 bp, synthetic construct
  source 1..110: mol_type = other DNA
gtgattgggggcagggactgctcctcacccccgttgaataggaggaaactgaagtgtcactggtgtccagcacctgacagccaaactgacctgggtctgaatcccagctc

SEQ ID NO: 47893 - DNA, 110 bp, synthetic construct
  source 1..110: mol_type = other DNA
gtcactggtgtccagcacctgacagccaaactgacctgggtctgaatcccagctccttgctgtgtggtcccaaacaagtgacttcgcctttgctcagctgattctcttct

SEQ ID NO: 47894 - DNA, 110 bp, synthetic construct
  source 1..110: mol_type = other DNA
tgggctccgtcctcacccagcatccgaggggatcctttggaaatgtgaaagaggtgacatcacacctccgtccatcacaccccggaaggcactctaccagctgaccacag

SEQ ID NO: 47895 - DNA, 110 bp, synthetic construct
  source 1..110: mol_type = other DNA
gacatcacacctccgtccatcacaccccggaaggcactctaccagctgaccacagccaccaggccccacatactctgggccctgcctgctgccccgaccttgttcccatg

SEQ ID NO: 47896 - DNA, 110 bp, synthetic construct
  source 1..110: mol_type = other DNA
ctcccccagcttgcaagtggtgtcacttcaaagtaacaaaacctcctaatcaagcaaccttctccacagtgaggctcaggtgacacagctggttcctggcgtcataggga

SEQ ID NO: 47897 - DNA, 110 bp, synthetic construct
  source 1..110: mol_type = other DNA
aaccttctccacagtgaggctcaggtgacacagctggttcctggcgtcatagggaggtgctgggacagagactggagctgccaggacaaagcaagacctcatgtaagagg

SEQ ID NO: 47898 - DNA, 110 bp, synthetic construct
  source 1..110: mol_type = other DNA
ataggcccaaattatggctctatattggggaaatgggacttccgggattgtaggggcgggagtaagatggagaagttgaccgcgatgaaaggcaaggcactgtcgcgata

SEQ ID NO: 47899 - DNA, 110 bp, synthetic construct
  source 1..110: mol_type = other DNA
gcgggagtaagatggagaagttgaccgcgatgaaaggcaaggcactgtcgcgatatacccagagttccagagttggtgcaaagtcttgagctgtggtgtttgtcctgctc

SEQ ID NO: 47900 - DNA, 110 bp, synthetic construct
  source 1..110: mol_type = other DNA
caggtgccttgccaaaaagctcagctaaccattttgaggggtttggtgtgagggctgaaactgcagaggcaaggacgagggttaaggggacttgtggatggcaaaggagc

SEQ ID NO: 47901 - DNA, 110 bp, synthetic construct
  source 1..110: mol_type = other DNA
tgaaactgcagaggcaaggacgagggttaaggggacttgtggatggcaaaggagctgggaggggtggtggcagccaggtgtgactaggagacccctgagctggagggaag

SEQ ID NO: 47902 - DNA, 110 bp, synthetic construct
  source 1..110: mol_type = other DNA
aggtgtcgggctccgagaagcgatgcgtggccaagcgtggcactcgtggaatccccgcacatggggaattcctgttaagcccggggcctcgggccgggtggcgacccggg

SEQ ID NO: 47903 - DNA, 110 bp, synthetic construct
  source 1..110: mol_type = other DNA
cgcacatggggaattcctgttaagcccggggcctcgggccgggtggcgacccgggaaatcccgggccgggggcagggtcatggccattgtgaatccctgtggcctggcgc

SEQ ID NO: 47904 - DNA, 110 bp, synthetic construct
  source 1..110: mol_type = other DNA
ttatcatcagcttgatcccgtagtgctcgaagagcacttaccaggcccagaaaggttaggccacttgcccaagggcacacagcaagtaggtgatggagctgacttgaatt

SEQ ID NO: 47905 - DNA, 110 bp, synthetic construct
  source 1..110: mol_type = other DNA
ttaggccacttgcccaagggcacacagcaagtaggtgatggagctgacttgaattcaggtggcctggctgtagagtctgggcttttaatcaccacactacatggctttag

SEQ ID NO: 47906 - DNA, 110 bp, synthetic construct
  source 1..110: mol_type = other DNA
tgtagactataaatcatataatcgaaaaggttattagttacgagttccctggtggtgcagcgggttaatgatttggtattgttactgctggggcatgggtttgatccctg

SEQ ID NO: 47907 - DNA, 110 bp, synthetic construct; identical to SEQ ID NO: 47906
  source 1..110: mol_type = other DNA

SEQ ID NO: 47908 - DNA, 110 bp, synthetic construct
  source 1..110: mol_type = other DNA
agaatttttatcctgcttcagtctggactggctgtactctgacctgataggtcctaccttgtagcttttcatcactattattgtagaaattttctttgctttttctccta

SEQ ID NO: 47909 - DNA, 110 bp, synthetic construct
  source 1..110: mol_type = other DNA
acttaggttcagactgaaagttttgtttagccttctgtgagcagtagatcaatatcagttcagttttcaaaggctttgctatgctgtttgggaatgcccacacatgtgcc

SEQ ID NO: 47910 - DNA, 110 bp, synthetic construct
  source 1..110: mol_type = other DNA
tcgagtcagagcttggaccagagctcctcctgaggatgctgaaggtaacgaatcctgtcgccccaggactggcaagaggagtgtctggagtgttaggtttctaagtgcag

SEQ ID NO: 47911 - DNA, 110 bp, synthetic construct
  source 1..110: mol_type = other DNA
tccccaggcagcaacaagactagtccaatttcacacacaatcagctgccacatttcctaaagtggcaagcacccaaaacgcagcaggttcggcacaggaggccgcctcca

SEQ ID NO: 47912 - DNA, 110 bp, synthetic construct
  source 1..110: mol_type = other DNA
tataatctccttattctctgagttttcttgcctttacttagtgactacgttgccgacacttagtatacttcctctcttttcattctcacaacagttcaagagaaggggac

SEQ ID NO: 47913 - DNA, 110 bp, synthetic construct
  source 1..110: mol_type = other DNA
aagctagtccactagtccaagggagagagattttcatattaagtattctattgaatataaagggaagaggttcaggatatatttaggagcacaattaagcagtatttgct

SEQ ID NO: 47914 - DNA, 110 bp, synthetic construct
  source 1..110: mol_type = other DNA
tatggtctataagacttttaggatcttgtggataggaatgcgattgggatcttgtattgtgaggcctgaaatttcatatgctgccctgataccttttttttttttttttt

SEQ ID NO: 47915 - DNA, 110 bp, synthetic construct
  source 1..110: mol_type = other DNA
cttgcgcctgcagctgtagctcaaataatacatattcaggtttctttttaattgacactcatcaattccatcaaacctgattttgcttttctttttagggaagcacccac

SEQ ID NO: 47916 - DNA, 110 bp, synthetic construct
  source 1..110: mol_type = other DNA
aaactgttttatgggttaaaaaaacaaagaaaaataactgtcaacaatgtaagctgtttgaccaactggaacatctagttccctatactattcagcaagagcataaggat

SEQ ID NO: 47917 - DNA, 110 bp, synthetic construct
  source 1..110: mol_type = other DNA
gtttgaccaactggaacatctagttccctatactattcagcaagagcataaggatgagagttcccattgtgatacaggggaaacaaggaaccatgaggttgcagttggat

SEQ ID NO: 47918 - DNA, 110 bp, synthetic construct
  source 1..110: mol_type = other DNA
gaacctagaaaaccaaccaaccaaataaaaacaaaaaacaaaccaagctcacagacacagagaacagactgaagattgccaggggaggcagggtgggggcagagtagaaa

SEQ ID NO: 47919 - DNA, 110 bp, synthetic construct
  source 1..110: mol_type = other DNA
cacagagaacagactgaagattgccaggggaggcagggtgggggcagagtagaaaattactgtgagatagcagttttggctgaaaagcccatattaccactttaactggg

SEQ ID NO: 47920 - DNA, 110 bp, synthetic construct
  source 1..110: mol_type = other DNA
agctgtggcataggtttgctccctggcctgggtgtggccaaaaacaaacaaaacgtagtctttatgtggatgcaggattcctgtaaaagcgcaccttagatgctaatatg

SEQ ID NO: 47921 - DNA, 110 bp, synthetic construct
  source 1..110: mol_type = other DNA
ggatccttagatttaagagacagcccacgcggggccttattgtttgggaggcagctggggcattgcaaccccaagttggtgggacaggacagtaaggcaaggtctaggga

SEQ ID NO: 47922 - DNA, 110 bp, synthetic construct
  source 1..110: mol_type = other DNA
acaaaaaacaagatataaggagggtaagacaagagaccctatcagtgactgacgagtcatgaaggacataaaaggaaaagccagagaggacagagagtgagcaaggggca

SEQ ID NO: 47923 - DNA, 110 bp, synthetic construct
  source 1..110: mol_type = other DNA
tatcaagaagtctgttcatgatccaaagggtatactttgcccatcacagatcagtcaattagcctacaggtactcccagagctctgtgggcctctcatctacagccaacc

SEQ ID NO: 47924 - DNA, 110 bp, synthetic construct
  source 1..110: mol_type = other DNA
atttgtccttcttaattttttttggtttcttctcttcctaaatatcttaatataggggtgctccaggtttcattccttgctcccttctcttcaatatatactcattgtct

SEQ ID NO: 47925 - DNA, 110 bp, synthetic construct
  source 1..110: mol_type = other DNA
gggagcatccttggtgtctctgtatgtgcataaatttccccccacataaggatactaatcatagcggttttgaatttgtgtgtgggggggcacaattcagcacataatat

SEQ ID NO: 47926 - DNA, 110 bp, synthetic construct
  source 1..110: mol_type = other DNA
taatcatagcggttttgaatttgtgtgtgggggggcacaattcagcacataatattcactgaaacaagggttatgggagcagactaacactgctctactgtatctttttg

SEQ ID NO: 47927 - DNA, 110 bp, synthetic construct
  source 1..110: mol_type = other DNA
cttaatcacattgcgattcctttacagaaggatctctgggtgttaatgaagcacaatattcaaggaatttctagtggtgcaacggtgtctgaagtatcttggtagtgctg

SEQ ID NO: 47928 - DNA, 110 bp, synthetic construct
  source 1..110: mol_type = other DNA
atattcaaggaatttctagtggtgcaacggtgtctgaagtatcttggtagtgctgggacgtaggttcatccctggccccacaaagtgggttaaggatcctgagttgcagc

SEQ ID NO: 47929 - DNA, 110 bp, synthetic construct
  source 1..110: mol_type = other DNA
tttatcccaatttccatatcccagagaaataagaccttagtatttgttgtgggatagatctttaccaggaagattactttctgtgaaaaagattctccttaccactgtta

SEQ ID NO: 47930 - DNA, 110 bp, synthetic construct
  source 1..110: mol_type = other DNA
accagaaagccctccgggcagtgtagagagtgctaatacagccccaaagtgcacgaatttctctattcgggcacagctgtgctgggaaagcactctgatcataccactct

SEQ ID NO: 47931 - DNA, 110 bp, synthetic construct
  source 1..110: mol_type = other DNA
acccatgaaagtgaccattcattttgtagactgacgtttcctgtaggtgcctgttgcaactaccgcttatggacccagcataaagctgttgccccgtgggactgctgggg

SEQ ID NO: 47932 - DNA, 110 bp, synthetic construct
  source 1..110: mol_type = other DNA
ttgaaagtggtggttccttgggggtcgttgtaccgtgtccctctcttctaccccatcccttcactgagttcagtactgacagctgaaggctgccatcttgcccctcacct

SEQ ID NO: 47933 - DNA, 110 bp, synthetic construct
  source 1..110: mol_type = other DNA
caagatttcttccagcctgtctactgctgtagaattaggagggcccccaccagagaactgggggctcctgggagctggaaagacagttattagcaaatgaacccaaaccc

SEQ ID NO: 47934 - DNA, 110 bp, synthetic construct
  source 1..110: mol_type = other DNA
aactgggggctcctgggagctggaaagacagttattagcaaatgaacccaaacccaaagtagggaaggaatacccatgttcctctggcttgactttttaaagtatccctg

SEQ ID NO: 47935 - DNA, 110 bp, synthetic construct
  source 1..110: mol_type = other DNA
aaaatccctgtgctcctggggctggtatactgaggagaattttgcctgaaaaactgagtttccctcttggtggatgttgagctgaaagacacaactaagccaaagactta

SEQ ID NO: 47936 - DNA, 110 bp, synthetic construct
  source 1..110: mol_type = other DNA
gagtttccctcttggtggatgttgagctgaaagacacaactaagccaaagacttattacttgcagcaaaaaagaacatccggaactttcccaaagcagtgtctccccgaa

SEQ ID NO: 47937 - DNA, 110 bp, synthetic construct
  source 1..110: mol_type = other DNA
tgggttgtttccaccatttggcattgtgagtaatgctgctatgaacatgggtgtacaggtacctttccgttcattggagtatataaaagccaggggagggagctccctga

SEQ ID NO: 47938 - DNA, 110 bp, synthetic construct
  source 1..110: mol_type = other DNA
catgggtgtacaggtacctttccgttcattggagtatataaaagccaggggagggagctccctgagggtctagtagttaggatttggtgctttcactgctgcagcctggg

SEQ ID NO: 47939 - DNA, 110 bp, synthetic construct
  source 1..110: mol_type = other DNA
aagccctctaggtggttctgatgcatgctcaagcttgagaaccataggtctagatggtaccactgagggcttacatgcccctcctcagaaggcctatgattattctattg

SEQ ID NO: 47940 - DNA, 110 bp, synthetic construct
  source 1..110: mol_type = other DNA
ggtaccactgagggcttacatgcccctcctcagaaggcctatgattattctattgagagaagaaactgaggcacagagtggttcagtgtcttacctaaggtcacacagcc

SEQ ID NO: 47941 - DNA, 110 bp, synthetic construct
  source 1..110: mol_type = other DNA
aagggctaggccaccccttgctacgctctgccaaaggtcatgtgatacctgcagcagggagagcaggggtggcagcaagattgtctagaaaaggtcgtagagttacagac

SEQ ID NO: 47942 - DNA, 110 bp, synthetic construct
  source 1..110: mol_type = other DNA
agggagagcaggggtggcagcaagattgtctagaaaaggtcgtagagttacagactggaatttgaccacgtcagcatgtgaccttctgggttgattttacaagggtaagg

SEQ ID NO: 47943 - DNA, 110 bp, synthetic construct
  source 1..110: mol_type = other DNA
gggcctggtcccagacctggtggcggagaaagaaggaaaaagtatgtagatgatcctggcatggggacaaacgcttaggtcccggtgcttcccagtcttgagatctgtca

SEQ ID NO: 47944 - DNA, 110 bp, synthetic construct
  source 1..110: mol_type = other DNA
ctggcatggggacaaacgcttaggtcccggtgcttcccagtcttgagatctgtcacagacccgttccccttccttaggacaagcctcctcctcgctgcttgttggttaag

SEQ ID NO: 47945 - DNA, 110 bp, synthetic construct
  source 1..110: mol_type = other DNA
ctccacttcaaagacccttctctccggcttctccagtctaatcctcggatcgtgaacacctgcagagtcgactatgatgtcagcttggagaaggcagggatttttcgtgg

SEQ ID NO: 47946 - DNA, 110 bp, synthetic construct
  source 1..110: mol_type = other DNA
acacctgcagagtcgactatgatgtcagcttggagaaggcagggatttttcgtggtcagagctggacgcccagccccaagaacagggtctggcccttggcgggggtcctg

SEQ ID NO: 47947 - DNA, 110 bp, synthetic construct
  source 1..110: mol_type = other DNA
ggacccttcaggcggcgggatgtcctggtccggccttctccgtggcctcggcacgtccctaaactgtggtaagtaggggactagggctgcagagccgaggctaggtgagg

SEQ ID NO: 47948 - DNA, 110 bp, synthetic construct
  source 1..110: mol_type = other DNA
tccctaaactgtggtaagtaggggactagggctgcagagccgaggctaggtgagggttatcccccctgggacttgcatcctctgccgagggaatcaaggttttaaatcag

SEQ ID NO: 47949 - DNA, 110 bp, synthetic construct; identical to SEQ ID NO: 47947
  source 1..110: mol_type = other DNA

SEQ ID NO: 47950 - DNA, 110 bp, synthetic construct; identical to SEQ ID NO: 47948
  source 1..110: mol_type = other DNA

SEQ ID NO: 47951 - DNA, 110 bp, synthetic construct
  source 1..110: mol_type = other DNA
agaaagcctcaggcttgggtcgcgcctacacgcgtcctgcttccaagggatcacgggcttggtttcctctaaggcagtgtttgccaaatctcaagtgactggaacctgga

SEQ ID NO: 47952 - DNA, 110 bp, synthetic construct
  source 1..110: mol_type = other DNA
gccatagcaatgagcccattcgtgccaggcactcagaatggtgtctggcacgtagacggtgctccaaacgaggcagctgagataatgagcatcactccgcaggtggtacc

SEQ ID NO: 47953 - DNA, 110 bp, synthetic construct
  source 1..110: mol_type = other DNA
gacctggctctgacacttcctaattgtgtgaccttgagaaaacaggctttgcaggtggccccaaatattggccatccacagatttggacaattttaaaagtgcacttgtt

SEQ ID NO: 47954 - DNA, 110 bp, synthetic construct
  source 1..110: mol_type = other DNA
caggtcctaggggtccccagaggggactcagacatcaggaaatcaggtttccatccccgaggtcaacgaaagaaagacaacttctcttggagccaggcctcggtgaggtc

SEQ ID NO: 47955 - DNA, 110 bp, synthetic construct
  source 1..110: mol_type = other DNA
ctcccaatccttccgggggaagatgacactcacttatgatagctgcgttgtctgtctcttttcgaaagcggaatttcctcagcttttcctttagctctgggtccacctcg

SEQ ID NO: 47956 - DNA, 110 bp, synthetic construct
  source 1..110: mol_type = other DNA
ctcttttcgaaagcggaatttcctcagcttttcctttagctctgggtccacctcgcacaccaccagggagtcggactgccggaggagcccagtaagagcagagtcgcctg

SEQ ID NO: 47957 - DNA, 110 bp, synthetic construct
  source 1..110: mol_type = other DNA
ggcttaagttggcttcatgttggtgcttgccttgctaatctcatcaccccaccctgcagactgcagaccccaggtcttgaactgggcccagctttgacctttcctgctcc

SEQ ID NO: 47958 - DNA, 110 bp, synthetic construct
  source 1..110: mol_type = other DNA
gcagactgcagaccccaggtcttgaactgggcccagctttgacctttcctgctcctgtgtcaccttggaaaagtgacttcttagaatgaaccctgatcctgtgtcccctg

SEQ ID NO: 47959 - DNA, 110 bp, synthetic construct
  source 1..110: mol_type = other DNA
ttcccctataagtattagcctctaagtattacattttattctgaggggaaaaaggtttgctccatctaaagggctttgctcagcacctggcacgcggaaatgattatgac

SEQ ID NO: 47960 - DNA, 110 bp, synthetic construct
  source 1..110: mol_type = other DNA
actcagccggaactcatattcctaccatggctatttgataacttctttcaccatcatgggctctattcgtggcagctcttcctcatcaagtctcagttttatgaagcagt

SEQ ID NO: 47961 - DNA, 110 bp, synthetic construct
  source 1..110: mol_type = other DNA
ggaatagagactttatttggaaagccagctgaccgagaagagggtagactcatgtcccaaagaactgtcttattctcttgtctgagttagaattcgggcttcttttatac

SEQ ID NO: 47962 - DNA, 110 bp, synthetic construct
  source 1..110: mol_type = other DNA
acagttttactggagacacaccccttcacttgcatggtttacagctgatctcatgctgccatggtggagttgagtacttgtgaccaggaccgtatcgcctacaaatttaa

SEQ ID NO: 47963 - DNA, 110 bp, synthetic construct
  source 1..110: mol_type = other DNA
taagaaaacctgtggggacacttccttgtggtcagtgaaattacgtccatcccaccaccagcagccctggtctgagtccaaatccacggcgctcgtgtgtctgagtcctc

SEQ ID NO: 47964 - DNA, 110 bp, synthetic construct
  source 1..110: mol_type = other DNA
tcaatttcgtggttgagaaggggtgctggtctctagtgatgtctgtatgtcgcggatcgtcccacagcggcatcctccagctccggagcaagatgagggctcctgaggga

SEQ ID NO: 47965 - DNA, 110 bp, synthetic construct
  source 1..110: mol_type = other DNA
ctggcctatgccacagccccagcaacaggcgatcctttacccactgagcaggggccagggatccagccactttcaggagttcttactgtggcacagtgggttaagaattc

SEQ ID NO: 47966 - DNA, 110 bp, synthetic construct
  source 1..110: mol_type = other DNA
cagggatccagccactttcaggagttcttactgtggcacagtgggttaagaattctactgcagcgactcaggtccatccggaggtgtgggtttgatccccgcccagctca

SEQ ID NO: 47967 - DNA, 110 bp, synthetic construct
  source 1..110: mol_type = other DNA
attcccacacacctcaaaagactctagaagaaatgataattatgtatgtaatgggatccaagcattagctcatgctatgctggtaataattctgcaatataagtgtatga

SEQ ID NO: 47968 - DNA, 110 bp, synthetic construct; identical to SEQ ID NO: 47967
  source 1..110: mol_type = other DNA

SEQ ID NO: 47969 - DNA, 110 bp, synthetic construct
  source 1..110: mol_type = other DNA
tcatataatctgaattcaaatttcagtgccatcttgtcttcattggcgagtcaccaaactctcttggactcagtttccctgtacgtcaaatagggtaaccgtagtgtttt

SEQ ID NO: 47970 - DNA, 110 bp, synthetic construct
  source 1..110: mol_type = other DNA
aaactctcttggactcagtttccctgtacgtcaaatagggtaaccgtagtgttttagaaaatcttcatagagaacaggggtggctcctctctctttgccagatgctaatg

SEQ ID NO: 47971 - DNA, 110 bp, synthetic construct
  source 1..110: mol_type = other DNA
cgagagacagatttccgaggagagatacagacagagacagaaagtcccagagagggacagaaagacccaagtgaaggagaaatgctccagctagggagttggtcagagac

SEQ ID NO: 47972 - DNA, 110 bp, synthetic construct
  source 1..110: mol_type = other DNA
gacagaaagacccaagtgaaggagaaatgctccagctagggagttggtcagagacctgccctgaggcagaaggacagcagggaggagagagctaatctagttgaaggaga

SEQ ID NO: 47973 - DNA, 110 bp, synthetic construct
  source 1..110: mol_type = other DNA
ggggaggaagacctgaccttgtaacttgggtgctttttaaccatttgtggcttaaggcctccttgggccaagtgccaaggcatagattacagcatatgtatacccagcat

SEQ ID NO: 47974 - DNA, 110 bp, synthetic construct
  source 1..110: mol_type = other DNA
ggcctccttgggccaagtgccaaggcatagattacagcatatgtatacccagcatacataccctctttacctgctgctcccccttaataaaggttggacattccctgggg

SEQ ID NO: 47975 - DNA, 110 bp, synthetic construct
  source 1..110: mol_type = other DNA
cccgaggccccggggccctgaaaccctgaagccgagctcagttgccctctgctttgcctgttaagaggaataactccggtgaagcgatcggagtaatttggggaaatctg

SEQ ID NO: 47976 - DNA, 110 bp, synthetic construct
  source 1..110: mol_type = other DNA
gcctgttaagaggaataactccggtgaagcgatcggagtaatttggggaaatctggattattttacccacctatatatgtgtcctaaagaccgcaggattagtagcaggt

SEQ ID NO: 47977 - DNA, 110 bp, synthetic construct
  source 1..110: mol_type = other DNA
caggcatgaataataactaaaattgatagaaaaatagtgaggcttgacaggagtgttctaggcagatggagtaagtacaaagacccagatgcaatagtgagcagggataa

SEQ ID NO: 47978 - DNA, 110 bp, synthetic construct
  source 1..110: mol_type = other DNA
ttctaggcagatggagtaagtacaaagacccagatgcaatagtgagcagggataattaaggaataaagcactttgatgtgcctggagcataaactgcaagaattggggtt

SEQ ID NO: 47979 - DNA, 110 bp, synthetic construct
  source 1..110: mol_type = other DNA
gaagatttggtttcattcactattgtatccccagcaactagaacatcatcatcctcctcataaacacagactgtttcctgtgggccaggcacagttcttttttttttttt

SEQ ID NO: 47980 - DNA, 110 bp, synthetic construct
  source 1..110: mol_type = other DNA
gggctcaccaggggtagtggctggctggctcctcctccccgcactgacacgctaggggtggccaagggcactagtaccttcccaggtagcagctgggctgagccacctgg

SEQ ID NO: 47981 - DNA, 110 bp, synthetic construct
  source 1..110: mol_type = other DNA
atgtattagtcgtgagaccctgggcaagttatgaacctggcctcagctccctccaaatgagcacgatcatagcagggttcagggtgctgtgagcgctacgttaagggagg

SEQ ID NO: 47982 - DNA, 110 bp, synthetic construct
  source 1..110: mol_type = other DNA
caccacctccagccacctgctcagttcctgctgccgcaggcccagcagagccagccaggtaagacccccaccctggacggtgctgccctcttgcctccacagaactccat

SEQ ID NO: 47983 - DNA, 110 bp, synthetic construct
  source 1..110: mol_type = other DNA
cttaacccttatccccattttgcagagaaggaaactgagcccagagaaacggcgttctttctgggctcagaagctgatagatgttggagatttgtatcaatctgaggcca

SEQ ID NO: 47984 - DNA, 110 bp, synthetic construct
  source 1..110: mol_type = other DNA
tcccaccgacatcttctttgtccttaattagtctgactaatgccactcgagcctgtatcaggtgggaaggagctgtggaaacaggggtggggtggaccagtggggggctc

SEQ ID NO: 47985 - DNA, 110 bp, synthetic construct
  source 1..110: mol_type = other DNA
aaaaagaaagaatggaaaagagttttattggagccaaattgaggacggtattcctggagattgtgcctggattgctctgaggaactgttctggagaagcatggttttcag

SEQ ID NO: 47986 - DNA, 110 bp, synthetic construct
  source 1..110: mol_type = other DNA
ggagattgtgcctggattgctctgaggaactgttctggagaagcatggttttcagcccattttttttttttttttcctttttagggcctcactttaaggcctttttaggg

SEQ ID NO: 47987 - DNA, 110 bp, synthetic construct
  source 1..110: mol_type = other DNA
ttgaccagttcaacatccactcatgaatttgtttcagcattcctgatgtcctgtatgcacgagctcttggaattctcctttgaactggctgtaacattttgcaggctccc

SEQ ID NO: 47988 - DNA, 110 bp, synthetic construct
  source 1..110: mol_type = other DNA
gaattaaactagaaatccgctcttctctggtatgaattccaagatgtacatgaatgggagaaagaggaactccagcgatataccgaggaacactgacgataatgtaccag

SEQ ID NO: 47989 - DNA, 110 bp, synthetic construct
  source 1..110: mol_type = other DNA
gggagaaagaggaactccagcgatataccgaggaacactgacgataatgtaccagaccaagtgctgggcgttttcagggtcccagagaagtttctggctaagcccatgtg

SEQ ID NO: 47990 - DNA, 110 bp, synthetic construct
  source 1..110: mol_type = other DNA
gattcttagcacctttggttttctcctcagcatcaagtccctttatgtcccaccgcttctgatgcatcctttcaatttctcagaaaaccgttctttctagtctttttcct

SEQ ID NO: 47991 - DNA, 110 bp, synthetic construct
  source 1..110: mol_type = other DNA
agtcaagcaggacaaagtaataatggttcagcgataaagtgaagaaggacctttatttccccctcaaagactgtagataatatcccgagccacatctttgagttgttttg

SEQ ID NO: 47992 - DNA, 110 bp, synthetic construct
  source 1..110: mol_type = other DNA
tttccccctcaaagactgtagataatatcccgagccacatctttgagttgttttgcagacagtaaaccccaaacaggtgggaaaagtaacctcatgctgatcaccaacat

SEQ ID NO: 47993 - DNA, 110 bp, synthetic construct
  source 1..110: mol_type = other DNA
cccaagaggggaaagagaagctgaaaaactcttttccaaagtggctgtaacattttacatcccaaccagcagtgacgaagatttccagttgttctacaacctcgccaggt

SEQ ID NO: 47994 - DNA, 110 bp, synthetic construct
  source 1..110: mol_type = other DNA
tacatcccaaccagcagtgacgaagatttccagttgttctacaacctcgccaggttagggatcaaatcagagctgcagctgccagctggcaccacaaccacagtaacgct

SEQ ID NO: 47995 - DNA, 110 bp, synthetic construct
  source 1..110: mol_type = other DNA
ggcagtgccagcatatggaagttcccagaccagcagtggcaatgccggatccttaacccactgtgccatgggagaactcctgaacagatagaataatgaatagaaaaatg

SEQ ID NO: 47996 - DNA, 110 bp, synthetic construct
  source 1..110: mol_type = other DNA
gtggcaatgccggatccttaacccactgtgccatgggagaactcctgaacagatagaataatgaatagaaaaatgacccatgaggttgtgggtttggtccctggccttgc

SEQ ID NO: 47997 - DNA, 110 bp, synthetic construct
  source 1..110: mol_type = other DNA
gcctcagggcctttgcacttgctgagacttcaaccccaaaacactctttccccacatagttagtcacagtcgccctctgttgactccttcagatctcagctcaaatgtca

SEQ ID NO: 47998 - DNA, 110 bp, synthetic construct
  source 1..110: mol_type = other DNA
atagttagtcacagtcgccctctgttgactccttcagatctcagctcaaatgtcacctaggaaaggccctccctgacctccctaccaaaagagcaacccctgccactccc

SEQ ID NO: 47999 - DNA, 110 bp, synthetic construct
  source 1..110: mol_type = other DNA
ccacacacccggtgcaggatggaactgtggcagcagcggaggcgcatgaagctggaaggccccggtggagcgggatggagggggaggctggaatggaggtgcgtggcatt

SEQ ID NO: 48000 - DNA, 110 bp, synthetic construct
  source 1..110: mol_type = other DNA
aaggccccggtggagcgggatggagggggaggctggaatggaggtgcgtggcatttcagaggacagtgatccagccgtcgccctggaccccgaggcacacaggctccggg

SEQ ID NO: 48001 - DNA, 110 bp, synthetic construct
  source 1..110: mol_type = other DNA
tccttcctcctccatcctcaccacccctgtaacaaggcttgcctatccttcaaagcctggacatcttgaagaattctgacacgtgttcactcctcgtttcttatccttgg

SEQ ID NO: 48002 - DNA, 110 bp, synthetic construct
  source 1..110: mol_type = other DNA
cctggacatcttgaagaattctgacacgtgttcactcctcgtttcttatccttggaactctactggaatttgtgcctcttctggactcataaagatatgtttcattgcaa

SEQ ID NO: 48003 - DNA, 110 bp, synthetic construct
  source 1..110: mol_type = other DNA
cgctgctgtggcctgggtgccgtcccaggcctaggaacttctgcaggccactggctctgccaaaaaaacccaaaagtagccagaaaaataagagtgagtcaggtggttat

SEQ ID NO: 48004 - DNA, 110 bp, synthetic construct
  source 1..110: mol_type = other DNA
gccttggcccatttctctgcaggatcctctcttacagggagctgacaattgagccacagagacagggagagcctcacaagacaaaggacaatcccagtcacctgtgtatg

SEQ ID NO: 48005 - DNA, 110 bp, synthetic construct
  source 1..110: mol_type = other DNA
tttgtgttcacacaggctctctctccccaccttgcttccagggtgggtccgtgtgtgcagagtttgtccacattgttgcaggaaggaaaaggatggttaactcggctaat

SEQ ID NO: 48006 - DNA, 110 bp, synthetic construct
  source 1..110: mol_type = other DNA
aaggccacgatgccatcggggaccacagcggacatctccagcaggaggtttccgtagttccggatcaccgctgggaggggtcagaggtcagatgtgctcctggccggggt

SEQ ID NO: 48007 - DNA, 110 bp, synthetic construct
  source 1..110: mol_type = other DNA
catttcacaggcgggaagggggaggtccaaaggccgagggccaccaggttatgtagatagagtccagactcctacctcgctgtggctgcaggagatggacacttgagttt

SEQ ID NO: 48008 - DNA, 110 bp, synthetic construct
  source 1..110: mol_type = other DNA
tccaagccgcatatgcagcctgcattgcagcttacagcaacactggctccttaacacaatgaacgaggccagagattgaattcacatcctcacagagattatgttgggtg

SEQ ID NO: 48009 - DNA, 110 bp, synthetic construct; identical to SEQ ID NO: 48008
  source 1..110: mol_type = other DNA

SEQ ID NO: 48010 - DNA, 110 bp, synthetic construct
  source 1..110: mol_type = other DNA
agtcccgagtcccggggcactgcatctcaggcaaccccaatacacatcttaacaagattctccattgttagaaacaagctgaaccccaaatttctgtcctaagaatagaa

SEQ ID NO: 48011 - DNA, 110 bp, synthetic construct
  source 1..110: mol_type = other DNA
gattctccattgttagaaacaagctgaaccccaaatttctgtcctaagaatagaacattttcaagaagaacacaaaaagacaacccacagaatggaagaaaatgtttgca

SEQ ID NO: 48012 - DNA, 110 bp, synthetic construct
  source 1..110: mol_type = other DNA
ccattggttgacctaaggcaaattccttagcctctgtgcacccgtttcttctggaaaatgaagagacagatacatacaaacatacgtgtatgtacacagtcttaatcaca

SEQ ID NO: 48013 - DNA, 110 bp, synthetic construct
  source 1..110: mol_type = other DNA
aaatgaagagacagatacatacaaacatacgtgtatgtacacagtcttaatcacacggttggggaaattagatgagattggagatatcaaacgcctacttacacagtgct

SEQ ID NO: 48014 - DNA, 110 bp, synthetic construct
  source 1..110: mol_type = other DNA
gtgcacgtggggtggggcagggaagggatcggaaaggttgagaagtggaggcagggtggctggagatgtcagttgcatgtggaggaaggcagagaccgggttggaggtgg

SEQ ID NO: 48015 - DNA, 110 bp, synthetic construct
  source 1..110: mol_type = other DNA
gtggctggagatgtcagttgcatgtggaggaaggcagagaccgggttggaggtggacgctcccaggtagtgggggatcccagctgaacccccaccccacccgggatagtt

SEQ ID NO: 48016 - DNA, 110 bp, synthetic construct
  source 1..110: mol_type = other DNA
attcactacccgctgcccctcccgtaccagggcaagccagaccctgtggtcctacagggcatcattcgctcactgaaggaggagctgagccgccttcgagggctggacgg

SEQ ID NO: 48017 - DNA, 110 bp, synthetic construct
  source 1..110: mol_type = other DNA
ggaggggtcacaaactcagtggccccaggaccaaccaggtaaaataattaaccaagcccatagctcacccagtctccttttctttgttttcaacagagacataatttaag

SEQ ID NO: 48018 - DNA, 110 bp, synthetic construct
  source 1..110: mol_type = other DNA
aacagagcctggaggctggaactttggaaggttccttggagctgcgagttcacggcgctgaagttcttggctctcggaagcgtgagtgtttgagatgccctaggctgggc

SEQ ID NO: 48019 - DNA, 110 bp, synthetic construct
  source 1..110: mol_type = other DNA
tgttgtacactgcttttgacttgttgttgagacttttctaaacaaagtagctgtgacataaacccggggagtagggggtaaggtcaacaaaggaagcactcagtggattt

SEQ ID NO: 48020 - DNA, 110 bp, synthetic construct
  source 1..110: mol_type = other DNA
acataaacccggggagtagggggtaaggtcaacaaaggaagcactcagtggatttatgttgggatgaaactgtggacattctgtgcctgtgtaactgaggaaggtatgtt

SEQ ID NO: 48021 - DNA, 110 bp, synthetic construct
  source 1..110: mol_type = other DNA
ggaagcctgtcctcagcatcagggatgaagtctctgagagcagtgggatgggtgtatctgacagctcatcctttggtactttgaaccactggaaggttttctctactcca

SEQ ID NO: 48022 - DNA, 110 bp, synthetic construct
  source 1..110: mol_type = other DNA
atctgacagctcatcctttggtactttgaaccactggaaggttttctctactccaaataataaaagaacattttaaaatacataaaccagaggtcccatcatggctcagc

SEQ ID NO: 48023 - DNA, 110 bp, synthetic construct
  source 1..110: mol_type = other DNA
agcaacttggcaaaagtgtttatttccaaaggcttatccaaaagatactcaatatagcctcctgttgcctagtcattccatagcttttattgttttttattattttttat

SEQ ID NO: 48024 - DNA, 110 bp, synthetic construct; identical to SEQ ID NO: 48023
  source 1..110: mol_type = other DNA

SEQ ID NO: 48025 - DNA, 110 bp, synthetic construct; identical to SEQ ID NO: 48023
  source 1..110: mol_type = other DNA

SEQ ID NO: 48026 - DNA, 110 bp, synthetic construct; identical to SEQ ID NO: 48023
  source 1..110: mol_type = other DNA

SEQ ID NO: 48027 - DNA, 110 bp, synthetic construct
  source 1..110: mol_type = other DNA
gtttgcaagcggcgcattgccatgttgggccttgttttagatatttgaggtacagcatctcttgtaatccctaggataagactggttatttccattttacatggggaaag

SEQ ID NO: 48028 - DNA, 110 bp, synthetic construct
  source 1..110: mol_type = other DNA
catctcttgtaatccctaggataagactggttatttccattttacatggggaaagtaaaggtcagagaggctaagccatctgcttgaggacgcacagctggtaagggacc

SEQ ID NO: 48029 - DNA, 110 bp, synthetic construct
  source 1..110: mol_type = other DNA
caggacatgatgggacgagtagagggttcctgggcagagttactacattgcatgtgaagtggcccaatagtctaaataggccgtgagtaggtaaggttgtgtgttatccc

SEQ ID NO: 48030 - DNA, 110 bp, synthetic construct
  source 1..110: mol_type = other DNA
gaagtggcccaatagtctaaataggccgtgagtaggtaaggttgtgtgttatccctagagcagtactaaaaaacattgccgaagcaccagaagatagagttagaaaaatt

SEQ ID NO: 48031 - DNA, 110 bp, synthetic construct
  source 1..110: mol_type = other DNA
tcctctggtggcctcagagtcccgagaggatgtaaaccagggtgccaggaggcctgtaaactccctcaacttgcctggcaaactatgggcatggtgtctatatgtcttta

SEQ ID NO: 48032 - DNA, 110 bp, synthetic construct
  source 1..110: mol_type = other DNA
gtaaactccctcaacttgcctggcaaactatgggcatggtgtctatatgtctttatagggtgatggcccatagtgttcaccctattatcaagggggatactttttttttg

SEQ ID NO: 48033 - DNA, 110 bp, synthetic construct
  source 1..110: mol_type = other DNA
ggcctggggtaccaccgctcaagtgtttcgcccccattgactgaggcctttgtgtcccctgggctgcgagggcccccgacggtaagagagagtgtgttctaagacagttt

SEQ ID NO: 48034 - DNA, 110 bp, synthetic construct
  source 1..110: mol_type = other DNA
cccctgggctgcgagggcccccgacggtaagagagagtgtgttctaagacagtttctagtttggcgacaatgacttttgtgtaccgagtttgcggctatccatggtggcg

SEQ ID NO: 48035 - DNA, 110 bp, synthetic construct
  source 1..110: mol_type = other DNA
gagagaacctggggttcctgggctgggaaggttctggaaaggtctgacctgccagcaagcttctggagagccctgaggtctacctctgacatgaggcattttgcagcttt

SEQ ID NO: 48036 - DNA, 110 bp, synthetic construct
  source 1..110: mol_type = other DNA
caagcttctggagagccctgaggtctacctctgacatgaggcattttgcagctttgcggtgttcaaggaaaatattcaaatttttttaaagacagagttttaaatatatt

SEQ ID NO: 48037 - DNA, 110 bp, synthetic construct
  source 1..110: mol_type = other DNA
taaagacatttcattactcattcatttggactttgagagtgggcatattgataagaaaatgaaaggcaagttgaccgtttcatgtctactctgttttctttggttctagc

SEQ ID NO: 48038 - DNA, 110 bp, synthetic construct
  source 1..110: mol_type = other DNA
aaaatgaaaggcaagttgaccgtttcatgtctactctgttttctttggttctagcattttctaaaggtgaacttcacccagacattggagggacggtggtggctgtgtgg

SEQ ID NO: 48039 - DNA, 110 bp, synthetic construct
  source 1..110: mol_type = other DNA
cgtagatacgcatgaggtcaccctgggatatcattaactgtggggctcttccaccccagcgtcccctgattgtaaccatccatggaaaacccttctttggggagctgctg

SEQ ID NO: 48040 - DNA, 110 bp, synthetic construct
  source 1..110: mol_type = other DNA
ccagcgtcccctgattgtaaccatccatggaaaacccttctttggggagctgctgtctcactttacagacaagcttagggcccaaaccatcagagaagccagagaccttg

SEQ ID NO: 48041 - DNA, 110 bp, synthetic construct
  source 1..110: mol_type = other DNA
aaaattttaaaacccagtgccaagtcttccattgtttataggttcataacatatgtaagaatgctaagtacctaacttgagttgtggctacctcgggggacagaaggagc

SEQ ID NO: 48042 - DNA, 110 bp, synthetic construct
  source 1..110: mol_type = other DNA
taagaatgctaagtacctaacttgagttgtggctacctcgggggacagaaggagcgaagggacttggttgggacagggttcacagagggcctcagctggcaatgttgtca

SEQ ID NO: 48043 - DNA, 110 bp, synthetic construct
  source 1..110: mol_type = other DNA
ttcccagcaagctatgtggtgctggccgcctcactgtcaggagagccattctgaagacctcctgggagatgtagtttctcaggactccgctgtcaggttttccttagcct

SEQ ID NO: 48044 - DNA, 110 bp, synthetic construct
  source 1..110: mol_type = other DNA
aactgcgacaccactctgtctcacaaaggaaggctcaggaacagaaaagcagtgagaaggctccctgagcaggcgccacccttgtgagccaggccccacccctgccaggc

SEQ ID NO: 48045 - DNA, 110 bp, synthetic construct
  source 1..110: mol_type = other DNA
gaggaggatgtggagatgagcgaagacgcctacacggtgctgacccgcatcgggctggagacctccctgcgctacgccatccagctcattacagccgccagcctggtgtg

SEQ ID NO: 48046 - DNA, 110 bp, synthetic construct
  source 1..110: mol_type = other DNA
tgttcccaggaccctcgagatgcccctcctccaactcgagcagaaacccgggaggaacgaatggagaggaaggtatgtcacgtttgcctcatggccccgtatcttccttt

SEQ ID NO: 48047 - DNA, 110 bp, synthetic construct
  source 1..110: mol_type = other DNA
gacaggtaagaggtggaagtctttctctcctcttgcccttcattggtccccgttcctgtgacttggtgatggcccttttaatgtttggtaggattctcactgatcctagg

SEQ ID NO: 48048 - DNA, 110 bp, synthetic construct
  source 1..110: mol_type = other DNA
tccctggggggctcccgtgatcttccgaggactcagaacccacgtgtagacttaccgttgattcctcagaacatcctatggctcccgagtttccccggaattcctggagg

SEQ ID NO: 48049 - DNA, 110 bp, synthetic construct
  source 1..110: mol_type = other DNA
gatgcacattgaccgggcagttgctggcggcctccatctgggtgaaatcattcggatgaacctgggagctcaccgttggtcggtcagaaggagctcagctcaaaaaatag

SEQ ID NO: 48050 - DNA, 110 bp, synthetic construct
  source 1..110: mol_type = other DNA
tccaagcaaaaggagcagcacatgcaaaggccctgaggttggcatgagctttggacactcaaggaaccaagagagagtgtctctggcttgaatgtggtgaacaagagaga

SEQ ID NO: 48051 - DNA, 110 bp, synthetic construct
  source 1..110: mol_type = other DNA
tggaaaccacggaagggctgtgaccagggcaggggcatggtcagctctgagtgtagaaagatccttctggatcaggtgggagtcagactggaagccagaagggtagaaag

SEQ ID NO: 48052 - DNA, 110 bp, synthetic construct
  source 1..110: mol_type = other DNA
gggaagggcagcttgttaccagctgggaccatttagtccaaagtgctgttgccgcctgtttgagagacaagcgattgagaagtaaagttaggaacttgttacagacgaaa

SEQ ID NO: 48053 - DNA, 110 bp, synthetic construct
  source 1..110: mol_type = other DNA
gataaggagatgcaaagcacttagaactatatgcccagcacatactaagtacttgccatgtgtgagctactaatatacatcagatataacaaatacactcttttacatta

SEQ ID NO: 48054 - DNA, 110 bp, synthetic construct
  source 1..110: mol_type = other DNA
ggacaacactctcctatatgtactgaggcctctcatgtttgtcaccggcctagccacttacggagcccagatgcatatatccaccgctcccttcgggctctccgcttgga

SEQ ID NO: 48055 - DNA, 110 bp, synthetic construct
  source 1..110: mol_type = other DNA
tggaatttaactctattttacacataaatgcaaaactcttcttgtttggtctgcgtttataccagctgttctaggggtatggttggcttggaaacagagatttggctcca

SEQ ID NO: 48056 - DNA, 110 bp, synthetic construct
  source 1..110: mol_type = other DNA
ctcagattctgcatagcaagggagccgtaagttaagaataatggggctgtgccagctggcaggaatccctctgggaactgaaaggctcccacatcctgatttccttttct

SEQ ID NO: 48057 - DNA, 110 bp, synthetic construct
  source 1..110: mol_type = other DNA
gaaattcgacatgtagctgtttaaggagctgctggcctgatttccatagcagctgcacccttttatattcctccatgtgggaggtggggatttgaggctgaggagccccg

SEQ ID NO: 48058 - DNA, 110 bp, synthetic construct
  source 1..110: mol_type = other DNA
tttgatccctggcccgagaacttccacatgccacaatcttgccccccccaaatgtctccccataaccatctaggtaggcagctctgctccagaaggttgtcaaggggcca

SEQ ID NO: 48059 - DNA, 110 bp, synthetic construct
  source 1..110: mol_type = other DNA
tgtcctcaatctgaatgatcgaagctgggtcatgggtatatctgtgtctatcaggcaggaagtgggaaggagagaaatcgagaacaggcacctcagaatcgaagatgacc

SEQ ID NO: 48060 - DNA, 110 bp, synthetic construct
  source 1..110: mol_type = other DNA
ccacctctgcctcttcaggctcttagctctgcgagggaactacttcccttgctcggtccactgtgggtccctctcaccctgaagggcacctggtacataatggatggcaa

SEQ ID NO: 48061 - DNA, 110 bp, synthetic construct
  source 1..110: mol_type = other DNA
gtcggatttgtttgtgctgcgccacaacaggaactcccatccctgcttttaataggaagaggggtgaaggtctcctctcctgtagcttcttcctgttgaataggggcatg

SEQ ID NO: 48062 - DNA, 110 bp, synthetic construct
  source 1..110: mol_type = other DNA
tgtgtcccaatgaaacttcacaaacacaggatttggtccctgagccatagctttctgcctcctgtgatagagaataatgggtggggcccctccttagatggaatggtcag

SEQ ID NO: 48063 - DNA, 110 bp, synthetic construct
  source 1..110: mol_type = other DNA
attgcttatggtataacagatattcctgcttatcctctagtccctgtatgttatacctctgcatgagcaatgctcaaatattaaagtttctgtgtcagagttcctgctgt

SEQ ID NO: 48064 - DNA, 110 bp, synthetic construct; identical to SEQ ID NO: 48063
  source 1..110: mol_type = other DNA

SEQ ID NO: 48065 - DNA, 110 bp, synthetic construct
  source 1..110: mol_type = other DNA
ggatcttgatggcatagagctcatccgagcccctgcgctccgccagcatcacctagggacagaggccagaaaggtctggtccattttggggacccagatgtgcaggtccc

SEQ ID NO: 48066 - DNA, 110 bp, synthetic construct
  source 1..110: mol_type = other DNA
gggacagaggccagaaaggtctggtccattttggggacccagatgtgcaggtccctacttctccctttcaaggacacaaagaaatggaataccaggtcctccctctgcct

SEQ ID NO: 48067 - DNA, 110 bp, synthetic construct; identical to SEQ ID NO: 48065
  source 1..110: mol_type = other DNA

SEQ ID NO: 48068 - DNA, 110 bp, synthetic construct; identical to SEQ ID NO: 48066
  source 1..110: mol_type = other DNA

SEQ ID NO: 48069 - DNA, 110 bp, synthetic construct
  source 1..110: mol_type = other DNA
acatgcaacataactgaatccatagcgacagattagcttttgccaggggctggagggccaaaaggggggcagattggagttcccatcatggagcagcagaaatgaacccc

SEQ ID NO: 48070 - DNA, 110 bp, synthetic construct
  source 1..110: mol_type = other DNA
tgtgccaaggatctctaccaaaggggagctactcaatcggtaacactcaaaaaatggcggcacttccctccctagaccagaaagtgcccccacagtttgagtaccacagg

SEQ ID NO: 48071 - DNA, 110 bp, synthetic construct
  source 1..110: mol_type = other DNA
gccttgtctgagagagggccaagacccagctctacttacccctgggaaggtaccagccctgctctccaagcacctgaaccagactttagatcagtctcacataccagcag

SEQ ID NO: 48072 - DNA, 110 bp, synthetic construct
  source 1..110: mol_type = other DNA
cctgcacctcatcttaattcaaggtgtgggttcttccttccatgtaggaagcccggattgagagaatggagaagctatgggagagaggagagattactctgaagaactaa

SEQ ID NO: 48073 - DNA, 110 bp, synthetic construct
  source 1..110: mol_type = other DNA
cacttgtgaaatacgttcactaccacagacagggacgcaagacaaactgagcttttgctcccaaagaaacaccaccatccatagcaatgacaatacaagtgtcatgtatt

SEQ ID NO: 48074 - DNA, 110 bp, synthetic construct
  source 1..110: mol_type = other DNA
taccgactgttgcaacggtcattctcttctgcgtacttgtaagaagtaaacaaattttaaataaattagcttacagagaccctagttagttcgtcacagcttaattctcc

SEQ ID NO: 48075 - DNA, 110 bp, synthetic construct
  source 1..110: mol_type = other DNA
tttcaagcccccttaggttctggggcttctgtcacccgtaaaacagtgacgtcaccatccccaatggagcagatggacggctggaaggcaaagctcctgtccaaggaggg

SEQ ID NO: 48076 - DNA, 110 bp, synthetic construct
  source 1..110: mol_type = other DNA
catccccaatggagcagatggacggctggaaggcaaagctcctgtccaaggagggaactggtccctggatgtgcacagccgggaagccctggggctacagcagagcagtg

SEQ ID NO: 48077 - DNA, 110 bp, synthetic construct
  source 1..110: mol_type = other DNA
tttatttttttatggctgcagcacatggaagtttctaggccagggattgactctgaccagaagctttggcaactccatatcctttaaccactgcactgggtgagggatca

SEQ ID NO: 48078 - DNA, 110 bp, synthetic construct
  source 1..110: mol_type = other DNA
accagaagctttggcaactccatatcctttaaccactgcactgggtgagggatcaaacgcaaaactccccaggtgtctgcagtctgatttttaatccatggcgccaccac

SEQ ID NO: 48079 - DNA, 110 bp, synthetic construct
  source 1..110: mol_type = other DNA
tgggaactccagtaaaatttagttcttcatagtcctaaaaaaatcatgctccactaccaaaatagttttattccacctagtacctaataacagaagctaacagtgcacca

SEQ ID NO: 48080 - DNA, 110 bp, synthetic construct
  source 1..110: mol_type = other DNA
aatttagttcttcatagtcctaaaaaaatcatgctccactaccaaaatagttttattccacctagtacctaataacagaagctaacagtgcaccattaggttctcagagt

SEQ ID NO: 48081 - DNA, 110 bp, synthetic construct
  source 1..110: mol_type = other DNA
gtcagatttgtttccactgcaccacaacgggaaagcataaaatttttttaaattaaagtatagttgactcacaatattccttcaatttctgctatacagcaaagtgagcc

SEQ ID NO: 48082 - DNA, 110 bp, synthetic construct; identical to SEQ ID NO: 48081
  source 1..110: mol_type = other DNA

SEQ ID NO: 48083 - DNA, 110 bp, synthetic construct
  source 1..110: mol_type = other DNA
ggcgtagagtagcaggtggagcagagccagagcagctgagagggaaagagaaaaactgaggggaaagaaatgagggagaaccgatgggaatatagaagttggctgaggga

SEQ ID NO: 48084 - DNA, 110 bp, synthetic construct
  source 1..110: mol_type = other DNA
ctgaggggaaagaaatgagggagaaccgatgggaatatagaagttggctgagggacttgcagagagacagtaaaatgaaagagattaaaccttgaaagtagcaggtgagt

SEQ ID NO: 48085 - DNA, 110 bp, synthetic construct
  source 1..110: mol_type = other DNA
ggccctcagtgtcagatgctccaggggctcctcccaatgccgggtccccaggacctgacgctgggctcagaacgctcactcccgtaggtgattctcttacacagttactt

SEQ ID NO: 48086 - DNA, 110 bp, synthetic construct
  source 1..110: mol_type = other DNA
tgacgctgggctcagaacgctcactcccgtaggtgattctcttacacagttactttccagtctgtgggctgccccccgccccggtgggggtggcggggcggggttgctta

SEQ ID NO: 48087 - DNA, 110 bp, synthetic construct
  source 1..110: mol_type = other DNA
actgcacttcagaataaaagcttcccttgctactggcactcagacatgcacatccaaggaaacccatgggaagctgtcttccatcgttatctatcactcattgctggact

SEQ ID NO: 48088 - DNA, 110 bp, synthetic construct
  source 1..110: mol_type = other DNA
aaggaaacccatgggaagctgtcttccatcgttatctatcactcattgctggactgtattcacttctgcttaatattcccatgactacaccactgggtcagccactttga

SEQ ID NO: 48089 - DNA, 110 bp, synthetic construct
  source 1..110: mol_type = other DNA
cctggaatatccaggtgggtccagtgtaattgcatgagccttaaagagctgacatcagattaaaaaagaagagagaagaccttaaagacagcaaaggattcagtgtgtga

SEQ ID NO: 48090 - DNA, 110 bp, synthetic construct
  source 1..110: mol_type = other DNA
aaaggttttgatggttagaccctgatatgttgggtatgcatgttgtaacttctcgggcagtggttcgcagctgggagggacgaagcctcctggtgtgtctatgccatgct

SEQ ID NO: 48091 - DNA, 110 bp, synthetic construct
  source 1..110: mol_type = other DNA
cttcctcatctggaaaatggaggggagcacaggccctacttcaaagcacggctgtaaaaattcactaagatcctaaatgatctgcccttttacagcaagcagcacagagc

SEQ ID NO: 48092 - DNA, 110 bp, synthetic construct
  source 1..110: mol_type = other DNA
agaaagaaaaagaaaatcccagggacaaaaccacacaaacctgatttttcccagaccgaccagaagcctaaacgtcgtacttccgtgaactgctacgactggtcctgctc

SEQ ID NO: 48093 - DNA, 110 bp, synthetic construct
  source 1..110: mol_type = other DNA
gcagggtggccaaaaaaagaagaagagacaggaatatatttaaagctgaacactcacaaagaaagagttctcatctggagagatgagtatgtgtggcagctgttgagagg

SEQ ID NO: 48094 - DNA, 110 bp, synthetic construct
  source 1..110: mol_type = other DNA
tggcctacgccacagacacagcaacaccagatttgcactgtatctgcttacgctacagcttacggcaaagctggatcttttaacccgctgatcggggccaaggatcaaac

SEQ ID NO: 48095 - DNA, 110 bp, synthetic construct
  source 1..110: mol_type = other DNA
gaggtggctgtagatctccagcatcacgtcctggtacaggcgtctctgggcagagtccagctgaagccactcctccctgctgaagtccatggtcacatcctcaaatgaca

SEQ ID NO: 48096 - DNA, 110 bp, synthetic construct
  source 1..110: mol_type = other DNA
gcatggcttgatccggggttggacatatgccctacactctgctcctctgtctcggtttcactttctgtagctccagggtcacttcccaccagtctgacaacccagcagaa

SEQ ID NO: 48097 - DNA, 110 bp, synthetic construct
  source 1..110: mol_type = other DNA
agaggaagaaagttcccagagtggagaggggcccagagaaggagcggagaggccccgggggtccaggtcatccgggggcctcagggagggggaccctagctgctcacagt

SEQ ID NO: 48098 - DNA, 110 bp, synthetic construct; identical to SEQ ID NO: 48097
  source 1..110: mol_type = other DNA

SEQ ID NO: 48099 - DNA, 110 bp, synthetic construct
  source 1..110: mol_type = other DNA
caacctcatggtttctcgttggattcgttaaccactgcgccacggcgggaactccttttaaaatgttttcctataggcgacttaccatgttctgtggcacagcacagtga

SEQ ID NO: 48100 - DNA, 110 bp, synthetic construct; identical to SEQ ID NO: 48099
  source 1..110: mol_type = other DNA

SEQ ID NO: 48101 - DNA, 110 bp, synthetic construct
  source 1..110: mol_type = other DNA
tgagcccacctgcagacgtgctggaacctgctggctgaattttcttgtcctttttctttgtggcaggcagagctcttcccctgagacccagctcctgtacccatgggggg

SEQ ID NO: 48102 - DNA, 110 bp, synthetic construct
  source 1..110: mol_type = other DNA
gcatggattccctgtttattccagcttcccatctccctgtcctgtctgtaaaaacatctcgttcccttgcctggctggaacctgcacatgctcgccatggagacagacac

SEQ ID NO: 48103 - DNA, 110 bp, synthetic construct
  source 1..110: mol_type = other DNA
gcacagctttgcgctgccccctagtgggcaggttccaccgctggcccctctgcactgagagaaggaaggagggactgatagcgcatctcctaggagagagaagaggcttc

SEQ ID NO: 48104 - DNA, 110 bp, synthetic construct
  source 1..110: mol_type = other DNA
ctagggttctatagaatgtcctttcatctctagaatgttctcactcccatccttctcaaacagctactctcacaatcacaggctagacatgagccctagttattctcata

SEQ ID NO: 48105 - DNA, 110 bp, synthetic construct
  source 1..110: mol_type = other DNA
tcaaaatccataaatataagaagctcactcttttaatctctcaaacccagcttaaggtccttggtgtcgataaatatcttaaagtcggagttaatgtcccaacttgaact

SEQ ID NO: 48106 - DNA, 110 bp, synthetic construct
  source 1..110: mol_type = other DNA
ctcagaagtccaagtgaaatgatgaagggttgcattcctcttttcgtgagcttatctggaggttccatccagggagcaccactacttgtacacccctgaccgaacaacgg

SEQ ID NO: 48107 - DNA, 110 bp, synthetic construct
  source 1..110: mol_type = other DNA
ggcccaggaggaaatgggcgggcctcaatcttcaaaacgaggctcacatggaaccggcccgggccccatccctgaggatcccaattgaactggtctggggagtgctggag

SEQ ID NO: 48108 - DNA, 110 bp, synthetic construct
  source 1..110: mol_type = other DNA
taggcactctcctgggaggcagacacatgtacagggaatagaatatccaggctttaaacaaagacagaatccagctgtgccccggggagccatggcgaggtctaaaacac

SEQ ID NO: 48109 - DNA, 110 bp, synthetic construct
  source 1..110: mol_type = other DNA
aaacaaagacagaatccagctgtgccccggggagccatggcgaggtctaaaacacgaactgaccctgccatgtaggtcatttgatgtcactatcctcgcaatccacacct

SEQ ID NO: 48110 - DNA, 110 bp, synthetic construct; identical to SEQ ID NO: 48108
  source 1..110: mol_type = other DNA

SEQ ID NO: 48111 - DNA, 110 bp, synthetic construct; identical to SEQ ID NO: 48109
  source 1..110: mol_type = other DNA

SEQ ID NO: 48112 - DNA, 110 bp, synthetic construct
  source 1..110: mol_type = other DNA
gctttcgattttcttgcatacctgttccttttccattccatttagatcccagttcaggattccgactatgatcccacccgtgttttccagcccgccagcctgaatacacc

SEQ ID NO: 48113 - DNA, 110 bp, synthetic construct
  source 1..110: mol_type = other DNA
ctttgggagcctggttctttctttcccctcacgagggtgtacgaggcagatgtttggtgaggactaacaatcagttccaagctgtcgggtgggactcatgccacttttac

SEQ ID NO: 48114 - DNA, 110 bp, synthetic construct
  source 1..110: mol_type = other DNA
gcctctctttcacattttttctctgcttaccaagggcacacctggttacccccatttttcagtttttcgtgcccggtttcctttcctctccctccagaggctccctgtcc

SEQ ID NO: 48115 - DNA, 110 bp, synthetic construct
  source 1..110: mol_type = other DNA
ttttcagtttttcgtgcccggtttcctttcctctccctccagaggctccctgtcccttgcgctcccactgcctcgccctccaccgcttcacactcgatccgcgccccctg

SEQ ID NO: 48116 - DNA, 110 bp, synthetic construct
  source 1..110: mol_type = other DNA
tactcgctcactgcattttcatgtctgtctcctcccaccagaatggaagccccactggggagaggtgtgtgtctgctgtcctcggccactggatgatcagcctcttggag

SEQ ID NO: 48117 - DNA, 110 bp, synthetic construct
  source 1..110: mol_type = other DNA
tggggagaggtgtgtgtctgctgtcctcggccactggatgatcagcctcttggagggataccccacagagcaggagcgcagtaagtacctgtcagatccatgccctcggt

SEQ ID NO: 48118 - DNA, 110 bp, synthetic construct
  source 1..110: mol_type = other DNA
catggacagcaggaacctgccccaacgacggaatggcagaaaccagttgcgcatgttactctgaagaggacttgatacccggcatgcctaaggtactccagatagctaac

SEQ ID NO: 48119 - DNA, 110 bp, synthetic construct
  source 1..110: mol_type = other DNA
ttactctgaagaggacttgatacccggcatgcctaaggtactccagatagctaaccaccagagccctcatacaaaaccatgcaagggctccaaaagacatttctccagag

SEQ ID NO: 48120 - DNA, 110 bp, synthetic construct
  source 1..110: mol_type = other DNA
cgtcaagatagagaaagggattcctctagatgtaaggatgtgctgggatcccacggcagcctagaaccacaactcaaggggggcagtgctgagagggtctggtcaactgg

SEQ ID NO: 48121 - DNA, 110 bp, synthetic construct
  source 1..110: mol_type = other DNA
gcagcctagaaccacaactcaaggggggcagtgctgagagggtctggtcaactggaggagggctgcatgtattggtaacatctccaaataaccctgtatggggatgggtg

SEQ ID NO: 48122 - DNA, 110 bp, synthetic construct
  source 1..110: mol_type = other DNA
gcctccctggaagagagggctgtttctctgccaccactgccccaggaggctgtcctgtggtccaccctgaactctgcagccatcttgcaaactcaggccatctggatgaa

SEQ ID NO: 48123 - DNA, 110 bp, synthetic construct
  source 1..110: mol_type = other DNA
tgtggtccaccctgaactctgcagccatcttgcaaactcaggccatctggatgaatgtgcacttgtttgcaggtttgagggccttcacctgcccctcagggggcatttgt

SEQ ID NO: 48124 - DNA, 110 bp, synthetic construct
  source 1..110: mol_type = other DNA
gtgggcaggtgaagagctgcagtctacaccagagacagagaaagagaacttgcgtcccaggacttttttttaatggatcgcagtgcctggattcttcagggcacagacat

SEQ ID NO: 48125 - DNA, 110 bp, synthetic construct
  source 1..110: mol_type = other DNA
acacatactgacaacaaacttgtggtcacaaacgggggggaggggcaatatagggtggagacacagtacatacataccattgagtttaagataggctaaaggatatcttg

SEQ ID NO: 48126 - DNA, 110 bp, synthetic construct
  source 1..110: mol_type = other DNA
caatatagggtggagacacagtacatacataccattgagtttaagataggctaaaggatatcttgtgcaatacagggaatagagccaatatttagtaataactgaatggg

SEQ ID NO: 48127 - DNA, 110 bp, synthetic construct
  source 1..110: mol_type = other DNA
actgaggatgtggtggaaaagggaacctcccgtgcactgctgatgggactgtaaattgatgccaccaccatggagaacaatatggaagttccttatacagcaaaactata

SEQ ID NO: 48128 - DNA, 110 bp, synthetic construct
  source 1..110: mol_type = other DNA
gaaaagggaacctcccgtgcactgctgatgggactgtaaattgatgccaccaccatggagaacaatatggaagttccttatacagcaaaactatagagttaccatatgat

SEQ ID NO: 48129 - DNA, 110 bp, synthetic construct
  source 1..110: mol_type = other DNA
ttttaaatggtgcactagacaaattttccatcaagcaagctctcaaaaatattatgtcctattgacatttctcaagcagctattacagaacaggtctcctgaaacagtga

SEQ ID NO: 48130 - DNA, 110 bp, synthetic construct; identical to SEQ ID NO: 48129
  source 1..110: mol_type = other DNA

SEQ ID NO: 48131 - DNA, 110 bp, synthetic construct
  source 1..110: mol_type = other DNA
caagaacacatcctcacaccatgcacacaaataaactcaacatggcttcaggactcaaatataaaaacaaaacaccctccagcacctaaaagagaccataggcaaaacat

SEQ ID NO: 48132 - DNA, 110 bp, synthetic construct; identical to SEQ ID NO: 48131
  source 1..110: mol_type = other DNA

SEQ ID NO: 48133 - DNA, 110 bp, synthetic construct
  source 1..110: mol_type = other DNA
agaggacaccaccggggacaacgccggccctctgcccaaccaaaaaaaccctccaatacatttgcactgtgcctggcctgagcagtctcccaggcgaaatgagggcctgc

SEQ ID NO: 48134 - DNA, 110 bp, synthetic construct
  source 1..110: mol_type = other DNA
ggtaccatcttatagcgggactggaaaagggaatgaggcaggtagctgaataggaaaagtgaaagaagaaaggaacaagggagggagagaggccacggctgtgggatctg

SEQ ID NO: 48135 - DNA, 110 bp, synthetic construct
  source 1..110: mol_type = other DNA
gaagcatcagtggtacctatatagaaggaaaagggacaaaactaaaagatttaactaaatccctgatcccggtgggggactcgaacccctctctcagtagatgatggaac

SEQ ID NO: 48136 - DNA, 110 bp, synthetic construct
  source 1..110: mol_type = other DNA
tgcagacctggaattaattcccctcaactgtgaccccccaccaagaaattgcaacacgtgtggaaagcatctccagctttagagatgggaactaatcaaaacttttttgt

SEQ ID NO: 48137 - DNA, 110 bp, synthetic construct
  source 1..110: mol_type = other DNA
acgtgtggaaagcatctccagctttagagatgggaactaatcaaaacttttttgtgggagttcccttggtggcttagggttaagcaacccaaccagtattcatgaggaca

SEQ ID NO: 48138 - DNA, 110 bp, synthetic construct
  source 1..110: mol_type = other DNA
ccaacaaatgaaataggcaatcggctggaggaagcagtcttcattccagaaagaagaaggacctcgggaaccagtcccggggccactaaacatgagccataaagaatgca

SEQ ID NO: 48139 - DNA, 110 bp, synthetic construct
  source 1..110: mol_type = other DNA
ggcaatcggctggaggaagcagtcttcattccagaaagaagaaggacctcgggaaccagtcccggggccactaaacatgagccataaagaatgcaagcttgcacctaccc

SEQ ID NO: 48140 - DNA, 110 bp, synthetic construct
  source 1..110: mol_type = other DNA
gttggatttgtttccactgagccacaacgggaactcctaatgttggatattttctagggatgcctaggtgtgtatgtcaaggcttgtcaaatttaaaatacaaaagggat

SEQ ID NO: 48141 - DNA, 110 bp, synthetic construct; identical to SEQ ID NO: 48140
  source 1..110: mol_type = other DNA

SEQ ID NO: 48142 - DNA, 110 bp, synthetic construct
  source 1..110: mol_type = other DNA
gcaaaggtcacacacccaaccgctgtcatcaacagctaatactttcattttctataataaggcccttaaaatgggtatttttatggttgaagtgtggcagccctagagga

SEQ ID NO: 48143 - DNA, 110 bp, synthetic construct
  source 1..110: mol_type = other DNA
atgatagttgtctttccctgtctaacttcactcagtatgataattaatagatgtgaactattgcatttggagtggatgagtaatgagatctgctgtctggcacagagaac

SEQ ID NO: 48144 - DNA, 110 bp, synthetic construct
  source 1..110: mol_type = other DNA
gcaagagatggcactcctggggcttcaacatcacccaaacctcagttcaagagaccagttctggggtggagctcatgcttctggaaggttttggaaccaacagaccacca

SEQ ID NO: 48145 - DNA, 110 bp, synthetic construct
  source 1..110: mol_type = other DNA
tgtaggccgtgtaaggactgacgatccctgacggcacaacctctagcttgcaataggaaatccaccaggagtgatgagccagcatccacatttcactcaagtcttccgaa

SEQ ID NO: 48146 - DNA, 110 bp, synthetic construct
  source 1..110: mol_type = other DNA
cacggcgacacgcagcccacacgaaggatgagctggcaaacaggacgctgtgcatgctgaacacagaggggcccgggccaaacacacccatgagaaaacactgaacacgc

SEQ ID NO: 48147 - DNA, 110 bp, synthetic construct
  source 1..110: mol_type = other DNA
cagagctttctctgtgtgggcgcagcggaccccagggagggacctccgcttttcagctcccgaggagcctccgcacttgttctgatcaccacggacagggaagggcttgt

SEQ ID NO: 48148 - DNA, 110 bp, synthetic construct
  source 1..110: mol_type = other DNA
gctcccgaggagcctccgcacttgttctgatcaccacggacagggaagggcttgttaacaggtcacaaaagcacacacgcatgaaagaagagacacatgcgtctgaccac

SEQ ID NO: 48149 - DNA, 110 bp, synthetic construct
  source 1..110: mol_type = other DNA
gactgtctactcagggagcagagacctggtgccccgggtttcttgggggcactatagcacagcacattctgggcctccagaaggacagtgtggcataagccgcctggtta

SEQ ID NO: 48150 - DNA, 110 bp, synthetic construct
  source 1..110: mol_type = other DNA
gatgggaactccaggaaatgaatttaaatttactaatttaagcttcattttcccactttgttttgccatccccactgctgagaccacctcagaaaacagggcaaaggacg

SEQ ID NO: 48151 - DNA, 110 bp, synthetic construct
  source 1..110: mol_type = other DNA
gctttcaacacgatgggactcatggagaggagctctgtgactccctttggagagggagacatcaatcttatgttgaacctcatatatctgaacattaacactgggaagat

SEQ ID NO: 48152 - DNA, 110 bp, synthetic construct
  source 1..110: mol_type = other DNA
actgtttctgtctcttagcgcaagttgttccgggtaatgtagtgcaaagccctcagggaaggtttcccctgcacctgaatcgcctggaaaagagccaatcatcaggctgg

SEQ ID NO: 48153 - DNA, 110 bp, synthetic construct
  source 1..110: mol_type = other DNA
aaaacgaaacgaacaactaactttccatgacaccctcaacccctgtagctgcagatgctacagatgcacacccctgccacacaggtcttcctgtccatcctcatttagtc

SEQ ID NO: 48154 - DNA, 110 bp, synthetic construct
  source 1..110: mol_type = other DNA
gcattgtgtcagagaagaaggtgagtcaggcagcaccctagggaagattcttgctgtcgttgctccacaggtgtctgctaaataaccaccctggtaaaagcatctggtgg

SEQ ID NO: 48155 - DNA, 110 bp, synthetic construct
  source 1..110: mol_type = other DNA
cgagccacagtgggaacttgttttgttacttcctgtggccacacgctcagcacgtggaactttttttctgcccaggctcacagcatacagaagttcctggaccagggatc

SEQ ID NO: 48156 - DNA, 110 bp, synthetic construct
  source 1..110: mol_type = other DNA
cttcatattcccaagcatcattaagaggcagttggcctctggtacctgccgaggagcctgagttcagaatttaataggcaggtgtcgctggctggatgacctataggagc

SEQ ID NO: 48157 - DNA, 110 bp, synthetic construct
  source 1..110: mol_type = other DNA
agtgcggggcgcctgctcccgtgcctgcagcacagaccccagtgtccagaaaaacgaagcggtcgtggatggggccctatttctgatggacagtgtgatgtcgcgtggga

SEQ ID NO: 48158 - DNA, 110 bp, synthetic construct
  source 1..110: mol_type = other DNA
gatatatctccaacctgacgactcatcggagagttcacactggggaaaagcctcatgagtgtaatgagtgtggaaaattcttcagtcaaagctctaacctcatcacacat

SEQ ID NO: 48159 - DNA, 110 bp, synthetic construct
  source 1..110: mol_type = other DNA
acactgaacaaattttttaaaaatgaaggaaaaaaaatcactgcagaggcagcataacatagtggttaaaaacatgaactctggaagcaaacaatctctctactcctaac

SEQ ID NO: 48160 - DNA, 110 bp, synthetic construct
  source 1..110: mol_type = other DNA
gacgctcttcctatgcccttgatttgccatagaaacatcatttaatgagactcagggtctgtacctgatgaacaatgtctcatagaaatgactatcatatgggaattcct

SEQ ID NO: 48161 - DNA, 110 bp, synthetic construct
  source 1..110: mol_type = other DNA
ctttcttcccagctccgcaggggccacggggatgtgctgatcgcgtcgtaggcacttatgcgaacgaggtcaccacggcgaagcttatgtcaaggatcagtatgttggag

SEQ ID NO: 48162 - DNA, 110 bp, synthetic construct
  source 1..110: mol_type = other DNA
tgaccactgtggtcatgggctgcagagcaggcagtgtacccaccactgtgctcaacctgcactatgccagtgacctcaccagcgcaggccccagctggatcaaaaagggc

SEQ ID NO: 48163 - DNA, 110 bp, synthetic construct
  source 1..110: mol_type = other DNA
cctgcactatgccagtgacctcaccagcgcaggccccagctggatcaaaaagggcagaggagagttcccaggtgggctggtggaaaggactctgactactatccatgagg

SEQ ID NO: 48164 - DNA, 110 bp, synthetic construct
  source 1..110: mol_type = other DNA
aacagctccaagaaggtacataaaatgtacttaggaaccacactgttttaaggggaaagtgtctaacaataaatagggcactattgcagataattagggtattgctgtga

SEQ ID NO: 48165 - DNA, 110 bp, synthetic construct
  source 1..110: mol_type = other DNA
aaagtgtctaacaataaatagggcactattgcagataattagggtattgctgtgaaaaaaaggctggcattgaacacggattacatttatcatcagcagatagacacctg

SEQ ID NO: 48166 - DNA, 110 bp, synthetic construct
  source 1..110: mol_type = other DNA
aataatcagattccagatagatttttcaaggtggaatcaatggggtttccgattacatatgaagagtgatgccagaggcccgctccggcggccagggagcgtcctctttt

SEQ ID NO: 48167 - DNA, 110 bp, synthetic construct
  source 1..110: mol_type = other DNA
tcaaggtggaatcaatggggtttccgattacatatgaagagtgatgccagaggcccgctccggcggccagggagcgtcctctttttcccgatgggagagggatgcggcgt

SEQ ID NO: 48168 - DNA, 110 bp, synthetic construct
  source 1..110: mol_type = other DNA
gagaaggatgtcagaggctagaaaaacttagggcacgggctgttccccacctgcggggacgcagactcgcagaggtccaaccgcgtcctagtcggggtccaaggaaggag

SEQ ID NO: 48169 - DNA, 110 bp, synthetic construct
  source 1..110: mol_type = other DNA
atcttggcttccagtctgtcccccacgtccctcttgctaggccccacgtactgcatccttcatgtgctcagagcctccctggacacccaccttctgctagttcctgccag

SEQ ID NO: 48170 - DNA, 110 bp, synthetic construct
  source 1..110: mol_type = other DNA
atgttacgagctacgtgacattacttcaccaaacccctgagataacttcccaccgtactaggatgtcatacaaatgatctacaagatccagccccatcaccacctctcca

SEQ ID NO: 48171 - DNA, 110 bp, synthetic construct
  source 1..110: mol_type = other DNA
caaacaagcgcccttgagaactagtgcttttatcccaacctcccagcactgccacgagacccaaagatgcgtcgcctttaagggagctctggaggggagaggcctctcgg

SEQ ID NO: 48172 - DNA, 110 bp, synthetic construct
  source 1..110: mol_type = other DNA
gcagagctggttcccctccaaagtgcagacgaacgcccacaagtccgtccttcaaacggaatccaaaccgcccccggggaaggacaggacaggagaactctccttggcag

SEQ ID NO: 48173 - DNA, 110 bp, synthetic construct
  source 1..110: mol_type = other DNA
gcgctctgcaaaacgtgggtgttggtagatgggggcatttgtcaaacccttgtgtcaagtaaacacatgctggtccccaaggtccgggacagcggggctgggtctgccct

SEQ ID NO: 48174 - DNA, 110 bp, synthetic construct
  source 1..110: mol_type = other DNA
aggtgtgaagtgtcgacggcctcaacagcaaccagccctcgtcaacgcggactcccaggacatgtttacaaagcaagccctacgccggctcgtcccggcggcgcccgcaa

SEQ ID NO: 48175 - DNA, 110 bp, synthetic construct
  source 1..110: mol_type = other DNA
caggacatgtttacaaagcaagccctacgccggctcgtcccggcggcgcccgcaagtgtgccactggcaggaggcctttccgtgggacaccagccgtgggaccaccagaa

SEQ ID NO: 48176 - DNA, 110 bp, synthetic construct
  source 1..110: mol_type = other DNA
ttgcccatgtcctggggttagtccagaagtaaaaataaaaggagaagagccccgagccctggttacttcttcagctaaagcagccagccgggcaggtgcctggtgccggg

SEQ ID NO: 48177 - DNA, 110 bp, synthetic construct
  source 1..110: mol_type = other DNA
cccaatgctaacacccaaagcaggccagacccagagaagatgggatggcccagcgaggtccatgctgggatcacatgcccttaaatgatgccctaccctgtggagcccag

SEQ ID NO: 48178 - DNA, 110 bp, synthetic construct
  source 1..110: mol_type = other DNA
ttccttgctctcctggtcactggaggtttgcagtaggttttaaaatcggaaatgggaggcctctaacgtgttcttatcttattcaagattgttttggctatttgggtttc

SEQ ID NO: 48179 - DNA, 110 bp, synthetic construct
  source 1..110: mol_type = other DNA
gaatgacctctggggcccctcggagctaacagactgatctacagttgtgcggaagcagtttacagtttattgaagactgcaagagtgtcaacgggccgcatttcccacgt

SEQ ID NO: 48180 - DNA, 110 bp, synthetic construct
  source 1..110: mol_type = other DNA
cgtcagtgctggatcttcagcgtttgcctgtttcctgtgaccacaacctcttcactgagaggggtcaggccttttgcggaaagcccccagcatctgacggtttctctgga

SEQ ID NO: 48181 - DNA, 110 bp, synthetic construct
  source 1..110: mol_type = other DNA
gaaaaagcatctgacaaaattcaatacacttttatgatgaaaacaatcaacaaaataggactagaaggacgctaccacttcatcataaaagccacatatgaaaaccccac

SEQ ID NO: 48182 - DNA, 110 bp, synthetic construct; identical to SEQ ID NO: 48181
  source 1..110: mol_type = other DNA

SEQ ID NO: 48183 - DNA, 110 bp, synthetic construct
  source 1..110: mol_type = other DNA
gtttcgcattttccatcgcttgaaagaattcgaattgccactttaaaccacagaaaatctgcaaacagggttctgacttctccgtgtcacacatgagctattgtatgtgg

SEQ ID NO: 48184 - DNA, 110 bp, synthetic construct
  source 1..110: mol_type = other DNA
aatctgcaaacagggttctgacttctccgtgtcacacatgagctattgtatgtggatgcctctttctctcacgtggaaaaaattctctaagtggcccaggccgatcactt

SEQ ID NO: 48185 - DNA, 110 bp, synthetic construct
  source 1..110: mol_type = other DNA
cttatggagcataccgactaataagtactcacagcttggagttccctggtggctcagcaggttaaggatctggggttgtcactctgtggcacaggttccatccctggcct

SEQ ID NO: 48186 - DNA, 110 bp, synthetic construct
  source 1..110: mol_type = other DNA
agcaggttaaggatctggggttgtcactctgtggcacaggttccatccctggcctaggaacttccgtatatcacacctgtggccaaaaagaaaaaaaaacaaaaaatact

SEQ ID NO: 48187 - DNA, 110 bp, synthetic construct
  source 1..110: mol_type = other DNA
cgggaccccagaagcgcagtgatgggaaccacgaggggaaaggcctactccggctctgaccgaccctctgcctttcagatgatggcccctcgttgccgaccaaacagaac

SEQ ID NO: 48188 - DNA, 110 bp, synthetic construct
  source 1..110: mol_type = other DNA
ctgaccgaccctctgcctttcagatgatggcccctcgttgccgaccaaacagaacgaggagttccggcccttcattcgaaggctcccggagttcaaattttggtgagttc

SEQ ID NO: 48189 - DNA, 110 bp, synthetic construct
  source 1..110: mol_type = other DNA
tcttagcctcagacccagacttccgcagggccacgggccgcgggtggtccccaggcacctccagggtcctcaggcagtgtggcggcttcggatgaaaaagtggcgaagca

SEQ ID NO: 48190 - DNA, 110 bp, synthetic construct
  source 1..110: mol_type = other DNA
cacctccagggtcctcaggcagtgtggcggcttcggatgaaaaagtggcgaagcagaaaggttcacatacattcaccaatgtgaaacgcaagatcaattatgatttccac

SEQ ID NO: 48191 - DNA, 110 bp, synthetic construct
  source 1..110: mol_type = other DNA
ggtgtgcagcttcgtttgtgactgtttagaaaaaaatctgaaaaacctcaataactgaacagttattcaatggaagaacctccgtaggattgtttagatgacttaggtca

SEQ ID NO: 48192 - DNA, 110 bp, synthetic construct
  source 1..110: mol_type = other DNA
tgaacagttattcaatggaagaacctccgtaggattgtttagatgacttaggtcatggagcagccctgagaagtcaaggccatgctccacgggctcagggacaagggcgc

SEQ ID NO: 48193 - DNA, 110 bp, synthetic construct
  source 1..110: mol_type = other DNA
cagacgccctgatgtctcgctggctgggctccccaaagacctcaggcaggagctgttacagccccccccaccccatatttcctgccccagcggttagagctgcggcgggt

SEQ ID NO: 48194 - DNA, 110 bp, synthetic construct
  source 1..110: mol_type = other DNA
ttacagccccccccaccccatatttcctgccccagcggttagagctgcggcgggtcccgggagctctgggcaccacgtgctttccctgtgtcagcggcacagcctctcgc

SEQ ID NO: 48195 - DNA, 110 bp, synthetic construct
  source 1..110: mol_type = other DNA
cagtgactgctctgcaagacctgagacgacggttgaccgttcgtaggaagtgtggggaaatggggacatgtcgtggacacacaggaaagcagtgtagacagccggccatc

SEQ ID NO: 48196 - DNA, 110 bp, synthetic construct
  source 1..110: mol_type = other DNA
ggaaatggggacatgtcgtggacacacaggaaagcagtgtagacagccggccatccctgctgcctctgtgcgcagcagctctgagtcagggatcagagcctggttccaag

SEQ ID NO: 48197 - DNA, 110 bp, synthetic construct
  source 1..110: mol_type = other DNA
ccaggtgtagaaaggctttcaggcatggctggatccaggtgttcaaacagttgtccctctgtgtcttgcctggccttccccacgatggctttgttcttaggcagcatctt

SEQ ID NO: 48198 - DNA, 110 bp, synthetic construct
  source 1..110: mol_type = other DNA
cctctgtgtcttgcctggccttccccacgatggctttgttcttaggcagcatcttctcccatgatgaaaggtaccaagctccaccagcattggctggatccaggtgttca

SEQ ID NO: 48199 - DNA, 110 bp, synthetic construct
  source 1..110: mol_type = other DNA
ggttccatgtcttccccctctctccccggcaccctatctgcggggcccttgaatggtggcagtgcctgctttccgggtttgctgactgcatcctcctggtgctgtgtatc

SEQ ID NO: 48200 - DNA, 110 bp, synthetic construct
  source 1..110: mol_type = other DNA
gtggcagtgcctgctttccgggtttgctgactgcatcctcctggtgctgtgtatcgtgtttctctgtcctgagtcttcctgagaagaggcggctgagagcagaggctcaa

SEQ ID NO: 48201 - DNA, 110 bp, synthetic construct
  source 1..110: mol_type = other DNA
agaagacagaccactggggccacctcaaagctgcctgcccaggtgagtgcacagctgggtttctgtacttgtgaggtgaggggatagtgacaccactcctgtggggttgg

SEQ ID NO: 48202 - DNA, 110 bp, synthetic construct
  source 1..110: mol_type = other DNA
tgggtttctgtacttgtgaggtgaggggatagtgacaccactcctgtggggttggtttgagaggatgtgtgtcctcaaaattctgagcctggagatctttgcatcagaaa

SEQ ID NO: 48203 - DNA, 110 bp, synthetic construct
  source 1..110: mol_type = other DNA
cagtgacaagacaccgtggaagccttcagttcattttccaaagaccaaagagatacgcagttcaaccaagtgagctaatctcaacaaaagctaaattatgtttcctggtg

SEQ ID NO: 48204 - DNA, 110 bp, synthetic construct
  source 1..110: mol_type = other DNA
cgcagttcaaccaagtgagctaatctcaacaaaagctaaattatgtttcctggtgcaaaactgatgagtgatccattttgtcactgtggacagaagtgggggaccggaac

SEQ ID NO: 48205 - DNA, 110 bp, synthetic construct
  source 1..110: mol_type = other DNA
agtatcaccacctacctcatcagaagagcctttcagtactggaaaaagctgtcaagctccgcgtggtggagatgagtttccctaaattctactttttgctttgaaagccc

SEQ ID NO: 48206 - DNA, 110 bp, synthetic construct
  source 1..110: mol_type = other DNA
gctccgcgtggtggagatgagtttccctaaattctactttttgctttgaaagcccgaattctattcttggcaacaaataatttccgccgtttcccatggagtgacaggtt

SEQ ID NO: 48207 - DNA, 110 bp, synthetic construct
  source 1..110: mol_type = other DNA
aagttatcatttggctaaagcttgcagagagatttttttgtgatggcgtgaaatgttttctgcttgatccaggtttaaagtcgctgggcaattaatggccaggatggaat

SEQ ID NO: 48208 - DNA, 110 bp, synthetic construct
  source 1..110: mol_type = other DNA
ttttctgcttgatccaggtttaaagtcgctgggcaattaatggccaggatggaatgggatcctgtgagggttctgctgccctcgctcccccggcaggttcgttggcccag

SEQ ID NO: 48209 - DNA, 110 bp, synthetic construct
  source 1..110: mol_type = other DNA
agtccgcagagcacacctggggcctgggccactgctcttggcagactctgtagacaagccctggggcatcacaacctggcagggctgctgcccaggaaggcacagtcagc

SEQ ID NO: 48210 - DNA, 110 bp, synthetic construct
  source 1..110: mol_type = other DNA
aagccctggggcatcacaacctggcagggctgctgcccaggaaggcacagtcagctcctgggggccatggcactgaatacctgctcagatgaccgcattggaaccaggat

SEQ ID NO: 48211 - DNA, 110 bp, synthetic construct
  source 1..110: mol_type = other DNA
tgacagagcaggggtttgcctctgggtgcgtctttggctaaaccctaacacagcttgcagccacgttctggggctgctgtaatggactccacagactgcggggcttagaa

SEQ ID NO: 48212 - DNA, 110 bp, synthetic construct
  source 1..110: mol_type = other DNA
tgcagccacgttctggggctgctgtaatggactccacagactgcggggcttagaacaagacagactgattctcgcacagtcccggaggttggggtcctactccctctcca

SEQ ID NO: 48213 - DNA, 110 bp, synthetic construct
  source 1..110: mol_type = other DNA
gttcctagtcggattcctttctgcggcaccacagtgggaactcccacacatgtacttttaaggactgctttagccatgtctcacaagttctgatacaaagtggcattttt

SEQ ID NO: 48214 - DNA, 110 bp, synthetic construct; identical to SEQ ID NO: 48213
  source 1..110: mol_type = other DNA

SEQ ID NO: 48215 - DNA, 110 bp, synthetic construct
  source 1..110: mol_type = other DNA
ctataaagcctgttgccagctcccctgctggttccctcagctgcagagcgcagccctgagtggctctgcatggggcagggtctctggtcccaggccctgaagacaggtga

SEQ ID NO: 48216 - DNA, 110 bp, synthetic construct
  source 1..110: mol_type = other DNA
ctgagtggctctgcatggggcagggtctctggtcccaggccctgaagacaggtgactaacagatgctgtccttctcatctggcccacgtctggcacgtcctgctattgca

SEQ ID NO: 48217 - DNA, 110 bp, synthetic construct
  source 1..110: mol_type = other DNA
ccccatgcccatgtttgcaagctgtgagacctttggtcaaggaggtaatgtgacaagattgtgcagctggtaagtgtaagaggcagcacttgaaatgatttgtttggctc

SEQ ID NO: 48218 - DNA, 110 bp, synthetic construct
  source 1..110: mol_type = other DNA
agattgtgcagctggtaagtgtaagaggcagcacttgaaatgatttgtttggctcttgaaaaaggaacaaacaaaacctgtatcattctgactgccacccttttgttgga

SEQ ID NO: 48219 - DNA, 110 bp, synthetic construct
  source 1..110: mol_type = other DNA
gtcctccctgccggtacctgggccgggcagagatggctgtccagccatggagaattacagctgtgttttcaggtgcgctggagtttttatgtctagacaaataaaatttg

SEQ ID NO: 48220 - DNA, 110 bp, synthetic construct
  source 1..110: mol_type = other DNA
tacagctgtgttttcaggtgcgctggagtttttatgtctagacaaataaaatttgtttctcggccagcacgcatggctcagtcattgtaacgttgccacttaggcgcttg

SEQ ID NO: 48221 - DNA, 110 bp, synthetic construct
  source 1..110: mol_type = other DNA
ccacatggcccatatgggcaaggtccagcctccagagagacgtgggggaaggaatagcccacagatgctggagagaagcttaacagctcccagttgtgctcctgctgggc

SEQ ID NO: 48222 - DNA, 110 bp, synthetic construct
  source 1..110: mol_type = other DNA
agcccacagatgctggagagaagcttaacagctcccagttgtgctcctgctgggccttgttaccaccacggtccccgggccccagaaactgtgctgtgtgtggctgggcc

SEQ ID NO: 48223 - DNA, 110 bp, synthetic construct
  source 1..110: mol_type = other DNA
aagatattagcgttatcccagctctctcgaaatgctccaccttataatctgttttctttaagaggttagtcatggtgacttttaatgttgttggctgataactctgaaac

SEQ ID NO: 48224 - DNA, 110 bp, synthetic construct; identical to SEQ ID NO: 48223
  source 1..110: mol_type = other DNA

SEQ ID NO: 48225 - DNA, 110 bp, synthetic construct
  source 1..110: mol_type = other DNA
gatccttgacccactgtgcagggctgggattgaactcacgccacggcagagacagtgctggatccttaacccacggggccacagcagggactccagccatgcctttctta

SEQ ID NO: 48226 - DNA, 110 bp, synthetic construct
  source 1..110: mol_type = other DNA
tgctggatccttaacccacggggccacagcagggactccagccatgcctttcttactgcatttatttcacttctttaaactgtgggctcacagtgcctgcaaacatgccc

SEQ ID NO: 48227 - DNA, 110 bp, synthetic construct
  source 1..110: mol_type = other DNA
ctattaggagatattattaccgatcccattacagtgatgcagacacagtagctcatcgaggttcagaggtgggcccaagtttgccaagcaaagaaagggcagaggtctga

SEQ ID NO: 48228 - DNA, 110 bp, synthetic construct
  source 1..110: mol_type = other DNA
tcgaggttcagaggtgggcccaagtttgccaagcaaagaaagggcagaggtctgattcagaatggtctggttccaatgtcacagcctcaacctccatcctgcatgtcatc

SEQ ID NO: 48229 - DNA, 110 bp, synthetic construct
  source 1..110: mol_type = other DNA
ctgtctggcctcctgccatgaaaaatgcctttgaggcctgtccactggggagaggccagcggggcagctcggggcaccgggcgaggactgcgcagttagggtgccattaa

SEQ ID NO: 48230 - DNA, 110 bp, synthetic construct
  source 1..110: mol_type = other DNA
ccagcggggcagctcggggcaccgggcgaggactgcgcagttagggtgccattaaccctgggatcctcagcaaaactgcttccctcaaaggctgcctgctccaaaatgtg

SEQ ID NO: 48231 - DNA, 110 bp, synthetic construct; identical to SEQ ID NO: 48229
  source 1..110: mol_type = other DNA

SEQ ID NO: 48232 - DNA, 110 bp, synthetic construct; identical to SEQ ID NO: 48230
  source 1..110: mol_type = other DNA

SEQ ID NO: 48233 - DNA, 110 bp, synthetic construct
  source 1..110: mol_type = other DNA
tttttgtggtcgcacctgcaggacatggaagttcccaggctaggggtcgagcctatgccacaaccacggcaatgcacatgccgagctgtatctgcggcctatgctgcagc

SEQ ID NO: 48234 - DNA, 110 bp, synthetic construct
  source 1..110: mol_type = other DNA
ctgcaggacatggaagttcccaggctaggggtcgagcctatgccacaaccacggcaatgcacatgccgagctgtatctgcggcctatgctgcagctcatggccatgctgg

SEQ ID NO: 48235 - DNA, 110 bp, synthetic construct
  source 1..110: mol_type = other DNA
aaatccagcaagtaaattggaattaggtcagaaggaaacacggggaaaatatcagttcacaagaagaaaagtgaaagatggcagtgagccagggagctgatggcaccttc

SEQ ID NO: 48236 - DNA, 110 bp, synthetic construct
  source 1..110: mol_type = other DNA
ttcacaagaagaaaagtgaaagatggcagtgagccagggagctgatggcaccttcctgggaggggggctggcagctctcctggccttgcccctggggagtcgcccagcta

SEQ ID NO: 48237 - DNA, 110 bp, synthetic construct
  source 1..110: mol_type = other DNA
atgagggggtgagcgtggagaggagctgggcagggcatggttgtcacgggctgggggctgtcagaacattttctcatgatgagactagaaaaactacctcaggggagcat

SEQ ID NO: 48238 - DNA, 110 bp, synthetic construct
  source 1..110: mol_type = other DNA
ggctgtcagaacattttctcatgatgagactagaaaaactacctcaggggagcatcctctgggatccgggctaaaggaatgaaccccaaaggggacatgggcggacttct

SEQ ID NO: 48239 - DNA, 110 bp, synthetic construct
  source 1..110: mol_type = other DNA
gtgcaaatcgggatgcaaaaacagattgtggcataattaatttatcacctccctttgagataaaataaaagggagaacaatcgggcggcagtaactcagaaaatattttc

SEQ ID NO: 48240 - DNA, 110 bp, synthetic construct
  source 1..110: mol_type = other DNA
tgagataaaataaaagggagaacaatcgggcggcagtaactcagaaaatattttcttcctttaagttaatgggccccatggttttagacggagccatagcaaactctccc

SEQ ID NO: 48241 - DNA, 110 bp, synthetic construct
  source 1..110: mol_type = other DNA
gactatcagtaacagctgatgttcactgagcttgtagcgcgtgtgcccccccgttatgtcatataatcctcccagcagctgagggacaagggatctcgattatcaccacg

SEQ ID NO: 48242 - DNA, 110 bp, synthetic construct
  source 1..110: mol_type = other DNA
atgtcatataatcctcccagcagctgagggacaagggatctcgattatcaccacgttcctttcacctaaggtgagactcacaacgaaacagtcaaggttaagatctgaat

SEQ ID NO: 48243 - DNA, 110 bp, synthetic construct
  source 1..110: mol_type = other DNA
taaagcgcttagaaacgcacctgctccagggcccccctccatctccagagcatggagtaaggagatctggagtgtgagatagcactcccgcctgacccctccccagccag

SEQ ID NO: 48244 - DNA, 110 bp, synthetic construct
  source 1..110: mol_type = other DNA
agtaaggagatctggagtgtgagatagcactcccgcctgacccctccccagccaggaaccctgactttggaaaaatcctctctccacacatcccacccccccacaagaag

SEQ ID NO: 48245 - DNA, 110 bp, synthetic construct
  source 1..110: mol_type = other DNA
cgagtactcgctacttcagagcccaggtgttttacaaacaatccctctgctctggagcacagttccggtcccacacgggtcaccaaggtcaaggggaccaggtctctggg

SEQ ID NO: 48246 - DNA, 110 bp, synthetic construct
  source 1..110: mol_type = other DNA
tctgctctggagcacagttccggtcccacacgggtcaccaaggtcaaggggaccaggtctctgggggcagagtcacagggagggggaagggggctccaggtaaggcggcc

SEQ ID NO: 48247 - DNA, 110 bp, synthetic construct
  source 1..110: mol_type = other DNA
actgaggggagggcgggaaccaggagtgaacctggggagagtgaaccaggcgaaggagcggcaggccaggggctccgggccacgcgagctgggtgctcagggaccaggaa

SEQ ID NO: 48248 - DNA, 110 bp, synthetic construct
  source 1..110: mol_type = other DNA
gagcggcaggccaggggctccgggccacgcgagctgggtgctcagggaccaggaagaaagcctcctaactgtgcttaaggacatgaactaatttttcttacttcccctgt

SEQ ID NO: 48249 - DNA, 110 bp, synthetic construct
  source 1..110: mol_type = other DNA
ctgcacgcaggtaggagctacaggggccactcctgactctgaccacctccttaagaagctggcccttcacagtggccctcaaggtgagtggcccacatcagggtgccaca

SEQ ID NO: 48250 - DNA, 110 bp, synthetic construct
  source 1..110: mol_type = other DNA
aagctggcccttcacagtggccctcaaggtgagtggcccacatcagggtgccacaatcttgctggaaggcccaggaggtgctcagtgcagggggacgacaagccccggga

SEQ ID NO: 48251 - DNA, 110 bp, synthetic construct
  source 1..110: mol_type = other DNA
acggaggagctgtggatgctggcgctgtcgaagtccgactcctcccgctcatcctcctcgctctgcaggggcaggaaagggcctgtgagcccagagccggccctggggct

SEQ ID NO: 48252 - DNA, 110 bp, synthetic construct
  source 1..110: mol_type = other DNA
ggctccctgcacgcggcccccacccacggcccagctgccgcctccttgcagcctgtcttcctccatccggcaaagtaaataaatacataagttgttggctgttgctgttt

SEQ ID NO: 48253 - DNA, 110 bp, synthetic construct
  source 1..110: mol_type = other DNA
gccctccgggtctagctgctgtcaggctcccactcttattagctgggtgacccgagcaagctgcccaacccagccctccacttctcatgtgtgaaggagaaacagcgctg

SEQ ID NO: 48254 - DNA, 110 bp, synthetic construct
  source 1..110: mol_type = other DNA
acacgaatgcacacttgtgcagaagccaggcacacatgccaatgcgtgctgactacgccctgagcttagggggtcagtctacctgccatgcttgcttcaggccaccaggt

SEQ ID NO: 48255 - DNA, 110 bp, synthetic construct
  source 1..110: mol_type = other DNA
tcaggcagcccagggtcaggctggggctgggacctggaggctgctgagggcccgcatgagctctggcaccagctctcatctcacaggcctcactcctgccccttcctgca

SEQ ID NO: 48256 - DNA, 110 bp, synthetic construct
  source 1..110: mol_type = other DNA
aagagatgaggtgggggactctgacattctgaaaacagaaggcactaggcctgcgagcgggctgaatgtggtgacaaaggcaaggggtgccaggaggccccaggggcctg

SEQ ID NO: 48257 - DNA, 110 bp, synthetic construct
  source 1..110: mol_type = other DNA
cagccctcctcgatgccctgggacaacagggcctggaggaaggcagggtgaggccaaggccactcccagatttctggaaggacccctccacttctgctggtactccagaa

SEQ ID NO: 48258 - DNA, 110 bp, synthetic construct
  source 1..110: mol_type = other DNA
aaggccactcccagatttctggaaggacccctccacttctgctggtactccagaagcggcccccctctcctgataggggagcaagtaggcacaggtggtggctgcaggag

SEQ ID NO: 48259 - DNA, 110 bp, synthetic construct
  source 1..110: mol_type = other DNA
cctcttcccaacgccagcccagaacagcattctggcaggaaggacactggtctcgtgtgatgcagtcacactcgtaatcacttctgtgctcccactggcctgtgttctgc

SEQ ID NO: 48260 - DNA, 110 bp, synthetic construct
  source 1..110: mol_type = other DNA
tgtgatgcagtcacactcgtaatcacttctgtgctcccactggcctgtgttctgcttagacctggttcacaggtcctgcccacattcagggggtgggggtgacacagggg

SEQ ID NO: 48261 - DNA, 110 bp, synthetic construct
  source 1..110: mol_type = other DNA
cacaaggaggtgagcacaggccaggatggtccggggcactttctgggaggcagaggccgagctctccctgcaggacagatgatccatgagtaggcagaaaggaggggaaa

SEQ ID NO: 48262 - DNA, 110 bp, synthetic construct
  source 1..110: mol_type = other DNA
gccgagctctccctgcaggacagatgatccatgagtaggcagaaaggaggggaaagaaatattccagatctgagccaggcaaatagcaggagcaggggcactggggtggg

SEQ ID NO: 48263 - DNA, 110 bp, synthetic construct
  source 1..110: mol_type = other DNA
tgtggctctggcatagcctggcagctacggctctgattcgactcttagcctggaaacttccatacgccgcaagtgcagccctaaaaagaaaaaaattcagaaagtacaga

SEQ ID NO: 48264 - DNA, 110 bp, synthetic construct; identical to SEQ ID NO: 48263
  source 1..110: mol_type = other DNA

SEQ ID NO: 48265 - DNA, 110 bp, synthetic construct
  source 1..110: mol_type = other DNA
ttcaagtgtttggttccattagccccagggggctcacaccagcttcctccctgactcatgctggttggatgtttctcactctgcagggttgtctgtctatgtgtcttggc

SEQ ID NO: 48266 - DNA, 110 bp, synthetic construct
  source 1..110: mol_type = other DNA
tcgcggtatgtttccactggttttgttctttaggtcccatatcgaagtgagaactgtagtaactgatttgcagggtttctttgtattttctagatcctaggtgctttgtc

SEQ ID NO: 48267 - DNA, 110 bp, synthetic construct
  source 1..110: mol_type = other DNA
ggaaacacgtgtgtagtttctgcctgccttccatctctggtagattacagcacgtgcagtattctgcaatttcctttttcaacttgattggagccttattgagctagaaa

SEQ ID NO: 48268 - DNA, 110 bp, synthetic construct
  source 1..110: mol_type = other DNA
tttacccgcatcccactccttccttccttaatgctgcagggtgagcagctcccgagaacccactacccaggctcccttcttaagcttcattccttcacttccagaggggc

SEQ ID NO: 48269 - DNA, 110 bp, synthetic construct
  source 1..110: mol_type = other DNA
cttccagggcgcatccgctgtttcctattagagtttcatgcatccctttgacacatttttatcgtcaggttagaagaaaatattccactcgtttgcaacattctcattat

SEQ ID NO: 48270 - DNA, 110 bp, synthetic construct
  source 1..110: mol_type = other DNA
atgagaaaagaatttctctctggaatatcgagtataattaaaactctgccttgaaaaaaaaaattcccagccaccatggagcgtatgagaggaagtgaaaatgttaacag

SEQ ID NO: 48271 - DNA, 110 bp, synthetic construct
  source 1..110: mol_type = other DNA
aaaaaaaattcccagccaccatggagcgtatgagaggaagtgaaaatgttaacagacaacccccggtttcctctccctgtgacatagattattaagtcaggttcgaaaaa

SEQ ID NO: 48272 - DNA, 110 bp, synthetic construct
  source 1..110: mol_type = other DNA
ctccctgagagttgttcctcctcgtgtccactcctcacactgttcttgaacttgaaccctcacgccccttcctctccaacccagctctggctgttttctaaaaccgaatc

SEQ ID NO: 48273 - DNA, 110 bp, synthetic construct
  source 1..110: mol_type = other DNA
accctcacgccccttcctctccaacccagctctggctgttttctaaaaccgaatctatctgcaaaacatgcaggttttatacttggaacaaacaatgtatgagcagaaaa

SEQ ID NO: 48274 - DNA, 110 bp, synthetic construct
  source 1..110: mol_type = other DNA
cttacctgcaggctgcaaatcatgtcccaaacctcccccgtgcctcccggttcgtgtttagtcggagctcgggggtcacccacgtcctgatctggtctgaggctgtcagg

SEQ ID NO: 48275 - DNA, 110 bp, synthetic construct
  source 1..110: mol_type = other DNA
gtttagtcggagctcgggggtcacccacgtcctgatctggtctgaggctgtcaggcccatcgcagagactctttctgggtgccccctatcatggtcctgcagtgacattc

SEQ ID NO: 48276 - DNA, 110 bp, synthetic construct
  source 1..110: mol_type = other DNA
ttagatcctggatctgaggcgctcgttttgtaggaaactgattgagagatgccgaaataagtttattttgtagcaacagcttgtatccaggatctcgtgcatctttttag

SEQ ID NO: 48277 - DNA, 110 bp, synthetic construct
  source 1..110: mol_type = other DNA
aataagtttattttgtagcaacagcttgtatccaggatctcgtgcatctttttagagtgactttttgtcatccgtgtcgtagtcacagttaccgttggcaaatgtgtaat

SEQ ID NO: 48278 - DNA, 110 bp, synthetic construct
  source 1..110: mol_type = other DNA
gagacactcccctctgtccttggcccctggtttagggtgcttttcccaagccgcctacaagcactggcaggactagggtatcggtagtgatgtggaaatgaaagcccaga

SEQ ID NO: 48279 - DNA, 110 bp, synthetic construct
  source 1..110: mol_type = other DNA
tacaagcactggcaggactagggtatcggtagtgatgtggaaatgaaagcccagataggaagaagaatatggtatttaagtggtttgaaagcacacgtttgaagatcccc

SEQ ID NO: 48280 - DNA, 110 bp, synthetic construct
  source 1..110: mol_type = other DNA
aaaaagacaaaaaaaaaagaagaagaagaaggtctgggagaagggggtgctgtaggtcagtgcacagatggagagcttggtcctggataggatgaagggatggaggaaag

SEQ ID NO: 48281 - DNA, 110 bp, synthetic construct
  source 1..110: mol_type = other DNA
gtcagtgcacagatggagagcttggtcctggataggatgaagggatggaggaaagagtgggaggaaatatacaaggaggtttgcaggcttggtggccagcggccaagggc

SEQ ID NO: 48282 - DNA, 110 bp, synthetic construct
  source 1..110: mol_type = other DNA
agcctgctcggaaccagaaacccagacagacgagctctctgtggaagtaagccgaggacgtgcacccctcacccccggagagtgctgagaactctcccagctcctagggc

SEQ ID NO: 48283 - DNA, 110 bp, synthetic construct
  source 1..110: mol_type = other DNA
ggacgtgcacccctcacccccggagagtgctgagaactctcccagctcctagggcaaagctaatgcctcccggcaaatcacttcgcctgcagggtctggttctctatcgg

SEQ ID NO: 48284 - DNA, 110 bp, synthetic construct
  source 1..110: mol_type = other DNA
ctctccctaccctgccttcagggggccctctcaggaacaggaaagatctcgcccagagcctcctaaattctgtgtgcagccacgatgcccggcgccctcgccttatcacg

SEQ ID NO: 48285 - DNA, 110 bp, synthetic construct
  source 1..110: mol_type = other DNA
gagcctcctaaattctgtgtgcagccacgatgcccggcgccctcgccttatcacggcctagccatgcacttgtgactggacatctgtgaaaccatccaagccataagacc

SEQ ID NO: 48286 - DNA, 110 bp, synthetic construct; identical to SEQ ID NO: 48284
  source 1..110: mol_type = other DNA

SEQ ID NO: 48287 - DNA, 110 bp, synthetic construct; identical to SEQ ID NO: 48285
  source 1..110: mol_type = other DNA

SEQ ID NO: 48288 - DNA, 110 bp, synthetic construct
  source 1..110: mol_type = other DNA
gccaaaacccttttttggcaaggtcggcagcaggggaagagggaggactaacacgcagaaaatgctcagggaggcggcatctgggccctacacgccaggtccaagcacca

SEQ ID NO: 48289 - DNA, 110 bp, synthetic construct
  source 1..110: mol_type = other DNA
ccagggcatgtgccagttgagcgagagggtttgcgtttcacctctcactgcgtccaggaggagttaaaggagcaaatgctgaaccatttcatttgcagtggtgctacttc

SEQ ID NO: 48290 - DNA, 110 bp, synthetic construct
  source 1..110: mol_type = other DNA
attttctaagtatttcttgaacccacccgcatctctcccccgccactgccccagcttcggctcgcagcatctaccactatcctagtcataagcctcacagcactgacacg

SEQ ID NO: 48291 - DNA, 110 bp, synthetic construct
  source 1..110: mol_type = other DNA
ttcggctcgcagcatctaccactatcctagtcataagcctcacagcactgacacgcctactttttcctctggaactgcaaccacgaggatcttcgtaaaaggcaaatcca

SEQ ID NO: 48292 - DNA, 110 bp, synthetic construct
  source 1..110: mol_type = other DNA
gtgagaagacatatcacggcaaaaatgatgaagcagtaagcgccgaggcccacctgtgggaggggagcaggttcacgttcctcaagagagtctggatttaccgcttgagg

SEQ ID NO: 48293 - DNA, 110 bp, synthetic construct
  source 1..110: mol_type = other DNA
gtgggaggggagcaggttcacgttcctcaagagagtctggatttaccgcttgaggagttggggcatctggggcccgcggggtcacacttacttgaatgaatgggaagatc

SEQ ID NO: 48294 - DNA, 110 bp, synthetic construct
  source 1..110: mol_type = other DNA
aagagccactgcccaaggtgcactttctgctgtttctgtgccatccccacccccatctagaggagcttaaggaggtcccctgtgcattgtcatttaagtcctcccaccca

SEQ ID NO: 48295 - DNA, 110 bp, synthetic construct
  source 1..110: mol_type = other DNA
tctagaggagcttaaggaggtcccctgtgcattgtcatttaagtcctcccacccactcctaacacagaggtgagcgcatcccttcttcaatgctatccctacagcggcaa

SEQ ID NO: 48296 - DNA, 110 bp, synthetic construct
  source 1..110: mol_type = other DNA
atagtgtctgtaagctgaaggagactgtgtgtctcctgattcctcgcagagatttgaggagctgaacgaatactcggcctctctcccgctccctcacctcctcttcattc

SEQ ID NO: 48297 - DNA, 110 bp, synthetic construct
  source 1..110: mol_type = other DNA
gaggagctgaacgaatactcggcctctctcccgctccctcacctcctcttcattctgtatcttctgctttcccagccaaggaaaggggactgatccagaggaaaggcaga

SEQ ID NO: 48298 - DNA, 110 bp, synthetic construct
  source 1..110: mol_type = other DNA
gaagactatgtgcccagcacagcctagactgacagtcctagaagaggcagggtgctgctgtggcattagaaacctgggtccttgagctctcgttgtggctcaggggtcac

SEQ ID NO: 48299 - DNA, 110 bp, synthetic construct
  source 1..110: mol_type = other DNA
tcctagaagaggcagggtgctgctgtggcattagaaacctgggtccttgagctctcgttgtggctcaggggtcacgaacctgattagtatctatgaggacatgggttcga

SEQ ID NO: 48300 - DNA, 110 bp, synthetic construct
  source 1..110: mol_type = other DNA
gaaaaactcttgagaatttttttttcctctgttgctgtttagaatgtttgagaccgaagcaggaaaggccgtcgagtgtctggctccttatcacctgttggacattcctt

SEQ ID NO: 48301 - DNA, 110 bp, synthetic construct
  source 1..110: mol_type = other DNA
gaagcaggaaaggccgtcgagtgtctggctccttatcacctgttggacattccttttggactcgtgcgttctggaaggtttcgatgcgttaacgttaacagttaattata

SEQ ID NO: 48302 - DNA, 110 bp, synthetic construct; identical to SEQ ID NO: 48300
  source 1..110: mol_type = other DNA

SEQ ID NO: 48303 - DNA, 110 bp, synthetic construct; identical to SEQ ID NO: 48301
  source 1..110: mol_type = other DNA

SEQ ID NO: 48304 - DNA, 110 bp, synthetic construct
  source 1..110: mol_type = other DNA
atctcatccatggccactgaggcgttttaccagccttttgtctttagagctgttgtcatagtaaacatcacctttggaagtggtttttggcttcgttggataattttcgg

SEQ ID NO: 48305 - DNA, 110 bp, synthetic construct
  source 1..110: mol_type = other DNA
ctggagacattgtgagcttgaaaacattgagggtctgtctggaaaggtgcgcccggcttggactgggcagagaacggatgcgaaaccaaacccaggtcacaaagaccaaa

SEQ ID NO: 48306 - DNA, 110 bp, synthetic construct
  source 1..110: mol_type = other DNA
tggaccctgctgttaacacagcaccagtgttggaggtgcccaaatgctgagaatggctgctgcctgctttcagccttcccacccttcttagtaaccggggctcaaagtga

SEQ ID NO: 48307 - DNA, 110 bp, synthetic construct
  source 1..110: mol_type = other DNA
ttttagggttcctctttttcataggctttcagcatacaggtatgtgctaatttacataaaaaatctagctatgtttgtttaccctgaaaacacagccaaagtactgcaat

SEQ ID NO: 48308 - DNA, 110 bp, synthetic construct
  source 1..110: mol_type = other DNA
cacagagttaagtgaccaggtcaaggtcgtacaaccatataagagcttttaaacactcatgtgacctttttcttttttgaacattgtttctctagaaccctcttgtccct

SEQ ID NO: 48309 - DNA, 110 bp, synthetic construct
  source 1..110: mol_type = other DNA
aaggccatgcctttgaaagcgatcccttggtcactaacacgtaggcagagaaaatgtgcgctctggggaatgtccccttcggcgttcaagcagaggcgggggagcccgga

SEQ ID NO: 48310 - DNA, 110 bp, synthetic construct
  source 1..110: mol_type = other DNA
gtgcgctctggggaatgtccccttcggcgttcaagcagaggcgggggagcccggaggaagaaggaggtgtttccaggggaggggcgcagagggccaggagcgcaaggcga

SEQ ID NO: 48311 - DNA, 110 bp, synthetic construct
  source 1..110: mol_type = other DNA
tgcggtgtgagcagaaacagctggtcccgccctctcccttggccccgatgtggcaagtccctgcagaggctactttgtcatcctgggtctttggagtgaggttgttttga

SEQ ID NO: 48312 - DNA, 110 bp, synthetic construct
  source 1..110: mol_type = other DNA
aggaatgttcattccgggcccgagtcctagagaccgtggcgtgtgtggtcttttcggggatgggtcgactctttgcaggaggtgttgtcttttctagattggtctctttc

SEQ ID NO: 48313 - DNA, 110 bp, synthetic construct
  source 1..110: mol_type = other DNA
aaatcaggaagctgcatattttctgtgatttcatgctgtgtttcttcatgattgtctcatctcattcctggttcattttcttgacctggttttcccttagaaactattcc

SEQ ID NO: 48314 - DNA, 110 bp, synthetic construct
  source 1..110: mol_type = other DNA
gaggactcaggtcacttagagagagggagagagaggaaagattccatgagctcatttttgaattcctgggctcatggatttttggaatcaacatggcagcaaccagacac

SEQ ID NO: 48315 - DNA, 110 bp, synthetic construct
  source 1..110: mol_type = other DNA
gattgagtcctcatcctcatggttatgcgtcaggtttgttactgctgagccacagcaggaactcaccccaacctctcattttggaaaaaatactaccattagcctttgta

SEQ ID NO: 48316 - DNA, 110 bp, synthetic construct
  source 1..110: mol_type = other DNA
tgaactttggtgtttcatcaaaactttaaatgataccaaacattttggtgaatcgtttctgccctctccacagacacgcaaaaaggagcacaattaacactgaagacgtg

SEQ ID NO: 48317 - DNA, 110 bp, synthetic construct
  source 1..110: mol_type = other DNA
ctttatcttacacttgcaatagtgtcttgccactttaatgcatatagatttgcctcactttttgatggctgcatagtattccagtgtcataatctttttttttttttttt

SEQ ID NO: 48318 - DNA, 110 bp, synthetic construct
  source 1..110: mol_type = other DNA
ttgctccccctcttgactaaagctggggggcgggggatggaatacctaactgaacaggactttttgagatttgctctctgtcaataatgtagttggattgtcagcgtcac

SEQ ID NO: 48319 - DNA, 110 bp, synthetic construct
  source 1..110: mol_type = other DNA
atggagcagtgtgtcacagtcaaaggggaaggcaggcaagaaggatgggtgtgtctgaggttatccaggccctttgcctgtgcgccctcctccgggaagggcttgaagct

SEQ ID NO: 48320 - DNA, 110 bp, synthetic construct
  source 1..110: mol_type = other DNA
tcctggtttctgcccttgcctctcccgatccattctccccatgacagccccagccatctatttaaaacaaaaatctgatcacttcatctccctgcttaaaaccctccagc

SEQ ID NO: 48321 - DNA, 110 bp, synthetic construct
  source 1..110: mol_type = other DNA
agaggctaagatgtgggaatcccacactctctgagccgaggaaggaggaaaagaaaatccagctgccctcaggctcccctcgaattctgaaagcacctcctcaaaggggg

SEQ ID NO: 48322 - DNA, 110 bp, synthetic construct
  source 1..110: mol_type = other DNA
gaggacggcattgggcagaattaggggcaagttctagttctgccccttaagggggggcatatctgtaggcaagttattcaacctctgcggcctccatttccccatctgca

SEQ ID NO: 48323 - DNA, 110 bp, synthetic construct
  source 1..110: mol_type = other DNA
gctcctctcttcctcagagggatggtgctggatgcagcgagccggtggacgtggaaatttctcagaccctgtagaagtgctagcattgctgggattatggaggcagagga

SEQ ID NO: 48324 - DNA, 110 bp, synthetic construct
  source 1..110: mol_type = other DNA
cggggcgtgcatcctgacaaatcatcacctgctttggctccggggtagacttccaagccctgtaatcgctctagtcttgtccatcaaaacctccccctgagaaagctgag

SEQ ID NO: 48325 - DNA, 110 bp, synthetic construct
  source 1..110: mol_type = other DNA
ttgttggattccacactgcagtagagcttcagcaggtggtcgagggagtgccggcccaagttgagaaggcgtgctgcctggtgggtgtcaaacatgttcaccacgtacaa

SEQ ID NO: 48326 - DNA, 110 bp, synthetic construct
  source 1..110: mol_type = other DNA
gatatctccccctttggagacagacgagatttcccgggttcctggattaattatggggagcacagctgttcagagacacgacatgttactttttctgttttgtcttcaat

SEQ ID NO: 48327 - DNA, 110 bp, synthetic construct
  source 1..110: mol_type = other DNA
gctgctctctgctcacttctcctttccaagcacctttgctatgtgcttgaatcgtggtatctgagctcccataaggagataagagcctttcctgcagttggtgagactcc

SEQ ID NO: 48328 - DNA, 110 bp, synthetic construct
  source 1..110: mol_type = other DNA
agcactgcacagagggctgcctctcaagcaataaagagaacattaagtttcctctgcaggtggggagctcagggtaaagagagaaagggattcgggacagaccctgaacc

SEQ ID NO: 48329 - DNA, 110 bp, synthetic construct
  source 1..110: mol_type = other DNA
aacccttctcctggctcttcctgagctccctctgcacgtgggggttgttgccctgggtgttggaggagagggagaagaaagagggtcaagggaacccagagagaggggat

SEQ ID NO: 48330 - DNA, 110 bp, synthetic construct
  source 1..110: mol_type = other DNA
ctactggacacactgcaagggatgccggagccctggtggccacactgaccttggaggatgcccagctcttaggtgaaaggcaccagggaccttgaggatatgggtgaagt

SEQ ID NO: 48331 - DNA, 110 bp, synthetic construct
  source 1..110: mol_type = other DNA
cattcatccatcgagtgaaagctgacctatggccagctttccctagggttccctgtgtccccgggggaaaggtcgttatccacccagtgctccggtgtcccatcgtctcc

SEQ ID NO: 48332 - DNA, 110 bp, synthetic construct
  source 1..110: mol_type = other DNA
aggagagaaggcttaaagtcacctcgcgggaaggacctgtgagatggtggtattgctctggcaaatacagtgggccacgtgcacgttttaggacatgacagcttttgtgg

SEQ ID NO: 48333 - DNA, 110 bp, synthetic construct
  source 1..110: mol_type = other DNA
ctctggcaaatacagtgggccacgtgcacgttttaggacatgacagcttttgtggagaagcggagtataaataaatagtagctgtcatttcccaagcacttagacctacc

SEQ ID NO: 48334 - DNA, 110 bp, synthetic construct
  source 1..110: mol_type = other DNA
aatctgctgcaccacagtgggaactccaagtagttttcattattgatgctccctagttaaaatccaccctctgcctagaaggccgtttggcagatggtcccacagctggc

SEQ ID NO: 48335 - DNA, 110 bp, synthetic construct
  source 1..110: mol_type = other DNA
gttaaaatccaccctctgcctagaaggccgtttggcagatggtcccacagctggcagtggtgagcctgctccagtctcctggccccagtccagggccctctcgcccaccg

SEQ ID NO: 48336 - DNA, 110 bp, synthetic construct
  source 1..110: mol_type = other DNA
ttgtttgtgaatattggcgccacagggtcccagaggcactaactcgtgtgaaaagaaccttttgcccttcctctgctgctgatgcacagctcgtgatcttaatgagattt

SEQ ID NO: 48337 - DNA, 110 bp, synthetic construct
  source 1..110: mol_type = other DNA
aaccttttgcccttcctctgctgctgatgcacagctcgtgatcttaatgagattttgctgagtgccggtgagacgcccttcattagtcccagcacggcggctggctgggg

SEQ ID NO: 48338 - DNA, 110 bp, synthetic construct
  source 1..110: mol_type = other DNA
ttcctagttagattcgttaacccctgagccacgacaggaactccctcatgggcgactttggacaagcagctgcaccttacaatgtcctgtctgcaatctggccaccacct

SEQ ID NO: 48339 - DNA, 110 bp, synthetic construct
  source 1..110: mol_type = other DNA
aactaataaccctctctccagccctgacatctctctggtgctccaggctcatatttccagctgcgtacttgcaattgtcaccaggatgggaattcaaaacagaaatttgt

SEQ ID NO: 48340 - DNA, 110 bp, synthetic construct
  source 1..110: mol_type = other DNA
tctcctcccctctgtctgtcctacagtcagagcttaaaaatcagagtggaacgagtctccaatttcaaactgagatcaatgtggctgtgtcaatgttgccagcagctggt

SEQ ID NO: 48341 - DNA, 110 bp, synthetic construct
  source 1..110: mol_type = other DNA
tgagagacagagctgcaggagtggagaggggagagagcccccattcccgggccgtctgcgccccattgtttctttaatcacatcagccttctaaggtttttacggatggg

SEQ ID NO: 48342 - DNA, 110 bp, synthetic construct
  source 1..110: mol_type = other DNA
cagctgcgtacggtggctgaaaaacctaaggcagaaatgttcttgtttttgtcccctgtcctctagctcttttgttccatgtctgccaccttcactctcaacttctttcg

SEQ ID NO: 48343 - DNA, 110 bp, synthetic construct
  source 1..110: mol_type = other DNA
tacggggaggggggccactctacatcccgagtgacctctgaagaggaaaagacgcagggaaagaatactgtcatcaccccccgggcagcttgtgattcagactctaccca

SEQ ID NO: 48344 - DNA, 110 bp, synthetic construct
  source 1..110: mol_type = other DNA
agggaaagaatactgtcatcaccccccgggcagcttgtgattcagactctacccaagtgtctgggtcagactcaaccacacacaaactggtcacaaagtttgaaagagat

SEQ ID NO: 48345 - DNA, 110 bp, synthetic construct
  source 1..110: mol_type = other DNA
aatgtaagcttcacgagggcaggggttttatccaggtagctgctctttccccagcacataaaacagtgtctggcccatagtaaagggtctgggaagaattttttttcctt

SEQ ID NO: 48346 - DNA, 110 bp, synthetic construct
  source 1..110: mol_type = other DNA
acataaaacagtgtctggcccatagtaaagggtctgggaagaattttttttcctttttcggccacacccgtggcacatggacgttcccaggccagggatcgaatctgagc

SEQ ID NO: 48347 - DNA, 110 bp, synthetic construct
  source 1..110: mol_type = other DNA
ccagggagtgtctgcaggaatgaaaggtagaattgcagttgatttcaggaataatagcattgaaaatcttaaggattgagggaaggcacattatccttctactgacaagg

SEQ ID NO: 48348 - DNA, 110 bp, synthetic construct
  source 1..110: mol_type = other DNA
agcattgaaaatcttaaggattgagggaaggcacattatccttctactgacaaggaaaagaaaggcaattgaaaactctaggaaaaacaaaaatctggtaagaaatgtgc

SEQ ID NO: 48349 - DNA, 110 bp, synthetic construct
  source 1..110: mol_type = other DNA
gtgtttcttataataggctttaaattttttttaattaaaagaatcaaggagttcccttgtggcacagtggggtaagggtctcgtattgtcatggctgtggcatgggttgg

SEQ ID NO: 48350 - DNA, 110 bp, synthetic construct
  source 1..110: mol_type = other DNA
aaggagttcccttgtggcacagtggggtaagggtctcgtattgtcatggctgtggcatgggttgggtccctggcccaggaccttctgcatgctctgggtggggccaaaaa

SEQ ID NO: 48351 - DNA, 110 bp, synthetic construct
  source 1..110: mol_type = other DNA
aagactagggtccattaaactacagatgatgatggccctggggtacaggcagctgggactgcagccacgtgacaaccaaacccactttaggttagtcaggcatcacggag

SEQ ID NO: 48352 - DNA, 110 bp, synthetic construct
  source 1..110: mol_type = other DNA
ggactgcagccacgtgacaaccaaacccactttaggttagtcaggcatcacggagaaattaatcagccgatttaagaaagaaatgctaaattttattggagccaaatcga

SEQ ID NO: 48353 - DNA, 110 bp, synthetic construct
  source 1..110: mol_type = other DNA
tgcaggtgcagccctaaaaagacaagaaaaagaaaaaaattaatgtgtacatggaagtgccaggttccaggacagaggtcagtggggctggcaaggcactaacgcgggac

SEQ ID NO: 48354 - DNA, 110 bp, synthetic construct
  source 1..110: mol_type = other DNA
agtgccaggttccaggacagaggtcagtggggctggcaaggcactaacgcgggaccaggccttcacacccggggaaggaaggcctgcaccaaatcttagagtcaaggaga

SEQ ID NO: 48355 - DNA, 110 bp, synthetic construct
  source 1..110: mol_type = other DNA
tccgtgcgtgtaaaatgcttggaagaaataaagaaggggtcacattttgcctggcacagcagctaacgtctctggtagcctcgaagcattttgccaaatggacttaaatt

SEQ ID NO: 48356 - DNA, 110 bp, synthetic construct
  source 1..110: mol_type = other DNA
acagcagctaacgtctctggtagcctcgaagcattttgccaaatggacttaaattggtttccttctgttctatttttattttgtcgtcatttagtgtatagggagccaac

SEQ ID NO: 48357 - DNA, 110 bp, synthetic construct
  source 1..110: mol_type = other DNA
tggtaggttaattgtgttaacacccaaaaagtctgagtatgtccacaagttccttttgggggtggggagccttgctcggctgtacctttgccctttcaaggcaagggacc

SEQ ID NO: 48358 - DNA, 110 bp, synthetic construct
  source 1..110: mol_type = other DNA
ttgggggtggggagccttgctcggctgtacctttgccctttcaaggcaagggaccgtcttgatgagaaagcccttgaggcatttgtgtgctttgacccgacttcagattc

SEQ ID NO: 48359 - DNA, 110 bp, synthetic construct
  source 1..110: mol_type = other DNA
ccccccaacccccaactcccaaagaaggatccagttacatggaagctgcagtgaaggaacaaacacagcttgtgcttcctccaagtgattatttcctttgttttgtgaac

SEQ ID NO: 48360 - DNA, 110 bp, synthetic construct
  source 1..110: mol_type = other DNA
ggaacaaacacagcttgtgcttcctccaagtgattatttcctttgttttgtgaacattgaaaaatgaaaagaatgataaggatttggtgggggggggggtaggcagcatg

SEQ ID NO: 48361 - DNA, 110 bp, synthetic construct
  source 1..110: mol_type = other DNA
tctataaaagcatctccttcccttgctgtggggagacttgctcatggctcactacagctgcagaccctgagttgtgattctccgctgatcctgaataaaccatctttgct

SEQ ID NO: 48362 - DNA, 110 bp, synthetic construct
  source 1..110: mol_type = other DNA
agctgcagaccctgagttgtgattctccgctgatcctgaataaaccatctttgctgaagaaatttctgacagtctctttgttttaggtcaatataaccaagacaaaaggc

SEQ ID NO: 48363 - DNA, 110 bp, synthetic construct
  source 1..110: mol_type = other DNA
gggagctccccgccgacccccctctcagcagctcatcatctgcagagtcttaattttatacactagctatgcccccctttccttggcacctcaccgtccatgtgcatcat

SEQ ID NO: 48364 - DNA, 110 bp, synthetic construct
  source 1..110: mol_type = other DNA
ttatacactagctatgcccccctttccttggcacctcaccgtccatgtgcatcataggaatcctataaagtggctattcttaagccctttgtacagatgaggatactgag

SEQ ID NO: 48365 - DNA, 110 bp, synthetic construct
  source 1..110: mol_type = other DNA
ctctgtttactgtggaaaggtatctgtgggtaagcgaacctgagcagttcaattgcatgttgttggagagttgcgtgtatgtgtagagacagatatgcattattgggaga

SEQ ID NO: 48366 - DNA, 110 bp, synthetic construct
  source 1..110: mol_type = other DNA
catgttgttggagagttgcgtgtatgtgtagagacagatatgcattattgggagaggcctgcacagctatagaggctggggagtcccacattcggttgtctggaagccag

SEQ ID NO: 48367 - DNA, 110 bp, synthetic construct
  source 1..110: mol_type = other DNA
cactttgaaccctgcgacctctctggttctcatggaagctgggatcccatagaaacacctccagctgagtccctcacctgagagaatctaccaattattccctgcatgga

SEQ ID NO: 48368 - DNA, 110 bp, synthetic construct
  source 1..110: mol_type = other DNA
cacctccagctgagtccctcacctgagagaatctaccaattattccctgcatggaagtgggcaggtttctccccaagatcagacgcaagtccaccaggcgaaacatgggg

SEQ ID NO: 48369 - DNA, 110 bp, synthetic construct; identical to SEQ ID NO: 48367
  source 1..110: mol_type = other DNA

SEQ ID NO: 48370 - DNA, 110 bp, synthetic construct; identical to SEQ ID NO: 48368
  source 1..110: mol_type = other DNA

SEQ ID NO: 48371 - DNA, 110 bp, synthetic construct
  source 1..110: mol_type = other DNA
aatatctcagaatatctatcactagaggtgaattcagttgcccctacccgctccttgcactggctgcttgagcagcttaggcaaataggattcaatgatggccccatgaa

SEQ ID NO: 48372 - DNA, 110 bp, synthetic construct
  source 1..110: mol_type = other DNA
tgcactggctgcttgagcagcttaggcaaataggattcaatgatggccccatgaaaaagccgagtctcatttcaggtcctgagttttgctgtcgtccctgttataaggac

SEQ ID NO: 48373 - DNA, 110 bp, synthetic construct
  source 1..110: mol_type = other DNA
catctgggtatgtgctgagaaaagtgcttcaggacaacaataaatgctatttagtgagcttttaccacgggccaggcactgttctaagtgctgcacacacaatacattgt

SEQ ID NO: 48374 - DNA, 110 bp, synthetic construct
  source 1..110: mol_type = other DNA
gagcttttaccacgggccaggcactgttctaagtgctgcacacacaatacattgtttaatcctcacaactccatggagtatgtccttctatcatctccattttacagaca

SEQ ID NO: 48375 - DNA, 110 bp, synthetic construct
  source 1..110: mol_type = other DNA
gcacagaactgatgctggtctaagagaggcccagcggagaggcaccctagcctggggtcagaggctagggctcccagctgtgtggaccccgtgtgccccctctgcaacat

SEQ ID NO: 48376 - DNA, 110 bp, synthetic construct
  source 1..110: mol_type = other DNA
ggtcagaggctagggctcccagctgtgtggaccccgtgtgccccctctgcaacatggaaagaagtaatgcctatgacaccatctctgggcaaggaccacagagtcaaagc

SEQ ID NO: 48377 - DNA, 110 bp, synthetic construct
  source 1..110: mol_type = other DNA
aggaggggtaagggtggagggcttgatggcatgtgtgtctgccaggtggggacagtaaggggaccaccagctcacagtcaccacttctgggcatgctataagcatttcct

SEQ ID NO: 48378 - DNA, 110 bp, synthetic construct
  source 1..110: mol_type = other DNA
taaggggaccaccagctcacagtcaccacttctgggcatgctataagcatttcctgaatgagtaaatcaatgagttactactgtgaatgaatgacagcaggaatcctgag

SEQ ID NO: 48379 - DNA, 110 bp, synthetic construct
  source 1..110: mol_type = other DNA
tttttaaatactagccatcccaatgggtgtgaagggctgtctcattatcattttgatctgcattcccctaatgacgcatggtattgcacagctttaaatggtttataagc

SEQ ID NO: 48380 - DNA, 110 bp, synthetic construct
  source 1..110: mol_type = other DNA
tatcattttgatctgcattcccctaatgacgcatggtattgcacagctttaaatggtttataagccatttatttatcttctttggagaaatatctgttaataactttttc

SEQ ID NO: 48381 - DNA, 110 bp, synthetic construct
  source 1..110: mol_type = other DNA
tgtgtttcaaacatcaccccctctatagcacaatcccttttttcaatagcaactggaaaaaacacacttttgcatcccagtgttctagtccagggaagcatctcaaaatc

SEQ ID NO: 48382 - DNA, 110 bp, synthetic construct
  source 1..110: mol_type = other DNA
gaaaaaacacacttttgcatcccagtgttctagtccagggaagcatctcaaaatcttttgatggcacctgttatatatcctgacacgtcactgaagtttggacttttttt

SEQ ID NO: 48383 - DNA, 110 bp, synthetic construct
  source 1..110: mol_type = other DNA
aatcgttgtgtgtgtcccgttaggtagagttgcagagaattgtctttactttggtcagaaagaaaagcaatagctactccttgggctaaaatgcctccctcccccggatt

SEQ ID NO: 48384 - DNA, 110 bp, synthetic construct
  source 1..110: mol_type = other DNA
cagaaagaaaagcaatagctactccttgggctaaaatgcctccctcccccggattcctcttagagctacagggataaacagtcttttcctcttgtacttataatcctacc

SEQ ID NO: 48385 - DNA, 110 bp, synthetic construct
  source 1..110: mol_type = other DNA
ccgcagacgtgtacggcataaactgtctgctggcgcccgttaccgtggaaattactcaaaacataaagaccacacaggcccctgtcacagatgatcttcctaaggagcct

SEQ ID NO: 48386 - DNA, 110 bp, synthetic construct
  source 1..110: mol_type = other DNA
tcaaaacataaagaccacacaggcccctgtcacagatgatcttcctaaggagccttccagcagcacaaacagtgagtccaagaagcgcagaaccactagtcctcctgtgt

SEQ ID NO: 48387 - DNA, 110 bp, synthetic construct
  source 1..110: mol_type = other DNA
tcaattaaaaaatgtacattatggtaatttgagaaaaataaggacaatcccaagaaatccccagtcatcaatggactctttagtgcatgatccctcgggtttttatgtaa

SEQ ID NO: 48388 - DNA, 110 bp, synthetic construct; identical to SEQ ID NO: 48387
  source 1..110: mol_type = other DNA

SEQ ID NO: 48389 - DNA, 110 bp, synthetic construct
  source 1..110: mol_type = other DNA
tcacagctgcatcccatgtatggggaagaatgcctggcagagagtaaaggctcaactatttgaattaatcttggccaccccctacccccaccccgccttggatatttgag

SEQ ID NO: 48390 - DNA, 110 bp, synthetic construct
  source 1..110: mol_type = other DNA
ctatttgaattaatcttggccaccccctacccccaccccgccttggatatttgagtgtccatgatgtgcctggtcttgtgcaaggcactggggaagagaaatgtggaccc

SEQ ID NO: 48391 - DNA, 110 bp, synthetic construct
  source 1..110: mol_type = other DNA
agctcaggaatagactcatgtgtatggaaatttgatagataataatagttgtgccacagtgggggcatggatgggttgggaagaactggaccccagcttatattaaatat

SEQ ID NO: 48392 - DNA, 110 bp, synthetic construct
  source 1..110: mol_type = other DNA
acagtgggggcatggatgggttgggaagaactggaccccagcttatattaaatataaaaataggctccagatagacaagaactaaatgtaaaaggtaaaagcctaagagt

SEQ ID NO: 48393 - DNA, 110 bp, synthetic construct
  source 1..110: mol_type = other DNA
tttccaggtgatttgtatgcacataacaatttgaggtacttagtagttccatgatttaaagtagtagttctcaaacattgatttgtatcaaaatcagcttgacagtcaag

SEQ ID NO: 48394 - DNA, 110 bp, synthetic construct
  source 1..110: mol_type = other DNA
ttaaagtagtagttctcaaacattgatttgtatcaaaatcagcttgacagtcaaggaagaacacagatgctgggcttggaagtaagtgagagcctggctctgtatttttt

SEQ ID NO: 48395 - DNA, 110 bp, synthetic construct
  source 1..110: mol_type = other DNA
tcatctgtaagtggaacatgataatactgttactgtattttcaggtaactaagagcttttctatgaatttatcttggaatgtgaagcatctgaacaacttagacttagga

SEQ ID NO: 48396 - DNA, 110 bp, synthetic construct
  source 1..110: mol_type = other DNA
cttttctatgaatttatcttggaatgtgaagcatctgaacaacttagacttaggaaggtcataggagccattgctgaccttccatggaaatacatgcatgtggaaacata

SEQ ID NO: 48397 - DNA, 110 bp, synthetic construct
  source 1..110: mol_type = other DNA
aaatggggtattccaggtctgtgtgtatgtagtcatacaaattacagcctcatgctgacccatcacagcaagaacccaccccaagtgcttccacattttctagatcagct

SEQ ID NO: 48398 - DNA, 110 bp, synthetic construct
  source 1..110: mol_type = other DNA
tgacccatcacagcaagaacccaccccaagtgcttccacattttctagatcagctccactctttgagaaccaggaaccactgactcacctacatacagaccaggtgactc

SEQ ID NO: 48399 - DNA, 110 bp, synthetic construct
  source 1..110: mol_type = other DNA
ttactcagtaaattgtttgtggaccaagtgacattctcaaccctaaatctacaagcttttcagcttgtccttcctactcagcggggttcagatgatgatgatagtgatgg

SEQ ID NO: 48400 - DNA, 110 bp, synthetic construct
  source 1..110: mol_type = other DNA
cttttcagcttgtccttcctactcagcggggttcagatgatgatgatagtgatggtggtggtggtgatgacaacaatgtttaggtgatgatgacgatgacgatattaata

SEQ ID NO: 48401 - DNA, 110 bp, synthetic construct
  source 1..110: mol_type = other DNA
gattctttatgaaataagaaaagaaacaatatggagataaaaattaaaaccatggacacagacactgaaagctctgaatgctatcatccctcaggaggtgctcctgttct

SEQ ID NO: 48402 - DNA, 110 bp, synthetic construct
  source 1..110: mol_type = other DNA
acacagacactgaaagctctgaatgctatcatccctcaggaggtgctcctgttctcattctttgaatggggaggaagaggaaaaaggcagccaaaaaaataaatgctaga

SEQ ID NO: 48403 - DNA, 110 bp, synthetic construct
  source 1..110: mol_type = other DNA
gaagtgatgggccatattcattagtgaaagaatcaatattataaaatggaaattcccccaaatctgtagataaagctaatataattctaaccatgaccctaacagacttc

SEQ ID NO: 48404 - DNA, 110 bp, synthetic construct
  source 1..110: mol_type = other DNA
ccccaaatctgtagataaagctaatataattctaaccatgaccctaacagacttctccgtgaaaatcacatgaggaaaatcaaagaggcaaattatttttagaaggaacg

SEQ ID NO: 48405 - DNA, 110 bp, synthetic construct
  source 1..110: mol_type = other DNA
ataaggggggataaaactctatatatgtacatatatattgtcaatcaggacgagacaagactaagtaggaaaagatgtgttgactgcctgttagacttgacagtggcctc

SEQ ID NO: 48406 - DNA, 110 bp, synthetic construct
  source 1..110: mol_type = other DNA
caagactaagtaggaaaagatgtgttgactgcctgttagacttgacagtggcctcagctttgcaaaggaggctgtgaatatattgttttcagaggcagttcagaagacat

SEQ ID NO: 48407 - DNA, 110 bp, synthetic construct
  source 1..110: mol_type = other DNA
tttgcagagtgcttcctatgggttaggtggcaaggatgcaaagaggactaacgcgtaaaagctgagcatcctccttctcccacgcggagctctaagtgggagagaaacac

SEQ ID NO: 48408 - DNA, 110 bp, synthetic construct
  source 1..110: mol_type = other DNA
taaaagctgagcatcctccttctcccacgcggagctctaagtgggagagaaacacgtaaacagattaatggctgtgccttctgatgggagctgtaagaggcgtgagtacg

SEQ ID NO: 48409 - DNA, 110 bp, synthetic construct
  source 1..110: mol_type = other DNA
tgaccacaaactgggtggcttaaaacaacggtcgtttattcattcatctttctggaagccagaagtacaaaatcaaggtgccgacagggccctgctcccctgaaagctct

SEQ ID NO: 48410 - DNA, 110 bp, synthetic construct
  source 1..110: mol_type = other DNA
aagccagaagtacaaaatcaaggtgccgacagggccctgctcccctgaaagctctccgggagggtccttcctgtctcttccagctcctggcgctccttggttcatggcca

SEQ ID NO: 48411 - DNA, 110 bp, synthetic construct
  source 1..110: mol_type = other DNA
agatatgtgttattcccattttgttgatgatgagtggagaaactgaggcccgaatgcccaaggccctgctcttcgctctgcactccctcccaaactcagcctgcccctcc

SEQ ID NO: 48412 - DNA, 110 bp, synthetic construct
  source 1..110: mol_type = other DNA
gcccaaggccctgctcttcgctctgcactccctcccaaactcagcctgcccctcctggagaccaagccagagttttcaagcacacccagctcagtctaaccaattcccag

SEQ ID NO: 48413 - DNA, 110 bp, synthetic construct
  source 1..110: mol_type = other DNA
caggaattcatcctaataatggagccccaagccctgcagagggagaggccagagaaagctcaccaacgggagctcctttgtctgactgagcccctgcaaagaggaagagc

SEQ ID NO: 48414 - DNA, 110 bp, synthetic construct
  source 1..110: mol_type = other DNA
aagctcaccaacgggagctcctttgtctgactgagcccctgcaaagaggaagagcccatgtgcagaacactgataaagaccaactggccttttcaaggtgaccctgagaa

SEQ ID NO: 48415 - DNA, 110 bp, synthetic construct
  source 1..110: mol_type = other DNA
gagctgaaatcttttatgggacagctattaaacctcaggaatgggttcccactgagaagcagggaaagctgcaaatacagtgtcaagggactgtttcaacaacccttccc

SEQ ID NO: 48416 - DNA, 110 bp, synthetic construct
  source 1..110: mol_type = other DNA
gaagcagggaaagctgcaaatacagtgtcaagggactgtttcaacaacccttcccagataggacttgcccaatccaaggtgggcgggacacagccctaaaccttgaagca

SEQ ID NO: 48417 - DNA, 110 bp, synthetic construct
  source 1..110: mol_type = other DNA
ctgatcaccagcattccaggtggcatcgacaccgtggagaggttcatgcctcgagctcaataactatttgttcatgaaaaaaccacctttgtattatttgcacctcttac

SEQ ID NO: 48418 - DNA, 110 bp, synthetic construct
  source 1..110: mol_type = other DNA
ctcaataactatttgttcatgaaaaaaccacctttgtattatttgcacctcttacttccttactacctgcccagagagtcatgtaggtacaggactatttgaagtgcaca

SEQ ID NO: 48419 - DNA, 110 bp, synthetic construct
  source 1..110: mol_type = other DNA
ctcatggatcttagttggttcattgccactgagccacgacaggaactcctggagttttatctttggggttctccccagtgctcagggtccccatgtgacagttccctcag

SEQ ID NO: 48420 - DNA, 110 bp, synthetic construct; identical to SEQ ID NO: 48419
  source 1..110: mol_type = other DNA

SEQ ID NO: 48421 - DNA, 110 bp, synthetic construct
  source 1..110: mol_type = other DNA
acccagcttggcctctggcattccttgagcctggaccccataaataatgtgaattgaaaagccagctccccctcccaggcccgaggcacacactcacaaggacacaccga

SEQ ID NO: 48422 - DNA, 110 bp, synthetic construct
  source 1..110: mol_type = other DNA
gaaaagccagctccccctcccaggcccgaggcacacactcacaaggacacaccgagttcacgaaaacaccttctcacgagtgtgagcacgcctgcatgcgcacacacaca

SEQ ID NO: 48423 - DNA, 110 bp, synthetic construct
  source 1..110: mol_type = other DNA
gggagggcacagctggagggagtggcccctgtgcggcagggagtatttctcagtcaccagctgcaccccccaaagcggaagtaagataaattcttagtgctgcatcagca

SEQ ID NO: 48424 - DNA, 110 bp, synthetic construct
  source 1..110: mol_type = other DNA
accagctgcaccccccaaagcggaagtaagataaattcttagtgctgcatcagcaccactgatggttcaggccgcccggcggggtggtgaatgcttggcccactccagct

SEQ ID NO: 48425 - DNA, 110 bp, synthetic construct
  source 1..110: mol_type = other DNA
tttccccctcagggccagccttggacgaggcattttcccctaatcgatatggaacaccagttaaactttgtaacttgctagaccgtcatttattcattctatgaagagat

SEQ ID NO: 48426 - DNA, 110 bp, synthetic construct
  source 1..110: mol_type = other DNA
accagttaaactttgtaacttgctagaccgtcatttattcattctatgaagagataccaagcatccattctgttcttgccgtgtgatgctgggtactgggtgctgggcgc

SEQ ID NO: 48427 - DNA, 110 bp, synthetic construct
  source 1..110: mol_type = other DNA
ggaacccgagtcctcatggacactagtcaggcttttaacccctctgagccacagcgggaaccctgcatcagcttatttaaagctcagtcctctgacacatatcatttgac

SEQ ID NO: 48428 - DNA, 110 bp, synthetic construct
  source 1..110: mol_type = other DNA
gggaaccctgcatcagcttatttaaagctcagtcctctgacacatatcatttgacagaggaggagactgaggcaggctcagagacacccaggaagttgttacatttgcac

SEQ ID NO: 48429 - DNA, 110 bp, synthetic construct
  source 1..110: mol_type = other DNA
ctgatcacccatctgagttcctttttctgtatctgaaaaacacctttggtggtttctttccacgtagctctgatgatgacacattctcccagatgtgtgtctgtctatct

SEQ ID NO: 48430 - DNA, 110 bp, synthetic construct
  source 1..110: mol_type = other DNA
ctttccacgtagctctgatgatgacacattctcccagatgtgtgtctgtctatctgaaaatgtacatttcaccttcaatcttaaaacacattttggggagttcccatcat

SEQ ID NO: 48431 - DNA, 110 bp, synthetic construct
  source 1..110: mol_type = other DNA
gagagagagtttttttttttttttttttttttttttttaataaaaagcaggcagcgggccagatttggcctggaggccatagcttgccaacccctggctctagagtcaag

SEQ ID NO: 48432 - DNA, 110 bp, synthetic construct; identical to SEQ ID NO: 48431
  source 1..110: mol_type = other DNA

SEQ ID NO: 48433 - DNA, 110 bp, synthetic construct
  source 1..110: mol_type = other DNA
cttcgctcagtgaattaagggtccagcattgtggtgagctatgctgtagatcgcagatgcagctctgctttgacccctagcctgggaaccttcacatgccgtgagtgtgg

SEQ ID NO: 48434 - DNA, 110 bp, synthetic construct; identical to SEQ ID NO: 48433
  source 1..110: mol_type = other DNA

SEQ ID NO: 48435 - DNA, 110 bp, synthetic construct
  source 1..110: mol_type = other DNA
gaagctttacctataacctcctaccgtctagttgagggcctaatacagaggagaaacttaaagattattagctgaggaaagcactactcaagcaccagttttaatgctga

SEQ ID NO: 48436 - DNA, 110 bp, synthetic construct
  source 1..110: mol_type = other DNA
acttaaagattattagctgaggaaagcactactcaagcaccagttttaatgctgataagatttgcaggttatccttgtggtatttgtgatttcactccgcgtattaattt

SEQ ID NO: 48437 - DNA, 110 bp, synthetic construct
  source 1..110: mol_type = other DNA
aggtctatgggcagctaaaaaaaaatgtctccatccctactgagttaaaaattcggagttcccgtcatggcacagaggttaacgaatctcactaggaaccatgaggttgt

SEQ ID NO: 48438 - DNA, 110 bp, synthetic construct; identical to SEQ ID NO: 48437
  source 1..110: mol_type = other DNA

SEQ ID NO: 48439 - DNA, 110 bp, synthetic construct
  source 1..110: mol_type = other DNA
gagtgccgcgctctccgcgggcctggagagtccgcatctctgtgccctcggggttggagggtgggaagtggggcgcaaagaaatagaaaagaggcgttccctctggaggc

SEQ ID NO: 48440 - DNA, 110 bp, synthetic construct
  source 1..110: mol_type = other DNA
ggagggtgggaagtggggcgcaaagaaatagaaaagaggcgttccctctggaggctgccctctgggcagagagccagggaggtgacaggcacactgcttgcctgatgacc

SEQ ID NO: 48441 - DNA, 110 bp, synthetic construct
  source 1..110: mol_type = other DNA
tccacagaaggatcccaggtggcaaagaacctgtggctgcccagccagtggaacaaagtaatgactgcagggacagcctctttggagaccaggtcaccagggagctcctg

SEQ ID NO: 48442 - DNA, 110 bp, synthetic construct
  source 1..110: mol_type = other DNA
aagtaatgactgcagggacagcctctttggagaccaggtcaccagggagctcctggacagaggaccagagataatgtccccagtggctgtcactgattgaaggcctacca

SEQ ID NO: 48443 - DNA, 110 bp, synthetic construct
  source 1..110: mol_type = other DNA
tcctaggttcacttactcatctagctggtttctagtttatcttggatgtgagagctgtagtctgagtgcaaatgataaaaactgctggatcccccactccctgaattatt

SEQ ID NO: 48444 - DNA, 110 bp, synthetic construct
  source 1..110: mol_type = other DNA
tgtagtctgagtgcaaatgataaaaactgctggatcccccactccctgaattatttgcttcagggattaagtcttccacagtaaggagagtgtgaagcagaatttcaaaa

SEQ ID NO: 48445 - DNA, 110 bp, synthetic construct
  source 1..110: mol_type = other DNA
tccccacaggagtcacaggcgtagaggatgtgggtgttgggatctgtgggagtggggttgcagtcagaacaggaagggccccaggcccaccagctttcccggcagggagc

SEQ ID NO: 48446 - DNA, 110 bp, synthetic construct
  source 1..110: mol_type = other DNA
ggttgcagtcagaacaggaagggccccaggcccaccagctttcccggcagggagcccctctcaccttcttcctgcacttgcttcacagctttgctgatctcggctttaag

SEQ ID NO: 48447 - DNA, 110 bp, synthetic construct
  source 1..110: mol_type = other DNA
tgtcaccagcaccgtgtccctttgttgccctcttcccagtttcctgatgctcatggggctgggagatgagggtgtggacctgcggtgctggctgctggctgatgccagct

SEQ ID NO: 48448 - DNA, 110 bp, synthetic construct
  source 1..110: mol_type = other DNA
gggctgggagatgagggtgtggacctgcggtgctggctgctggctgatgccagctgtgagttggagccagaccagagactggggtttgggatatcgacagggtggccagt

SEQ ID NO: 48449 - DNA, 110 bp, synthetic construct
  source 1..110: mol_type = other DNA
cgtgccatggccgtgggctttgtgatgtggtccttgatgctttgcaccactcctgggggaattgggggcagatgggtgacagccctgacccaaggcccagctcggggccc

SEQ ID NO: 48450 - DNA, 110 bp, synthetic construct
  source 1..110: mol_type = other DNA
accactcctgggggaattgggggcagatgggtgacagccctgacccaaggcccagctcggggccccacttccagtaccccaggccccccagtcccccaggcccctgagta

SEQ ID NO: 48451 - DNA, 110 bp, synthetic construct; identical to SEQ ID NO: 48449
  source 1..110: mol_type = other DNA

SEQ ID NO: 48452 - DNA, 110 bp, synthetic construct
  source 1..110: mol_type = other DNA
ggggaattgggggcagatgggtgacagccctgacccaaggcccagctcggggccccacttccagtaccccaggccccccagtcccccaggcccctgagtactgcaggcat

SEQ ID NO: 48453 - DNA, 110 bp, synthetic construct
  source 1..110: mol_type = other DNA
taatcaaagagggatacaatggaaggacccctggggcactgacaatattaaatttcttgacctgaatgacggttacacaggaatttgcttataattattctttaaactgc

SEQ ID NO: 48454 - DNA, 110 bp, synthetic construct
  source 1..110: mol_type = other DNA
cttgacctgaatgacggttacacaggaatttgcttataattattctttaaactgcacgtttcatgcactcttctgaatttctcataatataaaaaaagctgggagctccc

SEQ ID NO: 48455 - DNA, 110 bp, synthetic construct
  source 1..110: mol_type = other DNA
gatactagctgggttcccaatctgctgtgccacaacaggaactccctagtgagacctttttaccgaggaagctttctctctccagtgtggaaaagctttgagccattctg

SEQ ID NO: 48456 - DNA, 110 bp, synthetic construct
  source 1..110: mol_type = other DNA
agccctagagctgccacctctagtgttctggctccccctgctgcttttacctgttcctccggccttaaggacccaagcacaggtggcagctattcagggagagggtagga

SEQ ID NO: 48457 - DNA, 110 bp, synthetic construct
  source 1..110: mol_type = other DNA
accttggactagtccctccccatctctggtctttagttcccttgtctgtaaaatcagggtattaaaatcagctgatttaagattctgtgaggagtttccaggtggcctag

SEQ ID NO: 48458 - DNA, 110 bp, synthetic construct
  source 1..110: mol_type = other DNA
ggtgttatgtgtattcttctctctctctctttctaaaaccctagctccttgaacgcagcctggtgtcagtcttgaaccgcttaactctccctggggtctggggccgttat

SEQ ID NO: 48459 - DNA, 110 bp, synthetic construct
  source 1..110: mol_type = other DNA
caaatctcattattaataataacaacaatagtgaacgcttattaagaggcagactagagcctggaagctccaagtatggtctgtggacctgcaggaccgtaatctccagg

SEQ ID NO: 48460 - DNA, 110 bp, synthetic construct
  source 1..110: mol_type = other DNA
ccctctttggaggcagtagcatggggcgattaacacacgcctctgagtcccgcggatggggttgcagctctgcctctatcctcattagcaggacaccttggacatgctgc

SEQ ID NO: 48461 - DNA, 110 bp, synthetic construct
  source 1..110: mol_type = other DNA
atggggttgcagctctgcctctatcctcattagcaggacaccttggacatgctgctcaaactccctgagactcgatttcctcctctgccaagcggaggcagcagccgtgc

SEQ ID NO: 48462 - DNA, 110 bp, synthetic construct
  source 1..110: mol_type = other DNA
gtgctggggtaattgtgtgcccccaaggtgtcctggaaaccttagaaaccccctgactcagcagatcctacttcctcaccccagttggctagctcaccatcgagacggcc

SEQ ID NO: 48463 - DNA, 110 bp, synthetic construct
  source 1..110: mol_type = other DNA
actcagcagatcctacttcctcaccccagttggctagctcaccatcgagacggcccctgggcctggccagaccaccctgactgtccagtcctggctccgagatggcctct

SEQ ID NO: 48464 - DNA, 110 bp, synthetic construct; identical to SEQ ID NO: 48462
  source 1..110: mol_type = other DNA

SEQ ID NO: 48465 - DNA, 110 bp, synthetic construct; identical to SEQ ID NO: 48463
  source 1..110: mol_type = other DNA

SEQ ID NO: 48466 - DNA, 110 bp, synthetic construct
  source 1..110: mol_type = other DNA
aaaccagttcccacagcaatttcacagtgtgcaaaggaacagggactcttccgaaacgtccaacaagcttaccatctgacacgtgacaaatactgaggggagtctgacat

SEQ ID NO: 48467 - DNA, 110 bp, synthetic construct
  source 1..110: mol_type = other DNA
acgtccaacaagcttaccatctgacacgtgacaaatactgaggggagtctgacatccccacaacaccagcctcttcgttttaatggaaataaatgacacaagaaggaaaa

SEQ ID NO: 48468 - DNA, 110 bp, synthetic construct
  source 1..110: mol_type = other DNA
caacctcacctcttagcatgttcacatctacaccctggctcagcctatggtgtcgtctggctgggtacttcatgcccattttatagagatgtagcctgaagctctgagag

SEQ ID NO: 48469 - DNA, 110 bp, synthetic construct
  source 1..110: mol_type = other DNA
tctggctgggtacttcatgcccattttatagagatgtagcctgaagctctgagaggccaaggagaggcctggagtcacacaaagaggatgaggtactgctcaccctgcag

SEQ ID NO: 48470 - DNA, 110 bp, synthetic construct
  source 1..110: mol_type = other DNA
ctctgatgttctgacttcctcttccatccctctgtgcctgctctgtccccggcccccagagctaggaagcacctgcagaggtcgcccagggcaaacagctgtccgtggta

SEQ ID NO: 48471 - DNA, 110 bp, synthetic construct
  source 1..110: mol_type = other DNA
ccagagctaggaagcacctgcagaggtcgcccagggcaaacagctgtccgtggtacaggatgctctgtcctagaactccgcggttggagcggaacagcctgctgaatttt

SEQ ID NO: 48472 - DNA, 110 bp, synthetic construct
  source 1..110: mol_type = other DNA
tgttttgagggctgataggagacaagttctattcatcccagctggtttgggggaactgctgggaactgctcgatcctgggccatgtgtttatccaacggtgctctgccaa

SEQ ID NO: 48473 - DNA, 110 bp, synthetic construct
  source 1..110: mol_type = other DNA
ctgctgggaactgctcgatcctgggccatgtgtttatccaacggtgctctgccaacagcaagccatgaggtacctcctaggctggggcacctctgggagtttggggtgga

SEQ ID NO: 48474 - DNA, 110 bp, synthetic construct
  source 1..110: mol_type = other DNA
acccccatatcccctcgtccccggctttattttcctttataaaacaaatatgttttccaacacacacacacacacccaccccaatggcggctccaccatctccttgatca

SEQ ID NO: 48475 - DNA, 110 bp, synthetic construct
  source 1..110: mol_type = other DNA
tccaacacacacacacacacccaccccaatggcggctccaccatctccttgatcacggctgcagaccttggagacactgcaggttcatttccagacccagcaataaagca

SEQ ID NO: 48476 - DNA, 110 bp, synthetic construct
  source 1..110: mol_type = other DNA
acctgtcgctgctcctggcagctgggggctggtcttgggggaagggtgcagggaggcaaatgaaatcacctctggaaaaccactggtgctcagctgccggctgcccagca

SEQ ID NO: 48477 - DNA, 110 bp, synthetic construct
  source 1..110: mol_type = other DNA
gcaaatgaaatcacctctggaaaaccactggtgctcagctgccggctgcccagcagacaggggcctggtctttgatctccttcctagagccggctgactgatgcatggcc

SEQ ID NO: 48478 - DNA, 110 bp, synthetic construct
  source 1..110: mol_type = other DNA
atgccagaaaaattcacatgtacatgcagaccccagattttgtttatgatttcggggagatgcctggatttctggaaggacacccatgggccgtctcagggtcctaagaa

SEQ ID NO: 48479 - DNA, 110 bp, synthetic construct
  source 1..110: mol_type = other DNA
ggagatgcctggatttctggaaggacacccatgggccgtctcagggtcctaagaactcccggttcaaagctccttgttttgagcagagttttcccacctcagcactgttg

SEQ ID NO: 48480 - DNA, 110 bp, synthetic construct
  source 1..110: mol_type = other DNA
tgttggaatggggagctttgttttcttttgaatcatcttctttggactgatgcatgagcccaatctcaggatctcctctttttggggcagggtttctactctgaaatcag

SEQ ID NO: 48481 - DNA, 110 bp, synthetic construct
  source 1..110: mol_type = other DNA
gagcccaatctcaggatctcctctttttggggcagggtttctactctgaaatcagtcatgagccatgctcagcagaatgactcaggctggtaggaagcagtaggtggcag

SEQ ID NO: 48482 - DNA, 110 bp, synthetic construct
  source 1..110: mol_type = other DNA
agtgtggggtttggtgggtgtggaggtgaccaaggagatgcattcagggcagtgggaggggctgcagcttgtctccccttccactcatcccctagaaagcatgatctcag

SEQ ID NO: 48483 - DNA, 110 bp, synthetic construct
  source 1..110: mol_type = other DNA
gaggggctgcagcttgtctccccttccactcatcccctagaaagcatgatctcagaggggacctactgtgcacagagttcttggaagagcactgggtgccatctttgggg

SEQ ID NO: 48484 - DNA, 110 bp, synthetic construct
  source 1..110: mol_type = other DNA
gacccggcaatccacaaatgtccacccttcccacctccctggattccagaaggtctaaatccctttctcagaacctcttgagtgactgagagctccaaattcagactgac

SEQ ID NO: 48485 - DNA, 110 bp, synthetic construct
  source 1..110: mol_type = other DNA
taaatccctttctcagaacctcttgagtgactgagagctccaaattcagactgacatcctccaggcacccccgtgatctagctaccccatcagggtcaccaacacatccg

SEQ ID NO: 48486 - DNA, 110 bp, synthetic construct
  source 1..110: mol_type = other DNA
taacctggttgctaaagatcgattttggagtgccgcatcctggggcaggaaccagctccaccactcactagctatgtgatctcgggcaagtactgtggctcctcggggcc

SEQ ID NO: 48487 - DNA, 110 bp, synthetic construct
  source 1..110: mol_type = other DNA
ctccaccactcactagctatgtgatctcgggcaagtactgtggctcctcggggcctcagtttcaacctttgaaaaatggggataagaggagttcccgttgtggctcagtg

SEQ ID NO: 48488 - DNA, 110 bp, synthetic construct; identical to SEQ ID NO: 48486
  source 1..110: mol_type = other DNA

SEQ ID NO: 48489 - DNA, 110 bp, synthetic construct; identical to SEQ ID NO: 48487
  source 1..110: mol_type = other DNA

SEQ ID NO: 48490 - DNA, 110 bp, synthetic construct
  source 1..110: mol_type = other DNA
caatcagggcaagtgacttcaggcagtgacttaatctttgcgttttagaaacctcatctgaaatcaggcaggcaaaagcaccagcactgtaggcataaatgagataatgt

SEQ ID NO: 48491 - DNA, 110 bp, synthetic construct
  source 1..110: mol_type = other DNA
atctgaaatcaggcaggcaaaagcaccagcactgtaggcataaatgagataatgtcggcctgccaaacaagcccggtccctccgcaatccttttattccacccaacaaaa

SEQ ID NO: 48492 - DNA, 110 bp, synthetic construct
  source 1..110: mol_type = other DNA
tccaagagcccccatcaaagaggaaggtaaaagaagctaaggggccctggtcttcggttcaccagcttcatctgagaagctttgcaagaccttaccacccccatttcaca

SEQ ID NO: 48493 - DNA, 110 bp, synthetic construct
  source 1..110: mol_type = other DNA
ggttcaccagcttcatctgagaagctttgcaagaccttaccacccccatttcacagatggggagactggcgcacagcaaggtgtgctgcagggatggaatgaagtcaggg

SEQ ID NO: 48494 - DNA, 110 bp, synthetic construct
  source 1..110: mol_type = other DNA
gggtatgaaagactgtctgagatgggggccaaggatgtttgtgtatgtgtgcgcgcgggcgtgtggtagatttgtgtctttgcatttttccttaatttatctttaaagcg

SEQ ID NO: 48495 - DNA, 110 bp, synthetic construct
  source 1..110: mol_type = other DNA
cgggcgtgtggtagatttgtgtctttgcatttttccttaatttatctttaaagcggcaaacttacaggtgtggagtgggaaatgacggagaaggatcggaaaggagggga

SEQ ID NO: 48496 - DNA, 110 bp, synthetic construct
  source 1..110: mol_type = other DNA
tgtgcatcaattcagctcattctgtttggaacagtaatttaatctggagggaaaaaaaaaaaacaaacccagctccgcaacttcaaacctctggtctgtccctgcccctt

SEQ ID NO: 48497 - DNA, 110 bp, synthetic construct
  source 1..110: mol_type = other DNA
aaaaaaaacaaacccagctccgcaacttcaaacctctggtctgtccctgccccttccacacactggtctggtttcagtccagggggaccctgaactcctctggcctggtg

SEQ ID NO: 48498 - DNA, 110 bp, synthetic construct
  source 1..110: mol_type = other DNA
tgcattcattcgtctagctcccattatgaacacaacgtatagggaggctccaaaaagaaatgcacgtggcctctgctcttaccaagtctatttgacaggaaatgacactc

SEQ ID NO: 48499 - DNA, 110 bp, synthetic construct
  source 1..110: mol_type = other DNA
agaaatgcacgtggcctctgctcttaccaagtctatttgacaggaaatgacactctccttacccctccccgctcgccaccaaagagcaatgagagagtctgctactgact

SEQ ID NO: 48500 - DNA, 110 bp, synthetic construct
  source 1..110: mol_type = other DNA
cccagagtcccttgggcaaagcaaggagacctctggggacctgctgggaggcccctccagccctgacagcagaggcaccaaaagtggacgtgaggcacagaagaatatct

SEQ ID NO: 48501 - DNA, 110 bp, synthetic construct
  source 1..110: mol_type = other DNA
tccagccctgacagcagaggcaccaaaagtggacgtgaggcacagaagaatatctttggctctgacactgaccctggaaggtgaacttgacagtcagcaaatcaggtagg

SEQ ID NO: 48502 - DNA, 110 bp, synthetic construct
  source 1..110: mol_type = other DNA
ctcacagcctggcacagaaagatgtcagttccaagttcccagggcaggtactttcgactggcccagctggggtcagatatccacccctgggcccagcatccccaggaagc

SEQ ID NO: 48503 - DNA, 110 bp, synthetic construct
  source 1..110: mol_type = other DNA
cccgtgggcaccttaaatgatgagtttactactctgacctccctgggctagacggtgagctccttgagggcaggagcttggccgtcattatcttggcatccctaacgctg

SEQ ID NO: 48504 - DNA, 110 bp, synthetic construct
  source 1..110: mol_type = other DNA
ctgtagctgttttttaaacaccttgaaagttctcacactgacttgtttgatggtccttgttttgatgagacataaactgtgcggacatccgtgcttctccagaggagctc

SEQ ID NO: 48505 - DNA, 110 bp, synthetic construct
  source 1..110: mol_type = other DNA
cttgttttgatgagacataaactgtgcggacatccgtgcttctccagaggagctcctcagaggtatctgagagacagccttcagggccacaggcctcaggttggcccaaa

SEQ ID NO: 48506 - DNA, 110 bp, synthetic construct
  source 1..110: mol_type = other DNA
aaggaaaaaacatccatcagcctctagaaaccactcactgagccctgccctgcaaggtccctccatcacccccaaccccggcctccgtgttcccatctgtgaaatgggaa

SEQ ID NO: 48507 - DNA, 110 bp, synthetic construct
  source 1..110: mol_type = other DNA
ggtccctccatcacccccaaccccggcctccgtgttcccatctgtgaaatgggaaacgagcagcagaggggtggagaaatggaaggttctggaaggagctggcgtgttga

SEQ ID NO: 48508 - DNA, 110 bp, synthetic construct
  source 1..110: mol_type = other DNA
tgaactcctcctggaaggccttcagggccttgtcggcagcctcgtggatgggcatgtcgttgtggcggatgtactccgcgagcgagcaggaccagcctccctccgtgttg

SEQ ID NO: 48509 - DNA, 110 bp, synthetic construct
  source 1..110: mol_type = other DNA
gtcgttgtggcggatgtactccgcgagcgagcaggaccagcctccctccgtgttgctggtcggcaccttctacaagaaccaatgcgagacgggccggggtggggggggca

SEQ ID NO: 48510 - DNA, 110 bp, synthetic construct
  source 1..110: mol_type = other DNA
tctttgatccgtctccagccttctttatgaggatcacgccagcgaaaccgtgatccagatcccagaggtagacagatgagacaccgccttcaaaatacctgaaggaaaca

SEQ ID NO: 48511 - DNA, 110 bp, synthetic construct
  source 1..110: mol_type = other DNA
cagatcccagaggtagacagatgagacaccgccttcaaaatacctgaaggaaacaggcccaactgcccattagatgttaagcccatcaaattacaaagcatcagcccagg

SEQ ID NO: 48512 - DNA, 110 bp, synthetic construct
  source 1..110: mol_type = other DNA
gaatccaaagcccaacactagaccgctgacgttttaaaggaagaagaagcagagatgcttagtctcaacttcagtaagaagcgctactgcacaggtcagctgggtccctc

SEQ ID NO: 48513 - DNA, 110 bp, synthetic construct
  source 1..110: mol_type = other DNA
tgcttagtctcaacttcagtaagaagcgctactgcacaggtcagctgggtccctctaggctacaagatggtaagaggcacgattaagggtcattacaggtatcttaaggc

SEQ ID NO: 48514 - DNA, 110 bp, synthetic construct
  source 1..110: mol_type = other DNA
tgggttcttactggctaggccatcagagaactccaggacagggcttttgagggtgctgaaaacttccccaacctcatacacataacactgagtcaatatcacagctgcta

SEQ ID NO: 48515 - DNA, 110 bp, synthetic construct
  source 1..110: mol_type = other DNA
ctgaaaacttccccaacctcatacacataacactgagtcaatatcacagctgctatgtaactagcacttattctatgtcgggcaccgcgcatgcatttattctccacagc

SEQ ID NO: 48516 - DNA, 110 bp, synthetic construct; identical to SEQ ID NO: 48514
  source 1..110: mol_type = other DNA

SEQ ID NO: 48517 - DNA, 110 bp, synthetic construct; identical to SEQ ID NO: 48515
  source 1..110: mol_type = other DNA

SEQ ID NO: 48518 - DNA, 110 bp, synthetic construct
  source 1..110: mol_type = other DNA
ggtagtcagcctcgatgacaaactccgccatctccctgcatgaagagccccgtcaaaggtggagccccagactgtgaagcagtccggatctggcagcagcctgcatctct

SEQ ID NO: 48519 - DNA, 110 bp, synthetic construct
  source 1..110: mol_type = other DNA
aaggtggagccccagactgtgaagcagtccggatctggcagcagcctgcatctctgaatgtccctctgagcatgaatgtgcgtccatagagctcctgagcccaggttcct

SEQ ID NO: 48520 - DNA, 110 bp, synthetic construct
  source 1..110: mol_type = other DNA
aagagccaacgagatatattctagcctctagacagagaacgtggttcattattaacaacgagaacatctcatgttcatttggtgtagctctgtgccaggctctgtggggc

SEQ ID NO: 48521 - DNA, 110 bp, synthetic construct
  source 1..110: mol_type = other DNA
caacgagaacatctcatgttcatttggtgtagctctgtgccaggctctgtggggccatcaacatggtcctacctcgggcccaccctctctgatggatggccgtttcccag

SEQ ID NO: 48522 - DNA, 110 bp, synthetic construct; identical to SEQ ID NO: 48520
  source 1..110: mol_type = other DNA

SEQ ID NO: 48523 - DNA, 110 bp, synthetic construct; identical to SEQ ID NO: 48521
  source 1..110: mol_type = other DNA

SEQ ID NO: 48524 - DNA, 110 bp, synthetic construct
  source 1..110: mol_type = other DNA
ataaatggactggcaaggcctcggatgggctgagcagagagagttctggccccacaggtacagagacgttccacctgggccacgaccccctgtgcttaagcttggctcca

SEQ ID NO: 48525 - DNA, 110 bp, synthetic construct
  source 1..110: mol_type = other DNA
aggtacagagacgttccacctgggccacgaccccctgtgcttaagcttggctccaaggcaatataaatgccaccatcaagacaggctggggcagtggacctggcggagac

SEQ ID NO: 48526 - DNA, 110 bp, synthetic construct
  source 1..110: mol_type = other DNA
agccacaggatggaaacaaggtctatgtgtgttgttctttggggtagttggttaggtgtgccaacaccagtgagagctatcatatttttactgaggcactttctttctaa

SEQ ID NO: 48527 - DNA, 110 bp, synthetic construct
  source 1..110: mol_type = other DNA
gtgtgccaacaccagtgagagctatcatatttttactgaggcactttctttctaaggatgcctttgagccaagaagactgtttacctgcttccttgtcccagttttttgt

SEQ ID NO: 48528 - DNA, 110 bp, synthetic construct
  source 1..110: mol_type = other DNA
ccttatgccaaagggacatattttggggcgcaaattttgctcccctccagagcagtgatacctactctcacagctgctgtacacacccagggttgacttattttttttag

SEQ ID NO: 48529 - DNA, 110 bp, synthetic construct
  source 1..110: mol_type = other DNA
tgatacctactctcacagctgctgtacacacccagggttgacttattttttttaggtagacacagtgtctgggcccatgagaatgtttccactttaaattcttttaaaat

SEQ ID NO: 48530 - DNA, 110 bp, synthetic construct
  source 1..110: mol_type = other DNA
agtaatgctgctacaaacatttatgtgaaaatttttgtgtagatgcatgttttcatttctcttgggtatatatctaggagtaaaattgctgggttgtatggtaactccat

SEQ ID NO: 48531 - DNA, 110 bp, synthetic construct
  source 1..110: mol_type = other DNA
tttctcttgggtatatatctaggagtaaaattgctgggttgtatggtaactccatatttaactttttgagatactgtcaaactgttttccaaagtggccacaccatttta

SEQ ID NO: 48532 - DNA, 110 bp, synthetic construct
  source 1..110: mol_type = other DNA
aaaataaaattgggtttttattttgcatctaccctggtgatgtgacactttcctttcctgatgagggcagtttctcctagccttttctgacatccctgtgtgcctccacc

SEQ ID NO: 48533 - DNA, 110 bp, synthetic construct
  source 1..110: mol_type = other DNA
tcctgatgagggcagtttctcctagccttttctgacatccctgtgtgcctccaccatcagtttcggaaacagcagcaatccagaacagctgatggacaggcacagatctc

SEQ ID NO: 48534 - DNA, 110 bp, synthetic construct
  source 1..110: mol_type = other DNA
taattacccctttctctgcattcccctaggtatgtctattgagcccttttggagttctgattcacttagttgattgtttatcgatctgtgggtgatagagctggggcact

SEQ ID NO: 48535 - DNA, 110 bp, synthetic construct
  source 1..110: mol_type = other DNA
tctgattcacttagttgattgtttatcgatctgtgggtgatagagctggggcactgcgtctctttatctttctatccattgccccacctcacaatcaacagtttattgag

SEQ ID NO: 48536 - DNA, 110 bp, synthetic construct
  source 1..110: mol_type = other DNA
agttggattcgtttccagtgtgccccaatgggaactccatcctcagttttataggaacccaatactccatagaaaagaaacacggtgaaggaaagcagagctagaaggag

SEQ ID NO: 48537 - DNA, 110 bp, synthetic construct
  source 1..110: mol_type = other DNA
aacccaatactccatagaaaagaaacacggtgaaggaaagcagagctagaaggaggctgctgtaaattcatgtaggacagaagcaagacagggagttgagggagagccca

SEQ ID NO: 48538 - DNA, 110 bp, synthetic construct
  source 1..110: mol_type = other DNA
cgaagagtttccttctcagagacaaggcagggaagtcagcactcattggacagccttgcaaatacatggcaaccggctacccactgtgcctggcacgtgcactggtgaga

SEQ ID NO: 48539 - DNA, 110 bp, synthetic construct
  source 1..110: mol_type = other DNA
ttgcaaatacatggcaaccggctacccactgtgcctggcacgtgcactggtgagagaagacccagaaagaatctcagacttgcatttcacatcctttgtttgactttgct

SEQ ID NO: 48540 - DNA, 110 bp, synthetic construct
  source 1..110: mol_type = other DNA
gtcacagatgcagctgaatctggtgtggctgtggctgtggcgtgggccgacaactgcagctctgattccacccctggcatgggaacttcataggctgcaggtgtggcccc

SEQ ID NO: 48541 - DNA, 110 bp, synthetic construct
  source 1..110: mol_type = other DNA
gcagctctgattccacccctggcatgggaacttcataggctgcaggtgtggccccagaaagaaagaaggaaaaaaaaaaaaaaaaagcctttactgagtagttcctgctg

SEQ ID NO: 48542 - DNA, 110 bp, synthetic construct
  source 1..110: mol_type = other DNA
gagcagctgagttgcaaagcctgggatgggtgaaggggctgtccaaaacccagtcctcccccaacacccctgccaacatggtccttctggacgattcctgggccagagcc

SEQ ID NO: 48543 - DNA, 110 bp, synthetic construct
  source 1..110: mol_type = other DNA
ctcccccaacacccctgccaacatggtccttctggacgattcctgggccagagcctcatctccataagccaccaggaaacttcagaccgtcttagcctcttccctcttct

SEQ ID NO: 48544 - DNA, 110 bp, synthetic construct
  source 1..110: mol_type = other DNA
ctggcacagagtaatgcccaataaacactggctattattgtccctgtctgacttatttgacgatcacccttttgctattagccacgtcttggcttctggaacgccagcga

SEQ ID NO: 48545 - DNA, 110 bp, synthetic construct
  source 1..110: mol_type = other DNA
tttgacgatcacccttttgctattagccacgtcttggcttctggaacgccagcgatcagacctcccgggctgctaacaagttagctttcgaaactgccctgggagatgtg

SEQ ID NO: 48546 - DNA, 110 bp, synthetic construct
  source 1..110: mol_type = other DNA
tttttttaatttaggaccgaacccacagccatgtatggaagttcccaggccaggggtcaaatcgaagctgcagccaccagcctacatcacagccgtagcagttcaggatc

SEQ ID NO: 48547 - DNA, 110 bp, synthetic construct; identical to SEQ ID NO: 48546
  source 1..110: mol_type = other DNA

SEQ ID NO: 48548 - DNA, 110 bp, synthetic construct
  source 1..110: mol_type = other DNA
tatgctgcaggtgcggccctaaaagaccaaaaaaattctttttctaaagcaggaggcacaatttttcagcctcaaccatccttgctctcccactgccacggttctgttag

SEQ ID NO: 48549 - DNA, 110 bp, synthetic construct; identical to SEQ ID NO: 48548
  source 1..110: mol_type = other DNA

SEQ ID NO: 48550 - DNA, 110 bp, synthetic construct
  source 1..110: mol_type = other DNA
agcaactactatcaaacaggaaggcataagtcttgctctaactcacctgctccaagagaaaattatgtacatcttccccttctggtaaaaagtccttccagctgaggtca

SEQ ID NO: 48551 - DNA, 110 bp, synthetic construct
  source 1..110: mol_type = other DNA
gagaaaattatgtacatcttccccttctggtaaaaagtccttccagctgaggtcagcttccctccataaggctcccactttcttatggctctaaaacagagataagtcca

SEQ ID NO: 48552 - DNA, 110 bp, synthetic construct
  source 1..110: mol_type = other DNA
ggtcacagactcactgaaaattctgcagacattttattattttttatttactacgagacatacagattattcggatctaaattttatattgccctttccccctgtatttt

SEQ ID NO: 48553 - DNA, 110 bp, synthetic construct
  source 1..110: mol_type = other DNA
agaaaaaagaagagttcagtagaggttagtgaacaaatacacaccatcatccatcatggcacactctctcttacctggggaggagtaggtgtggatgtgggtctccctat

SEQ ID NO: 48554 - DNA, 110 bp, synthetic construct
  source 1..110: mol_type = other DNA
cctttaagagaggaagcatctctttgtcctctccattctccttcctgctaactggaatgcaagcttatagactagagctagagcagcactctaggacaaggttcactcca

SEQ ID NO: 48555 - DNA, 110 bp, synthetic construct
  source 1..110: mol_type = other DNA
cggctgcacctggcatacggcgttcctggaccacggatcagatccaagctgcagctgtgcacaactgtggcaatactggattttttaacccactgggctcggccagggat

SEQ ID NO: 48556 - DNA, 110 bp, synthetic construct
  source 1..110: mol_type = other DNA
cccagcgagggactgcattccttcccacccacgtggtcagccacagggattcggggcccttccaaagggccagacagagccatccttgtctttaaactcctcgtaggctc

SEQ ID NO: 48557 - DNA, 110 bp, synthetic construct
  source 1..110: mol_type = other DNA
gcccttccaaagggccagacagagccatccttgtctttaaactcctcgtaggctcggcagagcacctgtacttcattaaacacgtcccaagatggtgagcggttcagagc

SEQ ID NO: 48558 - DNA, 110 bp, synthetic construct
  source 1..110: mol_type = other DNA
cggccaaggcctgagggctcactgtcactcagaatgggggagcactgggggcccctgtctccaaaaggtgctctgaagagtgccaagagcacggtgccaccatgtgacat

SEQ ID NO: 48559 - DNA, 110 bp, synthetic construct
  source 1..110: mol_type = other DNA
tgtctccaaaaggtgctctgaagagtgccaagagcacggtgccaccatgtgacattcatgggagcacatgagaggcaggaccccgggacaggctaggatctggggctaag

SEQ ID NO: 48560 - DNA, 110 bp, synthetic construct
  source 1..110: mol_type = other DNA
ccggagggtgcatctaggcttgggcagctgattctaagtaaggaagaattctgatattcatctgagctgcccagtaaaggaacgggctacttcagaggtagtgagcctcc

SEQ ID NO: 48561 - DNA, 110 bp, synthetic construct
  source 1..110: mol_type = other DNA
attcatctgagctgcccagtaaaggaacgggctacttcagaggtagtgagcctcccatcactaggagtgagcatcgaatggagagtcaaggagctgccaaggggtcctga

SEQ ID NO: 48562 - DNA, 110 bp, synthetic construct
  source 1..110: mol_type = other DNA
catcttaagcagcccactgtagatgcaaaacgtacggaaggaaagctatggcattctgggcacttggggttaggaagctactttgcaggatatgttgcctttatgcataa

SEQ ID NO: 48563 - DNA, 110 bp, synthetic construct
  source 1..110: mol_type = other DNA
ctgggcacttggggttaggaagctactttgcaggatatgttgcctttatgcataaactgaaggagccgtatgcctacaaagatttgcctgatcacggagtttccatcatg

SEQ ID NO: 48564 - DNA, 110 bp, synthetic construct
  source 1..110: mol_type = other DNA
cacctaggacctgaatccatctatcagcgttagtgatgacaagttatcaacatctatcgcctgccttctacaagcacacaggatgcaggcagagtggggagaagcttgtg

SEQ ID NO: 48565 - DNA, 110 bp, synthetic construct
  source 1..110: mol_type = other DNA
atcgcctgccttctacaagcacacaggatgcaggcagagtggggagaagcttgtgtggcttcaaagcctggctcatggtgccaccgaacagtgtatgtgagtcgctgggc

SEQ ID NO: 48566 - DNA, 110 bp, synthetic construct
  source 1..110: mol_type = other DNA
cctgagttgtggtgtagctcacagacacgcctcggatctggcgttactgtggctatggggttggctggtggctggctgcagctctgattcgaccccctagcctgggaact

SEQ ID NO: 48567 - DNA, 110 bp, synthetic construct; identical to SEQ ID NO: 48566
  source 1..110: mol_type = other DNA

SEQ ID NO: 48568 - DNA, 110 bp, synthetic construct
  source 1..110: mol_type = other DNA
agtgaactctcaagcctgggacccaggggtccctctactggtcgctctgggacccagtactgattcagagaagactcccaggtaccgtggggctggaccggcaacctgag

SEQ ID NO: 48569 - DNA, 110 bp, synthetic construct
  source 1..110: mol_type = other DNA
agtactgattcagagaagactcccaggtaccgtggggctggaccggcaacctgaggtcccaacgctgaggggaagaagcagcagtgcctctgaggatcatctacactaaa

SEQ ID NO: 48570 - DNA, 110 bp, synthetic construct
  source 1..110: mol_type = other DNA
ctctcacccctgcagcctccaggcagagattcaggaagttccgctacgaggatgcggctgggcccagggatgtcctcagacaactccaggagcttgccggacagtggctg

SEQ ID NO: 48571 - DNA, 110 bp, synthetic construct
  source 1..110: mol_type = other DNA
ggctgggcccagggatgtcctcagacaactccaggagcttgccggacagtggctgaggcccgacattcacacaaaggagcagattgtggaaatgctggtgcaggagcaac

SEQ ID NO: 48572 - DNA, 110 bp, synthetic construct
  source 1..110: mol_type = other DNA
tgaagtcactgccttgactgtgagcccaggaggggagggtctgggtgctgctcctcccgggttccggggctgggcaaggtgaggctctcaacacggttcatcaaaggtcc

SEQ ID NO: 48573 - DNA, 110 bp, synthetic construct
  source 1..110: mol_type = other DNA
cccgggttccggggctgggcaaggtgaggctctcaacacggttcatcaaaggtccagatgaatgagatgaacttgcctacagaaggccaagagctaagggaaggtctgtc

SEQ ID NO: 48574 - DNA, 110 bp, synthetic construct
  source 1..110: mol_type = other DNA
cttccagccaggaaccatgctcacagatgcccagccagcatccctgcaaatgcagacaccccagcactggagtgtcagaaacccgccggggcaggagcagctgcttctaa

SEQ ID NO: 48575 - DNA, 110 bp, synthetic construct
  source 1..110: mol_type = other DNA
acaccccagcactggagtgtcagaaacccgccggggcaggagcagctgcttctaaatcaaggccaaaaggcagccgaggggccgggttgggtttggtggctctgccgtat

SEQ ID NO: 48576 - DNA, 110 bp, synthetic construct
  source 1..110: mol_type = other DNA
ccctgcccatcatgtcagcaagtctgctcagactcttaacatcttgataaggggtcttactcctggcccagctgcaagtgctccctggaaaaagcctcgccaggtgtgcc

SEQ ID NO: 48577 - DNA, 110 bp, synthetic construct
  source 1..110: mol_type = other DNA
cttactcctggcccagctgcaagtgctccctggaaaaagcctcgccaggtgtgcctccccccactccacccaggtcgccctgaggttccaggtgccagagctgccatggg

SEQ ID NO: 48578 - DNA, 110 bp, synthetic construct
  source 1..110: mol_type = other DNA
ccactcaaacccacagacaatcaagccacatggttaatcaggggttcacagttacaaccagtcccgtgtgtccaaacacgggtgaatacagctcttaaccactgtccaga

SEQ ID NO: 48579 - DNA, 110 bp, synthetic construct
  source 1..110: mol_type = other DNA
aaccagtcccgtgtgtccaaacacgggtgaatacagctcttaaccactgtccagacccccaaatgaggccccagaaatgcaaactaggggggtttcagcagagatctttc

SEQ ID NO: 48580 - DNA, 110 bp, synthetic construct; identical to SEQ ID NO: 48578
  source 1..110: mol_type = other DNA

SEQ ID NO: 48581 - DNA, 110 bp, synthetic construct; identical to SEQ ID NO: 48579
  source 1..110: mol_type = other DNA

SEQ ID NO: 48582 - DNA, 110 bp, synthetic construct
  source 1..110: mol_type = other DNA
agatcattacagtcacttaaaatggtgcctagttcatgtttaagtgcctccagatgttagttatcattagttgtcgaactgtttgcaacagttttgatgagtttacagat

SEQ ID NO: 48583 - DNA, 110 bp, synthetic construct
  source 1..110: mol_type = other DNA
gttagttatcattagttgtcgaactgtttgcaacagttttgatgagtttacagatcatatgtgttccattttgttgatgaagaaactgaggttccaggtggggaggtgac

SEQ ID NO: 48584 - DNA, 110 bp, synthetic construct; identical to SEQ ID NO: 48582
  source 1..110: mol_type = other DNA

SEQ ID NO: 48585 - DNA, 110 bp, synthetic construct; identical to SEQ ID NO: 48583
  source 1..110: mol_type = other DNA

SEQ ID NO: 48586 - DNA, 110 bp, synthetic construct
  source 1..110: mol_type = other DNA
cctcatttcagactcagtactcaaggagacagacactattattatcccatgttacagatgaggaaactgaggcggagaaaagtgcagtagctacccaaggtcccaggact

SEQ ID NO: 48587 - DNA, 110 bp, synthetic construct
  source 1..110: mol_type = other DNA
agatgaggaaactgaggcggagaaaagtgcagtagctacccaaggtcccaggactaacaggtagggctagagttgaacctgggcaatctctctcccaaaacaacctccct

SEQ ID NO: 48588 - DNA, 110 bp, synthetic construct
  source 1..110: mol_type = other DNA
tttcatttgattgggaaggggagacagcaaggaatgggagaggggcagccactgtgtgatggtgtctgaagaactgcccaccacaagctcctttggggggtggccaccag

SEQ ID NO: 48589 - DNA, 110 bp, synthetic construct
  source 1..110: mol_type = other DNA
gtgatggtgtctgaagaactgcccaccacaagctcctttggggggtggccaccagactaaggccaagatgctgcccttccccacccaccaccatgaagctaccctgctgg

SEQ ID NO: 48590 - DNA, 110 bp, synthetic construct; identical to SEQ ID NO: 48588
  source 1..110: mol_type = other DNA

SEQ ID NO: 48591 - DNA, 110 bp, synthetic construct; identical to SEQ ID NO: 48589
  source 1..110: mol_type = other DNA

SEQ ID NO: 48592 - DNA, 110 bp, synthetic construct
  source 1..110: mol_type = other DNA
atctatcctctttgccccaaaacagaccctgttactcaatcctgacagtcttttagctgctccaggaagcccttacgaatcatgtagagtcaaaacaaaaaacccaattt

SEQ ID NO: 48593 - DNA, 110 bp, synthetic construct
  source 1..110: mol_type = other DNA
gctgctccaggaagcccttacgaatcatgtagagtcaaaacaaaaaacccaatttctctgctctctctgctgacctctctgtccccctggcccttactcaggatcagtgt

SEQ ID NO: 48594 - DNA, 110 bp, synthetic construct
  source 1..110: mol_type = other DNA
accctggagggacaggagggtggcttggaatgggggtatgagtcgtggggatccaggagtctggcctaaggaacagcaaagatggaactgccaccaactgagatgaggca

SEQ ID NO: 48595 - DNA, 110 bp, synthetic construct
  source 1..110: mol_type = other DNA
ggagtctggcctaaggaacagcaaagatggaactgccaccaactgagatgaggcagactacggcaggagcagacctggggtgttgagacctaagttagagatgcctttta

SEQ ID NO: 48596 - DNA, 110 bp, synthetic construct
  source 1..110: mol_type = other DNA
ggcactgtttagtgtgtatagtaaatgtaacttcttttgggaactgaatcttttagttatcatcccttctttgaagtcaggggggagaatttttcattaaaattatgtct

SEQ ID NO: 48597 - DNA, 110 bp, synthetic construct
  source 1..110: mol_type = other DNA
tgtaacttcttttgggaactgaatcttttagttatcatcccttctttgaagtcaggggggagaatttttcattaaaattatgtcttttgcttgttgtcttatattgtttt

SEQ ID NO: 48598 - DNA, 110 bp, synthetic construct
  source 1..110: mol_type = other DNA
caaagctcagagaggttatgggcttttccaagctaataaatagcctagccccgtttgctaatgcggctggtctgactgagagtccttgctcttaatccttgaacctcccc

SEQ ID NO: 48599 - DNA, 110 bp, synthetic construct
  source 1..110: mol_type = other DNA
tgctaatgcggctggtctgactgagagtccttgctcttaatccttgaacctccccagagctggtgatacaaaggactttagtctaacattctcttaacaagcagtatgac

SEQ ID NO: 48600 - DNA, 110 bp, synthetic construct
  source 1..110: mol_type = other DNA
gctggcagactcttcttgggtggtcttggggaacacccaaagacccttccaaagacccttccaccgtggaccagctgttctcgctcttggcctgggaagatggtggaagt

SEQ ID NO: 48601 - DNA, 110 bp, synthetic construct
  source 1..110: mol_type = other DNA
cccttccaccgtggaccagctgttctcgctcttggcctgggaagatggtggaagtggggaaagtataatcctttaagcagggcaacctcacctgggaggcgatgagacag

SEQ ID NO: 48602 - DNA, 110 bp, synthetic construct; identical to SEQ ID NO: 48600
  source 1..110: mol_type = other DNA

SEQ ID NO: 48603 - DNA, 110 bp, synthetic construct; identical to SEQ ID NO: 48601
  source 1..110: mol_type = other DNA

SEQ ID NO: 48604 - DNA, 110 bp, synthetic construct
  source 1..110: mol_type = other DNA
tagactgtcacattaagcgtgagtattattattattattttggctgcacagatggcatgtggaagttctggggccagggaatgaacctgagccacagcagcaatgtaagc

SEQ ID NO: 48605 - DNA, 110 bp, synthetic construct
  source 1..110: mol_type = other DNA
catgtggaagttctggggccagggaatgaacctgagccacagcagcaatgtaagctacagcaatgatgctagatccttaacctactaagccaccagggaactccaagcat

SEQ ID NO: 48606 - DNA, 110 bp, synthetic construct
  source 1..110: mol_type = other DNA
gagccacaaggaacgcctcctacaaagtctgatgtagatacacaagatgacctgatagagctcaaactaatagctgggtgtgcttttattctaccctgcacacagcccaa

SEQ ID NO: 48607 - DNA, 110 bp, synthetic construct
  source 1..110: mol_type = other DNA
tagagctcaaactaatagctgggtgtgcttttattctaccctgcacacagcccaactcaggaaatagcaaatcccattctctccctgtctgcaaaggatcacctatgttt

SEQ ID NO: 48608 - DNA, 110 bp, synthetic construct
  source 1..110: mol_type = other DNA
tagacaaagggcctcagagggtttctatgcctgatgtccttagctaattagtagagcgtttaattgaacttcaaggcaagtccatgaaaggtgtggattttgaatctcag

SEQ ID NO: 48609 - DNA, 110 bp, synthetic construct
  source 1..110: mol_type = other DNA
gcgtttaattgaacttcaaggcaagtccatgaaaggtgtggattttgaatctcagacaccatttcctagggctggcagtctccacttgcagtactatatttgaggaaggc

SEQ ID NO: 48610 - DNA, 110 bp, synthetic construct
  source 1..110: mol_type = other DNA
tgccagagaagaggacggcaatgagcaggagccagcccagcagatagtcattgggaagcagggggaagagctcagagcagggtctgggacagcaagtccatcccatgaga

SEQ ID NO: 48611 - DNA, 110 bp, synthetic construct
  source 1..110: mol_type = other DNA
aagcagggggaagagctcagagcagggtctgggacagcaagtccatcccatgagaggcaggtaggagaccaatgccgagagggcccacatgatgcccagggccaccagtg

SEQ ID NO: 48612 - DNA, 110 bp, synthetic construct
  source 1..110: mol_type = other DNA
ttacatccgtttctggcagggctcgtcagcctcggcattggtgtcatctggggttgagctctaggtggtggggagctgtcccgtttaacagtacccccagcctctacctt

SEQ ID NO: 48613 - DNA, 110 bp, synthetic construct
  source 1..110: mol_type = other DNA
gagctctaggtggtggggagctgtcccgtttaacagtacccccagcctctaccttctagatgccggtggacacctccagttgtgacagcctaaaatttgggcactgccaa

SEQ ID NO: 48614 - DNA, 110 bp, synthetic construct
  source 1..110: mol_type = other DNA
cacaagcagcttctttctggggcctgagggcaaagcccacattctcctgggctcagaggtgtggccccctgggctgggccctctcctgggcatggggtgggggagggaga

SEQ ID NO: 48615 - DNA, 110 bp, synthetic construct
  source 1..110: mol_type = other DNA
gaggtgtggccccctgggctgggccctctcctgggcatggggtgggggagggagacttattcttccccaagagcctgctccagccaagctttatctaaaccacctcattt

SEQ ID NO: 48616 - DNA, 110 bp, synthetic construct
  source 1..110: mol_type = other DNA
caaccccactgtcagagctctcgatcacacttcctttcccgggttctcatggggcctgttcatccctattcttccaatatctatagctcactattggtgaaggacatcta

SEQ ID NO: 48617 - DNA, 110 bp, synthetic construct
  source 1..110: mol_type = other DNA
ctgttcatccctattcttccaatatctatagctcactattggtgaaggacatctactgatcactgtgcgccagaggtttcaaaaaggaccacaactccgctcctgccctt

SEQ ID NO: 48618 - DNA, 110 bp, synthetic construct; identical to SEQ ID NO: 48616
  source 1..110: mol_type = other DNA

SEQ ID NO: 48619 - DNA, 110 bp, synthetic construct; identical to SEQ ID NO: 48617
  source 1..110: mol_type = other DNA

SEQ ID NO: 48620 - DNA, 110 bp, synthetic construct
  source 1..110: mol_type = other DNA
tacttgactattttgcctcagattgccagttggcccctcagaaactaccctccagaacatggtacatgcaagtccctgcccctatctcagcttcatcggctggggcaagg

SEQ ID NO: 48621 - DNA, 110 bp, synthetic construct
  source 1..110: mol_type = other DNA
aacatggtacatgcaagtccctgcccctatctcagcttcatcggctggggcaaggatatgtgtgtacgggcctctcaaggtctttccacatccaccctgctcccctccaa

SEQ ID NO: 48622 - DNA, 110 bp, synthetic construct
  source 1..110: mol_type = other DNA
ggggctgccatcttttgcagcatccctggcctctagccactagatgccaggggtagctccccacccctgagctgtgacaaccaaaactgtctccagacgtttccaaatgc

SEQ ID NO: 48623 - DNA, 110 bp, synthetic construct
  source 1..110: mol_type = other DNA
gctccccacccctgagctgtgacaaccaaaactgtctccagacgtttccaaatgcccctggggcagaatcgcccccattgagaatgtctgttagagattcaggaactgag

SEQ ID NO: 48624 - DNA, 110 bp, synthetic construct
  source 1..110: mol_type = other DNA
agccctgttccccgttgccacatttacattctatctctggggtgagaatcagatggagtgctagctgggagagtaatagcagtcgcttcctctttatccaagttggggcc

SEQ ID NO: 48625 - DNA, 110 bp, synthetic construct
  source 1..110: mol_type = other DNA
gagtgctagctgggagagtaatagcagtcgcttcctctttatccaagttggggccagtgaggtgatgaggtaatggatggggtctcggggtggcttccagaacccagggg

SEQ ID NO: 48626 - DNA, 110 bp, synthetic construct; identical to SEQ ID NO: 48624
  source 1..110: mol_type = other DNA

SEQ ID NO: 48627 - DNA, 110 bp, synthetic construct; identical to SEQ ID NO: 48625
  source 1..110: mol_type = other DNA

SEQ ID NO: 48628 - DNA, 110 bp, synthetic construct
  source 1..110: mol_type = other DNA
gggggtctcggggcacaaggccaccacctctcctagggccctcagaagagcagacagatggctagctggcaggggtaggaatctgggatcctcacccccgctcccgcccc

SEQ ID NO: 48629 - DNA, 110 bp, synthetic construct
  source 1..110: mol_type = other DNA
agatggctagctggcaggggtaggaatctgggatcctcacccccgctcccgccccacttaagttatcatgtctcatctgaactctccccagtgctggattttgccttcct

SEQ ID NO: 48630 - DNA, 110 bp, synthetic construct
  source 1..110: mol_type = other DNA
gtcaggagctctgtcctccccatcaaaaacctccgttataaaattcaccagacctttctgtactctcttggcctttctggaacactttttgccagagtgttggtcttttt

SEQ ID NO: 48631 - DNA, 110 bp, synthetic construct
  source 1..110: mol_type = other DNA
ttctgtactctcttggcctttctggaacactttttgccagagtgttggtctttttgcgtggagttgtccatttcagcaaagttctgtgctatattccatttgtttgattc

SEQ ID NO: 48632 - DNA, 110 bp, synthetic construct
  source 1..110: mol_type = other DNA
aatgccatcgtaacctcacccaccataaagagtgaacatgccagaagtaacttctctaagttgcctgccacacagcaaataccgaacccccagtgctcctggccttgtag

SEQ ID NO: 48633 - DNA, 110 bp, synthetic construct
  source 1..110: mol_type = other DNA
ctaagttgcctgccacacagcaaataccgaacccccagtgctcctggccttgtaggaaatcctcagggagtctccaagaggagcttctgtttctaagagggaatcacaag

SEQ ID NO: 48634 - DNA, 110 bp, synthetic construct
  source 1..110: mol_type = other DNA
ggttttttttaagaaaatgagaaagagaaaagcagcccctgacagctgggagctggcctggctctcacagctgagccttggcgttcctggctgaacatagaccatttcat

SEQ ID NO: 48635 - DNA, 110 bp, synthetic construct
  source 1..110: mol_type = other DNA
gcctggctctcacagctgagccttggcgttcctggctgaacatagaccatttcatggaacatgaacatcagacaaggtcaccctgggactgtgatagatcaagacagaca

SEQ ID NO: 48636 - DNA, 110 bp, synthetic construct
  source 1..110: mol_type = other DNA
cctgggacagtcagggacagcctcagaaatccatgagctgctatctgcggactcatggaagggtggagccaccagctaagggatcttccctttttcctcaaacaggaaac

SEQ ID NO: 48637 - DNA, 110 bp, synthetic construct
  source 1..110: mol_type = other DNA
tggaagggtggagccaccagctaagggatcttccctttttcctcaaacaggaaacagcaatagttttgtctccctgtccatttttcatgttttctgcacacctgtaacct

SEQ ID NO: 48638 - DNA, 110 bp, synthetic construct
  source 1..110: mol_type = other DNA
cccacatccacttagcatacagtgtggtgaagagaccgttgtgggttcaaatctcgtgtctgtcatcttcccagctgaatgactttgtgtttatgtcctccattccccag

SEQ ID NO: 48639 - DNA, 110 bp, synthetic construct
  source 1..110: mol_type = other DNA
gtgtctgtcatcttcccagctgaatgactttgtgtttatgtcctccattccccagtctccttagttgttaaatggggacaatgaaaactattcatctgaaacatcatgag

SEQ ID NO: 48640 - DNA, 110 bp, synthetic construct
  source 1..110: mol_type = other DNA
aataatggatgtatgtgctctggaaaaaaagcccaagggctctattggttgtggaaggagcttgggtttgtgattccactgcttggattcttctaccacctattgcttaa

SEQ ID NO: 48641 - DNA, 110 bp, synthetic construct
  source 1..110: mol_type = other DNA
aggagcttgggtttgtgattccactgcttggattcttctaccacctattgcttaaaacctcagagcctcatttgtttcatctgtaaagtggggtaatattagtggcctcg

SEQ ID NO: 48642 - DNA, 110 bp, synthetic construct
  source 1..110: mol_type = other DNA
tcccttctagccctggattttgaacctggcaggtagccagctggtgcgtgtttgatggctgcaaactatggtcatcagtctggttctagctcttgctgtgtagcctcaga

SEQ ID NO: 48643 - DNA, 110 bp, synthetic construct
  source 1..110: mol_type = other DNA
tggctgcaaactatggtcatcagtctggttctagctcttgctgtgtagcctcagacaagtgcctatctttctctgggcctcagtttcccagcgggcaaaggaggagatca

SEQ ID NO: 48644 - DNA, 110 bp, synthetic construct
  source 1..110: mol_type = other DNA
ccagggtctgcatcttgtacctctttatcccagatcctgacacagggcctggagacatcagggagaaatcagcagacatgtgaccaaatgctttctgacagctcggtgct

SEQ ID NO: 48645 - DNA, 110 bp, synthetic construct
  source 1..110: mol_type = other DNA
catcagggagaaatcagcagacatgtgaccaaatgctttctgacagctcggtgctcaaaccccagctccacctcataccccttttgtgaacttgcctaactgagtagggc

SEQ ID NO: 48646 - DNA, 110 bp, synthetic construct
  source 1..110: mol_type = other DNA
gcaggagttggggttttactcgtctgtgcgctacctagacagtttaagtcgatgattggcggttttgtgagccagggaaggcgctggcagcccacaagctgacgtctggc

SEQ ID NO: 48647 - DNA, 110 bp, synthetic construct
  source 1..110: mol_type = other DNA
ttggcggttttgtgagccagggaaggcgctggcagcccacaagctgacgtctggcttctgcgaagggatgctgtgtccccaagctccagggaacccagcatccccgccat

SEQ ID NO: 48648 - DNA, 110 bp, synthetic construct
  source 1..110: mol_type = other DNA
cttctaatctagagcctgggaggcaggggacacagtttcataccttgtttctctttctttagcatctaaaaacattaaaagcagaatatatatgttgttcagctattcgg

SEQ ID NO: 48649 - DNA, 110 bp, synthetic construct
  source 1..110: mol_type = other DNA
tctttagcatctaaaaacattaaaagcagaatatatatgttgttcagctattcggcaattttttgtttgtttgtttgttagggccacgccatgtggaggttcccaggcta

SEQ ID NO: 48650 - DNA, 110 bp, synthetic construct
  source 1..110: mol_type = other DNA
tggacactgagtcccagagaaggggaggaatttgccctaagccatggaataagttaaagctggatcagaaacttgaaccccaggttcctgacttttcaccctggactctg

SEQ ID NO: 48651 - DNA, 110 bp, synthetic construct
  source 1..110: mol_type = other DNA
aaagctggatcagaaacttgaaccccaggttcctgacttttcaccctggactctgtctgtacaccacggcatctccccaggaagacctggccataaactccagcaaagac

SEQ ID NO: 48652 - DNA, 110 bp, synthetic construct
  source 1..110: mol_type = other DNA
actggggatcccggctgctgggagaggcagctgcctgcctagctgtcaccttgtgtgggtgcagcaccaaattcatctcagatttggttgggagaacaagggaagtgaaa

SEQ ID NO: 48653 - DNA, 110 bp, synthetic construct
  source 1..110: mol_type = other DNA
tgggtgcagcaccaaattcatctcagatttggttgggagaacaagggaagtgaaaccgtgagaatggcctttctgcagccagcccggcctggaggagagagcacatgtta

SEQ ID NO: 48654 - DNA, 110 bp, synthetic construct
  source 1..110: mol_type = other DNA
aggtggacaaggccccagggccagggcccccctgggacatgtcctcagagctttctgtatgggcagaagtcactggcacagcgcagggccaactgccctctatcatatca

SEQ ID NO: 48655 - DNA, 110 bp, synthetic construct
  source 1..110: mol_type = other DNA
tgtatgggcagaagtcactggcacagcgcagggccaactgccctctatcatatcattcctgattctcttgccactgcctatagccgactggggagagcgcaggggagagg

SEQ ID NO: 48656 - DNA, 110 bp, synthetic construct
  source 1..110: mol_type = other DNA
accaatctgtgtgctatccatgccaaatgtgtaacaattataccaaaagacattcagctagcatgttgcatacatggagaacatgcttaagaatccattatgggaattcc

SEQ ID NO: 48657 - DNA, 110 bp, synthetic construct
  source 1..110: mol_type = other DNA
agctagcatgttgcatacatggagaacatgcttaagaatccattatgggaattcccatcatgactcagcaaatccaactaggatccatgaggatgcaggttcagtccctg

SEQ ID NO: 48658 - DNA, 110 bp, synthetic construct
  source 1..110: mol_type = other DNA
atttctctcctctcccattctcgtcttttctatcacaccaggtcactcttctctcaatctgtttgtcccttgtgccagcttgcttttataaatcttccttgctggtctca

SEQ ID NO: 48659 - DNA, 110 bp, synthetic construct
  source 1..110: mol_type = other DNA
ggactatgagagtacctggccttaaaagtcaagaaaccagatgtggaaaccccataaggaccttggaggcagccctcatagtattatcagtggcagtcctgaccagaact

SEQ ID NO: 48660 - DNA, 110 bp, synthetic construct
  source 1..110: mol_type = other DNA
gcttatgtcttagccattggttaatcagctgtgataacagggtttgtttcatttaaaacaggttatatgagtgatagcccttgagcaggagagaacagtttggatcactt

SEQ ID NO: 48661 - DNA, 110 bp, synthetic construct
  source 1..110: mol_type = other DNA
cgggcttaggcgttttccttcaaaaagagtgaggaaaggaaggagccgagctcaatcttttgttggctgaattttgtatttcggacacttaggggaagcaaattgcaaga

SEQ ID NO: 48662 - DNA, 110 bp, synthetic construct
  source 1..110: mol_type = other DNA
ggattcgggcagttcagcagcagggccttctctgggctgaggggatatcttcaatagagacagatttgtctctagagaggaggaagcgaggacgtctgggttcctggaga

SEQ ID NO: 48663 - DNA, 110 bp, synthetic construct
  source 1..110: mol_type = other DNA
ctgtctaaaccaggaatctaggagcctaacttctgctccacctccttctatccataaccacctggccaccagctctggttgtctatctccttaatattttttcagtccac

SEQ ID NO: 48664 - DNA, 110 bp, synthetic construct
  source 1..110: mol_type = other DNA
cagccagaaagtggaagcaacccaagtgttcattgatggatgagcaagatgtcgtatatacatataatacgttattcagctttttaaggggagacagacaagagcaccta

SEQ ID NO: 48665 - DNA, 110 bp, synthetic construct
  source 1..110: mol_type = other DNA
cctgctgagccacaacaggaactcctgataaaggctatttttaaaaacccacttagaggcctcattccagctggctggtgggaaacccagcttccattatcgttaggctg

SEQ ID NO: 48666 - DNA, 110 bp, synthetic construct
  source 1..110: mol_type = other DNA
gaggtagagacctcatcctctgctgagtctggtacccgattggtgcccaataagaggatgtggaataaatgaacagatgcctgtgtttgtttcccttttgttcttcctgg

SEQ ID NO: 48667 - DNA, 110 bp, synthetic construct
  source 1..110: mol_type = other DNA
tttgttccctgcttctctcctggcttctggtggttggacaacaatctttggtggttttttgttttgttttttgtcttttgtcttttgggggctgcacctggggtatatgg

SEQ ID NO: 48668 - DNA, 110 bp, synthetic construct
  source 1..110: mol_type = other DNA
tttgtttttaacaaagtcacttttttcctcctgatcttgcttttcacagctggcagaggtgataaagacatgctcctctctgtgctccaccatctacaatggaatcccca

SEQ ID NO: 48669 - DNA, 110 bp, synthetic construct
  source 1..110: mol_type = other DNA
ctgagagtgctggttgccacctatgtgactttcagccccaatggcacagagctgctggtcaacatgggaggagagcaggtatggacagctgcccaaaggggctctgcctc

SEQ ID NO: 48670 - DNA, 110 bp, synthetic construct
  source 1..110: mol_type = other DNA
cacaaagcagctttggagcttgccttcttggagcttccagaccaacagatactctgagagtttcgtctctggggcttccctgggtgcaggctgcgctgcctatctccagc

SEQ ID NO: 48671 - DNA, 110 bp, synthetic construct
  source 1..110: mol_type = other DNA
acgctcctggagcggccgtgcgagtgggtggacggccttctgcccctcagaaccaacctggcccccaggacttagctgccctacaagccctacaaaacccctctctctgg

SEQ ID NO: 48672 - DNA, 110 bp, synthetic construct
  source 1..110: mol_type = other DNA
acccacagtggtatttatggaaaagtgtctaatcccagttttctaccttaccctgggatggagaaaatggagctaggctggtacttttctttcctggttcttgcaagcag

SEQ ID NO: 48673 - DNA, 110 bp, synthetic construct
  source 1..110: mol_type = other DNA
caggggatttgggggagtggaatgggcagaagaaaagcttagccttccagtttcaacttatgaggaagtgaaggtgctgaaggaaaatgctgcccaggtgtgctaagcgt

SEQ ID NO: 48674 - DNA, 110 bp, synthetic construct
  source 1..110: mol_type = other DNA
tgttacgggcttcctatcagttcctcaaagctgaactgcttgcagccactgccattccctccatccagaatgctcttcccgctccccatccagccgacaccccttcttct

SEQ ID NO: 48675 - DNA, 110 bp, synthetic construct
  source 1..110: mol_type = other DNA
ccaacacgactaactctcacacaaggccaagctctggtgtgcagaggcacacaagcaagcaggcacacacacgcaaagactgcctctcaggcttacagactcgtgcacac

SEQ ID NO: 48676 - DNA, 110 bp, synthetic construct
  source 1..110: mol_type = other DNA
tgtattagtatattagtcaaatgggtttaactgaagaatctcaatgtttgcgttttgttggggtttgactagcagctttatgctttcagccttgatcctagtttgtttta

SEQ ID NO: 48677 - DNA, 110 bp, synthetic construct
  source 1..110: mol_type = other DNA
agtagaaatgttatgctggccacttcctctgtgaatgtcctagaacaagaactcgctagctgctatactgatgtttcttgggcaggttttgttttggtttggttttgcta

SEQ ID NO: 48678 - DNA, 110 bp, synthetic construct
  source 1..110: mol_type = other DNA
tcatttaagggcaccctaataggagaatcaacaaatcctttgtgtgttcctggatggacttgccaaactgagttcatatgacggaaaataatgttgagaaatttcaatag

SEQ ID NO: 48679 - DNA, 110 bp, synthetic construct
  source 1..110: mol_type = other DNA
ggacttgccaaactgagttcatatgacggaaaataatgttgagaaatttcaataggaaccaagaaatatagttttagggacaaaataatggtgcataaaatttcttgttt

SEQ ID NO: 48680 - DNA, 110 bp, synthetic construct
  source 1..110: mol_type = other DNA
gcgtctactagtatcttccccagagagcaacaagcacttcagaatcaaagctttagaggtaacatgaaaaaaataaaagtcactgaattgctacataaagtggcaaatga

SEQ ID NO: 48681 - DNA, 110 bp, synthetic construct
  source 1..110: mol_type = other DNA
gaggtaacatgaaaaaaataaaagtcactgaattgctacataaagtggcaaatgaaaacataatgaggtaataatgccaactgattaccaatgtcagagtttattaacag

SEQ ID NO: 48682 - DNA, 110 bp, synthetic construct
  source 1..110: mol_type = other DNA
tgcagcagagacttaagggtattggccaaaatcatagggaatttttatccctttctccaagggtactctgcttagaagaacacttaaaagagactgagataaattagata

SEQ ID NO: 48683 - DNA, 110 bp, synthetic construct
  source 1..110: mol_type = other DNA
tccaagggtactctgcttagaagaacacttaaaagagactgagataaattagatataaggaacaactactgctgcagccctagctctcagaagaacttgggacaaataaa

SEQ ID NO: 48684 - DNA, 110 bp, synthetic construct
  source 1..110: mol_type = other DNA
tttgcacttattcatcttagagatgattaacttaatggatcttaaatgctgatattacctcaggaggcccaaaatattgcctcctagtgacttcaacccactaaatctat

SEQ ID NO: 48685 - DNA, 110 bp, synthetic construct
  source 1..110: mol_type = other DNA
atttgctttttttttttttgctccttcaaaaaccatgcaagctgagccaccactaactccaccagggggagcccgtgagtaaccaatgtgatatacccagaaaagttact

SEQ ID NO: 48686 - DNA, 110 bp, synthetic construct
  source 1..110: mol_type = other DNA
tcgaccctccatctctccattggttcctgtctgtccccagacttgcgtctccaactacccataagttcctgagcctcgcccacatccctccaagaaattgtcttttgctg

SEQ ID NO: 48687 - DNA, 110 bp, synthetic construct
  source 1..110: mol_type = other DNA
aagttttaacaaggcaaagttaaggtctatttcaaaacagaaacattttgcttaggaatgacaactgttctactgaaggcctcagcttcttcatgaccagaagacaaaac

SEQ ID NO: 48688 - DNA, 110 bp, synthetic construct
  source 1..110: mol_type = other DNA
gcatctcatgcacctcagcaacctgagccacagtagtgacagtgctgggtcctgaacctgctgagccacaggggaactccctaggctggtgattaaatcagcctccacct

SEQ ID NO: 48689 - DNA, 110 bp, synthetic construct
  source 1..110: mol_type = other DNA
tgtggccgaaaaagaaaaaataaaataaaataaataatctctctgaagatctcttttggcacagcagattaaggatctggccttgtcactacagcgaccgtgggttgctg

SEQ ID NO: 48690 - DNA, 110 bp, synthetic construct; identical to SEQ ID NO: 48689
  source 1..110: mol_type = other DNA

SEQ ID NO: 48691 - DNA, 110 bp, synthetic construct
  source 1..110: mol_type = other DNA
gtgagtagttaaccatttacatgcttgatcaaaggatgtagtataccattatcttttctctgatctgtcagtaaatctcatttttagggaatgactttcttaataccaat

SEQ ID NO: 48692 - DNA, 110 bp, synthetic construct
  source 1..110: mol_type = other DNA
aactcctcatttggtgtgtcttccaatgagccccaacagaggcctatttcctcgtccttggcatcacctccagcatgagtccagggctcgtcatgaagattgaggccagc

SEQ ID NO: 48693 - DNA, 110 bp, synthetic construct
  source 1..110: mol_type = other DNA
ggccagggcttgaacccacatcctcttgggtactagtcggctacgttactgataagccacaacaggaacttggtaagagctttttattacttaaaagtggagcggcagtg

SEQ ID NO: 48694 - DNA, 110 bp, synthetic construct
  source 1..110: mol_type = other DNA
ttttggtgtcctatctaggaaaccattgcctaatccaaggttatggttatttacacttacattttcttctaagatttgtatagttttagctcttacagtcatatatttga

SEQ ID NO: 48695 - DNA, 110 bp, synthetic construct
  source 1..110: mol_type = other DNA
aaattccccaagttctagatttttaatagaatggatattcaactttgtaccagataactcggttgctagttaatagtcaactttcaggatattctaatgctagccaaatt

SEQ ID NO: 48696 - DNA, 110 bp, synthetic construct
  source 1..110: mol_type = other DNA
atcctgtgctatggtccttaatttattcaaagagtctactatacttctatgatagatgtcagtctctcttgttaatgtcttacaatttgattcaattaaaagctgttatc

SEQ ID NO: 48697 - DNA, 110 bp, synthetic construct; identical to SEQ ID NO: 48696
  source 1..110: mol_type = other DNA

SEQ ID NO: 48698 - DNA, 110 bp, synthetic construct
  source 1..110: mol_type = other DNA
caaaagacaacagcttcatctcccaagagccccctctgctactctagctcttagttgagaaggacaaagggagtcagaccatggaagcctgtgcagtggggaccacagac

SEQ ID NO: 48699 - DNA, 110 bp, synthetic construct
  source 1..110: mol_type = other DNA
gtgaggggacaatggaagcaacagccacaaagggctatgatgaggatggagcctgcattagggtttttctggcctttagctggttctcacacctataaaatgtcaggccg

SEQ ID NO: 48700 - DNA, 110 bp, synthetic construct
  source 1..110: mol_type = other DNA
acccactgcgccaccgtgggaactcccctgcatacacttttgcccttcacttactaactcaactcactgagaccacagagctgttttaaaaatatagttgactcctgaaa

SEQ ID NO: 48701 - DNA, 110 bp, synthetic construct
  source 1..110: mol_type = other DNA
tctgtcattgttgagtacactgttctacatacatctagctaatatttattgcgaacttactacacgtcacgcactcttctgaatgcttttcatacattaatgcatatgct

SEQ ID NO: 48702 - DNA, 110 bp, synthetic construct
  source 1..110: mol_type = other DNA
agctgggccgagaacagcatgagaaatgtggcaggccggcccagagtgaggtcctgcagggcaggagcggggaatgagtgttaagtgtgtgattgtgagagtcaggaggt

SEQ ID NO: 48703 - DNA, 110 bp, synthetic construct
  source 1..110: mol_type = other DNA
cattcaggtgagtgtacctacatggttaagcttagcagaaactgccaaaccaactcccagagctggaagttgttctttcttttaggccagtaattttggggattgtttgt

SEQ ID NO: 48704 - DNA, 110 bp, synthetic construct
  source 1..110: mol_type = other DNA
tccatctgctgatggccagcaggtctgttttggctgttgtgagcagtgctgcgacgtgagtgctgagagctcttccataccctgcttccgatctttctgtggcaccgctt

SEQ ID NO: 48705 - DNA, 110 bp, synthetic construct
  source 1..110: mol_type = other DNA
ttgttgcccccttcccccttccaccccaggcttcctggacttttgtgatccctgttcccttcatgctttcattctcaccccaatggccctttttctgccaagcagccata

SEQ ID NO: 48706 - DNA, 110 bp, synthetic construct
  source 1..110: mol_type = other DNA
tcccttcatgctttcattctcaccccaatggccctttttctgccaagcagccatagtgatcttctcaaagcaaatcagctcacctaactctcccgctcaaaactctgaag

SEQ ID NO: 48707 - DNA, 110 bp, synthetic construct
  source 1..110: mol_type = other DNA
tgctacagagcaggtacaatgagctctgtaccatggtccctccttgtcatgcaactggaaacttatgttagcaggacttctgtgcccaatcctgtgagggatcctagtag

SEQ ID NO: 48708 - DNA, 110 bp, synthetic construct
  source 1..110: mol_type = other DNA
ggtcccctggcccattgctcactgctccatcccagtcttactggggattcagtacaggtcctccacctccctggttctgctgctagctccttctagccctgatcctggag

SEQ ID NO: 48709 - DNA, 110 bp, synthetic construct
  source 1..110: mol_type = other DNA
aggaagcctttggaggcagttgaacaggaaagtgtgggctgtgcagtcaggccatctcccagaccctcctttatttctagagagagctgaggctgttgtgactctttggc

SEQ ID NO: 48710 - DNA, 110 bp, synthetic construct
  source 1..110: mol_type = other DNA
ggcagaactgattgcgtgtacagctcacatcaccctgaagagcccaccccagttaatcaatacacctgcaacactgtgtctgctgcctcaaatcaataatgtttacaaag

SEQ ID NO: 48711 - DNA, 110 bp, synthetic construct
  source 1..110: mol_type = other DNA
cggctgcctccccgtggcaagctcgttccattgcctccactgtctgatcagtttttagtgccaccatttctgtaccaaaggagatcatgaaatgtggaaagaaaacgtaa

SEQ ID NO: 48712 - DNA, 110 bp, synthetic construct
  source 1..110: mol_type = other DNA
gtagatttgtagaaaagtttcatagctgccaagggttaggaatagtaggaagcggggaagagagtaggtgtgactcctgcatggtagcaggagagagatatcgggagtga

SEQ ID NO: 48713 - DNA, 110 bp, synthetic construct
  source 1..110: mol_type = other DNA
caggagctgagaagtctttccctgaaaaataaaatgcatctgaaccctcctcctcctgctttctctctctggagtgggaagaggaagcctgccccggagcttcattttcc

SEQ ID NO: 48714 - DNA, 110 bp, synthetic construct
  source 1..110: mol_type = other DNA
ctgctttctctctctggagtgggaagaggaagcctgccccggagcttcattttccatccatctgtaaactgagcagcggctgttggcaccagcaccaccctcgtctctgt

SEQ ID NO: 48715 - DNA, 110 bp, synthetic construct
  source 1..110: mol_type = other DNA
aggatggagtccggggggatgctcagcttttgatgaagcaggagcatgattttaggggggcttggggagttgacaagaaggtggatatcaaggtcaggataaccaggtgc

SEQ ID NO: 48716 - DNA, 110 bp, synthetic construct
  source 1..110: mol_type = other DNA
gggggcttggggagttgacaagaaggtggatatcaaggtcaggataaccaggtgccagctagggtgcccttgtccctggggaaccaagcctaactggcttgagccctgga

SEQ ID NO: 48717 - DNA, 110 bp, synthetic construct
  source 1..110: mol_type = other DNA
aggtctgccctaggcttctttcagattattcttctgccttgggtcctggagtgtgtgagattttgtgtggcatctctgtttcccatagcctctggtgctccagaaagtaa

SEQ ID NO: 48718 - DNA, 110 bp, synthetic construct
  source 1..110: mol_type = other DNA
tgagattttgtgtggcatctctgtttcccatagcctctggtgctccagaaagtaagccttgttgaccttaaagccaaatactctgggggcttgaccccagaatccccagg

SEQ ID NO: 48719 - DNA, 110 bp, synthetic construct
  source 1..110: mol_type = other DNA
tgtgtgactttgaatcatatccattctctgggctgaaactataaatcctatgattctaaggatggcaatatctatgagctccacagcatgactcttaaagggaagatggc

SEQ ID NO: 48720 - DNA, 110 bp, synthetic construct
  source 1..110: mol_type = other DNA
ctaaggatggcaatatctatgagctccacagcatgactcttaaagggaagatggccaaatagatcatgaggctgacaacctcctaagatattattgccttctaagcattt

SEQ ID NO: 48721 - DNA, 110 bp, synthetic construct
  source 1..110: mol_type = other DNA
actcagaggggaaggagctgcttaagggcacaatctaagccaggattatgacatggatcttggtggagttcctacaaatctatgggtcaggcccatacatcgcctgttta

SEQ ID NO: 48722 - DNA, 110 bp, synthetic construct
  source 1..110: mol_type = other DNA
gatcttggtggagttcctacaaatctatgggtcaggcccatacatcgcctgtttaaagggcctgtgaccacacgtggtgctgtgtacaccttgagagaccctgaagctgc

SEQ ID NO: 48723 - DNA, 110 bp, synthetic construct
  source 1..110: mol_type = other DNA
caacataattattctagtcccattaagtttaatttgcagcaaattatgcacttagcttgaagttggtgttcctctgctggttagagctgagatagggtttggtggttaag

SEQ ID NO: 48724 - DNA, 110 bp, synthetic construct
  source 1..110: mol_type = other DNA
cttgaagttggtgttcctctgctggttagagctgagatagggtttggtggttaagagttaactgagccagtgaaaacagcacagctgggcagacagcatcaggtctttcc

SEQ ID NO: 48725 - DNA, 110 bp, synthetic construct
  source 1..110: mol_type = other DNA
ctctgttttcccatttcctcctccgtaatgtgatgaccgccctgccgagcacagagccatgtttgataagcggccaggctattattctgttatttagagctggggggagg

SEQ ID NO: 48726 - DNA, 110 bp, synthetic construct
  source 1..110: mol_type = other DNA
gccatgtttgataagcggccaggctattattctgttatttagagctggggggaggcttcctcccatttctagtgttcttggggaggactgtcctgcagataggcaggcct

SEQ ID NO: 48727 - DNA, 110 bp, synthetic construct
  source 1..110: mol_type = other DNA
attaccaagaggatcacgtgaccccttcccaggtgaactcggggaatgtgtttatccatgaacttttttttgggggggtgagaggggctgatccctctaaggaccagtga

SEQ ID NO: 48728 - DNA, 110 bp, synthetic construct
  source 1..110: mol_type = other DNA
ccatgaacttttttttgggggggtgagaggggctgatccctctaaggaccagtgagctgatcctcataatgtgtcggcacagagtctaaactggttcatggacttcgtgt

SEQ ID NO: 48729 - DNA, 110 bp, synthetic construct
  source 1..110: mol_type = other DNA
ttccccttctttccatccttgggaatgtcagtttccaatgactcagcagatgtcaccagtgagtgccaggccacgtacagggctctgggtacagagaggaagctcagtca

SEQ ID NO: 48730 - DNA, 110 bp, synthetic construct
  source 1..110: mol_type = other DNA
ccagtgagtgccaggccacgtacagggctctgggtacagagaggaagctcagtcacgttctgtgcttgaggaggtcacggtcagatgggggaggccgacctgccagcaac

SEQ ID NO: 48731 - DNA, 110 bp, synthetic construct
  source 1..110: mol_type = other DNA
agcccccaacagagtcccttgggggctaagggaacgagtaactgcacaggcaagtgggcaaccatctttaacccgagcctctgtcagcaagtttggaccactccccaaag

SEQ ID NO: 48732 - DNA, 110 bp, synthetic construct
  source 1..110: mol_type = other DNA
gggcaaccatctttaacccgagcctctgtcagcaagtttggaccactccccaaagtcgagctctgatctcagggtatatatgggaccgaggcttcacagctactctcaga

SEQ ID NO: 48733 - DNA, 110 bp, synthetic construct
  source 1..110: mol_type = other DNA
gaggcctctgggaaaggatatgcttcctggtcagggcctgcaacagaccctccactttgctctgaaatttcacgatggactcacaggcgcacgggtcttcctctggggtg

SEQ ID NO: 48734 - DNA, 110 bp, synthetic construct
  source 1..110: mol_type = other DNA
tttgctctgaaatttcacgatggactcacaggcgcacgggtcttcctctggggtgggtggaaggtggaaaagagaaagtacatggtgagtggttacctgctggggaggct

SEQ ID NO: 48735 - DNA, 110 bp, synthetic construct
  source 1..110: mol_type = other DNA
tggtttagggttaggcttgtgacccagcctggccccatcagacatgctcctgggatgtctctctttctgctggggttgctgaaagggtgggatagccacttagggatttg

SEQ ID NO: 48736 - DNA, 110 bp, synthetic construct
  source 1..110: mol_type = other DNA
tgtctctctttctgctggggttgctgaaagggtgggatagccacttagggatttgggcagctattttgccaccatgaggaaagggctgcctgaaaatggagccaacactg

SEQ ID NO: 48737 - DNA, 110 bp, synthetic construct
  source 1..110: mol_type = other DNA
ggagatgggaagaaccaaattcaggagggggtataaagaagatggtaccacaggtgcagtgacagagtgaatgtcaccaccatgcctgggaacctgggaaggctttcctg

SEQ ID NO: 48738 - DNA, 110 bp, synthetic construct
  source 1..110: mol_type = other DNA
gcagtgacagagtgaatgtcaccaccatgcctgggaacctgggaaggctttcctggcatctagacaagaccatagcaacccctcccatacagcattgatgtcccatgtat

SEQ ID NO: 48739 - DNA, 110 bp, synthetic construct; identical to SEQ ID NO: 48737
  source 1..110: mol_type = other DNA

SEQ ID NO: 48740 - DNA, 110 bp, synthetic construct; identical to SEQ ID NO: 48738
  source 1..110: mol_type = other DNA

SEQ ID NO: 48741 - DNA, 110 bp, synthetic construct
  source 1..110: mol_type = other DNA
gcttggactgccataaccacataccaaagattgggttaaccggcttaaacaagagacattaattttctcatggttccagaggtgggaagttcaaggtcaagctgccaaca

SEQ ID NO: 48742 - DNA, 110 bp, synthetic construct
  source 1..110: mol_type = other DNA
acattaattttctcatggttccagaggtgggaagttcaaggtcaagctgccaacatggttggtttctagtgagggctctcttcctggtttgcagacggctgccttctcac

SEQ ID NO: 48743 - DNA, 110 bp, synthetic construct
  source 1..110: mol_type = other DNA
agaagaaaaaactttttctttttttttttttcccagtctttttagggccacacccaccgcatatggaggctcccaagctagcagtcaaatcaaaacaacagctgctggcc

SEQ ID NO: 48744 - DNA, 110 bp, synthetic construct
  source 1..110: mol_type = other DNA
ggccacacccaccgcatatggaggctcccaagctagcagtcaaatcaaaacaacagctgctggcctgcaccacagtcacagcaatgctagatccaagctgcttctgtgac

SEQ ID NO: 48745 - DNA, 110 bp, synthetic construct
  source 1..110: mol_type = other DNA
gggcagaaggcaggcttagaggtcagacttggcttcagttggtcccacaggagtaggggctgccttttaagtctggccccttctgccctgggatacagctgttaagccct

SEQ ID NO: 48746 - DNA, 110 bp, synthetic construct
  source 1..110: mol_type = other DNA
ggggctgccttttaagtctggccccttctgccctgggatacagctgttaagccctaaagtctcttggaaggagcaatcctgtcctaacttagcctttctctaaggctcaa

SEQ ID NO: 48747 - DNA, 110 bp, synthetic construct
  source 1..110: mol_type = other DNA
gacccttatctgactgtgcttctgcccactctgataatgttgttttgttctactctactcatactctagctactctggcctcattatcgccctgaacattctaaacttgc

SEQ ID NO: 48748 - DNA, 110 bp, synthetic construct
  source 1..110: mol_type = other DNA
tactcatactctagctactctggcctcattatcgccctgaacattctaaacttgctttcttctcaggacttgtacacatgctgttgtttctaactgccccactttcttac

SEQ ID NO: 48749 - DNA, 110 bp, synthetic construct
  source 1..110: mol_type = other DNA
aagtctccacctcagcatctagaaaattaaatactcaattagctgctcttccctttctcagtttttgtatttctctcacattaggtagctgctctcctgtttctgagaaa

SEQ ID NO: 48750 - DNA, 110 bp, synthetic construct
  source 1..110: mol_type = other DNA
tctcagtttttgtatttctctcacattaggtagctgctctcctgtttctgagaaagtagatgggctagctgctatagcaccagatagatgtgtgcttttcctagagagca

SEQ ID NO: 48751 - DNA, 110 bp, synthetic construct
  source 1..110: mol_type = other DNA
ggggtccctccgcctcctgacccatctgccgctgcccctcctgcccaggcctcttcttcttcaccctcctcttctatgcgttgtccattacggccgtggcgctgctgttt

SEQ ID NO: 48752 - DNA, 110 bp, synthetic construct
  source 1..110: mol_type = other DNA
cttcttcaccctcctcttctatgcgttgtccattacggccgtggcgctgctgtttgtctactacacccagcccgacgcctgctatgagagcaaggtcttcattggcctca

SEQ ID NO: 48753 - DNA, 110 bp, synthetic construct
  source 1..110: mol_type = other DNA
gtggccaaaccagacatgcactcaggtttccagttggtgacctctgaactccatagcctggacctccccacctctggcacttaacccctcaccaaggagctccagctcct

SEQ ID NO: 48754 - DNA, 110 bp, synthetic construct
  source 1..110: mol_type = other DNA
gcctggacctccccacctctggcacttaacccctcaccaaggagctccagctcctgggtggtcctgtcctctcactgcagaaccatgtgggcctctgccctggtcactct

SEQ ID NO: 48755 - DNA, 110 bp, synthetic construct
  source 1..110: mol_type = other DNA
tagagagatcactttacatggaggcttggcgtttcaagacgaagccttcgaagagaacaaagccccatgttcaagagcttattttcctgcatctctctagctaaagcctc

SEQ ID NO: 48756 - DNA, 110 bp, synthetic construct
  source 1..110: mol_type = other DNA
aacaaagccccatgttcaagagcttattttcctgcatctctctagctaaagcctcacaggccaagataaatcacaagtcagggctcagagtcaatgtgagaggttgctgt

SEQ ID NO: 48757 - DNA, 110 bp, synthetic construct
  source 1..110: mol_type = other DNA
tggttgcatctttatatcttattgcagaaaatctttcttctagtcttgttctcatggatagttgctctgggaatagctgtcgcggtggtgtgcccatgggaggaggtgag

SEQ ID NO: 48758 - DNA, 110 bp, synthetic construct
  source 1..110: mol_type = other DNA
ggatagttgctctgggaatagctgtcgcggtggtgtgcccatgggaggaggtgagctcaggctccttctactccaccatcttggccataccttgagtttctcttttccta

SEQ ID NO: 48759 - DNA, 110 bp, synthetic construct; identical to SEQ ID NO: 48757
  source 1..110: mol_type = other DNA

SEQ ID NO: 48760 - DNA, 110 bp, synthetic construct; identical to SEQ ID NO: 48758
  source 1..110: mol_type = other DNA

SEQ ID NO: 48761 - DNA, 110 bp, synthetic construct
  source 1..110: mol_type = other DNA
gtgtgtactccttgtccagtcacctctcctgctgcagtccactgagctggtgggtaactgcggcttagagcagtttctgttatacaacagtgagctccccgggggcagac

SEQ ID NO: 48762 - DNA, 110 bp, synthetic construct
  source 1..110: mol_type = other DNA
aactgcggcttagagcagtttctgttatacaacagtgagctccccgggggcagacactgggcctcattcatcacgggaccccagggtccagcacactgcctggcacctgc

SEQ ID NO: 48763 - DNA, 110 bp, synthetic construct
  source 1..110: mol_type = other DNA
actagctcaagccagacacttggtaatgtccttttcctgtcccccccagtccccagaactatttttcccacttgttctactgtagaagctacctacgcactgtctaccag

SEQ ID NO: 48764 - DNA, 110 bp, synthetic construct
  source 1..110: mol_type = other DNA
gaactatttttcccacttgttctactgtagaagctacctacgcactgtctaccagctatagggcctcacgattctcaacctccatgtcccagctggtcttctgaggaagg

SEQ ID NO: 48765 - DNA, 110 bp, synthetic construct
  source 1..110: mol_type = other DNA
atattggggctcagggtgggaggaggagactgtgctgagactcctgggttcctgaccttggaccaccagcaaccacccatcttgcctacagctgctgtgtggtcccatct

SEQ ID NO: 48766 - DNA, 110 bp, synthetic construct
  source 1..110: mol_type = other DNA
ccttggaccaccagcaaccacccatcttgcctacagctgctgtgtggtcccatctgccctcccctcttaacatctctggaacccactgtccttgttcaggaccacagaca

SEQ ID NO: 48767 - DNA, 110 bp, synthetic construct
  source 1..110: mol_type = other DNA
ttgagatttgtactctgacctcagtcaggcatgtgaactcactttcctgagcctcagtttccccatctatgaaccaaagctagtagtaagtaccctgctcctgttgagaa

SEQ ID NO: 48768 - DNA, 110 bp, synthetic construct
  source 1..110: mol_type = other DNA
agtttccccatctatgaaccaaagctagtagtaagtaccctgctcctgttgagaaaaactacattaattaatacatagtgatgaatcatagaacagacagacctggatcc

SEQ ID NO: 48769 - DNA, 110 bp, synthetic construct
  source 1..110: mol_type = other DNA
agagggatcctaataaagatctgactagttcaaaatatagcggaagaattcatgtcatagataggtcttaaattcacagggcaggagttcccgtcatggcgcagtggtta

SEQ ID NO: 48770 - DNA, 110 bp, synthetic construct; identical to SEQ ID NO: 48769
  source 1..110: mol_type = other DNA

SEQ ID NO: 48771 - DNA, 110 bp, synthetic construct
  source 1..110: mol_type = other DNA
agatttagcatgaaggctagaaaatctgggcttgggaaccagagtagttgcagtaaaccgagacagtagtagtagaccacagaagtggtcctaaagctggggttagctgc

SEQ ID NO: 48772 - DNA, 110 bp, synthetic construct
  source 1..110: mol_type = other DNA
aaccgagacagtagtagtagaccacagaagtggtcctaaagctggggttagctgctcaggcactgttgctggaatgagtacattctagccatgtttggtttctttcttcc

SEQ ID NO: 48773 - DNA, 110 bp, synthetic construct
  source 1..110: mol_type = other DNA
gagaaggctattttcactatttcccaaaccccaaagaagacagcgcacacatgcagcccaggaacagccatgcaagtgatcacgtcataaacatagctcacttggaacca

SEQ ID NO: 48774 - DNA, 110 bp, synthetic construct
  source 1..110: mol_type = other DNA
gcccaggaacagccatgcaagtgatcacgtcataaacatagctcacttggaaccagatctttgaaaacattgagtggcagtggaagagatgataaaaggaggggttcttg

SEQ ID NO: 48775 - DNA, 110 bp, synthetic construct
  source 1..110: mol_type = other DNA
ccgcccagcacagcgggttaaggatccagtgttgcgacagctgtggctcagatttgattcctggcctgggagctccctatgctgccgggcagccaaaaaaaatttttttt

SEQ ID NO: 48776 - DNA, 110 bp, synthetic construct
  source 1..110: mol_type = other DNA
gattcctggcctgggagctccctatgctgccgggcagccaaaaaaaattttttttaaataaaatattctctgccttctctacccccagactgatgctgggctttaggact

SEQ ID NO: 48777 - DNA, 110 bp, synthetic construct
  source 1..110: mol_type = other DNA
gccactgaaattccaggcagtaggggaagaagatgaggaggatgaggaagaagagagcctggactctgtaaaggcgctgacgaccaagttgcagctgcagacacggcggc

SEQ ID NO: 48778 - DNA, 110 bp, synthetic construct
  source 1..110: mol_type = other DNA
agcctggactctgtaaaggcgctgacgaccaagttgcagctgcagacacggcggccttcatatctggagtggtcagcccgggtccagagccaggcctggcgcaaggccca

SEQ ID NO: 48779 - DNA, 110 bp, synthetic construct
  source 1..110: mol_type = other DNA
ggctggagaggggagtaactaggaggtggggtgcacacatgcctctaacagaggaggattaaaattcaggtctcctctagggctttgggtggtgtgtgtcatctctataa

SEQ ID NO: 48780 - DNA, 110 bp, synthetic construct
  source 1..110: mol_type = other DNA
ggattaaaattcaggtctcctctagggctttgggtggtgtgtgtcatctctataacacaggcccccaacttgggggatgggcagagagagcaggaggcgggagaggcagg

SEQ ID NO: 48781 - DNA, 110 bp, synthetic construct
  source 1..110: mol_type = other DNA
tttaatccagtccaaagggagaggtcttgtgctgtggggtaggatattcaaatctctggcccataaatggcctcagtggtgtgtccagagatgtgagctagacttgccct

SEQ ID NO: 48782 - DNA, 110 bp, synthetic construct
  source 1..110: mol_type = other DNA
ctggcccataaatggcctcagtggtgtgtccagagatgtgagctagacttgcccttgaggggaatggtactgacctgctctgtccctggcccacctcatgggcccagcgt

SEQ ID NO: 48783 - DNA, 110 bp, synthetic construct
  source 1..110: mol_type = other DNA
aatgtgaattccaaacagtgtggggtctgcatcccagcaaacctcttctctacatgcctggaagctattcttaggagctgttattaaagagagcatgaatcctggttcag

SEQ ID NO: 48784 - DNA, 110 bp, synthetic construct
  source 1..110: mol_type = other DNA
gcctggaagctattcttaggagctgttattaaagagagcatgaatcctggttcagaggtctgatccatcataatagttttttcgaactcctgagggtcatgaaatcaaat

SEQ ID NO: 48785 - DNA, 110 bp, synthetic construct
  source 1..110: mol_type = other DNA
tcatctccatcatttataggctttccactttctttagtctggcattcagaccctctctagtttgactagaccttccatttctcctctggttttcactgtccagtatggaa

SEQ ID NO: 48786 - DNA, 110 bp, synthetic construct
  source 1..110: mol_type = other DNA
gtgttgaagttaggagcagtgaggggaatacagccctgacctctccccactcccctttcctctccacctccaaatcaggggatgcagtctatgagttgactcctgaaggt

SEQ ID NO: 48787 - DNA, 110 bp, synthetic construct
  source 1..110: mol_type = other DNA
ggggatgagaagaacccaaggctcgaactctcctccttcccacagcaggccagtggctgattccaccaaatgaggacacgagcaggacttagtgcagaatccccacaatc

SEQ ID NO: 48788 - DNA, 110 bp, synthetic construct
  source 1..110: mol_type = other DNA
tgtgcctacggaacatatttttccatatgcttctacaacagagcctgccctctcaaccacgatgccgatgcagctctgacgcagtgattaagtcctcagaaaggactccc

SEQ ID NO: 48789 - DNA, 110 bp, synthetic construct
  source 1..110: mol_type = other DNA
accacgatgccgatgcagctctgacgcagtgattaagtcctcagaaaggactcccgtccacatggcagcctcgccatcctctactcccccactttctaccttctctctct

SEQ ID NO: 48790 - DNA, 110 bp, synthetic construct
  source 1..110: mol_type = other DNA
gcctgtccacatggcctgcttctcacagcaaaataactggctttgagagggaaatgtctcaagaaggagtgagctatccaagagactaggaagaaattgcaagattcctt

SEQ ID NO: 48791 - DNA, 110 bp, synthetic construct
  source 1..110: mol_type = other DNA
gtctcaagaaggagtgagctatccaagagactaggaagaaattgcaagattccttttggccttggagttcctgttgttgcttagcaggttaagaacctgacattgtgtcc

SEQ ID NO: 48792 - DNA, 110 bp, synthetic construct
  source 1..110: mol_type = other DNA
aacccaatatagtgttcatgaggatgtaggtttgatccgtggccttgttaagggggttaaggatccagcagtgctgcaggctatggcgtaggttgcagatgtggcttgaa

SEQ ID NO: 48793 - DNA, 110 bp, synthetic construct
  source 1..110: mol_type = other DNA
gttaaggatccagcagtgctgcaggctatggcgtaggttgcagatgtggcttgaatctggtgtagccatggctgtggcttaggacacaactgatcaacccctagcctggg

SEQ ID NO: 48794 - DNA, 110 bp, synthetic construct
  source 1..110: mol_type = other DNA
gccctctctgagcctctctctcctcctgagtaaacctgcagggcctgaggccagaatcctaatggggctgtaggcaggggcccgggtatcttccttggtcaaagctggct

SEQ ID NO: 48795 - DNA, 110 bp, synthetic construct
  source 1..110: mol_type = other DNA
atcctaatggggctgtaggcaggggcccgggtatcttccttggtcaaagctggctgaacctttagttttattaaaaatattccatgaggagttctcatcgtggcacagca

SEQ ID NO: 48796 - DNA, 110 bp, synthetic construct
  source 1..110: mol_type = other DNA
acacacattccttttcctcacatgatcatgctccatcataagtgactagctatcgtcccctcttcttccattttaaccaggctgactcattgagctgcagattcttaggc

SEQ ID NO: 48797 - DNA, 110 bp, synthetic construct; identical to SEQ ID NO: 48796
  source 1..110: mol_type = other DNA

SEQ ID NO: 48798 - DNA, 110 bp, synthetic construct
  source 1..110: mol_type = other DNA
tatattttaaaagtatctggacttaaatatcacaatattcttagcacaaaacattaagtggaaaataaaaacctcagggaagcgatgttctttctccagctgaacaattc

SEQ ID NO: 48799 - DNA, 110 bp, synthetic construct
  source 1..110: mol_type = other DNA
aagtggaaaataaaaacctcagggaagcgatgttctttctccagctgaacaattcctggtcattcagaagctagtggtacaggtttgcccacagtgtccagacacctgct

SEQ ID NO: 48800 - DNA, 110 bp, synthetic construct
  source 1..110: mol_type = other DNA
gtgtagcccatggagggcaagtccagggccccgacgttggcgtgggtgggtgtctctggctgtttgcagtggtgagctggacaagaggagagattgctgggcatggggag

SEQ ID NO: 48801 - DNA, 110 bp, synthetic construct
  source 1..110: mol_type = other DNA
ctggctgtttgcagtggtgagctggacaagaggagagattgctgggcatggggagatttgggtctccaggggcctctcctccactgccctgtctctcaaagaaacatccc

SEQ ID NO: 48802 - DNA, 110 bp, synthetic construct
  source 1..110: mol_type = other DNA
taaggaacgcaatttagaggcttctgaaattccctagggatcggaaaaaaacgctggcatggtcagaagcagaagcagccccgaaggctgtcagatcttgctggaggcaa

SEQ ID NO: 48803 - DNA, 110 bp, synthetic construct
  source 1..110: mol_type = other DNA
ggcatggtcagaagcagaagcagccccgaaggctgtcagatcttgctggaggcaaatctggtgatccttcctcttgaaggtgagctgtgggagcctctggcatggagctg

SEQ ID NO: 48804 - DNA, 110 bp, synthetic construct
  source 1..110: mol_type = other DNA
gagtctggacacttctttactgattggactctgcattctgatgactaatgtcatttgctagatcttaggcccagagtccactcctgagcagccaaggcaagtgtgagatg

SEQ ID NO: 48805 - DNA, 110 bp, synthetic construct
  source 1..110: mol_type = other DNA
tgctagatcttaggcccagagtccactcctgagcagccaaggcaagtgtgagatgagatggcagcagacgccttgccgtcggcctttcccccaacaagagattaagtgag

SEQ ID NO: 48806 - DNA, 110 bp, synthetic construct
  source 1..110: mol_type = other DNA
atctttgctgggcatcagcttcacacctcgagacttcaactcgatttgcttcttgactagaaagaatgggagagaaaaaatcagtttaagtcatttttctgggactggaa

SEQ ID NO: 48807 - DNA, 110 bp, synthetic construct
  source 1..110: mol_type = other DNA
actagaaagaatgggagagaaaaaatcagtttaagtcatttttctgggactggaagataggtccttccagaatgatccctctcctggcttgggatgttccaaggggggag

SEQ ID NO: 48808 - DNA, 110 bp, synthetic construct
  source 1..110: mol_type = other DNA
cttggcgacaatgtcatctgcagtgatacggaatgcaggacatgggcccagctaaggagtgacatccagctaaagagatgtccgggcaacgctcaaggtactggctggct

SEQ ID NO: 48809 - DNA, 110 bp, synthetic construct
  source 1..110: mol_type = other DNA
ggagtgacatccagctaaagagatgtccgggcaacgctcaaggtactggctggcttcttcttgctactcaggtgagaagagccataaattgagggaaagatggcgaaaaa

SEQ ID NO: 48810 - DNA, 110 bp, synthetic construct
  source 1..110: mol_type = other DNA
ggcaaaggcaagccctgctggcaaaggcaagccctgatgcagagatggcacaccaggatgccacatagcctcctctgggaagctcggagtctgtagtcattgatctgagc

SEQ ID NO: 48811 - DNA, 110 bp, synthetic construct
  source 1..110: mol_type = other DNA
ggatgccacatagcctcctctgggaagctcggagtctgtagtcattgatctgagcatcatttcagatcaccccctggtctctgctctcatcaagtgaggccagctttgca

SEQ ID NO: 48812 - DNA, 110 bp, synthetic construct
  source 1..110: mol_type = other DNA
tgaaggccctgaaagattaaatgtctcattcaaacttgtcgctctagcgaggagcctggctggggctttaatctagctttcctgacttcagctcccacattcagctgcct

SEQ ID NO: 48813 - DNA, 110 bp, synthetic construct
  source 1..110: mol_type = other DNA
ctggctggggctttaatctagctttcctgacttcagctcccacattcagctgcctcgggtcatttggggtatggtgggtgggcagaagcttctcggagtcaagatggaga

SEQ ID NO: 48814 - DNA, 110 bp, synthetic construct
  source 1..110: mol_type = other DNA
gctgcagctccaatttgacccaagcttggttgcgtccatattccatggttgcggcccttaaaagaaaaaagaaaaaaaagatggtatgtttcagagttcctgctgtggcg

SEQ ID NO: 48815 - DNA, 110 bp, synthetic construct
  source 1..110: mol_type = other DNA
ttggttgcgtccatattccatggttgcggcccttaaaagaaaaaagaaaaaaaagatggtatgtttcagagttcctgctgtggcgcagtgggttaatgatctggcttatc

SEQ ID NO: 48816 - DNA, 110 bp, synthetic construct
  source 1..110: mol_type = other DNA
tggtgtgtctgtgtgcacagtgtgtgggcaaaggtgtgtcaaggggagctgtgcaggtacgcgtgtatttgttagagaaaacacagtgtgaccgcgtgtacatgtgcgtg

SEQ ID NO: 48817 - DNA, 110 bp, synthetic construct
  source 1..110: mol_type = other DNA
ggtacgcgtgtatttgttagagaaaacacagtgtgaccgcgtgtacatgtgcgtgcttctgttctgtgtgtttgtagttgtgtgtgtgtgagccaaaggaaagacaggca

SEQ ID NO: 48818 - DNA, 110 bp, synthetic construct
  source 1..110: mol_type = other DNA
tgaaaacactccatcaggcttactgtgataaggtaggctagctgctgtaacaaacagaccctgtagtaagaaacttctgaaacggcttcatgatccctttctcctgcctt

SEQ ID NO: 48819 - DNA, 110 bp, synthetic construct
  source 1..110: mol_type = other DNA
tgtaacaaacagaccctgtagtaagaaacttctgaaacggcttcatgatccctttctcctgcctttcatactccactggagtgtgggctggacctagtgactcacttcta

SEQ ID NO: 48820 - DNA, 110 bp, synthetic construct
  source 1..110: mol_type = other DNA
taactctccaaggctctcttggaagccctcctggagatgaactagcctattaaagggatccaggggtaggagtgccatggggatgagctgactcaaggaggcagaaaaaa

SEQ ID NO: 48821 - DNA, 110 bp, synthetic construct
  source 1..110: mol_type = other DNA
ggatccaggggtaggagtgccatggggatgagctgactcaaggaggcagaaaaaaaaaatggccagggaaaggcagactctgcaaggggatcagacaatccaggaagaga

SEQ ID NO: 48822 - DNA, 110 bp, synthetic construct; identical to SEQ ID NO: 48820
  source 1..110: mol_type = other DNA

SEQ ID NO: 48823 - DNA, 110 bp, synthetic construct; identical to SEQ ID NO: 48821
  source 1..110: mol_type = other DNA

SEQ ID NO: 48824 - DNA, 110 bp, synthetic construct
  source 1..110: mol_type = other DNA
gaattgagaaaagcagtcccttggtcagatcagagtcatctaaagacaaatagaaaacagttccattgcattatgtctctgcttaaatgtggttacctatgcctcactgt

SEQ ID NO: 48825 - DNA, 110 bp, synthetic construct
  source 1..110: mol_type = other DNA
aacagttccattgcattatgtctctgcttaaatgtggttacctatgcctcactgtatttaacctgagtatcttggcctagttttccatgtgactttgcttgactatacac

SEQ ID NO: 48826 - DNA, 110 bp, synthetic construct
  source 1..110: mol_type = other DNA
gtccagccctggcagccaatgggagagcagatcatccaacccacacttcactttcttgagcagttgtgtgacctgcacagccaaaggttgggatcaatgaggatgtaggg

SEQ ID NO: 48827 - DNA, 110 bp, synthetic construct
  source 1..110: mol_type = other DNA
ttgagcagttgtgtgacctgcacagccaaaggttgggatcaatgaggatgtagggcacatccatacaggatgttacccttcacatttatctattacttttagagaataaa

SEQ ID NO: 48828 - DNA, 110 bp, synthetic construct
  source 1..110: mol_type = other DNA
ggaggactgttggaggaggcaagggaggagaggcaaggaatttggaagttggtgggaagtgaagagaggtcttaccactggacctcagtcattttaatgaagtaagcagg

SEQ ID NO: 48829 - DNA, 110 bp, synthetic construct
  source 1..110: mol_type = other DNA
ctcttcccactataccaggccatcaccttttactcataggtggctgtttgctttttgctgtgggcagagttggcaaagcatctctatttggaactcctagcagaaacaaa

SEQ ID NO: 48830 - DNA, 110 bp, synthetic construct
  source 1..110: mol_type = other DNA
acattctcatggttcttctcttgaattgcttctttcagtcatcttattctctttttgcttgtccagtaggtcttgttccctcagcttgtggggttttttttttttttttg

SEQ ID NO: 48831 - DNA, 110 bp, synthetic construct
  source 1..110: mol_type = other DNA
tgttgggaggatactaacataaacatcatgattctgccttgaggcattgtggggtatacaagcagagtacttaagatatatatttattgtactgtattacataagtaata

SEQ ID NO: 48832 - DNA, 110 bp, synthetic construct
  source 1..110: mol_type = other DNA
caccatagaagctggcattctactctaagctttatcacaaactctacattccccaagagtatcaaatctggctggctcatacctcagttcccacacaggtaaaatggaga

SEQ ID NO: 48833 - DNA, 110 bp, synthetic construct
  source 1..110: mol_type = other DNA
cttcatgcgactgggcagagaatggaagcaagaatgggaatattggataaaagctaaagttccccaaagtagagctcggggattttttttccttcatataaattgttttg

SEQ ID NO: 48834 - DNA, 110 bp, synthetic construct
  source 1..110: mol_type = other DNA
ggatcaggttgctgctatgatgcagttcaacccctggcttagggaagtcctacatgctgtgggaatgacaaaacaattcttttcttccctttcctgtttcttagtccaag

SEQ ID NO: 48835 - DNA, 110 bp, synthetic construct
  source 1..110: mol_type = other DNA
ttactgaaagaagcttgcatgaaaaaacaaaatgtgaagtttctgttgtggcttaccaggttaaggacctaacctagtgtcagtgaggatgtgggtttgatccctaggct

SEQ ID NO: 48836 - DNA, 110 bp, synthetic construct
  source 1..110: mol_type = other DNA
aatcataagtttcactaagagcttgataaattttagctatttttcatgttctgatttgatcctgacaggattcataaaaaagaggcagaattattccttggtggctcagc

SEQ ID NO: 48837 - DNA, 110 bp, synthetic construct
  source 1..110: mol_type = other DNA
tatgtaggcccttttgctagagaaaaaaaaagttgtccattgaaggaatcaaacggaagctgctgcttcagtatgagagtaggttatacaagcagcctggattagaccat

SEQ ID NO: 48838 - DNA, 110 bp, synthetic construct
  source 1..110: mol_type = other DNA
gctaaacgcaagcctggcacccaataaatgttagcaagtgttattactgttaccatggttctcccattccttgtaaatttctatcttgatctgtcaattaaaaaaactca

SEQ ID NO: 48839 - DNA, 110 bp, synthetic construct
  source 1..110: mol_type = other DNA
ggtgatggcatccattttaacgagcttcacaggagaacactttccgaaaacccctttactgaaaacctctttacctactccctttgtcacggaagtgggggggagcggtg

SEQ ID NO: 48840 - DNA, 110 bp, synthetic construct
  source 1..110: mol_type = other DNA
gacctgggctccagttctggttccagttcgaaatagccaactgggtgcagcaacatccctcaggtgtcccacaggccttgctcagcaaatcacattgactctgcttttca

SEQ ID NO: 48841 - DNA, 110 bp, synthetic construct
  source 1..110: mol_type = other DNA
ctccagtttgacccatagcccaggaacgcccatatgttgcaggtgcggcctaaaaaaagaagaaaaagaaaaagttaaaaaaacaaagtgctgagtgcacagaggtgtga

SEQ ID NO: 48842 - DNA, 110 bp, synthetic construct; identical to SEQ ID NO: 48841
  source 1..110: mol_type = other DNA

SEQ ID NO: 48843 - DNA, 110 bp, synthetic construct
  source 1..110: mol_type = other DNA
cagtcttcctaccctcctcccacctccatccatcccccttctatcacattcagattctgcagacaaccttgacttgatctctgctgtgtagtcaagctcatcagacatgg

SEQ ID NO: 48844 - DNA, 110 bp, synthetic construct
  source 1..110: mol_type = other DNA
tctgcagacaaccttgacttgatctctgctgtgtagtcaagctcatcagacatgggctcccactatttctcctcagagttctcaccccctccctctctcagagggaagag

SEQ ID NO: 48845 - DNA, 110 bp, synthetic construct
  source 1..110: mol_type = other DNA
atgaaataagggaatgagttttatttatggctgggggtggggaccttggggtaataatcatattctgctccccctccccacaggctggtttggaaccagctcatcactaa

SEQ ID NO: 48846 - DNA, 110 bp, synthetic construct
  source 1..110: mol_type = other DNA
aatcatattctgctccccctccccacaggctggtttggaaccagctcatcactaacctaggagttgggcagctagtcatggaggatgtggctcagaagtgtggccacgat

SEQ ID NO: 48847 - DNA, 110 bp, synthetic construct
  source 1..110: mol_type = other DNA
actgctattagaatggctaaagtcaaaaaactgacagcatcaagtgccaatgaggatgcagagaaactggggccctcctcctttgctggtgggagatgatgcaaatgata

SEQ ID NO: 48848 - DNA, 110 bp, synthetic construct
  source 1..110: mol_type = other DNA
tgaacacaccattatatggtacttccagattcaatgcagataaataacctctggatcataaataatagtaaaataatcaagatatgatgggtcttgagcacttattacac

SEQ ID NO: 48849 - DNA, 110 bp, synthetic construct
  source 1..110: mol_type = other DNA
cctttcctcttggactcaagctttccatacttagggctctgctccctactccccagcaggatcctggggacctggtgccagaacagagctctggatggcaggtgtcagga

SEQ ID NO: 48850 - DNA, 110 bp, synthetic construct
  source 1..110: mol_type = other DNA
gggatggaggcccagggagattaaagatgtcattaaaactactttatggtaaattgtcttctccaaccagagctagcttttagggccaattgttaaattttcaggagtct

SEQ ID NO: 48851 - DNA, 110 bp, synthetic construct
  source 1..110: mol_type = other DNA
ttaacaagtaatcacatccgtactacggcttcccttgatccagagacctggagcggctggagtcccacaacttcagttctggtggcatctggactaaaagcagaggttgg

SEQ ID NO: 48852 - DNA, 110 bp, synthetic construct
  source 1..110: mol_type = other DNA
ccggtgttagcaggcaccaaaggtttaacaaaaatccatcagggtggaagtgactgagaaagtcctatcaaccagctgcacagtttctgtgacttgggataagatcactc

SEQ ID NO: 48853 - DNA, 110 bp, synthetic construct
  source 1..110: mol_type = other DNA
tagacttcaagcccagcaggctcgggcctcaccatgcaggaggtttcaggatcctccctgaacagctctgacagaggtcccaatgttgactcagatcatagattccttgg

SEQ ID NO: 48854 - DNA, 110 bp, synthetic construct
  source 1..110: mol_type = other DNA
ccctgaacagctctgacagaggtcccaatgttgactcagatcatagattccttgggaatgaggaacaggctgtcaccttatgacctgggagccagagcaaagggaactgc

SEQ ID NO: 48855 - DNA, 110 bp, synthetic construct
  source 1..110: mol_type = other DNA
acccataaatttcaggcactctcttactgattttgaattgtgatggatgtgggtttggctcttttattcccccaatctgtatatccccagagacctattccactattttt

SEQ ID NO: 48856 - DNA, 110 bp, synthetic construct
  source 1..110: mol_type = other DNA
tggctcttttattcccccaatctgtatatccccagagacctattccactatttttagtgaaataatttgtgtagtaaaatagacatttgctgtttggtagcagccaaaat

SEQ ID NO: 48857 - DNA, 110 bp, synthetic construct
  source 1..110: mol_type = other DNA
ctgtcccagtgccaaagagcggtcaaggtgacacagggagacaacacaggcactcatctgagacactcgggccaaccagtcaggcgtctacctggctgtctccatctcca

SEQ ID NO: 48858 - DNA, 110 bp, synthetic construct
  source 1..110: mol_type = other DNA
atctgagacactcgggccaaccagtcaggcgtctacctggctgtctccatctccaggtcagagaggctgcaaaaggctctgcagaggattcagcttaacagccagggtct

SEQ ID NO: 48859 - DNA, 110 bp, synthetic construct
  source 1..110: mol_type = other DNA
atcccttccagaaggctgagagatctgggagagaaaaaaaaaaaatcagagtgtacaaaacttctttttaaagaaaagagtaatttcccccatgctggccacacaatcag

SEQ ID NO: 48860 - DNA, 110 bp, synthetic construct
  source 1..110: mol_type = other DNA
cagaagctcttggtactacttgcttttcttacatgtgattagcaagaaacagagagcttgctgcctggtgaacacaaagagacagagttgagattcatttacctggtttg

SEQ ID NO: 48861 - DNA, 110 bp, synthetic construct
  source 1..110: mol_type = other DNA
cccaagaaccgcactcagaaaccttttctccagctgcaccccacttactgctcagtctggtctgtgcctcatcccaaccccaccctctgcctggagtgtcctccactccc

SEQ ID NO: 48862 - DNA, 110 bp, synthetic construct
  source 1..110: mol_type = other DNA
attcagagattattcaggagcttggcaggaaagacccaggacaaattagtaatatgtacgtctgagggagagagaggtcatagaaattcgctatcctaggctacattaag

SEQ ID NO: 48863 - DNA, 110 bp, synthetic construct
  source 1..110: mol_type = other DNA
cgtgctgcatgtgaagggctttaccaagcctccaagtatgtatcggatgggcctgccagtcccatgcaccacgagcccccaggaacgtaccaggcatgacggtctctccg

SEQ ID NO: 48864 - DNA, 110 bp, synthetic construct
  source 1..110: mol_type = other DNA
ggcatctgaccattagggatcattacatcgcgtgcctcagaggcctgtggtgaggacgacattagatgtgtcactacctggcagctctagttctggttatttaggtatgg

SEQ ID NO: 48865 - DNA, 110 bp, synthetic construct
  source 1..110: mol_type = other DNA
gaggggaaataggtaccatacctgttgatgggaagagcatcatttgtgtctagagaggaaagggagtagctgtggccatattaggaaactatcaatggcagcatgtaaca

SEQ ID NO: 48866 - DNA, 110 bp, synthetic construct
  source 1..110: mol_type = other DNA
cctcagagcatatccaggccccgcctgtcctctctccaggggtctgagctgagatctggtcctgtcttctgatgtccctcttattgtgtatccccagggtgttagctctc

SEQ ID NO: 48867 - DNA, 110 bp, synthetic construct
  source 1..110: mol_type = other DNA
cagaggtaggagccggaggaagcagcatgtgctatgggaggggcacccgcaacagagggaagaagggcctggatcaaaagcccagctcttcaccacctgtcagcgcttgt

SEQ ID NO: 48868 - DNA, 110 bp, synthetic construct
  source 1..110: mol_type = other DNA
gctttccaggaagttccacccaacaatttccacttaagtctcattggccaggatttaggctagggctattcttactgtaaggggatgtcatcttcttgctttgcacatta

SEQ ID NO: 48869 - DNA, 110 bp, synthetic construct
  source 1..110: mol_type = other DNA
tttaattgtttgcattgcaaacaaggctgcagtgaacatctgcgcatgtgtcttcttatgtaccacctcaatcatctttctgtttgcctcttgctccttctccaggcatc

SEQ ID NO: 48870 - DNA, 110 bp, synthetic construct
  source 1..110: mol_type = other DNA
ctttaacaatctaactacagcgatagtcctctccagaaaaagtcacccatacatgaaacacggatttcatttcaggcacctctagaagctcatccagggacccccagttt

SEQ ID NO: 48871 - DNA, 110 bp, synthetic construct
  source 1..110: mol_type = other DNA
catcccttgaggcatgcaagcaaaggcaggactgaccccttggcagggatgccattgagtcttgctacttatctggcctcctttcctaccattctcctgcctactccctg

SEQ ID NO: 48872 - DNA, 110 bp, synthetic construct
  source 1..110: mol_type = other DNA
ggagcatttatgaacccaggggaaccccggatggggcaacatccccattgagtgcccataaacctccttgcaggaggaactttggccctcagaagttaaaagtcaatttc

SEQ ID NO: 48873 - DNA, 110 bp, synthetic construct
  source 1..110: mol_type = other DNA
cgtcacagccacagaccttccttctctggatgacactgggacctggttgaattccttggcttcctgtgttaacaagctcctgatgccagatgcaaaaaataagttagcca

SEQ ID NO: 48874 - DNA, 110 bp, synthetic construct
  source 1..110: mol_type = other DNA
gaaatctcaaaggaaagaggtggaactcaggaaattgtagcacggtgctaaatttcaagaggcaccttgctcttcctgttttgtcttttcctggacttcagaagctgaca

SEQ ID NO: 48875 - DNA, 110 bp, synthetic construct
  source 1..110: mol_type = other DNA
ctcagagatcataggttgagtggcctaaccccttagcaatgtcctgctgcctggaccacctgccccctgcttccacagctccactctcagtgggtctccacttggccccc

SEQ ID NO: 48876 - DNA, 110 bp, synthetic construct
  source 1..110: mol_type = other DNA
tatacaagatgaagcagaggttcagagaagttaggtaagctatgtaagtttatccaagctaagtaaactagtaaacgggaaagctggagtttgagaccaaatctacccaa

SEQ ID NO: 48877 - DNA, 110 bp, synthetic construct
  source 1..110: mol_type = other DNA
gcaatcaaacatttaagcgaagatgtcttactaagagatcccaatggggaaactggtccaagtcagagctggaggtgtgactgtttcaatcaactccacagaggagatta

SEQ ID NO: 48878 - DNA, 110 bp, synthetic construct
  source 1..110: mol_type = other DNA
gtccaagtcagagctggaggtgtgactgtttcaatcaactccacagaggagattaaacaaagcctggtgaggtgcactgaccaggacagcaagtgaaaaagtgagtggga

SEQ ID NO: 48879 - DNA, 110 bp, synthetic construct
  source 1..110: mol_type = other DNA
ctgagtgccatcaagaggcagcgggataagctaataaaggaagggaagtacacacctccacctcatcacttgggcaaggaggatcctcggccctgagcagagcagctgcc

SEQ ID NO: 48880 - DNA, 110 bp, synthetic construct
  source 1..110: mol_type = other DNA
acagtcatctgctctctctggaccctggggccaaagtgaaagctggataccggagctggatttgggaactgcagggaggctggtagctgaaggcatgtacctccctgact

SEQ ID NO: 48881 - DNA, 110 bp, synthetic construct
  source 1..110: mol_type = other DNA
acagtggggaaaagttagtttattcgtctcactatatgcaggttgtttcctgggtgtggttctgcagagcttcctctgagagctgactcaagagttatcttccattgtca

SEQ ID NO: 48882 - DNA, 110 bp, synthetic construct
  source 1..110: mol_type = other DNA
agaggtgactcatttttcatcaaaggaatttcaaagaaaatgtaatgataggacgatgtcacaggagcaggtggagacaggaaccttgactgaggggctgagggaggtgc

SEQ ID NO: 48883 - DNA, 110 bp, synthetic construct
  source 1..110: mol_type = other DNA
gggcaagcctgaggagcaggtcgttgggcaatggatgcactgttcctgacttggcagtgagccattttacctcaccagctctcttgcaactgtctcagactcaccagtca

SEQ ID NO: 48884 - DNA, 110 bp, synthetic construct
  source 1..110: mol_type = other DNA
attcagtctgtagcaagcaccttggtagcttggtttgtatgcagcactcatcatagccaagaagaatggcatcttggtagtgttcacgtggtcacaaagccttcctgttg

SEQ ID NO: 48885 - DNA, 110 bp, synthetic construct
  source 1..110: mol_type = other DNA
ttctaatgtggaactccagtcttagaaaactgtaatcagcttctgtgttgtcctctagggtggagcagtcttaccagaaggtgatggccctttggcatcagctacatgtt

SEQ ID NO: 48886 - DNA, 110 bp, synthetic construct
  source 1..110: mol_type = other DNA
cactgccgagtccgagaaatgttttctcagttggcagacctggacgatgagcttgattgcatgggtgccatcggcagagacactgacagcctccagtcccagatcgagga

SEQ ID NO: 48887 - DNA, 110 bp, synthetic construct
  source 1..110: mol_type = other DNA
cagttgcttcggtgctcaccgcaggggataatgtcccacagagacctctcacctcagctgctgcagtgcctgctccagaggagcctgccaccccagctgctgcggtgtcc

SEQ ID NO: 48888 - DNA, 110 bp, synthetic construct
  source 1..110: mol_type = other DNA
ctgagagtgagagaggatgtgtctgggaaggcttcctgggtggcagatcatctaaattgtcttttgaaaattaagagaattagagtcagagcccaagacttcgatttttt

SEQ ID NO: 48889 - DNA, 110 bp, synthetic construct
  source 1..110: mol_type = other DNA
ccccctgctggtggtcaagggcacagcacgtgcatcctcacagctacctctgcgcctggaacacacaggtgcctgtgttcactggcttattcaacctcctgcgtgtgaca

SEQ ID NO: 48890 - DNA, 110 bp, synthetic construct
  source 1..110: mol_type = other DNA
ctgccctgaaagactgcttatcagcacagaatcgaagactcttagcccaggataaagtgaggggagggggcagcagctttgccacctcaaatttttgaaggaattgtgtt

SEQ ID NO: 48891 - DNA, 110 bp, synthetic construct
  source 1..110: mol_type = other DNA
ttatttctgagccacagtgggaacttctcagtggagaattttaagaccatcagacacaagctatcctgaggggcagatgggtgtgaggcctgtggctcaggaaggtgtga

SEQ ID NO: 48892 - DNA, 110 bp, synthetic construct
  source 1..110: mol_type = other DNA
acaagctatcctgaggggcagatgggtgtgaggcctgtggctcaggaaggtgtgatattcaggtcttctaggagacagatgctaaggtgaattagagatgcaagagattt

SEQ ID NO: 48893 - DNA, 110 bp, synthetic construct
  source 1..110: mol_type = other DNA
aaggaacaatctggagaagggaaatggagaccccttctttgagctgatgagaaaagaaattaagacaaacattggaaaaattggggataggcgtgtaagttgagagactt

SEQ ID NO: 48894 - DNA, 110 bp, synthetic construct
  source 1..110: mol_type = other DNA
aagtggacaaaagtgttcttgtcccaggcttttaaagccattgagaacacaagcccagccctccaaggactgcggtggaaaaagcacggttctgaaataaaactgtcacc

SEQ ID NO: 48895 - DNA, 110 bp, synthetic construct
  source 1..110: mol_type = other DNA
atgagagattcctgtttcttcaaatacttgcaagctcctaaatcatttgaaaggggagggtgggcacacccataaaaaccattaggaaatgttaataattctcaagtgaa

SEQ ID NO: 48896 - DNA, 110 bp, synthetic construct
  source 1..110: mol_type = other DNA
tttagtgggaacaatatacaacccagtacagtgcctgtgagtaaccgcagctgcaacaccttccattggtctggtgaattgctgtttccagcattgtttccagtggtgat

SEQ ID NO: 48897 - DNA, 110 bp, synthetic construct
  source 1..110: mol_type = other DNA
ctggggccaagcccagatttcccgccctcgacagctcctcctctgccctctccccctgcagtggccgttgacatttctggcacactgaactgcctgtctgtgctgaatgg

SEQ ID NO: 48898 - DNA, 110 bp, synthetic construct
  source 1..110: mol_type = other DNA
attcgacccctagcctgggaacttccatagaccatgggtttggccctaaagagcaaaaagaaaattttaaatcaaaattatatagtaatactagaaatataaatttagtt

SEQ ID NO: 48899 - DNA, 110 bp, synthetic construct; identical to SEQ ID NO: 48898
  source 1..110: mol_type = other DNA

SEQ ID NO: 48900 - DNA, 110 bp, synthetic construct
  source 1..110: mol_type = other DNA
aggctcctgggtgcaaaaaccagatgtatgggactgaactggatgagcgtgaggccaccatggaagagatccaattgtctttgggtcagtaatcccagagctgggggaga

SEQ ID NO: 48901 - DNA, 110 bp, synthetic construct
  source 1..110: mol_type = other DNA
caccatggaagagatccaattgtctttgggtcagtaatcccagagctgggggagagaactgctgctgggtggggcccaggtcttacctggaatccctgggggcccaggca

SEQ ID NO: 48902 - DNA, 110 bp, synthetic construct
  source 1..110: mol_type = other DNA
agccctggctggcctgtacccacatgctcctctcctcattgtttattcttctgtcctgggtcccttcagccttgtgctttttaggaaaatagctccttttccctcaagaa

SEQ ID NO: 48903 - DNA, 110 bp, synthetic construct
  source 1..110: mol_type = other DNA
ctgggtcccttcagccttgtgctttttaggaaaatagctccttttccctcaagaaaaccataagtgggttgagtccaactccaggcaggctagagagggtgatatccaca

SEQ ID NO: 48904 - DNA, 110 bp, synthetic construct
  source 1..110: mol_type = other DNA
agatgcagagtgacctaggggacatcctctgtttgttcccaggaaggcggccagccatgggctccctgccaggttggggcaaatgtggtcaggtttgaagatgggtcccc

SEQ ID NO: 48905 - DNA, 110 bp, synthetic construct
  source 1..110: mol_type = other DNA
catgggctccctgccaggttggggcaaatgtggtcaggtttgaagatgggtccccaggccacctttgaggagaagtgccttggtcatgtctggggacttggagccaccag

SEQ ID NO: 48906 - DNA, 110 bp, synthetic construct
  source 1..110: mol_type = other DNA
catatttctgagtgttttacaaccacaatatatttaaaagtacttacatcaattcaaagctattaggagtggtaccaataaagtagcctccagggctcagcctctcacag

SEQ ID NO: 48907 - DNA, 110 bp, synthetic construct
  source 1..110: mol_type = other DNA
aaagctattaggagtggtaccaataaagtagcctccagggctcagcctctcacaggcatttctgagcatgatgtcagcctgctcgtaggactcaaacgagtaatggcaga

SEQ ID NO: 48908 - DNA, 110 bp, synthetic construct
  source 1..110: mol_type = other DNA
tttgtcagtgagagaaaatgaagtagtaactgctaagttttctggtcagagtaaaggcaagcaacagattcagtagatactatccctcttttaattctttccttctcaaa

SEQ ID NO: 48909 - DNA, 110 bp, synthetic construct
  source 1..110: mol_type = other DNA
ggcaagcaacagattcagtagatactatccctcttttaattctttccttctcaaagtaagagtactgggagtatgcagttttaaagtgtcatttctgttgtagagttgaa

SEQ ID NO: 48910 - DNA, 110 bp, synthetic construct
  source 1..110: mol_type = other DNA
tataggatttccatcccacaaccccagtacatccccccaccccctggttctcatctttttaaaagacagtgtttaatgccaaacatatcatgaaaagtgtctcagatgtt

SEQ ID NO: 48911 - DNA, 110 bp, synthetic construct
  source 1..110: mol_type = other DNA
tttttaaaagacagtgtttaatgccaaacatatcatgaaaagtgtctcagatgttctcattttaagttaagaagaggcaaaatacggcaaggttaaaagctgacttggcc

SEQ ID NO: 48912 - DNA, 110 bp, synthetic construct
  source 1..110: mol_type = other DNA
aaggcacactgaccttcccaaggtcacacagcctcccaggggcacggccaggcacaagggctggaagcagcagatgaaagccaccttttacagcaaaaccttcctcaaaa

SEQ ID NO: 48913 - DNA, 110 bp, synthetic construct
  source 1..110: mol_type = other DNA
aagggctggaagcagcagatgaaagccaccttttacagcaaaaccttcctcaaaacccggaggtggtgtgtctgcacctcagacagcaagtccctgggcgtcaagcccag

SEQ ID NO: 48914 - DNA, 110 bp, synthetic construct
  source 1..110: mol_type = other DNA
tgatgaatggttcttgagcactgtaccaatcactgggagccagggccagccctcatcccgactacacacgcagggcccttggatatttatcatcaaacagcctagaggct

SEQ ID NO: 48915 - DNA, 110 bp, synthetic construct
  source 1..110: mol_type = other DNA
tcccgactacacacgcagggcccttggatatttatcatcaaacagcctagaggctcccaccaaacctggctaatttacagatcgaatacctcttaagggagacagaatta

SEQ ID NO: 48916 - DNA, 110 bp, synthetic construct
  source 1..110: mol_type = other DNA
ataaaattgcatttcagattattgatggagtgaaggactggtcaattatagccctttgacagggatgagctactgacccctgaggagcattcccaccgaagatgactgct

SEQ ID NO: 48917 - DNA, 110 bp, synthetic construct
  source 1..110: mol_type = other DNA
ttgacagggatgagctactgacccctgaggagcattcccaccgaagatgactgctgtggtgaaacttaagtgctgacaaattcacgagaaccaatccagggaggagttcc

SEQ ID NO: 48918 - DNA, 110 bp, synthetic construct; identical to SEQ ID NO: 48916
  source 1..110: mol_type = other DNA

SEQ ID NO: 48919 - DNA, 110 bp, synthetic construct; identical to SEQ ID NO: 48917
  source 1..110: mol_type = other DNA

SEQ ID NO: 48920 - DNA, 110 bp, synthetic construct
  source 1..110: mol_type = other DNA
agtgaaagctcagagtctggaagtctcttgtttgccttgtatgagatagatgcgtctccaataattgaatggagctcaatgagcagtgtatatatgactatgaacagatt

SEQ ID NO: 48921 - DNA, 110 bp, synthetic construct
  source 1..110: mol_type = other DNA
tcaactactgcactctgaaattaacagcttagatggacactttgcttctgactgttgattccatctttggtaggatgcacaggtagcaccacgatctcgctgacagggtg

SEQ ID NO: 48922 - DNA, 110 bp, synthetic construct
  source 1..110: mol_type = other DNA
gctgaaacatgaggttttagagaacagacttggggagagaactgcaggtgactatgccaaggcagcctggagggtggaaggcataacaccacagccaggaatatctgggg

SEQ ID NO: 48923 - DNA, 110 bp, synthetic construct
  source 1..110: mol_type = other DNA
tatatttggagcacgtgtctatctcaaaatctattttttcctcccactcacagtggtttaatgaactaagagggtctaggattacattctgtatcttcaggcctctggca

SEQ ID NO: 48924 - DNA, 110 bp, synthetic construct
  source 1..110: mol_type = other DNA
gtttaatgaactaagagggtctaggattacattctgtatcttcaggcctctggcaaccttgttgcatgtgtccttttgagaagttagcagtgtagaggggaactctgctt

SEQ ID NO: 48925 - DNA, 110 bp, synthetic construct
  source 1..110: mol_type = other DNA
tgggcccatgcagacggggtaggacctggtcctgctctgccacatcactgacactcaggggccgcacgagctgggaaaagggaaaaaagcactgcgcatgtgaaatcccc

SEQ ID NO: 48926 - DNA, 110 bp, synthetic construct
  source 1..110: mol_type = other DNA
caggggccgcacgagctgggaaaagggaaaaaagcactgcgcatgtgaaatccccacaaagaggacagtcagggcaaacaatgacagactagggacccagcagcctgaga

SEQ ID NO: 48927 - DNA, 110 bp, synthetic construct
  source 1..110: mol_type = other DNA
gaagttcatcccaatccagtgacaaagtgagaaatacctattgatggttagttttcccagcatgtctgtatatagttgcattatagcattttgaggaataaagctggttt

SEQ ID NO: 48928 - DNA, 110 bp, synthetic construct
  source 1..110: mol_type = other DNA
cccagcatgtctgtatatagttgcattatagcattttgaggaataaagctggtttttgtaggggatctctctttaccaagataccaactatttaattaaatatagtacct

SEQ ID NO: 48929 - DNA, 110 bp, synthetic construct
  source 1..110: mol_type = other DNA
ttgccagatgcctttgaagggggagggagaggaggggctttccagaaagctggacagcccatccaaaggaaaggaggcagtgccaggggtgtgccagggaaagcatgcag

SEQ ID NO: 48930 - DNA, 110 bp, synthetic construct
  source 1..110: mol_type = other DNA
agcccatccaaaggaaaggaggcagtgccaggggtgtgccagggaaagcatgcaggtgactggagctcttggtgtgatgaggcccatggttatgaggtggtttgtcagat

SEQ ID NO: 48931 - DNA, 110 bp, synthetic construct
  source 1..110: mol_type = other DNA
tcagtccccatcacactgtcttctggtttcttctgtggagctccctgtttcagctccatcacatgagcaagagtattctccacggctctgccgcacactgcagccgtggt

SEQ ID NO: 48932 - DNA, 110 bp, synthetic construct
  source 1..110: mol_type = other DNA
ccatcacatgagcaagagtattctccacggctctgccgcacactgcagccgtggtgacactggaagtgtttacatgctgactgaagtgtgcgtaccttgcagagcagctg

SEQ ID NO: 48933 - DNA, 110 bp, synthetic construct
  source 1..110: mol_type = other DNA
aaaaaccaaaaacacaaaaaaaaattcttcccggttccattaaaggacagttctctgttttctctcactcttgagaagtgacgtatctttcaacttccatctccgtgttc

SEQ ID NO: 48934 - DNA, 110 bp, synthetic construct
  source 1..110: mol_type = other DNA
tgttttctctcactcttgagaagtgacgtatctttcaacttccatctccgtgttcttctccacaactttacaccctgagccagttaccagcacagctggcaaggttttgt

SEQ ID NO: 48935 - DNA, 110 bp, synthetic construct
  source 1..110: mol_type = other DNA
atgctaaaagcgcagctgcatcccctgctcccatcctgccatcccaggagaggcagaggccactgaatctgcagctcacactcaagacatctgaaaacaagtggacaagt

SEQ ID NO: 48936 - DNA, 110 bp, synthetic construct
  source 1..110: mol_type = other DNA
gaggccactgaatctgcagctcacactcaagacatctgaaaacaagtggacaagtgcaaggattcaggcagtttcgttttgtcttttaaacaattaaaatgctacaggat

SEQ ID NO: 48937 - DNA, 110 bp, synthetic construct
  source 1..110: mol_type = other DNA
agggggtggtgggagatatgtgcaggaagggtggtgaggcttagggcaggagatcacagggtggcccaggatggagcagcagcaaaatagaggctgggccatgatcaaga

SEQ ID NO: 48938 - DNA, 110 bp, synthetic construct
  source 1..110: mol_type = other DNA
acagggtggcccaggatggagcagcagcaaaatagaggctgggccatgatcaagagccctgagtgtgtcatcctgagtgtggactggactggaacaggcaactggtttga

SEQ ID NO: 48939 - DNA, 110 bp, synthetic construct
  source 1..110: mol_type = other DNA
aacggggggacaggaaactgtggatagcttctctaccagacagccctctgctcactgcgcttcaacaactcagtcaactgaatctgacttctccctctgctgagctcaaa

SEQ ID NO: 48940 - DNA, 110 bp, synthetic construct
  source 1..110: mol_type = other DNA
gaatttggctattttgaaatggtaatgagaaggaggctttgagaagtacagcctcgtagaaatctccctgcaggaaccggcttgagtttggtctttaaatcttttaagag

SEQ ID NO: 48941 - DNA, 110 bp, synthetic construct
  source 1..110: mol_type = other DNA
tgcaaagacccctgccctcaagggagggcaggtcagcgcactgtgcaatcaaatccctctctgcagcccctcctgggacaagaaggagtaggatgtttctgcaggttaag

SEQ ID NO: 48942 - DNA, 110 bp, synthetic construct
  source 1..110: mol_type = other DNA
cctctctgcagcccctcctgggacaagaaggagtaggatgtttctgcaggttaaggtgagagcgaagtccaagatacccccacccccaggttagcacaaagggccctgaa

SEQ ID NO: 48943 - DNA, 110 bp, synthetic construct
  source 1..110: mol_type = other DNA
ttgtcatcagaaaatcctcatgtagtacagcctgcaccagttctgagcccatgaacacaaccgtgccaaacgccctgctctgcggtgtgcagttcaaggacagaggacag

SEQ ID NO: 48944 - DNA, 110 bp, synthetic construct
  source 1..110: mol_type = other DNA
cacaaccgtgccaaacgccctgctctgcggtgtgcagttcaaggacagaggacaggatggggacatcagctcctgagactccacatcaacgtcgctatttctgagctgtg

SEQ ID NO: 48945 - DNA, 110 bp, synthetic construct
  source 1..110: mol_type = other DNA
tggcttctccaagagcacaaagcattcagggaatgttccacagatggaggtcagttccatctgggagtgctcaccaaagaaataagattagacacaccaaacatcaggat

SEQ ID NO: 48946 - DNA, 110 bp, synthetic construct
  source 1..110: mol_type = other DNA
tccatctgggagtgctcaccaaagaaataagattagacacaccaaacatcaggattctggaagacacaggtacacaccacctgctacaaatgaccctccagtcaggaacc

SEQ ID NO: 48947 - DNA, 110 bp, synthetic construct
  source 1..110: mol_type = other DNA
tcctccacagcaacccgagccactgcatttggatccttaacccactgtgtcatggcaggaacacaagaaggtatattttcatcactggaaaaataaaaaaaataatgtta

SEQ ID NO: 48948 - DNA, 110 bp, synthetic construct; identical to SEQ ID NO: 48947
  source 1..110: mol_type = other DNA

SEQ ID NO: 48949 - DNA, 110 bp, synthetic construct
  source 1..110: mol_type = other DNA
gctggttggcaatgccacatagcgaacaactacatgaggcctggctggtcgctcagtgaaacctgattccaggttgaatcatgaagggaatcattaattcatttaaaata

SEQ ID NO: 48950 - DNA, 110 bp, synthetic construct
  source 1..110: mol_type = other DNA
gtgaaacctgattccaggttgaatcatgaagggaatcattaattcatttaaaataggcattagtgggagttcaattaggactcagccggttaagaaccagaccagtatct

SEQ ID NO: 48951 - DNA, 110 bp, synthetic construct
  source 1..110: mol_type = other DNA
aaaaaaagttcaaacctatattccccttctctagctaaatctctcttctctcctttacagtcaagccccaaagatgtttacccttgtagtcttgacttccattggccctt

SEQ ID NO: 48952 - DNA, 110 bp, synthetic construct; identical to SEQ ID NO: 48951
  source 1..110: mol_type = other DNA

SEQ ID NO: 48953 - DNA, 110 bp, synthetic construct
  source 1..110: mol_type = other DNA
ccttgttcatggcagagatgggcagccatccattctgtctttgggctaaatccaggactggaagcacagctgctgctttatgcccttctgggtagttttttacaattgcc

SEQ ID NO: 48954 - DNA, 110 bp, synthetic construct
  source 1..110: mol_type = other DNA
gactggaagcacagctgctgctttatgcccttctgggtagttttttacaattgcctctatcctctgtaccaaagaaaaagcacctgttttagtgtctggaaaacactaaa

SEQ ID NO: 48955 - DNA, 110 bp, synthetic construct
  source 1..110: mol_type = other DNA
tgatattaagtattagatttaaaagacgtctttttctgtattccattagccccagagtcacaagaaatttttgcttttgagcgttaggacccaaacatacaacaaaacaa

SEQ ID NO: 48956 - DNA, 110 bp, synthetic construct
  source 1..110: mol_type = other DNA
agtcacaagaaatttttgcttttgagcgttaggacccaaacatacaacaaaacaacaatgctgctggacagtcctgcctgaagggttaaaaaattcccccaccatcttta

SEQ ID NO: 48957 - DNA, 110 bp, synthetic construct
  source 1..110: mol_type = other DNA
caggagactgaggggcgatgatgaagttagagctttgcgtggagggtggtaatacagggtttagtcctcctgttatgaaaaccgccacagttgccccaggcctgagctgg

SEQ ID NO: 48958 - DNA, 110 bp, synthetic construct
  source 1..110: mol_type = other DNA
agggtttagtcctcctgttatgaaaaccgccacagttgccccaggcctgagctggcctccttcttcggttgggtaggggggtcagactgaagcacgtatttcccttcaag

SEQ ID NO: 48959 - DNA, 110 bp, synthetic construct
  source 1..110: mol_type = other DNA
actcacttacatgttgctcagggagagtaaaaatgggaagtaaagaattcgacacaaatgaccagtgacagcagcgatagcgataatgggaagatgacaaatcatgatca

SEQ ID NO: 48960 - DNA, 110 bp, synthetic construct
  source 1..110: mol_type = other DNA
aaatgaccagtgacagcagcgatagcgataatgggaagatgacaaatcatgatcaaaacgtggtatgagatgggtgtagaggaagcggctttgaattgggctgaagcaaa

SEQ ID NO: 48961 - DNA, 110 bp, synthetic construct
  source 1..110: mol_type = other DNA
aatacagcagtctggctaaaacccaagaaaatttcacttgaatttcccattcgataatacctcctaaggttttgaggaggtggttactcctaggccattcgagctctgaa

SEQ ID NO: 48962 - DNA, 110 bp, synthetic construct
  source 1..110: mol_type = other DNA
aatacctcctaaggttttgaggaggtggttactcctaggccattcgagctctgaaactgtgagacttgtaccataacggtgacagaactgactcaggaaaagcttgtcac

SEQ ID NO: 48963 - DNA, 110 bp, synthetic construct
  source 1..110: mol_type = other DNA
ggctttggcaccaagtagatctggggcaaatgctgcccaagtcacttacactctgcgtggccttgggtaaagtattgttatcaatgttatcttcatcactactatttaac

SEQ ID NO: 48964 - DNA, 110 bp, synthetic construct
  source 1..110: mol_type = other DNA
cgtggccttgggtaaagtattgttatcaatgttatcttcatcactactatttaacaccagtggaatcatctctattactttagaatgtgagcaaagcaaacttggattga

SEQ ID NO: 48965 - DNA, 110 bp, synthetic construct
  source 1..110: mol_type = other DNA
aggccactcccacacgggctgggcttctccgtttccaggctctgaatccaattttccgagatggaagctctgccccgagccccgtgagggtctgtctgctgcaccggatg

SEQ ID NO: 48966 - DNA, 110 bp, synthetic construct
  source 1..110: mol_type = other DNA
ccgagatggaagctctgccccgagccccgtgagggtctgtctgctgcaccggatgatgtttccttaagggcacgggctggccttctacctcggccacatccccacagcac

SEQ ID NO: 48967 - DNA, 110 bp, synthetic construct
  source 1..110: mol_type = other DNA
gtttcttttcttaattggggcaaatatttatttactgtacttttttcttttaaggctgtacctgtggcatacggaagttccctgggctaggggtcgaatcagagctgtag

SEQ ID NO: 48968 - DNA, 110 bp, synthetic construct; identical to SEQ ID NO: 48967
  source 1..110: mol_type = other DNA

SEQ ID NO: 48969 - DNA, 110 bp, synthetic construct
  source 1..110: mol_type = other DNA
gctaagtgacttggaagctggggttccaacacacatcaatccagctgagctcggcaaacttcggaatgactccccaagcatgagggccttgtctgtgcacatcagcctct

SEQ ID NO: 48970 - DNA, 110 bp, synthetic construct
  source 1..110: mol_type = other DNA
aaacttcggaatgactccccaagcatgagggccttgtctgtgcacatcagcctctaacgacctggcatggcttgtcctgggagcgtcagggtggctgtgtggtgaggggc

SEQ ID NO: 48971 - DNA, 110 bp, synthetic construct
  source 1..110: mol_type = other DNA
ccctggtatggagcataacgctgcccaatcttgcctccgtctcccttcccttctcccatcccagagaccttaagaactttgtgatcatcacaaagctagtcatagagaag

SEQ ID NO: 48972 - DNA, 110 bp, synthetic construct
  source 1..110: mol_type = other DNA
ccatcccagagaccttaagaactttgtgatcatcacaaagctagtcatagagaagcctaggatttgaagctaggtttatttgctctgaagagtatgtttttttctctgtg

SEQ ID NO: 48973 - DNA, 110 bp, synthetic construct
  source 1..110: mol_type = other DNA
tggatggcaaatgtccttggtgccatcgtgactagtctcctaaataacaggaatatgtgtggtttgcagatctacactgatgcgtctggtggtcactagccacatgtagg

SEQ ID NO: 48974 - DNA, 110 bp, synthetic construct
  source 1..110: mol_type = other DNA
tctcctaaataacaggaatatgtgtggtttgcagatctacactgatgcgtctggtggtcactagccacatgtaggtttttttttttaatgaattaaaattttataatttt

SEQ ID NO: 48975 - DNA, 110 bp, synthetic construct
  source 1..110: mol_type = other DNA
gattatccctgattatcaggtgggcccagtgtcatcacaagagtcctcataagtggcagagggaggcaggcggtcaaaggtggagacaggaagaagccaggctgctagct

SEQ ID NO: 48976 - DNA, 110 bp, synthetic construct
  source 1..110: mol_type = other DNA
gcagagggaggcaggcggtcaaaggtggagacaggaagaagccaggctgctagctttaaagtcagagggaggaaccacacgccaaggaaataagcagcttccagaaactg

SEQ ID NO: 48977 - DNA, 110 bp, synthetic construct
  source 1..110: mol_type = other DNA
agatccctgctggccaattattccatataccccagtatggacaatcttttccaaagctcttgtctcacagagggcaagccacctcctatgtcacatcactggcctgtaga

SEQ ID NO: 48978 - DNA, 110 bp, synthetic construct
  source 1..110: mol_type = other DNA
gctcttgtctcacagagggcaagccacctcctatgtcacatcactggcctgtagagtataagaaaataacctagtttaggagttcccactgtggtacagtgggttaagaa

SEQ ID NO: 48979 - DNA, 110 bp, synthetic construct
  source 1..110: mol_type = other DNA
gcggtgccctattttcatgcaacctaatgctcttacacccgatcctatctctggggtcctggatgaggcctggtgtgaaaggcacagagtcaaggcagctgaaaggcttc

SEQ ID NO: 48980 - DNA, 110 bp, synthetic construct
  source 1..110: mol_type = other DNA
gtcctggatgaggcctggtgtgaaaggcacagagtcaaggcagctgaaaggcttcagtacttctcctggaaggccatggcgcgcgcgtgtggcactgcctctgctcctgt

SEQ ID NO: 48981 - DNA, 110 bp, synthetic construct
  source 1..110: mol_type = other DNA
gctttgcttgtaactgagacatctgtgggtattagtagctcacattaccgtctgccacgttggtatgtttttgggtgctttttgacaatttatgtgacacatttagcata

SEQ ID NO: 48982 - DNA, 110 bp, synthetic construct
  source 1..110: mol_type = other DNA
cacgttggtatgtttttgggtgctttttgacaatttatgtgacacatttagcatatgctggaacataacgcatctgcaggaagagcacctaattattacgtgtggctgag

SEQ ID NO: 48983 - DNA, 110 bp, synthetic construct
  source 1..110: mol_type = other DNA
acggggccaagcgacgttaattacagacccatggggaagatcctggtgtgatgtcgccaatcacttattctctctagagcctggtttttctttattctatgagtacagct

SEQ ID NO: 48984 - DNA, 110 bp, synthetic construct
  source 1..110: mol_type = other DNA
gccaatcacttattctctctagagcctggtttttctttattctatgagtacagctttccctttgtcttctgtccgagtctttggtctgagagggcagcatctgtaaggtg

SEQ ID NO: 48985 - DNA, 110 bp, synthetic construct
  source 1..110: mol_type = other DNA
aggaccaagtgacccagacagaagtcttgtggccttgactggggacaaactcttgtgcccagtattttccttaagctgacgaggccttattgatcacatagaataatctg

SEQ ID NO: 48986 - DNA, 110 bp, synthetic construct
  source 1..110: mol_type = other DNA
tgcccagtattttccttaagctgacgaggccttattgatcacatagaataatctgatattttctccctactcctgaaacctcgttctttaatataactcgtatgagaaca

SEQ ID NO: 48987 - DNA, 110 bp, synthetic construct
  source 1..110: mol_type = other DNA
gggcagcagtaggtgggtggcaccttaggctgggagcccaagcaacatcctgtcactcgcataaagctgcacggagtctcacgggtgcttcggtgcatcccatctcatga

SEQ ID NO: 48988 - DNA, 110 bp, synthetic construct
  source 1..110: mol_type = other DNA
ctcgcataaagctgcacggagtctcacgggtgcttcggtgcatcccatctcatgactgagagcttggatcagagaggtctagtcattcttccagggtcacagagctgaga

SEQ ID NO: 48989 - DNA, 110 bp, synthetic construct
  source 1..110: mol_type = other DNA
gcatcctcatggatcctagtcaggttcgtaaaccactgagccgagaaggaaactccctctatgcaccttcttctgtacattttagatcatttctagattacttaaaatag

SEQ ID NO: 48990 - DNA, 110 bp, synthetic construct
  source 1..110: mol_type = other DNA
aaggaaactccctctatgcaccttcttctgtacattttagatcatttctagattacttaaaatagctaatacaatataaattgttacttaaatagctggtagtgcacaac

SEQ ID NO: 48991 - DNA, 110 bp, synthetic construct; identical to SEQ ID NO: 48989
  source 1..110: mol_type = other DNA

SEQ ID NO: 48992 - DNA, 110 bp, synthetic construct; identical to SEQ ID NO: 48990
  source 1..110: mol_type = other DNA

SEQ ID NO: 48993 - DNA, 110 bp, synthetic construct
  source 1..110: mol_type = other DNA
aatgctaccatcttttagcaccaaggtcagagtacaacgtttgtgagtccaataactgtttttagacttgagctgattaagcacaatgactcttttaaagggctttattt

SEQ ID NO: 48994 - DNA, 110 bp, synthetic construct
  source 1..110: mol_type = other DNA
ctgtttttagacttgagctgattaagcacaatgactcttttaaagggctttatttaattaaccctgttgattatacataaatactgataagatgtgatgcagaatgatct

SEQ ID NO: 48995 - DNA, 110 bp, synthetic construct
  source 1..110: mol_type = other DNA
tccttggtcctaacactttctgagtccccctgtcagaagcagtccctacaacccaagttctggctactgaatcattcacatttaggctcttcaggcctccctgtaattct

SEQ ID NO: 48996 - DNA, 110 bp, synthetic construct
  source 1..110: mol_type = other DNA
agttctggctactgaatcattcacatttaggctcttcaggcctccctgtaattctgttcactgtgggaccaggaaatttgcttcttgctgcacagagatgtattcatgtc

SEQ ID NO: 48997 - DNA, 110 bp, synthetic construct
  source 1..110: mol_type = other DNA
tgggggtaggagtgactgttgaattgctgcaatgggtccttgaggatgatgacaatgttttgaacctaggaagaggtcatggtctcacaacattgtgaactgactacata

SEQ ID NO: 48998 - DNA, 110 bp, synthetic construct
  source 1..110: mol_type = other DNA
ggagcctttactgaatgccctttatgtgtccagcattgtgctgggtaggatctgtctgtttctagctcacggctgagggaaggagaggaatctgtgatgttaggtaaatg

SEQ ID NO: 48999 - DNA, 110 bp, synthetic construct
  source 1..110: mol_type = other DNA
ctgtttctagctcacggctgagggaaggagaggaatctgtgatgttaggtaaatggcgtgagaaaggtctgtttggggagccgtgtatgggtggtcgtatgagggtctct

SEQ ID NO: 49000 - DNA, 110 bp, synthetic construct
  source 1..110: mol_type = other DNA
gtgggtcatcgtggtacattttccagtatgttgacttgttctttctttaaaaatgagcaatgtcagaatgctttatgcccatgagcctacttactcactgaatcttgaaa

SEQ ID NO: 49001 - DNA, 110 bp, synthetic construct
  source 1..110: mol_type = other DNA
ctctgaggctgtcagggcatgcgtggtgctgggaaggtactctctgaatgctgtgtcctgggaccctcagagctgacaagccctctgtttccagggagttcagcaccaga

SEQ ID NO: 49002 - DNA, 110 bp, synthetic construct
  source 1..110: mol_type = other DNA
gaccagatattcttgacccagaacttgttggattttcagaactcagtctctcagaagggagagtcaggatggagcagctctgcatgaattattaatgggcattaataaca

SEQ ID NO: 49003 - DNA, 110 bp, synthetic construct
  source 1..110: mol_type = other DNA
ccaccagcttgagctgacaaagtcagtgggtgtgactgtgagaaacagaaagacgggaagaagggagcaaagccgactgcttcctaatgccagtgcgtgtccacatgtga

SEQ ID NO: 49004 - DNA, 110 bp, synthetic construct
  source 1..110: mol_type = other DNA
aaggcagttgacaggtctgagtagttggcatgaggagatgggacacggggatcccggttcttccaaagcagaaggctgctcaaccagtggaggtgggggaggaagaccca

SEQ ID NO: 49005 - DNA, 110 bp, synthetic construct
  source 1..110: mol_type = other DNA
ggttcttccaaagcagaaggctgctcaaccagtggaggtgggggaggaagacccatggagaagagcccagccccaggccagggtgggactgagtgagtggtcaagggcag

SEQ ID NO: 49006 - DNA, 110 bp, synthetic construct
  source 1..110: mol_type = other DNA
gtagccaaagagaaaaagacaagccaatcctgtccctctcaggatttaccgtcctgtctgagaaagacattgctcaatccctcctggatgataagcactgggggaagggc

SEQ ID NO: 49007 - DNA, 110 bp, synthetic construct
  source 1..110: mol_type = other DNA
gtctgagaaagacattgctcaatccctcctggatgataagcactgggggaagggcacagaaggttatggggaatctagtttaaacggagaggagcagagttcctgtcatg

SEQ ID NO: 49008 - DNA, 110 bp, synthetic construct
  source 1..110: mol_type = other DNA
aaagataataatggaaaagggtgtatatgtccaaaggcatatttccttcacttatgttctttttcacaaagaaagtaaaacagggagcatccatccccacagacctttct

SEQ ID NO: 49009 - DNA, 110 bp, synthetic construct
  source 1..110: mol_type = other DNA
aaataacaaataataaaggactgggaaaagccatcatcaggagaaaaagctccatgccatcacccctgaaaagtggcagcaaacaaaagatagaaaactccagagggaac

SEQ ID NO: 49010 - DNA, 110 bp, synthetic construct
  source 1..110: mol_type = other DNA
acagtctgaaatgaaattaggtttcaaaaatcagagtcaattcacaaaaatcagaagcttatcacttttctcctttctcgccttcctcctagttttgatgctaggaaaga

SEQ ID NO: 49011 - DNA, 110 bp, synthetic construct
  source 1..110: mol_type = other DNA
cctctctgtccttttaacgccattgccttcacaaaccaatgctaactcctgccatgttatacatgctaactaaagaatttccagtccagatgtttgcaatggataacaaa

SEQ ID NO: 49012 - DNA, 110 bp, synthetic construct
  source 1..110: mol_type = other DNA
aaagcccttatgcataatgcttatgagaacttacggtgaatttgtactgctacaaaagggcattaggacctgaaacctaggactgaacaaacccttcagagactctttgg

SEQ ID NO: 49013 - DNA, 110 bp, synthetic construct
  source 1..110: mol_type = other DNA
gacttatgtgggtgcatcccatgggtggaatataagtcacatgtctgcactgtagtgacaagggaagctaagaagtaagtttttgctgaatttcacatggagaaggcaag

SEQ ID NO: 49014 - DNA, 110 bp, synthetic construct
  source 1..110: mol_type = other DNA
cacacatacaccaattggctttttaaaatggctggtagagtatatttactgctgtgggctagctttttcttaactagtgaatgtttattactcttaggaataaaagtttt

SEQ ID NO: 49015 - DNA, 110 bp, synthetic construct
  source 1..110: mol_type = other DNA
aatggcgatagagaaaaatgtgagcttagatcaggaatgctaaatgaaattgcgatctcttttatgcgtttcatgttggaatgtttcaaaacttatgtaaggtgttcccg

SEQ ID NO: 49016 - DNA, 110 bp, synthetic construct
  source 1..110: mol_type = other DNA
accaggattagagggactggcccacacagtcacagaatactggcccagacagcactgaatacctgcaaaccatgtgctacaggaataaagacattaccgtaaagctcaac

SEQ ID NO: 49017 - DNA, 110 bp, synthetic construct
  source 1..110: mol_type = other DNA
tgaatacctgcaaaccatgtgctacaggaataaagacattaccgtaaagctcaaccctatgcccattacagcccacagccttgcttcctgcaggaaggaggaaggggctg

SEQ ID NO: 49018 - DNA, 110 bp, synthetic construct
  source 1..110: mol_type = other DNA
cttttataaatagaggcataaatactctaaatggtaatgacagggatggagtgggatagttaggtagttgtagaagtcccaataggggaccatagatagagggaaaccta

SEQ ID NO: 49019 - DNA, 110 bp, synthetic construct; identical to SEQ ID NO: 49018
  source 1..110: mol_type = other DNA

SEQ ID NO: 49020 - DNA, 110 bp, synthetic construct
  source 1..110: mol_type = other DNA
gagacagacagacccagccctgcctgtcctcccactggtgcctcgctggactagccagagctcgatggggaagggtggacccggaaaggggaaaccacagcaaacagaag

SEQ ID NO: 49021 - DNA, 110 bp, synthetic construct
  source 1..110: mol_type = other DNA
cagagctcgatggggaagggtggacccggaaaggggaaaccacagcaaacagaagaaacaggaccactgaatggacggggtcactaagacagcctcactactgaaacttg

SEQ ID NO: 49022 - DNA, 110 bp, synthetic construct
  source 1..110: mol_type = other DNA
cggcctaggccatcttataaaaaaaaaaaagaacccagcaattatcaccttacatagaggaaattcctagtattagtgggagggagaagtagcccttgggggaaaaaatc

SEQ ID NO: 49023 - DNA, 110 bp, synthetic construct
  source 1..110: mol_type = other DNA
gttgatgacagttactcatagctaatgtccatctccccaagactaaatcagaacaactcaataacggaagagcacttggaaatgttaggtgctgagtagttagcagacag

SEQ ID NO: 49024 - DNA, 110 bp, synthetic construct
  source 1..110: mol_type = other DNA
gtgtggctcggattcgatccagggaatttccataggcagtggggaaaaaaagtacaaacttctagttataagataaataagtactaaggggagttcctgtcatggcgcag

SEQ ID NO: 49025 - DNA, 110 bp, synthetic construct
  source 1..110: mol_type = other DNA
gatccagggaatttccataggcagtggggaaaaaaagtacaaacttctagttataagataaataagtactaaggggagttcctgtcatggcgcagtggttaatgaatcca

SEQ ID NO: 49026 - DNA, 110 bp, synthetic construct
  source 1..110: mol_type = other DNA
ggcagatacatattctcttatatcattatcttctgtctgctctaggagccaatgaagcttttgggggagggggagctgaaattacttcaggcccacagcttcccttgccc

SEQ ID NO: 49027 - DNA, 110 bp, synthetic construct
  source 1..110: mol_type = other DNA
gatggatgccctgaagccatttgaagcaacaggcttgggttggaaagtaaccagactttattaatctgtccagctcccattgtttggtaaagcacactcaagacagactt

SEQ ID NO: 49028 - DNA, 110 bp, synthetic construct
  source 1..110: mol_type = other DNA
gccatagtcatgatcatttcccgtagcagaaattgagagaagcagctcaaactattgtggtgttgaaacaggagggaagggggtagggcacaacgttcaaaagaatgaca

SEQ ID NO: 49029 - DNA, 110 bp, synthetic construct
  source 1..110: mol_type = other DNA
tctggttctaaaatatttactttcctttagcagcagtctgccctttggtccgatagttaaaaatttattccactcaccataacattttggcttcagaggtcttttctttg

SEQ ID NO: 49030 - DNA, 110 bp, synthetic construct
  source 1..110: mol_type = other DNA
ttgtctcataggtacaaaaaccaggtgccaataaacgtccatgcaaaccctgggaagtatattattgaaagccgatatggaatgcacactctggagataaatgcgtaaga

SEQ ID NO: 49031 - DNA, 110 bp, synthetic construct
  source 1..110: mol_type = other DNA
tttgttaaccactgtgccacaacggaaactcctggatgcaggctttctgaattctgggagggaaccatttctcatctgtaagcttattcaccataaaactggaaaagtaa

SEQ ID NO: 49032 - DNA, 110 bp, synthetic construct
  source 1..110: mol_type = other DNA
gctggccttattttccccaacttatttgattgcattttttaaaaattagggcagaagataactacagaaattcttagccaaattttgtaaccctaagacatgcttctaga

SEQ ID NO: 49033 - DNA, 110 bp, synthetic construct
  source 1..110: mol_type = other DNA
agataactacagaaattcttagccaaattttgtaaccctaagacatgcttctagaacggagtccttctgaggattggagctgtaaggggctctggagggctcctggttgt

SEQ ID NO: 49034 - DNA, 110 bp, synthetic construct
  source 1..110: mol_type = other DNA
ccctcaatccataagcaccagtcttaaggaacttgagttggttttacatctttattcatgctccccgtctttgcacttacgtcgtacatatatcattcaaggagtccaac

SEQ ID NO: 49035 - DNA, 110 bp, synthetic construct
  source 1..110: mol_type = other DNA
tcatgctccccgtctttgcacttacgtcgtacatatatcattcaaggagtccaacaagctacgtaaacagtctctcctgcatccctctcagccaggtaaatggcgggggg

SEQ ID NO: 49036 - DNA, 110 bp, synthetic construct
  source 1..110: mol_type = other DNA
gagatctgtcagctggagagataacaaatacaagcaaaagccatttcgggctttgaactgctgctctgaaatgattaccaggaaaatacaaataaatcatgtcttctgaa

SEQ ID NO: 49037 - DNA, 110 bp, synthetic construct
  source 1..110: mol_type = other DNA
aactgctgctctgaaatgattaccaggaaaatacaaataaatcatgtcttctgaaggacagattcattacggaacttgttaagttggggttttaaatatgtaagatactt

SEQ ID NO: 49038 - DNA, 110 bp, synthetic construct
  source 1..110: mol_type = other DNA
ctatcatttgtgtttctatagtaactgtaaggtcctaggctaattcagtgctaaggctgcagtgtagcctcaagaatatataactttcatccagaactgcttggtaggaa

SEQ ID NO: 49039 - DNA, 110 bp, synthetic construct
  source 1..110: mol_type = other DNA
tgcaaccaccgtgaacaagaaacctggtcagggaacaccaaattcagctaatacccaaggaactgcaacaccaaatcctcaggtccctaattatcctccaaattatattt

SEQ ID NO: 49040 - DNA, 110 bp, synthetic construct
  source 1..110: mol_type = other DNA
aatgataaataaaataaaaaggggaaaaacccaaataaatgttatgggggaaatttctgctgacttagtgttttgttgtgtttttgtgagctgtaaaactgcatgaaaac

SEQ ID NO: 49041 - DNA, 110 bp, synthetic construct
  source 1..110: mol_type = other DNA
gcctgtatggaggctgaattctaaaagctacagtttatatgaaatcatagcaccataaaaccaaatatcttaggccagctatcacacctatatttgaccttgcttatctt

SEQ ID NO: 49042 - DNA, 110 bp, synthetic construct
  source 1..110: mol_type = other DNA
atgatcgcagaaaatctgtcccattggttggtcacaagggagactgggcaaaagaagatgaatacaaagtataaatcattcaccacaactaagaaattatatttagaatt

SEQ ID NO: 49043 - DNA, 110 bp, synthetic construct
  source 1..110: mol_type = other DNA
gtgacaacaatggagtggtgggagggacactagctctgcaatcagagtctgtcattgtaattcctttcctcctggcgtcaggttttcatttgaaaatgggaataattctg

SEQ ID NO: 49044 - DNA, 110 bp, synthetic construct
  source 1..110: mol_type = other DNA
ttctgttcacactcttccctttgcttgtagttatttcccccacacaccccccaccctttccttggccactctgttggtgccttacttccctgaggtttctgttcagatgt

SEQ ID NO: 49045 - DNA, 110 bp, synthetic construct
  source 1..110: mol_type = other DNA
gtcctgattcatagaactaactttattattggcttaagaaagaagtacaccctgaaacaactcctcgatgtttgggtcttttatgattagagccaagaacatcactcttg

SEQ ID NO: 49046 - DNA, 110 bp, synthetic construct
  source 1..110: mol_type = other DNA
aacaactcctcgatgtttgggtcttttatgattagagccaagaacatcactcttggaccctatgagcagagataaacttgaattcttttcattttagatcattttattct

SEQ ID NO: 49047 - DNA, 110 bp, synthetic construct
  source 1..110: mol_type = other DNA
cacagtggttgggaacatggaaagaaaaaaagtaccttctgctctagaagaaaatagaaaacttcctgtcatgagatctagcagagtaaacactggaaggaatgtaagtg

SEQ ID NO: 49048 - DNA, 110 bp, synthetic construct
  source 1..110: mol_type = other DNA
acacaggcatcatatataaaaatggtggggcttttaaaaacataccaaatgttcaacaacaagctatcaggtcacagatggaaaactgatttcaaagacatctttcatat

SEQ ID NO: 49049 - DNA, 110 bp, synthetic construct
  source 1..110: mol_type = other DNA
acaacaagctatcaggtcacagatggaaaactgatttcaaagacatctttcatatgtaaattctaaataatttactcaagaacatggcttaggctaaaaaatattaccag

SEQ ID NO: 49050 - DNA, 110 bp, synthetic construct
  source 1..110: mol_type = other DNA
gcatctgaatattatctgcatgcattcatttctaatcattcaacccagcaagctgccattcttcaaatcccaaagtcctgagaggcatgaatattcatgagggtcagtga

SEQ ID NO: 49051 - DNA, 110 bp, synthetic construct
  source 1..110: mol_type = other DNA
ccattcttcaaatcccaaagtcctgagaggcatgaatattcatgagggtcagtgaactatagattctgtacagttttaagaggatagaaggtcaatggtaactccatgaa

SEQ ID NO: 49052 - DNA, 110 bp, synthetic construct
  source 1..110: mol_type = other DNA
gcaggtcaacaaggtaacaaggcagcatttctcaagcacagaatatgccccactaacttcataagctactcgagttctccacaatgtgctactaaaggatgaaaggtgta

SEQ ID NO: 49053 - DNA, 110 bp, synthetic construct
  source 1..110: mol_type = other DNA
acttcataagctactcgagttctccacaatgtgctactaaaggatgaaaggtgtatttctgcttggggacctattaaaaaatccaagattacctgagtccttgaatactc

SEQ ID NO: 49054 - DNA, 110 bp, synthetic construct
  source 1..110: mol_type = other DNA
actgtgagcatcacttagtgatcagacaaccatgaaaaggtgaaaaaaatctcaaagtttggtcagtgcagaggttactcctgtaagtggccaattctaggaaatttttc

SEQ ID NO: 49055 - DNA, 110 bp, synthetic construct
  source 1..110: mol_type = other DNA
agtttggtcagtgcagaggttactcctgtaagtggccaattctaggaaatttttctgcagtcagacaggagctaaagagaaccaaaatagaggctgaaaaaaggctaccg

SEQ ID NO: 49056 - DNA, 110 bp, synthetic construct
  source 1..110: mol_type = other DNA
atccatccaagctaatggtgaacctcaccctaagtgtattttgtattaattaatcatggtagcaatccacgtgtctaatttataaataacatacatatcttcaggagtga

SEQ ID NO: 49057 - DNA, 110 bp, synthetic construct; identical to SEQ ID NO: 49056
  source 1..110: mol_type = other DNA

SEQ ID NO: 49058 - DNA, 110 bp, synthetic construct
  source 1..110: mol_type = other DNA
aggcttcataggttaggaaaacagaccacccagaactggagacctctgattccatgttctgaggagccaggaactccagcctggggcagagtggatgccaggacaagccc

SEQ ID NO: 49059 - DNA, 110 bp, synthetic construct
  source 1..110: mol_type = other DNA
gcatgtggaagttctcaggggccagggatcaaacctgcactgcaggtgcaactgtaatcctttctagaagagtatatgagactataccttacctgacttttatacttgct

SEQ ID NO: 49060 - DNA, 110 bp, synthetic construct
  source 1..110: mol_type = other DNA
aggtaatttagactacacaaaagcatgcccttgtaagttctggagttccagctgccctgatatttctggcaaacacacacccaacgtggataacagcagctctttgtgct

SEQ ID NO: 49061 - DNA, 110 bp, synthetic construct
  source 1..110: mol_type = other DNA
gttttgtagtaactgtagtaattgtagaaccagattcagatctttgggagaatttgtagcaaagactaatgagtgagttttatcttaattcaaactcgatagtgatactt

SEQ ID NO: 49062 - DNA, 110 bp, synthetic construct
  source 1..110: mol_type = other DNA
gtatctttgttcttgtgaattgaaaaaggcaaatcttttttttttttccccagggcaaattgttgtcagatattgcatatcatggtttgtccccaccaggtagtgggagg

SEQ ID NO: 49063 - DNA, 110 bp, synthetic construct
  source 1..110: mol_type = other DNA
aggcagggctatctgcttacctcagtctaccaactcaaatgctaatctcacccggaaacatcttcacagacacagccagaggtttgtttgtttttttttcttttttcatt

SEQ ID NO: 49064 - DNA, 110 bp, synthetic construct
  source 1..110: mol_type = other DNA
gaatgtgaagcatcagaaatcaaacacgtaattaccaaggatatattactgactgtattacatacccaactcctgattatcacgtggcaatggagaacagtgaaaaataa

SEQ ID NO: 49065 - DNA, 110 bp, synthetic construct; identical to SEQ ID NO: 49064
  source 1..110: mol_type = other DNA

SEQ ID NO: 49066 - DNA, 110 bp, synthetic construct
  source 1..110: mol_type = other DNA
tgctttcaatttacacaaacaaaaatacagattgcccataatttgtcctattccccgccccattaaaaaagaagactaaaagaacatgtaatcccaaatttccacccagc

SEQ ID NO: 49067 - DNA, 110 bp, synthetic construct
  source 1..110: mol_type = other DNA
cgccccattaaaaaagaagactaaaagaacatgtaatcccaaatttccacccagcacacccaggtacacaagaatttgaggaaagcctgacctcaccagagggacccagt

SEQ ID NO: 49068 - DNA, 110 bp, synthetic construct
  source 1..110: mol_type = other DNA
gtaaatactccatttctacattggctgatggctgttgaggatggaaatgatctgttagtaaatgattataaagtacttgcctaatcaaaatgagggctcagtaacccttt

SEQ ID NO: 49069 - DNA, 110 bp, synthetic construct
  source 1..110: mol_type = other DNA
tccccaggtattttactgtctgctgtcttagtcacttccagcatcctgggaataaagttgggggtaggtaagaatgacatccctcccattctgcccagtgtctggctcag

SEQ ID NO: 49070 - DNA, 110 bp, synthetic construct
  source 1..110: mol_type = other DNA
agttgggggtaggtaagaatgacatccctcccattctgcccagtgtctggctcagtttgaaagaaaaccagccatttctgattccacatcggctctcctattggagttag

SEQ ID NO: 49071 - DNA, 110 bp, synthetic construct
  source 1..110: mol_type = other DNA
agttgcagatttagaacaccacaaacccaagccccacatcccatgcaaggtctgtttcaggtttacaaggtcaatttcccaaagtggagagtgctttccactctcaggga

SEQ ID NO: 49072 - DNA, 110 bp, synthetic construct
  source 1..110: mol_type = other DNA
ttcaggtttacaaggtcaatttcccaaagtggagagtgctttccactctcagggacatgtcaaggacaagagaaggaaagatcgagagacacacatagcaaacctatgac

SEQ ID NO: 49073 - DNA, 110 bp, synthetic construct
  source 1..110: mol_type = other DNA
agactgctgtcccaaagaccctgagggatggggaatgagtgttgtttaaagccacagagcttgcgggtgatttgttagacagcgctagatattaacatggagcccttgca

SEQ ID NO: 49074 - DNA, 110 bp, synthetic construct
  source 1..110: mol_type = other DNA
agagcttgcgggtgatttgttagacagcgctagatattaacatggagcccttgcaatttcatgaaagtgaagtggtgtacagcaaacttttgtaaagcaggggtttcctg

SEQ ID NO: 49075 - DNA, 110 bp, synthetic construct; identical to SEQ ID NO: 49073
  source 1..110: mol_type = other DNA

SEQ ID NO: 49076 - DNA, 110 bp, synthetic construct; identical to SEQ ID NO: 49074
  source 1..110: mol_type = other DNA

SEQ ID NO: 49077 - DNA, 110 bp, synthetic construct
  source 1..110: mol_type = other DNA
atcttctcatgaattgtgtgtgtgcacacattggtatgtgtgtggattgtgggaaatgctttggataaaattgcaagctcttctagttttcctaatgacaatgtctgaca

SEQ ID NO: 49078 - DNA, 110 bp, synthetic construct
  source 1..110: mol_type = other DNA
atgctttggataaaattgcaagctcttctagttttcctaatgacaatgtctgacaatttctaacaatctgaaaacattctctgctttctttagtacaccatagagttgtg

SEQ ID NO: 49079 - DNA, 110 bp, synthetic construct
  source 1..110: mol_type = other DNA
ctggaagtgcttttgaaacttgattcaaagccagacactgacctataatcctagctttctagggagcaaaggtctccttcaccgtggaggtaaagagaaacatactgtga

SEQ ID NO: 49080 - DNA, 110 bp, synthetic construct
  source 1..110: mol_type = other DNA
tttctagggagcaaaggtctccttcaccgtggaggtaaagagaaacatactgtgaagttagagtaactgataattctggcttgcccaggaccatcttggttttaacactg

SEQ ID NO: 49081 - DNA, 110 bp, synthetic construct; identical to SEQ ID NO: 49079
  source 1..110: mol_type = other DNA

SEQ ID NO: 49082 - DNA, 110 bp, synthetic construct; identical to SEQ ID NO: 49080
  source 1..110: mol_type = other DNA

SEQ ID NO: 49083 - DNA, 110 bp, synthetic construct
  source 1..110: mol_type = other DNA
tttttcatctttgctctctagttcctggggcttcccccaatagccagtatggttctgtttaggttatattacctcatctgcaattagatttgtaccattcttttctggta

SEQ ID NO: 49084 - DNA, 110 bp, synthetic construct
  source 1..110: mol_type = other DNA
tgtttaggttatattacctcatctgcaattagatttgtaccattcttttctggtagcaaaagtaggatatgggtttttttaatatcccaaaacctgaatttccttgaaaa

SEQ ID NO: 49085 - DNA, 110 bp, synthetic construct
  source 1..110: mol_type = other DNA
aaggggtcctggagttcctactgtggctcagtggattaaggatccagcatggccacagctgtggcttaggtcacagctgtggcttgaaatcgatccttggtctgggaact

SEQ ID NO: 49086 - DNA, 110 bp, synthetic construct
  source 1..110: mol_type = other DNA
cagctgtggcttaggtcacagctgtggcttgaaatcgatccttggtctgggaactttcatgtgcctggggcatgactgaaaaaggggtaaaaagggggctcctgataccc

SEQ ID NO: 49087 - DNA, 110 bp, synthetic construct
  source 1..110: mol_type = other DNA
cctggcttcacttttcaagagaccaaccatcattcccagattcctgggacgcatctgcacatagtacaagtacctatgtatgtgggttgttggggttttttttaaatata

SEQ ID NO: 49088 - DNA, 110 bp, synthetic construct
  source 1..110: mol_type = other DNA
tgcacatagtacaagtacctatgtatgtgggttgttggggttttttttaaatataatgagcataaaatacacactgccctgcaacttgctttttttcagataagctacat

SEQ ID NO: 49089 - DNA, 110 bp, synthetic construct
  source 1..110: mol_type = other DNA
tagcccaacttgcttttaaacgcagcacatagaacatactgctcctaggcatctattaaaaaccttttgcataattaagtgtgtcctgtaatcagtgctaacaggaaaga

SEQ ID NO: 49090 - DNA, 110 bp, synthetic construct
  source 1..110: mol_type = other DNA
cacatagaacatactgctcctaggcatctattaaaaaccttttgcataattaagtgtgtcctgtaatcagtgctaacaggaaagagctaatctttcattaaattagtttt

SEQ ID NO: 49091 - DNA, 110 bp, synthetic construct
  source 1..110: mol_type = other DNA
gggctgggaagggtcttctgctgtcttcaccctacacgtgcaaataagtgtgctgagcagttacgttggaggattattgtgcacagcacgaaacagatgtgattggtgac

SEQ ID NO: 49092 - DNA, 110 bp, synthetic construct
  source 1..110: mol_type = other DNA
cctctctctcccctcatcttcacctccattgtgcaaacagttactatcctatcgaacaaattatgatttctcgttctgaaaactccttgaggccctggataatgtcttat

SEQ ID NO: 49093 - DNA, 110 bp, synthetic construct
  source 1..110: mol_type = other DNA
gttactttctaaaatccccacttattcattggctggtgacctttagggcttcgttattctttagctatgaaatggaaataataacagctgctacccttgtggaattgttg

SEQ ID NO: 49094 - DNA, 110 bp, synthetic construct
  source 1..110: mol_type = other DNA
agggaactccctgcttttgctacatcattagctgggtgtctgggggaagacaagccccttcccttcttgcctctcagagtctcatgacactgtagcatatgaagacttta

SEQ ID NO: 49095 - DNA, 110 bp, synthetic construct
  source 1..110: mol_type = other DNA
tgggtgagaagctcggttaaataaggacagacaaggctcagtgaggtaagatcgttttattcatatcttcctctctaggtacacgagggtgagacacctgtttgcaaagg

SEQ ID NO: 49096 - DNA, 110 bp, synthetic construct
  source 1..110: mol_type = other DNA
gattcctgacctcaaatccactctacccaaaggttctttcttttctcaggttccttatgcacttggatgtctacaggctgaagaagcctgtggccaagagctcagactgc

SEQ ID NO: 49097 - DNA, 110 bp, synthetic construct
  source 1..110: mol_type = other DNA
tatgcacttggatgtctacaggctgaagaagcctgtggccaagagctcagactgccttaaagttcctgtggctactcactcacaggagcacacaggccttctctgatcac

SEQ ID NO: 49098 - DNA, 110 bp, synthetic construct
  source 1..110: mol_type = other DNA
aaaaaaggaaagaaaatagagaaaagggagtaaagtggtcattaatatggtccacaggtgaggtcactatgaaaaagagcgtgcccactccagctccgtccagtgtggtg

SEQ ID NO: 49099 - DNA, 110 bp, synthetic construct
  source 1..110: mol_type = other DNA
aggtgaggtcactatgaaaaagagcgtgcccactccagctccgtccagtgtggtgctgctgcccagcaagacccaagtaagacaggatggccagttcccagatgcccaag

SEQ ID NO: 49100 - DNA, 110 bp, synthetic construct
  source 1..110: mol_type = other DNA
cgaggcctatgaagctatatgaatttaaattaagtaaccttaagtaaagctaaaaattcagttccaggagttcccattgtggctctgcaggttaaggactggatcttgtc

SEQ ID NO: 49101 - DNA, 110 bp, synthetic construct
  source 1..110: mol_type = other DNA
aaccttaagtaaagctaaaaattcagttccaggagttcccattgtggctctgcaggttaaggactggatcttgtctctgtgaggatgccagttcaacccttggcctggct

SEQ ID NO: 49102 - DNA, 110 bp, synthetic construct
  source 1..110: mol_type = other DNA
tgattctaaagaattagtggctatggttgagtatatacagcaaaaaataatgctagaaaaattggtcttttccatcccattaggataattttagtgcacggtttacaggc

SEQ ID NO: 49103 - DNA, 110 bp, synthetic construct
  source 1..110: mol_type = other DNA
gaaaaattggtcttttccatcccattaggataattttagtgcacggtttacaggcttaatatgggcacagggaggaagcctttatgttttcagagggaagaaaagtccac

SEQ ID NO: 49104 - DNA, 110 bp, synthetic construct
  source 1..110: mol_type = other DNA
gtttcaagaccttcaggtgctgggccgtgtcttcctaagcagacatttcagaaatagactcttgggtactttgtcgagctagggtttgatcatcgtagagtataagagca

SEQ ID NO: 49105 - DNA, 110 bp, synthetic construct
  source 1..110: mol_type = other DNA
gaggtcaggacagattggtgctgctaagcccaaggatgcacctttgtcagctcgtggttctgaacacctgtaatctctgaccacctggaatcactctcctcctgtggtct

SEQ ID NO: 49106 - DNA, 110 bp, synthetic construct
  source 1..110: mol_type = other DNA
aaaattaagagcctatctatgaaattcttcactgctaccttctgatcaaggaagtaagcccatttatttttcctagtgaaaacagtttttatgcgctcgggttgatggcg

SEQ ID NO: 49107 - DNA, 110 bp, synthetic construct
  source 1..110: mol_type = other DNA
gctgctggtccgaggatgacacagtgactagcaaagccttcagctttctgcacgcagctgcctcttcctgagagcatgaaggtatttgaattatgccattggaagtacca

SEQ ID NO: 49108 - DNA, 110 bp, synthetic construct
  source 1..110: mol_type = other DNA
aggtgctgcagggcactgaggcccaggatgacaaatgcctgaagacaatgactctccttcctgatcaagatgcagctggactgagaccacacctggcagataagtgccta

SEQ ID NO: 49109 - DNA, 110 bp, synthetic construct
  source 1..110: mol_type = other DNA
ggtgcatctactgtgacggctaggggccttataaaagggagggagcaaagtcaggttcagggagagagcttggaagatgtcataccgatagctttgaaggtggaggatgg

SEQ ID NO: 49110 - DNA, 110 bp, synthetic construct
  source 1..110: mol_type = other DNA
ttcagggagagagcttggaagatgtcataccgatagctttgaaggtggaggatggggccttgtgccaaggaatgaaggatgtccccagaagctagagaagcaaaaagaca

SEQ ID NO: 49111 - DNA, 110 bp, synthetic construct
  source 1..110: mol_type = other DNA
ttgttttggccttagaaagtattactttttaaaatttctttgatataatttggaccatctgaactatagtagcactgtcctcaagtactgacaagggctcctgggggaag

SEQ ID NO: 49112 - DNA, 110 bp, synthetic construct
  source 1..110: mol_type = other DNA
aaagtattactttttaaaatttctttgatataatttggaccatctgaactatagtagcactgtcctcaagtactgacaagggctcctgggggaagtgtgttaagagcttg

SEQ ID NO: 49113 - DNA, 110 bp, synthetic construct; identical to SEQ ID NO: 49111
  source 1..110: mol_type = other DNA

SEQ ID NO: 49114 - DNA, 110 bp, synthetic construct; identical to SEQ ID NO: 49112
  source 1..110: mol_type = other DNA

SEQ ID NO: 49115 - DNA, 110 bp, synthetic construct
  source 1..110: mol_type = other DNA
actttctggccaaaaggtggatgaaagtaacaggaggtaatcattataactaccaatttaaaaaagtcctaatcttgataaactcactaattgtacgtacttttacattg

SEQ ID NO: 49116 - DNA, 110 bp, synthetic construct
  source 1..110: mol_type = other DNA
ttgacttatggaactccttctctccttttttcctcccgtgcacgtttatggccatccttatacactgtgcttcccgtggcaactcattgctggctccaatttggcaggta

SEQ ID NO: 49117 - DNA, 110 bp, synthetic construct
  source 1..110: mol_type = other DNA
tttcctttgaatcatgatgagttgttttagatctagctctttggtacagttgaatttagtgtcttgattcagtgtgagaattttttcccatttcccatgctttatgtaca

SEQ ID NO: 49118 - DNA, 110 bp, synthetic construct
  source 1..110: mol_type = other DNA
agggggtcagggagagtttcaccaaggaggtgctgctcaagctgagactgaaggaagggggcccctctgaagggactggaaagaggccagtctgctttcctgtctaaaga

SEQ ID NO: 49119 - DNA, 110 bp, synthetic construct
  source 1..110: mol_type = other DNA
ggagggggacgaaaaggagggccttttaagctcagatccctaacaggctccatgcctcagggagccatgaacctgacacagacaagggcaccaggttggtgctttgaacc

SEQ ID NO: 49120 - DNA, 110 bp, synthetic construct
  source 1..110: mol_type = other DNA
agtttctcctgtcaccagccactgatgccattttattcagtctcttttgtagaccagctcctgggtccctgacatggcctggcttgccgagtttggtcatatgctcaaag

SEQ ID NO: 49121 - DNA, 110 bp, synthetic construct
  source 1..110: mol_type = other DNA
aaagttttcagtttgactccaagcaaatcaactgccttataagcaaccaacaacaataacaaaaatactctaaataacatgacagaatcaagtcattgcattgtattttc

SEQ ID NO: 49122 - DNA, 110 bp, synthetic construct
  source 1..110: mol_type = other DNA
gaccagaccgcaatgtggatgcaccttggacagcggacatcctgggcgcagcagcagcaaagttccagctcccaccatttcccacgtggaaatccagcaaagaaaaacaa

SEQ ID NO: 49123 - DNA, 110 bp, synthetic construct
  source 1..110: mol_type = other DNA
agcaaagttccagctcccaccatttcccacgtggaaatccagcaaagaaaaacaagctcacggtcatgtgatccaggtttctcatcctctgcatctgtctccatgtgtaa

SEQ ID NO: 49124 - DNA, 110 bp, synthetic construct
  source 1..110: mol_type = other DNA
cccagatatattgcatttcaacttgtccaagactgccctgcgaataccgccgactgacagctccactgaccgcctataaaatcctacgtgcaagggaataaatctccttt

SEQ ID NO: 49125 - DNA, 110 bp, synthetic construct
  source 1..110: mol_type = other DNA
gagaggacacactatatactctcaggcaggtatgcctggtgtccccctttctcgggaaatcaccattgagaaaaacgccacttggagctaaaccatttataaaggtacca

SEQ ID NO: 49126 - DNA, 110 bp, synthetic construct
  source 1..110: mol_type = other DNA
catcttagagttctaaataggaagcagatgtaaatccactgggaataccttcatccgcaagtaactgaaacccagctctcagcgactctatgaatcaggacttgtatttc

SEQ ID NO: 49127 - DNA, 110 bp, synthetic construct
  source 1..110: mol_type = other DNA
cgcaagtaactgaaacccagctctcagcgactctatgaatcaggacttgtatttctcatagaatatgaaatccagggataagcaatttctaacattgttggagctgccac

SEQ ID NO: 49128 - DNA, 110 bp, synthetic construct
  source 1..110: mol_type = other DNA
atactgcatgttgaggagcatgtggagaaagaccaagtgtccatacgttgctagtgagcatacaaactggttgcacaactctagagatcaatatggcaataattagtaaa

SEQ ID NO: 49129 - DNA, 110 bp, synthetic construct
  source 1..110: mol_type = other DNA
gagcatacaaactggttgcacaactctagagatcaatatggcaataattagtaaagacagcatgtctgacaatacagctatgccaattcttggtatataatccagataaa

SEQ ID NO: 49130 - DNA, 110 bp, synthetic construct
  source 1..110: mol_type = other DNA
aagccattctatctcttactttctttcattcattcattcaaaacatatttacttagagtttattagctaaagcagatgttgagtggcagcaagaaaatggttcctacctt

SEQ ID NO: 49131 - DNA, 110 bp, synthetic construct
  source 1..110: mol_type = other DNA
tgcaggcctaacaccagagccacagcaacgtaggactggagctgcatctgtggttcatgctgcagcctgtcgtaacaccagatcctcaaccaattgagtgaggccaggga

SEQ ID NO: 49132 - DNA, 110 bp, synthetic construct
  source 1..110: mol_type = other DNA
cccttggaatagggggacaggtagagtctcctgcttgaaaatcgcttcattcctggattgagggagatgctgtttctgaaatttgggctggaaggggcagagttaaaaaa

SEQ ID NO: 49133 - DNA, 110 bp, synthetic construct
  source 1..110: mol_type = other DNA
atttcagtgagggtgttcgcttcttggattcgggaaattgtggtagagaaagccggcagtttcctgccaggattactgcctgtggaaccagtttaggtggttgtcctaag

SEQ ID NO: 49134 - DNA, 110 bp, synthetic construct
  source 1..110: mol_type = other DNA
ggtcacatcaatgcaactgaagatacccttgttacaagcttacggatgctggtcggtgtatttcagggagctaattttcacattcttgtttgggcagcagagaacggtgc

SEQ ID NO: 49135 - DNA, 110 bp, synthetic construct
  source 1..110: mol_type = other DNA
ctccatggccatctggggcttgcacagcttctgtggtccagcttctccacgggtttgctttctgaagcaccctcacagcccacattggtccaggctggctagcccaagaa

SEQ ID NO: 49136 - DNA, 110 bp, synthetic construct
  source 1..110: mol_type = other DNA
ccatgaccagcgctaagatttccatgaacctagaaagagaaaaatactccatcagcattaaggcaggagaacactttctgatgacataacattgcgaaaggcacatttta

SEQ ID NO: 49137 - DNA, 110 bp, synthetic construct
  source 1..110: mol_type = other DNA
agcaagcttcagaccagagataaactagctaaatccatctatccatctcccctctggactctggactggaaaaaatggagaggatcggccagttattggaaaggagaaaa

SEQ ID NO: 49138 - DNA, 110 bp, synthetic construct
  source 1..110: mol_type = other DNA
gagatcttgatgcaactgacagagtttgacacctactaaaatcgcgaaactttatacaaattggagaccaaatctaaatccacattagccactgtattccactgctccca

SEQ ID NO: 49139 - DNA, 110 bp, synthetic construct
  source 1..110: mol_type = other DNA
acaaattggagaccaaatctaaatccacattagccactgtattccactgctcccatttaattaagccgctaagaaagtagtgccataatttacagatatactcagaggca

SEQ ID NO: 49140 - DNA, 110 bp, synthetic construct
  source 1..110: mol_type = other DNA
ttatgctggactccctccaggagtagattcagctgctcggcatgcagagggaatgtgcgaaactggcttcattttctgtgaaaagagtcccatgtatgggactacaacag

SEQ ID NO: 49141 - DNA, 110 bp, synthetic construct
  source 1..110: mol_type = other DNA
acagacatggtgagtatattcatggcttggctgaaaggggttttttttaaaccaaagtattgttgatttacaatactgtcaatattgtaccggtttctgctgtacagtag

SEQ ID NO: 49142 - DNA, 110 bp, synthetic construct
  source 1..110: mol_type = other DNA
acatagctctgcatatcagtaaaagttgaactttaaacttatcacaacctttcaagaatttcagtcaagctttttatgatcactgagataagcattattagagagttctt

SEQ ID NO: 49143 - DNA, 110 bp, synthetic construct
  source 1..110: mol_type = other DNA
gacgagaactctggggaacactctggattgtttaaatcaccttctccactaaaccctgaaattctaccatcagctcagctacctcttttcagcatctcctcttgtctttt

SEQ ID NO: 49144 - DNA, 110 bp, synthetic construct
  source 1..110: mol_type = other DNA
agctcagctacaggtgcctccgtactttgtataggattttaaacctactccctgtagtcttttgactttggtctttagcagcacatttgttgatatataattgaataatg

SEQ ID NO: 49145 - DNA, 110 bp, synthetic construct
  source 1..110: mol_type = other DNA
tactccctgtagtcttttgactttggtctttagcagcacatttgttgatatataattgaataatgacacagaacaactgcctttctagataatatagcctataacagaat

SEQ ID NO: 49146 - DNA, 110 bp, synthetic construct
  source 1..110: mol_type = other DNA
aaatttagaaagctcagttttgggtctgttaatatggactcagttttgtatagctttataactagaacattagacatcacttctatttagaagacccaatcttggagttc

SEQ ID NO: 49147 - DNA, 110 bp, synthetic construct
  source 1..110: mol_type = other DNA
ggactcagttttgtatagctttataactagaacattagacatcacttctatttagaagacccaatcttggagttcccactgtggcgcagcggaaatgaacccgactagta

SEQ ID NO: 49148 - DNA, 110 bp, synthetic construct
  source 1..110: mol_type = other DNA
gtctgtcctatttgccaaagggttaaatcagttcacttcaaatgtcatttgcctgattttggaactagtcatgtggatgagccaaaatctggtgagaagataaaaataat

SEQ ID NO: 49149 - DNA, 110 bp, synthetic construct
  source 1..110: mol_type = other DNA
attttggaactagtcatgtggatgagccaaaatctggtgagaagataaaaataataggtactagtgagtacttaccataaattgccctttggtttaaagcacacaaataa

SEQ ID NO: 49150 - DNA, 110 bp, synthetic construct
  source 1..110: mol_type = other DNA
tgaagaaaagccaggcaatgttcaaaactcttcgcatttttccttcattgtagccaatcccatcaatgttttaacacacacaaaaaaaaaccctggacactgtgggtaga

SEQ ID NO: 49151 - DNA, 110 bp, synthetic construct
  source 1..110: mol_type = other DNA
aatcccatcaatgttttaacacacacaaaaaaaaaccctggacactgtgggtagagctatgtctgcagactgtcgtgcagactgccacagaagagaactcagagaggtca

SEQ ID NO: 49152 - DNA, 110 bp, synthetic construct
  source 1..110: mol_type = other DNA
aaggcacaagctccatggcttcaccctatggctttgcaccagctcatgctagcggtactgatttgtgccaaaaagagccaagagtgggctactactgcatgccccctgct

SEQ ID NO: 49153 - DNA, 110 bp, synthetic construct
  source 1..110: mol_type = other DNA
aaactgggcaacagagaatactgaagatttaaggaacagcttctcaaggtatgcggctgccaagaaactctaggtttgttttgttggggttgttttgttttagggccaca

SEQ ID NO: 49154 - DNA, 110 bp, synthetic construct
  source 1..110: mol_type = other DNA
aagatctagtagtgaaattcccaggagtcttcaaaggattcattttatctctgctaccacccagttctagccaccattacagttcaccctgaatttcaaacaccctcctg

SEQ ID NO: 49155 - DNA, 110 bp, synthetic construct
  source 1..110: mol_type = other DNA
attaattatggctcagggagattaagccactggccaaaggttccccaatggtcaaagagaagaaactgccattattagggacaaaatgaactacaaataatgataggttt

SEQ ID NO: 49156 - DNA, 110 bp, synthetic construct
  source 1..110: mol_type = other DNA
agagaagaaactgccattattagggacaaaatgaactacaaataatgataggtttctagctcacactgagttgatggcttgttaaaattacctattttctgctgtgccag

SEQ ID NO: 49157 - DNA, 110 bp, synthetic construct
  source 1..110: mol_type = other DNA
ttcagtaccaaatattttctcagaaggtcctacctggacaagaagaagctctcggaattatttcagacaggagagaatttagctgtggtcattagaagctttcctaattg

SEQ ID NO: 49158 - DNA, 110 bp, synthetic construct
  source 1..110: mol_type = other DNA
cttattagcctttattcagaaagagggcagcctgctagtacattctgtggcagtacatcatttatatttggaaaaacaaaacaagcttaaattaggttacattccttgcc

SEQ ID NO: 49159 - DNA, 110 bp, synthetic construct
  source 1..110: mol_type = other DNA
aataaataatcagcagcttgacaacaatggttgtacctttgccttgtttctcaaaggaatcagtttaggcttatgcctcacaactattaatggtgcaataaataggtagt

SEQ ID NO: 49160 - DNA, 110 bp, synthetic construct; identical to SEQ ID NO: 49159
  source 1..110: mol_type = other DNA

SEQ ID NO: 49161 - DNA, 110 bp, synthetic construct
  source 1..110: mol_type = other DNA
aatgtgtcccacagagaaaggcagtcgcctggtccttaaagtcacctccttcattcccacagacttgcttcagtagtcagctgtgttacttccccgggaccgcgagccac

SEQ ID NO: 49162 - DNA, 110 bp, synthetic construct
  source 1..110: mol_type = other DNA
ggggatttaatgtaatatgatgatagttgacaatactatatttgacagctgtcaagagagcaaaaattaaaagatgtgattatgggagttcccgtcatggctcagtggta

SEQ ID NO: 49163 - DNA, 110 bp, synthetic construct
  source 1..110: mol_type = other DNA
acgttgggttgtacgatgtcttattgaggttaatgttaaatacaatgttcaaggatgtctaaattgacagctagcaagcagccaggtgatgagatgatcctccttcccag

SEQ ID NO: 49164 - DNA, 110 bp, synthetic construct
  source 1..110: mol_type = other DNA
aaacaattttaatgtcctgcctgctgaagctaggaaaattggcttcacagctgactggctggttcattcagcaagaagtccatcaactttcaaagacttgaaaaattgca

SEQ ID NO: 49165 - DNA, 110 bp, synthetic construct
  source 1..110: mol_type = other DNA
agtcctgcacatgttgctaaaactaataatacaaaccaagtagtggtgctggctttcttgcaaaggtgaaaggctggctttctaaagtcggtgtccacttcttataaatg

SEQ ID NO: 49166 - DNA, 110 bp, synthetic construct
  source 1..110: mol_type = other DNA
tcttgcaaaggtgaaaggctggctttctaaagtcggtgtccacttcttataaatgtacttaatggcagacaagttcaatcttccatgactgccatttaacattcacagtg

SEQ ID NO: 49167 - DNA, 110 bp, synthetic construct
  source 1..110: mol_type = other DNA
aatattcctaccaggctcttaaaatcagcttccaatagatggccaatttctgaccatagagctaacttaaaaattctttgaactagctcgccaattttcaacagaggcaa

SEQ ID NO: 49168 - DNA, 110 bp, synthetic construct
  source 1..110: mol_type = other DNA
atagagctaacttaaaaattctttgaactagctcgccaattttcaacagaggcaaacaaataaatatgtctggcagtattaaataactccatggacccaggaggtaacct

SEQ ID NO: 49169 - DNA, 110 bp, synthetic construct
  source 1..110: mol_type = other DNA
agtgttcctaggataatattctatatttattgctcgattgtacttaggcattgatgttgagtaattaagctctctgcaggagcgcttaatatagaggaactgcgaacagg

SEQ ID NO: 49170 - DNA, 110 bp, synthetic construct
  source 1..110: mol_type = other DNA
gttgagtaattaagctctctgcaggagcgcttaatatagaggaactgcgaacaggatctccaaatattgtttatctgaccacaaaatgcagcaatgcttagtcacacctt

SEQ ID NO: 49171 - DNA, 110 bp, synthetic construct
  source 1..110: mol_type = other DNA
gtctactccaaataaatgtcatagctcttaatccctggaatacagagctacatgtaaagttttatttgagaggtttattacatgtcttatgtaacttgttaccaaaattt

SEQ ID NO: 49172 - DNA, 110 bp, synthetic construct; identical to SEQ ID NO: 49171
  source 1..110: mol_type = other DNA

SEQ ID NO: 49173 - DNA, 110 bp, synthetic construct
  source 1..110: mol_type = other DNA
caaaacacctgagtagacagttctctattcagatgatatactgaatagaagatatactctggccaggaaccacatgaaaaatgttcaacgtcattgattattagagaaat

SEQ ID NO: 49174 - DNA, 110 bp, synthetic construct; identical to SEQ ID NO: 49173
  source 1..110: mol_type = other DNA

SEQ ID NO: 49175 - DNA, 110 bp, synthetic construct
  source 1..110: mol_type = other DNA
gtctaatgttctctttcttggttaacttctctattggtcatgaatcagtgatagcagtagaatatacatgttgggcatgactgcctaaggactcaggcaaagtgactgat

SEQ ID NO: 49176 - DNA, 110 bp, synthetic construct
  source 1..110: mol_type = other DNA
agtagaatatacatgttgggcatgactgcctaaggactcaggcaaagtgactgatttttctggattcactgtcttacacagcttaatttctccagagaatgatggtatct

SEQ ID NO: 49177 - DNA, 110 bp, synthetic construct
  source 1..110: mol_type = other DNA
aagttctccctataagaatgattttcactgagatcatttgctttctggtaatgatgttctccttagaaataataaagtgcttaagagatatttttcttaggatcatagtc

SEQ ID NO: 49178 - DNA, 110 bp, synthetic construct
  source 1..110: mol_type = other DNA
atttttcttctattaatctacaaatttatcccgactctttatttcaagctggtataagatacttttaaccaggagatgattaaaattaagagtgtggcacacacactcgg

SEQ ID NO: 49179 - DNA, 110 bp, synthetic construct
  source 1..110: mol_type = other DNA
tcttttaacctggataattcagcagtagtgggctctgcccttcaggaatactctaggttcaccttaggtgactcataatttaagatgcaaaaaatatatgtatgacaaga

SEQ ID NO: 49180 - DNA, 110 bp, synthetic construct
  source 1..110: mol_type = other DNA
ggttcaccttaggtgactcataatttaagatgcaaaaaatatatgtatgacaagactacacaaagatgtttggcattagaaagaaaaccattgggtcaaaacattgggaa

SEQ ID NO: 49181 - DNA, 110 bp, synthetic construct
  source 1..110: mol_type = other DNA
gccagattttctaggtttaaattctggctccattacttggtagctgtgtgattctaagcaggttatagaatatccctgagcctgtttttctcatgagtaaaatgaaggct

SEQ ID NO: 49182 - DNA, 110 bp, synthetic construct
  source 1..110: mol_type = other DNA
aagcaggttatagaatatccctgagcctgtttttctcatgagtaaaatgaaggctatagtggtagttgttttgatacttaataataaaatgctttgactaatacctgaca

SEQ ID NO: 49183 - DNA, 110 bp, synthetic construct
  source 1..110: mol_type = other DNA
taccccacttcttgtctggaaagttgttctttgctgttcaccaaagcacttacacacagtctcttgagcatattagtcccagagctactggccttcttccagaatctcag

SEQ ID NO: 49184 - DNA, 110 bp, synthetic construct
  source 1..110: mol_type = other DNA
gaccttaggggaaagttaaatgacttgtatgcaatgcaatgcttactgaacataacaagaaaaccacagcatgatggcgaaaatcatatatcatttttattgaaccattt

SEQ ID NO: 49185 - DNA, 110 bp, synthetic construct
  source 1..110: mol_type = other DNA
caacacacatcgcaaaaatctggccagaatagaagccaagctttcagccacacctgccctcactctttgtcactggcttgttctgctaacttgtcaaacacctgcggttc

SEQ ID NO: 49186 - DNA, 110 bp, synthetic construct
  source 1..110: mol_type = other DNA
cattgtttttaaaacagaagttcccaattgagccctttaatcgtagaatggaactgtcaatagcttttaaacaggggccatctaccgtcaagtttaatatttctcattta

SEQ ID NO: 49187 - DNA, 110 bp, synthetic construct; identical to SEQ ID NO: 49186
  source 1..110: mol_type = other DNA

SEQ ID NO: 49188 - DNA, 110 bp, synthetic construct
  source 1..110: mol_type = other DNA
atacttaaatatacaatttaaaactagatccacaacagtgaaaaagtcattcattggaaaaaagttagtcttttcaacaaatagtgctggaacaatgggacagctatagg

SEQ ID NO: 49189 - DNA, 110 bp, synthetic construct
  source 1..110: mol_type = other DNA
tgacttgagagatgggtcaaacgttatagtgacagaaagggtcatagcaccaaattcaagtctgcccaccactctaacgatccctgatcctagagagtcttcaaatgtgg

SEQ ID NO: 49190 - DNA, 110 bp, synthetic construct
  source 1..110: mol_type = other DNA
taaagattcctctggtgagtagcaacaggaatttgtttaatgattccctggagtagcgcctaggaaaccagctactgaaaaacaaaacagcagaaaaaggaaagtaacca

SEQ ID NO: 49191 - DNA, 110 bp, synthetic construct
  source 1..110: mol_type = other DNA
gattttatctccaaccaaccacaagaaccaaagaagagcttttctaaaagaaacaacattgctgaagtgtgcgtgaggttccttgggaaaattccttccttcatactctt

SEQ ID NO: 49192 - DNA, 110 bp, synthetic construct
  source 1..110: mol_type = other DNA
catagttggcttcttcccctgggactccctctcctttgcttcacatgatctgcccttgctctttaggtctctgccaaaaattttcatcttatatgtaaaaacatcatctc

SEQ ID NO: 49193 - DNA, 110 bp, synthetic construct
  source 1..110: mol_type = other DNA
ttcaggtccaggtggacacccaatgtcttcagttgtaacagagagaactactgaatgccttccatgagctaaggattctaatcggtgctttttccatgtcatcgatctaa

SEQ ID NO: 49194 - DNA, 110 bp, synthetic construct
  source 1..110: mol_type = other DNA
tgccttccatgagctaaggattctaatcggtgctttttccatgtcatcgatctaaaattaccaacagtatccctatttgccatatatttcttttcatgactattaatgcc

SEQ ID NO: 49195 - DNA, 110 bp, synthetic construct
  source 1..110: mol_type = other DNA
ttgccccaacctaacttgaatctcgctctacagttccctcggcacagaaccttaattttagcttttatataagcttctctagctaaagtgccctttcctaccttgtttgc

SEQ ID NO: 49196 - DNA, 110 bp, synthetic construct
  source 1..110: mol_type = other DNA
ttttagcttttatataagcttctctagctaaagtgccctttcctaccttgtttgcctagatccttactcattcttaaaaatccagttcagagcagaatgtgaaagctcga

SEQ ID NO: 49197 - DNA, 110 bp, synthetic construct
  source 1..110: mol_type = other DNA
taccttaggggttagaatttcccccaagccacgaataggaagaaagcagaagaaaagcttgacaaacacaaagaaaaccatcgcagcccctggtgtatctaaagacagaa

SEQ ID NO: 49198 - DNA, 110 bp, synthetic construct
  source 1..110: mol_type = other DNA
agcttgacaaacacaaagaaaaccatcgcagcccctggtgtatctaaagacagaagaagtaagcagatatattgtctgcagagaagataataaatggggagttcccattg

SEQ ID NO: 49199 - DNA, 110 bp, synthetic construct
  source 1..110: mol_type = other DNA
agttctaggtgcctctttgtttcctccgaacaaccctgtgaaagagattttatcaaagctgtctgggagttcccatcatgactcagcggaaattaatctgactaggatcc

SEQ ID NO: 49200 - DNA, 110 bp, synthetic construct
  source 1..110: mol_type = other DNA
aaaatcgttttttcttgattgacaccttttttcctcttcttttactttttttttaaataagctctgtttagcaaatcagtctagcaaaagggagatgaggggagatgagg

SEQ ID NO: 49201 - DNA, 110 bp, synthetic construct
  source 1..110: mol_type = other DNA
tgcgccacagccattggaaccccagatccttaaccagctgcaccacttgggaacttcctgctctattgtttcttaatggtttttcctttgtttcgcatcacccccaccaa

SEQ ID NO: 49202 - DNA, 110 bp, synthetic construct
  source 1..110: mol_type = other DNA
acatagacacgtatgtgtgcatacgcatgtatatatcttgttggtaatagcattaatttattgtcttaaaaaatgtcttagctatggcaaccaataaacacgttttctag

SEQ ID NO: 49203 - DNA, 110 bp, synthetic construct
  source 1..110: mol_type = other DNA
cctgtatgtgtggcatttcaaagtgtcccctaggtgtctgtgtagctgagggcgtagttatgaagcggtctgtggctcagtactgggcccatttactcatgggtttagac

SEQ ID NO: 49204 - DNA, 110 bp, synthetic construct
  source 1..110: mol_type = other DNA
ttgggaaagatgctatgctattgtgttgctctgttctctgagcctgctgtagcctggaagttagaacctgtcacagtcaagtattggcgccaatttaaagagttaagagc

SEQ ID NO: 49205 - DNA, 110 bp, synthetic construct
  source 1..110: mol_type = other DNA
ggaagttagaacctgtcacagtcaagtattggcgccaatttaaagagttaagagccagttccctgcccaaatgtgaaatcaatttacacaacacatattcccacaacccc

SEQ ID NO: 49206 - DNA, 110 bp, synthetic construct; identical to SEQ ID NO: 49204
  source 1..110: mol_type = other DNA

SEQ ID NO: 49207 - DNA, 110 bp, synthetic construct; identical to SEQ ID NO: 49205
  source 1..110: mol_type = other DNA

SEQ ID NO: 49208 - DNA, 110 bp, synthetic construct
  source 1..110: mol_type = other DNA
aaattcacaggcaataaactggttgttccagactaagatgacactgattctgaaactcaagctaagccattttctttccctcagatatttaataacatctacagataacc

SEQ ID NO: 49209 - DNA, 110 bp, synthetic construct
  source 1..110: mol_type = other DNA
gggaagggaaactgatacagatggttatggatgtgcgttactaatcaaagtgccgaggaggatctttttaggggaccaagagatcaaaacattgtttgcagtccattcag

SEQ ID NO: 49210 - DNA, 110 bp, synthetic construct
  source 1..110: mol_type = other DNA
tcaatttgcctgttccctggactgtgcctcagctgcgaggacacagtccgtcaatagcattcctttaagaattatctcacatgctccggattgtgccgatttccacccaa

SEQ ID NO: 49211 - DNA, 110 bp, synthetic construct
  source 1..110: mol_type = other DNA
gacgagaactcctctcccaagtctcctttggctggacattttaaagggccagacaatgtccactcacaaagatgcccacattttaatcctcagagggtgtcatgtgaata

SEQ ID NO: 49212 - DNA, 110 bp, synthetic construct
  source 1..110: mol_type = other DNA
ggttcgttaccactgaccaacaatgggaactcccttatgacagtttttaaaaggtggcacccaagcagagaagagcatgattcagcttttagaagtagatttgaatgatc

SEQ ID NO: 49213 - DNA, 110 bp, synthetic construct
  source 1..110: mol_type = other DNA
tatctgcaacttattaagcttcccaggcaattcatgtgcgcattaaaattaagaaacacagcagttccctagcggcctggcagttaaaggatctggcattgtcactgatc

SEQ ID NO: 49214 - DNA, 110 bp, synthetic construct
  source 1..110: mol_type = other DNA
gtcgttctctcagatcatttgacctgggggaagctggctgtcatgttgtgtaagcagctctgtggaaagacccacatggtgaggaactgaagccttttgttttgccaaca

SEQ ID NO: 49215 - DNA, 110 bp, synthetic construct
  source 1..110: mol_type = other DNA
agctctgtggaaagacccacatggtgaggaactgaagccttttgttttgccaacagccctgtgagtgatcttaaaagtagattctccagcctgttcagatgactgccatc

SEQ ID NO: 49216 - DNA, 110 bp, synthetic construct
  source 1..110: mol_type = other DNA
aaagtggcacagtcttctcttcctcctaaataaatatttactgaccacctgttacctgcaaaaactatattaggagacatggaacataaaacgttgtatgagacatgatg

SEQ ID NO: 49217 - DNA, 110 bp, synthetic construct
  source 1..110: mol_type = other DNA
ctgcaaaaactatattaggagacatggaacataaaacgttgtatgagacatgatgcatgtgtgtttcaaacagtagaaatctgcaaaggccaggcatgtgaacataaaaa

SEQ ID NO: 49218 - DNA, 110 bp, synthetic construct
  source 1..110: mol_type = other DNA
aggatcctaggttgcagttattctacaataagtacaaaacaagttaatgactgtgatattattagtaacagaaaaatgactggataatatctgtatgtccattaatcagg

SEQ ID NO: 49219 - DNA, 110 bp, synthetic construct; identical to SEQ ID NO: 49218
  source 1..110: mol_type = other DNA

SEQ ID NO: 49220 - DNA, 110 bp, synthetic construct
  source 1..110: mol_type = other DNA
cagataagtaacacaactcagaaagagatctgggggctcctagtcgtacaactaggagcaaacactgcccctgacaggacaatgacaaccacagagcaaaaaggagtccc

SEQ ID NO: 49221 - DNA, 110 bp, synthetic construct
  source 1..110: mol_type = other DNA
gagtcaagcttacttctaaaattgtgcttgcctaccacctgtgcaactttgagcaggttctaggaaaaaaaaaaaaaaagctgttgaccactgtttgggtctatggctta

SEQ ID NO: 49222 - DNA, 110 bp, synthetic construct
  source 1..110: mol_type = other DNA
ggttctaggaaaaaaaaaaaaaaagctgttgaccactgtttgggtctatggcttatatgaaactattcttaaagagagtaagaggatgttagtgtgaccactttgctaga

SEQ ID NO: 49223 - DNA, 110 bp, synthetic construct
  source 1..110: mol_type = other DNA
cttacagatgagaaaattgaggcccagagaagtgaggtcagcttgtatgaatcacttagcctttctattatggataagtgtcaaaaataaaataagcagggcatttattg

SEQ ID NO: 49224 - DNA, 110 bp, synthetic construct
  source 1..110: mol_type = other DNA
taaccactgcgtgacgacgggaaatccagtgtgttttaaaaataataccagccacacctaagtgtggtggtaactgagctaaattgaaagcggtttctccattgcctccc

SEQ ID NO: 49225 - DNA, 110 bp, synthetic construct
  source 1..110: mol_type = other DNA
tcagattacagagcacaaaatgtggagtaccattacccatcgattgagtgtggctgcagaattaaaaaaaccaagtggggaacatcatctgtacccagggtaagaatgac

SEQ ID NO: 49226 - DNA, 110 bp, synthetic construct
  source 1..110: mol_type = other DNA
gcagaattaaaaaaaccaagtggggaacatcatctgtacccagggtaagaatgacagctattttctcaagggatcatcctaatcagtgttaacttttgacatcccttaaa

SEQ ID NO: 49227 - DNA, 110 bp, synthetic construct
  source 1..110: mol_type = other DNA
atacagaagaaaatgtacagatagagcagctgacaaatatttgtaaaatgtttgtgctgctgacttaggatctttactacaggtgaatggacaagatagaactggataca

SEQ ID NO: 49228 - DNA, 110 bp, synthetic construct
  source 1..110: mol_type = other DNA
gctgctgacttaggatctttactacaggtgaatggacaagatagaactggatacagagaggtattcaatagaaaaaaaatagaaaaggatatcaaaacagaaatatactc

SEQ ID NO: 49229 - DNA, 110 bp, synthetic construct
  source 1..110: mol_type = other DNA
agaactcccttatgccacaggtgcagccataaaaagaaaaaaaaagcaaattatacattatttttaagctcacatagaatattcatcaatatagaaccacattttgggcc

SEQ ID NO: 49230 - DNA, 110 bp, synthetic construct
  source 1..110: mol_type = other DNA
cattatttttaagctcacatagaatattcatcaatatagaaccacattttgggccacaaaccacaccttatcacactaaaggaatagaatcacactaaaggaatataaat

SEQ ID NO: 49231 - DNA, 110 bp, synthetic construct
  source 1..110: mol_type = other DNA
attcactatactgggcattcgatttctaggagttatttactacttgttgcaagtttgtacccttaaacatctgttctatcttcccactcccacctaccctggtaaccatc

SEQ ID NO: 49232 - DNA, 110 bp, synthetic construct; identical to SEQ ID NO: 49231
  source 1..110: mol_type = other DNA

SEQ ID NO: 49233 - DNA, 110 bp, synthetic construct
  source 1..110: mol_type = other DNA
agatacgaaggccatcatataaagtcaagtacatcatatagaacaaaatcagcacattattacctatgacacatgaaacatttacacttttattgttgtaagatgagcat

SEQ ID NO: 49234 - DNA, 110 bp, synthetic construct
  source 1..110: mol_type = other DNA
tcatatccacaagagcaagtgtagtgaagcggtgaagatgaaagcctacctgcagtgggccagaaaagtagaagaggaggtagagaggatgaggcaggtctgtcaatgag

SEQ ID NO: 49235 - DNA, 110 bp, synthetic construct
  source 1..110: mol_type = other DNA
atggtaactagcagtgggatgtgagtacaagtgagtcaacaattatctcagttgaagtttccattcagggtccatcgagctgaggtgccagtgtgcagtcatttagtcat

SEQ ID NO: 49236 - DNA, 110 bp, synthetic construct
  source 1..110: mol_type = other DNA
ctgcctatatgtgtatttttaactcatatttccatggctaaccaaacatcacttattataactttctatattagtgcataaagctcttagtatcccttttgaagctgttc

SEQ ID NO: 49237 - DNA, 110 bp, synthetic construct; identical to SEQ ID NO: 49236
  source 1..110: mol_type = other DNA

SEQ ID NO: 49238 - DNA, 110 bp, synthetic construct
  source 1..110: mol_type = other DNA
tcacatttgaggttgtgtggaatgagcaggggatgcaaagccaaagaaatgcagtttctgactatgggcagctcatattctttgaggggaaacacctacatacacaaacc

SEQ ID NO: 49239 - DNA, 110 bp, synthetic construct
  source 1..110: mol_type = other DNA
ttctgactatgggcagctcatattctttgaggggaaacacctacatacacaaacctgatcagttctgtgtgctgatccaaggctgatttgccctctgaggcctcaacctt

SEQ ID NO: 49240 - DNA, 110 bp, synthetic construct
  source 1..110: mol_type = other DNA
tgggggaagttttgaaccatggtgtaggataattttatgtgtgctacttgattgcagctccactaacatccacgctaccctattaaggctatcttttctctgaacaatag

SEQ ID NO: 49241 - DNA, 110 bp, synthetic construct
  source 1..110: mol_type = other DNA
agctccactaacatccacgctaccctattaaggctatcttttctctgaacaatagtgaatgggccacagacagctgttgggtcgccttaagcctgacagtgaatgctgat

SEQ ID NO: 49242 - DNA, 110 bp, synthetic construct
  source 1..110: mol_type = other DNA
aactgaactcaccttctgcaacagataaaacacatttactgctacatatggaataattttcctctgaaaaggacatgagagccagataagcaggcccccacaacagaaga

SEQ ID NO: 49243 - DNA, 110 bp, synthetic construct
  source 1..110: mol_type = other DNA
attttcctctgaaaaggacatgagagccagataagcaggcccccacaacagaagataaaagagatgcatcagagaacacagggatgaatgtatctttttgagtgaaagtt

SEQ ID NO: 49244 - DNA, 110 bp, synthetic construct
  source 1..110: mol_type = other DNA
taaaaaaaatagaaatttaattttgtaccactgtgcttgacttcatgatttttcttcccaagtgataatgctatgttcttattttgccatgctaacaaacaacaggccat

SEQ ID NO: 49245 - DNA, 110 bp, synthetic construct
  source 1..110: mol_type = other DNA
cacaagtggatggtacctttgaacattttccctggtgtcattggacgcctgtcacccttgctttatcagctgtcttgaactgtttgcaagaggatggagcctggcagcga

SEQ ID NO: 49246 - DNA, 110 bp, synthetic construct
  source 1..110: mol_type = other DNA
gaaagtaatctccatccttacctcagaagtctagaaagctggactgcagtgctgtagtctcccaagcacaactaaaaatgaagagggagtttccactgtggctcagtggg

SEQ ID NO: 49247 - DNA, 110 bp, synthetic construct
  source 1..110: mol_type = other DNA
cgccagtcagacagcctgtaccccagccatacagaatcatctgccatttcctcgtgcaccaagttttcttttctccccgtgagtctctaattttgagtgaagacacctgt

SEQ ID NO: 49248 - DNA, 110 bp, synthetic construct
  source 1..110: mol_type = other DNA
aagtgtgtttatatagaaatggctatttgcctccttagcatgaggctaatacatattgtaaccattttgtctcatagaatgattgaagatagtgggaaaagaggaaatac

SEQ ID NO: 49249 - DNA, 110 bp, synthetic construct
  source 1..110: mol_type = other DNA
tgctttatctccttttctgtcaggaattgtaagttctgtttgttccagatgagcagagcatggtgcaagagttgctgagtggtttctcttggaaaaacaccagataaaat

SEQ ID NO: 49250 - DNA, 110 bp, synthetic construct
  source 1..110: mol_type = other DNA
gagcatggtgcaagagttgctgagtggtttctcttggaaaaacaccagataaaatcatgtaactgagaactcagcttcttagtttcaaatattcgctaaatgccatcgta

SEQ ID NO: 49251 - DNA, 110 bp, synthetic construct
  source 1..110: mol_type = other DNA
tgactctgtccggcagctggaaatgagctgaagatggaggaatacctgaaacagaagctacaggatgaagcctaccaggtactgagagctggccccacaccacccaccac

SEQ ID NO: 49252 - DNA, 110 bp, synthetic construct
  source 1..110: mol_type = other DNA
agctacaggatgaagcctaccaggtactgagagctggccccacaccacccaccacagctgccccaggcccttggtagctggatcttctccattccccccaaattcagtgc

SEQ ID NO: 49253 - DNA, 110 bp, synthetic construct
  source 1..110: mol_type = other DNA
aggaattgatttgctcctctccctagaaaagcatctttttccacaataaaatttgtcagactattcatgttagaatagttttcttccttgaatttagactgtctttcagc

SEQ ID NO: 49254 - DNA, 110 bp, synthetic construct
  source 1..110: mol_type = other DNA
tcagactattcatgttagaatagttttcttccttgaatttagactgtctttcagctattagcttttgtaatactgaactggatgtgtcatggtctattagtttctttttt

SEQ ID NO: 49255 - DNA, 110 bp, synthetic construct
  source 1..110: mol_type = other DNA
agccctctatccttcctcgccccgcccccaagagcctcatggatattagtttgcgagaataagcttttttaaaaattggtcctgtaatgatttctgtaattacaggtata

SEQ ID NO: 49256 - DNA, 110 bp, synthetic construct
  source 1..110: mol_type = other DNA
ctgagtaccaaaaaagaaggagaaggagagggaaaaaggatggaggaggagaaaaaaagctgttcccagtatttggggacccaagactacccaggactctactcaccagc

SEQ ID NO: 49257 - DNA, 110 bp, synthetic construct
  source 1..110: mol_type = other DNA
atttccatgcagaaggaattgacctggagagcatttctgcaaagtcaagaggaaggatgagctgggtaggcagccccactccctgctttctgatgggccagacattgcta

SEQ ID NO: 49258 - DNA, 110 bp, synthetic construct
  source 1..110: mol_type = other DNA
aggaagagcaggctgccgctaaaaacactgtgaccaaggaggaatttcggggtaaatggacagttctagctcctgaatttactgctacttaaactgaggctggtctgtag

SEQ ID NO: 49259 - DNA, 110 bp, synthetic construct
  source 1..110: mol_type = other DNA
cgcggccaccccttcccgacccgccgggtaagggtcgtttccctgaggcctagcagcgcgaagagacctcaactctcacctaaggcctgggaaggacggcccagcgtttt

SEQ ID NO: 49260 - DNA, 110 bp, synthetic construct; identical to SEQ ID NO: 49259
  source 1..110: mol_type = other DNA

SEQ ID NO: 49261 - DNA, 110 bp, synthetic construct
  source 1..110: mol_type = other DNA
aagcaatgaagaggacaaggaaaatagttgatagagccagcaataagatgagcaagggaagtgtctgtcagatgatgctgttcggttactacaattaggctgcaaatttg

SEQ ID NO: 49262 - DNA, 110 bp, synthetic construct
  source 1..110: mol_type = other DNA
gggaagtgtctgtcagatgatgctgttcggttactacaattaggctgcaaatttggacctaagagccctgggagccaaagaaagagaaaaaaaacaaggcagaaagtgca

SEQ ID NO: 49263 - DNA, 110 bp, synthetic construct
  source 1..110: mol_type = other DNA
agttttatggcctgtgcagttctgacaagcttcctcatatgctgtgatttatttggaacatgattttagtaggcagcaagacagtcagacaagatggagcacattgcccc

SEQ ID NO: 49264 - DNA, 110 bp, synthetic construct
  source 1..110: mol_type = other DNA
gtcatctcagagtttggaagaaatgcagaatctcagggcccaaaccacgtcaactgaatgagtatctgttaaagtgatttaacaggtggcaggtgatagatttcagatct

SEQ ID NO: 49265 - DNA, 110 bp, synthetic construct
  source 1..110: mol_type = other DNA
tcttaaatgctgcttctcttaaatgcttatccaccacaccgtgatgtggataccggctacctattgcaccatcagtgtaggaagagaataggggataagccagtttgaga

SEQ ID NO: 49266 - DNA, 110 bp, synthetic construct
  source 1..110: mol_type = other DNA
tttgcaaaatacaccctaggggactacaaggtggaacagagttctggtcacccatatttaattactcacaaccagtttgccagacatcaagcaatgcaatgtagaatggt

SEQ ID NO: 49267 - DNA, 110 bp, synthetic construct
  source 1..110: mol_type = other DNA
atttaattactcacaaccagtttgccagacatcaagcaatgcaatgtagaatggtccatcaggattgctgttccctagccctagaaagggaaaattcccaatcactgttc

SEQ ID NO: 49268 - DNA, 110 bp, synthetic construct
  source 1..110: mol_type = other DNA
acacaaagggaactcattaaacccctgagcttcaaagggcaagggagggggagctgttactggaactccgtgagagctattgtcaaggaagagggtctgctcccagggag

SEQ ID NO: 49269 - DNA, 110 bp, synthetic construct
  source 1..110: mol_type = other DNA
gttactggaactccgtgagagctattgtcaaggaagagggtctgctcccagggagctgagcagccagcctgggccaggggtggagaataagtcactcttacctctttccc

SEQ ID NO: 49270 - DNA, 110 bp, synthetic construct; identical to SEQ ID NO: 49268
  source 1..110: mol_type = other DNA

SEQ ID NO: 49271 - DNA, 110 bp, synthetic construct; identical to SEQ ID NO: 49269
  source 1..110: mol_type = other DNA

SEQ ID NO: 49272 - DNA, 110 bp, synthetic construct
  source 1..110: mol_type = other DNA
gaatgttctgggttgtaatccagcttacaagctgtgacacctggggaatattctattgtctttgtgaaaacaagtttctccatctttaaaatgggcgtgatggtgtcgca

SEQ ID NO: 49273 - DNA, 110 bp, synthetic construct
  source 1..110: mol_type = other DNA
aaataatgaggcttcctttttctctgcacttgtacctgaatgcccttatttctgtattatttagatttttttttttttgcttttttagggcctcacccaaggcatatgga

SEQ ID NO: 49274 - DNA, 110 bp, synthetic construct
  source 1..110: mol_type = other DNA
atatcttaagacttttaggggaaactagcatcccaaccttctcgcaaggaactataaaatactgactcacaactgatcagatttcacaaacctgtaccacccgctgcata

SEQ ID NO: 49275 - DNA, 110 bp, synthetic construct
  source 1..110: mol_type = other DNA
caagactgtgcagtggtttcaggaaccagcccaggaaacatgagtagaggtcttaatggagagctgggtaggggtgttggaggtgctctgtggagtttgatttttttttt

SEQ ID NO: 49276 - DNA, 110 bp, synthetic construct
  source 1..110: mol_type = other DNA
tccgtctttattctggagaagctggagaacttaatttacctcacacactctcatagaaatgctgaattgggagtttccactatggctcagtgggttaagaacccgacata

SEQ ID NO: 49277 - DNA, 110 bp, synthetic construct
  source 1..110: mol_type = other DNA
gtgtgcctgggggtgggatggggtgggggcagggaaaagagctctcgggcaccccctccagaacaatagtcaaggatctgagtggttttttgttcccagaactgggtgca

SEQ ID NO: 49278 - DNA, 110 bp, synthetic construct
  source 1..110: mol_type = other DNA
taagttctggttctaggtttctggtgcatattttagaaagtgacatagagatgaagtctggaaagatcaattccatttcaaatttaattccttatatgttattctctagt

SEQ ID NO: 49279 - DNA, 110 bp, synthetic construct; identical to SEQ ID NO: 49278
  source 1..110: mol_type = other DNA

SEQ ID NO: 49280 - DNA, 110 bp, synthetic construct
  source 1..110: mol_type = other DNA
agtccactccctgctcgtctccactttaggtgcctcagattaatgacctgggaaggccagaagcagcacgtgatctagctggcctgggaagccggagagggccgatggag

SEQ ID NO: 49281 - DNA, 110 bp, synthetic construct
  source 1..110: mol_type = other DNA
gccagaagcagcacgtgatctagctggcctgggaagccggagagggccgatggaggtatctcaggaattttgtgaaccatatcttcattatagccattattaaaaattaa

SEQ ID NO: 49282 - DNA, 110 bp, synthetic construct
  source 1..110: mol_type = other DNA
gtttgagacagggcagtgtccaactgaggaaatctcctgaaacaggcgtggaaaaatccctctcatagagctccattgaactagctattccaggcaaaggactggctctt

SEQ ID NO: 49283 - DNA, 110 bp, synthetic construct
  source 1..110: mol_type = other DNA
atccctctcatagagctccattgaactagctattccaggcaaaggactggctcttgggattggctggaccatagttaggtaatcctggccagaattttgtggctcttgag

SEQ ID NO: 49284 - DNA, 110 bp, synthetic construct; identical to SEQ ID NO: 49282
  source 1..110: mol_type = other DNA

SEQ ID NO: 49285 - DNA, 110 bp, synthetic construct; identical to SEQ ID NO: 49283
  source 1..110: mol_type = other DNA

SEQ ID NO: 49286 - DNA, 110 bp, synthetic construct
  source 1..110: mol_type = other DNA
aattcagtgtgtagtctcaggggcttcttaggtgtccgtgacaatttggtgaacaggtactggtccaggaccacactggtgagcagaaggcagagtcttggctcccaggg

SEQ ID NO: 49287 - DNA, 110 bp, synthetic construct
  source 1..110: mol_type = other DNA
ggtactggtccaggaccacactggtgagcagaaggcagagtcttggctcccagggaactttcacctttgttgttcctgcatctgattaatacatctggaggagggctcag

SEQ ID NO: 49288 - DNA, 110 bp, synthetic construct
  source 1..110: mol_type = other DNA
cacataaagagccctaagagaaagtaggatggtggctaagagccaggcctgagagatggtcaccagccatgggcagcttgtgcccatttccatgattggcatccactgga

SEQ ID NO: 49289 - DNA, 110 bp, synthetic construct
  source 1..110: mol_type = other DNA
atggtcaccagccatgggcagcttgtgcccatttccatgattggcatccactggatccgttgggatcagtatgtgaaggagtgggatggccagtggctcctcccctgccc

SEQ ID NO: 49290 - DNA, 110 bp, synthetic construct
  source 1..110: mol_type = other DNA
ctgtttaatttttcaggatccactagttcatggactatgggaatggatgactcgcctaatgtcacagatgatgcagctgatgagatcatggaccgcatcgtcaagtcagc

SEQ ID NO: 49291 - DNA, 110 bp, synthetic construct
  source 1..110: mol_type = other DNA
gcacatggccactggtggtagacttgcctacagattaagagcaattcaattaatgtcagagagtttcttggctcagaagattaggcataattttagaaagggcaagggaa

SEQ ID NO: 49292 - DNA, 110 bp, synthetic construct
  source 1..110: mol_type = other DNA
ctgcaagtaaaatatgctccttcagccataaattgctttcctcctttatagcttctggtgatatcaaaagaagttagtgtttctgtggtatctaaattcgattggttaat

SEQ ID NO: 49293 - DNA, 110 bp, synthetic construct
  source 1..110: mol_type = other DNA
caaagagatgtgataaaatgttctgtgtaatgatgttagttgtgcatcaagatacttcgattctctgatgttaaagaatggacctcatgttgtactctgcatttagttgt

SEQ ID NO: 49294 - DNA, 110 bp, synthetic construct
  source 1..110: mol_type = other DNA
atatatttttcagtgggaaatctcttaaaaaatactgcatactttttgcttggcacatcatgttgtcatcacctggaagtttaaggaatcatggagacttattgttaaaa

SEQ ID NO: 49295 - DNA, 110 bp, synthetic construct
  source 1..110: mol_type = other DNA
ctttacatacaattcatttggacacatcaactgtgttcaatagatgatgacatatgcagatattctctacagtttaccttgattagctcttgttgagacgtacagaaaca

SEQ ID NO: 49296 - DNA, 110 bp, synthetic construct
  source 1..110: mol_type = other DNA
cttaagagtctttgtaatagcctcttttatcataagataggaaacatggtatttctgtatatctgtcagttgacactttttacctatcaatgcatcgttttcaactattg

SEQ ID NO: 49297 - DNA, 110 bp, synthetic construct
  source 1..110: mol_type = other DNA
tcattaaccactgtgccacgacgggagctcctgagtggtatttttgaagtttatcacaaaacttttaagaatgcaggaacaggatttcctattgtgactcaggagattaa

SEQ ID NO: 49298 - DNA, 110 bp, synthetic construct
  source 1..110: mol_type = other DNA
gatttcaatattaaatttattgtgcttttccttgtcatccaattttctaaattcttccaaactgagatagatagtttatctgcctgggtcttgttactgccagagccagt

SEQ ID NO: 49299 - DNA, 110 bp, synthetic construct
  source 1..110: mol_type = other DNA
tccaaactgagatagatagtttatctgcctgggtcttgttactgccagagccagtagcttccccagtcttggtaatgctctgtcaaaactcccaatttcttccccatcaa

SEQ ID NO: 49300 - DNA, 110 bp, synthetic construct
  source 1..110: mol_type = other DNA
ccctctgtggccaagaatcttgtaggtggggctcatctgtatgtacagcattttgtgtacacggtggtggtggtaggacagaatctgtgtgtctgggggcctgggaggtg

SEQ ID NO: 49301 - DNA, 110 bp, synthetic construct
  source 1..110: mol_type = other DNA
tgtacacggtggtggtggtaggacagaatctgtgtgtctgggggcctgggaggtggggtgcgggggagtttggggtgagggtggggtggggtggggggtaagggttgttg

SEQ ID NO: 49302 - DNA, 110 bp, synthetic construct
  source 1..110: mol_type = other DNA
gagtgactactctgcccagccctgcagagggcagcgaggggcggctggagagagctctgtattatttgggcaaagaaaccttttcagagaggactgagtaatcacacaag

SEQ ID NO: 49303 - DNA, 110 bp, synthetic construct
  source 1..110: mol_type = other DNA
tctgtattatttgggcaaagaaaccttttcagagaggactgagtaatcacacaagggcacgacccagctgaggagtggagtaaaggtgccagagatttgtgccaggggat

SEQ ID NO: 49304 - DNA, 110 bp, synthetic construct
  source 1..110: mol_type = other DNA
cccatcagagcaggacaaccagggccattcggaaccttcagtgaagccaggtcctgcagtctgcttaaaacatttataataggaaaaaaccaaatatgtccctctggggt

SEQ ID NO: 49305 - DNA, 110 bp, synthetic construct
  source 1..110: mol_type = other DNA
gcagtctgcttaaaacatttataataggaaaaaaccaaatatgtccctctggggtggtttttaaaactggttttgatcatttgaagagtaaatccgtagctacttagaaa

SEQ ID NO: 49306 - DNA, 110 bp, synthetic construct; identical to SEQ ID NO: 49304
  source 1..110: mol_type = other DNA

SEQ ID NO: 49307 - DNA, 110 bp, synthetic construct; identical to SEQ ID NO: 49305
  source 1..110: mol_type = other DNA

SEQ ID NO: 49308 - DNA, 110 bp, synthetic construct
  source 1..110: mol_type = other DNA
tatttctaagaatcttccctcaaaacagaggaatactccaacctttgttacctgttaatatctaaataggaaatagcagagggaaggccgggttagaggtgttggagctc

SEQ ID NO: 49309 - DNA, 110 bp, synthetic construct
  source 1..110: mol_type = other DNA
taatatctaaataggaaatagcagagggaaggccgggttagaggtgttggagctcttaggggactctgatgcatgcgtggactccaatacttattacctgtctttaggtt

SEQ ID NO: 49310 - DNA, 110 bp, synthetic construct; identical to SEQ ID NO: 49308
  source 1..110: mol_type = other DNA

SEQ ID NO: 49311 - DNA, 110 bp, synthetic construct; identical to SEQ ID NO: 49309
  source 1..110: mol_type = other DNA

SEQ ID NO: 49312 - DNA, 110 bp, synthetic construct
  source 1..110: mol_type = other DNA
attccagggttgtgttatatgatggggaaaagttcctctggagaaaaattctggggctcattaaacagtgggtagaagagcaggagagaatgaaggagggaagtaaagag

SEQ ID NO: 49313 - DNA, 110 bp, synthetic construct
  source 1..110: mol_type = other DNA
gctcattaaacagtgggtagaagagcaggagagaatgaaggagggaagtaaagagaaaattatggcaggattatgtattcttttcctctaggaaaggacctaaaataatt

SEQ ID NO: 49314 - DNA, 110 bp, synthetic construct
  source 1..110: mol_type = other DNA
gcaggggcaaattgctgcagttatccctgattctagaggtgggcatggcccactgacattggagattcctgaacaaaaatcacttgcaacccccttcacctaaagggccc

SEQ ID NO: 49315 - DNA, 110 bp, synthetic construct
  source 1..110: mol_type = other DNA
cctgattctagaggtgggcatggcccactgacattggagattcctgaacaaaaatcacttgcaacccccttcacctaaagggccctgcagaggagggcattgtgaccaaa

SEQ ID NO: 49316 - DNA, 110 bp, synthetic construct
  source 1..110: mol_type = other DNA
gtgagtagatggaggtcagggaagatggatcggattgacaaaccttggagaatgagatgggagatgggtattatagggcatgaggtcaacagaggcaagggcaagatgat

SEQ ID NO: 49317 - DNA, 110 bp, synthetic construct
  source 1..110: mol_type = other DNA
gatgggagatgggtattatagggcatgaggtcaacagaggcaagggcaagatgattcttatttattgaaggaacatgagaatagatgcctagaaggactcttcacctata

SEQ ID NO: 49318 - DNA, 110 bp, synthetic construct
  source 1..110: mol_type = other DNA
tctatattgcgcatggacgcacagagagcacttctgcatttcccctcctgtctagttccatgctatgctgtgtcctattgacactttattatgcatcccttcagctctct

SEQ ID NO: 49319 - DNA, 110 bp, synthetic construct
  source 1..110: mol_type = other DNA
ttccatgctatgctgtgtcctattgacactttattatgcatcccttcagctctctttctatgcattcatatatgtagatagatacatattcatgtctatacatacattca

SEQ ID NO: 49320 - DNA, 110 bp, synthetic construct
  source 1..110: mol_type = other DNA
tataaaagtagcaatacatttgtatggaaaaaaataattctgatccctactaaatgctgctaaggtattgctacatgtgccatgttcaaattttgagaccatgacatctg

SEQ ID NO: 49321 - DNA, 110 bp, synthetic construct; identical to SEQ ID NO: 49320
  source 1..110: mol_type = other DNA

SEQ ID NO: 49322 - DNA, 110 bp, synthetic construct
  source 1..110: mol_type = other DNA
gggcagatctaccttcagcttcagaatcaggacctaaggaacaggctaacatggagggaagagccatatccaagcagaaggagcacagaacacttgatgaatacagttac

SEQ ID NO: 49323 - DNA, 110 bp, synthetic construct
  source 1..110: mol_type = other DNA
gggaagagccatatccaagcagaaggagcacagaacacttgatgaatacagttacatctggcaggagtccactcagggacaaaagatgggagctaggaacctgggaatca

SEQ ID NO: 49324 - DNA, 110 bp, synthetic construct
  source 1..110: mol_type = other DNA
aactatgtccagagcactatacctagagtttgtcagacatcctcttgaaccatctccatagtctaaagccaaaaaacaaaaacgttattgctaatttttcagatgaagtg

SEQ ID NO: 49325 - DNA, 110 bp, synthetic construct
  source 1..110: mol_type = other DNA
ccatagtctaaagccaaaaaacaaaaacgttattgctaatttttcagatgaagtgctgagttcaggaacttgcaggagaatgtaccactcagaagtgttagagttaaatt

SEQ ID NO: 49326 - DNA, 110 bp, synthetic construct
  source 1..110: mol_type = other DNA
ctgccttcattgtggttgcttgtaaatgccccatttagactggaagtagcttggcagtgcataaatagaatacatgtaaaatgaagagggttcagggcagcccactgtaa

SEQ ID NO: 49327 - DNA, 110 bp, synthetic construct
  source 1..110: mol_type = other DNA
ccttgatcagaggagtgagatgaattttccagggttagagtctggaatgagctgaaatatcctacttatataaaccaaagagagagagggtctgcttggaataaagctga

SEQ ID NO: 49328 - DNA, 110 bp, synthetic construct
  source 1..110: mol_type = other DNA
ctgcagtttttgataaaaattcggcttatagtctaatcggagttccctagtatataattgtttttctcttgctgcttttgagattctctccttatctttagattttacat

SEQ ID NO: 49329 - DNA, 110 bp, synthetic construct; identical to SEQ ID NO: 49328
  source 1..110: mol_type = other DNA

SEQ ID NO: 49330 - DNA, 110 bp, synthetic construct
  source 1..110: mol_type = other DNA
aggattgggtagcatgaagggcttcacccaaagggcctcttggggagatgtgggaggagaccacatggtggtcagtggaattgttggagcagcatctcagctcagaggaa

SEQ ID NO: 49331 - DNA, 110 bp, synthetic construct
  source 1..110: mol_type = other DNA
ggagaccacatggtggtcagtggaattgttggagcagcatctcagctcagaggaaagggacaatggaccttaacagtgtcctctccggcgacatgtccacatgtatgtgt

SEQ ID NO: 49332 - DNA, 110 bp, synthetic construct
  source 1..110: mol_type = other DNA
tgtttgtctacccgccccctcaaacttgtcaatgggatcctttgtttcacagcatttgaagagggaaataaataatctgaagacatcttttttcttaaaaatgttgtttc

SEQ ID NO: 49333 - DNA, 110 bp, synthetic construct
  source 1..110: mol_type = other DNA
gatcctttgtttcacagcatttgaagagggaaataaataatctgaagacatcttttttcttaaaaatgttgtttccattagggtctatgttctttgaaacttttcaatcc

SEQ ID NO: 49334 - DNA, 110 bp, synthetic construct
  source 1..110: mol_type = other DNA
aagcagaactaaaatgtccatgcatcctatgtcttttcttcctaagcagcttcagagttttgggaatgacttgacactgcctcagttgggttgagttaaagttatgggca

SEQ ID NO: 49335 - DNA, 110 bp, synthetic construct
  source 1..110: mol_type = other DNA
agttttgggaatgacttgacactgcctcagttgggttgagttaaagttatgggcatctggatatgaatctttgtttgactttatgaaacactaatggaagaagatattac

SEQ ID NO: 49336 - DNA, 110 bp, synthetic construct; identical to SEQ ID NO: 49334
  source 1..110: mol_type = other DNA

SEQ ID NO: 49337 - DNA, 110 bp, synthetic construct; identical to SEQ ID NO: 49335
  source 1..110: mol_type = other DNA

SEQ ID NO: 49338 - DNA, 110 bp, synthetic construct
  source 1..110: mol_type = other DNA
cctggtttaccttgtcacagggtaaagctgggatttggaaatcagtaaatgtctttactattcaaaattttggagcagctgcatttcagtccctagctccgtgagcatgt

SEQ ID NO: 49339 - DNA, 110 bp, synthetic construct
  source 1..110: mol_type = other DNA
tactattcaaaattttggagcagctgcatttcagtccctagctccgtgagcatgttcctgatcaagttcaaaaaaggagccataccttcatttgcgggatgctgtgttga

SEQ ID NO: 49340 - DNA, 110 bp, synthetic construct
  source 1..110: mol_type = other DNA
gatgtttttgcgacaactatggcatctatatggcttgttaccagcctaatgaaaagttgctttaggtgtcaaataaatctaagaatgttctacactttagctgactgtaa

SEQ ID NO: 49341 - DNA, 110 bp, synthetic construct
  source 1..110: mol_type = other DNA
gttgctttaggtgtcaaataaatctaagaatgttctacactttagctgactgtaatatatcataatggcctgcttaagtagtataaactgcaacatgataaagcagctaa

SEQ ID NO: 49342 - DNA, 110 bp, synthetic construct
  source 1..110: mol_type = other DNA
gcggctacagctctgattggacccctgattgggaaactccatatgcatgggtgcggccctaaaaggaaaaaaagacaaaagacaaaaaaaaaaaaaaggtatttgcagat

SEQ ID NO: 49343 - DNA, 110 bp, synthetic construct; identical to SEQ ID NO: 49342
  source 1..110: mol_type = other DNA

SEQ ID NO: 49344 - DNA, 110 bp, synthetic construct
  source 1..110: mol_type = other DNA
gtgttggtagtggtggttttttttcattttatttatttttttcacctcagaattgtacacagagtatacacaattctgggggaaaggagcttagcaaatcctataaagtc

SEQ ID NO: 49345 - DNA, 110 bp, synthetic construct
  source 1..110: mol_type = other DNA
tacacagagtatacacaattctgggggaaaggagcttagcaaatcctataaagtccttgaaacagctctcctatttgtccctctattttcctaggtcaggtgaaacaact

SEQ ID NO: 49346 - DNA, 110 bp, synthetic construct; identical to SEQ ID NO: 49344
  source 1..110: mol_type = other DNA

SEQ ID NO: 49347 - DNA, 110 bp, synthetic construct; identical to SEQ ID NO: 49345
  source 1..110: mol_type = other DNA

SEQ ID NO: 49348 - DNA, 110 bp, synthetic construct
  source 1..110: mol_type = other DNA
aggcacttgcttctctggccccagcttaactcacagggctttttcctgaccactcaacagaaggatgtacagtctggccctgtgacttcctttctgcttcttctctgtct

SEQ ID NO: 49349 - DNA, 110 bp, synthetic construct
  source 1..110: mol_type = other DNA
ggcaatgaagtaaattggagaaggagcaataaggaaatccttagagccaagctaagatgtttgagccctgtcctcatcacagttggaagacttttcatgtttaaagcaga

SEQ ID NO: 49350 - DNA, 110 bp, synthetic construct
  source 1..110: mol_type = other DNA
aaagtcgttcttcataactacttccagaaatacttccctgtaataaacactgtctagtaagtactacctagctttcatcctccacccattttacaggagtaagctgtctt

SEQ ID NO: 49351 - DNA, 110 bp, synthetic construct
  source 1..110: mol_type = other DNA
ttaaaagaaatgtaagtttctagaaaccaatcacattaataaagtacaccctcactcatgcttcataacttaaattatagctgctgaaatttgagcctataactatttcc

SEQ ID NO: 49352 - DNA, 110 bp, synthetic construct
  source 1..110: mol_type = other DNA
taacattccacaagaatgtggctttgagaaataagttgagaaggaaatttgcctaaaaaaaatgtggacattctggcatttctattactgagcttctgtgacatctcaga

SEQ ID NO: 49353 - DNA, 110 bp, synthetic construct
  source 1..110: mol_type = other DNA
aaaaaaatgtggacattctggcatttctattactgagcttctgtgacatctcagacagtagttaaaccacgttagcctaaaattctttgttcagtgggtaacacagcatg

SEQ ID NO: 49354 - DNA, 110 bp, synthetic construct
  source 1..110: mol_type = other DNA
tttcacaggctacccatatgagaagctactttaagcaacactgagaggttggtaatggatgtcaactcaaaatagctagccttctagcaaaaatgggtataggaaaaggc

SEQ ID NO: 49355 - DNA, 110 bp, synthetic construct
  source 1..110: mol_type = other DNA
tggatgtcaactcaaaatagctagccttctagcaaaaatgggtataggaaaaggcagaaaaattaagtgtccaccagcaaagttactcatatagtgcaatactccaaaaa

SEQ ID NO: 49356 - DNA, 110 bp, synthetic construct
  source 1..110: mol_type = other DNA
ctatttgcactattccactgcagagaactaaagtttaaactatcagctacctgacatttctggaattgctgcagataaaaactctttgatgatttcagttttctgctgct

SEQ ID NO: 49357 - DNA, 110 bp, synthetic construct
  source 1..110: mol_type = other DNA
acttatttgataatgaattagttatatgaaggacatagctgtctttccttaacatgaaagactctttgtgctttgctgggcctgtgcagttcctacatggttatactgag

SEQ ID NO: 49358 - DNA, 110 bp, synthetic construct
  source 1..110: mol_type = other DNA
ctaatatcagcatggaagtttaggagatatacatacatttgggcagtgagattgactatcattgctcaatcataccagcaggcaggtgcttacttagcccttgtctatag

SEQ ID NO: 49359 - DNA, 110 bp, synthetic construct
  source 1..110: mol_type = other DNA
ccacctctaaccaactttaggctcactagcttggacttcatgactggctcccccatacaacctcccaggcctcaatacctaaaggttgaccaaaaaaaaatcataattta

SEQ ID NO: 49360 - DNA, 110 bp, synthetic construct
  source 1..110: mol_type = other DNA
ggagtgaggacagcctacattgtctccacttgactgctttctgacctttcattcgtaagcttagaagctacaggtagagtatagtttgaattcatgaaagggaaatgaac

SEQ ID NO: 49361 - DNA, 110 bp, synthetic construct
  source 1..110: mol_type = other DNA
ttcataccatcccctattttctcaggatcagttacaccgactgtcaaaccaaactggtcttcctcttcctcttccactagctcctcatagcttgtctgggcctgagaaga

SEQ ID NO: 49362 - DNA, 110 bp, synthetic construct
  source 1..110: mol_type = other DNA
gggaaaaaaaataaagtttcatgcacacctgaggtaaagctctaaattcaatctcttcacattgctggatttagaatcaattcagatttgtaggggctggactaattgtg

SEQ ID NO: 49363 - DNA, 110 bp, synthetic construct
  source 1..110: mol_type = other DNA
cttttagaggacacatatctggggaaagaataaggaaacaaattaaatgattgcacagtaagatggaaagatcgctggcctatggactaggatattttatatccagtaga

SEQ ID NO: 49364 - DNA, 110 bp, synthetic construct
  source 1..110: mol_type = other DNA
ggtctggtgtcaaaccatctttccctctttagactgagcacatctggccactgcccactcccacagctggaaactgtttccctgctcaatgtatgtatttactggctcat

SEQ ID NO: 49365 - DNA, 110 bp, synthetic construct
  source 1..110: mol_type = other DNA
tactggatgagtcgtttatattctctttggatgttgttccaattaccgagtgacgagagctctgcatctataccataacaatttagtttagaatgtgaactctaaaggct

SEQ ID NO: 49366 - DNA, 110 bp, synthetic construct
  source 1..110: mol_type = other DNA
tcagaaccagggaagacaagcccccttagctagtttgaaaaccagtgggggctgtaagaaactgagactttgttcttgaagggcacatgcacagacttgcttagtcccag

SEQ ID NO: 49367 - DNA, 110 bp, synthetic construct
  source 1..110: mol_type = other DNA
ttgagaaaaaaaaatatattcagcttagagcctaggctgccttggagttctcctctagtggcaatgcagcccctctgcatgctcaattaaacctcgaaccactgaggaaa

SEQ ID NO: 49368 - DNA, 110 bp, synthetic construct
  source 1..110: mol_type = other DNA
cagaatccaaggctagaacaataagacaaagacaagctaagttgttcggatttaagccaatatagtaagaaactattaagatcttaaactgagggttatgtaatcaaatg

SEQ ID NO: 49369 - DNA, 110 bp, synthetic construct
  source 1..110: mol_type = other DNA
agtgactaatgtgttggttctgagtacttggcacaggagaaagatctatttttctcaagcccttaaaagcactacaagtaaagggcagttaaccaaaggaaaaaaaaatc

SEQ ID NO: 49370 - DNA, 110 bp, synthetic construct
  source 1..110: mol_type = other DNA
tgaattacttagaagggaggttttcccatggcttaagcttaaaattgagtctcaagccagaccatgaccaagatcacagtgtacagagaccaacagtgacagaggaaatg

SEQ ID NO: 49371 - DNA, 110 bp, synthetic construct
  source 1..110: mol_type = other DNA
gcactttctctacttagggtccctcaacttcaaaagcccacctcttctcaatgcttcactcaactgctatttccttctggaaggttttctattgtcacaatcagaaaaat

SEQ ID NO: 49372 - DNA, 110 bp, synthetic construct
  source 1..110: mol_type = other DNA
tgtgaattgagctgcatggaaccttagtagctctgaacccccatctgtaccacgtacttgtctactgtggggagatggggccacaggaggagacttctaatcacctcctc

SEQ ID NO: 49373 - DNA, 110 bp, synthetic construct
  source 1..110: mol_type = other DNA
agatggttcttttatgattgtcggaagcctgaacacataatgcctctccctaagggaacaagaagctgtgatctggactctgtaagttgtccctttcctcaacagaggta

SEQ ID NO: 49374 - DNA, 110 bp, synthetic construct
  source 1..110: mol_type = other DNA
gaacaagaagctgtgatctggactctgtaagttgtccctttcctcaacagaggtacagcaaaatcacttggggagatttttcaagatctatcttcccaggctccatctca

SEQ ID NO: 49375 - DNA, 110 bp, synthetic construct
  source 1..110: mol_type = other DNA
agttcagttggttgtatggaataacacagaccaaataacaggttgactgtgtcttaccttttcaacatgttgtatttgacatggtccacttgaaaaattttctactgtca

SEQ ID NO: 49376 - DNA, 110 bp, synthetic construct
  source 1..110: mol_type = other DNA
taacaggttgactgtgtcttaccttttcaacatgttgtatttgacatggtccacttgaaaaattttctactgtcaagtaaattagttcatgtgtcttactaaaagtaaaa

SEQ ID NO: 49377 - DNA, 110 bp, synthetic construct
  source 1..110: mol_type = other DNA
ttattcagaggatctgctctttttaatctagactctttcctcacttatatcaatcaatggagcaaaaattaaatatatgtgctatcaaaactctcccttcttctcctggc

SEQ ID NO: 49378 - DNA, 110 bp, synthetic construct
  source 1..110: mol_type = other DNA
aatggagcaaaaattaaatatatgtgctatcaaaactctcccttcttctcctggcagatatttagtagaggacactgctcttggcctcacatctcacagacttcctgaca

SEQ ID NO: 49379 - DNA, 110 bp, synthetic construct
  source 1..110: mol_type = other DNA
ctgtgctaaatatgttcttttcttagaggccatgaggctgttggaggaataagatcaaacacagtttttaaatgtatttgtaacaggtcattgtctagttaagggaaatt

SEQ ID NO: 49380 - DNA, 110 bp, synthetic construct
  source 1..110: mol_type = other DNA
caaacacagtttttaaatgtatttgtaacaggtcattgtctagttaagggaaattagctgaatatttttatttccgttgactagaaatcgaaaacaaatcagtggctgaa

SEQ ID NO: 49381 - DNA, 110 bp, synthetic construct
  source 1..110: mol_type = other DNA
aaataaatggagcttgggcaaaacctgaggtggttagaagtttgagctgagagaatcacaattacactttccaagtttcctttcttaacttgtgactctggggctgaaat

SEQ ID NO: 49382 - DNA, 110 bp, synthetic construct
  source 1..110: mol_type = other DNA
gtggaacaagtttgagctgagagtcaatggatgtgggttctaggtctagcttacccaccattttgaggagatgggcaagctacttcattgaggttatgtacaaatttgaa

SEQ ID NO: 49383 - DNA, 110 bp, synthetic construct
  source 1..110: mol_type = other DNA
tatgataactgtattaactcatgtagtctggaatttcatgtattcggtttaaagttattagtgtgcaaaattatctggtagaatttgtatgtggaaccacatctgcatca

SEQ ID NO: 49384 - DNA, 110 bp, synthetic construct
  source 1..110: mol_type = other DNA
ctttagggctcactttctcccctaaactctctccttaagcatttttacccggatttgtgattttaaataggatccaaataatgatgaccccaaactattaccatcagctc

SEQ ID NO: 49385 - DNA, 110 bp, synthetic construct
  source 1..110: mol_type = other DNA
ggaagaaacagttaatggaatatactgccttgttaaatacatacagtaatgaagcttttactcagtaaacttacgtgaatttttgaaatcccagtttatgtctcaaggct

SEQ ID NO: 49386 - DNA, 110 bp, synthetic construct; identical to SEQ ID NO: 49385
  source 1..110: mol_type = other DNA

SEQ ID NO: 49387 - DNA, 110 bp, synthetic construct
  source 1..110: mol_type = other DNA
aacaactatccgtaaaaacaacctgaagactagcagaaaagattttccacaactaaaaatataaagaaggaactacagcaaggtgtggcagaggcattgagacacagtat

SEQ ID NO: 49388 - DNA, 110 bp, synthetic construct
  source 1..110: mol_type = other DNA
aaaatataaagaaggaactacagcaaggtgtggcagaggcattgagacacagtattgtcaagaatcatacctctgggtaagcaaaccacaacaggagaatgatcacaatt

SEQ ID NO: 49389 - DNA, 110 bp, synthetic construct
  source 1..110: mol_type = other DNA
tttatattgcccaaactttaataaggtatcatacctataggaagatggtgcagtgcaggggaaagagcaaaatctccagcatatgacagacctgatttatagctacaaag

SEQ ID NO: 49390 - DNA, 110 bp, synthetic construct
  source 1..110: mol_type = other DNA
caggggaaagagcaaaatctccagcatatgacagacctgatttatagctacaaagtccctgaaagtttatatattcagagacatagtgaggcagacagataggtagataa

SEQ ID NO: 49391 - DNA, 110 bp, synthetic construct
  source 1..110: mol_type = other DNA
ctctatttgtagctacaggaagtgcacttctggagtccctccccagatcacctctgtgggcaggagtactctctgtagctgctatggatcagaatgtgggccaatggttt

SEQ ID NO: 49392 - DNA, 110 bp, synthetic construct
  source 1..110: mol_type = other DNA
gtgggcaggagtactctctgtagctgctatggatcagaatgtgggccaatggttttcctgcaactcccttgatatggatttagtgctgctggtgcaggcctctacagggc

SEQ ID NO: 49393 - DNA, 110 bp, synthetic construct
  source 1..110: mol_type = other DNA
agcttgatcaagcactgatttgtgtggagctactgaagttcagaaaagttcttgggtgaagatggggtttaaaaaataagatcagcaccaagccaaaggagggcattcca

SEQ ID NO: 49394 - DNA, 110 bp, synthetic construct
  source 1..110: mol_type = other DNA
gtgaagatggggtttaaaaaataagatcagcaccaagccaaaggagggcattccaagtgggccagcgggatcatcaaatgtgggattagatgtagcacaaatgtggcatg

SEQ ID NO: 49395 - DNA, 110 bp, synthetic construct
  source 1..110: mol_type = other DNA
agaaccccagaggccacctaaataccagactgtgaccactccctcacagtttacccctgatatacacagagacaatgaggcaataccctgtggagtagttccacaacagg

SEQ ID NO: 49396 - DNA, 110 bp, synthetic construct
  source 1..110: mol_type = other DNA
taattcctagctttttcctagacatttggccactagcccatatgagcaaggctgtttccatattctctatatcaaagaattacagaatagtgcaaatcttttcaatttaa

SEQ ID NO: 49397 - DNA, 110 bp, synthetic construct
  source 1..110: mol_type = other DNA
ggtttttagtgggtactcactatttatagagtgacattattggaactttggaaatggaaatacagctggagttaaaataaatagaggaaagaattgtcagagcaattgaa

SEQ ID NO: 49398 - DNA, 110 bp, synthetic construct
  source 1..110: mol_type = other DNA
ggaaatacagctggagttaaaataaatagaggaaagaattgtcagagcaattgaaaaattaaaaaggacgtttccaattattgtgatcagtgccatgatagtggccagca

SEQ ID NO: 49399 - DNA, 110 bp, synthetic construct
  source 1..110: mol_type = other DNA
aggtaggatttgggagggagtaaaagacaaaacttttgttattcataattattttcacttctattccagcctatatccataaacctctgtagaaccaaaagggtacatct

SEQ ID NO: 49400 - DNA, 110 bp, synthetic construct
  source 1..110: mol_type = other DNA
cacttctattccagcctatatccataaacctctgtagaaccaaaagggtacatctctaatttagataattatggaatgaccactatttaactggacagagagcaggtgat

SEQ ID NO: 49401 - DNA, 110 bp, synthetic construct; identical to SEQ ID NO: 49399
  source 1..110: mol_type = other DNA

SEQ ID NO: 49402 - DNA, 110 bp, synthetic construct; identical to SEQ ID NO: 49400
  source 1..110: mol_type = other DNA

SEQ ID NO: 49403 - DNA, 110 bp, synthetic construct
  source 1..110: mol_type = other DNA
ccacagaagcccaaaaagatagatcatttgatgtttgtaagcactcaagccccatttgctttagcatacccctactttggggcaaaggcctcagtatggagagaaggaaa

SEQ ID NO: 49404 - DNA, 110 bp, synthetic construct
  source 1..110: mol_type = other DNA
cactgtttgcagatgacattatactatacatggaaaattctggggagtgggatagagatggcagagaagtaagacttcttatttcactcacctacttcactcaccttctc

SEQ ID NO: 49405 - DNA, 110 bp, synthetic construct
  source 1..110: mol_type = other DNA
gtctaatgctttcatgcttttcccatcaccttatttaacttcaagagttacttctttttctttctcctcacatttgtcagactgtacacttggtgatctagctgaacagc

SEQ ID NO: 49406 - DNA, 110 bp, synthetic construct
  source 1..110: mol_type = other DNA
ttttctttctcctcacatttgtcagactgtacacttggtgatctagctgaacagctgaattcacaagatccccaatatatgtgcattaaaaatgtaatatttctgctttc

SEQ ID NO: 49407 - DNA, 110 bp, synthetic construct
  source 1..110: mol_type = other DNA
agcaaagctatagaacactggagaagtcatttctctaaaattcattttgtccatctttaaaatgagcaaattagaaatgacctttattgtcacttatgtttctggtccct

SEQ ID NO: 49408 - DNA, 110 bp, synthetic construct
  source 1..110: mol_type = other DNA
tttaaaatgagcaaattagaaatgacctttattgtcacttatgtttctggtccctgagttaattccacaatgacaacaatgtccatgcaccttgaaaatctctacctctc

SEQ ID NO: 49409 - DNA, 110 bp, synthetic construct
  source 1..110: mol_type = other DNA
ataacagatttatatacagttgtatgtgacttttaagttaagaatattagtggcaagctaaaacacaggcagaactgtgtttgaaaatacaattttctgatgccaaggtc

SEQ ID NO: 49410 - DNA, 110 bp, synthetic construct; identical to SEQ ID NO: 49409
  source 1..110: mol_type = other DNA

SEQ ID NO: 49411 - DNA, 110 bp, synthetic construct
  source 1..110: mol_type = other DNA
gtggagataaggagttagacaccctgtgctctggaaaactggcagaacagatcttcagataaatattttcaggagaaaatttcatgagcccaattcttgcatctccttgt

SEQ ID NO: 49412 - DNA, 110 bp, synthetic construct
  source 1..110: mol_type = other DNA
cagataaatattttcaggagaaaatttcatgagcccaattcttgcatctccttgtatctgaaaaagctctataatttttcatggcgacttctgttcttcatgactggcag

SEQ ID NO: 49413 - DNA, 110 bp, synthetic construct
  source 1..110: mol_type = other DNA
agaaaaaggcatcttttaggtccaggcaagtagacgcagcagtggaagggatcagccccagcagggtataagagttagggaccgacgggtgtaacatgacttttgcttca

SEQ ID NO: 49414 - DNA, 110 bp, synthetic construct
  source 1..110: mol_type = other DNA
ttaggtccaggcaagtagacgcagcagtggaagggatcagccccagcagggtataagagttagggaccgacgggtgtaacatgacttttgcttcatttatggctctcaag

SEQ ID NO: 49415 - DNA, 110 bp, synthetic construct
  source 1..110: mol_type = other DNA
atccatgtggagggtctgagtccccagggactggggccatgaggttgagcagagagggcagcttctcggtgggaccaagctgttcctctctgctggtactaacaaaacca

SEQ ID NO: 49416 - DNA, 110 bp, synthetic construct
  source 1..110: mol_type = other DNA
gggcagcttctcggtgggaccaagctgttcctctctgctggtactaacaaaaccaaggaaaagatctgctccatgccagaccatgccagtcactgcagccggccagtcta

SEQ ID NO: 49417 - DNA, 110 bp, synthetic construct
  source 1..110: mol_type = other DNA
gcatggcctgagaagcaatttctgcaataccaaccacagctaataaatacgcacaagtttaagggaggtgggagctgattgtttcagctcttctgaagaattatttgagg

SEQ ID NO: 49418 - DNA, 110 bp, synthetic construct
  source 1..110: mol_type = other DNA
atcgagtctaaaggtcattttggacaggtacttctttttcttctaagctccagacagtggcagattaagctttaaatagataagattctggtacccacatcagattttat

SEQ ID NO: 49419 - DNA, 110 bp, synthetic construct
  source 1..110: mol_type = other DNA
ttttgtggggaggtgcttggaaaccattcagattatctaatttctcactaaacactcaattattttatatcaccatgaatttaagtttctattctagtgggctatatttt

SEQ ID NO: 49420 - DNA, 110 bp, synthetic construct
  source 1..110: mol_type = other DNA
tttatagcatttccatcacaaacccccagctcatcacccctcctctaaacctccctcccttggatatcataagttttttttttgtttgttgttttgccttttcttgagcc

SEQ ID NO: 49421 - DNA, 110 bp, synthetic construct
  source 1..110: mol_type = other DNA
gtcttgaagattcctcaaaataaaaatgaagtcaacactgaaatacctttctctgccaaagagaagccacgcccaagttttgagagatgtttggatcactcctagaaggg

SEQ ID NO: 49422 - DNA, 110 bp, synthetic construct
  source 1..110: mol_type = other DNA
ccaaagagaagccacgcccaagttttgagagatgtttggatcactcctagaagggtttgtggagacactttcaaagcccaaggtgaagaactcctgtgctgctagttctg

SEQ ID NO: 49423 - DNA, 110 bp, synthetic construct
  source 1..110: mol_type = other DNA
tcacccggctccttgcttgtaaggtgcccacggggttgtcgtgatgaggtattgtcagactcaccaggcaaggccacaggagccaggcattaaggaggagtctttacctg

SEQ ID NO: 49424 - DNA, 110 bp, synthetic construct
  source 1..110: mol_type = other DNA
cagactcaccaggcaaggccacaggagccaggcattaaggaggagtctttacctgttaaaatctgctgagtagctgagtcacttattaagatacctctcaaaccccaagc

SEQ ID NO: 49425 - DNA, 110 bp, synthetic construct
  source 1..110: mol_type = other DNA
aaggattctagttaggaggagagcagggccttagtaacaaatggtgcaggccattattagtgacacagcagggttctagttcgggacagagcaggactctagctagagac

SEQ ID NO: 49426 - DNA, 110 bp, synthetic construct
  source 1..110: mol_type = other DNA
attagtgacacagcagggttctagttcgggacagagcaggactctagctagagacagtgcagggtgctagttagggacagagataggctctaaataaggagaccacatag

SEQ ID NO: 49427 - DNA, 110 bp, synthetic construct
  source 1..110: mol_type = other DNA
aaacggtccactacattgacttttttatcattacataaaatagctggtaacaggcaggatgattgggaaagagttttcataaaatctgacttagtactggcagagaatag

SEQ ID NO: 49428 - DNA, 110 bp, synthetic construct
  source 1..110: mol_type = other DNA
actcagaagaccctccatcctgactcacatctcctgcgccctgaccctggcaacagcccctatttctgtgaaataaagacaaggtgtacttctgggtctgagtcccaggg

SEQ ID NO: 49429 - DNA, 110 bp, synthetic construct
  source 1..110: mol_type = other DNA
ggctgaaatatcttcccagctaagagagaatttaaagtgacaggatgcatttcgcctcatcttgtgagctagatatttaaggaaatatttgtcaggtcactggctgacca

SEQ ID NO: 49430 - DNA, 110 bp, synthetic construct
  source 1..110: mol_type = other DNA
aggcccttgaagactttcctaaaaacatgaggaccccatatatctctggactcagtagaaaatattgtacttgacaataggctagctcttgactatctcccggctgagca

SEQ ID NO: 49431 - DNA, 110 bp, synthetic construct
  source 1..110: mol_type = other DNA
tagaaaatattgtacttgacaataggctagctcttgactatctcccggctgagcaagggaaattctgcatggttattaataaaacccaccacatgcatgtcaaaaactct

SEQ ID NO: 49432 - DNA, 110 bp, synthetic construct; identical to SEQ ID NO: 49430
  source 1..110: mol_type = other DNA

SEQ ID NO: 49433 - DNA, 110 bp, synthetic construct; identical to SEQ ID NO: 49430
  source 1..110: mol_type = other DNA

SEQ ID NO: 49434 - DNA, 110 bp, synthetic construct
  source 1..110: mol_type = other DNA
ctgtcccggcagcactggacaaactgtcagaatcagacattatgcatgctgtgtgctatacaagcttacattacccaggcacgcctttatgttggagcattattcagacc

SEQ ID NO: 49435 - DNA, 110 bp, synthetic construct
  source 1..110: mol_type = other DNA
ctatacaagcttacattacccaggcacgcctttatgttggagcattattcagaccccaaaacaatggttactggattccacgaacacgagaagaacctgcccatgagttt

SEQ ID NO: 49436 - DNA, 110 bp, synthetic construct
  source 1..110: mol_type = other DNA
aatggcatcagctcagttcctggacacccaagccaatctgaacatgggtcacaacagacttgagaagctctgtgcttgcatttccagtccctataaaccacccgctacca

SEQ ID NO: 49437 - DNA, 110 bp, synthetic construct
  source 1..110: mol_type = other DNA
agacttgagaagctctgtgcttgcatttccagtccctataaaccacccgctaccaccctcatctcacagccccagagaagttctgttaatgattcctatcttcacattaa

SEQ ID NO: 49438 - DNA, 110 bp, synthetic construct
  source 1..110: mol_type = other DNA
tgagggtgtcaaaatatgtaggtggcaaaaagagacaagaatagctagtatgttaggtgggaggttctggattctaacagctgtcaacagagcagaacaaacaattctgc

SEQ ID NO: 49439 - DNA, 110 bp, synthetic construct
  source 1..110: mol_type = other DNA
ggtgggaggttctggattctaacagctgtcaacagagcagaacaaacaattctgccaaagcaagtgagagcagcactttataagaatggatacagttgttaggtttagac

SEQ ID NO: 49440 - DNA, 110 bp, synthetic construct
  source 1..110: mol_type = other DNA
gtaggtctgggtggagcccagaaatctgaattttaagcaggcagcccagtgattctgatgcaggggaagcactatcctgagcgctcagacacagctgtgctctaaaatag

SEQ ID NO: 49441 - DNA, 110 bp, synthetic construct
  source 1..110: mol_type = other DNA
tgatgcaggggaagcactatcctgagcgctcagacacagctgtgctctaaaatagaagagttatccatgtccctgattgaaaacttcaaacaactaccattctacacttt

SEQ ID NO: 49442 - DNA, 110 bp, synthetic construct
  source 1..110: mol_type = other DNA
gggtgataatgatgtccacttcatagtgtggttctacgaattaataaaggaaatcattcacatgttagctgcaatggttattcgatgttatgatgactaagtagggaaat

SEQ ID NO: 49443 - DNA, 110 bp, synthetic construct
  source 1..110: mol_type = other DNA
attcacatgttagctgcaatggttattcgatgttatgatgactaagtagggaaatacttaacctgtgtctcatattttaggaaaaacatatcagaaagtttacaggtaag

SEQ ID NO: 49444 - DNA, 110 bp, synthetic construct
  source 1..110: mol_type = other DNA
actttaatcatctatctcaaacataatactaatttaacgtttcctatttagcttaatataatgtgtttccacactggctgggattttgtaggcttaaaggcctgtaaata

SEQ ID NO: 49445 - DNA, 110 bp, synthetic construct
  source 1..110: mol_type = other DNA
atataatgtgtttccacactggctgggattttgtaggcttaaaggcctgtaaatattttttgaataaatcattaaaagcctgctttttaaattaggcaaacacacactat

SEQ ID NO: 49446 - DNA, 110 bp, synthetic construct
  source 1..110: mol_type = other DNA
cctagccaggaatctgattttgctcattaattacatatcccatcaaaagctaaaccatagaagattagggaaaagaaaggtattttagtgatttcactagtctttttgcc

SEQ ID NO: 49447 - DNA, 110 bp, synthetic construct
  source 1..110: mol_type = other DNA
tctgtagcctgtgaaaatttcaaggaccatattcctgtctgtgaagaatgttgtagggtcaggccactcaagatggctattctcttggtctctgttcatctgcttgagca

SEQ ID NO: 49448 - DNA, 110 bp, synthetic construct
  source 1..110: mol_type = other DNA
tccaactcacattttctagaactttctttacaacaactctcttgccattcattatctggctacaagtggtgaccaatttgaagtttcccatcccactgcttacaaaagga

SEQ ID NO: 49449 - DNA, 110 bp, synthetic construct
  source 1..110: mol_type = other DNA
catttttcagataaggaatcaggcttagctggtgtaattaatgctgcttgaggttatatattgagtacatgatggacacggatcccacttccagatctttcccctgcaga

SEQ ID NO: 49450 - DNA, 110 bp, synthetic construct
  source 1..110: mol_type = other DNA
atcagcctcaaggccaatctcatgctcactaacaactgacccaagtgtggcaggacagatgccagaggcaaaaaaggcaacccagctcctggacccacattgcttttcag

SEQ ID NO: 49451 - DNA, 110 bp, synthetic construct
  source 1..110: mol_type = other DNA
cagatgccagaggcaaaaaaggcaacccagctcctggacccacattgcttttcagttatttaccaggcagcattcacctttttgatgtccaagacttttcttttctcctg

SEQ ID NO: 49452 - DNA, 110 bp, synthetic construct
  source 1..110: mol_type = other DNA
aataatgtctccctcacactccctgtgccccaaagatggccatgtctaaatccgtggaacctgtgaatgtgtcaggctatatggcaaagaattaaggttgatcatcagct

SEQ ID NO: 49453 - DNA, 110 bp, synthetic construct
  source 1..110: mol_type = other DNA
ctgcatgagaaacagtggtgtccatggtgttcttgtttggtgctgttcctgtttccctacagctcagtcagtacagtacatcagagtggggatggccatgacaaccagaa

SEQ ID NO: 49454 - DNA, 110 bp, synthetic construct
  source 1..110: mol_type = other DNA
ctggtcagtatcagccacaggaataacctcgtcccttgtcccgaccgtggttccgagcttctttgcgtagcagatccaggtattcgccgagccccccacgttttcctgcc

SEQ ID NO: 49455 - DNA, 110 bp, synthetic construct
  source 1..110: mol_type = other DNA
ttacttctaactcactggctcaaactattcatcccccccccactgcccaacatctctatcttactcccacctccaaaaaaactcagctttcccttagaccttctctctcc

SEQ ID NO: 49456 - DNA, 110 bp, synthetic construct
  source 1..110: mol_type = other DNA
ctatcttactcccacctccaaaaaaactcagctttcccttagaccttctctctcctaaactacatgccatcgttcctttcccattcccttttgaaaatcatctctttctt

SEQ ID NO: 49457 - DNA, 110 bp, synthetic construct
  source 1..110: mol_type = other DNA
tggcaaaatctatctgcatctaggccagaaatctgggagttagtctgacctcctccctttattatgaatcaacagaatttgacaaatgtatggcttctccttaatttctt

SEQ ID NO: 49458 - DNA, 110 bp, synthetic construct
  source 1..110: mol_type = other DNA
cctttattatgaatcaacagaatttgacaaatgtatggcttctccttaatttcttagtctcctcttcaagtttaaggacttctcatttcttccctgaactattttatttg

SEQ ID NO: 49459 - DNA, 110 bp, synthetic construct; identical to SEQ ID NO: 49457
  source 1..110: mol_type = other DNA

SEQ ID NO: 49460 - DNA, 110 bp, synthetic construct; identical to SEQ ID NO: 49458
  source 1..110: mol_type = other DNA

SEQ ID NO: 49461 - DNA, 110 bp, synthetic construct
  source 1..110: mol_type = other DNA
gggaaatacgctattttagtagccatagtgaaactgttgtattccctaataatgcacactgccgtttccccattctgggcttcattgctaattaagctgaaagttgactc

SEQ ID NO: 49462 - DNA, 110 bp, synthetic construct
  source 1..110: mol_type = other DNA
acactgccgtttccccattctgggcttcattgctaattaagctgaaagttgactctgatcaaatgatgactttgacattttatactttcctcttagtaaattgagctcac

SEQ ID NO: 49463 - DNA, 110 bp, synthetic construct
  source 1..110: mol_type = other DNA
tacttccccctagagggaaaaaaacatacaaaaaaagagtaaatttaaatgatttaaatgtaagaaactacccagttaccatgtgagcaaacttcattcttctagctact

SEQ ID NO: 49464 - DNA, 110 bp, synthetic construct
  source 1..110: mol_type = other DNA
aaatgtaagaaactacccagttaccatgtgagcaaacttcattcttctagctacttaggcctggctttttttgagtactagaattttattttcccccatttgcctattta

SEQ ID NO: 49465 - DNA, 110 bp, synthetic construct
  source 1..110: mol_type = other DNA
actgaaatttagcatcttatctaacaagaggttcagaacgtgatgtatatatggtctgttagggtcaagctccacttctcagtggttctcttagcaaggccacttccaag

SEQ ID NO: 49466 - DNA, 110 bp, synthetic construct
  source 1..110: mol_type = other DNA
ctgttagggtcaagctccacttctcagtggttctcttagcaaggccacttccaagtgtcgactttgttcttgggctgaaggcagtgtggctaagtcccacctagacacac

SEQ ID NO: 49467 - DNA, 110 bp, synthetic construct
  source 1..110: mol_type = other DNA
tgttcctactaccttccctttgttgtgaaatcccaaatatcctagcttcccacctcatctcctcagaatggtttctcagggcaacctgagatgctgtctcccaggcttaa

SEQ ID NO: 49468 - DNA, 110 bp, synthetic construct; identical to SEQ ID NO: 49467
  source 1..110: mol_type = other DNA

SEQ ID NO: 49469 - DNA, 110 bp, synthetic construct
  source 1..110: mol_type = other DNA
aggcagaggaatataaacagagttctgggacagaagccaaaggtcaggagctagtgagtcaacataagactataaagtccaaaggggaagaaaaatgatggagaggcgag

SEQ ID NO: 49470 - DNA, 110 bp, synthetic construct
  source 1..110: mol_type = other DNA
gagtcaacataagactataaagtccaaaggggaagaaaaatgatggagaggcgagacagagattagagataggaccactcggtgatggcaccaagttggtagcaggttaa

SEQ ID NO: 49471 - DNA, 110 bp, synthetic construct
  source 1..110: mol_type = other DNA
ttctaccaaactaacttgaacacactcaacatttctttcccttttcttattctttgctaacatgagtcttttctaattactacgtgattagaaagcataaacattaatgc

SEQ ID NO: 49472 - DNA, 110 bp, synthetic construct
  source 1..110: mol_type = other DNA
ttgaacacactcaacatttctttcccttttcttattctttgctaacatgagtcttttctaattactacgtgattagaaagcataaacattaatgctgatgtgatcttcca

SEQ ID NO: 49473 - DNA, 110 bp, synthetic construct
  source 1..110: mol_type = other DNA
aaaatattttgagtgcagatttgcataagtatgatggtttattttctcccctcactctactatttttcttttaaacctgatttctccagatagtaagtccttcttcagct

SEQ ID NO: 49474 - DNA, 110 bp, synthetic construct
  source 1..110: mol_type = other DNA
tctactatttttcttttaaacctgatttctccagatagtaagtccttcttcagctgccccacagtcatattttactaattttttttttctgcacctgaggcacatggaat

SEQ ID NO: 49475 - DNA, 110 bp, synthetic construct
  source 1..110: mol_type = other DNA
caactttatgtttataattttatggaataaattgtaaagtatatcatcttcccaccccttctcacctcagactgtaagctgcatgagagcaaggaccacatctataaaaa

SEQ ID NO: 49476 - DNA, 110 bp, synthetic construct
  source 1..110: mol_type = other DNA
cccttctcacctcagactgtaagctgcatgagagcaaggaccacatctataaaaaaacacttaagaaatatttgttgaaccagtagatgaatggattaccggtagatgaa

SEQ ID NO: 49477 - DNA, 110 bp, synthetic construct
  source 1..110: mol_type = other DNA
tctagtatacaactgccttttcacctcctgctctgccttccaccttctaatttttcagtgcccttttaatggttcctaactgtccaaagttttccctttcccaccagggc

SEQ ID NO: 49478 - DNA, 110 bp, synthetic construct
  source 1..110: mol_type = other DNA
cagtgcccttttaatggttcctaactgtccaaagttttccctttcccaccagggctttctagcttccatgctctaaaatgatctcttctttcctgaccagccctatttcc

SEQ ID NO: 49479 - DNA, 110 bp, synthetic construct
  source 1..110: mol_type = other DNA
tccttgtaagctctaagctgagaagtctcacagtgtcacttctaccacattcccttcatcaaagcaggttgcagagctgcctaaaattaacggaaggggaaatagcatca

SEQ ID NO: 49480 - DNA, 110 bp, synthetic construct
  source 1..110: mol_type = other DNA
tgatatgaattgggccatttattatatctggaggttcctggaagaccagaagactaatagaaaatgctcacttggaagctccatgaaagatttcccaatcaccctgagga

SEQ ID NO: 49481 - DNA, 110 bp, synthetic construct
  source 1..110: mol_type = other DNA
aaggtttcttccatgttagggcatgccctaccatcgcctggaatattgtcctcatctgctgagtcatgttcagctcctcagaagatgaaaggagtgtgaaggtgagcaca

SEQ ID NO: 49482 - DNA, 110 bp, synthetic construct
  source 1..110: mol_type = other DNA
tttcctggaaaagatccacaattgaaattatattccaggaattttcctggtgaaccaaacaacttggtatgaatgataatctagagtcattttgttgataaaacataact

SEQ ID NO: 49483 - DNA, 110 bp, synthetic construct
  source 1..110: mol_type = other DNA
agttatttgataatgtgtccagcttctatatcaaagaaatatctacaaaagtattccttgctcaggcagtttcagtgatctaagaaataggtatttcccatatcctgcca

SEQ ID NO: 49484 - DNA, 110 bp, synthetic construct
  source 1..110: mol_type = other DNA
tacatcctgttgcactggtagtgataatattatattaatagccatgaggtaacggagctgaagagtggaatagaaggtgtctacttcctggccataaaacgtgagtagtt

SEQ ID NO: 49485 - DNA, 110 bp, synthetic construct
  source 1..110: mol_type = other DNA
ccttttagtggtaacttatcaaagctttgtgaatttgtcataagtattatggagggcaactgaaaatataattcttggagttctcactgtgcctcagtgggttaagaatc

SEQ ID NO: 49486 - DNA, 110 bp, synthetic construct
  source 1..110: mol_type = other DNA
cagcttctgttgactctgggcattcagtcccattttgttaaacataactcactggcttgaactatgcttcagatgttaaatacgtaaagagagggcctaaattcacactg

SEQ ID NO: 49487 - DNA, 110 bp, synthetic construct
  source 1..110: mol_type = other DNA
cttgaactatgcttcagatgttaaatacgtaaagagagggcctaaattcacactgagggtacttttataaagattaaagaaagacttcgaaaggacaataataaaaggat

SEQ ID NO: 49488 - DNA, 110 bp, synthetic construct
  source 1..110: mol_type = other DNA
agatttgcacaaaacctgttgagtccaaggcccagtcatgagtcattgtgtttttctacccatttttaaatttctagggttgtggaggtcatctctatttaagtcctatc

SEQ ID NO: 49489 - DNA, 110 bp, synthetic construct
  source 1..110: mol_type = other DNA
ctacccatttttaaatttctagggttgtggaggtcatctctatttaagtcctatcatttcctccacctacgctaggcaaatattatctagaacataatgaaatccactgt

SEQ ID NO: 49490 - DNA, 110 bp, synthetic construct
  source 1..110: mol_type = other DNA
gggatgggtccagtcggagtgtagcggccggcctacaccacaggcacagcaacttgggatagagatgcgtctgcgagctaccgcatagctggcggcatccctggatcctg

SEQ ID NO: 49491 - DNA, 110 bp, synthetic construct
  source 1..110: mol_type = other DNA
caccacaggcacagcaacttgggatagagatgcgtctgcgagctaccgcatagctggcggcatccctggatcctggacctactgagcaaggccagggatggaatccgagt

SEQ ID NO: 49492 - DNA, 110 bp, synthetic construct
  source 1..110: mol_type = other DNA
catgttgcccccagaaaataaacacaatcaggattcctccagaaaaccaaagagagtgttcatgacttaccaggtgattctccggttagccaggcagccaagacttttgt

SEQ ID NO: 49493 - DNA, 110 bp, synthetic construct
  source 1..110: mol_type = other DNA
gtgttcatgacttaccaggtgattctccggttagccaggcagccaagacttttgtaaatataaaccttgggctctgtatcaagggtgatgggaataattcacaaacttgt

SEQ ID NO: 49494 - DNA, 110 bp, synthetic construct
  source 1..110: mol_type = other DNA
gtcaatgtatgtcaagacgatgataattaaatttcacttgaagttcagagacgaagtgattaaatttgaacttaaatctctccgaattaggtagctctcttggatttcac

SEQ ID NO: 49495 - DNA, 110 bp, synthetic construct
  source 1..110: mol_type = other DNA
gtgattaaatttgaacttaaatctctccgaattaggtagctctcttggatttcacagagggaaaattcgacttgaatatcaggaggaatataattatcttgttcaagata

SEQ ID NO: 49496 - DNA, 110 bp, synthetic construct
  source 1..110: mol_type = other DNA
catgatttaaaggatattttttttttcctttcaaacacaaactgcctttgtcatgcctgctgcctgactcatgattaacacctggcaaacatttttaatggttttaattg

SEQ ID NO: 49497 - DNA, 110 bp, synthetic construct
  source 1..110: mol_type = other DNA
ctcttttctccacgcagctagccagaggccccgaaacttttagtttccgcggccctccttttgtgtgactgctcgctagagaaagaacgtctgttcgcctcggctgcctc

SEQ ID NO: 49498 - DNA, 110 bp, synthetic construct
  source 1..110: mol_type = other DNA
ctgttagataagcacataattatattttcttctagtcatctagatactgcacctcagctgcacacttaaataggcattagtagagagttggagaggattcgtcggtggct

SEQ ID NO: 49499 - DNA, 110 bp, synthetic construct
  source 1..110: mol_type = other DNA
ataacctaacagcaatgttctaaggtggggagagggggtggcttaccttctttcatctcaaagctatcgctatttaaaaaaaccacccatgacttgtgcatgccaagtgg

SEQ ID NO: 49500 - DNA, 110 bp, synthetic construct
  source 1..110: mol_type = other DNA
tctcaaagctatcgctatttaaaaaaaccacccatgacttgtgcatgccaagtgggctttggtttagtttacaaggatcagtagatgcgactcacttgcatatttacttg

SEQ ID NO: 49501 - DNA, 110 bp, synthetic construct
  source 1..110: mol_type = other DNA
aatccatactataattaaatctactacgtcttattttgaaatgaatcatttaccttatgaatctatgtaggctccatactcttcagaactagttgtgaggtttagagtca

SEQ ID NO: 49502 - DNA, 110 bp, synthetic construct; identical to SEQ ID NO: 49501
  source 1..110: mol_type = other DNA

SEQ ID NO: 49503 - DNA, 110 bp, synthetic construct
  source 1..110: mol_type = other DNA
aagtaataggacatgctaaggaactatttctgtgtctcgttatacatcttacattgctgttccagtaccctagatttgcttagacagttaactgctgccaaacatagcag

SEQ ID NO: 49504 - DNA, 110 bp, synthetic construct
  source 1..110: mol_type = other DNA
gctgttccagtaccctagatttgcttagacagttaactgctgccaaacatagcagcagtcgattctctggaaaagaaacactgatggcactgtctggttgtggaacacgg

SEQ ID NO: 49505 - DNA, 110 bp, synthetic construct
  source 1..110: mol_type = other DNA
tgttctcgtgggttttgttttctttttcttttcttttctttttttttttttttttgcccctcctgcagcatgtggaagttcctggatcaggaattgaacccatgccatag

SEQ ID NO: 49506 - DNA, 110 bp, synthetic construct
  source 1..110: mol_type = other DNA
ttctttttttttttttttttgcccctcctgcagcatgtggaagttcctggatcaggaattgaacccatgccatagcagcgacccaagccacttcagtgacaatgcctgat

SEQ ID NO: 49507 - DNA, 110 bp, synthetic construct
  source 1..110: mol_type = other DNA
aagtacaggataatgataaaaattgaaattggggtttgtagggaaatattaaaactttgctacccgctacagctgagtcagaacaaagtaagtagacaaatccaaattga

SEQ ID NO: 49508 - DNA, 110 bp, synthetic construct
  source 1..110: mol_type = other DNA
tttgctacccgctacagctgagtcagaacaaagtaagtagacaaatccaaattgaataatgcaggttgctgcacttctgattgtgaggcccaaataatctgggccagtgc

SEQ ID NO: 49509 - DNA, 110 bp, synthetic construct
  source 1..110: mol_type = other DNA
aaagagataaaaggaggactgaggaagcagtatcactaagccaaagaaagaagagctcagagatgtcaaatagctcagaaacgcagatggcttagacaccagatacaagg

SEQ ID NO: 49510 - DNA, 110 bp, synthetic construct
  source 1..110: mol_type = other DNA
ctcagagatgtcaaatagctcagaaacgcagatggcttagacaccagatacaaggaataatgaaaggagtctgttggatttggcaattggtgcttgggggggtcctttca

SEQ ID NO: 49511 - DNA, 110 bp, synthetic construct
  source 1..110: mol_type = other DNA
tagagtcagaatacttgggttcaaatcctagttcaaactcagttcttgcaaatgactccctggcccgccaatccccacccccaccatcacttcagcctccttgaacctca

SEQ ID NO: 49512 - DNA, 110 bp, synthetic construct
  source 1..110: mol_type = other DNA
attagaatttctgaaagaaaaggaagtccttgaacttctgcttctatctcagctcacaaaacataatctctgagggccttgaggagcaattaagctattgctatcttctc

SEQ ID NO: 49513 - DNA, 110 bp, synthetic construct
  source 1..110: mol_type = other DNA
ataggtacttaaatgcagctatttgagggcagttcctcttgatctgtagagctatgaaactacacagacaatacatgctcccccttcacacttattcaaaatacagtggt

SEQ ID NO: 49514 - DNA, 110 bp, synthetic construct
  source 1..110: mol_type = other DNA
catcattaagaccaatgccaaggagtgtacctgctatgttatcttctaggagttttacaatttcaagtttaattttcaagaccataatccatttagcgttggtttttggg

SEQ ID NO: 49515 - DNA, 110 bp, synthetic construct
  source 1..110: mol_type = other DNA
gcattgtccaagcctcttgtagttaaactacccaggtgaaaacttctcaggtatagtaggtacttcaaaagttcatagaaacgtaagctaatatgaagtaaaaggccatt

SEQ ID NO: 49516 - DNA, 110 bp, synthetic construct
  source 1..110: mol_type = other DNA
tatatgggaaaggaatctgaaaaagaatggatatatatattatgtatgtataactgagtcactttacacctgaaactaacacaacactgaaagtcaaccatggtccaata

SEQ ID NO: 49517 - DNA, 110 bp, synthetic construct
  source 1..110: mol_type = other DNA
aatgtaagcttagatgaggcattatcttcagctgatgtgtttccttagtttctctaaaggaggctgacagctgagggattttcgatggtagctttcttgcagctgaggga

SEQ ID NO: 49518 - DNA, 110 bp, synthetic construct
  source 1..110: mol_type = other DNA
aaaggaggctgacagctgagggattttcgatggtagctttcttgcagctgagggaatgaaagtcctggaaccctgaaggggatgtgggcactgcctcacagcatcctcca

SEQ ID NO: 49519 - DNA, 110 bp, synthetic construct
  source 1..110: mol_type = other DNA
tttttagtaattcattgctgtgtaacaaattgcttttcttcccttcccccagcatagaggtttaaaacaattattcattatctttctgattctgtgggatactgaaccca

SEQ ID NO: 49520 - DNA, 110 bp, synthetic construct
  source 1..110: mol_type = other DNA
agaggtttaaaacaattattcattatctttctgattctgtgggatactgaacccaaatgagcagttattctgctgcacatgatgtttgatggggctgccgtcatccaggg

SEQ ID NO: 49521 - DNA, 110 bp, synthetic construct
  source 1..110: mol_type = other DNA
atgagtaggataattaaaatgtttcaatctcttcaattattttgtgtgattctgctcttctcctacactaataaaatgagctgaaatgtttaaaaactactggcacctcc

SEQ ID NO: 49522 - DNA, 110 bp, synthetic construct
  source 1..110: mol_type = other DNA
tcttctcctacactaataaaatgagctgaaatgtttaaaaactactggcacctccttttttgccaaacttacatgctatgaatgccaatattttggtgacacattacttt

SEQ ID NO: 49523 - DNA, 110 bp, synthetic construct
  source 1..110: mol_type = other DNA
ctcatttataattttgatggcaatacatcttttctctggttaggcctctgtagctcttctagagcatatgttcctgaatacttttctatgtggccagaccatttttattg

SEQ ID NO: 49524 - DNA, 110 bp, synthetic construct
  source 1..110: mol_type = other DNA
ggaaggcagttgtctgcctcccacataagaagcagaaaaaacaaatcctttctgttctcatcttttgacaactaaaggacaagctagtgacctcagcttcatcgcttgga

SEQ ID NO: 49525 - DNA, 110 bp, synthetic construct
  source 1..110: mol_type = other DNA
ccttctctcccattttcttgtgcatgtaatagcaagctcaccatgtatctattcgtctattgatggacccaggccaatagaacttccagattttactgattataactctc

SEQ ID NO: 49526 - DNA, 110 bp, synthetic construct
  source 1..110: mol_type = other DNA
ttatttgatgcacaagcatgtgcataaggttagctctgtaatgtatagttaaaaatggtcaagatggtaggatttcccatcgtggcatagtggaaacgaatccaactagg

SEQ ID NO: 49527 - DNA, 110 bp, synthetic construct
  source 1..110: mol_type = other DNA
aagttctaactcatatggatacctacacagaagccaaaatttgaataaactccgcattaagcgttgaactaaatatatatctgtatttgtcaggccccagttggctagct

SEQ ID NO: 49528 - DNA, 110 bp, synthetic construct
  source 1..110: mol_type = other DNA
agattttgcatctttctcctatgcttcagagaaaggtgaaagggagggtttggaatttgggaatgagcagtctggaaaggggaaacagctgattgggtgaaatccaaaat

SEQ ID NO: 49529 - DNA, 110 bp, synthetic construct
  source 1..110: mol_type = other DNA
aaaccttgctttagtgatatgggcaatctatagggagccaccaggtaacatcaaggcttaaacaaccttaaaacaggtagcaaagatatggaaatcaagtctgagtaatt

SEQ ID NO: 49530 - DNA, 110 bp, synthetic construct
  source 1..110: mol_type = other DNA
cctgggtcattaaatgaaacttcgcttctttctgggcacacagctagagttcatttcctgactccacatagttaggcataccatgtgacagttctaaccatcagaatgtg

SEQ ID NO: 49531 - DNA, 110 bp, synthetic construct
  source 1..110: mol_type = other DNA
ggtttcatcacttctgggtttttgtggtcagtgagttagcttccagagatttcttactccttctcaaacttgacagccagcttttgtttttctatccacctacaaatttg

SEQ ID NO: 49532 - DNA, 110 bp, synthetic construct
  source 1..110: mol_type = other DNA
ttagttcagggagttgcttgcctattgcctgtgcctgggtgactcttcccacacgcagctgcctcatatctctttattggaaaacttatatcacaataccactccctcgc

SEQ ID NO: 49533 - DNA, 110 bp, synthetic construct
  source 1..110: mol_type = other DNA
agccagctctgccactgctgagctagaagggtccatctagccagtgtggtttcctccatgcttccaaccagtcaatccttaaggaaaggctccatgaactagtactggac

SEQ ID NO: 49534 - DNA, 110 bp, synthetic construct
  source 1..110: mol_type = other DNA
agtattttgctgtaaatacagactatctattataaccagatggcaaatgtgcatgaatgatcagtttgcttaataaacttcacattggttttctccagactgtctttgat

SEQ ID NO: 49535 - DNA, 110 bp, synthetic construct
  source 1..110: mol_type = other DNA
atgatgctgcaccaagaatcgtcatttcagtacacttacatatagttattatttaaatgtgttaggaagttcttcttagcagtatcatgtaagtacaagaaatatagtca

SEQ ID NO: 49536 - DNA, 110 bp, synthetic construct
  source 1..110: mol_type = other DNA
tactcaaccacacatggctggcttttgaggtggaaacagtccatgagccaagggatgtgggcagcttctatgagctgaaaaaggcaagaagatggattctatcccagagc

SEQ ID NO: 49537 - DNA, 110 bp, synthetic construct
  source 1..110: mol_type = other DNA
tactcttatttgggggtccctgttaatttttcctgtttcatcacaagctcagttactcatttaatataagatgttaaaaaacacccagattcaagtcatattgaagaaag

SEQ ID NO: 49538 - DNA, 110 bp, synthetic construct
  source 1..110: mol_type = other DNA
attcattaactgctgagccacaacgggaactccgtacgtgcagcatttaaagctgcagatcttcattatgactttatcataactggagcccatatttcaccaatattttg

SEQ ID NO: 49539 - DNA, 110 bp, synthetic construct
  source 1..110: mol_type = other DNA
tcaaataggtctccttattcagatctataattaccttgttctctctcatccttcctctgttgaagcttaatgttcaatggaatttaaaacttgtcatcaggtgtctaagt

SEQ ID NO: 49540 - DNA, 110 bp, synthetic construct
  source 1..110: mol_type = other DNA
gaaggcactagactttatgattgatcccaaacggaaggcagtttgttccgatattgcactaatgattcattcatatcactaagaaaggtctagtaggtctggaaatgacc

SEQ ID NO: 49541 - DNA, 110 bp, synthetic construct
  source 1..110: mol_type = other DNA
ggaaagctaatgtcttgaatagcagaaacctgactaccagctccagctctgtatcctgagtccattccaacaggccagaactcatgccctctagtttgctaaatgttttg

SEQ ID NO: 49542 - DNA, 110 bp, synthetic construct
  source 1..110: mol_type = other DNA
ctgaacccggctgcataaaattctcctaaatagatgtacctattttttggaagcttgttagttgccatattgttgacaaaagttgacactttttatctgaatctctgatt

SEQ ID NO: 49543 - DNA, 110 bp, synthetic construct
  source 1..110: mol_type = other DNA
tgttagttgccatattgttgacaaaagttgacactttttatctgaatctctgattgtttccttggcataatcccctaaatgtgaactgttgagccagtacgtgtacacac

SEQ ID NO: 49544 - DNA, 110 bp, synthetic construct
  source 1..110: mol_type = other DNA
tcatctttgtattcccaacacttggctcattctctagcatacaataggagctcaataaatcctcaggaattggattgaacacgagtacattcacaagacctgcccagtgg

SEQ ID NO: 49545 - DNA, 110 bp, synthetic construct
  source 1..110: mol_type = other DNA
taaatcctcaggaattggattgaacacgagtacattcacaagacctgcccagtggacatggggaacgtgagtactgttgaccttcagcagaatgaaggtgtccaaattat

SEQ ID NO: 49546 - DNA, 110 bp, synthetic construct
  source 1..110: mol_type = other DNA
ttgtgtccccacaagtaaatatattaaaagtccttttcttaagacttctaacagccctgtgatattaaagaagctaaggtaagaaacaaatagggttggtttctactctt

SEQ ID NO: 49547 - DNA, 110 bp, synthetic construct
  source 1..110: mol_type = other DNA
cctgtgatattaaagaagctaaggtaagaaacaaatagggttggtttctactcttctggcagtcgagaaattgagaaacaatccaactcaaagatgtgagaggacacagg

SEQ ID NO: 49548 - DNA, 110 bp, synthetic construct
  source 1..110: mol_type = other DNA
caacaccggatccttaacccactgtaatggatgctagtcagattcatttccacttatccacgatggaaactccaagattttattttttatggctagttaatattcctctg

SEQ ID NO: 49549 - DNA, 110 bp, synthetic construct; identical to SEQ ID NO: 49548
  source 1..110: mol_type = other DNA

SEQ ID NO: 49550 - DNA, 110 bp, synthetic construct
  source 1..110: mol_type = other DNA
tactagagtcacttggctatattcacatgttcaactgaaataatgagttccataatttctcactctctgagtgggcagcattatcctcaaataattttttcaagctatat

SEQ ID NO: 49551 - DNA, 110 bp, synthetic construct
  source 1..110: mol_type = other DNA
tttctcactctctgagtgggcagcattatcctcaaataattttttcaagctatataaagtgtttccttttgctccagtatagagaacactgaaggaaatctatatattaa

SEQ ID NO: 49552 - DNA, 110 bp, synthetic construct
  source 1..110: mol_type = other DNA
aaactgaaagcccttccgtacgatttccattaaaaatgatggagaaaatagtgtcagctcttcaggtagtaaatgttagttacctagaagcctcactggtgtggagaact

SEQ ID NO: 49553 - DNA, 110 bp, synthetic construct
  source 1..110: mol_type = other DNA
agctcttcaggtagtaaatgttagttacctagaagcctcactggtgtggagaactccatttcccagaatccattgcgaaagacggagattgtggcatctccataaattag

SEQ ID NO: 49554 - DNA, 110 bp, synthetic construct
  source 1..110: mol_type = other DNA
tgaaaatataaatgatatgacacctatggataaggcttcttctattaaagctgatcacagaagcatatttccttttcaagatggtaagaccagacagcatggaacaaaag

SEQ ID NO: 49555 - DNA, 110 bp, synthetic construct
  source 1..110: mol_type = other DNA
cacagaagcatatttccttttcaagatggtaagaccagacagcatggaacaaaaggccaaacatatgattttttttttattcgtttttgtctttttagggtcacacccat

SEQ ID NO: 49556 - DNA, 110 bp, synthetic construct
  source 1..110: mol_type = other DNA
catcagcgaagatccttcatcttctaataatccatttcaaaaagtaaatgtgattaaaggcagatgtcctgattacaaatatcaagatgtttttggttctgcacaaggtt

SEQ ID NO: 49557 - DNA, 110 bp, synthetic construct
  source 1..110: mol_type = other DNA
aataatccatttcaaaaagtaaatgtgattaaaggcagatgtcctgattacaaatatcaagatgtttttggttctgcacaaggtttttcttcctcttgtacctaagaagc

SEQ ID NO: 49558 - DNA, 110 bp, synthetic construct
  source 1..110: mol_type = other DNA
tttctcttggcttttcacagattattattagttctttgtatacttcttacactaaactctaatggagtagtagaatactgcaattattcccggcacacttttcctagggg

SEQ ID NO: 49559 - DNA, 110 bp, synthetic construct
  source 1..110: mol_type = other DNA
actctaatggagtagtagaatactgcaattattcccggcacacttttcctaggggagacctagagttctaggcagagagaaaaaaaagtaggttggcaggggatggggag

SEQ ID NO: 49560 - DNA, 110 bp, synthetic construct
  source 1..110: mol_type = other DNA
agaaaaagtgttaaaactatgcatgagtttcggagccagacagcttagattcaaattctgactctactacttaatagctgtgtaaccttggctaagtttcttatcttctc

SEQ ID NO: 49561 - DNA, 110 bp, synthetic construct
  source 1..110: mol_type = other DNA
ttctgactctactacttaatagctgtgtaaccttggctaagtttcttatcttctccattcctcagtattctcatttataaaatgggaataaaatctacctcattgggtgt

SEQ ID NO: 49562 - DNA, 110 bp, synthetic construct
  source 1..110: mol_type = other DNA
agacatttatattcagaagcaaacacatggtcagcaaggttggcgattccgggaatcagtgtagaacgtcaaggtttggtgagttgactgatctcacatagcttatgaga

SEQ ID NO: 49563 - DNA, 110 bp, synthetic construct
  source 1..110: mol_type = other DNA
tcagtgtagaacgtcaaggtttggtgagttgactgatctcacatagcttatgagaaatattacctttggcacatgacacagactacatttgctttcttgatttgaaaaga

SEQ ID NO: 49564 - DNA, 110 bp, synthetic construct
  source 1..110: mol_type = other DNA
aatgggagggaaaccgtggcctattttgtaccaggggaatagttcagagataagttcaggacgtcgctgtagactgttcagataaaggtatctggttcacaatgctttta

SEQ ID NO: 49565 - DNA, 110 bp, synthetic construct
  source 1..110: mol_type = other DNA
tcaggacgtcgctgtagactgttcagataaaggtatctggttcacaatgcttttagcttgttatcttaccctactaagtatctgttctatatgatttatttgtaataaat

SEQ ID NO: 49566 - DNA, 110 bp, synthetic construct
  source 1..110: mol_type = other DNA
aaagactttctgacgttggcggggagagtggaatcaaggcaaatgggtagagtccaaaaatacatcagctttgggatgagccgtgggatgagccatgcctgcctggttca

SEQ ID NO: 49567 - DNA, 110 bp, synthetic construct
  source 1..110: mol_type = other DNA
aaaaatacatcagctttgggatgagccgtgggatgagccatgcctgcctggttcacagtggtccctcttcagtactactgcatgtaatgcagggctcattagaccacaga

SEQ ID NO: 49568 - DNA, 110 bp, synthetic construct
  source 1..110: mol_type = other DNA
tgttttgttttttgtttcttagggctgcgcctttttaggaactttcatatgctgctttttagggagggaggagatccttgtgcgtccctcccagggttgtggtaggacag

SEQ ID NO: 49569 - DNA, 110 bp, synthetic construct
  source 1..110: mol_type = other DNA
taggaactttcatatgctgctttttagggagggaggagatccttgtgcgtccctcccagggttgtggtaggacagacaaagctaatccacggagcacagcagcaggggaa

SEQ ID NO: 49570 - DNA, 110 bp, synthetic construct
  source 1..110: mol_type = other DNA
gtaggcaacagaaggcaattgtaactgattcaagtaaagaaggtatttactgaaagcatattgattagcttaccaaattgctgggaaggctgaagctttaaagagtcagg

SEQ ID NO: 49571 - DNA, 110 bp, synthetic construct
  source 1..110: mol_type = other DNA
gcatattgattagcttaccaaattgctgggaaggctgaagctttaaagagtcaggaacaaagaagacaaagtaacagaaaagacatttctaaaatcgtggcataaaacca

SEQ ID NO: 49572 - DNA, 110 bp, synthetic construct
  source 1..110: mol_type = other DNA
cgcactgatctttttcagagggatcctaaacatgtcctgataactgatttctttggaagtgtacggaaagtggaaattacaacagagactataagtttgcagccagattc

SEQ ID NO: 49573 - DNA, 110 bp, synthetic construct
  source 1..110: mol_type = other DNA
gaagtgtacggaaagtggaaattacaacagagactataagtttgcagccagattcaggaatcatgaaaagcaggtatccatcttaaatttttatttgaatagagtattct

SEQ ID NO: 49574 - DNA, 110 bp, synthetic construct
  source 1..110: mol_type = other DNA
acttcctctaggagaagattggacataaaggccccctgcgctcattaaaacaaacaaaaagctcccttttcattagaggaagatgatatttaatgctgccagacaagcct

SEQ ID NO: 49575 - DNA, 110 bp, synthetic construct
  source 1..110: mol_type = other DNA
aaaaagctcccttttcattagaggaagatgatatttaatgctgccagacaagcctgatccacagaattggcttctttggcctctgctaccttcgaaagggccctaagata

SEQ ID NO: 49576 - DNA, 110 bp, synthetic construct
  source 1..110: mol_type = other DNA
gaaacccggggattatatctgctcctccttggcacatggagtcagggctatatctctccctgccctggagagccactaagcttagctctcagaacccctctcaatgacac

SEQ ID NO: 49577 - DNA, 110 bp, synthetic construct
  source 1..110: mol_type = other DNA
ctccctgccctggagagccactaagcttagctctcagaacccctctcaatgacacctccaccagccagtgccaaggctggaattaggcttctgagatgaatcagtcccag

SEQ ID NO: 49578 - DNA, 110 bp, synthetic construct
  source 1..110: mol_type = other DNA
aaaatactacacaatcacaaggggaggatcagctaatgctagagagttcacaacggatcttggtgagggtgatattggcagtgtttcttgaagcatgggtcagtaccagc

SEQ ID NO: 49579 - DNA, 110 bp, synthetic construct
  source 1..110: mol_type = other DNA
agctattaaaagagaatgcaatttcaaaagtttccttttccttctgagctacagcatactatcaacgttaatttccctggcacaggtaaaatgggttcttagttgcctca

SEQ ID NO: 49580 - DNA, 110 bp, synthetic construct
  source 1..110: mol_type = other DNA
cggtaaatgacaataatacctacctcacgaggccatgaacattaaatgagataatacctgttaagctcttgatgtgacaagaactaggtacacagcaggaattcaataaa

SEQ ID NO: 49581 - DNA, 110 bp, synthetic construct
  source 1..110: mol_type = other DNA
cattggcacctgcaacaaaaaaattatctacttcctccaatactgtgtcattagtaaaattagctaattgtaaggactttgcagagaatgatggaatccagtggcttatg

SEQ ID NO: 49582 - DNA, 110 bp, synthetic construct
  source 1..110: mol_type = other DNA
gtttttaaattccccttgtttcagatgggttctcctaatattattcaagtagtcatgcggttaggaccagaactctggggagttggctccctacctgacgtactgcatca

SEQ ID NO: 49583 - DNA, 110 bp, synthetic construct
  source 1..110: mol_type = other DNA
tgcggttaggaccagaactctggggagttggctccctacctgacgtactgcatcatgttaatgctgaatttcagacatgaataagctactgtcggaatgcttatgaaaat

SEQ ID NO: 49584 - DNA, 110 bp, synthetic construct
  source 1..110: mol_type = other DNA
aatctatccaaaacttgcaagacctatatgaaggaaatgatgaatttttactataagacataaaaggagagttgaacaaagaaggcaatatatcatattttggggtgaga

SEQ ID NO: 49585 - DNA, 110 bp, synthetic construct; identical to SEQ ID NO: 49584
  source 1..110: mol_type = other DNA

SEQ ID NO: 49586 - DNA, 110 bp, synthetic construct
  source 1..110: mol_type = other DNA
gattcgtttccgctgtgccacgacgggaactcttttttttttttttttttggccatgtcaggcacttgtgaaatgattcacatgatccggtagagttaaagaatactgaa

SEQ ID NO: 49587 - DNA, 110 bp, synthetic construct
  source 1..110: mol_type = other DNA
tgtcaggcacttgtgaaatgattcacatgatccggtagagttaaagaatactgaatgacagccagaaacaaaagtaacaaaagatgagagtgagacaaaccattttctaa

SEQ ID NO: 49588 - DNA, 110 bp, synthetic construct
  source 1..110: mol_type = other DNA
aaaggaaaagagtgcttgtgagatcacgtgtgtcaagctagtctgggaaaaaacagaaacatgcttggtagacctgagcttttactatttgctctgcccaggccaaaccc

SEQ ID NO: 49589 - DNA, 110 bp, synthetic construct; identical to SEQ ID NO: 49588
  source 1..110: mol_type = other DNA

SEQ ID NO: 49590 - DNA, 110 bp, synthetic construct
  source 1..110: mol_type = other DNA
ttaaaatagggattgttaaactctactccgaagtcaaaaggttctcatgaggaaaagagcatcaatcagataaactttcctttatcggccacaacagaattctcagaatt

SEQ ID NO: 49591 - DNA, 110 bp, synthetic construct
  source 1..110: mol_type = other DNA
agagcatcaatcagataaactttcctttatcggccacaacagaattctcagaattcacattctattatgaaccaatgactagaaacgcatgcctccagccaggctcaggg

SEQ ID NO: 49592 - DNA, 110 bp, synthetic construct
  source 1..110: mol_type = other DNA
gaaacagacccaaagaggcagcttatgagtagcaacatgggaacttgaattcttaaacttgtatctaactctagaatcaatatctaacacaacagatcatattgtgacaa

SEQ ID NO: 49593 - DNA, 110 bp, synthetic construct
  source 1..110: mol_type = other DNA
aacttgtatctaactctagaatcaatatctaacacaacagatcatattgtgacaactccaaagcaagagttcacaaatttccatcattaactgcctcttcttctgacagt

SEQ ID NO: 49594 - DNA, 110 bp, synthetic construct; identical to SEQ ID NO: 49592
  source 1..110: mol_type = other DNA

SEQ ID NO: 49595 - DNA, 110 bp, synthetic construct; identical to SEQ ID NO: 49593
  source 1..110: mol_type = other DNA

SEQ ID NO: 49596 - DNA, 110 bp, synthetic construct
  source 1..110: mol_type = other DNA
agggagaaaggagcaatctgctattttattaacagttgagtagcaaagacctcttatcttccaaggaaccgtagtaagctcttaataaaggtgtgttgcagttcttcaaa

SEQ ID NO: 49597 - DNA, 110 bp, synthetic construct
  source 1..110: mol_type = other DNA
ttgagtagcaaagacctcttatcttccaaggaaccgtagtaagctcttaataaaggtgtgttgcagttcttcaaagtaatctattaaagaataaaataaagagagttaag

SEQ ID NO: 49598 - DNA, 110 bp, synthetic construct
  source 1..110: mol_type = other DNA
ccattacggtcagaccccaatagattccactcattctcagatattcagacatacagtattcctaaaatatagaattactttactgtgttagtttgaattgatgccagctt

SEQ ID NO: 49599 - DNA, 110 bp, synthetic construct
  source 1..110: mol_type = other DNA
gtattcctaaaatatagaattactttactgtgttagtttgaattgatgccagcttagatactgaacacacaaagccctacagccactgttacaccggtaaaatatctact

SEQ ID NO: 49600 - DNA, 110 bp, synthetic construct
  source 1..110: mol_type = other DNA
cctttttgactcagaggggtctgtctgctcatgtgtagttggggtctctctgaccccaaggacgggatgaatgtgacctcttcttttgcccaggcagggcttagctcctc

SEQ ID NO: 49601 - DNA, 110 bp, synthetic construct
  source 1..110: mol_type = other DNA
ccaaggacgggatgaatgtgacctcttcttttgcccaggcagggcttagctcctctctgccccttccattactgttacttaacatgttcacagaagacaaattccagtta

SEQ ID NO: 49602 - DNA, 110 bp, synthetic construct
  source 1..110: mol_type = other DNA
tatttctgtctccataattaggttttaagcctctggcagggaaagaccaggtcataaccgtcttttttacctttttcggtgttaacctttagctttcaaaaagatagtta

SEQ ID NO: 49603 - DNA, 110 bp, synthetic construct
  source 1..110: mol_type = other DNA
accaggtcataaccgtcttttttacctttttcggtgttaacctttagctttcaaaaagatagttacttagtaaatgtttattgaaaatgaatgctattttccttaagggc

SEQ ID NO: 49604 - DNA, 110 bp, synthetic construct; identical to SEQ ID NO: 49602
  source 1..110: mol_type = other DNA

SEQ ID NO: 49605 - DNA, 110 bp, synthetic construct; identical to SEQ ID NO: 49603
  source 1..110: mol_type = other DNA

SEQ ID NO: 49606 - DNA, 110 bp, synthetic construct
  source 1..110: mol_type = other DNA
ctagtgtcactcatttggtttctaagactataccggtagaaaggacatgaagagggagaaagtgatggcaaagatcatgcctcttcctgttctggcaagagctagcttgc

SEQ ID NO: 49607 - DNA, 110 bp, synthetic construct
  source 1..110: mol_type = other DNA
gataaagggaaacagatgtggaattataattgagctgggtttttaggaaatcactggggaaggagaagggaaaatttttccttgaggtcctaagatatgccagatatttt

SEQ ID NO: 49608 - DNA, 110 bp, synthetic construct
  source 1..110: mol_type = other DNA
tagtcaacctagggcagcagaacctctgataaataagagatgccttagaacacggctgcctaataaatttggtagtggagaggagaggcagagtagaccatatagcgtgt

SEQ ID NO: 49609 - DNA, 110 bp, synthetic construct
  source 1..110: mol_type = other DNA
gtgattggcttgcaaggtggaggtcagtttaaattcttatcagagcctcctgatagcactgctaagtgggtatcatgattataattctcatttagaaattagggaaaaat

SEQ ID NO: 49610 - DNA, 110 bp, synthetic construct
  source 1..110: mol_type = other DNA
ttagacatcctgttaatatttgttgaatgctgaataaatgaaggctactaggtccttagtagaggacttgtccggaattactatcctcagagatgggagagatctgtgtt

SEQ ID NO: 49611 - DNA, 110 bp, synthetic construct
  source 1..110: mol_type = other DNA
ttagtagaggacttgtccggaattactatcctcagagatgggagagatctgtgttaaatttgtcactttttatccctgaaaacataacaaattactgaacctttcttttt

SEQ ID NO: 49612 - DNA, 110 bp, synthetic construct; identical to SEQ ID NO: 49610
  source 1..110: mol_type = other DNA

SEQ ID NO: 49613 - DNA, 110 bp, synthetic construct; identical to SEQ ID NO: 49611
  source 1..110: mol_type = other DNA

SEQ ID NO: 49614 - DNA, 110 bp, synthetic construct
  source 1..110: mol_type = other DNA
agctctctaagcaacctaaaattcctgtttttcaggtctttaattaggaagaagagagacaattttataaccttgcttacacgaaggcaaagtagtctgactctgtagag

SEQ ID NO: 49615 - DNA, 110 bp, synthetic construct
  source 1..110: mol_type = other DNA
gagacaattttataaccttgcttacacgaaggcaaagtagtctgactctgtagaggaataatatggggacttacctaatgcttttggcttttcagtatcccaaattggat

SEQ ID NO: 49616 - DNA, 110 bp, synthetic construct
  source 1..110: mol_type = other DNA
aagagcatcttgaaatcctggccaaagtgctttcttcacccagccattaaagtacaggaattgggagatttaaacaacacaggtttaatattttatgccctcaaactctg

SEQ ID NO: 49617 - DNA, 110 bp, synthetic construct
  source 1..110: mol_type = other DNA
aggaattgggagatttaaacaacacaggtttaatattttatgccctcaaactctggctattgcagttatccctaactcctatctctcctgatctctctctggcaccagtt

SEQ ID NO: 49618 - DNA, 110 bp, synthetic construct
  source 1..110: mol_type = other DNA
tattcagcacctaaagtcttcttattggattttccacttctctttattttctttaaaaattgttttctcagcataggccagatcatgcacagctgtgccaactcgggtga

SEQ ID NO: 49619 - DNA, 110 bp, synthetic construct; identical to SEQ ID NO: 49618
  source 1..110: mol_type = other DNA

SEQ ID NO: 49620 - DNA, 110 bp, synthetic construct
  source 1..110: mol_type = other DNA
aatttatatatacaaacttaccacatcgtctttcacacaaggtttgtgtgaaaccagtagccagcaacagttttgtttctgaacctcaagactatccataccctaaagta

SEQ ID NO: 49621 - DNA, 110 bp, synthetic construct; identical to SEQ ID NO: 49620
  source 1..110: mol_type = other DNA

SEQ ID NO: 49622 - DNA, 110 bp, synthetic construct
  source 1..110: mol_type = other DNA
ggttccctccagcttctttcttggaccttttccaataataataacaacagggttatgatattttaagagtaagctctattaccgtcaactaaaatgtgcaggtctcatag

SEQ ID NO: 49623 - DNA, 110 bp, synthetic construct
  source 1..110: mol_type = other DNA
tgatattttaagagtaagctctattaccgtcaactaaaatgtgcaggtctcataggacattggttttcagctttttgtcagcttcataatcatttcttcacatgaaatct

SEQ ID NO: 49624 - DNA, 110 bp, synthetic construct
  source 1..110: mol_type = other DNA
ggaagtgccaagaagcttatgtcccccctgggggggcctgtagccctcccttactggagcagagtatgaaagcctagctcctccctcaagggaggaaaaattctaatata

SEQ ID NO: 49625 - DNA, 110 bp, synthetic construct
  source 1..110: mol_type = other DNA
ggagcagagtatgaaagcctagctcctccctcaagggaggaaaaattctaatataatttagactccagaaattctcatgggatcaggctgaggctgagatgttgcctgaa

SEQ ID NO: 49626 - DNA, 110 bp, synthetic construct
  source 1..110: mol_type = other DNA
aacacctggcattgacgagttgaggttaatgtgttcttgaagactgaccttataattttccatgaggagatgggtttccaaagcctgcagtttcagagctatgtgacttg

SEQ ID NO: 49627 - DNA, 110 bp, synthetic construct
  source 1..110: mol_type = other DNA
ttttccatgaggagatgggtttccaaagcctgcagtttcagagctatgtgacttgggaaattggattatttctttatgtttctagagcaagggtcagaaaatttttcctg

SEQ ID NO: 49628 - DNA, 110 bp, synthetic construct; identical to SEQ ID NO: 49626
  source 1..110: mol_type = other DNA

SEQ ID NO: 49629 - DNA, 110 bp, synthetic construct; identical to SEQ ID NO: 49627
  source 1..110: mol_type = other DNA

SEQ ID NO: 49630 - DNA, 110 bp, synthetic construct
  source 1..110: mol_type = other DNA
aaagacctcatcactattccagtaaactggcaaagataagatcagacataaataacctcagcagaagacacctttttttaattttccttagtttttcctgtttgtttgtt

SEQ ID NO: 49631 - DNA, 110 bp, synthetic construct; identical to SEQ ID NO: 49630
  source 1..110: mol_type = other DNA

SEQ ID NO: 49632 - DNA, 110 bp, synthetic construct
  source 1..110: mol_type = other DNA
tttcacaggtgtcactttcacaaaaatccctaaatcctaaatccccttcagaggatgcttttcaagaactaaactagcatactgtatcataaaatgttttctgttaatgt

SEQ ID NO: 49633 - DNA, 110 bp, synthetic construct
  source 1..110: mol_type = other DNA
aaaaatgcatttatgtaagtattttggttattaccgatgctatttcctattatgtagctttctactgtgttgcaaaccacataaacacattcgtttttctcttcaaatca

SEQ ID NO: 49634 - DNA, 110 bp, synthetic construct
  source 1..110: mol_type = other DNA
agaacgaattagattagctattcaagaaaatttagataagaaaatatatgccacacataaactaacagccagagataataagacaattcagaatggtttacaacgactct

SEQ ID NO: 49635 - DNA, 110 bp, synthetic construct
  source 1..110: mol_type = other DNA
gagcaggatgataggctatgacccaccagacattttctaactgtgtctcctattctctatttctaacacagcctcaagcttgaagagggaggcagtacatgtccaaactc

SEQ ID NO: 49636 - DNA, 110 bp, synthetic construct
  source 1..110: mol_type = other DNA
tctatttctaacacagcctcaagcttgaagagggaggcagtacatgtccaaactccaaaaaacacttccatcaaccttgtgaaattagaattcatattcataatatccca

SEQ ID NO: 49637 - DNA, 110 bp, synthetic construct
  source 1..110: mol_type = other DNA
tagttgttctttggggcggtggattctcaggtatttattcaaagaattcccactgcagctcagagataacaaacccgactagtatccatgaggatgagggtttgacccct

SEQ ID NO: 49638 - DNA, 110 bp, synthetic construct; identical to SEQ ID NO: 49637
  source 1..110: mol_type = other DNA

SEQ ID NO: 49639 - DNA, 110 bp, synthetic construct
  source 1..110: mol_type = other DNA
tgcttgtcattggctttctgtgttttcaatagatggtttagttgtagatcactttgtatttaccttgctggagttaatttgccttcttaagtgtgtagcttaaagatgtg

SEQ ID NO: 49640 - DNA, 110 bp, synthetic construct
  source 1..110: mol_type = other DNA
agatcactttgtatttaccttgctggagttaatttgccttcttaagtgtgtagcttaaagatgtgtaacatgtttgggaagttttactcatcatttttttgaatattttc

SEQ ID NO: 49641 - DNA, 110 bp, synthetic construct
  source 1..110: mol_type = other DNA
ccccccaacccccaggagttttagtacttgggaggttttgcgagcaagatgaagagcagtctgactgagctgagggcagagcgtgccatttaccttgccctgccaaccta

SEQ ID NO: 49642 - DNA, 110 bp, synthetic construct
  source 1..110: mol_type = other DNA
gcagtctgactgagctgagggcagagcgtgccatttaccttgccctgccaacctatcggtcttcatgcaccgaaggtgcgtacttcttaagtctgaagttctccaggtta

SEQ ID NO: 49643 - DNA, 110 bp, synthetic construct
  source 1..110: mol_type = other DNA
tctgatttcaaaatagttttctcatctagagagaacatgaggttatcatttttcccagccttttattctatgcaccctcgtgtgtcaatgcatgcacagctatcacaaaa

SEQ ID NO: 49644 - DNA, 110 bp, synthetic construct
  source 1..110: mol_type = other DNA
cagccttttattctatgcaccctcgtgtgtcaatgcatgcacagctatcacaaaatataaaattatgtgacacatagtctgttgaaacccatgttttctattagttgtgc

SEQ ID NO: 49645 - DNA, 110 bp, synthetic construct; identical to SEQ ID NO: 49643
  source 1..110: mol_type = other DNA

SEQ ID NO: 49646 - DNA, 110 bp, synthetic construct; identical to SEQ ID NO: 49644
  source 1..110: mol_type = other DNA

SEQ ID NO: 49647 - DNA, 110 bp, synthetic construct
  source 1..110: mol_type = other DNA
tcccctccatccttctgccaaagatattttcagcctaatagccagaacctgtgcctatgttaccttacggcaaaagtgacttaatgagcttgagattagaagatcattct

SEQ ID NO: 49648 - DNA, 110 bp, synthetic construct
  source 1..110: mol_type = other DNA
ccactatgggaccgtgtctagagtgggctggagctgggtttacttccctcccccaccagagcccagttaggttatgctaataccccagccaagttaggctctggttaact

SEQ ID NO: 49649 - DNA, 110 bp, synthetic construct
  source 1..110: mol_type = other DNA
gcaaagtcttgaccagttagacttaagcacctttaccactaaaatctaaagaactggaacttccatttccagctttgatgaaatggcaggggcagaatttaccccccacc

SEQ ID NO: 49650 - DNA, 110 bp, synthetic construct
  source 1..110: mol_type = other DNA
aaagaactagaaagtccaagacttcatttaaatctccccacctagatgttacacgtgtcacttctgtttgcactttactggcctgataatgatgcactgccacacttaac

SEQ ID NO: 49651 - DNA, 110 bp, synthetic construct
  source 1..110: mol_type = other DNA
tctagctttttagcttgtaagaggaaaacaaacttataatgcaccttactccagcaaatttcaaattgaaaatgttacctgctatggcaatgaacttgctagtaccacac

SEQ ID NO: 49652 - DNA, 110 bp, synthetic construct
  source 1..110: mol_type = other DNA
aaatttcaaattgaaaatgttacctgctatggcaatgaacttgctagtaccacacaccatgtacaaagaaaaacagaggcaagaaatgtatgaaaagagaaaaacctcct

SEQ ID NO: 49653 - DNA, 110 bp, synthetic construct
  source 1..110: mol_type = other DNA
ctctggttaatgatatgcatgttaaaggttttagtctactactgtttataacttactttaaaatccatcaaaaaaaagatggatcaatgagtaagtagggaaatggacag

SEQ ID NO: 49654 - DNA, 110 bp, synthetic construct; identical to SEQ ID NO: 49653
  source 1..110: mol_type = other DNA

SEQ ID NO: 49655 - DNA, 110 bp, synthetic construct
  source 1..110: mol_type = other DNA
tgtcactgatagtagattcctgctaacagattatagctcataagaaacatacccactgaatctctgtggtttgagttagacctatcaagaccacttgcagattcaattat

SEQ ID NO: 49656 - DNA, 110 bp, synthetic construct
  source 1..110: mol_type = other DNA
agctggtcacagtgtccagatatctggtcaaacattattctggatgattctgtgatgaagagtaataattaaatcactggacttgaaataaagcacaccactttccataa

SEQ ID NO: 49657 - DNA, 110 bp, synthetic construct
  source 1..110: mol_type = other DNA
aagcaaagctgtcataataaaataagtatcatgggcaaatagtttaaaaagtgcaatttagaaggcttatatcaaggcatctcccatatatttgatgactttcaaaatga

SEQ ID NO: 49658 - DNA, 110 bp, synthetic construct
  source 1..110: mol_type = other DNA
ggagaatagacttgtggtttcctagtgggagggagaggaagcagcatggattgggagcttggggttaatcatgcaaactacttcttttggaatggatttgcaatgagatc

SEQ ID NO: 49659 - DNA, 110 bp, synthetic construct
  source 1..110: mol_type = other DNA
ggtttcctagtgggagggagaggaagcagcatggattgggagcttggggttaatcatgcaaactacttcttttggaatggatttgcaatgagatccggctgtttagcact

SEQ ID NO: 49660 - DNA, 110 bp, synthetic construct
  source 1..110: mol_type = other DNA
aaatgaaggtaactaaaatacatgcaccgctgcttatgtgctaatgtaaacttttatttgggacattcagttcattatatgaatgaaggctttttacatagcttgcacaa

SEQ ID NO: 49661 - DNA, 110 bp, synthetic construct; identical to SEQ ID NO: 49660
  source 1..110: mol_type = other DNA

SEQ ID NO: 49662 - DNA, 110 bp, synthetic construct
  source 1..110: mol_type = other DNA
ccattataaaataccacttctcaggtaagagatgcatgcattaattatcttacttgtgggcatcttgtcatgatgtgtatatgtataaaaccatcacattgtgtacttta

SEQ ID NO: 49663 - DNA, 110 bp, synthetic construct; identical to SEQ ID NO: 49662
  source 1..110: mol_type = other DNA

SEQ ID NO: 49664 - DNA, 110 bp, synthetic construct
  source 1..110: mol_type = other DNA
cgtcatttattgtttgtagactttttgataatggccactctgactggtgtgagctgataagttgatacatcattgtagtttcaatttatatttctctaataattagtggt

SEQ ID NO: 49665 - DNA, 110 bp, synthetic construct
  source 1..110: mol_type = other DNA
ggtgtgagctgataagttgatacatcattgtagtttcaatttatatttctctaataattagtggtgttgggcatcttttcatggagttttggctgtcttctttatagaaa

SEQ ID NO: 49666 - DNA, 110 bp, synthetic construct
  source 1..110: mol_type = other DNA
gttctcttcttgtctgactgcagtacttaacattctgtatcgccaccataaagtgatatttatgagtagccttcaggcccaaatgctgtgctgtgcactttgccaagtgg

SEQ ID NO: 49667 - DNA, 110 bp, synthetic construct
  source 1..110: mol_type = other DNA
atatttatgagtagccttcaggcccaaatgctgtgctgtgcactttgccaagtggccacagtcctctctgactatgacaagaaaccaagaacactgcctctactagagac

SEQ ID NO: 49668 - DNA, 110 bp, synthetic construct
  source 1..110: mol_type = other DNA
agagttggcattgtttttccgttctacagattcctgaaggtttgagggtttacctactcttacaacaccatgactgcctaagaagtactcctaaggaccacattatgctg

SEQ ID NO: 49669 - DNA, 110 bp, synthetic construct
  source 1..110: mol_type = other DNA
actcttacaacaccatgactgcctaagaagtactcctaaggaccacattatgctgagtcacatgatagtctattgtcttcaagggcaaagatacacgcaaatgtgtcaaa

SEQ ID NO: 49670 - DNA, 110 bp, synthetic construct
  source 1..110: mol_type = other DNA
aaaacccaaaaaacatggttgataagaatactatatgtgggcagagcatcctctttgcaaaagtaccctccatatctcccaaaaagtgtaaataataggactctaaagca

SEQ ID NO: 49671 - DNA, 110 bp, synthetic construct
  source 1..110: mol_type = other DNA
tgcaaaagtaccctccatatctcccaaaaagtgtaaataataggactctaaagcaccagctgaaatatgggctaggctcagaaatgcctcctgaggcaagggtggggaac

SEQ ID NO: 49672 - DNA, 110 bp, synthetic construct
  source 1..110: mol_type = other DNA
tttgagatgaaatttaaccttttaacgttccatcagcacttcacatttcagtttttctttgtggtaaatttttgaggtggcaaaagtcacaatgggagaggtgagtcaag

SEQ ID NO: 49673 - DNA, 110 bp, synthetic construct
  source 1..110: mol_type = other DNA
tctttgtggtaaatttttgaggtggcaaaagtcacaatgggagaggtgagtcaagcaggacatcaaagagatggagtcactagtgtttttatttcttgtttgacatagtg

SEQ ID NO: 49674 - DNA, 110 bp, synthetic construct
  source 1..110: mol_type = other DNA
tcaagttctattctgcattatattctccattagtgagaatatggcactgctgacctccttagtgacatttaactctcaaagacaaacattctatcaattggaaaaaggat

SEQ ID NO: 49675 - DNA, 110 bp, synthetic construct
  source 1..110: mol_type = other DNA
tccttagtgacatttaactctcaaagacaaacattctatcaattggaaaaaggatagttatccaagaatgagcttttagtaactctagctttagtaatcctgtaccctct

SEQ ID NO: 49676 - DNA, 110 bp, synthetic construct
  source 1..110: mol_type = other DNA
ttgagccaaagacaaacaagccactggcattaaaaacaaaacaacaacgaaagtaaattctatattagaaagtaatagcactatggagaaattttaaaaatggaaaaggg

SEQ ID NO: 49677 - DNA, 110 bp, synthetic construct
  source 1..110: mol_type = other DNA
aattctatattagaaagtaatagcactatggagaaattttaaaaatggaaaagggaaggagaaattgggtgttggaaagtgtatgttagatggagctctccgtgtaggtc

SEQ ID NO: 49678 - DNA, 110 bp, synthetic construct
  source 1..110: mol_type = other DNA
atcatccatagggcattaatgcttaaggatttgatctcagacatcttacactcatagcctcagttgtgaaaaggaaatcatagcaatacttacagagtggttgtgaaagt

SEQ ID NO: 49679 - DNA, 110 bp, synthetic construct
  source 1..110: mol_type = other DNA
gatattttgctccctcctggcatagttacacctttgcccaggagagacagtgaagcatagggcagagatagaggcagataaaaacagataggtctggcaagctttctggt

SEQ ID NO: 49680 - DNA, 110 bp, synthetic construct
  source 1..110: mol_type = other DNA
ctctcaattctttctagtatattggagtcagagagcattattggaactggacacactatgctttgcttatctaattcataaaagctaatgcttcaaacagaaaacaggtt

SEQ ID NO: 49681 - DNA, 110 bp, synthetic construct
  source 1..110: mol_type = other DNA
ttttatgggtagaggcaaatcgctttgtttttgtgaagctttggtatgaactttgtcactgcatgtgttctatttaggatgggaccaaacaggctgcctttataggaggt

SEQ ID NO: 49682 - DNA, 110 bp, synthetic construct
  source 1..110: mol_type = other DNA
ggttttctcatccaaaatagacctgaatagcaagccccatcttactcaaagacattatcagcagacacacccagaaacccaaactgagctgactggagaaaagctatctc

SEQ ID NO: 49683 - DNA, 110 bp, synthetic construct
  source 1..110: mol_type = other DNA
gccatgggtcatggaagcagcatcccatgagtttagcttagtcagaaaagtctccttactacaagatggagccaaacctgagccttctggctgagcccacctgcaagagt

SEQ ID NO: 49684 - DNA, 110 bp, synthetic construct
  source 1..110: mol_type = other DNA
tttaaaaaagtgacaggaagtcttctgtgaggagtcgacgctgaggtaaacatggaaatgaatctatcatgtgacatatgacgctgtgaagggctaagatgaaaaggtgc

SEQ ID NO: 49685 - DNA, 110 bp, synthetic construct
  source 1..110: mol_type = other DNA
aaatgaatctatcatgtgacatatgacgctgtgaagggctaagatgaaaaggtgctcaacttgtttgaaaaacaggtaagagccccctggaaataaacaaatgagaggtt

SEQ ID NO: 49686 - DNA, 110 bp, synthetic construct
  source 1..110: mol_type = other DNA
cttaaaaatggaatgtgtccctcaccccttagcaaaaggtaagatgagagctaacaagaaatcataatattgacaattagaagttgacattaattcttatttaccacatg

SEQ ID NO: 49687 - DNA, 110 bp, synthetic construct
  source 1..110: mol_type = other DNA
aagaaatcataatattgacaattagaagttgacattaattcttatttaccacatgtgtaccatgtgtcagaaaccctgactggcacttgatcaagacaagtcaagttgca

SEQ ID NO: 49688 - DNA, 110 bp, synthetic construct
  source 1..110: mol_type = other DNA
atagttccagcaaatattgctggtggaggtattagcctgatttggatcatatttccttactgaactaattactgtggcttaagtttggtcctacaaacctcatgaactag

SEQ ID NO: 49689 - DNA, 110 bp, synthetic construct
  source 1..110: mol_type = other DNA
cttactgaactaattactgtggcttaagtttggtcctacaaacctcatgaactagaataaaggctctgaaaaggatgatcaaagtgttattatcagcatccatgaagaac

SEQ ID NO: 49690 - DNA, 110 bp, synthetic construct
  source 1..110: mol_type = other DNA
cagagattaacaaattgacagaaaataggctctccaaactatctgcactaatacaatctcaccccacattctgtggtctcaaccagtacactatatttttatcctcacca

SEQ ID NO: 49691 - DNA, 110 bp, synthetic construct
  source 1..110: mol_type = other DNA
aaaagatttataagatgctctctcttggctgtgtcaagattaattggaagacataactcagctgcttgtaaatggtagcttcttttctgttttgatttattttctcttgc

SEQ ID NO: 49692 - DNA, 110 bp, synthetic construct
  source 1..110: mol_type = other DNA
agaaaaaacaaagataagaagtataccagatatctaaccagaagctctgcatgacagaagaaaatggtgacatttttaaagtgctgaaaggaaaaactgttgactctatg

SEQ ID NO: 49693 - DNA, 110 bp, synthetic construct
  source 1..110: mol_type = other DNA
cgcagaccttagggtcattttaatttgacagtagacataattctaactagctggcctcatccccctcactatcccattttcctctctcctcccaagaccctttgggatct

SEQ ID NO: 49694 - DNA, 110 bp, synthetic construct
  source 1..110: mol_type = other DNA
tgggccctccagaccctctcctctccttagaggtcaggaagtggggactaaaaattccaagcttctcatcacatgactggctttcctggcaatcggtcctcctcctaggg

SEQ ID NO: 49695 - DNA, 110 bp, synthetic construct
  source 1..110: mol_type = other DNA
acttaaaatcctagtataaccacatgtgcttagaaagcagaataacataccaggataaataactttttctaccagaggatgcgattccaaaaactgagcaactgccattc

SEQ ID NO: 49696 - DNA, 110 bp, synthetic construct
  source 1..110: mol_type = other DNA
taaataactttttctaccagaggatgcgattccaaaaactgagcaactgccattccattttcaaaatgcttctccatgcggacctgtagagtcttcagacctcgattgca

SEQ ID NO: 49697 - DNA, 110 bp, synthetic construct
  source 1..110: mol_type = other DNA
gttcctagccagattcgttaaccactgtgccatgacgggaactcctacaatatttactattgaaaaaaatccatgtataaatgaacctgcacagtgtaaatccctgttgt

SEQ ID NO: 49698 - DNA, 110 bp, synthetic construct; identical to SEQ ID NO: 49697
  source 1..110: mol_type = other DNA

SEQ ID NO: 49699 - DNA, 110 bp, synthetic construct
  source 1..110: mol_type = other DNA
atgtgcactgagtatctcaaacgctgactaagggttcagacagttcacaagaagcgcgtccactgggaggtctagggctcggtcttctagttcacactctcgtttgagac

SEQ ID NO: 49700 - DNA, 110 bp, synthetic construct
  source 1..110: mol_type = other DNA
gcgtccactgggaggtctagggctcggtcttctagttcacactctcgtttgagacggagacacattgcccggaaggcgccagcattcagcaactctgggaatagaacgcg

SEQ ID NO: 49701 - DNA, 110 bp, synthetic construct
  source 1..110: mol_type = other DNA
acctaaaaatcagtgcacatgccataatttttaaatattgtaaaaagttttaaaaatggagtttctattgtggctcagtgggttaaacccaagtgtagtcttcgtgagga

SEQ ID NO: 49702 - DNA, 110 bp, synthetic construct; identical to SEQ ID NO: 49701
  source 1..110: mol_type = other DNA

SEQ ID NO: 49703 - DNA, 110 bp, synthetic construct
  source 1..110: mol_type = other DNA
gcaggttcaatccccggcctggggaacttctgcatgctgcatgcatgctccccctccacaaaaaaactctatcagatatctaatattttaaacccatttttcacataagg

SEQ ID NO: 49704 - DNA, 110 bp, synthetic construct
  source 1..110: mol_type = other DNA
ccacaaaaaaactctatcagatatctaatattttaaacccatttttcacataaggaaattgaggcataaagaggctaagtaattgcccaaagccgcacaaagtagggaag

SEQ ID NO: 49705 - DNA, 110 bp, synthetic construct
  source 1..110: mol_type = other DNA
tttaaacttaaaattgttcagagcagaatctattagattaaagtggaatcccaattttatcacttactggttgggtaaccctaggcaagtcattcaaatgtccaatgtgt

SEQ ID NO: 49706 - DNA, 110 bp, synthetic construct; identical to SEQ ID NO: 49705
  source 1..110: mol_type = other DNA

SEQ ID NO: 49707 - DNA, 110 bp, synthetic construct
  source 1..110: mol_type = other DNA
aagacaggtaccattatcctcattttacagatgagaaaagagatgcagtgaaaggttaaggaatgtgctcaaaattacacagttttacatggtaatgctggactttaaac

SEQ ID NO: 49708 - DNA, 110 bp, synthetic construct
  source 1..110: mol_type = other DNA
ttaaggaatgtgctcaaaattacacagttttacatggtaatgctggactttaaactagatgattcaactccagaacattcattttaaccactggattctatcacctctgt

SEQ ID NO: 49709 - DNA, 110 bp, synthetic construct
  source 1..110: mol_type = other DNA
cagatgatctccatattagaaatttcattgtctggtgcattgctacttactgatgaagatggcagaacttttaaatgctgttcaacaatacaatttgatttcaactgaaa

SEQ ID NO: 49710 - DNA, 110 bp, synthetic construct
  source 1..110: mol_type = other DNA
aagatggcagaacttttaaatgctgttcaacaatacaatttgatttcaactgaaacagatcattgaatggcctctaaaaaaactattgttggatttgggacacaaaagcc

SEQ ID NO: 49711 - DNA, 110 bp, synthetic construct
  source 1..110: mol_type = other DNA
gagaagcccttttcctcctgagtgttatcaaggaagcatgaagcagttgtttttctgtcatgagaaaaggattctgaagatgtagctagtctatgatgatgacagggttg

SEQ ID NO: 49712 - DNA, 110 bp, synthetic construct
  source 1..110: mol_type = other DNA
tgtcatgagaaaaggattctgaagatgtagctagtctatgatgatgacagggttgagagaatcaaagagaaatgcagctgcaaagaaatgtaggtacacctttgaagaca

SEQ ID NO: 49713 - DNA, 110 bp, synthetic construct
  source 1..110: mol_type = other DNA
ctttttagaaaagtatggtatagattgctcatcttccctcagtttttctctcctcttccagagaaatagatcttaggtagatcacaactgataatagattatattccatc

SEQ ID NO: 49714 - DNA, 110 bp, synthetic construct
  source 1..110: mol_type = other DNA
ttccagagaaatagatcttaggtagatcacaactgataatagattatattccatcctccttttttgcagctaagttgcccacatgactaaatgttaaccaatggaatgta

SEQ ID NO: 49715 - DNA, 110 bp, synthetic construct
  source 1..110: mol_type = other DNA
ttaatagattattcctaagcaaaagagcatgctttgtttttaagattctctcttggtagcatctgttacttgactgcattaaaaaaatgcacatgtttgtgggtataaag

SEQ ID NO: 49716 - DNA, 110 bp, synthetic construct
  source 1..110: mol_type = other DNA
gtagcatctgttacttgactgcattaaaaaaatgcacatgtttgtgggtataaaggaagattgatgttatgtggagaaaggccttaacatttttcttcttaatataggtg

SEQ ID NO: 49717 - DNA, 110 bp, synthetic construct
  source 1..110: mol_type = other DNA
tttacttatttctcttgccacttctatggatctctgactttagcgcctgggtgcgagtgacaacctccagctggtcacatctatcccccttcagcttttgcctctaacac

SEQ ID NO: 49718 - DNA, 110 bp, synthetic construct
  source 1..110: mol_type = other DNA
tctaaaattagtaggaaaaaaggagcatgttatttataatgtcccttataccccaccatcttagaggatttgacaaatatctgttaaagtagatgttattatttggctta

SEQ ID NO: 49719 - DNA, 110 bp, synthetic construct
  source 1..110: mol_type = other DNA
cgctactccattcctagggaaagatgaggaagagtactgtccagctcggcctacgaggcacagcatggcccatgaacagtacaagcagtgggcaactaatatcatccagg

SEQ ID NO: 49720 - DNA, 110 bp, synthetic construct
  source 1..110: mol_type = other DNA
cagtcagctaaaggccataagagaaaaagactgttgttccttccagcaggaaagaatactacctccagactatgtctggacttgagcttgcaacattaactgtttctggg

SEQ ID NO: 49721 - DNA, 110 bp, synthetic construct
  source 1..110: mol_type = other DNA
atttgtctagaaaggagatataactcttgcttcaaaaaatgttagaactatccaaaaccccattatctgatcataaaagccagtaaaaataggaagatgtaactcatttg

SEQ ID NO: 49722 - DNA, 110 bp, synthetic construct
  source 1..110: mol_type = other DNA
aaccccattatctgatcataaaagccagtaaaaataggaagatgtaactcatttgaggaagaaagcaaaatgtagcaataggaaggactttcttttaccagagatggttt

SEQ ID NO: 49723 - DNA, 110 bp, synthetic construct
  source 1..110: mol_type = other DNA
aggattaatactctctgatacttctaccaccaatttgcatgtccccagggtgaggcacagctaacctttgcctccctaggagaccctctttgaccagcaggtaggtctgc

SEQ ID NO: 49724 - DNA, 110 bp, synthetic construct
  source 1..110: mol_type = other DNA
cattttttttttttttttaacgtaagctcaaaagcaccgtctatgttgatgtagcaagcaacaattcaggatcagaatgactttcagttgctttgttcattctaataagc

SEQ ID NO: 49725 - DNA, 110 bp, synthetic construct
  source 1..110: mol_type = other DNA
cagcttggtactgctggagcacagatgaaagggagagcggcagatgtcgacacgaagaaataggcaggggtcaggtgtggaggatcttatagctgtgctaaagtacttgg

SEQ ID NO: 49726 - DNA, 110 bp, synthetic construct
  source 1..110: mol_type = other DNA
ccccttcaggggtagagcctagctcagctcctccctccacatgattttcaaactcctgaacccaagagaagacttgtatacttgcctccagtcaaaccctcctgggccag

SEQ ID NO: 49727 - DNA, 110 bp, synthetic construct
  source 1..110: mol_type = other DNA
ctgaacccaagagaagacttgtatacttgcctccagtcaaaccctcctgggccagtgagtctgcatggaaacctggaagatgcactgcgggataatgaagcagctaagaa

SEQ ID NO: 49728 - DNA, 110 bp, synthetic construct
  source 1..110: mol_type = other DNA
acatagtaggtgcacagataaatacttcttgtggtcaaattatgtggtctttcatttgcaaagtaatcttgggtatcaatttcaattccatatgtcaatgaaaagttaat

SEQ ID NO: 49729 - DNA, 110 bp, synthetic construct; identical to SEQ ID NO: 49728
  source 1..110: mol_type = other DNA

SEQ ID NO: 49730 - DNA, 110 bp, synthetic construct
  source 1..110: mol_type = other DNA
ctttctttaattctctccaggtgccagatcataaaggggcttgtgtgctaagctgaggagtttgaactttcttctggacgctgtggagaacgtttaagaagtttaggcag

SEQ ID NO: 49731 - DNA, 110 bp, synthetic construct
  source 1..110: mol_type = other DNA
aggagtttgaactttcttctggacgctgtggagaacgtttaagaagtttaggcaggagagtggactgtcgggggctctcagagagatcccctggctacaatgtggagggg

SEQ ID NO: 49732 - DNA, 110 bp, synthetic construct
  source 1..110: mol_type = other DNA
ttgtcagtgaattcttccttaggttgctctgaagtcagcctacctttaatttgtttccttggcccttgttctgcacacggtctgtcacagactcttccatggtagctctg

SEQ ID NO: 49733 - DNA, 110 bp, synthetic construct
  source 1..110: mol_type = other DNA
tccttggcccttgttctgcacacggtctgtcacagactcttccatggtagctctgtcatgtgttcctgagttggatcttctctgggataatatcccagactgctggccca

SEQ ID NO: 49734 - DNA, 110 bp, synthetic construct
  source 1..110: mol_type = other DNA
accccttgatcgggacacagagccatgcatcctggggagacagagcagaatttggttttcaaagcaagctgtgccccaactcgccaatctcccactgccatgtgctggcc

SEQ ID NO: 49735 - DNA, 110 bp, synthetic construct
  source 1..110: mol_type = other DNA
ttttcaaagcaagctgtgccccaactcgccaatctcccactgccatgtgctggccagtatcccttaaattgcttggcaggaagtccaagaggctttcctagagacggggc

SEQ ID NO: 49736 - DNA, 110 bp, synthetic construct
  source 1..110: mol_type = other DNA
agtttgtggcttttctttggagaaaaagatcaatattccactgccccaatattttctaacacggctccagcttgtggctggctttttatatctgctgcgacagtcagccc

SEQ ID NO: 49737 - DNA, 110 bp, synthetic construct
  source 1..110: mol_type = other DNA
cagtgtacctccaaagaaaatatacacagctccctgatgagtgtttaggacggcgtgggagttcagctggggagggtgggtgagtgagccggtgaatacacctcagctga

SEQ ID NO: 49738 - DNA, 110 bp, synthetic construct
  source 1..110: mol_type = other DNA
tttaggtcgttctttttcacctgtaactgatgaagcctccgcgccggtttgcttccacatcactcttcacctccccacccccagcaccctctccccctgcccaaagatga

SEQ ID NO: 49739 - DNA, 110 bp, synthetic construct
  source 1..110: mol_type = other DNA
ctccgaaaccactgtccgtcttcctctcttgcagctctgcaatccattttcccccaaacaggcagagtttttcaaccacagcactattggcatttggggccagaaaattc

SEQ ID NO: 49740 - DNA, 110 bp, synthetic construct
  source 1..110: mol_type = other DNA
tccaacttttagaggctcctcacattcctcagttctcagacacttcctccatctacaaagccgtaaccagccggtcaaattcttctcatactacctgtttctgacccatt

SEQ ID NO: 49741 - DNA, 110 bp, synthetic construct
  source 1..110: mol_type = other DNA
gtacagtgtgccggcagttcatttggcaacaggaaggatgcgagttactccttgggtgatagctctgcgctggcaagtgctagggcctttgcaaacttcctcgggcctgg

SEQ ID NO: 49742 - DNA, 110 bp, synthetic construct
  source 1..110: mol_type = other DNA
cttcttcttggaggagaggaaattgaaattcagagaaatgaagctcactcaatatcaaaagttagacagttctggagttcccgttgtggctcatcggaaacgaatgtgat

SEQ ID NO: 49743 - DNA, 110 bp, synthetic construct
  source 1..110: mol_type = other DNA
agtgaaatccaaagtccttgctaaagcttaaaaggccctataaaaatctgttcgccatgatgaagatgtgctaatattggttggtgctcatatgtgcacaactctgttaa

SEQ ID NO: 49744 - DNA, 110 bp, synthetic construct
  source 1..110: mol_type = other DNA
ctttatttgtaaccaagaagcctgactggaacgaatcacagcacattattgagcagctacgagcaaggagttcttctaagctctctacatggggtgtttcactgaacctt

SEQ ID NO: 49745 - DNA, 110 bp, synthetic construct
  source 1..110: mol_type = other DNA
attcaatccatttttctttgacatgttggcttgctttccatactgatctgtaagaacaccttattaagtatcttgtatcttgcagatgtttttatctaatttgatggtat

SEQ ID NO: 49746 - DNA, 110 bp, synthetic construct
  source 1..110: mol_type = other DNA
gtgctctcaatccttcaggactgcagcgacccaggggtcaagctcttaacttttcttctgctagtccagatgcaaagaggaaaaaaagcacaggcaacagaaggtaaggg

SEQ ID NO: 49747 - DNA, 110 bp, synthetic construct
  source 1..110: mol_type = other DNA
tctatagcactctctcgataacagggaccctgtccttgcatctgggtcaaccagcctactgcagcaattcttcctactatccccatgcttctcacctgccacttggggct

SEQ ID NO: 49748 - DNA, 110 bp, synthetic construct
  source 1..110: mol_type = other DNA
ctactgcagcaattcttcctactatccccatgcttctcacctgccacttggggcttccctggaaccacagaggcacaaggtgctgtgggattgctcagggcctatggttg

SEQ ID NO: 49749 - DNA, 110 bp, synthetic construct
  source 1..110: mol_type = other DNA
ggcaggatttctttccttctcatggctgaataatattccattgtgtgtgtgtgtctatgtgtgttcttcattgtctttcatcaatgtcttgaagttttcagtgtacagat

SEQ ID NO: 49750 - DNA, 110 bp, synthetic construct
  source 1..110: mol_type = other DNA
cttctcatggctgaataatattccattgtgtgtgtgtgtctatgtgtgttcttcattgtctttcatcaatgtcttgaagttttcagtgtacagatctttcacttccttgg

SEQ ID NO: 49751 - DNA, 110 bp, synthetic construct
  source 1..110: mol_type = other DNA
tgggagctgtagttggagaggtttatgaattagaggtaaaagcctggctgaacaagagatgcactttcaggaattcctttacctattgatgccactgtgagaagttgagt

SEQ ID NO: 49752 - DNA, 110 bp, synthetic construct
  source 1..110: mol_type = other DNA
gagatgcactttcaggaattcctttacctattgatgccactgtgagaagttgagtcagaaacatcagttaggtttcagatagttttcatgacttggcttcttgtactaca

SEQ ID NO: 49753 - DNA, 110 bp, synthetic construct
  source 1..110: mol_type = other DNA
attcacagtaggctgttctaccatatatagaataacattatcccagataagtattcccaaattgatgacatgcacagattcttaggaatatgcagaggaagttcaaaaag

SEQ ID NO: 49754 - DNA, 110 bp, synthetic construct; identical to SEQ ID NO: 49753
  source 1..110: mol_type = other DNA

SEQ ID NO: 49755 - DNA, 110 bp, synthetic construct; identical to SEQ ID NO: 49753
  source 1..110: mol_type = other DNA

SEQ ID NO: 49756 - DNA, 110 bp, synthetic construct; identical to SEQ ID NO: 49753
  source 1..110: mol_type = other DNA

SEQ ID NO: 49757 - DNA, 110 bp, synthetic construct
  source 1..110: mol_type = other DNA
aatcccacgacaattttagaaaaacattaatgagccttgggtcatgcagtctgtaactgatggtaatgaaataaaagcgaccccaaaaataggtcgccttattccaccca

SEQ ID NO: 49758 - DNA, 110 bp, synthetic construct
  source 1..110: mol_type = other DNA
actgatggtaatgaaataaaagcgaccccaaaaataggtcgccttattccacccatgactgaagaaaggttcactcaactccgggtggtctcagctaagcggcctcagtg

SEQ ID NO: 49759 - DNA, 110 bp, synthetic construct
  source 1..110: mol_type = other DNA
tctttctctttatttaggcataatgtccacagcgtgggatttgtatgattcttataatgctacagagctttcatctttaccagtaaaacaatctatagttgattcaagta

SEQ ID NO: 49760 - DNA, 110 bp, synthetic construct; identical to SEQ ID NO: 49759
  source 1..110: mol_type = other DNA

SEQ ID NO: 49761 - DNA, 110 bp, synthetic construct
  source 1..110: mol_type = other DNA
tagagctaaggcactacagtgaaaactgttcccccacccaacagggggtcagcaaacatcacagacataatgcatttcccgtgtattggagctttaatcaagagtctcca

SEQ ID NO: 49762 - DNA, 110 bp, synthetic construct
  source 1..110: mol_type = other DNA
acatcacagacataatgcatttcccgtgtattggagctttaatcaagagtctccaaaaatcagagagcaggactagaaagacctcttttctgcctggctcttctctttag

SEQ ID NO: 49763 - DNA, 110 bp, synthetic construct
  source 1..110: mol_type = other DNA
aaaataaaaataaagatgggcttcacagaggctaggagggagaaagagagtttcagctgggccaaagagaatgagaccagtctatcttgcctctcctctgtgtcagccac

SEQ ID NO: 49764 - DNA, 110 bp, synthetic construct
  source 1..110: mol_type = other DNA
gctgggccaaagagaatgagaccagtctatcttgcctctcctctgtgtcagccactttgggacaaagtgggaccagttacctgggacaagttaactcagactggcattca

SEQ ID NO: 49765 - DNA, 110 bp, synthetic construct
  source 1..110: mol_type = other DNA
tttgatgatttgggtaatttcatacagtcccatctagcactctgttctgttcttccacggagaaagctcatggtctgaaaccgccaagagagaaacgtaggcttcttctt

SEQ ID NO: 49766 - DNA, 110 bp, synthetic construct
  source 1..110: mol_type = other DNA
cacggagaaagctcatggtctgaaaccgccaagagagaaacgtaggcttcttcttcagtcatcacaccagaatctttctgtttctgtactttagtggttttcttgcccag

SEQ ID NO: 49767 - DNA, 110 bp, synthetic construct
  source 1..110: mol_type = other DNA
acctggaggcataagacggaaagaacctgcagctctgaacaaatacataggcgactgttcgcctcccaggagtatctgttaggtgaatgagaaaacaaatttgctagtgt

SEQ ID NO: 49768 - DNA, 110 bp, synthetic construct
  source 1..110: mol_type = other DNA
tgttcgcctcccaggagtatctgttaggtgaatgagaaaacaaatttgctagtgtgaagccactatcatgtttgagtctctgtgttacaccagcctgcatgaccctaaaa

SEQ ID NO: 49769 - DNA, 110 bp, synthetic construct
  source 1..110: mol_type = other DNA
tgactgaaaaatgcatgcctttggggaatactgactttgtgaattcgcttatttctttatcgaatggccctaaatgactatactgtaatagtaatgtcacaggaaaaaat

SEQ ID NO: 49770 - DNA, 110 bp, synthetic construct; identical to SEQ ID NO: 49769
  source 1..110: mol_type = other DNA

SEQ ID NO: 49771 - DNA, 110 bp, synthetic construct
  source 1..110: mol_type = other DNA
cttcctttgcaaatatttactgaagcactgggtgcagatgctgtagggaaatcactgatattcagggttgctcatttcaacagcagaacatcccttttttatcgataaag

SEQ ID NO: 49772 - DNA, 110 bp, synthetic construct
  source 1..110: mol_type = other DNA
tgatattcagggttgctcatttcaacagcagaacatcccttttttatcgataaagttcagacctttgcacggcacgtaaaagagcctcggggcaaggctagctgagcaag

SEQ ID NO: 49773 - DNA, 110 bp, synthetic construct
  source 1..110: mol_type = other DNA
cttgagatgagcaggcttattccagtccctggttccacctcacagtacaatgagtatttgttaaaaatgtaaaattggggagatcccgtcatggcacagcggaaacgaat

SEQ ID NO: 49774 - DNA, 110 bp, synthetic construct
  source 1..110: mol_type = other DNA
tccctggttccacctcacagtacaatgagtatttgttaaaaatgtaaaattggggagatcccgtcatggcacagcggaaacgaatccctctaggaaccatgaggttgcaa

SEQ ID NO: 49775 - DNA, 110 bp, synthetic construct
  source 1..110: mol_type = other DNA
tgactccaagaaagttgggggccagtcagaagttctctgacctcgctatgtttttcaccaaatgaatcacccaggtgcagagtcaatgggtttgagccatgaagcatacc

SEQ ID NO: 49776 - DNA, 110 bp, synthetic construct
  source 1..110: mol_type = other DNA
caccaaatgaatcacccaggtgcagagtcaatgggtttgagccatgaagcataccatatgttgtatctttttctattctttacatgggggattttctctaaacatttttt

SEQ ID NO: 49777 - DNA, 110 bp, synthetic construct
  source 1..110: mol_type = other DNA
aagcagagggctttttcacacagtacaagcattgtaaatagttgttgaataattgggtccaacaaacatttattaagtgccaatgaataagacccagtcgccaccttccc

SEQ ID NO: 49778 - DNA, 110 bp, synthetic construct
  source 1..110: mol_type = other DNA
ggtccaacaaacatttattaagtgccaatgaataagacccagtcgccaccttcccagactcctcgtaccaggaggatagcaaacatatatactagtaacaagaacaccaa

SEQ ID NO: 49779 - DNA, 110 bp, synthetic construct
  source 1..110: mol_type = other DNA
tgaaagagggcaagaagaaacgacggaattcaggattatactgcttcctggagaccagtctgagaagctgcttttagccaacccacaaactccaggtgtctgatacgaag

SEQ ID NO: 49780 - DNA, 110 bp, synthetic construct
  source 1..110: mol_type = other DNA
cagtctgagaagctgcttttagccaacccacaaactccaggtgtctgatacgaagcagtaagtgagactctctggttaaaaggacaaggaagagccataacaacatgtac

SEQ ID NO: 49781 - DNA, 110 bp, synthetic construct
  source 1..110: mol_type = other DNA
tttttagattccacatataagtgatgccatacagtcttggtcttcctctgtcttatttcacttagcatacttgaataactgcaaataggctcgtgtagctggagcaaagt

SEQ ID NO: 49782 - DNA, 110 bp, synthetic construct
  source 1..110: mol_type = other DNA
tttcacttagcatacttgaataactgcaaataggctcgtgtagctggagcaaagtgagtgcgggggagagcagtaggagatgagggcagggggctatttcatataaagct

SEQ ID NO: 49783 - DNA, 110 bp, synthetic construct
  source 1..110: mol_type = other DNA
ggtgcgaaagtgcttgcaaatgacaacaaaatttgtataggaaagaaagagtgggtaagctgctgcaatgttcagtgaattcagagtgacccagaggtcgtggatggcta

SEQ ID NO: 49784 - DNA, 110 bp, synthetic construct
  source 1..110: mol_type = other DNA
taagctgctgcaatgttcagtgaattcagagtgacccagaggtcgtggatggctacactcaggaagagtcatgagtaatgtagtctgatggcatgcacttccgtggaccc

SEQ ID NO: 49785 - DNA, 110 bp, synthetic construct
  source 1..110: mol_type = other DNA
acctctaaagcattagactaaactctacggtgaaacttccaggatgtgtgtgcagtgctgaggatggatggggagtccagcaaaaagtccccaattcaatgacctgtcca

SEQ ID NO: 49786 - DNA, 110 bp, synthetic construct
  source 1..110: mol_type = other DNA
tgctgaggatggatggggagtccagcaaaaagtccccaattcaatgacctgtccactcattctgcctgattatcctaaagctagacctgcctttgcacatggagttccaa

SEQ ID NO: 49787 - DNA, 110 bp, synthetic construct
  source 1..110: mol_type = other DNA
tgaactgatgtacaggcagaatgtggtatgtctatacaatggtctaggattcacccataaatagaaatgaagtattgatatatgctacaacataaatgaaccttgaaaac

SEQ ID NO: 49788 - DNA, 110 bp, synthetic construct
  source 1..110: mol_type = other DNA
cataaatagaaatgaagtattgatatatgctacaacataaatgaaccttgaaaacactatgccatatgaaacaagccaggcataaaaggccacatattgtgtgattccat

SEQ ID NO: 49789 - DNA, 110 bp, synthetic construct
  source 1..110: mol_type = other DNA
cataaatacaagtgatgtctggataatggaattttagtgatcgaaagccaggggaagtgaggatggcagtcacctaaaccttgtgttcagagaatggtgcaagaggaact

SEQ ID NO: 49790 - DNA, 110 bp, synthetic construct
  source 1..110: mol_type = other DNA
agtgaggatggcagtcacctaaaccttgtgttcagagaatggtgcaagaggaactgcaatgagaaactgtgagctttctgcctgaatgaagggacaagttgctgggatgc

SEQ ID NO: 49791 - DNA, 110 bp, synthetic construct
  source 1..110: mol_type = other DNA
aggacaggctggtgcgcttgttatgggctaacacagccggtgacttcagttgaaatcaatgctcatgtaccattctaaaaattctagagcccttaagaattatgctaaat

SEQ ID NO: 49792 - DNA, 110 bp, synthetic construct
  source 1..110: mol_type = other DNA
gcttgttatgggctaacacagccggtgacttcagttgaaatcaatgctcatgtaccattctaaaaattctagagcccttaagaattatgctaaatctactctgcctgtgt

SEQ ID NO: 49793 - DNA, 110 bp, synthetic construct
  source 1..110: mol_type = other DNA
ttgttcctagaaaagctaaaaataaggaagtgggttatcttctctcttcactgaaaaggtaaggagaaaaatcggtgatagaaaaattgcatctaaataagggggagaat

SEQ ID NO: 49794 - DNA, 110 bp, synthetic construct; identical to SEQ ID NO: 49793
  source 1..110: mol_type = other DNA

SEQ ID NO: 49795 - DNA, 110 bp, synthetic construct
  source 1..110: mol_type = other DNA
cctgggcttttcaggggaacacctgtgatgtgaacccactgcactactggacaaaagccagttctccctcctcagtccctgacgcacttgtaccaggagacagaactcta

SEQ ID NO: 49796 - DNA, 110 bp, synthetic construct
  source 1..110: mol_type = other DNA
agccagttctccctcctcagtccctgacgcacttgtaccaggagacagaactctaaaagggactggaggggaaaaaaaaaaaaaaaaaaaaaaaaaacagcttaatggag

SEQ ID NO: 49797 - DNA, 110 bp, synthetic construct
  source 1..110: mol_type = other DNA
ttggtgactatggttcctggtaccgtggggagtggaaaccccaaaagagcccctgcctggttcaccattcatagcagctcaacgacagaaaatgttacagcaacgcacat

SEQ ID NO: 49798 - DNA, 110 bp, synthetic construct
  source 1..110: mol_type = other DNA
cctggttcaccattcatagcagctcaacgacagaaaatgttacagcaacgcacatggccactgatagcaacttggagtttaaaaattgcaactctcactctccactccta

SEQ ID NO: 49799 - DNA, 110 bp, synthetic construct
  source 1..110: mol_type = other DNA
aatcaagtgaggaaaacatttttttcaggactcattggtactctccaactgtaccccatctactgaagattatagataagtaggaggtgtgactcacagaaatagttttc

SEQ ID NO: 49800 - DNA, 110 bp, synthetic construct
  source 1..110: mol_type = other DNA
tgcaacttcacatacatataaaatagaagcaacacgcaacacttttatttagtttggaacattttgagcaaattacagaatgccaaaatacagcttctgtgcctcagaaa

SEQ ID NO: 49801 - DNA, 110 bp, synthetic construct
  source 1..110: mol_type = other DNA
ggaacattttgagcaaattacagaatgccaaaatacagcttctgtgcctcagaaacttcaaccccagaggtgcccaaactttgctgcctgttgttatcatacgggacctt

SEQ ID NO: 49802 - DNA, 110 bp, synthetic construct
  source 1..110: mol_type = other DNA
cagggatcaaacccgtatcctcgtggacgctaagtcgggttcttaatctgctgagccacaacaggaactcccagacagttctgaaatgctgaaaacgctttccttccatt

SEQ ID NO: 49803 - DNA, 110 bp, synthetic construct; identical to SEQ ID NO: 49802
  source 1..110: mol_type = other DNA

SEQ ID NO: 49804 - DNA, 110 bp, synthetic construct
  source 1..110: mol_type = other DNA
tggtgttttcaacactggtatttacagaagccttggccatctatattattaaaataagatttaactacagacctagcactcccgtggtctggaaggaagagaaaatggtt

SEQ ID NO: 49805 - DNA, 110 bp, synthetic construct
  source 1..110: mol_type = other DNA
aagatttaactacagacctagcactcccgtggtctggaaggaagagaaaatggtttcagtgcttatactctgaaagatgagaatcaagaaaacttttctacatcatgcaa

SEQ ID NO: 49806 - DNA, 110 bp, synthetic construct
  source 1..110: mol_type = other DNA
tccatgagatattttaattaaaaaaaaaaaatgtttctagtcctgtctactgaaaagggctagacacagagaccaacccagtatcagtgagcacccaccatatcaagatt

SEQ ID NO: 49807 - DNA, 110 bp, synthetic construct
  source 1..110: mol_type = other DNA
agggctagacacagagaccaacccagtatcagtgagcacccaccatatcaagattgttgtcttgaaacacctactgccctcttaaaacaactagggccctttgcaaagtg

SEQ ID NO: 49808 - DNA, 110 bp, synthetic construct
  source 1..110: mol_type = other DNA
ttgtggtctgtgctttttttgtttccaggaacttaaaaacattggctataactgagattctagaaccatactgcctggaccgaatcctaattccatggactattagcttt

SEQ ID NO: 49809 - DNA, 110 bp, synthetic construct
  source 1..110: mol_type = other DNA
gattctagaaccatactgcctggaccgaatcctaattccatggactattagctttatgaacttgggcaaattacttaccctctctgcttcacctttctcctctataaaat

SEQ ID NO: 49810 - DNA, 110 bp, synthetic construct
  source 1..110: mol_type = other DNA
tcacttctggttggcaagtcaccagcctcttgcacctttgttttctcctccagaacagtggaaaggtaatatctgtctcagatgcgtacgttgaagatgaaacgtgagat

SEQ ID NO: 49811 - DNA, 110 bp, synthetic construct
  source 1..110: mol_type = other DNA
cagtggaaaggtaatatctgtctcagatgcgtacgttgaagatgaaacgtgagattgcattgaccaagcatctaggcttgtctggcataaagcaaatgtccaaattacac

SEQ ID NO: 49812 - DNA, 110 bp, synthetic construct
  source 1..110: mol_type = other DNA
accagtcctcctactggtggatatctaaatgctttccaatacactcctatgagtatcactgcacaggaattgaaacatatgattagggaaaaacagcctggcagacagga

SEQ ID NO: 49813 - DNA, 110 bp, synthetic construct
  source 1..110: mol_type = other DNA
tcactgcacaggaattgaaacatatgattagggaaaaacagcctggcagacaggaatatagactccagagaataaactgcctggggtggcagtccacttggcttgggtac

SEQ ID NO: 49814 - DNA, 110 bp, synthetic construct
  source 1..110: mol_type = other DNA
attctatcaccttcagcacgctcaacaggcacgtcctccccagagcatgtgccctgacagaaggtgtttcgaaagcgccaccgagaacttagccttcctgacggccctcc

SEQ ID NO: 49815 - DNA, 110 bp, synthetic construct
  source 1..110: mol_type = other DNA
gacagaaggtgtttcgaaagcgccaccgagaacttagccttcctgacggccctccctctgccaaatggatttattccagagcttgaaagaaaaatcacaacccaaaaccg

SEQ ID NO: 49816 - DNA, 110 bp, synthetic construct
  source 1..110: mol_type = other DNA
atgggtaccagtcagattcatttctgctgagccacacgatgggaactccagtggcttcatcctgttcatcatggcctccacaaagctaggtacagagtccagcagtggag

SEQ ID NO: 49817 - DNA, 110 bp, synthetic construct
  source 1..110: mol_type = other DNA
ttcatcctgttcatcatggcctccacaaagctaggtacagagtccagcagtggagagcaaacattattcaatgactgacattcacagccgaatgaagagtggataaagtt

SEQ ID NO: 49818 - DNA, 110 bp, synthetic construct; identical to SEQ ID NO: 49816
  source 1..110: mol_type = other DNA

SEQ ID NO: 49819 - DNA, 110 bp, synthetic construct; identical to SEQ ID NO: 49817
  source 1..110: mol_type = other DNA

SEQ ID NO: 49820 - DNA, 110 bp, synthetic construct
  source 1..110: mol_type = other DNA
ttaaatagccctgactggaggagaattaaaaagaacttcgctcactccacaattccgcctcgcgctagtgagattcccaggtccactggggctgtagagaccaaactatt

SEQ ID NO: 49821 - DNA, 110 bp, synthetic construct
  source 1..110: mol_type = other DNA
cgcctcgcgctagtgagattcccaggtccactggggctgtagagaccaaactattctttcaagagttgctctttatttcaaagaaaaaagatcttttgaggatgggccag

SEQ ID NO: 49822 - DNA, 110 bp, synthetic construct
  source 1..110: mol_type = other DNA
tataaaagaagaaacagcttcacaaagataactgtttgcccagagtcacacatcctaaaactgctaaactgaggacagagctgcgggggtaactgatattacagctctta

SEQ ID NO: 49823 - DNA, 110 bp, synthetic construct
  source 1..110: mol_type = other DNA
taaaactgctaaactgaggacagagctgcgggggtaactgatattacagctcttactctttccaccactgcagtctcttaaccacctaccaccagctagaggtgctacgt

SEQ ID NO: 49824 - DNA, 110 bp, synthetic construct
  source 1..110: mol_type = other DNA
ctgatgcaggaaacccccttatgcaaatagctggtttcccactccttcagaagcatcagcataacagagtggttcagactcctgaatctggaaccagcatctgtgggttt

SEQ ID NO: 49825 - DNA, 110 bp, synthetic construct
  source 1..110: mol_type = other DNA
tcagcataacagagtggttcagactcctgaatctggaaccagcatctgtgggtttgaacttcattttaattcatgctatccttttctcatgtgtaatacactttcatcag

SEQ ID NO: 49826 - DNA, 110 bp, synthetic construct
  source 1..110: mol_type = other DNA
agaatattattcagcattaaaaaaaaggggatgttccaatacactacacattacaacaacatggctgatccttgaagacattatcatgacaggaataagatacaaaggac

SEQ ID NO: 49827 - DNA, 110 bp, synthetic construct; identical to SEQ ID NO: 49826
  source 1..110: mol_type = other DNA

SEQ ID NO: 49828 - DNA, 110 bp, synthetic construct
  source 1..110: mol_type = other DNA
gtaggaaatagaaaagagtggtcaatgagagatgagctaaagttttgctgggggaccagctagaaacaaatgtcagacatgtataggggcaccaagacccctacttgttt

SEQ ID NO: 49829 - DNA, 110 bp, synthetic construct
  source 1..110: mol_type = other DNA
ccagctagaaacaaatgtcagacatgtataggggcaccaagacccctacttgtttggtttttttccaacaggacagagtgcactgcctgcagaagtggatggattcagaa

SEQ ID NO: 49830 - DNA, 110 bp, synthetic construct
  source 1..110: mol_type = other DNA
aaggaacattctaatctgaatctgaagtggagcacaattatcaagctgcaatgtatttaccaatgcccacaggtaattatcaggagctatataattaccttgttctgaaa

SEQ ID NO: 49831 - DNA, 110 bp, synthetic construct
  source 1..110: mol_type = other DNA
tttaccaatgcccacaggtaattatcaggagctatataattaccttgttctgaaaacatgagccctatgctcgattttgcctttattccataaattattggtagttattt

SEQ ID NO: 49832 - DNA, 110 bp, synthetic construct
  source 1..110: mol_type = other DNA
acatgtctcccgtgaatgcccatcatggcctggccatccccgtccggagtctgggctgagctggggtgactcataaccaaggtggcgatggcagagatgggaaacagggt

SEQ ID NO: 49833 - DNA, 110 bp, synthetic construct
  source 1..110: mol_type = other DNA
ctgagctggggtgactcataaccaaggtggcgatggcagagatgggaaacagggtgaacgtgtttgaggaagggctgattgaatttgggacaaaatgaaaaaaaatgttc

SEQ ID NO: 49834 - DNA, 110 bp, synthetic construct
  source 1..110: mol_type = other DNA
ccatctaaccagtccttgtctgagccaccagcatttcttggggtcaatatcaaagggggaagaacaattcaagctcctaactatcttataccttctgctaccaaatgacc

SEQ ID NO: 49835 - DNA, 110 bp, synthetic construct
  source 1..110: mol_type = other DNA
ggggaagaacaattcaagctcctaactatcttataccttctgctaccaaatgaccccctaatcagttactcctcaaaacagacccagaacaaacaatccgaatatgtagt

SEQ ID NO: 49836 - DNA, 110 bp, synthetic construct
  source 1..110: mol_type = other DNA
gaatcaagagaacagaggaattattaggtgtgcctgaaactcacatccagactgagctgcgcaaatgacaaaccctttttagacctgtctacctcaccattgaggaaagg

SEQ ID NO: 49837 - DNA, 110 bp, synthetic construct
  source 1..110: mol_type = other DNA
gctgcgcaaatgacaaaccctttttagacctgtctacctcaccattgaggaaaggtacaccaaggaacacatagcaaatcaaggacctaagagagacctgaccttattac

SEQ ID NO: 49838 - DNA, 110 bp, synthetic construct; identical to SEQ ID NO: 49836
  source 1..110: mol_type = other DNA

SEQ ID NO: 49839 - DNA, 110 bp, synthetic construct; identical to SEQ ID NO: 49837
  source 1..110: mol_type = other DNA

SEQ ID NO: 49840 - DNA, 110 bp, synthetic construct
  source 1..110: mol_type = other DNA
tccttttctaaacttgaggatctaataatgccttgactcttgtgtcacacttttccattttcaaagcacttttgcaaggctcatctcatgtgtgccttccaccaaccgca

SEQ ID NO: 49841 - DNA, 110 bp, synthetic construct
  source 1..110: mol_type = other DNA
cattttcaaagcacttttgcaaggctcatctcatgtgtgccttccaccaaccgcaggagttgggcagaacagatattcctgccctgtctctaccatcaggacatcaagac

SEQ ID NO: 49842 - DNA, 110 bp, synthetic construct
  source 1..110: mol_type = other DNA
tgaggatggttgcagagctttctatggcttgtaagcatttctatatgcttgacacctaataaatatcagtggtaataaaagacaattttaaaagagagaagttacaaata

SEQ ID NO: 49843 - DNA, 110 bp, synthetic construct
  source 1..110: mol_type = other DNA
ctaataaatatcagtggtaataaaagacaattttaaaagagagaagttacaaatatgggtagtggtgatcctataaactacctcttttatacaaccctctaaccacccag

SEQ ID NO: 49844 - DNA, 110 bp, synthetic construct
  source 1..110: mol_type = other DNA
acagcactggtggccctctcaggactttgcaagtgcccaaacaagtcacagcagggctggaagtttttcttccgggaataacactgttattgtcatgaaccacttttgct

SEQ ID NO: 49845 - DNA, 110 bp, synthetic construct
  source 1..110: mol_type = other DNA
gctggaagtttttcttccgggaataacactgttattgtcatgaaccacttttgcttgtctctttctcaacccacgttcagaagagtcatgaggtcctcatggtccccaca

SEQ ID NO: 49846 - DNA, 110 bp, synthetic construct
  source 1..110: mol_type = other DNA
aaatacatttaagattacacaggagagtggttcctaacatattaggagggaattccagagtacaggatagacactgtatagtatgtctgatactagaatttggcattggg

SEQ ID NO: 49847 - DNA, 110 bp, synthetic construct
  source 1..110: mol_type = other DNA
cagagtacaggatagacactgtatagtatgtctgatactagaatttggcattgggttctcaggttctcttttcttgtctctttgtcctaatgatcatgacaataacacgt

SEQ ID NO: 49848 - DNA, 110 bp, synthetic construct
  source 1..110: mol_type = other DNA
ctttttgaatgaaagttttgtgcagatacatgcccaggagtaggattactggatcacatgatagttctatattcagtttttggaagaacctccataccgttttccatagt

SEQ ID NO: 49849 - DNA, 110 bp, synthetic construct; identical to SEQ ID NO: 49848
  source 1..110: mol_type = other DNA

SEQ ID NO: 49850 - DNA, 110 bp, synthetic construct
  source 1..110: mol_type = other DNA
gaagggaaaggaaagaatctttcggggagttcccatcgtggccattggtaacaaatgctactcttctccatgaggacgtgagttcaatctctggccttgctcagtgggtt

SEQ ID NO: 49851 - DNA, 110 bp, synthetic construct; identical to SEQ ID NO: 49850
  source 1..110: mol_type = other DNA

SEQ ID NO: 49852 - DNA, 110 bp, synthetic construct
  source 1..110: mol_type = other DNA
ggaatccgaagattggaggaacagatactaaatactttggcctgaagcattggtatgggtggaaaaactgtagtttcagggaactcagaattgggtccctctggctgcta

SEQ ID NO: 49853 - DNA, 110 bp, synthetic construct
  source 1..110: mol_type = other DNA
tgggtggaaaaactgtagtttcagggaactcagaattgggtccctctggctgctaaagttcgaccacgagcagatgtaatgaggtctgagaagcctgtcccaccactgcc

SEQ ID NO: 49854 - DNA, 110 bp, synthetic construct
  source 1..110: mol_type = other DNA
ctctccagaaatcaaatcctctacttgacaaggaagcaggcagcgtgtgactcccacctggctgtaccgtgggggcctttctcggactccgaaccacaaaccacacggag

SEQ ID NO: 49855 - DNA, 110 bp, synthetic construct
  source 1..110: mol_type = other DNA
acctggctgtaccgtgggggcctttctcggactccgaaccacaaaccacacggaggagcagtagataacagaatagatgggatttggggaggaggttaccatgatgctgt

SEQ ID NO: 49856 - DNA, 110 bp, synthetic construct
  source 1..110: mol_type = other DNA
gacattgacaaaaggaggggagaatctgagctagctgccagaatcctgtggttcagtttggggggatagcaagtgtcgggcactgcaatgactgaggccttagtctgaac

SEQ ID NO: 49857 - DNA, 110 bp, synthetic construct
  source 1..110: mol_type = other DNA
gtttggggggatagcaagtgtcgggcactgcaatgactgaggccttagtctgaactgccacaggcagactcggaatcattcactggccagggaagtgcccagacaccaaa

SEQ ID NO: 49858 - DNA, 110 bp, synthetic construct; identical to SEQ ID NO: 49856
  source 1..110: mol_type = other DNA

SEQ ID NO: 49859 - DNA, 110 bp, synthetic construct; identical to SEQ ID NO: 49857
  source 1..110: mol_type = other DNA

SEQ ID NO: 49860 - DNA, 110 bp, synthetic construct
  source 1..110: mol_type = other DNA
tggttgttcaccgttctgtcatgaagttcagtatcttgtaaatctgtttcatacttcaaggttttgtttagtcttccatatgcgtctagaatagcctttatttggagatg

SEQ ID NO: 49861 - DNA, 110 bp, synthetic construct
  source 1..110: mol_type = other DNA
tcaaggttttgtttagtcttccatatgcgtctagaatagcctttatttggagatgactatagccccactaccaagggatgacccttctgaagtctccagtcggtgtcctt

SEQ ID NO: 49862 - DNA, 110 bp, synthetic construct
  source 1..110: mol_type = other DNA
tttgttcccaacatgggaacaccaatcattgagagagactgagtttcataatacctaagcactgctgtgactgttaagggggtgggggtgaggcgggagactggttaaac

SEQ ID NO: 49863 - DNA, 110 bp, synthetic construct
  source 1..110: mol_type = other DNA
taagcactgctgtgactgttaagggggtgggggtgaggcgggagactggttaaacaatgtaattattctaggctttcttctcatatgtgcctaccaaggggaaccaacca

SEQ ID NO: 49864 - DNA, 110 bp, synthetic construct
  source 1..110: mol_type = other DNA
aatccacatcttggacctgctgcttcctatgaataatagttaacatctagataggacttactatgtgccaggtactgatcttattttttaaaaaaattttagtggactat

SEQ ID NO: 49865 - DNA, 110 bp, synthetic construct
  source 1..110: mol_type = other DNA
acttactatgtgccaggtactgatcttattttttaaaaaaattttagtggactatagttgacttaaaatatattaacttcaggggtacagcaaagtgaatcagttaccca

SEQ ID NO: 49866 - DNA, 110 bp, synthetic construct
  source 1..110: mol_type = other DNA
tttaacatagtcttctttaaatctactacctcaaattataacaataaaaaaacaggggggggggggagtgaagatgagaagataccagaaagggatgtgattagtgacag

SEQ ID NO: 49867 - DNA, 110 bp, synthetic construct
  source 1..110: mol_type = other DNA
gggggggggggagtgaagatgagaagataccagaaagggatgtgattagtgacagaagagcaagtggtgggactggagatccagttcaccgtgtccacaatcttgcacaa

SEQ ID NO: 49868 - DNA, 110 bp, synthetic construct
  source 1..110: mol_type = other DNA
gggggatagacttgcttgttcgatacaaccttctctgtctccaacccagcacctgtctcagggcagaccccaagcacctccacgaatacctgagggctcccaggaagagc

SEQ ID NO: 49869 - DNA, 110 bp, synthetic construct
  source 1..110: mol_type = other DNA
tctcagggcagaccccaagcacctccacgaatacctgagggctcccaggaagagcttgaaaatcactcactagttccatcttctctacctatagatgatgaaactagaca

SEQ ID NO: 49870 - DNA, 110 bp, synthetic construct
  source 1..110: mol_type = other DNA
ttcactttcactgcggtaccacctaagactttacccttttacttcacttcatgtgtcaagcactacattgcttccaacattatatctgaacacatctccaatctataagg

SEQ ID NO: 49871 - DNA, 110 bp, synthetic construct
  source 1..110: mol_type = other DNA
cttttacttcacttcatgtgtcaagcactacattgcttccaacattatatctgaacacatctccaatctataaggtataaagagaccaattaatttcaaatgatttaatg

SEQ ID NO: 49872 - DNA, 110 bp, synthetic construct
  source 1..110: mol_type = other DNA
cagacccccttctgtcccctaaaggaaagtgaccttgtcataaattatctattccctgctgggaactcccttttcctgcccctttctgcctgtaaaagtctttcattcag

SEQ ID NO: 49873 - DNA, 110 bp, synthetic construct
  source 1..110: mol_type = other DNA
ctgctgggaactcccttttcctgcccctttctgcctgtaaaagtctttcattcagttcagctctttggagcgcccttccatatactaacagtgatgctgcccaattcata

SEQ ID NO: 49874 - DNA, 110 bp, synthetic construct
  source 1..110: mol_type = other DNA
caggtgagaaagaaccaagccaccttcagggccagagaccaagtaagtcactgcgtattctcactgccctggcctgactctgtgtagagcagcttggacagtcataacaa

SEQ ID NO: 49875 - DNA, 110 bp, synthetic construct
  source 1..110: mol_type = other DNA
tattctcactgccctggcctgactctgtgtagagcagcttggacagtcataacaaattttcaagcatttgatggctctgagtggagcctgggtggttttccaaataagag

SEQ ID NO: 49876 - DNA, 110 bp, synthetic construct
  source 1..110: mol_type = other DNA
gtttgttaactgctgagccatgacgggaactccaaaactgagatttcatggaacagcaatccaatgagcttttatggagctgttccaagtgagcatcaggcatggcactg

SEQ ID NO: 49877 - DNA, 110 bp, synthetic construct
  source 1..110: mol_type = other DNA
gcaatccaatgagcttttatggagctgttccaagtgagcatcaggcatggcactggaaatactgtggggagcaggtggacacgtgtggatctcaggtaccataaaccggg

SEQ ID NO: 49878 - DNA, 110 bp, synthetic construct
  source 1..110: mol_type = other DNA
aaagagatcggaactgccttctacctcaacttacagattctcagcttcgcctaacagctggatcactccctctccctctcccggaaggcctcgtgaccctggcaggagct

SEQ ID NO: 49879 - DNA, 110 bp, synthetic construct
  source 1..110: mol_type = other DNA
agctggatcactccctctccctctcccggaaggcctcgtgaccctggcaggagctgggatgccaggaatgccacagcttgaacaccatgtgttcctttctctcccctcct

SEQ ID NO: 49880 - DNA, 110 bp, synthetic construct
  source 1..110: mol_type = other DNA
ctcattcaagtgaattctactaaatactatagctagctcgaggttaccagcatcctgcaggccaggagctgtgctaggtctcggggggaaagagatgtcacacccatggg

SEQ ID NO: 49881 - DNA, 110 bp, synthetic construct
  source 1..110: mol_type = other DNA
tgcaggccaggagctgtgctaggtctcggggggaaagagatgtcacacccatgggtgcctgttctggctctgccacttcctatctgtatgaccgtgcaggctgtgtaacc

SEQ ID NO: 49882 - DNA, 110 bp, synthetic construct
  source 1..110: mol_type = other DNA
ggtgtgacattcagtgagaggcagagaggtctcctgggagataagcacgtgggaagccctctgcatctcaagagggaagtttcctcggtgagcatctgggccccagggta

SEQ ID NO: 49883 - DNA, 110 bp, synthetic construct
  source 1..110: mol_type = other DNA
gccctctgcatctcaagagggaagtttcctcggtgagcatctgggccccagggtaagaaaggctttaggctcatcccaagcgctcaccccaagctgcacctgcacagagc

SEQ ID NO: 49884 - DNA, 110 bp, synthetic construct
  source 1..110: mol_type = other DNA
gtctaagaaataactaaaacttgggcatcttttccaaaacacctctgattgttcagtggattcggaaggacctttccactaatgtaggcatttcaacccagccaggtcat

SEQ ID NO: 49885 - DNA, 110 bp, synthetic construct
  source 1..110: mol_type = other DNA
gtggattcggaaggacctttccactaatgtaggcatttcaacccagccaggtcatgagcctctgcaatcattcagcagctgctctttataacgagctctggggggcaaca

SEQ ID NO: 49886 - DNA, 110 bp, synthetic construct
  source 1..110: mol_type = other DNA
ccccttacctcctagctgagaactaaaaataagaacaaaacaaaaccaaaaagaaaatattttcaacagtgcaattacagcctcaatttccaaagttcttcctgaacact

SEQ ID NO: 49887 - DNA, 110 bp, synthetic construct
  source 1..110: mol_type = other DNA
aatattttcaacagtgcaattacagcctcaatttccaaagttcttcctgaacactggttctttgtgcctgcaacaggagagggagatagatttcattaaataaccaaaca

SEQ ID NO: 49888 - DNA, 110 bp, synthetic construct
  source 1..110: mol_type = other DNA
tcaagacactgaatacagcaggtggccttcatctcaatatccctttgtagtcagtgccaggtggctgtggatcaagctgtacaacaaggtgaccccatctagccccaggg

SEQ ID NO: 49889 - DNA, 110 bp, synthetic construct
  source 1..110: mol_type = other DNA
gccaggtggctgtggatcaagctgtacaacaaggtgaccccatctagccccagggtccctgctgataattatctgtattcttttgaagacatcttatcttcctagaatct

SEQ ID NO: 49890 - DNA, 110 bp, synthetic construct
  source 1..110: mol_type = other DNA
actgcaccacgacagaaactcctggttttaacttaataaatgtagtctttattaacatttcaagctgtatgatatgaaatttttcaggagcatcattgtttaatagaagc

SEQ ID NO: 49891 - DNA, 110 bp, synthetic construct
  source 1..110: mol_type = other DNA
catttcaagctgtatgatatgaaatttttcaggagcatcattgtttaatagaagctgtttgaaaattaatatttatagcaaacagactttggttgctaagggggagaggg

SEQ ID NO: 49892 - DNA, 110 bp, synthetic construct
  source 1..110: mol_type = other DNA
cccaccagcacctcctctgctctaccttggctgaatctttccaacctaccccccggcccacctggttcaaattctgaactgtagttctgtgtccctcccctactcacaaa

SEQ ID NO: 49893 - DNA, 110 bp, synthetic construct
  source 1..110: mol_type = other DNA
gcccacctggttcaaattctgaactgtagttctgtgtccctcccctactcacaaaccttccctgaaccataggatccagaaactgcacttctaggtacagacacaaaaag

SEQ ID NO: 49894 - DNA, 110 bp, synthetic construct
  source 1..110: mol_type = other DNA
cacacggacttgtgcagtaacaattaggaacagcactagaaactgcaacactgaaggaagtggagctgtttagtctgtgtggctgaggccaaaagcttgtgctgcctccg

SEQ ID NO: 49895 - DNA, 110 bp, synthetic construct
  source 1..110: mol_type = other DNA
ggaagtggagctgtttagtctgtgtggctgaggccaaaagcttgtgctgcctccgaggggagcatcgcataattgcaggcagaggggggagggcttcatggtgctcatcc

SEQ ID NO: 49896 - DNA, 110 bp, synthetic construct
  source 1..110: mol_type = other DNA
ggctagagtctgatcccagccttgagaactttcagatgccaagagaatggccaaaagaaaggagaagaaaagctaatacttgttcaatgcttattgtatacccaggacta

SEQ ID NO: 49897 - DNA, 110 bp, synthetic construct
  source 1..110: mol_type = other DNA
agaaaggagaagaaaagctaatacttgttcaatgcttattgtatacccaggactattctgaacactttacatgtattaacttatttaatcctctcaccaactctattagg

SEQ ID NO: 49898 - DNA, 110 bp, synthetic construct; identical to SEQ ID NO: 49896
  source 1..110: mol_type = other DNA

SEQ ID NO: 49899 - DNA, 110 bp, synthetic construct; identical to SEQ ID NO: 49897
  source 1..110: mol_type = other DNA

SEQ ID NO: 49900 - DNA, 110 bp, synthetic construct
  source 1..110: mol_type = other DNA
tccacagcagatctctagaacattttcatcctgcatgaatgacactctatacctgctgaatgccagcttacttcccctgcttggcaacccctggcaaccattattctact

SEQ ID NO: 49901 - DNA, 110 bp, synthetic construct
  source 1..110: mol_type = other DNA
tccctctgcaatcagtttgactttcccacagttgcagctaagaggattttgtaattacatccatgagttttaagaggttcccctctctcttcctttctcagtgtacactt

SEQ ID NO: 49902 - DNA, 110 bp, synthetic construct
  source 1..110: mol_type = other DNA
ctcagtcttgagcaagtcacatcctcactctatgcctcagtttcctcacttggtaaacaaggacataaggtccacctcacagggtggctgtaaataatgagatgatggat

SEQ ID NO: 49903 - DNA, 110 bp, synthetic construct
  source 1..110: mol_type = other DNA
aacaaggacataaggtccacctcacagggtggctgtaaataatgagatgatggatgtcaagagccccgcagaatccctcaggacggtcctcactgggcagcaggctatgc

SEQ ID NO: 49904 - DNA, 110 bp, synthetic construct
  source 1..110: mol_type = other DNA
ttcctgattcacctacatctgtccatctgctaaacttctgctcaacgtctgattctggggaatagcatgtaggagctcgttattgcctcacacctaccccatattctccc

SEQ ID NO: 49905 - DNA, 110 bp, synthetic construct
  source 1..110: mol_type = other DNA
tggggaatagcatgtaggagctcgttattgcctcacacctaccccatattctccccagacttttatctgtcataaaactaacattttgatctctgactgctcaactcctt

SEQ ID NO: 49906 - DNA, 110 bp, synthetic construct
  source 1..110: mol_type = other DNA
gtaaacaagttataacttgggagagtaccaggctaggagcagaagagagagcttcacctcccagaggctgagctcaatggttgggttgagttctcaaagaaagagaaggt

SEQ ID NO: 49907 - DNA, 110 bp, synthetic construct
  source 1..110: mol_type = other DNA
acctcccagaggctgagctcaatggttgggttgagttctcaaagaaagagaaggtagaggtgacagtgtgcactatgagaagggagcccttgggtgatttgatgagatca

SEQ ID NO: 49908 - DNA, 110 bp, synthetic construct
  source 1..110: mol_type = other DNA
ctcattctcactgttccactcgttgctctccctccccagaccatgcttttcttccccaggaacaaggcaggagatggacaccgaccctttcgttacctccagttcaagca

SEQ ID NO: 49909 - DNA, 110 bp, synthetic construct
  source 1..110: mol_type = other DNA
ccaggaacaaggcaggagatggacaccgaccctttcgttacctccagttcaagcaactagcacctggacactgactagcacctctaaatcccaattccaaatgctgggaa

SEQ ID NO: 49910 - DNA, 110 bp, synthetic construct
  source 1..110: mol_type = other DNA
caaaattaaagaaatagaaaaaaaaggccttcatgatgacaactcttaggatttactcttaacaactttcgcatacaacacacagcagtgctggttacatgtatcacatt

SEQ ID NO: 49911 - DNA, 110 bp, synthetic construct
  source 1..110: mol_type = other DNA
ctcttaacaactttcgcatacaacacacagcagtgctggttacatgtatcacattttatgttacatctctagtacttatatatcatacaaccagaagtgcatccaaatct

SEQ ID NO: 49912 - DNA, 110 bp, synthetic construct
  source 1..110: mol_type = other DNA
gattaaagacggccacaaaattctttgccatttctctcatcagtaaatggagcctactttttctacccatgaatctgggcttaccttttgagttgcttttgctcagtaga

SEQ ID NO: 49913 - DNA, 110 bp, synthetic construct
  source 1..110: mol_type = other DNA
actttttctacccatgaatctgggcttaccttttgagttgcttttgctcagtagaatttagcagaactgacactgtgcaagatcccagcacaagcctggagaaggcctgg

SEQ ID NO: 49914 - DNA, 110 bp, synthetic construct
  source 1..110: mol_type = other DNA
tacacaaaaatattacttaatttaaaacttgctatccagcttttctccaaattataaacatgctttgcaatggtgttttagtctatcctgtgcagataatccctcccagt

SEQ ID NO: 49915 - DNA, 110 bp, synthetic construct; identical to SEQ ID NO: 49914
  source 1..110: mol_type = other DNA

SEQ ID NO: 49916 - DNA, 110 bp, synthetic construct; identical to SEQ ID NO: 49914
  source 1..110: mol_type = other DNA

SEQ ID NO: 49917 - DNA, 110 bp, synthetic construct; identical to SEQ ID NO: 49914
  source 1..110: mol_type = other DNA

SEQ ID NO: 49918 - DNA, 110 bp, synthetic construct
  source 1..110: mol_type = other DNA
aaatgtttaaaataagagaatgtacattcatgtattctcttcctaaatcagtaagaaagtaggccacagggaagactttggctcaaacagttccctgcactagccaccag

SEQ ID NO: 49919 - DNA, 110 bp, synthetic construct; identical to SEQ ID NO: 49918
  source 1..110: mol_type = other DNA

SEQ ID NO: 49920 - DNA, 110 bp, synthetic construct
  source 1..110: mol_type = other DNA
ataggtaaatactcttaaacaatgtctgtcttgactccctactgcccaactgctggtagccaccattttattctgtttttacaagtttggcttttctttctttttttgca

SEQ ID NO: 49921 - DNA, 110 bp, synthetic construct
  source 1..110: mol_type = other DNA
tccctactgcccaactgctggtagccaccattttattctgtttttacaagtttggcttttctttctttttttgcagtgactcatttttatcattataaatgtattaaaat

SEQ ID NO: 49922 - DNA, 110 bp, synthetic construct
  source 1..110: mol_type = other DNA
ttgttttgttcatgatttcctttgctgtgaaaaccttttacgtttaatgaggtcccatatgtttatttctgttttcattgtcgttactctaggcagtggatctgagaaga

SEQ ID NO: 49923 - DNA, 110 bp, synthetic construct
  source 1..110: mol_type = other DNA
ttttacgtttaatgaggtcccatatgtttatttctgttttcattgtcgttactctaggcagtggatctgagaagacagtgctgcggtttatgtcagagagtgttcggcct

SEQ ID NO: 49924 - DNA, 110 bp, synthetic construct
  source 1..110: mol_type = other DNA
tcctttttttttccatttctttctctcctcctaacctctcttacagttttcttctattggattgaccctgtatgtaaaacccttctttgtctcatagtctttgttttaaa

SEQ ID NO: 49925 - DNA, 110 bp, synthetic construct; identical to SEQ ID NO: 49924
  source 1..110: mol_type = other DNA

SEQ ID NO: 49926 - DNA, 110 bp, synthetic construct
  source 1..110: mol_type = other DNA
cacttcataggaattagaaggcctgtgattattacttatgtaattaaatctccttggagtttggtaatgtgagaactcatactaagttcttaaaacagattttccaagta

SEQ ID NO: 49927 - DNA, 110 bp, synthetic construct
  source 1..110: mol_type = other DNA
agaaggcctgtgattattacttatgtaattaaatctccttggagtttggtaatgtgagaactcatactaagttcttaaaacagattttccaagtaattccttttatcaca

SEQ ID NO: 49928 - DNA, 110 bp, synthetic construct
  source 1..110: mol_type = other DNA
aggactgttagctttatgacatttgaataatggaaatcattgtccttacaaaataattggccactggctttctttttttaagagtttacaatatttgagctgctgtactt

SEQ ID NO: 49929 - DNA, 110 bp, synthetic construct; identical to SEQ ID NO: 49928
  source 1..110: mol_type = other DNA

SEQ ID NO: 49930 - DNA, 110 bp, synthetic construct; identical to SEQ ID NO: 49928
  source 1..110: mol_type = other DNA

SEQ ID NO: 49931 - DNA, 110 bp, synthetic construct; identical to SEQ ID NO: 49928
  source 1..110: mol_type = other DNA

SEQ ID NO: 49932 - DNA, 110 bp, synthetic construct
  source 1..110: mol_type = other DNA
agcagagaataagttagagttgattgaagaaatagttccaaaactagcaaagtgaaaattgtaattgacagttactatataggcccaggtaaaagccccaaattaatgaa

SEQ ID NO: 49933 - DNA, 110 bp, synthetic construct; identical to SEQ ID NO: 49932
  source 1..110: mol_type = other DNA

SEQ ID NO: 49934 - DNA, 110 bp, synthetic construct
  source 1..110: mol_type = other DNA
ttttcctcatcaaagtttgggaagtgctgccttaagctaccctgtcttggaaacacggagagcatattagcctgctgccttggggcccaaagtcagaataagaaacaaca

SEQ ID NO: 49935 - DNA, 110 bp, synthetic construct
  source 1..110: mol_type = other DNA
cggagagcatattagcctgctgccttggggcccaaagtcagaataagaaacaacacttagactatggcacagcaaggaggctgacttgtgtgtgctcatgcccctccacc

SEQ ID NO: 49936 - DNA, 110 bp, synthetic construct
  source 1..110: mol_type = other DNA
cttttgatgtagccattctgacaggtgtgagctgatatctcattgtggttttaatttgtacttatctgatgattaatgatcatgtttattgtcttctttggaaaaaaatg

SEQ ID NO: 49937 - DNA, 110 bp, synthetic construct
  source 1..110: mol_type = other DNA
tgtgagctgatatctcattgtggttttaatttgtacttatctgatgattaatgatcatgtttattgtcttctttggaaaaaaatgtctattcaggactcctagccatttt

SEQ ID NO: 49938 - DNA, 110 bp, synthetic construct
  source 1..110: mol_type = other DNA
aatggtactgtggtaggttaaagatgaccataaagtctttttcactctcccactgagagttggtgtttattactctccccttcgactctagggttgccctgttcaggact

SEQ ID NO: 49939 - DNA, 110 bp, synthetic construct
  source 1..110: mol_type = other DNA
agagttggtgtttattactctccccttcgactctagggttgccctgttcaggactgcttaaccaacaagacatgttggagaaaatattgtaccagttctggccctagcct

SEQ ID NO: 49940 - DNA, 110 bp, synthetic construct
  source 1..110: mol_type = other DNA
tctggtggtgaacatatgatggagtactcacttgggacactggcaccaagacctggccccaaccaacagcctctaggctccaatgctggtatgcctcaggctaaacaacc

SEQ ID NO: 49941 - DNA, 110 bp, synthetic construct
  source 1..110: mol_type = other DNA
gccccaaccaacagcctctaggctccaatgctggtatgcctcaggctaaacaaccaatagagtgggaacacggtcccacccatcaacagaaaggcaacctaaagaatttc

SEQ ID NO: 49942 - DNA, 110 bp, synthetic construct; identical to SEQ ID NO: 49940
  source 1..110: mol_type = other DNA

SEQ ID NO: 49943 - DNA, 110 bp, synthetic construct; identical to SEQ ID NO: 49941
  source 1..110: mol_type = other DNA

SEQ ID NO: 49944 - DNA, 110 bp, synthetic construct
  source 1..110: mol_type = other DNA
ccagtaatagtggggtgtacaaattaactgttcaataaagctctaatgaggaagccaaacattttctgcttttttttttttttctacttaagattaaggggggatggggt

SEQ ID NO: 49945 - DNA, 110 bp, synthetic construct
  source 1..110: mol_type = other DNA
caaacattttctgcttttttttttttttctacttaagattaaggggggatggggtaaaaatcataagaacgttaattcttttggtggaagggagaggctatggtcaagtc

SEQ ID NO: 49946 - DNA, 110 bp, synthetic construct
  source 1..110: mol_type = other DNA
gataacaatagttcatatacgtgcggtgaacagtcttccacagaagtgagacgcctaggactcagcaacgaactctgtgccaacagatatatttcatttctagaaactta

SEQ ID NO: 49947 - DNA, 110 bp, synthetic construct
  source 1..110: mol_type = other DNA
taggactcagcaacgaactctgtgccaacagatatatttcatttctagaaacttaccaagggtgtgtcttttcctcccacgatgctgagaccaagccccgaacgtccctt

SEQ ID NO: 49948 - DNA, 110 bp, synthetic construct
  source 1..110: mol_type = other DNA
ttgacaaactgtgcccatcactgctttctatgacacgatcctacaaggcgtgacgtcacaatgaccaatgactcttctaatatggtacacacacaggcaggattttaact

SEQ ID NO: 49949 - DNA, 110 bp, synthetic construct
  source 1..110: mol_type = other DNA
tcacaatgaccaatgactcttctaatatggtacacacacaggcaggattttaactagccattacatgcaacagtgcctacacattttgggactaaaatattctacctccg

SEQ ID NO: 49950 - DNA, 110 bp, synthetic construct
  source 1..110: mol_type = other DNA
tgtaccaattacgtataaaagttggagtccttgccctataagttagggtctttgccctaaaggaacttataatcttactctctccaaagaggtctaagaataagaatcca

SEQ ID NO: 49951 - DNA, 110 bp, synthetic construct
  source 1..110: mol_type = other DNA
cctaaaggaacttataatcttactctctccaaagaggtctaagaataagaatccacttattatcagaaatatttccttgaacactctaggctgaaaatttaaaaaggctc

SEQ ID NO: 49952 - DNA, 110 bp, synthetic construct
  source 1..110: mol_type = other DNA
gctgggttgtgagaaagaggaccactcatctcaacagataaatgtgagccatctccaggcaacagtcacagtatggggatgttgtgggttggggcccatgcaaatgagag

SEQ ID NO: 49953 - DNA, 110 bp, synthetic construct
  source 1..110: mol_type = other DNA
caggcaacagtcacagtatggggatgttgtgggttggggcccatgcaaatgagagttctctacttggtcaaaggagagcagaacgcttggactagatgggtagtgatggc

SEQ ID NO: 49954 - DNA, 110 bp, synthetic construct
  source 1..110: mol_type = other DNA
taacatgcattatcttattaatttcttacatatgatgggtgttgttatcaccccaacttccataatgagaacaatgaaactcgcagaggctaagacaatagttgagtcag

SEQ ID NO: 49955 - DNA, 110 bp, synthetic construct
  source 1..110: mol_type = other DNA
acttccataatgagaacaatgaaactcgcagaggctaagacaatagttgagtcagaatttggtaacaggataatctgacaaaatcccactgagccatactaactccctag

SEQ ID NO: 49956 - DNA, 110 bp, synthetic construct
  source 1..110: mol_type = other DNA
caaggtcttaactccaagtaacaaagaccaaacagcctgctattggctagagtcatgaccaaaaggtagtaaccgattctaactgggactccaaggcacgtatgggtaaa

SEQ ID NO: 49957 - DNA, 110 bp, synthetic construct
  source 1..110: mol_type = other DNA
tgaccaaaaggtagtaaccgattctaactgggactccaaggcacgtatgggtaaaaggtaaaagcgatccactcacctgagtctgaactgtcttttgggaatggacttca

SEQ ID NO: 49958 - DNA, 110 bp, synthetic construct
  source 1..110: mol_type = other DNA
taataagctcccaagtgacaccatgctgctggttctcagaccacatgttgagtagcaagatgagacctcacctgacacagatatcatagagtctcatatgggtgttcctt

SEQ ID NO: 49959 - DNA, 110 bp, synthetic construct
  source 1..110: mol_type = other DNA
caagatgagacctcacctgacacagatatcatagagtctcatatgggtgttccttacacttgtataagagaaaatttcctatggaaagctggaaatgttcagacatatat

SEQ ID NO: 49960 - DNA, 110 bp, synthetic construct
  source 1..110: mol_type = other DNA
aacaataaatactacaggtctacatgacccactggatactgaaccgcagacaaggaggaatcacatacactgagtgacgactataagttacactcggatttttttctttt

SEQ ID NO: 49961 - DNA, 110 bp, synthetic construct
  source 1..110: mol_type = other DNA
atactgaaccgcagacaaggaggaatcacatacactgagtgacgactataagttacactcggatttttttcttttttctttttacagctgcacctgcggcatatggaagt

SEQ ID NO: 49962 - DNA, 110 bp, synthetic construct
  source 1..110: mol_type = other DNA
acaaatccctgaataaaaacagaagcataaggagatatactcctaagaatctgtcctacaattatcagtcttttgagagtaggttgtttgtcttctggcaacaaggacat

SEQ ID NO: 49963 - DNA, 110 bp, synthetic construct
  source 1..110: mol_type = other DNA
ctacaattatcagtcttttgagagtaggttgtttgtcttctggcaacaaggacattaatggggaattttttttttaagggaaaagtgggtagatgataaaataaatgcat

SEQ ID NO: 49964 - DNA, 110 bp, synthetic construct
  source 1..110: mol_type = other DNA
ggaagccctcctcgaagaagttcgttaattcaacctggagaaagttctcgtctttgaatagttcttaactcttgaagataacagcttcctttaaaaacctgacaactgta

SEQ ID NO: 49965 - DNA, 110 bp, synthetic construct
  source 1..110: mol_type = other DNA
gaatagttcttaactcttgaagataacagcttcctttaaaaacctgacaactgtaaccaacccccttcccagaaaaattcacacggagtctaaattctccatgcgctatc

SEQ ID NO: 49966 - DNA, 110 bp, synthetic construct
  source 1..110: mol_type = other DNA
tctaatattttggggaaaagccatttctatcttaccagcagctagagaatgctgataagttcaggaacactagagtttggattaatcatttttttcttgtagttgccata

SEQ ID NO: 49967 - DNA, 110 bp, synthetic construct
  source 1..110: mol_type = other DNA
agaatgctgataagttcaggaacactagagtttggattaatcatttttttcttgtagttgccatagtgatatatggccaaaatgttgacaacactataagttacttctta

SEQ ID NO: 49968 - DNA, 110 bp, synthetic construct
  source 1..110: mol_type = other DNA
ccacttgtcagcaaaagagcaggtcatgagctcttttttgctgttgttattgttttgttttgtttttttgttttttcagggccgcaaccttggcatatggaggttcccac

SEQ ID NO: 49969 - DNA, 110 bp, synthetic construct
  source 1..110: mol_type = other DNA
agagcaggtcatgagctcttttttgctgttgttattgttttgttttgtttttttgttttttcagggccgcaaccttggcatatggaggttcccacgctaggggttaaatt

SEQ ID NO: 49970 - DNA, 110 bp, synthetic construct
  source 1..110: mol_type = other DNA
ctgcacacataggaggtgctcatcaaatgcttgctaactggataaataatagctctgtcagaaactggaaatgcaacactctgcctgggaggcagtttgaaatcaaagct

SEQ ID NO: 49971 - DNA, 110 bp, synthetic construct
  source 1..110: mol_type = other DNA
tgtcagaaactggaaatgcaacactctgcctgggaggcagtttgaaatcaaagcttgaggagacacagtgtggaccaataaaaatttatgctagataatctccacacaga

SEQ ID NO: 49972 - DNA, 110 bp, synthetic construct
  source 1..110: mol_type = other DNA
ttttttttttttgctttttagggtaacaccagtggcatacagaatttcctgggctagggggtcgaattcgagctgcagctgccggtctttaccacagtcatagcaaggcc

SEQ ID NO: 49973 - DNA, 110 bp, synthetic construct
  source 1..110: mol_type = other DNA
agggggtcgaattcgagctgcagctgccggtctttaccacagtcatagcaaggccagatatgagccatgtctgtgacctgcaccgtagttcatggcaatgccggatcctt

SEQ ID NO: 49974 - DNA, 110 bp, synthetic construct
  source 1..110: mol_type = other DNA
atagctgtgccccaaggaaacaattctcgcattccctctgctttgtttctccagctgtagagtcagagccttagaaaggggagagagacagatggagaccaggttataca

SEQ ID NO: 49975 - DNA, 110 bp, synthetic construct
  source 1..110: mol_type = other DNA
tgtagagtcagagccttagaaaggggagagagacagatggagaccaggttatacatccacacctcacatgccaggcagctgggaaaaggaaatcctccatttccatctct

SEQ ID NO: 49976 - DNA, 110 bp, synthetic construct
  source 1..110: mol_type = other DNA
tgtagttgcaatccagacttaaccagtgcctgtttgcagctcttcctgtccttgtctggagacccttccccttaagagatcttctaagcagtgctattttggaaggctat

SEQ ID NO: 49977 - DNA, 110 bp, synthetic construct
  source 1..110: mol_type = other DNA
gaattcagccctactacttaccaactggagaacaccaaagagctttccccttatggcacctctgtttctcatccataaaacagagataatgatatttaccttgtagaatt

SEQ ID NO: 49978 - DNA, 110 bp, synthetic construct
  source 1..110: mol_type = other DNA
tttcccatgttccgtctctattctttccttctcatctcctatgcattctggggcttctcattcatttacccagaaatactgggagttcttgcctcctcctctttcttgcc

SEQ ID NO: 49979 - DNA, 110 bp, synthetic construct
  source 1..110: mol_type = other DNA
agcctgctggtggatgttgagtaaccactgggtgggatgtaagcttttatactacgtggccttccactaatccaagaatgatgctctgaagaaaggagcatcgatgagtc

SEQ ID NO: 49980 - DNA, 110 bp, synthetic construct
  source 1..110: mol_type = other DNA
gtggccttccactaatccaagaatgatgctctgaagaaaggagcatcgatgagtcataagaagccaatccttacagagctctgtgggcaccccgcccaggattgggatcc

SEQ ID NO: 49981 - DNA, 110 bp, synthetic construct
  source 1..110: mol_type = other DNA
gtttgtcagaatatagacaaaccagaccagctagacatggttaaaaagtaggtgactgcagccagcaagaaagagctctagtcccttaagactccttatggggggctgat

SEQ ID NO: 49982 - DNA, 110 bp, synthetic construct
  source 1..110: mol_type = other DNA
ctgcagccagcaagaaagagctctagtcccttaagactccttatggggggctgatgaagatgctcaaaccctctttcctcgcccaaagtaagagacctataacatgccag

SEQ ID NO: 49983 - DNA, 110 bp, synthetic construct
  source 1..110: mol_type = other DNA
gcttaggccctaggtggcttatgtccattacttattgaggaatggccacataaatatatgaattaaagtttaaggcaatctttgatttagaggtgattaacgctctctac

SEQ ID NO: 49984 - DNA, 110 bp, synthetic construct
  source 1..110: mol_type = other DNA
atatgaattaaagtttaaggcaatctttgatttagaggtgattaacgctctctacagagcattctcatcctgactgaacatttgtgatgtttctgctaagatatggaaag

SEQ ID NO: 49985 - DNA, 110 bp, synthetic construct
  source 1..110: mol_type = other DNA
gcttattttccatcaccaagggtttgaagaggtttccagagtcatgtcttcagtttggaggactccccgtggatcagacgcaatgcctgagatggtggtgaaaatcgtag

SEQ ID NO: 49986 - DNA, 110 bp, synthetic construct
  source 1..110: mol_type = other DNA
tggaggactccccgtggatcagacgcaatgcctgagatggtggtgaaaatcgtaggaagtaaacactttcgataccttgtggagaggccaaagatgtaagtttactgttt

SEQ ID NO: 49987 - DNA, 110 bp, synthetic construct
  source 1..110: mol_type = other DNA
ctgagataaaaaacaaccaaaataacttcctgagtcaaggtcaaaaggactggtgcatgtgcacctaataagagcaggtataaggctacatgctgtgcacggcttatttc

SEQ ID NO: 49988 - DNA, 110 bp, synthetic construct
  source 1..110: mol_type = other DNA
catgtgcacctaataagagcaggtataaggctacatgctgtgcacggcttatttcatactcccagttgcccaatgagttaacatttttttacacccacttcatagatgag

SEQ ID NO: 49989 - DNA, 110 bp, synthetic construct
  source 1..110: mol_type = other DNA
tacggcatgcattaagagttatcactataatttcaaggattaaactttcacatataaaaattctggagttcccactgtggctcagcaggtgaaggacccaagactgtctc

SEQ ID NO: 49990 - DNA, 110 bp, synthetic construct; identical to SEQ ID NO: 49989
  source 1..110: mol_type = other DNA

SEQ ID NO: 49991 - DNA, 110 bp, synthetic construct
  source 1..110: mol_type = other DNA
attcagtaaatgtctatgtgcctgacctgttcccagcactgtgtagggcacggagaggataagagtgcacagctagctatgacctgccttcatggagcctgagaattaag

SEQ ID NO: 49992 - DNA, 110 bp, synthetic construct
  source 1..110: mol_type = other DNA
aggataagagtgcacagctagctatgacctgccttcatggagcctgagaattaagcacaagaaaatgggtattaaacacattactgattttaaatcctggtcattagttt

SEQ ID NO: 49993 - DNA, 110 bp, synthetic construct
  source 1..110: mol_type = other DNA
cctcctctgcttttccagagaaagtacaagctgagattgatagggtgcttggccaatcacagcagccaagcatagcagctcgtgagtgcatgccctacaccaacgctgtc

SEQ ID NO: 49994 - DNA, 110 bp, synthetic construct
  source 1..110: mol_type = other DNA
atcacagcagccaagcatagcagctcgtgagtgcatgccctacaccaacgctgtcatccatgaggtccagagaatgggcaacatcatccccatgaacgtgcccagggagg

SEQ ID NO: 49995 - DNA, 110 bp, synthetic construct
  source 1..110: mol_type = other DNA
ttaaccactgagccacaacgggaactccggcacaaagctcttacttactagtcccaagccgaagtttccttgggaataagcaatgccagatgaatggcttggggattcta

SEQ ID NO: 49996 - DNA, 110 bp, synthetic construct; identical to SEQ ID NO: 49995
  source 1..110: mol_type = other DNA

SEQ ID NO: 49997 - DNA, 110 bp, synthetic construct
  source 1..110: mol_type = other DNA
ttcaagttattcaaagtagagaagagccaaacaaggacttgaacccaggactatttgactcccacaccttcgtctctacttgggttacctaacttttcatgatatagagg

SEQ ID NO: 49998 - DNA, 110 bp, synthetic construct
  source 1..110: mol_type = other DNA
tgactcccacaccttcgtctctacttgggttacctaacttttcatgatatagaggataactgatttattcaggggttcatttactcaacagacatttatgcagtgtttat

SEQ ID NO: 49999 - DNA, 110 bp, synthetic construct
  source 1..110: mol_type = other DNA
tttttcagggttcatttattcagcagacatttatgaagtgcttatcatgtggcaggcacagtacaagacagtgtgtgatgaaatgtgcagtatagcctttggtaaccaaa

SEQ ID NO: 50000 - DNA, 110 bp, synthetic construct
  source 1..110: mol_type = other DNA
gcacagtacaagacagtgtgtgatgaaatgtgcagtatagcctttggtaaccaaatgagatgacattaggtgggatcactgtggatgggaaaccctggggatagcctctg

SEQ ID NO: 50001 - DNA, 110 bp, synthetic construct
  source 1..110: mol_type = other DNA
tgaactttgaaagaacacatttttgttgttttaaaccactcaatctatggcactttgttatggaaactccagaaaactaaaaaaattgtagctatgggtttttccccatg

SEQ ID NO: 50002 - DNA, 110 bp, synthetic construct; identical to SEQ ID NO: 50001
  source 1..110: mol_type = other DNA

SEQ ID NO: 50003 - DNA, 110 bp, synthetic construct
  source 1..110: mol_type = other DNA
gccaggggctgaattggagctgcagctgcatcccatgccatagtttgcaggaacacactgagcgaggtctgggatcaaacccacatcctcacagagacaacgtcaggtcc

SEQ ID NO: 50004 - DNA, 110 bp, synthetic construct
  source 1..110: mol_type = other DNA
ggagctgcagctgcatcccatgccatagtttgcaggaacacactgagcgaggtctgggatcaaacccacatcctcacagagacaacgtcaggtcctcaacccgctgagcc

SEQ ID NO: 50005 - DNA, 110 bp, synthetic construct
  source 1..110: mol_type = other DNA
ggaatgaagatgttagtgtggaatgaagctcggtttccatgttgaagtggaatcttgcagaagctagaaactccaggagtcctgttgtggcacagcggttatcaaacccg

SEQ ID NO: 50006 - DNA, 110 bp, synthetic construct
  source 1..110: mol_type = other DNA
tccatgttgaagtggaatcttgcagaagctagaaactccaggagtcctgttgtggcacagcggttatcaaacccgactaggaaccaaaaggttgcaggttcgatccctga

SEQ ID NO: 50007 - DNA, 110 bp, synthetic construct; identical to SEQ ID NO: 50005
  source 1..110: mol_type = other DNA

SEQ ID NO: 50008 - DNA, 110 bp, synthetic construct
  source 1..110: mol_type = other DNA
aagctcggtttccatgttgaagtggaatcttgcagaagctagaaactccaggagtcctgttgtggcacagcggttatcaaacccgactaggaaccaaaaggttgcaggtt

SEQ ID NO: 50009 - DNA, 110 bp, synthetic construct
  source 1..110: mol_type = other DNA
gaatcttaatgttcaatttattacttttagctagcctgctcaagtagctaaaaatcagaggtcactaggaagaccaaaagctcaaaggccacacatcattatttatttga

SEQ ID NO: 50010 - DNA, 110 bp, synthetic construct
  source 1..110: mol_type = other DNA
cagaggtcactaggaagaccaaaagctcaaaggccacacatcattatttatttgagataaggattaaaaacaaaaagatgaactgcaatatgacctcaggaggcagctgc

SEQ ID NO: 50011 - DNA, 110 bp, synthetic construct
  source 1..110: mol_type = other DNA
ctcactgttctgagcctatgtagtcactaccataaaagactgaccaataagggccattcaaagaagctctggccaggacaacagggagtcttcaagccaaagtcattctg

SEQ ID NO: 50012 - DNA, 110 bp, synthetic construct
  source 1..110: mol_type = other DNA
attcaaagaagctctggccaggacaacagggagtcttcaagccaaagtcattctgcagagaaatcctgcttcttgcaggaaatgacctgccttagtgtccctaccatgct

SEQ ID NO: 50013 - DNA, 110 bp, synthetic construct
  source 1..110: mol_type = other DNA
tttcccaactgcaggatccttcaatttgagtcaacggagaggaactaactaagcagcaaaaatggcttggggtttgctcacatatgtattgagtcttggccctaaccctt

SEQ ID NO: 50014 - DNA, 110 bp, synthetic construct
  source 1..110: mol_type = other DNA
gcaaaaatggcttggggtttgctcacatatgtattgagtcttggccctaacccttggtagctgcaggactttggacaaatcactcagtttctttgagccttatttgaaaa

SEQ ID NO: 50015 - DNA, 110 bp, synthetic construct
  source 1..110: mol_type = other DNA
caaggagtgaggagagacccaggaaaatcaaagcacttgctcacttgccagcaagggacatggtgaggaaccatacagccacacacccctgtgcaccagctctcgaccag

SEQ ID NO: 50016 - DNA, 110 bp, synthetic construct
  source 1..110: mol_type = other DNA
ggacatggtgaggaaccatacagccacacacccctgtgcaccagctctcgaccagccaggatgggccgagaagggcaagggagacatggcctcactaatgtggactcagg

SEQ ID NO: 50017 - DNA, 110 bp, synthetic construct
  source 1..110: mol_type = other DNA
gtcagttgtgaggaaagctaagaagccaccagatttgacctgcagaagcccaagaagctaaggaatttcgtgatacacactacctctggaagttaggttgaagagtggat

SEQ ID NO: 50018 - DNA, 110 bp, synthetic construct
  source 1..110: mol_type = other DNA
agctaaggaatttcgtgatacacactacctctggaagttaggttgaagagtggatgaatataggaggtctgcttgaaagcctatttaataaaaaggtaaactcagaattc

SEQ ID NO: 50019 - DNA, 110 bp, synthetic construct
  source 1..110: mol_type = other DNA
ctctccatgtcatcctaagacttttcttggatcattatcaaaacttggccaaagctactgggaagtcactacaagtagcagcgggatttctgatcatctaccaatgcaga

SEQ ID NO: 50020 - DNA, 110 bp, synthetic construct
  source 1..110: mol_type = other DNA
tactgggaagtcactacaagtagcagcgggatttctgatcatctaccaatgcagaagatgaagaagcggaagcgagccaggtcactgacccctcaggaggcaacagccga

SEQ ID NO: 50021 - DNA, 110 bp, synthetic construct
  source 1..110: mol_type = other DNA
cactgagctaagctaagtggcaccgacagtgaaggaatactcatgccagtagaaacttaatacatacgtgctcgacccttcatcttatttaagcaagataattttttttg

SEQ ID NO: 50022 - DNA, 110 bp, synthetic construct
  source 1..110: mol_type = other DNA
cttaatacatacgtgctcgacccttcatcttatttaagcaagataattttttttgaggtataaagcacgcagacacctatgtagcacattctgcagaatatgcaatagga

SEQ ID NO: 50023 - DNA, 110 bp, synthetic construct
  source 1..110: mol_type = other DNA
ttctattcctactactattgtggttcttgccactgttcctacaacttctgctagagctccatcaccactgccaccattactgctacggcttctgtacttcccctatgcag

SEQ ID NO: 50024 - DNA, 110 bp, synthetic construct
  source 1..110: mol_type = other DNA
gctccatcaccactgccaccattactgctacggcttctgtacttcccctatgcagagcctgagtgccagacagccaggaggcagaaaggattgggaaggagaagtaggga

SEQ ID NO: 50025 - DNA, 110 bp, synthetic construct
  source 1..110: mol_type = other DNA
aaaggaaagcactaagtaacatcccatggtgcctgaaagtaagcgtgctcaaaaaaacagatggagacaagccaagaggacacagaagccaacttgaaggggttccccat

SEQ ID NO: 50026 - DNA, 110 bp, synthetic construct
  source 1..110: mol_type = other DNA
aacagatggagacaagccaagaggacacagaagccaacttgaaggggttccccatggttcagctggtgactgtttgagcaagaaaataaaaataatggattataatgaac

SEQ ID NO: 50027 - DNA, 110 bp, synthetic construct
  source 1..110: mol_type = other DNA
acatcctggctctgatacagcagagctgtgtggccttgggaaagctatttgactcgtcttcacttcgcaatttccctgtgctataacaattacagaggacaagagtacaa

SEQ ID NO: 50028 - DNA, 110 bp, synthetic construct
  source 1..110: mol_type = other DNA
gtcttcacttcgcaatttccctgtgctataacaattacagaggacaagagtacaaccttcaccagagttgttgagagattattgtacaagtgtaagtgaagtgttcagaa

SEQ ID NO: 50029 - DNA, 110 bp, synthetic construct
  source 1..110: mol_type = other DNA
ggggttgtaaatcaagtgatcctatatttggggatctatttctggaccttgtattctgtttcagtgatctgtttttctaacttagcatcaatactgtactggcttaatta

SEQ ID NO: 50030 - DNA, 110 bp, synthetic construct
  source 1..110: mol_type = other DNA
ctgtttcagtgatctgtttttctaacttagcatcaatactgtactggcttaattactgtagctctatgtgtcttgaaatctattgaagttctctagctctatccttcctt

SEQ ID NO: 50031 - DNA, 110 bp, synthetic construct
  source 1..110: mol_type = other DNA
tgactcgctgagccacaacaggaactcctgaagttgaatcttaagggtagatggtgtcttcatcgtgtgcttgatgggaggatgcatttccagccgagtgaatggggcac

SEQ ID NO: 50032 - DNA, 110 bp, synthetic construct
  source 1..110: mol_type = other DNA
gtcttcatcgtgtgcttgatgggaggatgcatttccagccgagtgaatggggcacacatgcctgcacagagacagggcagagttcactccccgaggagagatgtgccgta

SEQ ID NO: 50033 - DNA, 110 bp, synthetic construct
  source 1..110: mol_type = other DNA
ggtctttggttgggtggcatggacacaagttcataaatggaagcatggagacagttcctggcacagaatcagcaccatgtcagggatctaatcataattactgggtaggt

SEQ ID NO: 50034 - DNA, 110 bp, synthetic construct
  source 1..110: mol_type = other DNA
tcctggcacagaatcagcaccatgtcagggatctaatcataattactgggtaggttaccactgcagccttgaggacagggatatctgagagcaaaagctacaggacagag

SEQ ID NO: 50035 - DNA, 110 bp, synthetic construct
  source 1..110: mol_type = other DNA
agggtatgagaacccctaggctagcttgtagcaacatctgtttcctgagtacctccctggtactgaacaggaggagcatagaaatccatgttacaacccccaggccttga

SEQ ID NO: 50036 - DNA, 110 bp, synthetic construct
  source 1..110: mol_type = other DNA
cctggtactgaacaggaggagcatagaaatccatgttacaacccccaggccttgaagaactcaccattcatgttcacagcctccagaaagagacagacaaagctgccatt

SEQ ID NO: 50037 - DNA, 110 bp, synthetic construct
  source 1..110: mol_type = other DNA
tggaggcctgggaaatgtcttaaaaccccataatatgaagtatgcctatagctccttaaagcacaaagttactccaaacaaacatcactgctcttaaccacacagtattg

SEQ ID NO: 50038 - DNA, 110 bp, synthetic construct
  source 1..110: mol_type = other DNA
ttaaagcacaaagttactccaaacaaacatcactgctcttaaccacacagtattgtgggctgtccatgccagcaggaagtttctgaaaacatgaattaccctctaggatc

SEQ ID NO: 50039 - DNA, 110 bp, synthetic construct
  source 1..110: mol_type = other DNA
ctcatgtatgtatagtcttgctccgtgatcattggaaagtcacttgacttctctgaaccccaatttccttatctctaaaaccagcagcaggagaggtggaataatgtcta

SEQ ID NO: 50040 - DNA, 110 bp, synthetic construct
  source 1..110: mol_type = other DNA
aaccccaatttccttatctctaaaaccagcagcaggagaggtggaataatgtctacagagaagcaatacagctagaggtgagaagctgggctgtgaggcctgactgccag

SEQ ID NO: 50041 - DNA, 110 bp, synthetic construct
  source 1..110: mol_type = other DNA
ttgctaaatgttctacatgagttacatcacttaatttcctaatgatctcctctgagaggtaccattgtttaaaatcaagattgtgttttcttggagcagtttaaggttca

SEQ ID NO: 50042 - DNA, 110 bp, synthetic construct
  source 1..110: mol_type = other DNA
gaggtaccattgtttaaaatcaagattgtgttttcttggagcagtttaaggttcacggcgaattgagggaaggtacagagatgtcttgtgtctcccatgtccccacacat

SEQ ID NO: 50043 - DNA, 110 bp, synthetic construct
  source 1..110: mol_type = other DNA
ggggacgggattatggtctgcactttacagatgggaaaaccaagaccccgagaggtgatgtgagcaagaggactttcatgggctccaggcacttctagcttcatggacct

SEQ ID NO: 50044 - DNA, 110 bp, synthetic construct
  source 1..110: mol_type = other DNA
tgatgtgagcaagaggactttcatgggctccaggcacttctagcttcatggacctctttcttcataactgtgcatacacatatatacaggcacatccatactcatgcaca

SEQ ID NO: 50045 - DNA, 110 bp, synthetic construct
  source 1..110: mol_type = other DNA
gtatgtttccaattggtctctttgtgagctagtgatgggactttctaatctcttgtgagcccaacgagagtacttggcaatcgggacttttgccccaaatcttaagtgct

SEQ ID NO: 50046 - DNA, 110 bp, synthetic construct
  source 1..110: mol_type = other DNA
tgagcccaacgagagtacttggcaatcgggacttttgccccaaatcttaagtgctattgagtgaattggtatctaattgattacatgagcctgagctcgtctcccccaag

SEQ ID NO: 50047 - DNA, 110 bp, synthetic construct
  source 1..110: mol_type = other DNA
cagagccacacagcaactagcagctggtagggtgaggacttgggcagaagtctttctgactaggaagccagtactctgggtacagtagcagcttgatgaggagggtgtga

SEQ ID NO: 50048 - DNA, 110 bp, synthetic construct
  source 1..110: mol_type = other DNA
ctgactaggaagccagtactctgggtacagtagcagcttgatgaggagggtgtgagcacatccacaccagaagtcttctcagggactagggaatacggtaatgacaaagg

SEQ ID NO: 50049 - DNA, 110 bp, synthetic construct
  source 1..110: mol_type = other DNA
acaaatctcagcccttattaatgctactgctttttacattctttgcttcagcatatgtttactgagtgctttccatggccaaacatagcttttagtccttgggatatact

SEQ ID NO: 50050 - DNA, 110 bp, synthetic construct
  source 1..110: mol_type = other DNA
tgtttactgagtgctttccatggccaaacatagcttttagtccttgggatatactggggaataaaacaggcaaggtgccttgcttcatgaaatctacgtggcacatgggc

SEQ ID NO: 50051 - DNA, 110 bp, synthetic construct
  source 1..110: mol_type = other DNA
agtcggatccatttcctctgtgccacagtaggaactccagcctatagatactttaaacttagaatgttttcccacaaaaatgcagggaaccattgcttgtattactgcct

SEQ ID NO: 50052 - DNA, 110 bp, synthetic construct; identical to SEQ ID NO: 50051
  source 1..110: mol_type = other DNA

SEQ ID NO: 50053 - DNA, 110 bp, synthetic construct
  source 1..110: mol_type = other DNA
taagtaggtgcatcctttgtttctaacttatgtatgtgatactcaccccttagactcgtttcctccagagtttagtgtgacttaaatgcagttacacctctctaggatta

SEQ ID NO: 50054 - DNA, 110 bp, synthetic construct
  source 1..110: mol_type = other DNA
tcgtttcctccagagtttagtgtgacttaaatgcagttacacctctctaggattaaacctatcccctgtctagtcttgggtcagcacacagaggcaggtggaagaaatgt

SEQ ID NO: 50055 - DNA, 110 bp, synthetic construct; identical to SEQ ID NO: 50053
  source 1..110: mol_type = other DNA

SEQ ID NO: 50056 - DNA, 110 bp, synthetic construct; identical to SEQ ID NO: 50054
  source 1..110: mol_type = other DNA

SEQ ID NO: 50057 - DNA, 110 bp, synthetic construct
  source 1..110: mol_type = other DNA
ggctctgattcaacccctacctgggaacgtccatatgctgcaggtgtagccattaaaacaaaaaaaaccaagaactttaaaatggtgaatttaacagtatgtgaattttt

SEQ ID NO: 50058 - DNA, 110 bp, synthetic construct; identical to SEQ ID NO: 50057
  source 1..110: mol_type = other DNA

SEQ ID NO: 50059 - DNA, 110 bp, synthetic construct
  source 1..110: mol_type = other DNA
gtgaccttgaagaagtcatctcattgcctctgttaaatgagatgaaggcaatgaactctatcagagactctaaattggagtgtgagagtctttgaaatgaattagcttga

SEQ ID NO: 50060 - DNA, 110 bp, synthetic construct
  source 1..110: mol_type = other DNA
ctctatcagagactctaaattggagtgtgagagtctttgaaatgaattagcttgagggactctgtgacacccactagaaactgcaaagtttagtgtttgtgcacggttgc

SEQ ID NO: 50061 - DNA, 110 bp, synthetic construct
  source 1..110: mol_type = other DNA
cagcaaggacccagacccaaatgagtcatgcttcttgcttgattcttggccccaaggggacatttctcctcccaagcccctgtcccccacccacatggctaccaaatgtt

SEQ ID NO: 50062 - DNA, 110 bp, synthetic construct
  source 1..110: mol_type = other DNA
ggggacatttctcctcccaagcccctgtcccccacccacatggctaccaaatgttaatagatcctattctcagggtcacctctctttctgactgctctcctgaaagaagc

SEQ ID NO: 50063 - DNA, 110 bp, synthetic construct
  source 1..110: mol_type = other DNA
taaaaggttttcccattgaagggtggaagcaggcgctctacgctgcactgtgtgagccctgcacattgttcctgacctgcatcgaaggtgttctttctcagcttcaggag

SEQ ID NO: 50064 - DNA, 110 bp, synthetic construct
  source 1..110: mol_type = other DNA
gccctgcacattgttcctgacctgcatcgaaggtgttctttctcagcttcaggagtaatcttagacacgtttgccctgatcacgatttagctcaataccagaggtgggtt

SEQ ID NO: 50065 - DNA, 110 bp, synthetic construct
  source 1..110: mol_type = other DNA
ctcagcttgttaccacatttgttaaaatggcacgcacctgaaggtggattctgccgttgtgggtgcactgttcttcatatgtcagttctgtcaagcaaattctgttgttt

SEQ ID NO: 50066 - DNA, 110 bp, synthetic construct
  source 1..110: mol_type = other DNA
gttgtgggtgcactgttcttcatatgtcagttctgtcaagcaaattctgttgtttcagatcatctatatccttgctgaatttttttctctgcttttttttttctagtaat

SEQ ID NO: 50067 - DNA, 110 bp, synthetic construct
  source 1..110: mol_type = other DNA
cagtagcactgatgatcatagatggaaaaatcctcaacaaaatatcagccagttgaatataatgatacatcaaaaggattctgtaccatgatcaagtgggatttatccca

SEQ ID NO: 50068 - DNA, 110 bp, synthetic construct
  source 1..110: mol_type = other DNA
tcatagatggaaaaatcctcaacaaaatatcagccagttgaatataatgatacatcaaaaggattctgtaccatgatcaagtgggatttatcccagatgtgcaaggattt

SEQ ID NO: 50069 - DNA, 110 bp, synthetic construct
  source 1..110: mol_type = other DNA
agaagaccagtaaccagtgcaattataagagccaccattcgttagtgaatggataatgaatcacctctcacaagtcaggccccggaagctcttaacatgcaggagatggt

SEQ ID NO: 50070 - DNA, 110 bp, synthetic construct
  source 1..110: mol_type = other DNA
atgaatcacctctcacaagtcaggccccggaagctcttaacatgcaggagatggtttgattcctgcaatcattacagggggtggaatgatcgtagtgctttatatatgaa

SEQ ID NO: 50071 - DNA, 110 bp, synthetic construct
  source 1..110: mol_type = other DNA
ggagatggactaagggaagatgctctgaccaaaaataaaacaatgcaattttggaaaggtttctggtgcctcgctccccaacgcaatgcccccattagaagaaaggaaat

SEQ ID NO: 50072 - DNA, 110 bp, synthetic construct
  source 1..110: mol_type = other DNA
aaggtttctggtgcctcgctccccaacgcaatgcccccattagaagaaaggaaatagaaaggaatacagtaagttcatatcccattataatacagaagatatgccctccc

SEQ ID NO: 50073 - DNA, 110 bp, synthetic construct
  source 1..110: mol_type = other DNA
attccttcaggggaactgtaattcatcactccctgaagggaggtccccatccctccaggaaaggtttttatgaaagttatcacgagtggtgcagctaggtttctaaatcc

SEQ ID NO: 50074 - DNA, 110 bp, synthetic construct
  source 1..110: mol_type = other DNA
caggaaaggtttttatgaaagttatcacgagtggtgcagctaggtttctaaatccaacagcaagaggcattttccacagatacaagaacaggagcacatgcaagctaggt

SEQ ID NO: 50075 - DNA, 110 bp, synthetic construct
  source 1..110: mol_type = other DNA
ggataaaggaattctggggatttgagatcactggagcataactggaattctaataaaaagagcattttgaagggtggtgtggggggaagtacaggttcccaagccagctg

SEQ ID NO: 50076 - DNA, 110 bp, synthetic construct
  source 1..110: mol_type = other DNA
aaaagagcattttgaagggtggtgtggggggaagtacaggttcccaagccagctgtgggaatggctccaaaagactttgtcatcacaccagtcatttggctgcctggaat

SEQ ID NO: 50077 - DNA, 110 bp, synthetic construct
  source 1..110: mol_type = other DNA
ttctgcctcccagaagcacatggccagacaggccctgggggcagataaaggtagtcttagcaagcccaatacgacacagtcagtttttggtaggcaagaagacaaatgca

SEQ ID NO: 50078 - DNA, 110 bp, synthetic construct
  source 1..110: mol_type = other DNA
cttagcaagcccaatacgacacagtcagtttttggtaggcaagaagacaaatgcactgtccttagaaattctgagcagtggtgtttaatcctcctggagtcattatgctt

SEQ ID NO: 50079 - DNA, 110 bp, synthetic construct
  source 1..110: mol_type = other DNA
attagaggggggaaggcttcatgcagacagaagtatttctcctctcttaagctcacattgcaggtgaagaagactttcctcttatccataccctggcagcctctgtctcc

SEQ ID NO: 50080 - DNA, 110 bp, synthetic construct
  source 1..110: mol_type = other DNA
cattgcaggtgaagaagactttcctcttatccataccctggcagcctctgtctcctgctatttggctcaaggtcactcattttttcctggactcccggtttaggatgtgc

SEQ ID NO: 50081 - DNA, 110 bp, synthetic construct
  source 1..110: mol_type = other DNA
tattcatgggtgaatccagctgtggatcccagggaaaagtttattagcaagagggagaaagcatctctctgcagggtgtgccttccatcactggccttggctcattaggc

SEQ ID NO: 50082 - DNA, 110 bp, synthetic construct
  source 1..110: mol_type = other DNA
agaaagcatctctctgcagggtgtgccttccatcactggccttggctcattaggcagagcagggtgggtcatctgggggtggggccgggtctgtaggcctcagctcctgc

SEQ ID NO: 50083 - DNA, 110 bp, synthetic construct; identical to SEQ ID NO: 50081
  source 1..110: mol_type = other DNA

SEQ ID NO: 50084 - DNA, 110 bp, synthetic construct; identical to SEQ ID NO: 50082
  source 1..110: mol_type = other DNA

SEQ ID NO: 50085 - DNA, 110 bp, synthetic construct
  source 1..110: mol_type = other DNA
gttccaccttctggattccaataataagttgattctatttttcttgtgacagttctttgtcgaaaacctaactttagctccacttcttcctggctaacctcccaccttta

SEQ ID NO: 50086 - DNA, 110 bp, synthetic construct
  source 1..110: mol_type = other DNA
tttgtcgaaaacctaactttagctccacttcttcctggctaacctcccacctttaatcttatcttctccaaaacttatttctaaatctttaaaactgttctttcatgaca

SEQ ID NO: 50087 - DNA, 110 bp, synthetic construct
  source 1..110: mol_type = other DNA
atacctcagggtgcatataccaatttcttttctaggcttctttcaagtagagggagcaagaatcaaaagagagcttccttttgcaggttgaaaaactgatgcatggagaa

SEQ ID NO: 50088 - DNA, 110 bp, synthetic construct
  source 1..110: mol_type = other DNA
gcaagaatcaaaagagagcttccttttgcaggttgaaaaactgatgcatggagaatttcagagacttgtaggaattgcatggcaaacagatggagagaggtggctgataa

SEQ ID NO: 50089 - DNA, 110 bp, synthetic construct
  source 1..110: mol_type = other DNA
aatgctttcaatctatcaccagcagagtaggaaatgcaaatgtgaaactttgcagaaggcttccacatgttataaatctggtatttcaagagcatggctgtgaatactga

SEQ ID NO: 50090 - DNA, 110 bp, synthetic construct
  source 1..110: mol_type = other DNA
aaggcttccacatgttataaatctggtatttcaagagcatggctgtgaatactgagctcagctttttttgccatgggtccaagattaatgtagccctgagtattaggagg

SEQ ID NO: 50091 - DNA, 110 bp, synthetic construct
  source 1..110: mol_type = other DNA
atgaacagcatctgtcatcaactggatttgcttatctgtttccctgacccctgattccctttcctaaaatataagattcttgcctgcctcaaaggcaatcaacgaagatc

SEQ ID NO: 50092 - DNA, 110 bp, synthetic construct
  source 1..110: mol_type = other DNA
tccctttcctaaaatataagattcttgcctgcctcaaaggcaatcaacgaagatcaggtaaataaatttggtataatatcatagctaagtttactcatcatttgaagcta

SEQ ID NO: 50093 - DNA, 110 bp, synthetic construct
  source 1..110: mol_type = other DNA
tgtaaatacttctcatttaggtggtggtctgtgcttgcaaatagctggtctccccctgcatatctgccagcagaaacatggaatccgagaggccttctgtagctgagaca

SEQ ID NO: 50094 - DNA, 110 bp, synthetic construct
  source 1..110: mol_type = other DNA
ctgcatatctgccagcagaaacatggaatccgagaggccttctgtagctgagacaaaaagattggaccaagaatgaatggcatgagattaggaggaaggagggagcagtg

SEQ ID NO: 50095 - DNA, 110 bp, synthetic construct
  source 1..110: mol_type = other DNA
ctccccaataatatcgataacgggataactaaaagttactcaggatttttctacatgccagtcactgttccaagcactttacgttcattgccttattcagtccttacaca

SEQ ID NO: 50096 - DNA, 110 bp, synthetic construct
  source 1..110: mol_type = other DNA
tgccagtcactgttccaagcactttacgttcattgccttattcagtccttacacagtaatttgggaggtgggtaattttattatctctttacgaggaagaggaaggtgag

SEQ ID NO: 50097 - DNA, 110 bp, synthetic construct
  source 1..110: mol_type = other DNA
gctacagaaatgaataacagcatccaggcaattacagcgttcaataaagcagctctccgaggatggggtagcagcagattaccgactgatggactgcatttaaatatgtt

SEQ ID NO: 50098 - DNA, 110 bp, synthetic construct
  source 1..110: mol_type = other DNA
tccgaggatggggtagcagcagattaccgactgatggactgcatttaaatatgttatctgctcattggaaagaccctggcgggtccctcccctctaggacatggccagca

SEQ ID NO: 50099 - DNA, 110 bp, synthetic construct
  source 1..110: mol_type = other DNA
ttaaaatagatgctctgcctataaaaatgaacttgtgccagagtctaataaattatgtgctaatatgtagctccatggtctgcgagggaattgcaggcattctgatcaga

SEQ ID NO: 50100 - DNA, 110 bp, synthetic construct
  source 1..110: mol_type = other DNA
tgtgctaatatgtagctccatggtctgcgagggaattgcaggcattctgatcagagtagcataataccagcttctgtatttgttagctccttaacccagcacagctgagg

SEQ ID NO: 50101 - DNA, 110 bp, synthetic construct
  source 1..110: mol_type = other DNA
tgggattatattttatgtctctttggtatactaatttttttttcttttttttttttttgcttttcagggccacacccacagcgtattggaagttcccaggccacgggtca

SEQ ID NO: 50102 - DNA, 110 bp, synthetic construct
  source 1..110: mol_type = other DNA
ttttttttcttttttttttttttgcttttcagggccacacccacagcgtattggaagttcccaggccacgggtcagattggacttacaggtgctggcctacaccacagcc

SEQ ID NO: 50103 - DNA, 110 bp, synthetic construct
  source 1..110: mol_type = other DNA
acaggtccaatacccaaccagacacagggggttaaaggacccagtgctgccacaggtacagcataggtcacaactgtggctcggatttggtccctggactggggaattcc

SEQ ID NO: 50104 - DNA, 110 bp, synthetic construct
  source 1..110: mol_type = other DNA
gtacagcataggtcacaactgtggctcggatttggtccctggactggggaattccatatgctgcagggtggccaaaaaaataaagaaaaataaaataaaatgtagagtat

SEQ ID NO: 50105 - DNA, 110 bp, synthetic construct
  source 1..110: mol_type = other DNA
ctgatttttagcaatttgctagagtcactgtatatcgagggattgatttgaatgaaagggaaggcagtgtgcagtgtgaattcgctgtctcggagctcagctctgaccac

SEQ ID NO: 50106 - DNA, 110 bp, synthetic construct
  source 1..110: mol_type = other DNA
aagggaaggcagtgtgcagtgtgaattcgctgtctcggagctcagctctgaccactgtgagctgcagctcagggcaggggaaagggtgcaggtctgatgcaccaggctga

SEQ ID NO: 50107 - DNA, 110 bp, synthetic construct
  source 1..110: mol_type = other DNA
agcaaaaaaataaaaagcaaaaaaaagaagggtcaaggtcattggtcaaggtcgcatagctcagattggatacagttgggatttgaacacagttctgcagacttctggtc

SEQ ID NO: 50108 - DNA, 110 bp, synthetic construct
  source 1..110: mol_type = other DNA
atagctcagattggatacagttgggatttgaacacagttctgcagacttctggtctgaggttctttctcatactccttagccattagcatgtcacttgtggagacaagga

SEQ ID NO: 50109 - DNA, 110 bp, synthetic construct
  source 1..110: mol_type = other DNA
agtggtccacatgaaatccacatcagtttataagtatggataccagcagggcccaaatagctcctgaccatttataagaaatatatgtggttctggtatactttccgtaa

SEQ ID NO: 50110 - DNA, 110 bp, synthetic construct
  source 1..110: mol_type = other DNA
aatagctcctgaccatttataagaaatatatgtggttctggtatactttccgtaatcttttctaaaataagctcagaatttctacaatgtgtaacaatggatgtgtcact

SEQ ID NO: 50111 - DNA, 110 bp, synthetic construct
  source 1..110: mol_type = other DNA
cagcatgtcacttcccttaagattcaaattccctaccgaaagaatctggcctaattttacttgcccaccagagagaggatgtatgtgatggaaatctttatcacctgctc

SEQ ID NO: 50112 - DNA, 110 bp, synthetic construct
  source 1..110: mol_type = other DNA
tttacttgcccaccagagagaggatgtatgtgatggaaatctttatcacctgctcatcaggaccacatggagtgaggcgctggcataatttattcaaggagaactgagta

SEQ ID NO: 50113 - DNA, 110 bp, synthetic construct
  source 1..110: mol_type = other DNA
caacattgctcaaaggggtcctgtgaagccttagaatcgtatctgaagctgcatttgctctagtgctcttttgaagacaatggtcatttcttctccttgccacatataac

SEQ ID NO: 50114 - DNA, 110 bp, synthetic construct
  source 1..110: mol_type = other DNA
tgctctagtgctcttttgaagacaatggtcatttcttctccttgccacatataacatacaaaattccatccaccagaggatctgctgaaattcctgttttctcccctttt

SEQ ID NO: 50115 - DNA, 110 bp, synthetic construct
  source 1..110: mol_type = other DNA
gccagcatctgcattctaccccatggctttctgtctgagtccctctcatcaaccctaaaagctgagtgtccagacttgagcctttcaggaggctaggccatcatccagct

SEQ ID NO: 50116 - DNA, 110 bp, synthetic construct
  source 1..110: mol_type = other DNA
taaaagctgagtgtccagacttgagcctttcaggaggctaggccatcatccagcttgctcttctgtgccctttctgaggaaatgtgtgatttcttggagccctctggctg

SEQ ID NO: 50117 - DNA, 110 bp, synthetic construct
  source 1..110: mol_type = other DNA
gttaagccacgattgcagagtatatgtgttaggagaaagagtggtacaggagatgaaaggcagctattttgagaaagtgatctgcaaactaaaactagagatggcatttt

SEQ ID NO: 50118 - DNA, 110 bp, synthetic construct
  source 1..110: mol_type = other DNA
aaaggcagctattttgagaaagtgatctgcaaactaaaactagagatggcattttccaaacaaaagctacagcacattaaaaaaaaaaaaaggattctgaggtaaaagag

SEQ ID NO: 50119 - DNA, 110 bp, synthetic construct
  source 1..110: mol_type = other DNA
agagaagaatctcttctttgtctctgtgaattctttttttttttttgtctgcaatacccttcctgcttcatctaggaacttagtcatttttcaagatggtaccactttct

SEQ ID NO: 50120 - DNA, 110 bp, synthetic construct
  source 1..110: mol_type = other DNA
acccttcctgcttcatctaggaacttagtcatttttcaagatggtaccactttcttcctactctgggttatatgcctggatctaatgttctcctagcatcccatacttag

SEQ ID NO: 50121 - DNA, 110 bp, synthetic construct
  source 1..110: mol_type = other DNA
agaaaactccagaggaagaagatatgagctatgttctctaggtgcagacgtcaggcgtgccactcgtagagttgaattatgcatgcattattcagctagctactttctag

SEQ ID NO: 50122 - DNA, 110 bp, synthetic construct
  source 1..110: mol_type = other DNA
cgtgccactcgtagagttgaattatgcatgcattattcagctagctactttctaggtgcattacaggtggctgatgtgatggtgactttgtcttggatgtggtcgaaaca

SEQ ID NO: 50123 - DNA, 110 bp, synthetic construct
  source 1..110: mol_type = other DNA
ctaactaaatacaggaaggcattaattaattgatattttaatatgcttcccatatgccaagcagggcgctagatcttgaggacgcagtggccaacagcgtgacttgattg

SEQ ID NO: 50124 - DNA, 110 bp, synthetic construct
  source 1..110: mol_type = other DNA
gccaagcagggcgctagatcttgaggacgcagtggccaacagcgtgacttgattgttcctttagattaagttacatatgatagattctgtaatgaacacctgtgagttac

SEQ ID NO: 50125 - DNA, 110 bp, synthetic construct; identical to SEQ ID NO: 50123
  source 1..110: mol_type = other DNA

SEQ ID NO: 50126 - DNA, 110 bp, synthetic construct; identical to SEQ ID NO: 50124
  source 1..110: mol_type = other DNA

SEQ ID NO: 50127 - DNA, 110 bp, synthetic construct
  source 1..110: mol_type = other DNA
taatttcacaccgtcagttccgagagaaatcttgaaagcaatgcccagtagttgatacgaaggcgttggtatggggcaaggaacgataaagtcctgttctttgagaatcc

SEQ ID NO: 50128 - DNA, 110 bp, synthetic construct
  source 1..110: mol_type = other DNA
tacgaaggcgttggtatggggcaaggaacgataaagtcctgttctttgagaatccgttgtacagacaccacagatttatctcagtggattttggaacctctgtgcatggc

SEQ ID NO: 50129 - DNA, 110 bp, synthetic construct
  source 1..110: mol_type = other DNA
gctctatggttctcatgacagagggcagaaatgcacaagtctgcatggagcaacatacgtgcttttaaaggaccttatgtccactcatgtcccattggctaaactagtct

SEQ ID NO: 50130 - DNA, 110 bp, synthetic construct
  source 1..110: mol_type = other DNA
tacgtgcttttaaaggaccttatgtccactcatgtcccattggctaaactagtctcgtggccaaacctgactgtggggggaggggagtggcaaagggcatggatgaataa

SEQ ID NO: 50131 - DNA, 110 bp, synthetic construct
  source 1..110: mol_type = other DNA
tagtagtcacagtaatacaagtaataataggataagaagactaaatagtcagtaggcccttactgtgtgctggaaactgggctctgctctttaaatacattgctatttaa

SEQ ID NO: 50132 - DNA, 110 bp, synthetic construct
  source 1..110: mol_type = other DNA
gcccttactgtgtgctggaaactgggctctgctctttaaatacattgctatttaatcctcccatcactatataagacatagatgttattactaccttcacttgacagctg

SEQ ID NO: 50133 - DNA, 110 bp, synthetic construct
  source 1..110: mol_type = other DNA
ggatagaaaaactgtcacagaagagtcagctagttgctcttgtttgcagctgctgcccctgacccaaatttgccctctgccagtcctcagctgctgatccaagctctggg

SEQ ID NO: 50134 - DNA, 110 bp, synthetic construct
  source 1..110: mol_type = other DNA
cccctgacccaaatttgccctctgccagtcctcagctgctgatccaagctctggggagtcagactgtgagttctgccaggatgcagatgcccatctccatggtcctcccc

SEQ ID NO: 50135 - DNA, 110 bp, synthetic construct
  source 1..110: mol_type = other DNA
cattcttgttctcccatttattggtggtatgactgtttacttaacctttctaagcttgtttcctcacttgtaaacattgacatggtcttagcactcttgagtaacaagat

SEQ ID NO: 50136 - DNA, 110 bp, synthetic construct
  source 1..110: mol_type = other DNA
ttgtttcctcacttgtaaacattgacatggtcttagcactcttgagtaacaagatctggcttgctttttcaaatgcttgctgctgtggctgccttgagaggcgctggagg

SEQ ID NO: 50137 - DNA, 110 bp, synthetic construct
  source 1..110: mol_type = other DNA
cctgagcctggcagcctcagctccagctctgggtgtggtactatgaagagcagaactgagctggcatagataaagctgacccttccttaaatacagtacacacttgtgtg

SEQ ID NO: 50138 - DNA, 110 bp, synthetic construct
  source 1..110: mol_type = other DNA
ctgagctggcatagataaagctgacccttccttaaatacagtacacacttgtgtgctgaaaatacccttttaaaggcagctctaattcagtccctggcctcgctcagtga

SEQ ID NO: 50139 - DNA, 110 bp, synthetic construct
  source 1..110: mol_type = other DNA
atggaccaaacatactgcagttcttccttcctggtgggagggggaggggagaccacatagatctccagttattggcaactctattaataagaatcaaatcctctttatgt

SEQ ID NO: 50140 - DNA, 110 bp, synthetic construct
  source 1..110: mol_type = other DNA
catagatctccagttattggcaactctattaataagaatcaaatcctctttatgtaaaccgtgtctaaacagtaaaatgttgcctgggccctgtgccaagtaccagagaa

SEQ ID NO: 50141 - DNA, 110 bp, synthetic construct
  source 1..110: mol_type = other DNA
tgactccagtggattcagtgtcctaaaaatgctaattgcctgcttccttgggatcctgccttctgagagaggggcttgttttattgaagttcttgcaaggtcccttgcag

SEQ ID NO: 50142 - DNA, 110 bp, synthetic construct
  source 1..110: mol_type = other DNA
ctgccttctgagagaggggcttgttttattgaagttcttgcaaggtcccttgcagtatgggacctccatgttggcagtgccttctgctccaaacagggacatgtagctgt

SEQ ID NO: 50143 - DNA, 110 bp, synthetic construct
  source 1..110: mol_type = other DNA
ttcttttttttttttccccctttataaccatcagctcagtcagtgagagaatatcaacctcaagaaccctttttatcctcggattccgtttatccttgcatgagcgagcg

SEQ ID NO: 50144 - DNA, 110 bp, synthetic construct
  source 1..110: mol_type = other DNA
aacctcaagaaccctttttatcctcggattccgtttatccttgcatgagcgagcgaaacccctgagtggtcccctttgctttggctgccatctgtttggcctcttataaa

SEQ ID NO: 50145 - DNA, 110 bp, synthetic construct
  source 1..110: mol_type = other DNA
attttacatcattaacaccacagaaaaactactgctctctgagcagtttttctctgctggcaaaatatgtccccttcatacagcaggaacaaacgggtcctgataatttc

SEQ ID NO: 50146 - DNA, 110 bp, synthetic construct
  source 1..110: mol_type = other DNA
gctggcaaaatatgtccccttcatacagcaggaacaaacgggtcctgataatttcacaaacaaacacattcttcttcaccaacgttgggtcaaaatcctctagaattaca

SEQ ID NO: 50147 - DNA, 110 bp, synthetic construct
  source 1..110: mol_type = other DNA
gcatttctgctagtgctctgccctcggcccacatagggtaaatgttggatgcttaggcgtgttttgttcaaccagtatttacagatggggaaacaaggatcataaaaaaa

SEQ ID NO: 50148 - DNA, 110 bp, synthetic construct
  source 1..110: mol_type = other DNA
ggcgtgttttgttcaaccagtatttacagatggggaaacaaggatcataaaaaaaaaatctgtcctgccctgagtaggctcatggagcagtgggaatacagagggaacag

SEQ ID NO: 50149 - DNA, 110 bp, synthetic construct
  source 1..110: mol_type = other DNA
acctctccccccgtaagtatgcattgtccccagagccctgcatctcttccctttcctttttcagtcccgtggtgacaaaaatataggctttgggtaaaagaggctgctgg

SEQ ID NO: 50150 - DNA, 110 bp, synthetic construct
  source 1..110: mol_type = other DNA
ctttttcagtcccgtggtgacaaaaatataggctttgggtaaaagaggctgctggtgggtttcaactcagactctttcaagctgtgtgatttgggcaaattaactaacta

SEQ ID NO: 50151 - DNA, 110 bp, synthetic construct
  source 1..110: mol_type = other DNA
taatcagaacaacccctgttagggcctcacaggcctcctttcacttctcacaaaaacaagcagccttatcttagattgccatgtaaatcgtaataagtagctcccagctc

SEQ ID NO: 50152 - DNA, 110 bp, synthetic construct
  source 1..110: mol_type = other DNA
acaagcagccttatcttagattgccatgtaaatcgtaataagtagctcccagctccaaaggagtgctaggctgtaatcttcaatgaagcaattttcttcctttcagagct

SEQ ID NO: 50153 - DNA, 110 bp, synthetic construct
  source 1..110: mol_type = other DNA
ctgatggcccttctgagcaatcactagcccacagtgatctcccaaagctccccaggcccccctctccatccatggtcccccactgggacccccacaaccacccatgtaac

SEQ ID NO: 50154 - DNA, 110 bp, synthetic construct
  source 1..110: mol_type = other DNA
agctccccaggcccccctctccatccatggtcccccactgggacccccacaaccacccatgtaaccatcctactccatccctatcagtaccacagcatgagtctcctacc

SEQ ID NO: 50155 - DNA, 110 bp, synthetic construct
  source 1..110: mol_type = other DNA
ggccttttatttatttatttatttatttatttattggcagggctaagacctagatttcgcccctaaggacatggaggggctactgaataaactgaagcagcagagctctg

SEQ ID NO: 50156 - DNA, 110 bp, synthetic construct
  source 1..110: mol_type = other DNA
ttcgcccctaaggacatggaggggctactgaataaactgaagcagcagagctctgtgatcagacttgtcctttgtgctctggggacaccaggaagatgcactggggagga

SEQ ID NO: 50157 - DNA, 110 bp, synthetic construct
  source 1..110: mol_type = other DNA
aggaagagccgagacatccccagtccagagaggagcccaactgagaacacctgccaccccacctatgacaatgagctcaacatccaggccccaggtgagaaatggaaacc

SEQ ID NO: 50158 - DNA, 110 bp, synthetic construct
  source 1..110: mol_type = other DNA
accccacctatgacaatgagctcaacatccaggccccaggtgagaaatggaaaccccaccggcctgggggaggggtcactgtgttcctaatgagagctggctggcttggg

SEQ ID NO: 50159 - DNA, 110 bp, synthetic construct
  source 1..110: mol_type = other DNA
gtgaagaaactgaggctcagagggagaggaagtgtgtttatatacaggttgatctcttgcctctggcttcaaatctgggggtcgacaagctatagcctatgggtcaaatt

SEQ ID NO: 50160 - DNA, 110 bp, synthetic construct
  source 1..110: mol_type = other DNA
cttgcctctggcttcaaatctgggggtcgacaagctatagcctatgggtcaaatttggccagccacttgtctttgtagatacagtcacaatagcagagttgaacagttac

SEQ ID NO: 50161 - DNA, 110 bp, synthetic construct
  source 1..110: mol_type = other DNA
tataggttattgcagaatggtcgttttggccttcctggatggtttgattaaatgcctagtgtcttcttttgaagcagctgcatgtacggctaccggagggaggaacatct

SEQ ID NO: 50162 - DNA, 110 bp, synthetic construct
  source 1..110: mol_type = other DNA
ctagtgtcttcttttgaagcagctgcatgtacggctaccggagggaggaacatctggtaggctaagatttaaaaatatttctgaagatgccaccgacttagagtagtcct

SEQ ID NO: 50163 - DNA, 110 bp, synthetic construct
  source 1..110: mol_type = other DNA
ggtacatggtgaatgttcagcaaacagtagcccatgctcttgccttgactctttccaaacaaagcgtttttttcttccaagcacgtgaggtttgctgagcttccgtgact

SEQ ID NO: 50164 - DNA, 110 bp, synthetic construct
  source 1..110: mol_type = other DNA
caaacaaagcgtttttttcttccaagcacgtgaggtttgctgagcttccgtgactgcattaatcctcagaggtgcttccttccctctattttaagggactgactgacttt

SEQ ID NO: 50165 - DNA, 110 bp, synthetic construct
  source 1..110: mol_type = other DNA
aaaatgtatctaatatgaaggtgataacattcttcatttaggtgataatgctgaggaggctaagaaatctgtgtgagtcagtgttagggggttggggagagaatcagata

SEQ ID NO: 50166 - DNA, 110 bp, synthetic construct
  source 1..110: mol_type = other DNA
gaggctaagaaatctgtgtgagtcagtgttagggggttggggagagaatcagataccattggcgagctatctagtgggctggaaactaatatgccttatcttaaaccctc

SEQ ID NO: 50167 - DNA, 110 bp, synthetic construct
  source 1..110: mol_type = other DNA
tggtgcaggaggggacgagggtgtataggttattatggaagctcagaattgcggcacccttgctaagctggaatggaaggtgagagccaggaagggcttcccatatggta

SEQ ID NO: 50168 - DNA, 110 bp, synthetic construct
  source 1..110: mol_type = other DNA
acccttgctaagctggaatggaaggtgagagccaggaagggcttcccatatggtagtcctgtgaaagtgagagggttggaagaactacctgcgcgcaggtggaaggagga

SEQ ID NO: 50169 - DNA, 110 bp, synthetic construct
  source 1..110: mol_type = other DNA
tctctctctctctctctttcttccttccttgtcaaggccagaagggagagaaattaggagagcaaactattaatgagagcagctgtcactgatcagcttgttctctgaag

SEQ ID NO: 50170 - DNA, 110 bp, synthetic construct
  source 1..110: mol_type = other DNA
aggagagcaaactattaatgagagcagctgtcactgatcagcttgttctctgaagcttggccctttaatgtgaagtgacagtgggggatgggtgttgcagccagggtaac

SEQ ID NO: 50171 - DNA, 110 bp, synthetic construct
  source 1..110: mol_type = other DNA
catacctgtggcacgtggaggttcccagtctcagtgtctaatcagagctggtagcctccggcctacaccagaactacagcaacgcccgatctgagctgcgtctgcagcct

SEQ ID NO: 50172 - DNA, 110 bp, synthetic construct; identical to SEQ ID NO: 50171
  source 1..110: mol_type = other DNA

SEQ ID NO: 50173 - DNA, 110 bp, synthetic construct
  source 1..110: mol_type = other DNA
ccacttctgagcaagtgcagaaccacttcatgcaaacccactcacccacactttccctgcctggcttttgcatgaggtggctgcaagagctctcacaggggctttccaag

SEQ ID NO: 50174 - DNA, 110 bp, synthetic construct
  source 1..110: mol_type = other DNA
cctgcctggcttttgcatgaggtggctgcaagagctctcacaggggctttccaaggatttctcgaagcttcttgcttctcccaacactcctgcaccccagaccctctctc

SEQ ID NO: 50175 - DNA, 110 bp, synthetic construct
  source 1..110: mol_type = other DNA
caacctggggcagccgcatctgggcttttcagcacatgagaaaacagataacgttattgattattgcttttttttccttgcagccataagcatcctaaatgaaagagaat

SEQ ID NO: 50176 - DNA, 110 bp, synthetic construct
  source 1..110: mol_type = other DNA
attgattattgcttttttttccttgcagccataagcatcctaaatgaaagagaatctgaaccctttattggacaaaaggggagaatgaggctcagagaggggcagcaact

SEQ ID NO: 50177 - DNA, 110 bp, synthetic construct
  source 1..110: mol_type = other DNA
ggaacttggaggaagagagcgacacaacctctccagttcaagtgcctgattgcgcaggagagacagctgtggacataagcaacgttaaaaatctcagtggttgtctgtgc

SEQ ID NO: 50178 - DNA, 110 bp, synthetic construct
  source 1..110: mol_type = other DNA
aggagagacagctgtggacataagcaacgttaaaaatctcagtggttgtctgtgctctttgaattcatcggccaatatacaaacgcatgtgtgtgtgtgtgtgtgtgtgt

SEQ ID NO: 50179 - DNA, 110 bp, synthetic construct
  source 1..110: mol_type = other DNA
tgaatgttggaggcagttggatttcagccacagagagggttacatttcaccagctagaataaagaatcagagctagactgtgatgtgcaatggtttgtggtcatgtgttt

SEQ ID NO: 50180 - DNA, 110 bp, synthetic construct
  source 1..110: mol_type = other DNA
agaataaagaatcagagctagactgtgatgtgcaatggtttgtggtcatgtgtttgaatataatgttttgggcaaaactaaactgctgagaggcaccatcatggaatgaa

SEQ ID NO: 50181 - DNA, 110 bp, synthetic construct
  source 1..110: mol_type = other DNA
cttcagctctaattcatcatctacttttcagaagagttcctatttcttttggaggagaatggtctttataagctgtaaattcaagtgctagggatgcttgctgtcacgag

SEQ ID NO: 50182 - DNA, 110 bp, synthetic construct
  source 1..110: mol_type = other DNA
agaatggtctttataagctgtaaattcaagtgctagggatgcttgctgtcacgagaccatgattgtcttaggccttttagtgggaagagcgagaataaaaaaaaattcga

SEQ ID NO: 50183 - DNA, 110 bp, synthetic construct
  source 1..110: mol_type = other DNA
cagggtccaccatggattttccatggtagactttttgctgtactggaaccagtttggctctgagcaccaagggtcaacatgttcctatggaaagaagctgagatggaaat

SEQ ID NO: 50184 - DNA, 110 bp, synthetic construct
  source 1..110: mol_type = other DNA
ggctctgagcaccaagggtcaacatgttcctatggaaagaagctgagatggaaattctttctaccctgagtttccagaaggaagggagagtctccagaagtccatgggct

SEQ ID NO: 50185 - DNA, 110 bp, synthetic construct
  source 1..110: mol_type = other DNA
tgctaatccaaaattcctaatttatccctactctactccctttcctctttggtaactgtaagtttgttttctatgtttacgagttgatttgttttttaagtagttccatt

SEQ ID NO: 50186 - DNA, 110 bp, synthetic construct; identical to SEQ ID NO: 50185
  source 1..110: mol_type = other DNA

SEQ ID NO: 50187 - DNA, 110 bp, synthetic construct
  source 1..110: mol_type = other DNA
agttggtctccttgacctccaggttaaaattaaattggtgcagatccttaaatgcacccaattcagactacagtttagagagccacacagcttgcatggtaaacagaagg

SEQ ID NO: 50188 - DNA, 110 bp, synthetic construct
  source 1..110: mol_type = other DNA
acccaattcagactacagtttagagagccacacagcttgcatggtaaacagaaggccttaggagttatttttttctgaattgcttttaacaattttatgagggtatcacc

SEQ ID NO: 50189 - DNA, 110 bp, synthetic construct
  source 1..110: mol_type = other DNA
aagttgaacacatgcagtttttggtgtaaagtaaactgaagtgattcagatctcattgtgcctgtcttttctgtgctgttggtaacacacaggcctttgttctttcattt

SEQ ID NO: 50190 - DNA, 110 bp, synthetic construct; identical to SEQ ID NO: 50189
  source 1..110: mol_type = other DNA

SEQ ID NO: 50191 - DNA, 110 bp, synthetic construct
  source 1..110: mol_type = other DNA
gagtggatgctagggatgggatccatgagggaggtggcagtggttcatatttctcaagactgctcctggaatgggggtggtggtgacagtggttcccatcaccccttcca

SEQ ID NO: 50192 - DNA, 110 bp, synthetic construct
  source 1..110: mol_type = other DNA
aagactgctcctggaatgggggtggtggtgacagtggttcccatcaccccttccattactgagtggctttcagaaccactcttcatatctgggagggggggcactgtttc

SEQ ID NO: 50193 - DNA, 110 bp, synthetic construct
  source 1..110: mol_type = other DNA
acaccaagatacttgtggctcatgtgaaagaacagaattaggtagaatgggaccatagttgagctctgagagaaactcagctagacgatggtgtcccagagcagagaggt

SEQ ID NO: 50194 - DNA, 110 bp, synthetic construct
  source 1..110: mol_type = other DNA
tagttgagctctgagagaaactcagctagacgatggtgtcccagagcagagaggtcggccagtttgaggaactgtgtgggacagcagttgacgggccctagagcccacac

SEQ ID NO: 50195 - DNA, 110 bp, synthetic construct
  source 1..110: mol_type = other DNA
gatgtttcagggccctgttttttgtttttttttgtttttttccaataagagccctgacttgctttagttgagcatgcaatggcttttgagctttttctctagcctagctt

SEQ ID NO: 50196 - DNA, 110 bp, synthetic construct
  source 1..110: mol_type = other DNA
gacttgctttagttgagcatgcaatggcttttgagctttttctctagcctagcttcttggcctctgcttctttttggtaggaaataagggcctttttataaactactgta

SEQ ID NO: 50197 - DNA, 110 bp, synthetic construct
  source 1..110: mol_type = other DNA
tgattataggtctgtcttgtgggagtttctaactaaatgtcctgcacatcctgatcaattttagatcgttatactctacaggttcactaaaaaggtattaaggatgtgtc

SEQ ID NO: 50198 - DNA, 110 bp, synthetic construct
  source 1..110: mol_type = other DNA
caattttagatcgttatactctacaggttcactaaaaaggtattaaggatgtgtcacctgtcctgggaaacaattcagaaatatgtctccacactgtagtctgtgtttat

SEQ ID NO: 50199 - DNA, 110 bp, synthetic construct
  source 1..110: mol_type = other DNA
tctgatgatgaacatcaaagcttaacgactcaacccaaaaattagagaaaaaattaagactgagctgaccttgttttactcagacattaaagggtgatttatgctgatat

SEQ ID NO: 50200 - DNA, 110 bp, synthetic construct
  source 1..110: mol_type = other DNA
aagactgagctgaccttgttttactcagacattaaagggtgatttatgctgatatatggatgccttgaaatcctgcataatctgggtgtcctgtgacccagtacggtaat

SEQ ID NO: 50201 - DNA, 110 bp, synthetic construct
  source 1..110: mol_type = other DNA
gcaggcaaatgagaactgtggagccttggcctccgacctagcagagtagacaaggacctgaaatgacaacaaagagcagtcacctgctggcagctatgctcttgttatta

SEQ ID NO: 50202 - DNA, 110 bp, synthetic construct
  source 1..110: mol_type = other DNA
acctgaaatgacaacaaagagcagtcacctgctggcagctatgctcttgttattagatcaaatgctagttcattcctgtgcttatctgtgtattccaggctggcacatga

SEQ ID NO: 50203 - DNA, 110 bp, synthetic construct
  source 1..110: mol_type = other DNA
gagaaagagttcagatggagactgaaagaatgtgagagtcagcctgaccgaggagaaagctcagagcctttgaagttagaccatcaaggtttatacctaagcccactact

SEQ ID NO: 50204 - DNA, 110 bp, synthetic construct
  source 1..110: mol_type = other DNA
aaagctcagagcctttgaagttagaccatcaaggtttatacctaagcccactactctctgtgggagaattagctaaggggatccaataagagaccgatgactcataggta

SEQ ID NO: 50205 - DNA, 110 bp, synthetic construct
  source 1..110: mol_type = other DNA
tagtgttggttcgtggtagagacttgatgggcatgaaccaaccgattagatggaactcttcaaagagttcctgaagttcagtatgacatttttccccagagcttgtggtt

SEQ ID NO: 50206 - DNA, 110 bp, synthetic construct
  source 1..110: mol_type = other DNA
ctcttcaaagagttcctgaagttcagtatgacatttttccccagagcttgtggttttcaggccagagaatgactttctcatcatgtctgttgcaaacagctctataagag

SEQ ID NO: 50207 - DNA, 110 bp, synthetic construct
  source 1..110: mol_type = other DNA
agtgatggatgcacttagaagtggggatggaggcctatcccgggactgttcgaacccatgaagatgcttcagggatcacagagagaaaacagagcctcctgaaaagagcc

SEQ ID NO: 50208 - DNA, 110 bp, synthetic construct
  source 1..110: mol_type = other DNA
ccatgaagatgcttcagggatcacagagagaaaacagagcctcctgaaaagagcccacagaggcaaagcatagagatgagaagcccagccttgggttgaggctgcaggct

SEQ ID NO: 50209 - DNA, 110 bp, synthetic construct
  source 1..110: mol_type = other DNA
cacagccatagcaacatcagatcggagccatgttgcgacccacaccacagctcacagcacccactgggtgaggccagggatcaaagccgcaacctcatggttactaggtg

SEQ ID NO: 50210 - DNA, 110 bp, synthetic construct; identical to SEQ ID NO: 50209
  source 1..110: mol_type = other DNA

SEQ ID NO: 50211 - DNA, 110 bp, synthetic construct
  source 1..110: mol_type = other DNA
aaaacaaaatgataattgtgattcacaatctaagcaaaatgatgggaataattttctgcaccttcctaaactttacatgagcatagatggctttggtgagtgacaggtgg

SEQ ID NO: 50212 - DNA, 110 bp, synthetic construct; identical to SEQ ID NO: 50211
  source 1..110: mol_type = other DNA

SEQ ID NO: 50213 - DNA, 110 bp, synthetic construct
  source 1..110: mol_type = other DNA
ccaatactgtcactcagtttgtagagagttacttgatcaattgatcaatagtgtttacactgacatccttacaaattttatagtgaaatctcatggttcaaaagatgctg

SEQ ID NO: 50214 - DNA, 110 bp, synthetic construct; identical to SEQ ID NO: 50213
  source 1..110: mol_type = other DNA

SEQ ID NO: 50215 - DNA, 110 bp, synthetic construct
  source 1..110: mol_type = other DNA
cggaaatgaatgtgactgggaaccatgaggctgagggctggatccctggcctcactcactggagtaaggacccagtgttgccatgagttgcagtgtaggtcacagactcg

SEQ ID NO: 50216 - DNA, 110 bp, synthetic construct; identical to SEQ ID NO: 50215
  source 1..110: mol_type = other DNA

SEQ ID NO: 50217 - DNA, 110 bp, synthetic construct
  source 1..110: mol_type = other DNA
gatatgggctgtttagagctagcccttgcttaagacagatgttcactggcctctgaatggagctgaggggcccacactgaatgggataattgtggaaagtcctaagactg

SEQ ID NO: 50218 - DNA, 110 bp, synthetic construct
  source 1..110: mol_type = other DNA
aatggagctgaggggcccacactgaatgggataattgtggaaagtcctaagactggtccttaatttaaaatcatgaggaattcccttcgtggagcagcagaaacaaatct

SEQ ID NO: 50219 - DNA, 110 bp, synthetic construct
  source 1..110: mol_type = other DNA
gcaagctttccctgatacgcccctttgggaccctggactttttctcacctactacctcaagcacgtgcatagagaaacattacgtcaccaggccgagaaagggggaccct

SEQ ID NO: 50220 - DNA, 110 bp, synthetic construct
  source 1..110: mol_type = other DNA
ctcaagcacgtgcatagagaaacattacgtcaccaggccgagaaagggggaccctgctaggtgtgcagtggttgtgtttggatggaggtaagggagcaaggcacctgagc

SEQ ID NO: 50221 - DNA, 110 bp, synthetic construct
  source 1..110: mol_type = other DNA
tagctctcctggtgggcctaggatgagaccttcctgcttggtgtgaaaccaatgatcctacttgctgtagaggagtggttcacccaagctagattaacccaacaggtgag

SEQ ID NO: 50222 - DNA, 110 bp, synthetic construct
  source 1..110: mol_type = other DNA
tcctacttgctgtagaggagtggttcacccaagctagattaacccaacaggtgaggtccctgcatttcacccctgggcctccatccctgggccccttggagcacggccag

SEQ ID NO: 50223 - DNA, 110 bp, synthetic construct
  source 1..110: mol_type = other DNA
acctggaggggcacccacagaggacaaacaggtatgtatttgttttgcttcctaggggatcctacattgggtgagaggccaaaattgatgccctctagagctgttccaat

SEQ ID NO: 50224 - DNA, 110 bp, synthetic construct
  source 1..110: mol_type = other DNA
gggatcctacattgggtgagaggccaaaattgatgccctctagagctgttccaatgaaacaacctggttccaaagaggagagtcctctactttacacctagtttgtctca

SEQ ID NO: 50225 - DNA, 110 bp, synthetic construct
  source 1..110: mol_type = other DNA
ctgataaataatggcggaaggaagcctccattcagaggaaggagaacattcaggaactgtggggaggatgggacagcagcaggagggagggtggctttgggtggctggga

SEQ ID NO: 50226 - DNA, 110 bp, synthetic construct
  source 1..110: mol_type = other DNA
actgtggggaggatgggacagcagcaggagggagggtggctttgggtggctgggagggccagtcctgactctcccagtcggcaagctcacacagggtggagctgtgtgcc

SEQ ID NO: 50227 - DNA, 110 bp, synthetic construct
  source 1..110: mol_type = other DNA
agagtgaagaccaggggagctcagcactctgaccagaaaggctgcagttctggaagttgacagctcttccccaccacgatgtggggaagcctgtcctcagggtgataaaa

SEQ ID NO: 50228 - DNA, 110 bp, synthetic construct
  source 1..110: mol_type = other DNA
gttgacagctcttccccaccacgatgtggggaagcctgtcctcagggtgataaaaataaagtgctagattctaggagtaggacccactgattcaagtgtactggactcca

SEQ ID NO: 50229 - DNA, 110 bp, synthetic construct
  source 1..110: mol_type = other DNA
aatatgtaaagagctcttatgaattaataagaaaaatatccaacagtcctatataaaactaggcagagaacaagaacaggtggttcacagaagaggaaacataaacgtcc

SEQ ID NO: 50230 - DNA, 110 bp, synthetic construct; identical to SEQ ID NO: 50229
  source 1..110: mol_type = other DNA

SEQ ID NO: 50231 - DNA, 110 bp, synthetic construct
  source 1..110: mol_type = other DNA
tgaacctgccctttggaactcaaggaaactcacggaggctgaatgaagcctgtttcctatagaaaagataggggggtggggtggcggtgggacacggaaaggattttgtg

SEQ ID NO: 50232 - DNA, 110 bp, synthetic construct; identical to SEQ ID NO: 50231
  source 1..110: mol_type = other DNA

SEQ ID NO: 50233 - DNA, 110 bp, synthetic construct
  source 1..110: mol_type = other DNA
gtcttgtgcagggctcggccacgcgggctttacgtcctgcctgattggtccatcagccggggagggcggggactgagcctctttggtgctgcttcatggagaagttgccc

SEQ ID NO: 50234 - DNA, 110 bp, synthetic construct
  source 1..110: mol_type = other DNA
gccggggagggcggggactgagcctctttggtgctgcttcatggagaagttgcccacaaccacgaaaaacacgatgcagatttgaaacttgtgttttggaggggaagggg

SEQ ID NO: 50235 - DNA, 110 bp, synthetic construct
  source 1..110: mol_type = other DNA
cctgcatcctcatggatgcgagttgggtttgtaacctatggagccacagcgggaactccagaaggaggagacttctgccaccggagcagtaggtcagggtgcagtgctcc

SEQ ID NO: 50236 - DNA, 110 bp, synthetic construct
  source 1..110: mol_type = other DNA
ctccagaaggaggagacttctgccaccggagcagtaggtcagggtgcagtgctccagagctggcccctctccaaggctgtctggccacccctttcccctggtgggtggga

SEQ ID NO: 50237 - DNA, 110 bp, synthetic construct
  source 1..110: mol_type = other DNA
acccattgtggctcagtgggttaaggactaattagcatccataaggatgtgggtttgttcactggcctcgacctgcaggttaaggatccagcattgctgcaattgcagca

SEQ ID NO: 50238 - DNA, 110 bp, synthetic construct
  source 1..110: mol_type = other DNA
gtgggttaaggactaattagcatccataaggatgtgggtttgttcactggcctcgacctgcaggttaaggatccagcattgctgcaattgcagcatatgtcacagatgca

SEQ ID NO: 50239 - DNA, 110 bp, synthetic construct
  source 1..110: mol_type = other DNA
atgaacaaaagctaaacagatatccagcttcttctcttgtgcttgttagatctaaagctgaagatcatgacgaagcagggccattacctacaaaagtgaatcttgctcat

SEQ ID NO: 50240 - DNA, 110 bp, synthetic construct
  source 1..110: mol_type = other DNA
cttgtgcttgttagatctaaagctgaagatcatgacgaagcagggccattacctacaaaagtgaatcttgctcattcagaaatttaagcttttttttttttttaaagaaa

SEQ ID NO: 50241 - DNA, 110 bp, synthetic construct
  source 1..110: mol_type = other DNA
acgctcccgcggggtgtgtgctatgatccccattttgcaaaccaagaactcgaagcacagagaggtcgggtcatctgcccacagccacacagctggcaagtggtgttgct

SEQ ID NO: 50242 - DNA, 110 bp, synthetic construct
  source 1..110: mol_type = other DNA
cacagagaggtcgggtcatctgcccacagccacacagctggcaagtggtgttgctggggcttggactccatctccgatgctgaacccagtatcctcccagctgctgcagc

SEQ ID NO: 50243 - DNA, 110 bp, synthetic construct
  source 1..110: mol_type = other DNA
caatctacctcgggcacaaggatgtgggtctgacaacaccaggagtctgcacacgtagccacagcagtttgccactttctgctgtgtctcaggaggtccaggaagcttcc

SEQ ID NO: 50244 - DNA, 110 bp, synthetic construct
  source 1..110: mol_type = other DNA
tagccacagcagtttgccactttctgctgtgtctcaggaggtccaggaagcttccagtggcagtgatgcctgagcagggccctgaaagagccagatgggaggcagggaca

SEQ ID NO: 50245 - DNA, 110 bp, synthetic construct
  source 1..110: mol_type = other DNA
catgcccataaaggaagctgcgcagaaattcaggctaccgtgagtttaatatcatcttgtcgagcttcctgtcaaatgctaactatcgccccctgtaactttttcaacaa

SEQ ID NO: 50246 - DNA, 110 bp, synthetic construct
  source 1..110: mol_type = other DNA
cttgtcgagcttcctgtcaaatgctaactatcgccccctgtaactttttcaacaaacgtgtactgtgtccctactatgtgctgatcaccattccaggaactggggcagtg

SEQ ID NO: 50247 - DNA, 110 bp, synthetic construct
  source 1..110: mol_type = other DNA
tgagccctgtgttggtcaagggtcaactgtagcgacggcccagaggaatagcagtgagagcaatgagaatcggacaggtccgagtctattacaaagaaagagttgatgag

SEQ ID NO: 50248 - DNA, 110 bp, synthetic construct
  source 1..110: mol_type = other DNA
gagagcaatgagaatcggacaggtccgagtctattacaaagaaagagttgatgagacttgctggtgggatggttgtggggtatgaaagaaacaaagtcactagtactgac

SEQ ID NO: 50249 - DNA, 110 bp, synthetic construct
  source 1..110: mol_type = other DNA
cccagcttgtgagactgggacttaagtggtagaatgggggcttatggagtcttcattttcagtttagccttccataacagggcaggtgcctcttccccagcagtagctta

SEQ ID NO: 50250 - DNA, 110 bp, synthetic construct
  source 1..110: mol_type = other DNA
ttttcagtttagccttccataacagggcaggtgcctcttccccagcagtagcttaccctcttggttacacacctccagggacgggaagctcactacctgaattgagcagc

SEQ ID NO: 50251 - DNA, 110 bp, synthetic construct
  source 1..110: mol_type = other DNA
gaacatctggagaattggccttttaaggggaatccacaatctcaggggatgcgaaaaacggtgtggccgccattattgccagccttgttcttttccatttaattctttgt

SEQ ID NO: 50252 - DNA, 110 bp, synthetic construct
  source 1..110: mol_type = other DNA
aaacggtgtggccgccattattgccagccttgttcttttccatttaattctttgtttctagtgatttctagaaactggcctaatgtttcctaagtctgaagaccagtctg

SEQ ID NO: 50253 - DNA, 110 bp, synthetic construct
  source 1..110: mol_type = other DNA
ggagctaagcccaccccacaggaccccaaggctggaacaaggggacgggaggggtgatgagcttagctgacaaagacgtgaacataacagagcacaatgaatttcaggtg

SEQ ID NO: 50254 - DNA, 110 bp, synthetic construct
  source 1..110: mol_type = other DNA
gatgagcttagctgacaaagacgtgaacataacagagcacaatgaatttcaggtgtagttgccatcactgacgtctccaccccgaaacttcacagcagcacttcaccagc

SEQ ID NO: 50255 - DNA, 110 bp, synthetic construct
  source 1..110: mol_type = other DNA
gcacactggcagtggctagaagctgtgggcacagctcagactcctctgtcagtacagtgaccaactgccctgatttgcctgggatggagagggtactggcgacactggac

SEQ ID NO: 50256 - DNA, 110 bp, synthetic construct
  source 1..110: mol_type = other DNA
agtgaccaactgccctgatttgcctgggatggagagggtactggcgacactggactttcagtgctgcaaccaggaaaggctgagatgaactgggacccgttggaggcctg

SEQ ID NO: 50257 - DNA, 110 bp, synthetic construct
  source 1..110: mol_type = other DNA
ttcacttttaaagtgatgacacagatgcatacgttctaacatgctgttgagtgacaaaattaggttatggcacagcatgcaatgtctcattttgtagctttgtattcata

SEQ ID NO: 50258 - DNA, 110 bp, synthetic construct
  source 1..110: mol_type = other DNA
aaaattaggttatggcacagcatgcaatgtctcattttgtagctttgtattcatatttaatacatatgcgtgttcatatgtatctaggtgcacagatgtctgaaaaaggt

SEQ ID NO: 50259 - DNA, 110 bp, synthetic construct
  source 1..110: mol_type = other DNA
gaagggaccacacggggccctgtggagggctgactgaatgctagtccccaaagatacggccatgccctaatccccagcacctgtagatcttgtgtaacttggaaagaggg

SEQ ID NO: 50260 - DNA, 110 bp, synthetic construct
  source 1..110: mol_type = other DNA
acggccatgccctaatccccagcacctgtagatcttgtgtaacttggaaagagggtctttgtagatacataagttaaggatttgggggtaacgagatagttagtcctgga

SEQ ID NO: 50261 - DNA, 110 bp, synthetic construct
  source 1..110: mol_type = other DNA
gaatgcccaatactcaggccgagaggaggggtccccttaagggactgcctgcccccaaggtgtaccacccaaggggacattcgcttgagcgtaagcaagaaatacactat

SEQ ID NO: 50262 - DNA, 110 bp, synthetic construct
  source 1..110: mol_type = other DNA
caaggtgtaccacccaaggggacattcgcttgagcgtaagcaagaaatacactattttcaccaagcttcggctgagcctttggtcttaaggctcctgcttcgggggacct

SEQ ID NO: 50263 - DNA, 110 bp, synthetic construct
  source 1..110: mol_type = other DNA
aaacatcagcaaccgcgcgcggagagctaaggaccagagaacctgcaggaaacagtgcacccagtcgaacagcagtagttcaattctagagaccgagggccaaggggtag

SEQ ID NO: 50264 - DNA, 110 bp, synthetic construct
  source 1..110: mol_type = other DNA
tgcacccagtcgaacagcagtagttcaattctagagaccgagggccaaggggtagcgcccatctagtctaagagctgaacagggggtcaaaagcctgcggggaggtgcac

SEQ ID NO: 50265 - DNA, 110 bp, synthetic construct; identical to SEQ ID NO: 50263
  source 1..110: mol_type = other DNA

SEQ ID NO: 50266 - DNA, 110 bp, synthetic construct; identical to SEQ ID NO: 50264
  source 1..110: mol_type = other DNA

SEQ ID NO: 50267 - DNA, 110 bp, synthetic construct
  source 1..110: mol_type = other DNA
ataataataaaaaataaaaggcacctcctcctgccctaaacctggagtggggtggggtggaggtgctgctcagcttctggtccaaagtggctcatcaaggaattccttct

SEQ ID NO: 50268 - DNA, 110 bp, synthetic construct
  source 1..110: mol_type = other DNA
ggtggaggtgctgctcagcttctggtccaaagtggctcatcaaggaattccttctgaacaaagacaactcccttactataatagcaattctgaagaatatgattcgtctc

SEQ ID NO: 50269 - DNA, 110 bp, synthetic construct
  source 1..110: mol_type = other DNA
acagtttttatctcaaggctttcacataacaaatgggatttttaaaaaaaccaatctagatgcactacaactaaacagaaatcagacagggacccaagagttacaaagtg

SEQ ID NO: 50270 - DNA, 110 bp, synthetic construct
  source 1..110: mol_type = other DNA
ctagatgcactacaactaaacagaaatcagacagggacccaagagttacaaagtgctttggatattcaaagggagaagctacctaagattggtcttaataggaagacaca

SEQ ID NO: 50271 - DNA, 110 bp, synthetic construct
  source 1..110: mol_type = other DNA
gacagctgcattttatattacgaaaagtacacctcaattttaagaaaaaatatggatatgaaaaaatcatactgttacaacaaagcatgattgctgagtgtttcagtgga

SEQ ID NO: 50272 - DNA, 110 bp, synthetic construct
  source 1..110: mol_type = other DNA
gcattgtctagatatacgaggctccaacccacctttctggcctgatttcccactgcttttcttctttccaacttctcccaaaattccagaagtttattctatattaccat

SEQ ID NO: 50273 - DNA, 110 bp, synthetic construct
  source 1..110: mol_type = other DNA
tatcaaaataaacagtgacaaaataaacatgaaaaacaaaatagtaattaatatccccttgatctcaccggcaagactggtaagaagacagggcaagggattatttcttc

SEQ ID NO: 50274 - DNA, 110 bp, synthetic construct
  source 1..110: mol_type = other DNA
tctccatcccttcttggccttcagaccttgacttcacacttttatggaatcagaggtcagaaccacaggattctaggattagtgtcaagctcaggattctagaatcatag

SEQ ID NO: 50275 - DNA, 110 bp, synthetic construct
  source 1..110: mol_type = other DNA
gtcagaaccacaggattctaggattagtgtcaagctcaggattctagaatcatagacgtttagcctcacatatgttagtcgtagaaaattttggaacctaattgtttgac

SEQ ID NO: 50276 - DNA, 110 bp, synthetic construct
  source 1..110: mol_type = other DNA
acatatacagctgagtttataaacttaaactttgaaacatactaaacctaccttatcagtcccaatcatgttatttttcaacttgctctctggtgagatgctgtaaaatt

SEQ ID NO: 50277 - DNA, 110 bp, synthetic construct; identical to SEQ ID NO: 50276
  source 1..110: mol_type = other DNA

SEQ ID NO: 50278 - DNA, 110 bp, synthetic construct
  source 1..110: mol_type = other DNA
cagatgtcctttgtcatgtaactaactttttaataccctcagattcaaagtctgggtcatgacttgctttggtcagtgggatgtatgtacatgagatgcagatactggga

SEQ ID NO: 50279 - DNA, 110 bp, synthetic construct
  source 1..110: mol_type = other DNA
gtcatgacttgctttggtcagtgggatgtatgtacatgagatgcagatactgggaagacacatggttgggcttatttgttcttgtattctgccactgcacacgcctaacc

SEQ ID NO: 50280 - DNA, 110 bp, synthetic construct
  source 1..110: mol_type = other DNA
gaatagaaggtggtggataataagctattattatctgtctcctgtacttgtctgcgagctccttgggaatggataataatatgagcatctgatgttctggggcctatact

SEQ ID NO: 50281 - DNA, 110 bp, synthetic construct
  source 1..110: mol_type = other DNA
gagctccttgggaatggataataatatgagcatctgatgttctggggcctatactatgcaacaggcactgtgtcgtgagatctacaacactatcttccttaatcctcaca

SEQ ID NO: 50282 - DNA, 110 bp, synthetic construct
  source 1..110: mol_type = other DNA
taggagtcaaactggagctgcagttgctggcctatgccatagccacagccacagcaatgcccaatctgagccacagcttgcggcaacatgggatccttaatctactgatc

SEQ ID NO: 50283 - DNA, 110 bp, synthetic construct; identical to SEQ ID NO: 50282
  source 1..110: mol_type = other DNA

SEQ ID NO: 50284 - DNA, 110 bp, synthetic construct
  source 1..110: mol_type = other DNA
aggctgttttgcccctaatcagtttcttgcacttgggaagaggccaggttggacttaatgcttagagctgtgccacatcttgagaccacaaggggaagaccaagagcacg

SEQ ID NO: 50285 - DNA, 110 bp, synthetic construct
  source 1..110: mol_type = other DNA
accccaagctggcagctctgaaccctgaatccaacacagctgggctagacatatttgctcaattttctgcctatatcaagaattcacacccagacctcaatgacaacctg

SEQ ID NO: 50286 - DNA, 110 bp, synthetic construct
  source 1..110: mol_type = other DNA
actccctacatgaatcttttaacccactgtgccaggcatccagtctgtgtcctagcactgcaaatatgctgcaaatccctgttgcgccacagtggtaactctgagacata

SEQ ID NO: 50287 - DNA, 110 bp, synthetic construct
  source 1..110: mol_type = other DNA
ataggctgtgtggtcagtttctctggttcagatctttatccagctgtgtgacctaaggcaagtatttaacttcagagtctcaggaccttcatctgtaaatggatatgatt

SEQ ID NO: 50288 - DNA, 110 bp, synthetic construct
  source 1..110: mol_type = other DNA
tctttgcctgcagtggagaagaaggctgcccccgggttctctacacatggccccacttacagacactcagcaccggaggaactaggtcccaaggtgggtggagattccct

SEQ ID NO: 50289 - DNA, 110 bp, synthetic construct
  source 1..110: mol_type = other DNA
tgggcaaattcattcgaaaaactcttgtcttactgtgtcttaggcactgagctatcttaactcttttctgaaacttggttgaatataacttgataaatgatattttattc

SEQ ID NO: 50290 - DNA, 110 bp, synthetic construct
  source 1..110: mol_type = other DNA
tctgtgtctctgagatttatcctggaattcacttctggacagattgttcacatccttagaaaacagctcttcagctttaacatgtcctattgttatttgtttatttggca

SEQ ID NO: 50291 - DNA, 110 bp, synthetic construct
  source 1..110: mol_type = other DNA
ccaagaacaggtactggacatcaaattttttttgaatgttatctgtgaccaagttgaaactggtgtggacattgtccctctttttggaagtgtcactggagttttaaatc

SEQ ID NO: 50292 - DNA, 110 bp, synthetic construct
  source 1..110: mol_type = other DNA
gctccaacagtgtccatgcccttaaataaaatgtaatgctgcctcttattgttatttaaacactgtatatcttaatcacagattgactgattagatttatctacagatta

SEQ ID NO: 50293 - DNA, 110 bp, synthetic construct; identical to SEQ ID NO: 50292
  source 1..110: mol_type = other DNA

SEQ ID NO: 50294 - DNA, 110 bp, synthetic construct
  source 1..110: mol_type = other DNA
ctcccactgaactgctatgagatcctagatgccgggaactcttttatatattatgatacatggcactcaagcacatactccagtatatgttttctaaataaaagcataaa

SEQ ID NO: 50295 - DNA, 110 bp, synthetic construct
  source 1..110: mol_type = other DNA
gtgggtgtaacttattttaatcatgtgaggccttttttaaaagcacaatgttttctgcagctggtaagagaaatgagaagtcagagagacttaaagcaccacgaggatgc

SEQ ID NO: 50296 - DNA, 110 bp, synthetic construct
  source 1..110: mol_type = other DNA
agtggcttggatcgctgctgaggcacaggtttgatcctcagcacagctcagtgggttaaggattaggcattgccacagctgtggcataggtgcagctcagattcaacccc

SEQ ID NO: 50297 - DNA, 110 bp, synthetic construct
  source 1..110: mol_type = other DNA
ttaaggattaggcattgccacagctgtggcataggtgcagctcagattcaacccctggcctgggaatctccatactctgtgggtgcagccaaaaaagataaatctctcct

SEQ ID NO: 50298 - DNA, 110 bp, synthetic construct
  source 1..110: mol_type = other DNA
tagccactgagccatgatgggaacgcctcaactatgttttccatctctcagtctgggtagctgcttcacgttttgccaccatatctgcattctgacgagctggaagaggg

SEQ ID NO: 50299 - DNA, 110 bp, synthetic construct
  source 1..110: mol_type = other DNA
ggtagctgcttcacgttttgccaccatatctgcattctgacgagctggaagagggactgggaggtagaaggcattttcctgtaggtgtgcaacctgggagttggacacat

SEQ ID NO: 50300 - DNA, 110 bp, synthetic construct
  source 1..110: mol_type = other DNA
tgcatgatcattggggcctttgaatagtatgttatctttaaaatactgttaccattagaaatttgtgttcacagttttacttcaccctctctgaggtctctgcccacctc

SEQ ID NO: 50301 - DNA, 110 bp, synthetic construct
  source 1..110: mol_type = other DNA
aactgagtggttagaaggtaagatgactcacccattaaagattttgttttcttcagtgtaggccaatcctactacccctggagtccatctgtttctaccttttcagaaac

SEQ ID NO: 50302 - DNA, 110 bp, synthetic construct
  source 1..110: mol_type = other DNA
tcaccgtaactttctgtggcattatttccattttaccagtagagaaagggaagatactatagaggttaagtatcttgtccaaagttatataaccacttaagttacagagc

SEQ ID NO: 50303 - DNA, 110 bp, synthetic construct
  source 1..110: mol_type = other DNA
ggttgataagtatgaaaatactttttccattagaggctccccgagaaaaggcactggaggactcttttttgctagaggatcatcagaaaaccagtcatcagctacttcta

SEQ ID NO: 50304 - DNA, 110 bp, synthetic construct
  source 1..110: mol_type = other DNA
tagcaggcataatatcctcaagcaacatctatacccagctccttgaagtacacggggactattagcaacaaaaaacacaccaacaatatctggataatcatctagcaaca

SEQ ID NO: 50305 - DNA, 110 bp, synthetic construct
  source 1..110: mol_type = other DNA
cctgatcttaactgtagttagtagcttttttttggatgatattcgttgcttgtggaagttcctgggccagggatcaaacccatgccaccccagcaacctgagctgctgca

SEQ ID NO: 50306 - DNA, 110 bp, synthetic construct
  source 1..110: mol_type = other DNA
agttagtagcttttttttggatgatattcgttgcttgtggaagttcctgggccagggatcaaacccatgccaccccagcaacctgagctgctgcagtcacagtgctggat

SEQ ID NO: 50307 - DNA, 110 bp, synthetic construct
  source 1..110: mol_type = other DNA
gattggcttttatgatgattagtgatgttgagcatcttttcttctacctgtatatctttggagaaaagtctattccagttctttgtccatttttaaattggcttatttat

SEQ ID NO: 50308 - DNA, 110 bp, synthetic construct
  source 1..110: mol_type = other DNA
gcaagctctccaaagctctttagctaggatttttttatggaggctcatcacatgggcataattggttaaatcattggtggttagtaatttactcaactttcagctcctct

SEQ ID NO: 50309 - DNA, 110 bp, synthetic construct
  source 1..110: mol_type = other DNA
gagttttgccaaggaattagatgctgctggaaaaatatccagagctcctatatttgctatccaaagagttccacagtgttgtggggtaaatggcatcccactattgacta

SEQ ID NO: 50310 - DNA, 110 bp, synthetic construct
  source 1..110: mol_type = other DNA
aaaaaacttcaagtagattttaagactattctctaactgatggaatgtgtactatgtggcaaatgtattctttaagccatcctcatagaaagtctgtgaggagaggtaat

SEQ ID NO: 50311 - DNA, 110 bp, synthetic construct; identical to SEQ ID NO: 50310
  source 1..110: mol_type = other DNA

SEQ ID NO: 50312 - DNA, 110 bp, synthetic construct
  source 1..110: mol_type = other DNA
aagagatccattcagtataaaatgctgtagaagcaaagaagggtggtactttatcgaccttagaagctcagggagatttctagaagaggtacctctgatctgactcttat

SEQ ID NO: 50313 - DNA, 110 bp, synthetic construct
  source 1..110: mol_type = other DNA
gaccttagaagctcagggagatttctagaagaggtacctctgatctgactcttataagatgaataaaacttaggcaaataaaattctaaacagaaggaaagtctaaagca

SEQ ID NO: 50314 - DNA, 110 bp, synthetic construct
  source 1..110: mol_type = other DNA
ctagttttggccttggaattacctggaataagcctgatttctcttctgcattgcagtcctttatcgatttaaccacagctgtcttgtctgccctaattttctggtttttc

SEQ ID NO: 50315 - DNA, 110 bp, synthetic construct
  source 1..110: mol_type = other DNA
cttattgtgtcttcagccttctttccacaaagcagagactactttctcaccagcggacctgttaaactttcttctgcacccccccccaatcaaaacaatacttcctgttc

SEQ ID NO: 50316 - DNA, 110 bp, synthetic construct
  source 1..110: mol_type = other DNA
gagtcccactcacatcccctggaccttttcgttcatctgtttccaacttccagtatcagttcagaactgcagaagagggttgtataccagaattgagggaattgagccat

SEQ ID NO: 50317 - DNA, 110 bp, synthetic construct
  source 1..110: mol_type = other DNA
tcagttcagaactgcagaagagggttgtataccagaattgagggaattgagccatctccccagagtaggcattgtttgtagagaaatttatttacttatttttttgtctt

SEQ ID NO: 50318 - DNA, 110 bp, synthetic construct
  source 1..110: mol_type = other DNA
gacagtggagaaccactggagggggtgccccagggcagcagtgtggtcagaaagctccggggattaattggctcactccgtcggaaggatgtgggagggtgaggaggaga

SEQ ID NO: 50319 - DNA, 110 bp, synthetic construct
  source 1..110: mol_type = other DNA
tccggggattaattggctcactccgtcggaaggatgtgggagggtgaggaggagaggctgaatgtaaaagaccagtgaggggctgtcgcagggatctaggcaggggttga

SEQ ID NO: 50320 - DNA, 110 bp, synthetic construct
  source 1..110: mol_type = other DNA
aactgccaacctagagagtcttgagccaaggttgtgctaaacctctaagtttcagatagtttacacagaaatagatagctggttcagactcttcagagggatattcagga

SEQ ID NO: 50321 - DNA, 110 bp, synthetic construct
  source 1..110: mol_type = other DNA
taaatttaggccaagggatttcactataacttcccagcatcatccacttgacatggatgagcctggaacctagaagattcattgcattctgtcttgttgtaaccatttct

SEQ ID NO: 50322 - DNA, 110 bp, synthetic construct
  source 1..110: mol_type = other DNA
agacaaatagcctaaatggagagactggaactgagaaacaaggctacttgtacgaggggccttgcgatatgacagaggttgcattataaaatggtaggaatagtagaaac

SEQ ID NO: 50323 - DNA, 110 bp, synthetic construct
  source 1..110: mol_type = other DNA
cagatgcttgattacttccaaggaagttgcaactaagcaccttgtgtagcacgtgctgtggggtctgagcaggatggggtgcttcttgcatggtctccaggagctggggg

SEQ ID NO: 50324 - DNA, 110 bp, synthetic construct
  source 1..110: mol_type = other DNA
tgggtgagcttccattctgtatctcagctgaagagatggacactgctgcataaggcagacttctctgatgcagtctgtatgactgatttgttttgggattccctaccatg

SEQ ID NO: 50325 - DNA, 110 bp, synthetic construct
  source 1..110: mol_type = other DNA
actcattttcactccttcagtacaaaactattgatggcctactatgtagtatgactttcttcaactagtaaacattgttgaaatgataatagaaataaacttcagttcgt

SEQ ID NO: 50326 - DNA, 110 bp, synthetic construct
  source 1..110: mol_type = other DNA
gcacacacttttcttagtgaggcttgcactcctaatctctgtccagcctccttcctggtggtaagtgagggctccttttcccattttacataagatccaggtcaagtaga

SEQ ID NO: 50327 - DNA, 110 bp, synthetic construct
  source 1..110: mol_type = other DNA
cctcaaatgtcccttttgcatcctcaaatgcccctgctgcttcttaactcaggtattttgtgcatgctgctccctcaaagtgaaaagctttcttaccacctcagtcaact

SEQ ID NO: 50328 - DNA, 110 bp, synthetic construct
  source 1..110: mol_type = other DNA
ccctggtgagacttggagctttgttttttttatagagcaaacttggaactgggcagatttactgaaaggtttattcttttgcaggttatttctgttacataaattccctc

SEQ ID NO: 50329 - DNA, 110 bp, synthetic construct
  source 1..110: mol_type = other DNA
tctcagtaccctctcctgaacacactgacctgagcaggttctgatcacctgggcaggtacttccttttagatctaagcattgataattagttagtttctggcttctgaat

SEQ ID NO: 50330 - DNA, 110 bp, synthetic construct
  source 1..110: mol_type = other DNA
gggcttctcagctgcacagttggagagaagaaagctgtagggtttcacacatgcaattaaatgcttcagtgcagaagtatcacttccattcataaactattagccagaaa

SEQ ID NO: 50331 - DNA, 110 bp, synthetic construct
  source 1..110: mol_type = other DNA
attaaatgcttcagtgcagaagtatcacttccattcataaactattagccagaaataatcacatggccccacacgtaaatgcaaaggagttattagaagtatatctagaa

SEQ ID NO: 50332 - DNA, 110 bp, synthetic construct
  source 1..110: mol_type = other DNA
ctgtgatgctgtgtccagagtcctcagtccatgactctggaccctaatcagttatctctattgtagaaatgggaaaatagaggatcagagataggaagtaatctttccag

SEQ ID NO: 50333 - DNA, 110 bp, synthetic construct
  source 1..110: mol_type = other DNA
acaataaactgcacatatttaaattgtgcagtttagacatagtttatatccatgaagacatcatcacaattgagactctgaacatgtcctctgtccacaccaccattcct

SEQ ID NO: 50334 - DNA, 110 bp, synthetic construct; identical to SEQ ID NO: 50333
  source 1..110: mol_type = other DNA

SEQ ID NO: 50335 - DNA, 110 bp, synthetic construct
  source 1..110: mol_type = other DNA
ttgcttccatgaggtactcccattgcatctggatttccccaccatagcacttaacacattcattattgctcatttgattctctctcatatagtagatgagaagctccaca

SEQ ID NO: 50336 - DNA, 110 bp, synthetic construct
  source 1..110: mol_type = other DNA
acattcattattgctcatttgattctctctcatatagtagatgagaagctccacatgcatgttgtccttttaagtaaaatcaattgtaccaatatgtaattattgtacga

SEQ ID NO: 50337 - DNA, 110 bp, synthetic construct
  source 1..110: mol_type = other DNA
tattatgccaatcgtcagtgcattagattagatcctgtatgtttttcatgagtaacgttggtcctatccacgtgttcttctttgatcatctacccaggcacacagctttg

SEQ ID NO: 50338 - DNA, 110 bp, synthetic construct
  source 1..110: mol_type = other DNA
cgttggtcctatccacgtgttcttctttgatcatctacccaggcacacagctttgctgatttcttaattttcaaaagaacatatcatatctttcacttagtggagtgtaa

SEQ ID NO: 50339 - DNA, 110 bp, synthetic construct
  source 1..110: mol_type = other DNA
aactccgcattatttattcttatccctgctctgttctcttcttctccctctaatcttggttttcaactgctcccttttctatcccttcattttctggtgaaactcagctc

SEQ ID NO: 50340 - DNA, 110 bp, synthetic construct
  source 1..110: mol_type = other DNA
ttggttttcaactgctcccttttctatcccttcattttctggtgaaactcagctcctaggtgaatagtctcccttggatcctcagttttaatccactaattcctttaccc

SEQ ID NO: 50341 - DNA, 110 bp, synthetic construct
  source 1..110: mol_type = other DNA
tgtctatgcactccccacactggccttcctatagttcttcctgtgagccatggattctcttcctaatttgtatgcacactggcccctctacctgaaatgttctttctcca

SEQ ID NO: 50342 - DNA, 110 bp, synthetic construct
  source 1..110: mol_type = other DNA
ccagaactcaaatccagaccaatctggccctaaaatcatgtgctcccagcatgtcagagtctcctgtgactaattcagtatctgactttaagaccactgaaggaatgggg

SEQ ID NO: 50343 - DNA, 110 bp, synthetic construct
  source 1..110: mol_type = other DNA
tccctcttttggctccttgattcactgaagcttctttgctgagaattggaggagtaacagggtctggaaataaaatagtctccctggcctgggtaatgagcactgtcctg

SEQ ID NO: 50344 - DNA, 110 bp, synthetic construct
  source 1..110: mol_type = other DNA
ttgaagcacgaactcatttagtcatttggcccagaaataccactatagtttttcctcttacttttcggaaagtttcttctcctataacctcttcagtagaagggaggcag

SEQ ID NO: 50345 - DNA, 110 bp, synthetic construct
  source 1..110: mol_type = other DNA
tcttacttttcggaaagtttcttctcctataacctcttcagtagaagggaggcagtatgaggaagtatttttcacctatccaagtgcagcttttaccaccagattgataa

SEQ ID NO: 50346 - DNA, 110 bp, synthetic construct
  source 1..110: mol_type = other DNA
actgagccccagagagggcagtaacttcctcaagatttcagggctagtaagcaacaaaggggggatttgatcccaggcagctccagagtctactctcaaccaccatgctc

SEQ ID NO: 50347 - DNA, 110 bp, synthetic construct
  source 1..110: mol_type = other DNA
aagtgagaaatttggggctttgtggaagtattgctcaaggattgcaaagcccaacaatgttttattctcagtccaaactccatttggaagtgagacatttactaaaactc

SEQ ID NO: 50348 - DNA, 110 bp, synthetic construct
  source 1..110: mol_type = other DNA
aatgttttattctcagtccaaactccatttggaagtgagacatttactaaaactcttagtctacttaggctactgtaacaaagtgaatgagtcatgatataaatatatcc

SEQ ID NO: 50349 - DNA, 110 bp, synthetic construct
  source 1..110: mol_type = other DNA
tctctgaacgttcccatgtcctccactctccctcatctctgctgttcccgatacgtctatcctcaggtctagaacagcattcggtcagctgacttactgatgggaggctg

SEQ ID NO: 50350 - DNA, 110 bp, synthetic construct
  source 1..110: mol_type = other DNA
tctatcctcaggtctagaacagcattcggtcagctgacttactgatgggaggctgcgtctcccttagggaagtctgctctgcccatgtgggctgtgatgagtgccctcca

SEQ ID NO: 50351 - DNA, 110 bp, synthetic construct
  source 1..110: mol_type = other DNA
tcctgggacagaccacctccacttagacataccaccattagcacggcgccttgtaagaagccttccttcccagcttaaccaggattacgtaatcgaataaatgtaacaca

SEQ ID NO: 50352 - DNA, 110 bp, synthetic construct
  source 1..110: mol_type = other DNA
cctcaccaacatctatatccagaagcccccccccccccggagtaattacagaattcactccgtccaccaacaaatatctgagcgtgtactaggtgtcaggcccacgtcta

SEQ ID NO: 50353 - DNA, 110 bp, synthetic construct
  source 1..110: mol_type = other DNA
cactccgtccaccaacaaatatctgagcgtgtactaggtgtcaggcccacgtctaaatgcctgagacatatcagtgaagacaaatacaaagctgaaagtctagtgggaat

SEQ ID NO: 50354 - DNA, 110 bp, synthetic construct; identical to SEQ ID NO: 50352
  source 1..110: mol_type = other DNA

SEQ ID NO: 50355 - DNA, 110 bp, synthetic construct; identical to SEQ ID NO: 50353
  source 1..110: mol_type = other DNA

SEQ ID NO: 50356 - DNA, 110 bp, synthetic construct
  source 1..110: mol_type = other DNA
cgtgtgtgtggagcttccacgccgctcctggcctgtcctgagcactgggcatttaaagagagtggaaggtcagcgtccctgtctctgtggagcttctatcctggtggagg

SEQ ID NO: 50357 - DNA, 110 bp, synthetic construct
  source 1..110: mol_type = other DNA
aagagagtggaaggtcagcgtccctgtctctgtggagcttctatcctggtggagggaacagaggggaacgcaggcggacaaatggatgtagacgcgtaggttgtgattag

SEQ ID NO: 50358 - DNA, 110 bp, synthetic construct
  source 1..110: mol_type = other DNA
acacggaggcccacttcctcctaagtgaagcccttggcagctgagcctctgcagatggcggactccctggtttgctgtcagataaagccctgtgctccatgcaatgccat

SEQ ID NO: 50359 - DNA, 110 bp, synthetic construct
  source 1..110: mol_type = other DNA
tggcggactccctggtttgctgtcagataaagccctgtgctccatgcaatgccatgcatgttaatggtctgagctgcctcctccccgcctgcccgccatccaggatgcat

SEQ ID NO: 50360 - DNA, 110 bp, synthetic construct
  source 1..110: mol_type = other DNA
tgaggctcaaaagcataaactttcaccttgaccctagtccctcccgttcacgctcctctctccccacagatgcacagacactcctcccgccgtgtccccatcctgtgaca

SEQ ID NO: 50361 - DNA, 110 bp, synthetic construct
  source 1..110: mol_type = other DNA
gcaagaagcccagtctcttcatttgcttagacctccatgggttagcatagaaatcctgtctaatcccaaggaagctgaccctcatgactctgtgaaagagatatgcttat

SEQ ID NO: 50362 - DNA, 110 bp, synthetic construct
  source 1..110: mol_type = other DNA
aaaatgacctcccagaaatgaggattaggagatggagaggggaagggaggctcgagggagataggccctctagcacaaagcttcagtttagcattcttttgctttgcact

SEQ ID NO: 50363 - DNA, 110 bp, synthetic construct
  source 1..110: mol_type = other DNA
agcacctaacacagttccaggcatgtcagaggcattcagttaatgtagcaggataaaagaatgagtaaatcttaaatccaaagttccattctgagtttatcctaataact

SEQ ID NO: 50364 - DNA, 110 bp, synthetic construct
  source 1..110: mol_type = other DNA
aaagaatgagtaaatcttaaatccaaagttccattctgagtttatcctaataactggatcctaattacagacttatcttcccaaagcactgacctctctaagacactgca

SEQ ID NO: 50365 - DNA, 110 bp, synthetic construct
  source 1..110: mol_type = other DNA
actctatgacacctgctctcccctgtgctcttgcctacagaagataccttatagcgtttccaaccaccagaaagcaagggtggtttagttgcctagaaccattctatgtg

SEQ ID NO: 50366 - DNA, 110 bp, synthetic construct
  source 1..110: mol_type = other DNA
gtttccaaccaccagaaagcaagggtggtttagttgcctagaaccattctatgtggcagctgtctacaccaagattcctgctccctacccgcaccccccccccagcccag

SEQ ID NO: 50367 - DNA, 110 bp, synthetic construct
  source 1..110: mol_type = other DNA
ggatgccgaaggtgaaggcgctgcaatgcgccctggcgctggagatccgctctgtgagtactggtcgcgccccctacgcctccgcctgggtgtcttgagcccccggaatt

SEQ ID NO: 50368 - DNA, 110 bp, synthetic construct
  source 1..110: mol_type = other DNA
gagtactggtcgcgccccctacgcctccgcctgggtgtcttgagcccccggaatttactttggacgctgcctccattcacttccgagaaccccggatcacctcgaaacct

SEQ ID NO: 50369 - DNA, 110 bp, synthetic construct
  source 1..110: mol_type = other DNA
gaaagtagaataagaaagtggtaaatggagtccgaatagctggcatggaaaatgatcctgactgctgcgtacaaaggggacatgaagtcttggtgtgcgttcagtgcagt

SEQ ID NO: 50370 - DNA, 110 bp, synthetic construct
  source 1..110: mol_type = other DNA
tcctgactgctgcgtacaaaggggacatgaagtcttggtgtgcgttcagtgcagtagtctatatgaagatgggagatgatagtggtttttagtctaataataactatagc

SEQ ID NO: 50371 - DNA, 110 bp, synthetic construct
  source 1..110: mol_type = other DNA
ctggggtctaatcagaactacggctgccagcctgagtcacagccacagcaacatcagatccgagatgagtctgtgacctacatggcagctcacggcaacgccagatcctt

SEQ ID NO: 50372 - DNA, 110 bp, synthetic construct; identical to SEQ ID NO: 50371
  source 1..110: mol_type = other DNA

SEQ ID NO: 50373 - DNA, 110 bp, synthetic construct
  source 1..110: mol_type = other DNA
ctcctcttgactgtatatttttaagtaacatacattggctgtagttttcatctcttgatcattgctctgattaatttgatgactttaccaagatgtaataccctagtgaa

SEQ ID NO: 50374 - DNA, 110 bp, synthetic construct; identical to SEQ ID NO: 50373
  source 1..110: mol_type = other DNA

SEQ ID NO: 50375 - DNA, 110 bp, synthetic construct
  source 1..110: mol_type = other DNA
agttagacctgagtaagtgtattacttcaaaggataaatgatcatgggcaagctttctttttcagtcacagaaaagagagcaatatgctaaaagtcacagctctgcggca

SEQ ID NO: 50376 - DNA, 110 bp, synthetic construct
  source 1..110: mol_type = other DNA
tctttttcagtcacagaaaagagagcaatatgctaaaagtcacagctctgcggcacaatcacagcccctatgccgatatgagaggacactctgtcacatctctctcatat

SEQ ID NO: 50377 - DNA, 110 bp, synthetic construct
  source 1..110: mol_type = other DNA
ccctgccactgtgctgccatgccccatcctgccctctgtccaaaggttgcttccgcaaaggccacgaccacaaggaaagtttaaagcttgttttcaaccttcttggatac

SEQ ID NO: 50378 - DNA, 110 bp, synthetic construct
  source 1..110: mol_type = other DNA
tccagatataccccgttagatataaagtagcaacaaatataaaccatcgacagaagcctttcaggatatttgctgttttttctattatttttgacaacactttagaaaaa

SEQ ID NO: 50379 - DNA, 110 bp, synthetic construct
  source 1..110: mol_type = other DNA
gcctttcaggatatttgctgttttttctattatttttgacaacactttagaaaaagctggctctataaaccacctacatctttacaaatttctccttagtggtcattctt

SEQ ID NO: 50380 - DNA, 110 bp, synthetic construct
  source 1..110: mol_type = other DNA
ccattccttacaaaagatggcctggattctgttcagcacaagacacagcttctgttctaattttctcaccaggtgctttatcctatgctgttgttgaagtgaaggttcag

SEQ ID NO: 50381 - DNA, 110 bp, synthetic construct
  source 1..110: mol_type = other DNA
tctaattttctcaccaggtgctttatcctatgctgttgttgaagtgaaggttcaggctttggccaaggtcaagggttgctctgtcccaggctgaggcttcactttgtgat

SEQ ID NO: 50382 - DNA, 110 bp, synthetic construct
  source 1..110: mol_type = other DNA
acgtgtttcatggaatcctgtagcctttagaaccactgtggtgtttggcaactgtagactcttgcctctccatgccaaagccagcctttgcccaggttgagctctattct

SEQ ID NO: 50383 - DNA, 110 bp, synthetic construct
  source 1..110: mol_type = other DNA
agactcttgcctctccatgccaaagccagcctttgcccaggttgagctctattctaggacgtcgtctgcctgtgagttctttgagcatccagacacctggggcacagagc

SEQ ID NO: 50384 - DNA, 110 bp, synthetic construct
  source 1..110: mol_type = other DNA
ggggtctgagggcagagcggcctgtgctagcattggggttttgcttctgggtggaggagctacctgttggggatggatgcgtcccacctgctttgctcgctggagcatct

SEQ ID NO: 50385 - DNA, 110 bp, synthetic construct
  source 1..110: mol_type = other DNA
ggagctacctgttggggatggatgcgtcccacctgctttgctcgctggagcatctgagggatgaaaatcgaagcgttgccagtttgcgcccagcttttcccgaggccctg

SEQ ID NO: 50386 - DNA, 110 bp, synthetic construct
  source 1..110: mol_type = other DNA
tgcagctccaattcgacccctcctagcctgggagcttccatgtgagaaagtgcaaaatggttaaaatagagagaagaggagctgaaggtccaggtcctgttggaaaactg

SEQ ID NO: 50387 - DNA, 110 bp, synthetic construct
  source 1..110: mol_type = other DNA
aatggttaaaatagagagaagaggagctgaaggtccaggtcctgttggaaaactgcaattatttgctccccactaatcgcagagcctggcgctgagcctggtgctgtgcc

SEQ ID NO: 50388 - DNA, 110 bp, synthetic construct
  source 1..110: mol_type = other DNA
ataacaccagctgaccagatccagcatagataagaaggataatgtctcacgatgaagtgggtgttatcctgggattacaaggctggtttgatattcagaagtcaatgtaa

SEQ ID NO: 50389 - DNA, 110 bp, synthetic construct
  source 1..110: mol_type = other DNA
ctcaaacaaacacataccaaacgaaaggaaacctagctcagaacctgaccttgcatcttgcctctgttatcacctggctgtgaccttggacaaactactctccctctctg

SEQ ID NO: 50390 - DNA, 110 bp, synthetic construct
  source 1..110: mol_type = other DNA
tacctcagggcctttgcacttgctgctctcgctgtccttctcttggatatccacgtgaccgcttctctcgtctcctgcaggtctcttctcagtgtcacttctcactgcag

SEQ ID NO: 50391 - DNA, 110 bp, synthetic construct
  source 1..110: mol_type = other DNA
gtggccaagtgcaagccgggaggagagccttccccaggagccaaagctgccagcgccttgatcttggatgtctcagactccagaacgatgagaagacacatgcctgttgg

SEQ ID NO: 50392 - DNA, 110 bp, synthetic construct
  source 1..110: mol_type = other DNA
tgataacagcacctacttcatagtgttgatgtgagaactgaacacaatgctttgtttggcgcttagaagaacagctggcacaaagcaggtgaggagaaatgttagcctgg

SEQ ID NO: 50393 - DNA, 110 bp, synthetic construct
  source 1..110: mol_type = other DNA
ttggcgcttagaagaacagctggcacaaagcaggtgaggagaaatgttagcctgggctgtgagtgatgccagcacggtctgtggctgcgggtcaccttcatttgttaggc

SEQ ID NO: 50394 - DNA, 110 bp, synthetic construct
  source 1..110: mol_type = other DNA
tcctctgattctcactgtgcagcggtgcccaggaaacggtgatggtgggtatcaccattactaaggagttgctgtggcttccaagtccggcctctcggcttcgttgccgt

SEQ ID NO: 50395 - DNA, 110 bp, synthetic construct
  source 1..110: mol_type = other DNA
cattactaaggagttgctgtggcttccaagtccggcctctcggcttcgttgccgttgtggagacggctcagtcctctagcctctcgctgggcctccgttcctgtggctcg

SEQ ID NO: 50396 - DNA, 110 bp, synthetic construct
  source 1..110: mol_type = other DNA
tccagcatcacttgttgtctcagagcactcctctcctctgcgcatttgtcaccattctaactacctattggtgtacctctcccattggaatgtagcttctccaaggcctg

SEQ ID NO: 50397 - DNA, 110 bp, synthetic construct
  source 1..110: mol_type = other DNA
acattttaagaggcccggacagatgctgccttaccacctgaacttgaaacttcgaggttccatttccaccgctttctattggttaagctagtgactaaggccacccagat

SEQ ID NO: 50398 - DNA, 110 bp, synthetic construct
  source 1..110: mol_type = other DNA
ggttccatttccaccgctttctattggttaagctagtgactaaggccacccagattccagaagaagagaattagactccacctcctgacaaggggacggcaattcccaat

SEQ ID NO: 50399 - DNA, 110 bp, synthetic construct
  source 1..110: mol_type = other DNA
atgatcccaagcatgataccacattacatttagttgacatctctcttcaggcttctcctagctagtttctcagactttccttgttctgataaccttgacagctctgacaa

SEQ ID NO: 50400 - DNA, 110 bp, synthetic construct
  source 1..110: mol_type = other DNA
tattcatcactgtcttctttagcaccttgaatagcacttcatttaaaatagctgtttagtacatattttgtaacttgaatgcatgaagaaggccaccagaaagattatac

SEQ ID NO: 50401 - DNA, 110 bp, synthetic construct
  source 1..110: mol_type = other DNA
ttagtacatattttgtaacttgaatgcatgaagaaggccaccagaaagattataccaatgtaacactccaaaacagttttcccacatattaggcatcttaaattattatt

SEQ ID NO: 50402 - DNA, 110 bp, synthetic construct
  source 1..110: mol_type = other DNA
tggatgtagacatgttacacgtaagccttgcttttgccagctctcaagactctagggagaacagagacacactggaaacagtcctacagcagtacgagacagtgtatgat

SEQ ID NO: 50403 - DNA, 110 bp, synthetic construct
  source 1..110: mol_type = other DNA
agccttcaggtagcctcaaggaaggacttttgagtgggactgaggcagaataatgtttcggatgtccagcctgggctcctcgtgatacagggaggcactagagacacagc

SEQ ID NO: 50404 - DNA, 110 bp, synthetic construct
  source 1..110: mol_type = other DNA
cacagccagtgaaagcacagggcaggatccttcagacagatgtctgggcacccaggcaagctcagggcagagaagatggcactgagtaactggggcagggaagcctctaa

SEQ ID NO: 50405 - DNA, 110 bp, synthetic construct
  source 1..110: mol_type = other DNA
gcaagctcagggcagagaagatggcactgagtaactggggcagggaagcctctaaaagcctgtttgtgggaacagctgaagctgcagagcctggagaggggtagactctg

SEQ ID NO: 50406 - DNA, 110 bp, synthetic construct
  source 1..110: mol_type = other DNA
gcatgtcccatctactgacattctctccttcacacagaagcacttttttcagcatccagactctactcctaacctaagtgtgtgacgctggcagctgagacagggtgtgt

SEQ ID NO: 50407 - DNA, 110 bp, synthetic construct
  source 1..110: mol_type = other DNA
ccagactctactcctaacctaagtgtgtgacgctggcagctgagacagggtgtgtgactccactcacttcaccctccccgttgggagaacagcagctcacagtctttgtc

SEQ ID NO: 50408 - DNA, 110 bp, synthetic construct
  source 1..110: mol_type = other DNA
atatatttaaagtactgagatgcaatacaatctgtgcaggatttggtgtgggtcctgccctcaacaagctcatactttagtataggagacaggccccattcgcaaggttg

SEQ ID NO: 50409 - DNA, 110 bp, synthetic construct
  source 1..110: mol_type = other DNA
tgccctcaacaagctcatactttagtataggagacaggccccattcgcaaggttgcagtataccatgttaagggcgatgagacaacacgatggtgaccacagacatttag

SEQ ID NO: 50410 - DNA, 110 bp, synthetic construct
  source 1..110: mol_type = other DNA
ctgggactagctgacacatactcattcaccgaacaaatactgagccttgttccatgcaggggctctgccaggtgtcctggagatgttctgccctcccggagctcacagaa

SEQ ID NO: 50411 - DNA, 110 bp, synthetic construct
  source 1..110: mol_type = other DNA
gcaggggctctgccaggtgtcctggagatgttctgccctcccggagctcacagaataagagcagagcccacttggtgagcgtggagtgggaaagatatatcagaaatctg

SEQ ID NO: 50412 - DNA, 110 bp, synthetic construct
  source 1..110: mol_type = other DNA
tcgaattactgaggaaggagtccgtctcctgacttaatagcaaacgcttctccaaaaactggccaactccatctgcgcggaaagcctaattctcttcccttgcaatagca

SEQ ID NO: 50413 - DNA, 110 bp, synthetic construct
  source 1..110: mol_type = other DNA
tgaataacgcagagcaacaaattactgacttggaagatagaagaatagaaatcacccaatcaggacagcaaacaggaccaaggctgggcagcaagaccagtgtgacctgt

SEQ ID NO: 50414 - DNA, 110 bp, synthetic construct
  source 1..110: mol_type = other DNA
gatagaagaatagaaatcacccaatcaggacagcaaacaggaccaaggctgggcagcaagaccagtgtgacctgttaggaaagggggtcgggccgggtcactcggacagc

SEQ ID NO: 50415 - DNA, 110 bp, synthetic construct
  source 1..110: mol_type = other DNA
tccgccagtaccagtcattggcagagagctcagcaagcccatcaccttccctgatggacgctccttacctgcaggtatgagcgtcaccacacccactaacctcagcatct

SEQ ID NO: 50416 - DNA, 110 bp, synthetic construct
  source 1..110: mol_type = other DNA
ggacgctccttacctgcaggtatgagcgtcaccacacccactaacctcagcatctgcaggaacacatgggagatcagacatccacatatgccagcccatttcagacatgc

SEQ ID NO: 50417 - DNA, 110 bp, synthetic construct
  source 1..110: mol_type = other DNA
ccttgagggctgctgtgaggcttcaacaagttaatgcatatcccccgggggccctaggggggcacttcacaaatgtgagttcgcacccgagtcactcctaaaaggaagcc

SEQ ID NO: 50418 - DNA, 110 bp, synthetic construct
  source 1..110: mol_type = other DNA
aggggggcacttcacaaatgtgagttcgcacccgagtcactcctaaaaggaagcctccaggtctttggactctcagggctgggtcacggttccgggctcctggtctttga

SEQ ID NO: 50419 - DNA, 110 bp, synthetic construct
  source 1..110: mol_type = other DNA
gcggcatcgggatgggtggccttgagggatccggggcgaactcaaaacggagcaagctgagggctgcgaccaccttcatttctttcatggcaaacgctgcccgatgcagt

SEQ ID NO: 50420 - DNA, 110 bp, synthetic construct
  source 1..110: mol_type = other DNA
gctgagggctgcgaccaccttcatttctttcatggcaaacgctgcccgatgcagttcctgtggcaagcagcacaaagtgacatcaggctgtgggttgccagggggatgaa

SEQ ID NO: 50421 - DNA, 110 bp, synthetic construct
  source 1..110: mol_type = other DNA
acagaggggaggctgccctgagtaagagggatgagtaagagacagtggccagccagagaagctctggaaccgtcacagaggaaggacccagacagagatgagctgaggcc

SEQ ID NO: 50422 - DNA, 110 bp, synthetic construct
  source 1..110: mol_type = other DNA
gagaagctctggaaccgtcacagaggaaggacccagacagagatgagctgaggcccagcaagcagggagcagctaagcgagggcagacctcgcctgggacagggtggaca

SEQ ID NO: 50423 - DNA, 110 bp, synthetic construct; identical to SEQ ID NO: 50421
  source 1..110: mol_type = other DNA

SEQ ID NO: 50424 - DNA, 110 bp, synthetic construct; identical to SEQ ID NO: 50422
  source 1..110: mol_type = other DNA

SEQ ID NO: 50425 - DNA, 110 bp, synthetic construct
  source 1..110: mol_type = other DNA
ccccttggcaaccacaagcctattctcttcgactgtggtctgtttttgttttataggtaggttcattcatcaggcacattcgttcttcacagctactctatgagttagtt

SEQ ID NO: 50426 - DNA, 110 bp, synthetic construct
  source 1..110: mol_type = other DNA
atctgagatccttccattctaagaggcaaaacaaattcttctgaattctggatgggcccagctgggtgatctgcctgtatcttcctacctcccaatgccaggcacacagt

SEQ ID NO: 50427 - DNA, 110 bp, synthetic construct
  source 1..110: mol_type = other DNA
aacctctagtgacttccattgtgtgtggtataaaatgaaacagtgctttattcctctttgtctcaccagtgcctaatagagctggacacatagtaggtgcttaagaaata

SEQ ID NO: 50428 - DNA, 110 bp, synthetic construct
  source 1..110: mol_type = other DNA
cttcaatcaccacgtcctaaagccctagactgtaacgagatctccaacttggatagtgctgcggacagggagctcatcccccaccccgggggcatcgcacatgactccca

SEQ ID NO: 50429 - DNA, 110 bp, synthetic construct
  source 1..110: mol_type = other DNA
gtgctgcggacagggagctcatcccccaccccgggggcatcgcacatgactcccaccctccagccaaccagactgtgagcctctccagggcagggtcctcccccaggggt

SEQ ID NO: 50430 - DNA, 110 bp, synthetic construct
  source 1..110: mol_type = other DNA
acaaaggaagtttcacattcattatacagtgggctggggaagcacagagacaggaactcagtctgccttaaaggaatcagaggcggctttctggagggcgtggaaatcca

SEQ ID NO: 50431 - DNA, 110 bp, synthetic construct
  source 1..110: mol_type = other DNA
actcagtctgccttaaaggaatcagaggcggctttctggagggcgtggaaatccaggcaagtgagaacagacagaaaagggcacttagacaaagacaatgtgtcaggacg

SEQ ID NO: 50432 - DNA, 110 bp, synthetic construct
  source 1..110: mol_type = other DNA
tttctaaagcaccttccttcacctctcctagtttaggtgagcatcacaacagacagctctgtgggatatagaaaatatcaacattctccatttgatgggaagacgagggc

SEQ ID NO: 50433 - DNA, 110 bp, synthetic construct
  source 1..110: mol_type = other DNA
gctctgtgggatatagaaaatatcaacattctccatttgatgggaagacgagggcaacttacctaaggtcatgcagtgactgacagcacaatgctcagaatcacagggct

SEQ ID NO: 50434 - DNA, 110 bp, synthetic construct
  source 1..110: mol_type = other DNA
ggatctggctgtgtcagcctggagcttctaggacactaaaattggctaggagggaagaggactgggggtggtgggccaggttgggaacgggaagcattaaaggtgccggc

SEQ ID NO: 50435 - DNA, 110 bp, synthetic construct
  source 1..110: mol_type = other DNA
gcctgtttggcctcgagtccagagcagccaaatgggcctctgatccaagtggcaccattagatccctccccaccctgatcacagcctcttggcagtgccagggtacctcc

SEQ ID NO: 50436 - DNA, 110 bp, synthetic construct
  source 1..110: mol_type = other DNA
cattagatccctccccaccctgatcacagcctcttggcagtgccagggtacctccttcctggtcgtaggtagcagcagcaggggcggaggcggaggcagacttatttcag

SEQ ID NO: 50437 - DNA, 110 bp, synthetic construct
  source 1..110: mol_type = other DNA
tgttttttaatgtaaataatgtgaattccagccttgttttgtgtgataaattaagtttgaaacgttcaaagctaagtaaattcttagggaagaggctgcagcgtggcttg

SEQ ID NO: 50438 - DNA, 110 bp, synthetic construct
  source 1..110: mol_type = other DNA
ctgcaaaaaaataaagataaaacaggtaatttaatgagctgtgaaaagggagcatcagtagggaaagcacattttaaaaataactagtaacttaccaatactgactttgg

SEQ ID NO: 50439 - DNA, 110 bp, synthetic construct
  source 1..110: mol_type = other DNA
ggattcaatcccttgcattgctttgtgggttaaggttccatcattgctgcaagctgcagtatggttcacacatgcagcttggatccgctgttgctgtggctgtgatagag

SEQ ID NO: 50440 - DNA, 110 bp, synthetic construct
  source 1..110: mol_type = other DNA
tgggttaaggttccatcattgctgcaagctgcagtatggttcacacatgcagcttggatccgctgttgctgtggctgtgatagaggccagaagctgcagctcctattcaa

SEQ ID NO: 50441 - DNA, 110 bp, synthetic construct
  source 1..110: mol_type = other DNA
tattacctaggatggtgactctaggaaaggggttgagaaatcaaaggaaggggcaatgtggagctgagggctgaaaggatttcgaaatagaataggtatgaggatacagg

SEQ ID NO: 50442 - DNA, 110 bp, synthetic construct
  source 1..110: mol_type = other DNA
atgtggagctgagggctgaaaggatttcgaaatagaataggtatgaggatacaggggagttaagtgactgtggtttgaacctgctgggcttagaatgaatgtgccattaa

SEQ ID NO: 50443 - DNA, 110 bp, synthetic construct
  source 1..110: mol_type = other DNA
tagtttaaaagcaaatcgaaaatgaccctcaaaattatactcatacacacgttaccttctttcatagctctctgcctagagactgggaactaacgttggtcaccttgcct

SEQ ID NO: 50444 - DNA, 110 bp, synthetic construct
  source 1..110: mol_type = other DNA
cttctttcatagctctctgcctagagactgggaactaacgttggtcaccttgcctctaactttacaacattctacagagcaagattatctcccaggttctgcaacagata

SEQ ID NO: 50445 - DNA, 110 bp, synthetic construct; identical to SEQ ID NO: 50443
  source 1..110: mol_type = other DNA

SEQ ID NO: 50446 - DNA, 110 bp, synthetic construct; identical to SEQ ID NO: 50444
  source 1..110: mol_type = other DNA

SEQ ID NO: 50447 - DNA, 110 bp, synthetic construct
  source 1..110: mol_type = other DNA
tagtcatggcttcccttcctgagaaacttgacaactccccactgtttacagaattaagccacacttttaaaacactaaaaagatcctccataaatccttcctggcctcag

SEQ ID NO: 50448 - DNA, 110 bp, synthetic construct
  source 1..110: mol_type = other DNA
aagccacacttttaaaacactaaaaagatcctccataaatccttcctggcctcagctctttccactctttcgaaactgattcattcattcaccttcagtcttctgccctg

SEQ ID NO: 50449 - DNA, 110 bp, synthetic construct
  source 1..110: mol_type = other DNA
ctcatggttcctcgtcggttttgttaacgttgagccacagcgagaacttcggtttgtgtgtcttttgaatcactagtgagactgagcattttcttagatgtttatagaat

SEQ ID NO: 50450 - DNA, 110 bp, synthetic construct; identical to SEQ ID NO: 50449
  source 1..110: mol_type = other DNA

SEQ ID NO: 50451 - DNA, 110 bp, synthetic construct
  source 1..110: mol_type = other DNA
tttccactgagccatgatgggaactccactcctttagtgttttaactttagggacttgaacatttagttttaccaaggagcaaacctgtgccacagctgtaaccagagcc

SEQ ID NO: 50452 - DNA, 110 bp, synthetic construct
  source 1..110: mol_type = other DNA
agtgttttaactttagggacttgaacatttagttttaccaaggagcaaacctgtgccacagctgtaaccagagccatagcagcgacaacactggatcattaacctgctga

SEQ ID NO: 50453 - DNA, 110 bp, synthetic construct
  source 1..110: mol_type = other DNA
cacgcttagcggaagactttctactttattgagaagataagaaacaatcagaatagatgttctgagctctcactgcagtagtgctcaggtactctgccttcccaactgtc

SEQ ID NO: 50454 - DNA, 110 bp, synthetic construct
  source 1..110: mol_type = other DNA
gatgttctgagctctcactgcagtagtgctcaggtactctgccttcccaactgtcaccacaaatgatgtgcaaacctaccaaaggctgatctctgctagtgcatcaaatc

SEQ ID NO: 50455 - DNA, 110 bp, synthetic construct
  source 1..110: mol_type = other DNA
aaaaaaaagggggggggtgagttcccattgtgactcagcaggttatgaacccagtatagtctccataaggattcaccttccactcctggcctcactcagtgggtgaagga

SEQ ID NO: 50456 - DNA, 110 bp, synthetic construct
  source 1..110: mol_type = other DNA
atagtctccataaggattcaccttccactcctggcctcactcagtgggtgaaggatctgctattgctgcaagctgcagtataaggtgcaggtgtggcttggatctgatgt

SEQ ID NO: 50457 - DNA, 110 bp, synthetic construct
  source 1..110: mol_type = other DNA
gttacctgcttactagagagaacgttgtgtggtgggaaagattttaaaacacacacatacacacagtatctccatggggcaacgcacaggttggagctggcagcgcagag

SEQ ID NO: 50458 - DNA, 110 bp, synthetic construct
  source 1..110: mol_type = other DNA
catacacacagtatctccatggggcaacgcacaggttggagctggcagcgcagagaggagacgctggtctgcagcagcagcttctactaccagcccttggggcctcaccc

SEQ ID NO: 50459 - DNA, 110 bp, synthetic construct
  source 1..110: mol_type = other DNA
aagctattttttctccttctccaaaaactctgtctatttggcaccagtgagcagaggccgagttccagcaacaggagttcctgctgtggtgcaataggattggcagcatc

SEQ ID NO: 50460 - DNA, 110 bp, synthetic construct; identical to SEQ ID NO: 50459
  source 1..110: mol_type = other DNA

SEQ ID NO: 50461 - DNA, 110 bp, synthetic construct
  source 1..110: mol_type = other DNA
aggcctttcttgcaggggttagggaggccagacttttcttcctcgggaggaaatggcctgcgctttaattacgtggcaggccaactggtgtgtcagtagcagggtttcac

SEQ ID NO: 50462 - DNA, 110 bp, synthetic construct
  source 1..110: mol_type = other DNA
gcctgcgctttaattacgtggcaggccaactggtgtgtcagtagcagggtttcacttttgaccttttgtagttcctattaaacctgaactgagactttgttgattcttca

SEQ ID NO: 50463 - DNA, 110 bp, synthetic construct
  source 1..110: mol_type = other DNA
tttttctttgtgtttctatcagagcaggatttgtttataggccattttgtgaagtagatattaatagaagctcaggattattattggattgtacactatagatggattgt

SEQ ID NO: 50464 - DNA, 110 bp, synthetic construct; identical to SEQ ID NO: 50463
  source 1..110: mol_type = other DNA

SEQ ID NO: 50465 - DNA, 110 bp, synthetic construct
  source 1..110: mol_type = other DNA
tagcgcttggaagagaggcctagattggaagcatacatctgagttattgagatatagctagttattaaagacatgggtgtgggcgaaattgtgtagcgagagaaggctga

SEQ ID NO: 50466 - DNA, 110 bp, synthetic construct
  source 1..110: mol_type = other DNA
agctagttattaaagacatgggtgtgggcgaaattgtgtagcgagagaaggctgaatgagaagggaggtgccataaaaatatctgcagtccagggcagggaaaacgaacc

SEQ ID NO: 50467 - DNA, 110 bp, synthetic construct
  source 1..110: mol_type = other DNA
ccaagtgtggttcagcatgtttttgagtggggtgggagggattatgattagtccctttactgttgagggttcagaaataattctttcttaaaatagcttgagcttcgttg

SEQ ID NO: 50468 - DNA, 110 bp, synthetic construct
  source 1..110: mol_type = other DNA
agtggggtgggagggattatgattagtccctttactgttgagggttcagaaataattctttcttaaaatagcttgagcttcgttgttttaaaaaattacgtactaattaa

SEQ ID NO: 50469 - DNA, 110 bp, synthetic construct
  source 1..110: mol_type = other DNA
tgtgaatggcattgttttgttccttttttatggattagtagtattccattgtatatgtgtagctaatccattcacctattaatggacatttaggttgtttccctgccttg

SEQ ID NO: 50470 - DNA, 110 bp, synthetic construct
  source 1..110: mol_type = other DNA
ttttatggattagtagtattccattgtatatgtgtagctaatccattcacctattaatggacatttaggttgtttccctgccttggctgtggtgaacagtgctgcagtga

SEQ ID NO: 50471 - DNA, 110 bp, synthetic construct
  source 1..110: mol_type = other DNA
ggaccttaccagtcatccagctccattgatgcatttttacacatgaatcggttgtggcagtttttgccttactgtacccatgctactccttgcccccttccagtttcctg

SEQ ID NO: 50472 - DNA, 110 bp, synthetic construct
  source 1..110: mol_type = other DNA
ggcagtttttgccttactgtacccatgctactccttgcccccttccagtttcctgcatcagactgactgatgtcaccactctctcgagaaccagaaccacagttgccttt

SEQ ID NO: 50473 - DNA, 110 bp, synthetic construct
  source 1..110: mol_type = other DNA
ctcgcctggtgacctcttcatcgcaccacagtgcctccaaaacacgagtgtcttaagcacatccctcctcttttcaaaatccttccaaggctccctctatctacagataa

SEQ ID NO: 50474 - DNA, 110 bp, synthetic construct
  source 1..110: mol_type = other DNA
agcacatccctcctcttttcaaaatccttccaaggctccctctatctacagataaaatcctaaaacgtcttagtgccagagacaaaggccctctagtctcctttttttag

SEQ ID NO: 50475 - DNA, 110 bp, synthetic construct
  source 1..110: mol_type = other DNA
gactgcatctccctgccctcccggagccacaactcagttcccctcctcccttagctaataacttccagacaagtatcctgtgcggggccaggccggtggggggtggggca

SEQ ID NO: 50476 - DNA, 110 bp, synthetic construct
  source 1..110: mol_type = other DNA
taataacttccagacaagtatcctgtgcggggccaggccggtggggggtggggcaggtgggcctcccagagttccctgggattgggcttgattataaactgccgaaaagg

SEQ ID NO: 50477 - DNA, 110 bp, synthetic construct
  source 1..110: mol_type = other DNA
agctgaagaatgtcctgagcttctgatctagagctgctttgttgtcttcattcgctgcaccttcaacgtccatcagatcaccaatggccaaaggccaaagaaggaccact

SEQ ID NO: 50478 - DNA, 110 bp, synthetic construct
  source 1..110: mol_type = other DNA
ccgtggtgcaaaaagaaagagaaccgctgtttctaagacctctaagctaaaggcttcacaaagtcctgatgaagggaagagtctctgaaatgctgttgaattgggcgtgg

SEQ ID NO: 50479 - DNA, 110 bp, synthetic construct
  source 1..110: mol_type = other DNA
ttcacgaaagagctggaaagtcttagggtcgcgagacatggtggaagctgaagagagcgcctgcttttgttcacgtgtaacccccacccccacgcgtgcaaggtctcagt

SEQ ID NO: 50480 - DNA, 110 bp, synthetic construct
  source 1..110: mol_type = other DNA
cattttgagtcttgtccagtataattgccactagccacctgtggcaatagagggcctgaaatgtagctgatgtgactaaggaacaaatttcaaatgttacttaattttaa

SEQ ID NO: 50481 - DNA, 110 bp, synthetic construct
  source 1..110: mol_type = other DNA
ttaaccatgatgggaaggccaagaatcatattttttaaagttgtcagttactgtagcaatagagagctctggaactgagaaactggaaatgttatcccaccgtctcccac

SEQ ID NO: 50482 - DNA, 110 bp, synthetic construct
  source 1..110: mol_type = other DNA
gtgttaactacttaactctcgtataagggctaaaggacaaaagtactgcatatagctatgcctacaataatttttaatacacgacataaaaatatgtccattatgacatc

SEQ ID NO: 50483 - DNA, 110 bp, synthetic construct
  source 1..110: mol_type = other DNA
ctatgcctacaataatttttaatacacgacataaaaatatgtccattatgacatcaaaccataaaatatgggaggggcagtaagagagtagaggttttgtatgcaatcac

SEQ ID NO: 50484 - DNA, 110 bp, synthetic construct
  source 1..110: mol_type = other DNA
aaaagccagaggctggatgtgaaatttagaccagacctggatttttctaagctgccccatcccgtggaccacaagaacgagactgactcagagtaatgccatctcactca

SEQ ID NO: 50485 - DNA, 110 bp, synthetic construct
  source 1..110: mol_type = other DNA
cccatcccgtggaccacaagaacgagactgactcagagtaatgccatctcactcacccgcaggcacaacatgtgtggtgggactgaagaggaaaagattcaagcggccct

SEQ ID NO: 50486 - DNA, 110 bp, synthetic construct
  source 1..110: mol_type = other DNA
ccagaacacagggcacgacttggccctgcaagactgctctctctctctgactgggggctgagcaggaggggagagctcacggctctgcagtgtctctcggacctggggtc

SEQ ID NO: 50487 - DNA, 110 bp, synthetic construct
  source 1..110: mol_type = other DNA
cagacagctaagaaaaccgttaagtacaacagagtgatgagtgttgctgttggggctcaaaagaggtgcatctaatacatccaggaaagagagagacaagacctggagct

SEQ ID NO: 50488 - DNA, 110 bp, synthetic construct
  source 1..110: mol_type = other DNA
ctcaaaagaggtgcatctaatacatccaggaaagagagagacaagacctggagctctgacaccaggcacaccctctagcccagatcatgcagcgctgggcggtggagtcg

SEQ ID NO: 50489 - DNA, 110 bp, synthetic construct
  source 1..110: mol_type = other DNA
agcagttgatagaattagatccttgataacagcccatcacagctatgtacatatattattcagtcagtcccctggggtagttccagtcttttgtagagcaggttccacca

SEQ ID NO: 50490 - DNA, 110 bp, synthetic construct
  source 1..110: mol_type = other DNA
ttattcagtcagtcccctggggtagttccagtcttttgtagagcaggttccaccaacagtggttacaacgaataactccatgcttaggtcttatctatttgccaatcttt

SEQ ID NO: 50491 - DNA, 110 bp, synthetic construct
  source 1..110: mol_type = other DNA
ctcgaatggctgctaatctctatccccatgggactgccttcggcagctcctacggcagcctccgaactgattttcacactccctagttcccgcctctagttcatcttcca

SEQ ID NO: 50492 - DNA, 110 bp, synthetic construct
  source 1..110: mol_type = other DNA
tcatgacagcaagtgggtccagaccatgccagtgcatctcctgctaaactgcaggagggttatcagggaaggcatgtcggaaaggcagcggggccaggaagcagaaaaaa

SEQ ID NO: 50493 - DNA, 110 bp, synthetic construct
  source 1..110: mol_type = other DNA
agggttatcagggaaggcatgtcggaaaggcagcggggccaggaagcagaaaaaacggctcactctgcagctggcatctgaaacttcgtggagcttagatcagtacacaa

SEQ ID NO: 50494 - DNA, 110 bp, synthetic construct
  source 1..110: mol_type = other DNA
ctctaccttccaggcttcgtgctttaacaccctggagcactttctgcctccctgatgacctgctccaagcaccactcaccctgtagggtctaaatttcaggagaagtaga

SEQ ID NO: 50495 - DNA, 110 bp, synthetic construct
  source 1..110: mol_type = other DNA
tgacctgctccaagcaccactcaccctgtagggtctaaatttcaggagaagtagaaggccctgcttggaccttgggtataaactgtgttctccaatctagtttcaggaaa

SEQ ID NO: 50496 - DNA, 110 bp, synthetic construct
  source 1..110: mol_type = other DNA
tggacatctgtatagggcacaaatatcacatttgcttttcttcttcttcttctttttttttttggctgccctatgacctatggaattcccaggccagggattagagccaa

SEQ ID NO: 50497 - DNA, 110 bp, synthetic construct
  source 1..110: mol_type = other DNA
tcttcaaccggtcacctgtctgttctgcagcaacatgaccatgtctaacagtacggctttcagaaggtcttcatatctgggttggcaggtccctcctgctctttacagag

SEQ ID NO: 50498 - DNA, 110 bp, synthetic construct
  source 1..110: mol_type = other DNA
gctttcagaaggtcttcatatctgggttggcaggtccctcctgctctttacagagataaataaagctagctcatagtttgggttttaagtaggtacagacttctgtaacg

SEQ ID NO: 50499 - DNA, 110 bp, synthetic construct
  source 1..110: mol_type = other DNA
aggcaggaccaggagaaggcggtgccttgaacctgagagacagacccactcacatccactaagacagacggacagccggacgaacggacagacacgcctgacgatgcacg

SEQ ID NO: 50500 - DNA, 110 bp, synthetic construct
  source 1..110: mol_type = other DNA
ccactaagacagacggacagccggacgaacggacagacacgcctgacgatgcacgtggacaagctctctgagggttgggcccctggtcacactcagggtcacgcccacgt

SEQ ID NO: 50501 - DNA, 110 bp, synthetic construct
  source 1..110: mol_type = other DNA
cctgtggctcctccacggggagggaggcggctgctcttttgtgccctccctgcggagcacacacacgcgtgtacacaaacacgtgtgcacacaaacatgcagccgccagg

SEQ ID NO: 50502 - DNA, 110 bp, synthetic construct
  source 1..110: mol_type = other DNA
agaattgcagggcagagcgcagttacacgcacagaactcggcttggaaatcctccgaggggctttcctccccgggagttttcgaaacagggagcagctactggaaaagtt

SEQ ID NO: 50503 - DNA, 110 bp, synthetic construct
  source 1..110: mol_type = other DNA
agattacctaatacccaagctttccccaccttgactgtgtgcacctgcaaagcttgacctctgtctggggaggcagaccacaaccacagccccgacacgtgcactagaac

SEQ ID NO: 50504 - DNA, 110 bp, synthetic construct
  source 1..110: mol_type = other DNA
ctacttgacggggatattgtgccagttaatcaggagagccaggacagtgaagaggaagcctgtcactctttggaacattcacaaggcctacataccatttacggcaagag

SEQ ID NO: 50505 - DNA, 110 bp, synthetic construct
  source 1..110: mol_type = other DNA
aagcctgtcactctttggaacattcacaaggcctacataccatttacggcaagaggaataaaacactgttaggcaccgtgctgcatgccatgtatgccacgatgaaggaa

SEQ ID NO: 50506 - DNA, 110 bp, synthetic construct
  source 1..110: mol_type = other DNA
aagcctgccagcctgtctgcaaacaggaggcatgtttccagctctctgatcacagagatgggaacctctgggaggctgctgggacggaggtcgcgcaggagaagagggtg

SEQ ID NO: 50507 - DNA, 110 bp, synthetic construct
  source 1..110: mol_type = other DNA
cagactccttggcccctcctcggcttaagctcttccatagtggttctccattgtcctcgggacagcacccgaccccttcgcacctcattttcaccatcttggccactgct

SEQ ID NO: 50508 - DNA, 110 bp, synthetic construct
  source 1..110: mol_type = other DNA
cgaggctaactccttccagtccttaggtcagaactctctgccccgcatctctgcggccaccatctcggcctcagcactgaccctctcacatgtggtcagccagtggcctc

SEQ ID NO: 50509 - DNA, 110 bp, synthetic construct
  source 1..110: mol_type = other DNA
gttgaaaggccttaaaaagtataactgagaatctcatcttcaaaagaaaaagcgaagtcaccagtgagcttctgaaagacattttattcatcgttgcatttgcattaacc

SEQ ID NO: 50510 - DNA, 110 bp, synthetic construct
  source 1..110: mol_type = other DNA
tgtggcatgtaagccacaacctgctcctttaccctccgcagctgtaggcgtcactcctgcgtagtctgggtaggtgtggccaaaagacagggctccctctctgcctagat

SEQ ID NO: 50511 - DNA, 110 bp, synthetic construct
  source 1..110: mol_type = other DNA
tgcatctccctgggccacggtctcttcccgcgtctagggggcagatggatcctgccgggagggcctcttcagagctgaagtgtgggccggtaacctgtgcgagaggagtc

SEQ ID NO: 50512 - DNA, 110 bp, synthetic construct
  source 1..110: mol_type = other DNA
cgggagggcctcttcagagctgaagtgtgggccggtaacctgtgcgagaggagtcagggccttggctcagagcacaggatggttatcgtttctgtcatggttccgaagaa

SEQ ID NO: 50513 - DNA, 110 bp, synthetic construct
  source 1..110: mol_type = other DNA
cttcctcaactaccggttctcaacccccgcccctcccctgagctgtcaccttgtcaggtcagattatgggacccaagccttcaatcctcaccccaaggcctgcattgcga

SEQ ID NO: 50514 - DNA, 110 bp, synthetic construct
  source 1..110: mol_type = other DNA
tggcgcacactctctatgtagctctgtgccgcccatcctgttcccccagcagcacttgcagtgtttctctctgcactgtcagcaagtccccttagacaggctcactcccc

SEQ ID NO: 50515 - DNA, 110 bp, synthetic construct
  source 1..110: mol_type = other DNA
gctctggccatgcctggttcactgctgtatctttgcgcctagagcgaaggctctggaataatgtaccctcccaccccactgcagtatttactggatcaagaacgagttga

SEQ ID NO: 50516 - DNA, 110 bp, synthetic construct
  source 1..110: mol_type = other DNA
gggcatcaagcactgtcggcatcattgccacgaaagcaccctttgcctcactgggagcagtgttcaagggtctgtcccgctgcgctcttgccacgagtatttgcatcacc

SEQ ID NO: 50517 - DNA, 110 bp, synthetic construct
  source 1..110: mol_type = other DNA
agcagtgttcaagggtctgtcccgctgcgctcttgccacgagtatttgcatcaccaaagagctggtcccaaattcagaaggtttcaaggtgttgacggatactagcctac

SEQ ID NO: 50518 - DNA, 110 bp, synthetic construct
  source 1..110: mol_type = other DNA
ttgccctttcctccgccctcaagcagtttgtgccaggcaaaacgaacttctttcgcttcccgaagccagtcatcaccgcacctactcctctcctgcagctccaacctctt

SEQ ID NO: 50519 - DNA, 110 bp, synthetic construct
  source 1..110: mol_type = other DNA
gcccagggggtcggtccgaacactgatgtcccgttcctgaaacggccagtggtttactcacctccaaggagggtcacaacagaacaaaacgcatcttctcctcttagcaa

SEQ ID NO: 50520 - DNA, 110 bp, synthetic construct
  source 1..110: mol_type = other DNA
actcacctccaaggagggtcacaacagaacaaaacgcatcttctcctcttagcaagttatcatttgcccacccctaaggacttgctcgtgaattcaacaaatgtttatat

SEQ ID NO: 50521 - DNA, 110 bp, synthetic construct
  source 1..110: mol_type = other DNA
gtaaaaaacatatgcacataagaaaggattgacacagaaaaatgacctggtgatatggcaggaatggctttctcaagctcggtgctaccgacattcggggccggctcact

SEQ ID NO: 50522 - DNA, 110 bp, synthetic construct
  source 1..110: mol_type = other DNA
tggcaggaatggctttctcaagctcggtgctaccgacattcggggccggctcactctttggtcttttttttttttttttttttttttttaatttcttgggccgctccctc

SEQ ID NO: 50523 - DNA, 110 bp, synthetic construct
  source 1..110: mol_type = other DNA
tatttttaagctcttctcctctcccccaaccctttctccagatttctatatccttgggtcctagagatttcatgattttgccgtaaaataaaagtgaggtaactgttcta

SEQ ID NO: 50524 - DNA, 110 bp, synthetic construct
  source 1..110: mol_type = other DNA
gggtcctagagatttcatgattttgccgtaaaataaaagtgaggtaactgttctacatctcgaaaataagggccttgaataccctcttccctcgtgggtttttcacggtt

SEQ ID NO: 50525 - DNA, 110 bp, synthetic construct
  source 1..110: mol_type = other DNA
agctggcacacgggacaggctcaggcagtgtttctgactaaatgggctgctgtaggtgacgtttttctggactagggttaccaaggctttgcaacaggacaccaccgagc

SEQ ID NO: 50526 - DNA, 110 bp, synthetic construct
  source 1..110: mol_type = other DNA
gtgacgtttttctggactagggttaccaaggctttgcaacaggacaccaccgagcttgggaggacctaggagggacccgcttctcctccacggatgctgtccagttgtag

SEQ ID NO: 50527 - DNA, 110 bp, synthetic construct
  source 1..110: mol_type = other DNA
ctcagctgtggcgaattgctccccgccccccatgttaataagcagctgctgggacaattctctgctttcctcgacgtaagagagaggggctattcagacacttaatttcc

SEQ ID NO: 50528 - DNA, 110 bp, synthetic construct
  source 1..110: mol_type = other DNA
tctgtgctttccattgtgttccttctccttggaatgctgttccctttgacttcatagcttctccatggtgtattcatcattcagatttccactcaaatgtttcttttctg

SEQ ID NO: 50529 - DNA, 110 bp, synthetic construct
  source 1..110: mol_type = other DNA
ctgtggagccagcacagggctgggtgtgcggtgggtctgcatggatgatcggttcctcccgaagccctctgtctaaagacaagactgctctgcacgtaggaaggacacga

SEQ ID NO: 50530 - DNA, 110 bp, synthetic construct
  source 1..110: mol_type = other DNA
acgtcaggcactcagtgaagacaggtcaactgaatgaagtgagcaagaaaccaatcaggcagtgtgcttggtccaggtgtttggaagggagagtccttcagctcggggaa

SEQ ID NO: 50531 - DNA, 110 bp, synthetic construct
  source 1..110: mol_type = other DNA
ttcggaaggataaacctcgccactcatggcctcccagtgtcgaggtgaaaggcaacgttggtgaagcataaaaacagctaattcttttcaatgttgcttcctaggcaccc

SEQ ID NO: 50532 - DNA, 110 bp, synthetic construct
  source 1..110: mol_type = other DNA
tggcagttgggttttcgggggggtctttttgcatcttagtgtctgtaacatgccccaactgtgcatggagacagttatttttagccccatatcatttctttgtattttgt

SEQ ID NO: 50533 - DNA, 110 bp, synthetic construct
  source 1..110: mol_type = other DNA
cctgcctggaatgccatttgatttccaccacattccctcgtctggaatctggagcagagggttgtgccacctccttggggagttgtgcactgaattcccaagtgcaggtt

SEQ ID NO: 50534 - DNA, 110 bp, synthetic construct
  source 1..110: mol_type = other DNA
agagggttgtgccacctccttggggagttgtgcactgaattcccaagtgcaggtttcagaaagaaatgccggcaaagagtccagagtcacagctccagggtcacgtgctg

SEQ ID NO: 50535 - DNA, 110 bp, synthetic construct
  source 1..110: mol_type = other DNA
atgtgtgtgcacacatgagggtttgtatccacaggtgtgcacattcctctgcacgtccacacgcataagccacccctgggctcgtaaggcttcgcctgggtgtggctgcc

SEQ ID NO: 50536 - DNA, 110 bp, synthetic construct
  source 1..110: mol_type = other DNA
tccggtgtgtgagatcagtttaaatatgcacacacgtaaaagtcatgagccgttccggtttttatgaataaggcgggggccggctttcaccctttcgcagcttttttgag

SEQ ID NO: 50537 - DNA, 110 bp, synthetic construct
  source 1..110: mol_type = other DNA
cggtttttatgaataaggcgggggccggctttcaccctttcgcagcttttttgagacgagctaccaagctttccctgcccttctgcttcatgcccgcgaggatcacggcc

SEQ ID NO: 50538 - DNA, 110 bp, synthetic construct
  source 1..110: mol_type = other DNA
ggcattgaaacgccccttgcgccgcagcaggaactcctcagcctctcccttagccatttaatagttgtcagagccctctgtgtactgagcactgcgttaggtcctaggga

SEQ ID NO: 50539 - DNA, 110 bp, synthetic construct
  source 1..110: mol_type = other DNA
atttaatagttgtcagagccctctgtgtactgagcactgcgttaggtcctagggacgccggagggagggaagcagacccatctcctgccctccctgagcttccgttctgg

SEQ ID NO: 50540 - DNA, 110 bp, synthetic construct
  source 1..110: mol_type = other DNA
acctgaaggcccaggctgcttccttgttcggagagagcttagcctcagaccctcccggctgatctggtgaggagggtgctggggtccggagacgtggccagccccactga

SEQ ID NO: 50541 - DNA, 110 bp, synthetic construct
  source 1..110: mol_type = other DNA
cctcggaggttcagcgtccacttcttcctgatgaataagctgcccagaccatcagcaaagtccttcatttctgacactgggatacggacctcgaagcttccactccagag

SEQ ID NO: 50542 - DNA, 110 bp, synthetic construct
  source 1..110: mol_type = other DNA
caaagtccttcatttctgacactgggatacggacctcgaagcttccactccagagctcttcccctgcactgtggtcaccggctcccgagggctgtcatcggtggaggcgg

SEQ ID NO: 50543 - DNA, 110 bp, synthetic construct
  source 1..110: mol_type = other DNA
attcacttttttttttttttttttgcctcagtgtatttgactgatttcgctcatgtcagcaattactgcccatcacagttgcagtttcaatagaggatagagagagctgg

SEQ ID NO: 50544 - DNA, 110 bp, synthetic construct
  source 1..110: mol_type = other DNA
tcagcaattactgcccatcacagttgcagtttcaatagaggatagagagagctggggtcggggctgcgggctctgtctccctcaggaggctgtgctcaatccagtgagcc

SEQ ID NO: 50545 - DNA, 110 bp, synthetic construct
  source 1..110: mol_type = other DNA
gtttcagttgcctcatcagtaaaggtagtgtatgtttcatgggcaagacgtcagagcccatcgtttttcctgccagtaggtactactgtttatacgcctagtgaatttta

SEQ ID NO: 50546 - DNA, 110 bp, synthetic construct
  source 1..110: mol_type = other DNA
gcccatcgtttttcctgccagtaggtactactgtttatacgcctagtgaattttactgacaatagtgactgtccatgctaccattgcaaatagagtggcctccccttcag

SEQ ID NO: 50547 - DNA, 110 bp, synthetic construct
  source 1..110: mol_type = other DNA
aggagagacaagtgctaatgttgggaaagacgctgcatggttgtctttggtttgcaagactgtaagaactataacagaagccgagccccccagatcccggtgagctgagc

SEQ ID NO: 50548 - DNA, 110 bp, synthetic construct
  source 1..110: mol_type = other DNA
aagactgtaagaactataacagaagccgagccccccagatcccggtgagctgagcccttgctgcatggcagccccaggctgctcggtacagcttccaagccagggcctca

SEQ ID NO: 50549 - DNA, 110 bp, synthetic construct
  source 1..110: mol_type = other DNA
ttccacagcagcaacttaagccacagcagtgacgatgctgaatccttaacctcccgagccaccaaggagctccaggcaggtgtctctagcttccccctgccacgcaaccc

SEQ ID NO: 50550 - DNA, 110 bp, synthetic construct
  source 1..110: mol_type = other DNA
tccctggtgagctcttcacaggcgcactgggtcgttcctcactgcttggcattcctcactgccatacacagaaagactgaataagcgaattcagaagtcgggtttaaaga

SEQ ID NO: 50551 - DNA, 110 bp, synthetic construct
  source 1..110: mol_type = other DNA
tcactgccatacacagaaagactgaataagcgaattcagaagtcgggtttaaagaaggcagagtcacacactctctgcacatcttttctgcactatcgacctgagttcaa

SEQ ID NO: 50552 - DNA, 110 bp, synthetic construct
  source 1..110: mol_type = other DNA
caaggacaggggttgggtctcctgacccttccatctccagcagagcgtgtggctcatagtaactgctcagtgaaggaaagtcagatgaaaggataacagcttccaagcag

SEQ ID NO: 50553 - DNA, 110 bp, synthetic construct
  source 1..110: mol_type = other DNA
atagtaactgctcagtgaaggaaagtcagatgaaaggataacagcttccaagcagcctctgccaagtcgttcaggccgtgcaggttttttcttttttgtctctggagtcc

SEQ ID NO: 50554 - DNA, 110 bp, synthetic construct; identical to SEQ ID NO: 50552
  source 1..110: mol_type = other DNA

SEQ ID NO: 50555 - DNA, 110 bp, synthetic construct; identical to SEQ ID NO: 50553
  source 1..110: mol_type = other DNA

SEQ ID NO: 50556 - DNA, 110 bp, synthetic construct
  source 1..110: mol_type = other DNA
ggcctcactcagtgggttaaggattcagggttgctgcaagttgtggcgcaggtcgtagatgtggctcagatgccctgctgccgtggctgtggtgtagaccacagctgcag

SEQ ID NO: 50557 - DNA, 110 bp, synthetic construct
  source 1..110: mol_type = other DNA
gttaaggattcagggttgctgcaagttgtggcgcaggtcgtagatgtggctcagatgccctgctgccgtggctgtggtgtagaccacagctgcagctccaattcagcccc

SEQ ID NO: 50558 - DNA, 110 bp, synthetic construct
  source 1..110: mol_type = other DNA
tcttttaaaccaacatgagcatgcactgaatcacggggactgtaactgaacactccaccatgtgatctcaccagggaatccaagaacacactcccagggtctgggaacaa

SEQ ID NO: 50559 - DNA, 110 bp, synthetic construct
  source 1..110: mol_type = other DNA
caccatgtgatctcaccagggaatccaagaacacactcccagggtctgggaacaatcaatgcaccgcacactgctcagcagagccatccttagttcccattctggtcaat

SEQ ID NO: 50560 - DNA, 110 bp, synthetic construct
  source 1..110: mol_type = other DNA
gctttataagaacacttatcttattcctaggcgctgttggttttggttattaaaatttacggccacaccccgacatatggaaagacctgggccggggacggaacccgggc

SEQ ID NO: 50561 - DNA, 110 bp, synthetic construct
  source 1..110: mol_type = other DNA
tttacggccacaccccgacatatggaaagacctgggccggggacggaacccgggcctccgcggtgatcggagcccctgcagagggacccttcacccacggcgccagagcg

SEQ ID NO: 50562 - DNA, 110 bp, synthetic construct
  source 1..110: mol_type = other DNA
ttattctctgctgggcagcccagtctttctccctcaggatgtgtgtgtgagaggcactgccccctctgaagtaattccacctgcacgtccagagctaatccctaccctct

SEQ ID NO: 50563 - DNA, 110 bp, synthetic construct
  source 1..110: mol_type = other DNA
tctctccactccattcccaaaaacaggccggctctctcccctctggtgtagacggggatgagaactgctctgtgggaatttcatgtgcaaacccacagctcaggaggggc

SEQ ID NO: 50564 - DNA, 110 bp, synthetic construct
  source 1..110: mol_type = other DNA
ggatgagaactgctctgtgggaatttcatgtgcaaacccacagctcaggaggggctggggtgcgtggaccacactcagaaaggagatggagcaggaacggtggccgtgag

SEQ ID NO: 50565 - DNA, 110 bp, synthetic construct; identical to SEQ ID NO: 50563
  source 1..110: mol_type = other DNA

SEQ ID NO: 50566 - DNA, 110 bp, synthetic construct; identical to SEQ ID NO: 50564
  source 1..110: mol_type = other DNA

SEQ ID NO: 50567 - DNA, 110 bp, synthetic construct
  source 1..110: mol_type = other DNA
gggtgaggaaactggaactgagtgtgcgttggcggggggtcccctctgcgacagtgatggcaggaggggccggcaggtgggcactcagtaagcctggagcacgtcttcag

SEQ ID NO: 50568 - DNA, 110 bp, synthetic construct
  source 1..110: mol_type = other DNA
gatggcaggaggggccggcaggtgggcactcagtaagcctggagcacgtcttcagaataatcccattcaatcctgttttcttcactgcgtagctcagacttcaccggaga

SEQ ID NO: 50569 - DNA, 110 bp, synthetic construct
  source 1..110: mol_type = other DNA
aaccccacgagctacccaggaaaagcaggtacattcgactccacaaacattgtaagcttctatgtgcttaaaaaataagcaggtatggaatgtgtccgtgacctagctga

SEQ ID NO: 50570 - DNA, 110 bp, synthetic construct
  source 1..110: mol_type = other DNA
gcttctatgtgcttaaaaaataagcaggtatggaatgtgtccgtgacctagctgacaaataaacactagctgataaataaaagctttgataaatcaatttaccaaactac

SEQ ID NO: 50571 - DNA, 110 bp, synthetic construct
  source 1..110: mol_type = other DNA
aacttaaactctttccccaaagtcttcatttctgagcctcgctgttaaggtaacaccaccaccaacaataataagtcaagcacttgaaatacaatcgagccgtttagtag

SEQ ID NO: 50572 - DNA, 110 bp, synthetic construct
  source 1..110: mol_type = other DNA
ccaccaccaacaataataagtcaagcacttgaaatacaatcgagccgtttagtagaggtttgcttccgaggaagcttataaaacacaaatgcaaatatcttttcctggca

SEQ ID NO: 50573 - DNA, 110 bp, synthetic construct
  source 1..110: mol_type = other DNA
gctgccctcctgaaccgaatccccaggacctcagtcacacagggatactgtggcattctgagcagctgcaggtaaataagttacattataaacatacatgacgaaccact

SEQ ID NO: 50574 - DNA, 110 bp, synthetic construct
  source 1..110: mol_type = other DNA
ttctgagcagctgcaggtaaataagttacattataaacatacatgacgaaccactggggaacgctgagtatcttctgcacaccgccccccgccccccacgccaggcttcg

SEQ ID NO: 50575 - DNA, 110 bp, synthetic construct; identical to SEQ ID NO: 50573
  source 1..110: mol_type = other DNA

SEQ ID NO: 50576 - DNA, 110 bp, synthetic construct; identical to SEQ ID NO: 50574
  source 1..110: mol_type = other DNA

SEQ ID NO: 50577 - DNA, 110 bp, synthetic construct
  source 1..110: mol_type = other DNA
ccacagtaattacattccagatcccatttcttcacatttatttcaactctaccttgagtatttctcaatccaaggcattctctaagaaatcaattcactgagaaatgact

SEQ ID NO: 50578 - DNA, 110 bp, synthetic construct
  source 1..110: mol_type = other DNA
gagtatttctcaatccaaggcattctctaagaaatcaattcactgagaaatgacttggaaaagtgcaacactgcatagactgctgaggtggtgccaacaaggggaaaaca

SEQ ID NO: 50579 - DNA, 110 bp, synthetic construct
  source 1..110: mol_type = other DNA
cacgtttccctcaagtctctttaatgtccatgctattccatgatttaagctcatagaaagctaaaagttcacgtccagaatgtaaacatcaagggggcactgtgagaaaa

SEQ ID NO: 50580 - DNA, 110 bp, synthetic construct
  source 1..110: mol_type = other DNA
gctgcagtggtgaaagcaccaggtcctaaccatgagaccaccagggtcacttcagttgagttttgtgcaggggataagatggcaccttcttctgcatggggccgtccagg

SEQ ID NO: 50581 - DNA, 110 bp, synthetic construct
  source 1..110: mol_type = other DNA
ttgagttttgtgcaggggataagatggcaccttcttctgcatggggccgtccaggtttcccaacactgcttactgaagagactcccactccccactgggcatcctcacct

SEQ ID NO: 50582 - DNA, 110 bp, synthetic construct
  source 1..110: mol_type = other DNA
caagaaaggacgtttagagctgcagcagagatgacaaaccctgcttagggaatacgacgggctccaccagctcttggctgaggctctggcaccttcaaagccctccccta

SEQ ID NO: 50583 - DNA, 110 bp, synthetic construct
  source 1..110: mol_type = other DNA
gacgggctccaccagctcttggctgaggctctggcaccttcaaagccctcccctaaaaacgaggtcaaactcggcagagcgttcgtatcttcatagattgtgcttcacag

SEQ ID NO: 50584 - DNA, 110 bp, synthetic construct; identical to SEQ ID NO: 50582
  source 1..110: mol_type = other DNA

SEQ ID NO: 50585 - DNA, 110 bp, synthetic construct; identical to SEQ ID NO: 50583
  source 1..110: mol_type = other DNA

SEQ ID NO: 50586 - DNA, 110 bp, synthetic construct
  source 1..110: mol_type = other DNA
aggtgacagggtgccagttcagggatctcaattgtcagccttctggatgcaaccagaggggtctgtgggcctgtggtcagcatgtcctcaccagcctccactggcttggg

SEQ ID NO: 50587 - DNA, 110 bp, synthetic construct
  source 1..110: mol_type = other DNA
gaggggtctgtgggcctgtggtcagcatgtcctcaccagcctccactggcttgggctggggtcttagcctctgcagaacagctcggagacgagtatcttattgttatctc

SEQ ID NO: 50588 - DNA, 110 bp, synthetic construct
  source 1..110: mol_type = other DNA
ttgctgatcgcatcactgccccggccgtgggcgcgggcagccgcgcagccgccgacttccaccctgaccagcgcggggtgcagagaaaagtccagttttcttttggttgt

SEQ ID NO: 50589 - DNA, 110 bp, synthetic construct
  source 1..110: mol_type = other DNA
cggactcacgcttttctccgggctgaggacttacgctcccgccttccgaactgtctctcacaacagctcttcaatcacgcggaggatggagccggcctcgagcttggcag

SEQ ID NO: 50590 - DNA, 110 bp, synthetic construct
  source 1..110: mol_type = other DNA
tctcacaacagctcttcaatcacgcggaggatggagccggcctcgagcttggcagggtgagcctctgggatgaagggagacagagcttccctcttcggtggccctgcgat

SEQ ID NO: 50591 - DNA, 110 bp, synthetic construct; identical to SEQ ID NO: 50589
  source 1..110: mol_type = other DNA

SEQ ID NO: 50592 - DNA, 110 bp, synthetic construct; identical to SEQ ID NO: 50590
  source 1..110: mol_type = other DNA

SEQ ID NO: 50593 - DNA, 110 bp, synthetic construct
  source 1..110: mol_type = other DNA
gttggattcatttccactgcgccacgatgggaactccgacaaggattcttgagctcgagttggaggcggtgccacgagggacaagccatgtctgcagtgtatgtggaaat

SEQ ID NO: 50594 - DNA, 110 bp, synthetic construct; identical to SEQ ID NO: 50593
  source 1..110: mol_type = other DNA

SEQ ID NO: 50595 - DNA, 110 bp, synthetic construct
  source 1..110: mol_type = other DNA
agacattgtgtgtattacccctgtgcaaatgtgtgtgtgtatagaggctctatatacatacagtgtagatggttaatttctcacacacacacacacacacacacacacac

SEQ ID NO: 50596 - DNA, 110 bp, synthetic construct
  source 1..110: mol_type = other DNA
agagtaaataaatcgatcctcatttaaagcataaatcctaagtaggcaaaatgcaaacacaggagctcctgctatggtgcagtgggttaagaatcgacgacagcagctca

SEQ ID NO: 50597 - DNA, 110 bp, synthetic construct
  source 1..110: mol_type = other DNA
gctctttctttcgaccccgtcctccgcctggtgccagttctttgtgagccattcctcgttttgcaaaatcgtctcacacgaaaaggctctttttgaaaccctcgggtgtt

SEQ ID NO: 50598 - DNA, 110 bp, synthetic construct
  source 1..110: mol_type = other DNA
tcgttttgcaaaatcgtctcacacgaaaaggctctttttgaaaccctcgggtgtttgcttttggacgtttcgagatgttcgtgtgaagagtaaattcgtattaaattaga

SEQ ID NO: 50599 - DNA, 110 bp, synthetic construct
  source 1..110: mol_type = other DNA
cggccgccacttgctctgggaagcggaggccgcgtttctgagtataaaacgccgaagagtctggaagcaggggcccccaaagtggcacccacgaagcccggctgccttcc

SEQ ID NO: 50600 - DNA, 110 bp, synthetic construct
  source 1..110: mol_type = other DNA
aaaacgccgaagagtctggaagcaggggcccccaaagtggcacccacgaagcccggctgccttccccgagtttgcttcagctggagcccgggaggcgacgggcgcagcag

SEQ ID NO: 50601 - DNA, 110 bp, synthetic construct
  source 1..110: mol_type = other DNA
acaggtgcgctgtcatcctctccgttacttttaggggcgttgcctagaaggaggggtcaaatcataaggggctgggtggcaactggtgttactgattctttccagtcggc

SEQ ID NO: 50602 - DNA, 110 bp, synthetic construct
  source 1..110: mol_type = other DNA
gtcaaatcataaggggctgggtggcaactggtgttactgattctttccagtcggctcccagcaaaggtgcacctgacgggtttggtccggaacaaaggaaagcgttactc

SEQ ID NO: 50603 - DNA, 110 bp, synthetic construct
  source 1..110: mol_type = other DNA
taacatcatactcaaaagtgaaaaacctgaagcttttcctccaagctcaggaatgagatgagggtgcccacgcttgccacttttattcagcatggtatcggaagtcctag

SEQ ID NO: 50604 - DNA, 110 bp, synthetic construct
  source 1..110: mol_type = other DNA
agatgagggtgcccacgcttgccacttttattcagcatggtatcggaagtcctagccagagccgttaggcggggaaaagaaaaggcatgtaaacgggaaaggaagaaata

SEQ ID NO: 50605 - DNA, 110 bp, synthetic construct
  source 1..110: mol_type = other DNA
ttgaatttgatttaggttctttagtctcattttagatcttttacaagattttcaggactgttttgatgcagagggaaaatgtgtcagtgtcagcaaaaaccgtgtaagtc

SEQ ID NO: 50606 - DNA, 110 bp, synthetic construct
  source 1..110: mol_type = other DNA
gactgttttgatgcagagggaaaatgtgtcagtgtcagcaaaaaccgtgtaagtcagcattgaaaaatgcccatttatcccgttcctgcagaaagggattggtatgaggt

SEQ ID NO: 50607 - DNA, 110 bp, synthetic construct
  source 1..110: mol_type = other DNA
atcagactcagacgttatatgtcatcccgtctagatggtgctggcatagagagatctaacctcgcctgtggggcccaggagagttctccacaacatctgtcacccaatga

SEQ ID NO: 50608 - DNA, 110 bp, synthetic construct
  source 1..110: mol_type = other DNA
ctaacctcgcctgtggggcccaggagagttctccacaacatctgtcacccaatgacactgcatttttttcattcaagctatagacaagatacacgaattaaattccacac

SEQ ID NO: 50609 - DNA, 110 bp, synthetic construct
  source 1..110: mol_type = other DNA
tgaatttaggggaaggaaacgcaaccccaagagaatgtagggtccggagggaaagtgcttgaccagttcgagcccctcgcccagggcccgggtctgacctcacacccacg

SEQ ID NO: 50610 - DNA, 110 bp, synthetic construct
  source 1..110: mol_type = other DNA
tgtagggtccggagggaaagtgcttgaccagttcgagcccctcgcccagggcccgggtctgacctcacacccacgcggcgttaggcggagcgtggcgagctgccagggcc

SEQ ID NO: 50611 - DNA, 110 bp, synthetic construct
  source 1..110: mol_type = other DNA
cccaagtgctgcacacagcaggggcaccggagttgccctggtgcctgcagccacggcaagtgagagggcagggagggacctcagggctcaaggccagctggcagcgcttg

SEQ ID NO: 50612 - DNA, 110 bp, synthetic construct
  source 1..110: mol_type = other DNA
aggccaagtgcagcatacagactatacacggcgtctccgcagaaagaatggccactgtttgaagatcaggagagggaccgttctttgagtctacagcagacccagctgcc

SEQ ID NO: 50613 - DNA, 110 bp, synthetic construct
  source 1..110: mol_type = other DNA
tgtttgaagatcaggagagggaccgttctttgagtctacagcagacccagctgccctttgcttctgcagagcacacagggctgtgtgggcaggtcgtttgttccgcccca

SEQ ID NO: 50614 - DNA, 110 bp, synthetic construct
  source 1..110: mol_type = other DNA
ttttcacacattgccgtgggcagtggcacacactttatcactgagatccgggcgtgccagggcttgttcacccatccaacagttgatgcacactggagttgttttcagtt

SEQ ID NO: 50615 - DNA, 110 bp, synthetic construct
  source 1..110: mol_type = other DNA
gccagggcttgttcacccatccaacagttgatgcacactggagttgttttcagtttgttcctcttgctgtgagtgtttgtgtacaagcctttcactcctctggggaacat

SEQ ID NO: 50616 - DNA, 110 bp, synthetic construct
  source 1..110: mol_type = other DNA
ttttaacttaaaagaggcatcagtagttaaactagtagctgtgtaaatatgtatgcctttatctatttttttggccacatccatggtgtacagaagtccccaggccaagg

SEQ ID NO: 50617 - DNA, 110 bp, synthetic construct
  source 1..110: mol_type = other DNA
gcaggtgtcttgcccaagagtcccaggtgaccgtcctccctgaagcaaaaagcatcgcattctcatttcctttgggcttttgtgactatttctattttcactcccagatg

SEQ ID NO: 50618 - DNA, 110 bp, synthetic construct
  source 1..110: mol_type = other DNA
cgcattctcatttcctttgggcttttgtgactatttctattttcactcccagatgtgcacacggtgccagcacggttttgcaaataaagcctctgattctcgtctcttct

SEQ ID NO: 50619 - DNA, 110 bp, synthetic construct
  source 1..110: mol_type = other DNA
ttagactgagatggacacatatttgaacccggggtctaccatgtatgagctgcatgccttggggatgttacttaaattctttagtctatgtcctcgtctgacaaagagaa

SEQ ID NO: 50620 - DNA, 110 bp, synthetic construct
  source 1..110: mol_type = other DNA
ttggggaccatgttttgatgtcaccacacggataaaatactgcaggccatcccggtgttggaccagcttttaggaatttatctaaaggcaattcaaggagcatttcatgg

SEQ ID NO: 50621 - DNA, 110 bp, synthetic construct
  source 1..110: mol_type = other DNA
gcatcttctgttcaggaagagtaagtggtgcagggtggctgccgggtgctgggtggtgtggagcgttgggaaaggggtgggtgggttctgttatgagagactcggtagga

SEQ ID NO: 50622 - DNA, 110 bp, synthetic construct
  source 1..110: mol_type = other DNA
ctactaagagagtgaaagggccacacaacgttcttgtatcggcccctcttaggtcttcagacgacctgggtcttaggtctcatggggcccacgtcgtcctctaaaaagaa

SEQ ID NO: 50623 - DNA, 110 bp, synthetic construct
  source 1..110: mol_type = other DNA
ttcagacgacctgggtcttaggtctcatggggcccacgtcgtcctctaaaaagaaccagattcccattcctgcccacacgcttccatcttcctggcacattctagccgtt

SEQ ID NO: 50624 - DNA, 110 bp, synthetic construct
  source 1..110: mol_type = other DNA
ctcaaaattccaatctttccaggcacattaacaaaacccgagaggaccaaagatgtcacagaggacacccagctccgtcccaagagccaggagcgtacacaacgtacaca

SEQ ID NO: 50625 - DNA, 110 bp, synthetic construct
  source 1..110: mol_type = other DNA
tcacagaggacacccagctccgtcccaagagccaggagcgtacacaacgtacacacagcacgtgtggaagttgaggaatctaaatgtttgagacctattcaacccaaggc

SEQ ID NO: 50626 - DNA, 110 bp, synthetic construct
  source 1..110: mol_type = other DNA
cccccctttccacctcctactggtaacgattagtttgctctccgagtctgtcagtctatttctgatgttatattcgtttactgtattttttagattccacatacaagtgg

SEQ ID NO: 50627 - DNA, 110 bp, synthetic construct
  source 1..110: mol_type = other DNA
ctatttctgatgttatattcgtttactgtattttttagattccacatacaagtggtaacagagtatttctcctcctctgcctcacttatttcactaagcatgatactccc

SEQ ID NO: 50628 - DNA, 110 bp, synthetic construct
  source 1..110: mol_type = other DNA
gtaagtgtagttattttgtttttaaaaagttttttggggcattcctgtcatggctcagcggaaactcacctgactagtatccgtgagaatgcaggttcaatccctgacct

SEQ ID NO: 50629 - DNA, 110 bp, synthetic construct; identical to SEQ ID NO: 50628
  source 1..110: mol_type = other DNA

SEQ ID NO: 50630 - DNA, 110 bp, synthetic construct
  source 1..110: mol_type = other DNA
ctaacccagtgctctaagccttagagctggggttctgtccagcctttcaaagttaaagtctgtgtcacaattcagagcacaggacagaagagagctttaaaacacaccca

SEQ ID NO: 50631 - DNA, 110 bp, synthetic construct
  source 1..110: mol_type = other DNA
aagtctgtgtcacaattcagagcacaggacagaagagagctttaaaacacacccagagaaacacagagggattttcaacgagcacctgacagcactaaacagaggctcga

SEQ ID NO: 50632 - DNA, 110 bp, synthetic construct
  source 1..110: mol_type = other DNA
agttatcatgactggggttactgggtgaggggcagacttttaccccaaagtaagaagtccagctcttccagaaaaatcttaggtggtcagaaatctgggcaagagctggt

SEQ ID NO: 50633 - DNA, 110 bp, synthetic construct
  source 1..110: mol_type = other DNA
gagctttcgaggcctcacaaaccccctccttgtttggatcctacatggtgttaaatgtggcgctttgcccccctggtggcccatatactccctctccccgtgtgcatctg

SEQ ID NO: 50634 - DNA, 110 bp, synthetic construct
  source 1..110: mol_type = other DNA
tgtggcgctttgcccccctggtggcccatatactccctctccccgtgtgcatctgcgctttctttattctttgggtcccctgctcttatcctgctgaatttggattctat

SEQ ID NO: 50635 - DNA, 110 bp, synthetic construct
  source 1..110: mol_type = other DNA
atcgaacctgcatcctcatggataccagttggattcattaccactgagccgcagcgggaactctgattttttttattagtgggttctacatgcctacgttgggtgatttg

SEQ ID NO: 50636 - DNA, 110 bp, synthetic construct
  source 1..110: mol_type = other DNA
gggaactctgattttttttattagtgggttctacatgcctacgttgggtgatttgagaagaatgagaacgcagatatttgccaagatgatcattattatcatcacggcat

SEQ ID NO: 50637 - DNA, 110 bp, synthetic construct
  source 1..110: mol_type = other DNA
aggaatccctggacaggtaaacgtatctgcccccttgcagcaaagactaagactgcaaatgttctgtgttcttaacagagctagttccccttaagctgtaaacgccacac

SEQ ID NO: 50638 - DNA, 110 bp, synthetic construct
  source 1..110: mol_type = other DNA
gcgtctccatttccccaaaaaagtatagaaggtgcagagcagtttttagtttttgcgatgtctagaatgataagctgtttacttgccgtagaaaataaagtagaaccaaa

SEQ ID NO: 50639 - DNA, 110 bp, synthetic construct
  source 1..110: mol_type = other DNA
aggatgcagaaagccctgggccagggactgaacccgagccacagcagtgacaacgccaaatcctcaactaccaggccaccccagaagtcccaccaatttttgacctacag

SEQ ID NO: 50640 - DNA, 110 bp, synthetic construct
  source 1..110: mol_type = other DNA
ccaaatcctcaactaccaggccaccccagaagtcccaccaatttttgacctacagaaatgttcatcacgcataattcaatttaatactgagccctcaatgggtaaatggg

SEQ ID NO: 50641 - DNA, 110 bp, synthetic construct
  source 1..110: mol_type = other DNA
cgatggtcactaggcagagaggctagcaggtcctgatgggacttgggacggggtccctgccggtttcggaccagcctcccaagggtgcgggatgctctctggatctcggc

SEQ ID NO: 50642 - DNA, 110 bp, synthetic construct
  source 1..110: mol_type = other DNA
cctgccggtttcggaccagcctcccaagggtgcgggatgctctctggatctcggcagcctaaagagtatcctttctgtccacaccgtactgagctcagctgaaatcagcc

SEQ ID NO: 50643 - DNA, 110 bp, synthetic construct
  source 1..110: mol_type = other DNA
gagttttcagagccctgcagagtgaaacccaaccttttgcatgggccaaagggcagcctggtggttgcaggatgggaagtacagaagacacaagctccctccctgtaaag

SEQ ID NO: 50644 - DNA, 110 bp, synthetic construct
  source 1..110: mol_type = other DNA
gcctggtggttgcaggatgggaagtacagaagacacaagctccctccctgtaaagacaagttttcttcatgtgccactttgggcccaggcttctaaggctggctcttatt

SEQ ID NO: 50645 - DNA, 110 bp, synthetic construct
  source 1..110: mol_type = other DNA
taagcttagaaaccaggaattgtgtttgtccccaagcctgttctgcctcattgaaattgctattttgtttccgtaacaaaacatatggaatgctttgggaagactttata

SEQ ID NO: 50646 - DNA, 110 bp, synthetic construct
  source 1..110: mol_type = other DNA
ttgtccccaagcctgttctgcctcattgaaattgctattttgtttccgtaacaaaacatatggaatgctttgggaagactttataaagattagctatttaaatatattta

SEQ ID NO: 50647 - DNA, 110 bp, synthetic construct
  source 1..110: mol_type = other DNA
aatgagcaaagaccacaaatagtttgcatagttgacaatacaaatggcatttaaacatatgaaaaaatgttcacgtttcctcgtaacaaaggaaatgccaagttaagttt

SEQ ID NO: 50648 - DNA, 110 bp, synthetic construct
  source 1..110: mol_type = other DNA
catatgaaaaaatgttcacgtttcctcgtaacaaaggaaatgccaagttaagtttcaatagagtaccactttcacccataaaattttctaaaatcaaaggcctgataagg

SEQ ID NO: 50649 - DNA, 110 bp, synthetic construct
  source 1..110: mol_type = other DNA
tctggagcccaagctgcacctcccccctctgaccaaacagtagcgcttcccttggttctgaaccaaactcggcctcgttctattggcgggagagtcaggggaggaggacc

SEQ ID NO: 50650 - DNA, 110 bp, synthetic construct
  source 1..110: mol_type = other DNA
agcgcagaagcagctgcgggccaggcctaaaggagtgggtgctgagcgccagtgaaaccgttatgggcggtaaaactcaaatttcgtggaattcttacatgttatggaat

SEQ ID NO: 50651 - DNA, 110 bp, synthetic construct
  source 1..110: mol_type = other DNA
gtctgtaagacttgggagttggctgagcatctgagtagaaatgggcttcctctctccatggtctcctgggttctagctgcaccgccagctttgggcgttctactctgccg

SEQ ID NO: 50652 - DNA, 110 bp, synthetic construct
  source 1..110: mol_type = other DNA
ccatggtctcctgggttctagctgcaccgccagctttgggcgttctactctgccgtgtcgagccttctgcaaccccagctgagcagttattgcaaaagggcgtaagattc

SEQ ID NO: 50653 - DNA, 110 bp, synthetic construct
  source 1..110: mol_type = other DNA
ttgatttcttctcagatctttattatttactaccttctacttgctttgggcttaatttgctcttttattcttgtttcccaagtcggatagcttagattgtgaatttaaaa

SEQ ID NO: 50654 - DNA, 110 bp, synthetic construct
  source 1..110: mol_type = other DNA
tctacttgctttgggcttaatttgctcttttattcttgtttcccaagtcggatagcttagattgtgaatttaaaaatttttaacttcttttctgagtatatgagtaaagc

SEQ ID NO: 50655 - DNA, 110 bp, synthetic construct
  source 1..110: mol_type = other DNA
ttggtgtctctgcatcgacacgtggacaggagctaccgtgacggtgggaacgcgggggacggccgtgcccaaggcagcagtgtcctcaggtctcgtcctgcgtcttgctc

SEQ ID NO: 50656 - DNA, 110 bp, synthetic construct
  source 1..110: mol_type = other DNA
agacaaacagcacagatgtggtgttggttctgtccagtgagtggagtgataccgtgtgttgtttcgcagctgttcccatttagcgatgtgcctttaagatgtttctagtt

SEQ ID NO: 50657 - DNA, 110 bp, synthetic construct
  source 1..110: mol_type = other DNA
ttacaggccaatgtcactgataacagatgaaaaaatcctcaacaaaatattagcgaacaaaatctaatagtacattgaaagaatcatccaccatgatcaagtgagattta

SEQ ID NO: 50658 - DNA, 110 bp, synthetic construct; identical to SEQ ID NO: 50657
  source 1..110: mol_type = other DNA

SEQ ID NO: 50659 - DNA, 110 bp, synthetic construct
  source 1..110: mol_type = other DNA
atactcgtcggatttgtttctgcttctccacgacgggatctctgagcaagtgtatagacgtgaaggtttcgtctacactgtcgcagtggggctcgactccttgaaatgtt

SEQ ID NO: 50660 - DNA, 110 bp, synthetic construct
  source 1..110: mol_type = other DNA
agacgtgaaggtttcgtctacactgtcgcagtggggctcgactccttgaaatgttccttcttcgagccccagtgccatgctgtgaggaagcccaagcagccacatgagcg

SEQ ID NO: 50661 - DNA, 110 bp, synthetic construct
  source 1..110: mol_type = other DNA
cactcaagagacggcgtcccaacctcaaacccgagccctgggaggctgcagagcccgagctttaacgcatgagctcatggacggaaggacgggttgggggctgcgggcag

SEQ ID NO: 50662 - DNA, 110 bp, synthetic construct
  source 1..110: mol_type = other DNA
cgagctttaacgcatgagctcatggacggaaggacgggttgggggctgcgggcaggggcctcacaggggcgtgcagccctccagctgcactgtcctgcagcccaggggcc

SEQ ID NO: 50663 - DNA, 110 bp, synthetic construct
  source 1..110: mol_type = other DNA
cagtgaaaataagcatacttcaacttaagagaaaaataagtcttcttcagggcctggaagccagtgcgagggtactggagccaggagggactctgccctgctcacctctg

SEQ ID NO: 50664 - DNA, 110 bp, synthetic construct
  source 1..110: mol_type = other DNA
ggaagccagtgcgagggtactggagccaggagggactctgccctgctcacctctgctctgtctgctcctgcgtctctccccgcagcctgggctcctccttacctgtctgt

SEQ ID NO: 50665 - DNA, 110 bp, synthetic construct
  source 1..110: mol_type = other DNA
cagggctattgctaccctgacttggagcaaatctctacgtcgtaaccctttcaatctcaggtagttctgtgaatgcacggtggtttttaaacgcggtttttagaatctgc

SEQ ID NO: 50666 - DNA, 110 bp, synthetic construct
  source 1..110: mol_type = other DNA
ctcaggtagttctgtgaatgcacggtggtttttaaacgcggtttttagaatctgcacaccgattttatcacgtttgcatttgaaacgctgaaggccagcgcatacgctac

SEQ ID NO: 50667 - DNA, 110 bp, synthetic construct
  source 1..110: mol_type = other DNA
atgtttatatgtccacggcatccaaacatcatgagcccaaaacagtgatatttaagggatactgtgtttcaacgcaatcatgtgcactgctgatgtttcccaagccttct

SEQ ID NO: 50668 - DNA, 110 bp, synthetic construct
  source 1..110: mol_type = other DNA
gggatactgtgtttcaacgcaatcatgtgcactgctgatgtttcccaagccttctgtggcagacggtcagtagcaagggagtatgtgaacatgtaaatgacatacgcact

SEQ ID NO: 50669 - DNA, 110 bp, synthetic construct
  source 1..110: mol_type = other DNA
ctcatggatactagtgcgtttccgctgcgccacagcaggagctcctaattgatatactcttaaggagtgcagaaaaaagtttcccagtaaagcgtgtccctgcttggaac

SEQ ID NO: 50670 - DNA, 110 bp, synthetic construct; identical to SEQ ID NO: 50669
  source 1..110: mol_type = other DNA

SEQ ID NO: 50671 - DNA, 110 bp, synthetic construct; identical to SEQ ID NO: 50669
  source 1..110: mol_type = other DNA

SEQ ID NO: 50672 - DNA, 110 bp, synthetic construct; identical to SEQ ID NO: 50669
  source 1..110: mol_type = other DNA

SEQ ID NO: 50673 - DNA, 110 bp, synthetic construct
  source 1..110: mol_type = other DNA
cgtgtccctgggagaattgctcaaacacagggcggaatcgcctcatctgacaaggataacggtgtctctctcacaaggctgccgtcaggagaagctgagacgagccattt

SEQ ID NO: 50674 - DNA, 110 bp, synthetic construct
  source 1..110: mol_type = other DNA
ataacggtgtctctctcacaaggctgccgtcaggagaagctgagacgagccatttacgtgcctgtgtggcacacgaggtcggtttacagagagggcgcgacgaccgggca

SEQ ID NO: 50675 - DNA, 110 bp, synthetic construct
  source 1..110: mol_type = other DNA
tccttatggtacgtaattgccatttgttttttattgatcctaacagaataggaaggtggaagggcccttggacatcagcttgtgtatttttagagatgagctaatggaag

SEQ ID NO: 50676 - DNA, 110 bp, synthetic construct
  source 1..110: mol_type = other DNA
gtggaagggcccttggacatcagcttgtgtatttttagagatgagctaatggaaggccctttcctcattcattcattccttcctccagcactccctgaccaccacttctt

SEQ ID NO: 50677 - DNA, 110 bp, synthetic construct; identical to SEQ ID NO: 50675
  source 1..110: mol_type = other DNA

SEQ ID NO: 50678 - DNA, 110 bp, synthetic construct; identical to SEQ ID NO: 50676
  source 1..110: mol_type = other DNA

SEQ ID NO: 50679 - DNA, 110 bp, synthetic construct
  source 1..110: mol_type = other DNA
ctggggggcacactggcgcctccagttagctggttcaagtgttcacctcctccggacactctgtcttagacgcatccataaatggtgtttaaccatgtacctggggaccc

SEQ ID NO: 50680 - DNA, 110 bp, synthetic construct
  source 1..110: mol_type = other DNA
cgccttgttcctctcgagatcacttctctcctgcaagaataaacttttgctcttaaacaccggcaaaaccctttccagcccaatgttgagccccttcctgtctccacgtg

SEQ ID NO: 50681 - DNA, 110 bp, synthetic construct
  source 1..110: mol_type = other DNA
aacaccggcaaaaccctttccagcccaatgttgagccccttcctgtctccacgtgggaggaagctcattttgagaaaaccgtcagtgacacgggcaccgccaccaccgcc

SEQ ID NO: 50682 - DNA, 110 bp, synthetic construct
  source 1..110: mol_type = other DNA
ttttgttacagttttttggtttttgttcttcgctgttcgtgatgcatacggaatcctcttaaatctgcctcactcacaagcctgctgtcggggctaggatgactggaaag

SEQ ID NO: 50683 - DNA, 110 bp, synthetic construct
  source 1..110: mol_type = other DNA
ctcttaaatctgcctcactcacaagcctgctgtcggggctaggatgactggaaagctgggttcacctgggatccttccctggcgtgcgggggaggggggggcctccacaa

SEQ ID NO: 50684 - DNA, 110 bp, synthetic construct
  source 1..110: mol_type = other DNA
tgtcacttcacgttcttgacctgtcctgggcaaagtggtgaacgtgctcgtaagaaggtggcgaagctgagactgaagaccgcgcggctgacatcgggggccgtgaccgt

SEQ ID NO: 50685 - DNA, 110 bp, synthetic construct
  source 1..110: mol_type = other DNA
aggtggcgaagctgagactgaagaccgcgcggctgacatcgggggccgtgaccgtgagagggcctcctgccagctgggcggccagttgtggatggactgggaagctggca

SEQ ID NO: 50686 - DNA, 110 bp, synthetic construct
  source 1..110: mol_type = other DNA
gtgcctgctgagtgccaagggtgtggtcaccagcccaggaactgggtcttattggctccgctcactaactgtagctgcagttgtctgcgtagcctagaattctgcactaa

SEQ ID NO: 50687 - DNA, 110 bp, synthetic construct
  source 1..110: mol_type = other DNA
gccagcctcactgcccttcgctcgcccggacgccgtctcccttttgtacgggaggaggctgggagaggggtttcctcagtgggaacaaggccaaagtcagggcctggcct

SEQ ID NO: 50688 - DNA, 110 bp, synthetic construct
  source 1..110: mol_type = other DNA
aggctgggagaggggtttcctcagtgggaacaaggccaaagtcagggcctggcctgcaaagcgaagccacctttagataggaaagccattcctctgttgactgtcggggg

SEQ ID NO: 50689 - DNA, 110 bp, synthetic construct
  source 1..110: mol_type = other DNA
actagtcgggttcattaccactgagccaccacaggagctccttgagtaacgttgtaaatggttcttttcctcggagctggagtaggtaaaaatgaacgctttctcagcgt

SEQ ID NO: 50690 - DNA, 110 bp, synthetic construct
  source 1..110: mol_type = other DNA
aggcgcattttcgtgctcagttaagacttgctgattagcggcccctgggggtcccgggatgtatcctgagttagtggaggtcctttgtgtgactcttcaccgcaggagag

SEQ ID NO: 50691 - DNA, 110 bp, synthetic construct
  source 1..110: mol_type = other DNA
gggatgtatcctgagttagtggaggtcctttgtgtgactcttcaccgcaggagagctgccagcctgactgcacagaacagcattgagttccatcctgtgtggtgccagca

SEQ ID NO: 50692 - DNA, 110 bp, synthetic construct
  source 1..110: mol_type = other DNA
ccgcagacgtgcgtggacccacagcctggccgcatgggcactgccagccgaggagggaggcaggccctccccaaaggtggcttcacacccaagggaagtggtcaccttgt

SEQ ID NO: 50693 - DNA, 110 bp, synthetic construct
  source 1..110: mol_type = other DNA
ggaggcaggccctccccaaaggtggcttcacacccaagggaagtggtcaccttgtttggggacaaagccgatcaatagtcttttcatttctgccatttcggggaaagaag

SEQ ID NO: 50694 - DNA, 110 bp, synthetic construct
  source 1..110: mol_type = other DNA
cagaggtgaatcggggtgcccccacccccggaaccatgctcctgccgccccactgcagcttttccaggagcctctgcttgtctggaccaaccatggcagggatggggaca

SEQ ID NO: 50695 - DNA, 110 bp, synthetic construct
  source 1..110: mol_type = other DNA
ctggggatcagaggacaggccgtgaggaggggctcgggctgttctaccggatttagagcagggaggtaacaggacaagaaccttaaaaataggaacaggatcctgtgcta

SEQ ID NO: 50696 - DNA, 110 bp, synthetic construct
  source 1..110: mol_type = other DNA
actggcccagaacacccaaaaaagacaccaagaagtagggcctggagtaagagaacaacagagccgtgacggacctgtcaaaccagggagagaaaggtctggaaggaatg

SEQ ID NO: 50697 - DNA, 110 bp, synthetic construct
  source 1..110: mol_type = other DNA
caacagagccgtgacggacctgtcaaaccagggagagaaaggtctggaaggaatgccgaggtccagtttgggaggcggtgtagacaaggaccccaccaacaaagtggagc

SEQ ID NO: 50698 - DNA, 110 bp, synthetic construct
  source 1..110: mol_type = other DNA
ctgtccttgggtcctaaccctccgtctggcaggggagctcaccgtgggggtcccgccatctcagaagggctgttcttttttttttttttttctttttgtctttttgctat

SEQ ID NO: 50699 - DNA, 110 bp, synthetic construct
  source 1..110: mol_type = other DNA
tagcgggtctggactattttcaggagcttctctccctgtgggaggcagtgcccacctctggccggtgtggctttgctttatcaggtatttctcttcctagacacccagag

SEQ ID NO: 50700 - DNA, 110 bp, synthetic construct
  source 1..110: mol_type = other DNA
tctgtaggctcacccctgcttctttctggtgtgtttgttttagttgtcgacaaactcgtccctttttctgcagagttccccatgttttgactttcttgtttgaatccaat

SEQ ID NO: 50701 - DNA, 110 bp, synthetic construct
  source 1..110: mol_type = other DNA
tcgtccctttttctgcagagttccccatgttttgactttcttgtttgaatccaatggtgtcatttaccttgttcctctgttgcctgtattcctttcagtactgtcatcaa

SEQ ID NO: 50702 - DNA, 110 bp, synthetic construct
  source 1..110: mol_type = other DNA
atagaagtggtaggagcaacctcatatgccaaaaataataaaaaaaaataatttgctctacgggaatgcctttcatctctaggtttcaaagagcatatattatcatacaa

SEQ ID NO: 50703 - DNA, 110 bp, synthetic construct
  source 1..110: mol_type = other DNA
gcaacctcatatgccaaaaataataaaaaaaaataatttgctctacgggaatgcctttcatctctaggtttcaaagagcatatattatcatacaattgaagcattagtag

SEQ ID NO: 50704 - DNA, 110 bp, synthetic construct
  source 1..110: mol_type = other DNA
tgtttgttcacttagcaggaggaagggatccatggaaagcagccacctcaatgtgcgacacacgacaagggctcagtacattgtcgctcgtgcttttttcatttcttttc

SEQ ID NO: 50705 - DNA, 110 bp, synthetic construct
  source 1..110: mol_type = other DNA
aggaagatgtccagctgcaaattggcattgttgtcatgggctgagaaataattagtaacgactcttgctggtatcccaaggcatcttaagactgcaggagagaaggatgg

SEQ ID NO: 50706 - DNA, 110 bp, synthetic construct
  source 1..110: mol_type = other DNA
aatttctaacccaagtgaatttttcaaggtggtctgaatagttgaaacggtttggggcaggaggaggcttcggctgaatgtgaagctctctatgagaagacaaagaaaac

SEQ ID NO: 50707 - DNA, 110 bp, synthetic construct
  source 1..110: mol_type = other DNA
ggcaggaggaggcttcggctgaatgtgaagctctctatgagaagacaaagaaaacacctggggaaaataaaaaacacggccttccagcagctgccggtggagctgcttgg

SEQ ID NO: 50708 - DNA, 110 bp, synthetic construct
  source 1..110: mol_type = other DNA
gcaggaaactgtgcttgcttaatatcgacacctcagacccctgcagcgatacacgagacagaaaatattcagtaagaatgtccgtgacggtgacacgttttaagtggctc

SEQ ID NO: 50709 - DNA, 110 bp, synthetic construct
  source 1..110: mol_type = other DNA
agacagaaaatattcagtaagaatgtccgtgacggtgacacgttttaagtggctcacctgaccatagctccagcttctgctcttgatgtcgttgaattcaccataaaaaa

SEQ ID NO: 50710 - DNA, 110 bp, synthetic construct
  source 1..110: mol_type = other DNA
gggcgatgcaattaatgaagagtgggcagagaatggaacccagtcagtctcgcttaagagcggggtgggacttcccagcttgcctagccgtgaaggacccagcactgtca

SEQ ID NO: 50711 - DNA, 110 bp, synthetic construct
  source 1..110: mol_type = other DNA
ctgcagttcactcttgtcaatggagggttcgattcataatcagctggatgccactgtgtgtgtgaggatatgtatggatgtctttctaacggaagccagtgaaaaccctt

SEQ ID NO: 50712 - DNA, 110 bp, synthetic construct
  source 1..110: mol_type = other DNA
cagaggaactggggagatgcctctagaaactgaaacctcagctaggcaaagcccactgcacacagatgagaaacacaccaaaacgtgtgcaagggaaacacacgcacact

SEQ ID NO: 50713 - DNA, 110 bp, synthetic construct
  source 1..110: mol_type = other DNA
taaaaaacggctcacagttacacagatctggacactgtctgcaggatacccgatcatcctcacaggtatggtaattctgagtcgaaaacacgggcacaaaagaaaacata

SEQ ID NO: 50714 - DNA, 110 bp, synthetic construct
  source 1..110: mol_type = other DNA
atcctcacaggtatggtaattctgagtcgaaaacacgggcacaaaagaaaacatactttgacggggaggcacagaaatgccccctccaaggacagccggtgaaaagaaaa

SEQ ID NO: 50715 - DNA, 110 bp, synthetic construct
  source 1..110: mol_type = other DNA
catcaataacaaagaaacgagataagaaaaagccccaaccaaatgtaaattggtatcaccactattgaaaacagtgtggagacaccttagaaaactatacctagaactac

SEQ ID NO: 50716 - DNA, 110 bp, synthetic construct; identical to SEQ ID NO: 50715
  source 1..110: mol_type = other DNA

SEQ ID NO: 50717 - DNA, 110 bp, synthetic construct
  source 1..110: mol_type = other DNA
tttccaggtttcacaaacaaggtgggttttctgttgtcgttgttgttgttgccgtcaggtttttcccctaccgtcagaagcttctgaccggttgggttgccaaatgccag

SEQ ID NO: 50718 - DNA, 110 bp, synthetic construct
  source 1..110: mol_type = other DNA
tacacccaaattctaatacagtgagatgctgcagcaattccattctgcgtacatatgcacaaactggttttacacagattcacgagtagacctgagcagatatgttactg

SEQ ID NO: 50719 - DNA, 110 bp, synthetic construct
  source 1..110: mol_type = other DNA
tgcacaaactggttttacacagattcacgagtagacctgagcagatatgttactgcagctgtatttaaacagtgaggagctgcatgcagcctgggtgtccaccccaagag

SEQ ID NO: 50720 - DNA, 110 bp, synthetic construct
  source 1..110: mol_type = other DNA
cccggagtctagttctgccccccatcctgggtggggtgatacatgtctattaaaccacaaggccgtgagattggatgcctgccttctgctcctacagcttccagcccacc

SEQ ID NO: 50721 - DNA, 110 bp, synthetic construct
  source 1..110: mol_type = other DNA
cacaaggccgtgagattggatgcctgccttctgctcctacagcttccagcccacccaagccagtggtgactcgggcaggccgtggttgacagggtggttgttaaaaccca

SEQ ID NO: 50722 - DNA, 110 bp, synthetic construct
  source 1..110: mol_type = other DNA
cggctgatcctgatggccagggtcacaggtgtttaagtcgttatccagacggacaattaagacagtggacatgggcagatgctccccatgcccacgcatcacacaaatgt

SEQ ID NO: 50723 - DNA, 110 bp, synthetic construct
  source 1..110: mol_type = other DNA
attaagacagtggacatgggcagatgctccccatgcccacgcatcacacaaatgtgaggctctgcctcgtccgtaaaatcaacccttccttttttctcaatcctgaaagc

SEQ ID NO: 50724 - DNA, 110 bp, synthetic construct
  source 1..110: mol_type = other DNA
actaaacccatagagaaggaaaagctataaggttagctctttgcatgcagggagaggttctgtacaggctgctctctggaaatgccccaccctaccccgccgcccctccc

SEQ ID NO: 50725 - DNA, 110 bp, synthetic construct
  source 1..110: mol_type = other DNA
ggttctgtacaggctgctctctggaaatgccccaccctaccccgccgcccctcccaaggacactcagtccaggatggaaggaggtaagttgcagctgctcccaggagcta

SEQ ID NO: 50726 - DNA, 110 bp, synthetic construct
  source 1..110: mol_type = other DNA
tggggagcgaggcttgagaaacaggggagccatcggaaatctttaagggccatgttgttgcgaacagggacgtgaggaccagacagagtggagctttgcggagaaggagg

SEQ ID NO: 50727 - DNA, 110 bp, synthetic construct
  source 1..110: mol_type = other DNA
tgttgcgaacagggacgtgaggaccagacagagtggagctttgcggagaaggaggcaaagctctgggagaagggatgggacaggctgggcagggacagtcagcagtcaag

SEQ ID NO: 50728 - DNA, 110 bp, synthetic construct
  source 1..110: mol_type = other DNA
ctaagttattttattccaggtaccacctgccagcccagcaacacatgctctcaaataatgtggcttctatgtgacaagaacagatactggaattgtaatcaagctagggc

SEQ ID NO: 50729 - DNA, 110 bp, synthetic construct
  source 1..110: mol_type = other DNA
taatgtggcttctatgtgacaagaacagatactggaattgtaatcaagctagggccctgtggggctcctgggcacacaagtctttctggggcctccatttcttgttttca

SEQ ID NO: 50730 - DNA, 110 bp, synthetic construct
  source 1..110: mol_type = other DNA
ggacgggcactcgagtccatcagcctcttcccacgtgtatgtctcccagcagacgcagtaacacccctgagtcacaacttccgccagggcaggaccatgggtttgtgacc

SEQ ID NO: 50731 - DNA, 110 bp, synthetic construct
  source 1..110: mol_type = other DNA
tacaggaagtaaagcaggatggcagtggctccttgcagatgcaacgcctctcacacacattaggatacttcaactgcaagtaacaaaacgcagctcacgccggctataag

SEQ ID NO: 50732 - DNA, 110 bp, synthetic construct
  source 1..110: mol_type = other DNA
cacattaggatacttcaactgcaagtaacaaaacgcagctcacgccggctataagaacaagacattgttatctcaggtgataagaaggccagcaagctcccaggggatta

SEQ ID NO: 50733 - DNA, 110 bp, synthetic construct
  source 1..110: mol_type = other DNA
tgcttttcaaggtttcaccttgacctcgaccttgccgtcagtctcaccccctagatctgtccagctgccccctgtggtcccccctctgtccttgcagcctttcctgaggc

SEQ ID NO: 50734 - DNA, 110 bp, synthetic construct
  source 1..110: mol_type = other DNA
tctgtccagctgccccctgtggtcccccctctgtccttgcagcctttcctgaggcactgcaatccagttttgcaggtggagatgctgggacctgtcttccactcctgaag

SEQ ID NO: 50735 - DNA, 110 bp, synthetic construct
  source 1..110: mol_type = other DNA
aggctctgtctgggctcatgaaaaaggtctagagctggatggaggggcggccgcacaacagcgtgcatgcacttaacgtgacagacccgcacccttacaaatggctacaa

SEQ ID NO: 50736 - DNA, 110 bp, synthetic construct
  source 1..110: mol_type = other DNA
caacagcgtgcatgcacttaacgtgacagacccgcacccttacaaatggctacaaaggtacattttatgtgtgttttacaattttttaaaacattaggagttcctggagt

SEQ ID NO: 50737 - DNA, 110 bp, synthetic construct
  source 1..110: mol_type = other DNA
tgtgtctgtcttcagggaccagacaagctggagaggcctggaggagttgtcatgtccgggcaaggacagccagtcactccagatggcaaagggactttcttaagggagcc

SEQ ID NO: 50738 - DNA, 110 bp, synthetic construct
  source 1..110: mol_type = other DNA
ccgggcaaggacagccagtcactccagatggcaaagggactttcttaagggagccagtgggcgttgcacggcgagggaggatttcacttgagccccacagcccttctaaa

SEQ ID NO: 50739 - DNA, 110 bp, synthetic construct
  source 1..110: mol_type = other DNA
cgtccccccccccccccccgcccgctttccccttcttctcgtctcccggactccgggcccgttactttggacacggccacactgcacacagaggctgatttttcactcca

SEQ ID NO: 50740 - DNA, 110 bp, synthetic construct
  source 1..110: mol_type = other DNA
ggcccgttactttggacacggccacactgcacacagaggctgatttttcactccaacaaatgctgcctggccgcgtcccaaagagaacaagcggccaccccgtgacttaa

SEQ ID NO: 50741 - DNA, 110 bp, synthetic construct
  source 1..110: mol_type = other DNA
tgagatgtcagttcttctcaacttgatccatggattcaatgcaaccccagtcaaaatctcagcaagttattttgcagatattataaactgattccgaagtttatatggag

SEQ ID NO: 50742 - DNA, 110 bp, synthetic construct
  source 1..110: mol_type = other DNA
atctcagcaagttattttgcagatattataaactgattccgaagtttatatggaggccaaagacccagaatagtccacgtggtagcgcaggagaagaactgggaggactg

SEQ ID NO: 50743 - DNA, 110 bp, synthetic construct
  source 1..110: mol_type = other DNA
acgccccacagcacctagcaaagtgcctggttgtgaataaatgattgaatgaatgtttgcagtcaacaagcatgcatgacttgccgttagggcaggcatgctgctggacc

SEQ ID NO: 50744 - DNA, 110 bp, synthetic construct
  source 1..110: mol_type = other DNA
tttgcagtcaacaagcatgcatgacttgccgttagggcaggcatgctgctggaccctgaggataggaaggggaagttatgatctattaatgccttcatctccatttccca

SEQ ID NO: 50745 - DNA, 110 bp, synthetic construct
  source 1..110: mol_type = other DNA
gccagggatcaaacccgcggcctcatgtatcctagtcagattcgtttcccctgagctgcaacgggaaccccctgaaagccatattgtattgcaggtacgcagcacttctt

SEQ ID NO: 50746 - DNA, 110 bp, synthetic construct; identical to SEQ ID NO: 50745
  source 1..110: mol_type = other DNA

SEQ ID NO: 50747 - DNA, 110 bp, synthetic construct
  source 1..110: mol_type = other DNA
tgcgtcagtacttcatttcttttttggctgaataatatcctgatatctctgcagattgcattttgtttgtgcgttcatcagttgatggacatctgggttgtttccacatg

SEQ ID NO: 50748 - DNA, 110 bp, synthetic construct
  source 1..110: mol_type = other DNA
ttgcattttgtttgtgcgttcatcagttgatggacatctgggttgtttccacatgggctcttttgaataatgtggctgtaaatatgggtataaaagcatctgttgaaatc

SEQ ID NO: 50749 - DNA, 110 bp, synthetic construct
  source 1..110: mol_type = other DNA
ccccaggtcctgctgtcctgggccaggtgagaatccttcagagctaatattagaatggccaggttcacggatcatgacacgatggacagatgtctagggatgggaggagg

SEQ ID NO: 50750 - DNA, 110 bp, synthetic construct
  source 1..110: mol_type = other DNA
gtatatatataaagaccatatatagagagagagtttaccatgtgaatgatttttaagtgtacagctcagtggcattaagtaatgtcacggaattgtgctattagcatctc

SEQ ID NO: 50751 - DNA, 110 bp, synthetic construct
  source 1..110: mol_type = other DNA
agtgtacagctcagtggcattaagtaatgtcacggaattgtgctattagcatctccatgtatcttcagaacttcttcatcttccccaaaagaaactgtacagaattccgc

SEQ ID NO: 50752 - DNA, 110 bp, synthetic construct
  source 1..110: mol_type = other DNA
atggcttcgcccctccgtggctccgtggcactgaggctcaaacagctgaactccgctcccaccaattcctggttccttctcgaagcctcggccccggccgctcggcttgc

SEQ ID NO: 50753 - DNA, 110 bp, synthetic construct
  source 1..110: mol_type = other DNA
ctcccaccaattcctggttccttctcgaagcctcggccccggccgctcggcttgcccggctgctctgctgcttgcccagagccgaggctgctggatgtgagttcccacga

SEQ ID NO: 50754 - DNA, 110 bp, synthetic construct
  source 1..110: mol_type = other DNA
ctccaaggtcagaagagtggttatgttatctagggcccttatggagtcctgtgtctgtttggcactgttctttaaaaaattgacgctcagttttctagcttcaagtcaga

SEQ ID NO: 50755 - DNA, 110 bp, synthetic construct
  source 1..110: mol_type = other DNA
ggcacacacacatccctccatgttccgctgccagcagagagccagcaggccgcaacttgctcacagcccattggtcagaacatatcacatgatctgccacatgcagaggc

SEQ ID NO: 50756 - DNA, 110 bp, synthetic construct
  source 1..110: mol_type = other DNA
cttgctcacagcccattggtcagaacatatcacatgatctgccacatgcagaggcgcaggggtgctaggtggcgtgaaagaacacgtgggtattctctgagccataaact

SEQ ID NO: 50757 - DNA, 110 bp, synthetic construct
  source 1..110: mol_type = other DNA
cgttgttccttaataaaaggtgttggcgatccagacccgtgtaaacactgaggcctttcgcccgaagtcccctgtgtttccaatcagtgaagtgtgagcacagagcaaaa

SEQ ID NO: 50758 - DNA, 110 bp, synthetic construct
  source 1..110: mol_type = other DNA
tttcgcccgaagtcccctgtgtttccaatcagtgaagtgtgagcacagagcaaaaccaagactcgagccgccccaagggtgagggtcgggtttgcttgcgcctctgcagg

SEQ ID NO: 50759 - DNA, 110 bp, synthetic construct
  source 1..110: mol_type = other DNA
tgtgtgtgtgtgtgaatcaggcaggactcacagtcacctgtctccacccccgctctgcacaccctcgtgtcttctcggaggcttccctgcgacacccccatttgggtgct

SEQ ID NO: 50760 - DNA, 110 bp, synthetic construct
  source 1..110: mol_type = other DNA
tgcacaccctcgtgtcttctcggaggcttccctgcgacacccccatttgggtgctagcttggttcttatcgatagtggaatatagttgtcctccccccccttcctccttt

SEQ ID NO: 50761 - DNA, 110 bp, synthetic construct
  source 1..110: mol_type = other DNA
gtagaaagggcttcagagtctttccagctcattgttagatgaggttcggtcacttaccgaagataaacaactgaaagggcctcgcctttagacagactttggcagtgggg

SEQ ID NO: 50762 - DNA, 110 bp, synthetic construct
  source 1..110: mol_type = other DNA
tctcgccttccaatctccgcttactcctctgggttcttttctcgcctccgcactcacacatctccgtcctgccaaaaccgaatgtcctcctctgagcctctctctgcatc

SEQ ID NO: 50763 - DNA, 110 bp, synthetic construct
  source 1..110: mol_type = other DNA
acacatctccgtcctgccaaaaccgaatgtcctcctctgagcctctctctgcatccatttctctcacgcctgtttctctttaacgcctgtcttccttccgcctcactgcc

SEQ ID NO: 50764 - DNA, 110 bp, synthetic construct
  source 1..110: mol_type = other DNA
tctccagctttactgagatttaactgacataaccttgtgtaagtttaaacaacgtgttgatgtgatacacagacacactacacaacaatcgccactaacccacccagcat

SEQ ID NO: 50765 - DNA, 110 bp, synthetic construct
  source 1..110: mol_type = other DNA
tttttatttctccattgacccaacagttattcagtagcctgttgtgcagtttctacatatctgagatttttccagctttcttcacaccactgtgatctgaaaaatatggt

SEQ ID NO: 50766 - DNA, 110 bp, synthetic construct
  source 1..110: mol_type = other DNA
catatctgagatttttccagctttcttcacaccactgtgatctgaaaaatatggttgatatttcaattttcttacacttattgagacttgttttttgtcccaaaatatgg

SEQ ID NO: 50767 - DNA, 110 bp, synthetic construct
  source 1..110: mol_type = other DNA
gtccaacagtgcaaatcagttgcccctgccttccctgtgccacgtgtgttccctggggcgctggggtctgaaaacctgcagatgactttggcagccttctactcaccgcc

SEQ ID NO: 50768 - DNA, 110 bp, synthetic construct
  source 1..110: mol_type = other DNA
gggcgctggggtctgaaaacctgcagatgactttggcagccttctactcaccgcccacgagctattcggttaccaaatcctctccaactctcctccacaaatggtttctt

SEQ ID NO: 50769 - DNA, 110 bp, synthetic construct
  source 1..110: mol_type = other DNA
agccagtcagtcgaaggacagcttaacagcttatatttcagggcccagcgtggtgacatttctgaaagtcctcttcgttttcaagagcctgacagattgcccagttttct

SEQ ID NO: 50770 - DNA, 110 bp, synthetic construct
  source 1..110: mol_type = other DNA
acatttctgaaagtcctcttcgttttcaagagcctgacagattgcccagttttctgctgttgatacgcacgtcggtaaagtccacgagcgttccggacttactttggcgc

SEQ ID NO: 50771 - DNA, 110 bp, synthetic construct
  source 1..110: mol_type = other DNA
ttgtccccatcctataagcagtattcaaacagctgtcttcctcccagaggcccccctggtgccagctcccctcaggccctccctctgtatgatccttatcacaggggttg

SEQ ID NO: 50772 - DNA, 110 bp, synthetic construct
  source 1..110: mol_type = other DNA
ctggtgccagctcccctcaggccctccctctgtatgatccttatcacaggggttggtcctactgcctcccaggacccgtgaatcacctccttggctgcagagattctgcc

SEQ ID NO: 50773 - DNA, 110 bp, synthetic construct
  source 1..110: mol_type = other DNA
tttttttttttttttttttttaaaggcgtgcatcaaatcaggctaactttcttgtcaagggcacagatgtatagcagagaaagcttctctccgctcctgttgcgtttgca

SEQ ID NO: 50774 - DNA, 110 bp, synthetic construct; identical to SEQ ID NO: 50773
  source 1..110: mol_type = other DNA

SEQ ID NO: 50775 - DNA, 110 bp, synthetic construct
  source 1..110: mol_type = other DNA
gaagatctgaaggtaacatacttgccttacttccttgaaggattaaaaaaggaaatagaactttattattgctgcctgctgagagcatatgaataaggacctactcacta

SEQ ID NO: 50776 - DNA, 110 bp, synthetic construct
  source 1..110: mol_type = other DNA
tagaactttattattgctgcctgctgagagcatatgaataaggacctactcactagtaaaactgtgtctcctctagacagtataatatagcttgttcataagtcagtgaa

SEQ ID NO: 50777 - DNA, 110 bp, synthetic construct
  source 1..110: mol_type = other DNA
tgcttcagcaaacctagccgtggccggaatccagcaggcaaggctgatctggccttttatcttcttagcgcgccctaactaaagtcatgcactggatgtagtgtacgcaa

SEQ ID NO: 50778 - DNA, 110 bp, synthetic construct
  source 1..110: mol_type = other DNA
gtggtgagggacccgcacgctagtttaccgctttaaaaacgttcgcaatctatacgtgggttttatggttgcgccaacatccaggggaggttggttgagaacataggcct

SEQ ID NO: 50779 - DNA, 110 bp, synthetic construct
  source 1..110: mol_type = other DNA
gtgggttttatggttgcgccaacatccaggggaggttggttgagaacataggcctaggccccattgtagagatgagaacactgaggcctggggaggtcgtatttgcttag

SEQ ID NO: 50780 - DNA, 110 bp, synthetic construct
  source 1..110: mol_type = other DNA
ggcatctgcgaggaccagcctgggcatctgcaggggtggctgcgtgggcaaattgcttaagctgccaaagcgtccgttctacaacttgttcatgaagataacaaacacta

SEQ ID NO: 50781 - DNA, 110 bp, synthetic construct
  source 1..110: mol_type = other DNA
cttaagctgccaaagcgtccgttctacaacttgttcatgaagataacaaacactacccatagatttgttgtgcggatgaacatgaaatttcctagcaaacacaaagtgct

SEQ ID NO: 50782 - DNA, 110 bp, synthetic construct
  source 1..110: mol_type = other DNA
tttttcagtttcctctcctaataataggctattatctgtctcacagctgggagggtacgtctatagcagcccatttctcatgtaatatttcgaagcatctgcggctagga

SEQ ID NO: 50783 - DNA, 110 bp, synthetic construct
  source 1..110: mol_type = other DNA
tacgtctatagcagcccatttctcatgtaatatttcgaagcatctgcggctaggaaatttaatttccaagtttgttgaaattgaatgtaaattaagaatacatcggctca

SEQ ID NO: 50784 - DNA, 110 bp, synthetic construct
  source 1..110: mol_type = other DNA
ctattaaatctgtctctaacaaggtaaaaagaggccgggccttttctaaatagcgctggctccccgcgacgtggtgaaagagtagtcagttcgtcttaaggcagaataaa

SEQ ID NO: 50785 - DNA, 110 bp, synthetic construct
  source 1..110: mol_type = other DNA
gttggccattggcagagggccattgaataccaaacacagagactgtacagagttgactcaaaacatttctgaggaaggatgcgagagctgtcatgtggcggataactcag

SEQ ID NO: 50786 - DNA, 110 bp, synthetic construct
  source 1..110: mol_type = other DNA
actcaaaacatttctgaggaaggatgcgagagctgtcatgtggcggataactcagaaaacaggcagacaggagaggtggagggaacagccacgcaggaggtaagaccttg

SEQ ID NO: 50787 - DNA, 110 bp, synthetic construct
  source 1..110: mol_type = other DNA
cttctttaggctttttaccagtttgatacataacctcttctccaagacaggctgatatgtatgaagtcggtgacatggagccagagagaaagctccatcgtgtcccttgg

SEQ ID NO: 50788 - DNA, 110 bp, synthetic construct
  source 1..110: mol_type = other DNA
tatgtatgaagtcggtgacatggagccagagagaaagctccatcgtgtcccttggaaagctgatggctatgactttgatgccaatctccacaccgggcatttttcttcaa

SEQ ID NO: 50789 - DNA, 110 bp, synthetic construct
  source 1..110: mol_type = other DNA
cctttgtgtgtggcaatatttcatataggatactacatttatagaaatccttttaaaattaattcctaagggccactcttcacctcttagaaaagactgatgtttagaga

SEQ ID NO: 50790 - DNA, 110 bp, synthetic construct
  source 1..110: mol_type = other DNA
aaattaattcctaagggccactcttcacctcttagaaaagactgatgtttagagatgaagctgtcatattactacatcacagggaatcttgcatgaagcctatcagggca

SEQ ID NO: 50791 - DNA, 110 bp, synthetic construct
  source 1..110: mol_type = other DNA
acgggcacacgccctgccttgccgatcctgccagataggtcgggcttgtcctctgcctgcaagggcccagcgctggcctgacgttcagattgttttctcatcatcccagg

SEQ ID NO: 50792 - DNA, 110 bp, synthetic construct
  source 1..110: mol_type = other DNA
tcctggaatcaatagaggatgaacctgtgaaaaaaaattggaaatccctacatcatttaaccaggtcaggcaccctagtcaagcgtgaaaaatctctagaactgcctctt

SEQ ID NO: 50793 - DNA, 110 bp, synthetic construct
  source 1..110: mol_type = other DNA
tttaaccaggtcaggcaccctagtcaagcgtgaaaaatctctagaactgcctctttgaatgcccacactgatgctgctggtttttctgtcctgccagagaggtgctcagg

SEQ ID NO: 50794 - DNA, 110 bp, synthetic construct
  source 1..110: mol_type = other DNA
actttcagtgttgtgttagcttcaggagtacagcaaagggaatcatttatccatacacatacttctctttcaggttcttttctcacatgagtcgctacagagtattgggt

SEQ ID NO: 50795 - DNA, 110 bp, synthetic construct
  source 1..110: mol_type = other DNA
cacatacttctctttcaggttcttttctcacatgagtcgctacagagtattgggtaaatttccctgtgctatagggtgggtccttgtcactcatccattccaggttttgt

SEQ ID NO: 50796 - DNA, 110 bp, synthetic construct
  source 1..110: mol_type = other DNA
aatcgggcgacttccgcgggctctgttgttggtgggccttgtgcgtctctgccgttctttcccttaagctacacatgcctctagccactctccaggagtcgcagcttaat

SEQ ID NO: 50797 - DNA, 110 bp, synthetic construct
  source 1..110: mol_type = other DNA
tgagaaattaggtcgtccaggcagggcttatccggttaacactgaagttgcgtggttcttttaggatcaggaagatgggtgcgagaaggccttgtctttcccactttttt

SEQ ID NO: 50798 - DNA, 110 bp, synthetic construct
  source 1..110: mol_type = other DNA
ttcttttaggatcaggaagatgggtgcgagaaggccttgtctttcccacttttttgagcctctcagaggcgttttctgttgtggtttttttttttttttttttttttttt

SEQ ID NO: 50799 - DNA, 110 bp, synthetic construct
  source 1..110: mol_type = other DNA
ttcctggtcggattgttaaccactgagacacgacaggaactctgaggccacactgttttacaaaagaaccacagtgaagtgtgttcctgggcctgcctcacaaataaaga

SEQ ID NO: 50800 - DNA, 110 bp, synthetic construct; identical to SEQ ID NO: 50799
  source 1..110: mol_type = other DNA

SEQ ID NO: 50801 - DNA, 110 bp, synthetic construct
  source 1..110: mol_type = other DNA
tcgaacctgtgtcccagcacacccaagacaccgcccatcctgttgcaccattgcaggaactccatcgctgcacagttcagggtcttcgtggccctttcacagctgggcag

SEQ ID NO: 50802 - DNA, 110 bp, synthetic construct
  source 1..110: mol_type = other DNA
ccttaagagaaaccagttgtgatcctatgcggcaagattgctcctgatcttattctgcctattgatccttgatggcccattatcatgtcattagcatattatgtcccagt

SEQ ID NO: 50803 - DNA, 110 bp, synthetic construct
  source 1..110: mol_type = other DNA
tgcctattgatccttgatggcccattatcatgtcattagcatattatgtcccagtaatttgtccataagtcagtgtccacagctagactctgagttcctggatgccagac

SEQ ID NO: 50804 - DNA, 110 bp, synthetic construct
  source 1..110: mol_type = other DNA
acacattaagtgcaactgcgagggtgctcttttagactgagtggtcagggaaggcctctcggaggaggggacctttgaacagagagctaaggaaagcgagggaggatgtc

SEQ ID NO: 50805 - DNA, 110 bp, synthetic construct
  source 1..110: mol_type = other DNA
ctctcggaggaggggacctttgaacagagagctaaggaaagcgagggaggatgtcttggtggatctgagggaagagcatgacaggcagaggctccgcggtgcagtgagct

SEQ ID NO: 50806 - DNA, 110 bp, synthetic construct
  source 1..110: mol_type = other DNA
atacctattaccacggctactaccaaagacacagaaaatagcaagtactggtgagtgtggagaaacactgctggtgaaaacacggtaagaggcaaccagtggtgaaaaca

SEQ ID NO: 50807 - DNA, 110 bp, synthetic construct
  source 1..110: mol_type = other DNA
tgtggagaaacactgctggtgaaaacacggtaagaggcaaccagtggtgaaaacagtgtgatggctcctcacaaaagtaaaaacagaattaccgtgtgatctacttgcgg

SEQ ID NO: 50808 - DNA, 110 bp, synthetic construct
  source 1..110: mol_type = other DNA
ttgactccacttgtttctctgcatagagcatcaacagcagcctttctaaatgctggttttccgtttagaataatctagtaccgagtccaaaattcacggggtggtaggaa

SEQ ID NO: 50809 - DNA, 110 bp, synthetic construct
  source 1..110: mol_type = other DNA
gttttccgtttagaataatctagtaccgagtccaaaattcacggggtggtaggaatttcccattgcttttcagctactgcatattccaataaacccaacgacaacaaaag

SEQ ID NO: 50810 - DNA, 110 bp, synthetic construct
  source 1..110: mol_type = other DNA
tcctggcactgtgtccttggcacgcggttcgctcgcagcagttgcgtaattccaaacgaaaggtaccattacagtgaacgctccgactgaatgcacacgcggggcctcca

SEQ ID NO: 50811 - DNA, 110 bp, synthetic construct
  source 1..110: mol_type = other DNA
gtgctcagtgcgctatattgtccatcagagctcttctgctcaagctgtgcctgtatgtcacttacatggtagcttgtagacccggcctctcaccccccaaaaaagcaagt

SEQ ID NO: 50812 - DNA, 110 bp, synthetic construct
  source 1..110: mol_type = other DNA
tgtcacttacatggtagcttgtagacccggcctctcaccccccaaaaaagcaagtacttctatcaagtcaagagaatcattgtccttcggggcatttcagatattgaggc

SEQ ID NO: 50813 - DNA, 110 bp, synthetic construct
  source 1..110: mol_type = other DNA
agggttcaaacctgaatcctcacggatactagttgggtttgttaccgctgagccatgcaacgggaactccccattctaacagtgtttaagaaaggtttaactcagacttt

SEQ ID NO: 50814 - DNA, 110 bp, synthetic construct
  source 1..110: mol_type = other DNA
tgcaacgggaactccccattctaacagtgtttaagaaaggtttaactcagactttttaggatcagttctcagtctttcagatgccactctgctctcctccgggatggtgc

SEQ ID NO: 50815 - DNA, 110 bp, synthetic construct
  source 1..110: mol_type = other DNA
atgaagaaagaatatatccatgatatttagtttgcataattaggacatgttcatagattgaatgtctttagttagctgtagagtttttttttctcccaaggatcaggttg

SEQ ID NO: 50816 - DNA, 110 bp, synthetic construct
  source 1..110: mol_type = other DNA
acacttccttgattctctgctcctttccttatctaaaaagagtggcgatgatgaccaggaaaactccggaccaagattaaagttcccatgttcctagggactccgcaaag

SEQ ID NO: 50817 - DNA, 110 bp, synthetic construct
  source 1..110: mol_type = other DNA
caggaaaactccggaccaagattaaagttcccatgttcctagggactccgcaaagatgccctcgtctgctaggaaagaccagtcttgtatgctgtctagcaaggtggttg

SEQ ID NO: 50818 - DNA, 110 bp, synthetic construct
  source 1..110: mol_type = other DNA
ttactcagattacaattcaaaagccttcatgtggcttcaagaaaaatttgatctggataaaccacacccacagctgctcttctgagcccatctaaccctctctaagcagg

SEQ ID NO: 50819 - DNA, 110 bp, synthetic construct
  source 1..110: mol_type = other DNA
gataaaccacacccacagctgctcttctgagcccatctaaccctctctaagcaggacaagcaccactctggacttactgtgccctctgcacagaacactgccccccatcg

SEQ ID NO: 50820 - DNA, 110 bp, synthetic construct
  source 1..110: mol_type = other DNA
gggttcacttttttagataactctaatcattagaaaggccttccttttattgaccttaacctctattttcccatcatttctacccattcactctaattctactccatcag

SEQ ID NO: 50821 - DNA, 110 bp, synthetic construct
  source 1..110: mol_type = other DNA
attttatataagggacttgaacatgtgaggattttggaatttgagaagtgtcctgggaccagttctgcatggatacctagggtcaactgtaatatgaaaatgcctgaaac

SEQ ID NO: 50822 - DNA, 110 bp, synthetic construct
  source 1..110: mol_type = other DNA
ggaccagttctgcatggatacctagggtcaactgtaatatgaaaatgcctgaaacaaacaaacaaacaaaaaggcacctggaattaacattaatctctttattatgtaat

SEQ ID NO: 50823 - DNA, 110 bp, synthetic construct
  source 1..110: mol_type = other DNA
tgagggtactctttcgtaaaacttccctctcttattctcccgttcagcctgtcctcagcgtgcggaagagtttagtgcaggagctaacccctttattgccctgtttcccc

SEQ ID NO: 50824 - DNA, 110 bp, synthetic construct
  source 1..110: mol_type = other DNA
cagcgtgcggaagagtttagtgcaggagctaacccctttattgccctgtttcccctccccatagggagaccactttcaaaaatagttaataaatagccataaaagaatag

SEQ ID NO: 50825 - DNA, 110 bp, synthetic construct
  source 1..110: mol_type = other DNA
taaaaaatatctcatcaatatcatactttgaatctctcttttctaaacagttggtcacagtaccttactctgttgtgaagagtaatcaatgcactatggctttttctatt

SEQ ID NO: 50826 - DNA, 110 bp, synthetic construct
  source 1..110: mol_type = other DNA
ttcgaaggaaaacaaaacttacatggtaggaaagttcttaagaatgggaacttctttttctttcttttctttttctagggccatgcccatggcatatggaagctcccagg

SEQ ID NO: 50827 - DNA, 110 bp, synthetic construct
  source 1..110: mol_type = other DNA
aacttacatggtaggaaagttcttaagaatgggaacttctttttctttcttttctttttctagggccatgcccatggcatatggaagctcccaggctaggggttgaagtg

SEQ ID NO: 50828 - DNA, 110 bp, synthetic construct
  source 1..110: mol_type = other DNA
gtttcttccttgaatatgaaaacaattctagaaatttaggatgtgatatttcatccttgtctagagattatacgtgtggaacaaattcacctttccttttgtactttctt

SEQ ID NO: 50829 - DNA, 110 bp, synthetic construct
  source 1..110: mol_type = other DNA
aataatattccacaatggggtattctttataattatcccatctgagtagcaccatccaaagttcttaaatcatcaacaatgctgttttcactgtagaggataagagttat

SEQ ID NO: 50830 - DNA, 110 bp, synthetic construct
  source 1..110: mol_type = other DNA
ccaaagttcttaaatcatcaacaatgctgttttcactgtagaggataagagttatgatcctgtgagtccttaaattttcttccttgacaaaagtgatctacctctctagc

SEQ ID NO: 50831 - DNA, 110 bp, synthetic construct
  source 1..110: mol_type = other DNA
actgagtttttggcccccaggacctcaggtctttgcccgtatgttttctggccctccatatacccagctgctgggaatcaggtgaacaagatcaagggaagtcgaaactg

SEQ ID NO: 50832 - DNA, 110 bp, synthetic construct
  source 1..110: mol_type = other DNA
taagtgcatagagaaatacatcagcaagagtgaagaattataagaaaggatgccaattgcttcagtctttagcccaggattatgctcatataaagttgagctcctacatt

SEQ ID NO: 50833 - DNA, 110 bp, synthetic construct
  source 1..110: mol_type = other DNA
attgcttcagtctttagcccaggattatgctcatataaagttgagctcctacattcttgtaaaaaggcatccggatgggatgtctctggtctcagtcagcggagtctact

SEQ ID NO: 50834 - DNA, 110 bp, synthetic construct
  source 1..110: mol_type = other DNA
gccatttatcctatagactaggtttattctttgaatgacagattgagctatacgagatccaaggtttatgagtctcttaggaggctggtatagactagttggattgtttt

SEQ ID NO: 50835 - DNA, 110 bp, synthetic construct
  source 1..110: mol_type = other DNA
ttgcattagctggaagaatctgtgtaagaataggcttatttctttcttgtatatttggaagaactcactggtaaagacttctcagtctgggtatttccatttgggtagta

SEQ ID NO: 50836 - DNA, 110 bp, synthetic construct
  source 1..110: mol_type = other DNA
tggaagaactcactggtaaagacttctcagtctgggtatttccatttgggtagtattttaatagcaaactctatttatagatataggactaatcagattagccattactt

SEQ ID NO: 50837 - DNA, 110 bp, synthetic construct
  source 1..110: mol_type = other DNA
agcctccaatttttgagctattctgagattctttggtgaaacttaacttgtttccggttggccctgaaatggagtgggctattcataatgacttgcagagaaaattttgt

SEQ ID NO: 50838 - DNA, 110 bp, synthetic construct
  source 1..110: mol_type = other DNA
ggttggccctgaaatggagtgggctattcataatgacttgcagagaaaattttgtaattccattgatattgaagacttccacatttccttaccctcacggctgcagttgg

SEQ ID NO: 50839 - DNA, 110 bp, synthetic construct
  source 1..110: mol_type = other DNA
aatttccaatactgcctacctcagaagaaaggtaaatggaactccccgggggcactgtggcaggtgggctatggcagaagagatatctgatgcctcttaaatgttgccac

SEQ ID NO: 50840 - DNA, 110 bp, synthetic construct
  source 1..110: mol_type = other DNA
tgtggcaggtgggctatggcagaagagatatctgatgcctcttaaatgttgccacatttattatgctcacgtagagtcttgcatttatggaggagaaattgtttcatact

SEQ ID NO: 50841 - DNA, 110 bp, synthetic construct
  source 1..110: mol_type = other DNA
ggatcgaacccgaaactgcatagttcctagtcggattagtttctgctgtaccacattgcaaactcctggcctgagatgggttacatactgtgggcgtggccaaaaaaacc

SEQ ID NO: 50842 - DNA, 110 bp, synthetic construct
  source 1..110: mol_type = other DNA
cgctcattggcccagggagcggggtgggcagggctaagcccactccactgttgccattgctttccctgcatattaaacacaaatctccctcctatctgctcattctgttt

SEQ ID NO: 50843 - DNA, 110 bp, synthetic construct
  source 1..110: mol_type = other DNA
attgctttccctgcatattaaacacaaatctccctcctatctgctcattctgtttcttccaccttaaagatttactaccatctgtttaaaaataaatactcgcctaacta

SEQ ID NO: 50844 - DNA, 110 bp, synthetic construct
  source 1..110: mol_type = other DNA
tatagaattaccgtctcctcatcagggtactgggacttcacatccgggtgtggcagatgctgtgctattcacatgtccccttcggtactggacgtcctttcttcaagaaa

SEQ ID NO: 50845 - DNA, 110 bp, synthetic construct
  source 1..110: mol_type = other DNA
gatgctgtgctattcacatgtccccttcggtactggacgtcctttcttcaagaaactgagggtgttggcttctgctgtctcacagccaaatccctctcttggaattattc

SEQ ID NO: 50846 - DNA, 110 bp, synthetic construct
  source 1..110: mol_type = other DNA
gctgtggttacagaaggtgaaggaggccctgctgctcattttcaggcatgaggacacaggttaagaaaaaaagggtcagtgtatgatttcagcgcccgtgatcacatata

SEQ ID NO: 50847 - DNA, 110 bp, synthetic construct
  source 1..110: mol_type = other DNA
gcaacaagattgaagacttcactggtatgtgccatcaaggatggattaaggagcggaagcttaagggacaacaaaaatacaatatgggtctagtacctgggtgtcaagca

SEQ ID NO: 50848 - DNA, 110 bp, synthetic construct
  source 1..110: mol_type = other DNA
gtccattggcaccagtttcccagcatcatttgcttgctttgtgtgtctgcgtcacatttttgtaattcgtgcaatagtccaagctttttcattattattacatttggtat

SEQ ID NO: 50849 - DNA, 110 bp, synthetic construct
  source 1..110: mol_type = other DNA
taaagtacagtatatctattggttacccctggatgttttcaccaacaacatggcgctgtggacatggaaattattggaggcccctgggctcaagcctctaaagaaattaa

SEQ ID NO: 50850 - DNA, 110 bp, synthetic construct
  source 1..110: mol_type = other DNA
cgggaactctcaacaccagaactatcttttacaaaaatccatggcatatttttccacccaaacttgatcatctgaattttctttgactatcttcattattaatttttcct

SEQ ID NO: 50851 - DNA, 110 bp, synthetic construct; identical to SEQ ID NO: 50850
  source 1..110: mol_type = other DNA

SEQ ID NO: 50852 - DNA, 110 bp, synthetic construct
  source 1..110: mol_type = other DNA
atctgagagaattaaacaccagcagactgagctgacggactcactaagccgacaaggaggaggagaccagcatgcaaagttaaaggtacatgaaaaggtgcgcaggatca

SEQ ID NO: 50853 - DNA, 110 bp, synthetic construct
  source 1..110: mol_type = other DNA
tgaattgttttgtatatgtacacacctgatacatcatggacccatcttgctgaacagtactggctttactatatctatacaccttctttcaacatacgacaagtaatagc

SEQ ID NO: 50854 - DNA, 110 bp, synthetic construct
  source 1..110: mol_type = other DNA
agtactggctttactatatctatacaccttctttcaacatacgacaagtaatagctcttagttcattaacgctcactataggaaggaacgcatccacataagttatgtat

SEQ ID NO: 50855 - DNA, 110 bp, synthetic construct
  source 1..110: mol_type = other DNA
cccactgacctcccagggatgaggcctttttctatcagagtcctcgatttaccatctttacgctctgcaggagaagggccacgtgtgcttttcccaggtttcaacccagc

SEQ ID NO: 50856 - DNA, 110 bp, synthetic construct
  source 1..110: mol_type = other DNA
ctttacgctctgcaggagaagggccacgtgtgcttttcccaggtttcaacccagcgcatacaacaaacagaaacatttatggaagaactgcttttcttcctatacttaaa

SEQ ID NO: 50857 - DNA, 110 bp, synthetic construct
  source 1..110: mol_type = other DNA
aagctgcagtacttttgtttttccttaataggcttttttaaatatgcttatagtttgggaggtttgcatgagctcaggtacacggcatctctcatctggcagttaaagtg

SEQ ID NO: 50858 - DNA, 110 bp, synthetic construct
  source 1..110: mol_type = other DNA
tgggaggtttgcatgagctcaggtacacggcatctctcatctggcagttaaagtgtacattcctacatgattccttatctccggataaatgtaagataatagggactgaa

SEQ ID NO: 50859 - DNA, 110 bp, synthetic construct
  source 1..110: mol_type = other DNA
gttttgagactttacagtacttcacctctgctaaattccagccttcgaagtataccataaatactaaaaggctgagaactactgctctacaagattagcaaatctaatcc

SEQ ID NO: 50860 - DNA, 110 bp, synthetic construct
  source 1..110: mol_type = other DNA
cataaatactaaaaggctgagaactactgctctacaagattagcaaatctaatcccatccaacaagaaagcagtttcctaagaaaaaagattttatgtaactgtcttatt
